United States Patent Application Publication US 2004/0259086 A1 - sequence listing, part 8

SEQ ID NO: 40414 - DNA, 433 bp, Homo sapiens
attggagctccaccgcggtggcggccgaggtacctcaggaggtctgcaagtgtgtggttaggtaaaaactgagctgtgcaaactcactgtatccaagctcttctcatgagagagcagaacaacctggcaagcttaaaggcaagtgttttcgttcttttaattaaataggctgtgacaaaattaacaataaaactagcccagaaccaaccagcccggtaagtgtcgtgcaaatcttgcagtaacaaaagaccatctgagagactacacgttggcctccagtcctagcaagcgtcccattctctccacattcttatcaattgtagcttgacatgttatctccttggcacattccataggaaaccagcctctttctccatctcgtagtcgttccccctcataccagccatcgctgacacgttgatagatgaggacg

SEQ ID NO: 40415 - DNA, 429 bp, Homo sapiens; identical to SEQ ID NO: 31445

SEQ ID NO: 40416 - DNA, 453 bp, Homo sapiens; identical to SEQ ID NO: 31446

SEQ ID NO: 40417 - DNA, 468 bp, Homo sapiens; identical to SEQ ID NO: 33356

SEQ ID NO: 40418 - DNA, 540 bp, Homo sapiens; identical to SEQ ID NO: 31448

SEQ ID NO: 40419 - DNA, 421 bp, Homo sapiens; identical to SEQ ID NO: 31449

SEQ ID NO: 40420 - DNA, 413 bp, Homo sapiens
tccaccgcggtggcggccgaggtactgctgttagtggctgctagtaggttattcagccgacctcttctgattctgctttgctgcctgatttcaaaagagttgccctatactggctttcagtcacagcttgatgtaaccactgcttgtttgcatgcatccccatcattttcatatgggctctttttttttttcttcttcaagttaggaagcaaaaaaatcaggaccatttttatatgataaaaaatttatataaggccagctagaatcaagccaaatgaaattcagctggaagggatggtaaaaaggctcacagaacttgtggctgccaaaaaagtcagtgttctttaaattaaaaagggttcagctagcagcagcaactctgactttgcattcatattgaagcaagctctcca

SEQ ID NO: 40421 - DNA, 460 bp, Homo sapiens; identical to SEQ ID NO: 31451

SEQ ID NO: 40422 - DNA, 455 bp, Homo sapiens; identical to SEQ ID NO: 31452

SEQ ID NO: 40423 - DNA, 512 bp, Homo sapiens
ccgggccccccctcgaaagtcttctagaattaattaacgcgggggagagagaaaaagagtgagaattggcagaaatgcaagagagagccaaaatttcagaaaacaaaagactgagttataccatattccaaactgctttggagaagcatcactgagcagtgcactcacccagccagccatccgccagccatccaaatatatatgcatacataagaacacacagacatacatttgaccatatgcaaccattcctactaaaaacacagtagcataatatgagctatgaggaacataaggacgagtgagaaaccatgtcttgttgcttcaatgaggaagcaaagcttatatatattcttataagggatgcagggatgtatcactgtaatatggggtttgctgccacatgtgctgtgaatagaaggacaggcagtaccgcatgctggatatggacagcagccttagttcagaaacatactccaagcaaatcatagagaatgtcacctcctttaagc

SEQ ID NO: 40424 - DNA, 531 bp, Homo sapiens; identical to SEQ ID NO: 31436

SEQ ID NO: 40425 - DNA, 472 bp, Homo sapiens; identical to SEQ ID NO: 31766

SEQ ID NO: 40426 - DNA, 421 bp, Homo sapiens; identical to SEQ ID NO: 31456

SEQ ID NO: 40427 - DNA, 450 bp, Homo sapiens; identical to SEQ ID NO: 31457

SEQ ID NO: 40428 - DNA, 424 bp, Homo sapiens; identical to SEQ ID NO: 31458

SEQ ID NO: 40429 - DNA, 251 bp, Homo sapiens; identical to SEQ ID NO: 31459

SEQ ID NO: 40430 - DNA, 334 bp, Homo sapiens; identical to SEQ ID NO: 31460
  misc_feature 269, 288: n = A,T,C or G

SEQ ID NO: 40431 - DNA, 438 bp, Homo sapiens; identical to SEQ ID NO: 31461
  misc_feature 84: n = A,T,C or G

SEQ ID NO: 40432 - DNA, 577 bp, Homo sapiens; identical to SEQ ID NO: 33036
  misc_feature 558: n = A,T,C or G

SEQ ID NO: 40433 - DNA, 413 bp, Homo sapiens; identical to SEQ ID NO: 31463

SEQ ID NO: 40434 - DNA, 429 bp, Homo sapiens; identical to SEQ ID NO: 31464

SEQ ID NO: 40435 - DNA, 451 bp, Homo sapiens
actactatagggcgaattgggccctctagatgcatgctcgagcggccgccagtgtgatggatatctgcagaattcgccctttcgagcggccgcccgggcaggtacgatcttggctcactgcaacctctccctcccgggttcaagtgattctcgtgcctcagcctcttgagtagctgggattacaggcgcgtgccactgcgtccggctaatttttgtatttttagtagagatggggtttcaccatgttggccaggctgatctcaaactcctgacctcatgtggtccacccaccttggcctcccaaagtgctgggattacaggcgtgagccaccacgctcagcctacaagcaattttttaaaaactgacacctattactgataaaattctctgtttaaaatcctatttactattttaaagataagtattagttttttttaaatacaataattc

SEQ ID NO: 40436 - DNA, 460 bp, Homo sapiens; identical to SEQ ID NO: 31466

SEQ ID NO: 40437 - DNA, 449 bp, Homo sapiens; identical to SEQ ID NO: 34635

SEQ ID NO: 40438 - DNA, 348 bp, Homo sapiens; identical to SEQ ID NO: 31468

SEQ ID NO: 40439 - DNA, 593 bp, Homo sapiens
  misc_feature 27: n = A,T,C or G
cgggccccccctcggaagtcttctagnattaattaacgcggggctctcgagtccgggccgcaagtcccagacgctgcccatggaggcgtccagcgagccgccgctggatgctaagtccgatgtcaccaaccagcttgtagattttcagtggaaactgggtatggctgtgagctcagacacttgcagatctcttaagtatccttacgttgcagtgatgctaaaagtggcagatcattcaggccaagtaaagaccaagtgctttgaaatgacgattccacagtttcagaatttctacagacagttcaaggaaattgctgcagttattgaaacggtgtgaagacggattctttggttgataaattgctatcattctaaagtcatggacttcactttcggcaacaaaactaaataaggatggaacatttattgaatgaaaaatgcacttttgtttttccatttttttaaataataaaaatcagacaaacaggaactgggtagtggtgatgaatgcaaaactttgtgaatgtgctttataaaagtgataattagacactttagaggatatacttggtgataatgtgaatgatgtaatc

SEQ ID NO: 40440 - DNA, 521 bp, Homo sapiens; identical to SEQ ID NO: 31470

SEQ ID NO: 40441 - DNA, 461 bp, Homo sapiens; identical to SEQ ID NO: 31471

SEQ ID NO: 40442 - DNA, 348 bp, Homo sapiens; identical to SEQ ID NO: 31472
  misc_feature 313: n = A,T,C or G

SEQ ID NO: 40443 - DNA, 407 bp, Homo sapiens; identical to SEQ ID NO: 31473

SEQ ID NO: 40444 - DNA, 443 bp, Homo sapiens; identical to SEQ ID NO: 31474

SEQ ID NO: 40445 - DNA, 439 bp, Homo sapiens; identical to SEQ ID NO: 31475

SEQ ID NO: 40446 - DNA, 353 bp, Homo sapiens; identical to SEQ ID NO: 31476

SEQ ID NO: 40447 - DNA, 380 bp, Homo sapiens; identical to SEQ ID NO: 31477

SEQ ID NO: 40448 - DNA, 414 bp, Homo sapiens; identical to SEQ ID NO: 31478

SEQ ID NO: 40449 - DNA, 435 bp, Homo sapiens; identical to SEQ ID NO: 31479

SEQ ID NO: 40450 - DNA, 415 bp, Homo sapiens; identical to SEQ ID NO: 30931

SEQ ID NO: 40451 - DNA, 385 bp, Homo sapiens; identical to SEQ ID NO: 31481

SEQ ID NO: 40452 - DNA, 166 bp, Homo sapiens; identical to SEQ ID NO: 31482

SEQ ID NO: 40453 - DNA, 434 bp, Homo sapiens; identical to SEQ ID NO: 31483

SEQ ID NO: 40454 - DNA, 399 bp, Homo sapiens; identical to SEQ ID NO: 40072

SEQ ID NO: 40455 - DNA, 367 bp, Homo sapiens; identical to SEQ ID NO: 31485

SEQ ID NO: 40456 - DNA, 478 bp, Homo sapiens; identical to SEQ ID NO: 34920
  misc_feature 325, 400, 446: n = A,T,C or G

SEQ ID NO: 40457 - DNA, 468 bp, Homo sapiens; identical to SEQ ID NO: 31790

SEQ ID NO: 40458 - DNA, 578 bp, Homo sapiens; identical to SEQ ID NO: 30972
  misc_feature 523: n = A,T,C or G

SEQ ID NO: 40459 - DNA, 447 bp, Homo sapiens; identical to SEQ ID NO: 31489

SEQ ID NO: 40460 - DNA, 401 bp, Homo sapiens; identical to SEQ ID NO: 31490

SEQ ID NO: 40461 - DNA, 435 bp, Homo sapiens; identical to SEQ ID NO: 31479

SEQ ID NO: 40462 - DNA, 465 bp, Homo sapiens; identical to SEQ ID NO: 31492

SEQ ID NO: 40463 - DNA, 604 bp, Homo sapiens; identical to SEQ ID NO: 31493
  misc_feature 58, 59: n = A,T,C or G

SEQ ID NO: 40464 - DNA, 422 bp, Homo sapiens; identical to SEQ ID NO: 31494

SEQ ID NO: 40465 - DNA, 443 bp, Homo sapiens; identical to SEQ ID NO: 31495

SEQ ID NO: 40466 - DNA, 451 bp, Homo sapiens; identical to SEQ ID NO: 32210

SEQ ID NO: 40467 - DNA, 443 bp, Homo sapiens; identical to SEQ ID NO: 31474

SEQ ID NO: 40468 - DNA, 434 bp, Homo sapiens; identical to SEQ ID NO: 31498

SEQ ID NO: 40469 - DNA, 382 bp, Homo sapiens; identical to SEQ ID NO: 31499

SEQ ID NO: 40470 - DNA, 430 bp, Homo sapiens; identical to SEQ ID NO: 31500

SEQ ID NO: 40471 - DNA, 433 bp, Homo sapiens; identical to SEQ ID NO: 31501

SEQ ID NO: 40472 - DNA, 572 bp, Homo sapiens; identical to SEQ ID NO: 30945
  misc_feature 121: n = A,T,C or G

SEQ ID NO: 40473 - DNA, 357 bp, Homo sapiens; identical to SEQ ID NO: 31545
  misc_feature 141, 172, 200, 201, 216, 217, 244, 245, 270, 271, 285, 300: n = A,T,C or G

SEQ ID NO: 40474 - DNA, 615 bp, Homo sapiens; identical to SEQ ID NO: 36652

SEQ ID NO: 40475 - DNA, 455 bp, Homo sapiens; identical to SEQ ID NO: 31616

SEQ ID NO: 40476 - DNA, 458 bp, Homo sapiens; identical to SEQ ID NO: 34848

SEQ ID NO: 40477 - DNA, 426 bp, Homo sapiens; identical to SEQ ID NO: 31507

SEQ ID NO: 40478 - DNA, 424 bp, Homo sapiens; identical to SEQ ID NO: 31508

SEQ ID NO: 40479 - DNA, 444 bp, Homo sapiens; identical to SEQ ID NO: 31509

SEQ ID NO: 40480 - DNA, 461 bp, Homo sapiens
  misc_feature 353, 410: n = A,T,C or G
acgactcactatagggcgaattggagctccaccgcggtggcggccggctgggtcccgcactcttgattcccttgcattcaatgccttaccactctacaactgtcttctaacagagctctattccttaatcaccagtgtaatctatccaccttctgcatccctgtcactgagtagctgggtgattctgggaaaaacaaatgctcagagttgtcttcccaaaacccagctgagctcccaacacaccttccaatccctctcagtttcttcagcaatcatcataccctaataccatgaaattcactatgcacaactctttcccctaactgcagcccaagaaaagctgaaaaactcanaatcctgttatagcttcccactaacctcatctatatccacatctttccagacctctntcctgtcaggttcagaggatttttcctctgcttgctctttattctatccct

SEQ ID NO: 40481 - DNA, 436 bp, Homo sapiens; identical to SEQ ID NO: 31511

SEQ ID NO: 40482 - DNA, 456 bp, Homo sapiens; identical to SEQ ID NO: 31512

SEQ ID NO: 40483 - DNA, 401 bp, Homo sapiens; identical to SEQ ID NO: 31490

SEQ ID NO: 40484 - DNA, 414 bp, Homo sapiens; identical to SEQ ID NO: 31514

SEQ ID NO: 40485 - DNA, 415 bp, Homo sapiens; identical to SEQ ID NO: 30931

SEQ ID NO: 40486 - DNA, 412 bp, Homo sapiens; identical to SEQ ID NO: 31516

SEQ ID NO: 40487 - DNA, 431 bp, Homo sapiens; identical to SEQ ID NO: 31517

SEQ ID NO: 40488 - DNA, 447 bp, Homo sapiens; identical to SEQ ID NO: 31518
  misc_feature 381: n = A,T,C or G

SEQ ID NO: 40489 - DNA, 738 bp, Homo sapiens; identical to SEQ ID NO: 31519

SEQ ID NO: 40490 - DNA, 458 bp, Homo sapiens; identical to SEQ ID NO: 31133

SEQ ID NO: 40491 - DNA, 393 bp, Homo sapiens; identical to SEQ ID NO: 31521

SEQ ID NO: 40492 - DNA, 397 bp, Homo sapiens; identical to SEQ ID NO: 31522

SEQ ID NO: 40493 - DNA, 431 bp, Homo sapiens
  misc_feature 416: n = A,T,C or G
tccaccgcggtggcggccgcccgggcaggtacatgccaccatgcctagctaagttttgtatttttagcagagacagggtttcgccatgttggccgggctggcctcgaactcctgaccttaggtgatccaccctcctaggtctctcaaagtgctggaattacggtgtgagccactgcgcccggcccttagtagcatcttttaatggaggtagagttgagatttcagtgactaacaactaaaggtattaacggtaggggtttatatgatacatttgcattttagaaaactgatctaagcttcaatgtgaagaacagattgaaatggaagggggagaagactagaagcagaaacattactcatttaagtaatctggaccatgaaactgaaaaaaagtatagggactccaaaagtcatanagaagtgaaagcaag

SEQ ID NO: 40494 - DNA, 443 bp, Homo sapiens; identical to SEQ ID NO: 31524

SEQ ID NO: 40495 - DNA, 421 bp, Homo sapiens
ggagctccaccgcggtggcggccgcccgggcaggtactctggtaagcttgttgttgtccaagtgaagctccctcagatgaggcgtgttggccagagagccattgtcaacagcagagatgctgttgaaactcaatcccaacttagccaaattattcagtcctttcaggctagctgcatcaactctgctgattttgttgccatcaagatgtaattccgtaagggaaggaggaagaccttgaggaatgctggtgatattggtatcagcaatgcggatgtaggagagcttcttcattccctggaaagccccattttcaattcctgagctctttagcggattggtgcccagttctatgacaatcatctggttcagtccattgaaagtaacttttcgcactttggtgatctcattctcatgggcacg

SEQ ID NO: 40496 - DNA, 413 bp, Homo sapiens; identical to SEQ ID NO: 31526

SEQ ID NO: 40497 - DNA, 391 bp, Homo sapiens; identical to SEQ ID NO: 31527

SEQ ID NO: 40498 - DNA, 451 bp, Homo sapiens; identical to SEQ ID NO: 31072

SEQ ID NO: 40499 - DNA, 445 bp, Homo sapiens; identical to SEQ ID NO: 31529

SEQ ID NO: 40500 - DNA, 450 bp, Homo sapiens; identical to SEQ ID NO: 31530

SEQ ID NO: 40501 - DNA, 420 bp, Homo sapiens; identical to SEQ ID NO: 31531

SEQ ID NO: 40502 - DNA, 467 bp, Homo sapiens; identical to SEQ ID NO: 31532

SEQ ID NO: 40503 - DNA, 251 bp, Homo sapiens; identical to SEQ ID NO: 31533

SEQ ID NO: 40504 - DNA, 460 bp, Homo sapiens; identical to SEQ ID NO: 31534

SEQ ID NO: 40505 - DNA, 429 bp, Homo sapiens; identical to SEQ ID NO: 31535

SEQ ID NO: 40506 - DNA, 377 bp, Homo sapiens; identical to SEQ ID NO: 31536

SEQ ID NO: 40507 - DNA, 428 bp, Homo sapiens; identical to SEQ ID NO: 31537

SEQ ID NO: 40508 - DNA, 561 bp, Homo sapiens; identical to SEQ ID NO: 31806

SEQ ID NO: 40509 - DNA, 427 bp, Homo sapiens; identical to SEQ ID NO: 31539

SEQ ID NO: 40510 - DNA, 380 bp, Homo sapiens; identical to SEQ ID NO: 31540

SEQ ID NO: 40511 - DNA, 457 bp, Homo sapiens; identical to SEQ ID NO: 31541

SEQ ID NO: 40512 - DNA, 345 bp, Homo sapiens; identical to SEQ ID NO: 31542

SEQ ID NO: 40513 - DNA, 462 bp, Homo sapiens
gcgaattggagctccaccgcggtggcggccgcccgggcaggacgcggggaaagtcctcagtaaaatactggcaaactaaatccagcagcacatcaaaaagcttatccaccacaatcaagtcggcttcatccctgggatgcaaagctcattcaacataccaaaatcaataaatgtaatccatcacatgaacagaaccaatgacaaaaaccacatgattatctcaatagatgcagaaaaggccttcgataaaattcagcaccccttcatgctaaaaactctcaataaactaggttttgatggaacatatctcaaagtaataagagctatttatgacaaacccacagccaatatcatactcagtgggcaaaaactgggagcattccctttgaaaaccggcacaagacaaggatgctgtctctcactactttgattcaacatattgttggaagttctggccagggc

SEQ ID NO: 40514 - DNA, 239 bp, Homo sapiens; identical to SEQ ID NO: 31544

SEQ ID NO: 40515 - DNA, 468 bp, Homo sapiens; identical to SEQ ID NO: 31790

SEQ ID NO: 40516 - DNA, 405 bp, Homo sapiens; identical to SEQ ID NO: 31150

SEQ ID NO: 40517 - DNA, 404 bp, Homo sapiens; identical to SEQ ID NO: 31547

SEQ ID NO: 40518 - DNA, 235 bp, Homo sapiens; identical to SEQ ID NO: 31548

SEQ ID NO: 40519 - DNA, 429 bp, Homo sapiens; identical to SEQ ID NO: 31549

SEQ ID NO: 40520 - DNA, 416 bp, Homo sapiens; identical to SEQ ID NO: 31550

SEQ ID NO: 40521 - DNA, 401 bp, Homo sapiens; identical to SEQ ID NO: 31551

SEQ ID NO: 40522 - DNA, 405 bp, Homo sapiens; identical to SEQ ID NO: 31552

SEQ ID NO: 40523 - DNA, 476 bp, Homo sapiens; identical to SEQ ID NO: 31553

SEQ ID NO: 40524 - DNA, 418 bp, Homo sapiens; identical to SEQ ID NO: 31114

SEQ ID NO: 40525 - DNA, 178 bp, Homo sapiens; identical to SEQ ID NO: 31555

SEQ ID NO: 40526 - DNA, 444 bp, Homo sapiens; identical to SEQ ID NO: 30863

SEQ ID NO: 40527 - DNA, 459 bp, Homo sapiens; identical to SEQ ID NO: 31557
  misc_feature 354: n = A,T,C or G

SEQ ID NO: 40528 - DNA, 527 bp, Homo sapiens
  misc_feature 436: n = A,T,C or G
tccaccgcggtggcggccgcccgggcaggtaccaagcctagagagcactaaataaatgtcaattattatttttatccattctggcatttagaaataaaagttacaaaattcactattaaaaataccattgatacataccatattccagccacactggcctcttttctgtgacaaaatgcccttttcttcttttgccctcaacacctgctcctccctatgcttggaattttcccccagctcctccacggccaactcattttgttccttaaatctcaagtccaatacctctcaattcaaatattccccctttagagagccttcattgagactgctatccccaaaagtctaactttcttataatcttgctttaattctgtcatagcttttacaaacatctgtaattgtcttattacactggtatggagagctgatcttntttgcactggtatttgcagctcctagcattgtattacagcaaataatgtctgcttaataataaataaaaatgatgcaatgtcaaatactta

SEQ ID NO: 40529 - DNA, 391 bp, Homo sapiens; identical to SEQ ID NO: 31559

SEQ ID NO: 40530 - DNA, 444 bp, Homo sapiens; identical to SEQ ID NO: 31560

SEQ ID NO: 40531 - DNA, 473 bp, Homo sapiens; identical to SEQ ID NO: 31561

SEQ ID NO: 40532 - DNA, 483 bp, Homo sapiens; identical to SEQ ID NO: 31562

SEQ ID NO: 40533 - DNA, 635 bp, Homo sapiens; identical to SEQ ID NO: 31563

SEQ ID NO: 40534 - DNA, 431 bp, Homo sapiens; identical to SEQ ID NO: 30724

SEQ ID NO: 40535 - DNA, 454 bp, Homo sapiens; identical to SEQ ID NO: 31565

SEQ ID NO: 40536 - DNA, 464 bp, Homo sapiens; identical to SEQ ID NO: 31566

SEQ ID NO: 40537 - DNA, 326 bp, Homo sapiens; identical to SEQ ID NO: 31567

SEQ ID NO: 40538 - DNA, 217 bp, Homo sapiens
gcgaattggagctccaccgcggtggcggccgcccgggcaggtactatatggacaccaacatggagcagaaaatgagggcagcagtgtccaatctcattccaggtgagaagttgcacagtgtccaataggtgcatacatctccttagtaagtagttgtgattaacaatgaaatagaaatgaaaaatatatttttttattaatgggaataatatttttt

SEQ ID NO: 40539 - DNA, 483 bp, Homo sapiens; identical to SEQ ID NO: 31569

SEQ ID NO: 40540 - DNA, 420 bp, Homo sapiens; identical to SEQ ID NO: 31738

SEQ ID NO: 40541 - DNA, 369 bp, Homo sapiens; identical to SEQ ID NO: 31571

SEQ ID NO: 40542 - DNA, 230 bp, Homo sapiens; identical to SEQ ID NO: 31572

SEQ ID NO: 40543 - DNA, 447 bp, Homo sapiens; identical to SEQ ID NO: 31573

SEQ ID NO: 40544 - DNA, 444 bp, Homo sapiens; identical to SEQ ID NO: 31574

SEQ ID NO: 40545 - DNA, 414 bp, Homo sapiens; identical to SEQ ID NO: 31575

SEQ ID NO: 40546 - DNA, 545 bp, Homo sapiens; identical to SEQ ID NO: 31576

SEQ ID NO: 40547 - DNA, 398 bp, Homo sapiens; identical to SEQ ID NO: 31577

SEQ ID NO: 40548 - DNA, 533 bp, Homo sapiens; identical to SEQ ID NO: 31578
  misc_feature 80: n = A,T,C or G

SEQ ID NO: 40549 - DNA, 445 bp, Homo sapiens; identical to SEQ ID NO: 31579

SEQ ID NO: 40550 - DNA, 384 bp, Homo sapiens; identical to SEQ ID NO: 31580

SEQ ID NO: 40551 - DNA, 428 bp, Homo sapiens; identical to SEQ ID NO: 31581

SEQ ID NO: 40552 - DNA, 418 bp, Homo sapiens
ctactatagggcgaattggagctccaccgcggtggcggccgcccgggcaggtacatgggactacaggcacgccccaccatgcccagctcatttttgtatttttagtagagacagggtttcaccatgttggccaggatgatcttgatctcttgacctcatgatccgcccctcttggcctcccaaagtgctgggatcacaggcgtgagccaccacacctggccctctatttattctctttaaagagagggaaaactatgagaggccaaaattatttaattaaatctttaccttagcacaagggaaaaaatggaatttgcctaatataggtgatgaagcatacacaatgaacagaaacaatcacattttagtaaaaggcaaaaatttgagacttataagctatatggtagcttatttttgg

SEQ ID NO: 40553 - DNA, 611 bp, Homo sapiens; identical to SEQ ID NO: 39970
  misc_feature 494: n = A,T,C or G

SEQ ID NO: 40554 - DNA, 460 bp, Homo sapiens; identical to SEQ ID NO: 31534

SEQ ID NO: 40555 - DNA, 444 bp, Homo sapiens; identical to SEQ ID NO: 31585

SEQ ID NO: 40556 - DNA, 430 bp, Homo sapiens; identical to SEQ ID NO: 30884

SEQ ID NO: 40557 - DNA, 440 bp, Homo sapiens; identical to SEQ ID NO: 31588

SEQ ID NO: 40558 - DNA, 357 bp, Homo sapiens; identical to SEQ ID NO: 31545
  misc_feature 141, 172, 200, 201, 216, 217, 244, 245, 270, 271, 285, 300: n = A,T,C or G

SEQ ID NO: 40559 - DNA, 358 bp, Homo sapiens; identical to SEQ ID NO: 31362

SEQ ID NO: 40560 - DNA, 561 bp, Homo sapiens; identical to SEQ ID NO: 31806

SEQ ID NO: 40561 - DNA, 449 bp, Homo sapiens; identical to SEQ ID NO: 31592

SEQ ID NO: 40562 - DNA, 385 bp, Homo sapiens; identical to SEQ ID NO: 31593

SEQ ID NO: 40563 - DNA, 446 bp, Homo sapiens; identical to SEQ ID NO: 31594

SEQ ID NO: 40564 - DNA, 431 bp, Homo sapiens; identical to SEQ ID NO: 31658

SEQ ID NO: 40565 - DNA, 399 bp, Homo sapiens; identical to SEQ ID NO: 31307

SEQ ID NO: 40566 - DNA, 398 bp, Homo sapiens; identical to SEQ ID NO: 31597

SEQ ID NO: 40567 - DNA, 413 bp, Homo sapiens; identical to SEQ ID NO: 31598

SEQ ID NO: 40568 - DNA, 374 bp, Homo sapiens; identical to SEQ ID NO: 31410

SEQ ID NO: 40569 - DNA, 461 bp, Homo sapiens; identical to SEQ ID NO: 31600

SEQ ID NO: 40570 - DNA, 443 bp, Homo sapiens; identical to SEQ ID NO: 31601

SEQ ID NO: 40571 - DNA, 450 bp, Homo sapiens; identical to SEQ ID NO: 35014

SEQ ID NO: 40572 - DNA, 420 bp, Homo sapiens; identical to SEQ ID NO: 31603

SEQ ID NO: 40573 - DNA, 395 bp, Homo sapiens; identical to SEQ ID NO: 31604

SEQ ID NO: 40574 - DNA, 467 bp, Homo sapiens; identical to SEQ ID NO: 31605

SEQ ID NO: 40575 - DNA, 620 bp, Homo sapiens; identical to SEQ ID NO: 31606

SEQ ID NO: 40576 - DNA, 409 bp, Homo sapiens; identical to SEQ ID NO: 31607

SEQ ID NO: 40577 - DNA, 577 bp, Homo sapiens; identical to SEQ ID NO: 33297

SEQ ID NO: 40578 - DNA, 433 bp, Homo sapiens; identical to SEQ ID NO: 34466

SEQ ID NO: 40579 - DNA, 419 bp, Homo sapiens; identical to SEQ ID NO: 31610

SEQ ID NO: 40580 - DNA, 464 bp, Homo sapiens; identical to SEQ ID NO: 33306

SEQ ID NO: 40581 - DNA, 459 bp, Homo sapiens; identical to SEQ ID NO: 30986

SEQ ID NO: 40582 - DNA, 470 bp, Homo sapiens; identical to SEQ ID NO: 31613

SEQ ID NO: 40583 - DNA, 448 bp, Homo sapiens; identical to SEQ ID NO: 31407

SEQ ID NO: 40584 - DNA, 444 bp, Homo sapiens; identical to SEQ ID NO: 30863

SEQ ID NO: 40585 - DNA, 466 bp, Homo sapiens; identical to SEQ ID NO: 31505

SEQ ID NO: 40586 - DNA, 311 bp, Homo sapiens; identical to SEQ ID NO: 31617

SEQ ID NO: 40587 - DNA, 193 bp, Homo sapiens; identical to SEQ ID NO: 31618

SEQ ID NO: 40588 - DNA, 604 bp, Homo sapiens
tccaccgcggtggcggccgcccgggcaggtacacatccctgacctccagagcagacttagctgtcccttcctggcaccctctcggaaacactctcttctcttggcctctgtgattcttctatctccctaaccagtttttgtctctcttttgggacttctcttctaccagctctgaaagaaagttctgtccttgcttcaggtttctatcttcggcctgttgtccttcaacacactccccataagggaccccattctctccaagccttcgttcatcacccagatgctaatgagccctaacctttatcctgtcttctgtgaactctggatccgtttccagtgtcctacaggatttctccacctgaatgtcctcatgacacttccatctcaggatatacaacttgaactcattacttatacctgccacaccaaaccctttcccagtttcagttgatcccctttcccagtttcagttgaaagcgttacccagacacctcagtcatcctcaacaattccttctgcctcaccctccacagacaattggtcaccatggcctgatgcatgtacctcggccgctctagaactagtggatcccccgggctgcagg

SEQ ID NO: 40589 - DNA, 333 bp, Homo sapiens
tccaccgcggtggcggccgaggtacttctccacccttcttacatttatttatgcctagcactgttactttccagaaatgaattaatacagctatcatcactgagtctcaattacttgatagatgacaggaacatcctctgatctctatgggatgagaatgttaactttattacccttaattcctgctgttttgcaaccagagagtaagcaaaggctaaagctgagggtgagatgtagaaaccttgcctactatgtgtgtggaaaagtttagtggcataaacttgcagaatttacttatttgtatgaatgagaaatatgtgatcagtaatttgg

SEQ ID NO: 40590 - DNA, 422 bp, Homo sapiens; identical to SEQ ID NO: 31621

SEQ ID NO: 40591 - DNA, 427 bp, Homo sapiens
gccctatcactactatagggcgaattggagctccaccgcggtggcggccgcccgggcaggtactgggtagcacagagatgagaaataatagaaacctttttgttcggttgtttcaagagctaacattgtcaaaagctcaattcctgttttatgtaaggttttggtttatattttctcaaagaagtgaagtgcagaaaaaagaaaacaaaacaaaaggatgatcaagcagaactttggtaaggaagggtgaagcagagatacttaactcagggtggggacaacagcaatgaccttgtttgaaatgcagctcctgtctctgtggctctctgtactctgctggggcatcagttcctttacttcttagttaaagcagtttatgttcgatgggtgcaatggctttttttggttgcccaatgattttttacac

SEQ ID NO: 40592 - DNA, 448 bp, Homo sapiens; identical to SEQ ID NO: 31623

SEQ ID NO: 40593 - DNA, 450 bp, Homo sapiens; identical to SEQ ID NO: 31624

SEQ ID NO: 40594 - DNA, 376 bp, Homo sapiens; identical to SEQ ID NO: 31625

SEQ ID NO: 40595 - DNA, 438 bp, Homo sapiens; identical to SEQ ID NO: 31053

SEQ ID NO: 40596 - DNA, 437 bp, Homo sapiens; identical to SEQ ID NO: 31627

SEQ ID NO: 40597 - DNA, 440 bp, Homo sapiens
tacgactactatagggcgaattggagctccaccgcggtggcggccgcccgggcaggtacgcggggagtgcaatctgggcgatcgcttcctggtcctcgcctcctccgctgtctccctggagttcttgcaagtcggccaggatgtctcaggctgagtttgagaaagctgcagaggaggttaggcaccttaagaccaagccatcggatgaggagatgctgttcatctatggccactacaaacaagcaactgtgggcgacataaatacagaacggcccgggatgttggacttcacgggcaaggccaagtgggatgcctggaatgagctgaaagggacttccaaggaagatgccatgaaagcttacatcaacaaagtagaagagctaaagaaaaaatacgggatatgagagactggatttggttactgtgccatgtgtttatcc

SEQ ID NO: 40598 - DNA, 455 bp, Homo sapiens
cgcgcgtaatacgactcactatagggcgaattggagctccaccgcggtggcggccgcccgggcaggtactctgtgttccgcctgctcaagttctagacttctggtgtccatagcaacccagcagaaaacatctgcatagcctttgggctgacgtgagttaaacttgagcagtgaagcagcataagttttatggtgcaaggcacactacagatcctcccttacccctcacatctgatccctctgcctatgctcagagccactgctatttctacaaatctacaaggcccagactgaggtgatgaccgggccaatctctggaatagtgtcagacaattagatactctttcctgtcttcaggagcccatctggaataaagctacttatcaagtttcaaaaacaacagaaaagaaatgagattgaggtggaaaacaacccaagtgttcatcaacagatga

SEQ ID NO: 40599 - DNA, 329 bp, Homo sapiens; identical to SEQ ID NO: 31630

SEQ ID NO: 40600 - DNA, 453 bp, Homo sapiens; identical to SEQ ID NO: 31631

SEQ ID NO: 40601 - DNA, 591 bp, Homo sapiens; identical to SEQ ID NO: 31632
  misc_feature 384, 385, 386, 387, 392, 394, 396, 397: n = A,T,C or G

SEQ ID NO: 40602 - DNA, 447 bp, Homo sapiens; identical to SEQ ID NO: 31633

SEQ ID NO: 40603 - DNA, 468 bp, Homo sapiens; identical to SEQ ID NO: 31634

SEQ ID NO: 40604 - DNA, 377 bp, Homo sapiens; identical to SEQ ID NO: 31635
  misc_feature 290: n = A,T,C or G

SEQ ID NO: 40605 - DNA, 300 bp, Homo sapiens; identical to SEQ ID NO: 31636

SEQ ID NO: 40606 - DNA, 445 bp, Homo sapiens; identical to SEQ ID NO: 31637

SEQ ID NO: 40607 - DNA, 333 bp, Homo sapiens; identical to SEQ ID NO: 31638

SEQ ID NO: 40608 - DNA, 423 bp, Homo sapiens; identical to SEQ ID NO: 32777

SEQ ID NO: 40609 - DNA, 559 bp, Homo sapiens
tccaccgcggtggccggccgcccgggcaggtacacccctacccccaagcacccatcatctcataatctaatccaggtcatatttaaaaacttgcaatcaatgtcaattcctccaaaatgcttcccccacatcccaggaccaaggaatgatatttgcatgtttgggatcacttacctagtattccctttcagaatgtaatttgagaccgtggctgtcccttacacacctgtgtttccagtgtgctcagcactgtaagctgctcaccttgacacccacttgctggctgaatattgattgaacaggtggatggatttgatggctccctcagtgatcttcaagctaaaaatgggttctaaaaagtcatcccgccttcttccacggcacttattcttggctaattaagaggtacctcggccgctctagaactagtggatcccccgggctgcaggaattcgatatcaagcttatcgataccgtcgacctcgagggggggcccggtacccagcttttgttccctttagtgagggttaattgcgcgcttggcgtaatcatggtcata

SEQ ID NO: 40610 - DNA, 613 bp, Homo sapiens; identical to SEQ ID NO: 30839
  misc_feature 279, 587, 605: n = A,T,C or G

SEQ ID NO: 40611 - DNA, 438 bp, Homo sapiens; identical to SEQ ID NO: 31642

SEQ ID NO: 40612 - DNA, 436 bp, Homo sapiens; identical to SEQ ID NO: 31643

SEQ ID NO: 40613 - DNA, 453 bp, Homo sapiens; identical to SEQ ID NO: 31644

SEQ ID NO: 40614 - DNA, 556 bp, Homo sapiens
tggtacccagctcggatccactagtaacggccgccagtgtgctggaatttcgagcggccgcccgggcaggtacattgtgacaatttgatacatgcatacattgtgaaatgatcaaatcaggttcattaatatattcatcacctaatatatttgtcatttatttttggtgagagcatttgaaatccactattttatgacatcagtaagataacctaactagaagctcccaatactcaccaccaccctcccaaagatagccaaaacaataagtaagcaactacatttagaagaaaataactaagggaggatgttagaatacattaaaggtgtattagaaactctgtagtgtgcagaaacccaagatggccacatagacaacagaaggaaacacctcacctccaccaccctatccctacatcaggatcagttggaaccagggggaaattctccttgcagggaaaaggtaaggaagaggaccacagcagcccccatcaccaccttaagcacctacagtcctcacctctggtgacccctgcagttctcacaggcactaagc

SEQ ID NO: 40615 - DNA, 518 bp, Homo sapiens; identical to SEQ ID NO: 31646

SEQ ID NO: 40616 - DNA, 412 bp, Homo sapiens; identical to SEQ ID NO: 31647

SEQ ID NO: 40617 - DNA, 570 bp, Homo sapiens
gcgtaatacgactactatagggcgaattggagatccaccgcggtggcggccgcccgggcaggtacgatcttggctcactgcaacctctccctcccgggttcaagtgattctcgtgcctcagcctcttgagtagctgggattacaggcgcgtgccactgcgtccggctaatttttgtatttttagtagagatggggtttcaccatgttggccaggctgatctcaaactcctgacctcatgtggtccacccaccttggcctcccaaagtgctgggattacaggcgtgagccaccgcgctcagcctacaagcaattttttaaaaactgacacctattactgataaaattctctgtttaaaatcctatttactattttaaagataagtattagttttttttttaaatacaataattctgttattgataaaatttaaggcattttcattgccttttgcagatttactcataactacctaacaaggaaagaaggtataattatttcagattggattatttattctaaaattaaattcttcactaatttattctaagatgaatttaatagtccatca

SEQ ID NO: 40618 - DNA, 385 bp, Homo sapiens; identical to SEQ ID NO: 31515

SEQ ID NO: 40619 - DNA, 458 bp, Homo sapiens; identical to SEQ ID NO: 31650

SEQ ID NO: 40620 - DNA, 433 bp, Homo sapiens; identical to SEQ ID NO: 31651

SEQ ID NO: 40621 - DNA, 604 bp, Homo sapiens; identical to SEQ ID NO: 39869
  misc_feature 9: n = A,T,C or G

SEQ ID NO: 40622 - DNA, 450 bp, Homo sapiens; identical to SEQ ID NO: 31653

SEQ ID NO: 40623 - DNA, 477 bp, Homo sapiens; identical to SEQ ID NO: 36931

SEQ ID NO: 40624 - DNA, 445 bp, Homo sapiens
acgactactatagggcgaattggagctccaccgcggtggcggccgcccgggctggtaccaggattatagttagaatttacggactgggtaggaagactggatagaaatctaaagattgctgactcaaacacaatgtggtttctttgctttattgtcacagctctgaattcacaattattagttaaattcataggcactataactttagaaagcaccttcccaaaccaagtattaagtgatttattataatttctctgacttcttatagaattgactttccaagtgttcatgagaattattgagaatttgctacatagtatcatctcagctgtgtccacatgagctatctgtcaccttgtcttaatgaataatggttcactaggaatattggttttggcatttaaagtgatctatatctaaatgcacataggatcggggaccactc

SEQ ID NO: 40625 - DNA, 446 bp, Homo sapiens; identical to SEQ ID NO: 31385

SEQ ID NO: 40626 - DNA, 397 bp, Homo sapiens; identical to SEQ ID NO: 31657

SEQ ID NO: 40627 - DNA, 465 bp, Homo sapiens; identical to SEQ ID NO: 31128

SEQ ID NO: 40628 - DNA, 577 bp, Homo sapiens; identical to SEQ ID NO: 33036
  misc_feature 558: n = A,T,C or G

SEQ ID NO: 40629 - DNA, 442 bp, Homo sapiens; identical to SEQ ID NO: 31660

SEQ ID NO: 40630 - DNA, 432 bp, Homo sapiens; identical to SEQ ID NO: 31209

SEQ ID NO: 40631 - DNA, 483 bp, Homo sapiens; identical to SEQ ID NO: 31662
  misc_feature 216: n = A,T,C or G

SEQ ID NO: 40632 - DNA, 474 bp, Homo sapiens; identical to SEQ ID NO: 31663

SEQ ID NO: 40633 - DNA, 437 bp, Homo sapiens; identical to SEQ ID NO: 31664

SEQ ID NO: 40634 - DNA, 478 bp, Homo sapiens; identical to SEQ ID NO: 30781

SEQ ID NO: 40635 - DNA, 391 bp, Homo sapiens
tatagggcgattggagctccccgcggtggcggccgaggtacctaggagctttttgaccctgtgttgagatgcctaaacagcttcctgattgacctcctgatatttctgcaaatgtggactaagaggccaggattcctcaaggcccaggtgactcaggttattccaaaattatatttggactaccagttcctttgcttgatttgggatgcaaaaggggacttctctccctaatcactaaagtagcttttcaatgtccccctctcatcacggtaagagtctcatttcttgagactcattttctttccatgacttatgttatgttttggagagagtggaattcaagacagaaagagcctggctctgtgcctggtttttccaggggttcaagccc

SEQ ID NO: 40636 - DNA, 390 bp, Homo sapiens; identical to SEQ ID NO: 35967

SEQ ID NO: 40637 - DNA, 415 bp, Homo sapiens; identical to SEQ ID NO: 31668

SEQ ID NO: 40638 - DNA, 401 bp, Homo sapiens; identical to SEQ ID NO: 31669

SEQ ID NO: 40639 - DNA, 445 bp, Homo sapiens; identical to SEQ ID NO: 31355

SEQ ID NO: 40640 - DNA, 422 bp, Homo sapiens; identical to SEQ ID NO: 31671

SEQ ID NO: 40641 - DNA, 420 bp, Homo sapiens; identical to SEQ ID NO: 31672

SEQ ID NO: 40642 - DNA, 434 bp, Homo sapiens; identical to SEQ ID NO: 31673

SEQ ID NO: 40643 - DNA, 385 bp, Homo sapiens; identical to SEQ ID NO: 31674

SEQ ID NO: 40644 - DNA, 635 bp, Homo sapiens; identical to SEQ ID NO: 31675

SEQ ID NO: 40645 - DNA, 363 bp, Homo sapiens; identical to SEQ ID NO: 31676

SEQ ID NO: 40646 - DNA, 424 bp, Homo sapiens
cactactatagggcgaattggagctccaccgcggtggcggccgaggtacatttttattatccttataccagttataacttcattcatggtcctgatcctggcatccgtgaaagttgcagttttactcctcagtgatgagaacaacttcccaaaacagctttgcaagggcaggagaatgattagaactgccatcccagcaaggcacgatattcctatctccatccagagtagggcagtcactgcgatcgcctgcagtggtcctgcccacaggaagtgtaagaacactgtcacctgatcaaacttgttcacatcattggacagcagattgactatctggcctgtggttgtcttccccatggccatgttactaagacgaagtgcatctgacagagaacaagcaattattttttcaatgaagcaaaga

SEQ ID NO: 40647 - DNA, 427 bp, Homo sapiens; identical to SEQ ID NO: 31678

SEQ ID NO: 40648 - DNA, 468 bp, Homo sapiens; identical to SEQ ID NO: 31679

SEQ ID NO: 40649 - DNA, 481 bp, Homo sapiens; identical to SEQ ID NO: 31680

SEQ ID NO: 40650 - DNA, 450 bp, Homo sapiens; identical to SEQ ID NO: 31681

SEQ ID NO: 40651 - DNA, 475 bp, Homo sapiens; identical to SEQ ID NO: 31347

SEQ ID NO: 40652 - DNA, 446 bp, Homo sapiens; identical to SEQ ID NO: 31683

SEQ ID NO: 40653 - DNA, 445 bp, Homo sapiens; identical to SEQ ID NO: 31684

SEQ ID NO: 40654 - DNA, 410 bp, Homo sapiens; identical to SEQ ID NO: 31685
  misc_feature 212: n = A,T,C or G

SEQ ID NO: 40655 - DNA, 411 bp, Homo sapiens; identical to SEQ ID NO: 31097

SEQ ID NO: 40656 - DNA, 431 bp, Homo sapiens; identical to SEQ ID NO: 40493
  misc_feature 416: n = A,T,C or G

SEQ ID NO: 40657 - DNA, 617 bp, Homo sapiens; identical to SEQ ID NO: 31688
  misc_feature 463: n = A,T,C or G

SEQ ID NO: 40658 - DNA, 466 bp, Homo sapiens; identical to SEQ ID NO: 31227

SEQ ID NO: 40659 - DNA, 196 bp, Homo sapiens; identical to SEQ ID NO: 31690

SEQ ID NO: 40660 - DNA, 430 bp, Homo sapiens; identical to SEQ ID NO: 31759

SEQ ID NO: 40661 - DNA, 447 bp, Homo sapiens; identical to SEQ ID NO: 31692

SEQ ID NO: 40662 - DNA, 404 bp, Homo sapiens; identical to SEQ ID NO: 30750

SEQ ID NO: 40663 - DNA, 454 bp, Homo sapiens
ctactatagggcgaattggagctccaccgcggtggcggccgccatcttgggtcatcgatgagcctcgccctgtgcctggtcccgcttgtgagggaaggacattagaaaatgaattgatgtgttccttaaaggatgggcaggaaaacagatcctgttgtggatatttatttgaacgggattacagattgaaaatgagttcacaaagtgagcattaccaatgagaggaaaacagacgagaaaatcttgatggcttcacaagacatgcaacaaacaaaatggaatactgtgatgacatgaggcagccaagctggggaggagataaccacggggcagagggtcaggattctggccctgctgcctaaactgtgcgttcataaccaaatcatttcatatttctaaccctcaaaacaaagctggtgtaatatctgatctctacggttccttctgggcccac

SEQ ID NO: 40664 - DNA, 433 bp, Homo sapiens; identical to SEQ ID NO: 31695

SEQ ID NO: 40665 - DNA, 293 bp, Homo sapiens; identical to SEQ ID NO: 31696

SEQ ID NO: 40666 - DNA, 393 bp, Homo sapiens; identical to SEQ ID NO: 31697

SEQ ID NO: 40667 - DNA, 425 bp, Homo sapiens; identical to SEQ ID NO: 33071

SEQ ID NO: 40668 - DNA, 376 bp, Homo sapiens; identical to SEQ ID NO: 31699

SEQ ID NO: 40669 - DNA, 445 bp, Homo sapiens; identical to SEQ ID NO: 31700

SEQ ID NO: 40670 - DNA, 446 bp, Homo sapiens; identical to SEQ ID NO: 31594

SEQ ID NO: 40671 - DNA, 544 bp, Homo sapiens; identical to SEQ ID NO: 40279

SEQ ID NO: 40672 - DNA, 431 bp, Homo sapiens; identical to SEQ ID NO: 32914

SEQ ID NO: 40673 - DNA, 469 bp, Homo sapiens; identical to SEQ ID NO: 30603

SEQ ID NO: 40674 - DNA, 390 bp, Homo sapiens; identical to SEQ ID NO: 31771

SEQ ID NO: 40675 - DNA, 425 bp, Homo sapiens; identical to SEQ ID NO: 31706

SEQ ID NO: 40676 - DNA, 392 bp, Homo sapiens
gactcactatagggcgaattggagctccaccgcggtggcggccgcccgggcaggtacttttttttttttttttttttttgagacggagtctcgctctgtcgcccaggctggagtgcagtggcgcgatctcggctcactgcaagctccgcctcccgggttcacgccattctcctgcctcagcctcccgagtagctgggactacaggcgcccgccaccacgcccggctaattttttgtatttttagtagagacggggtttcaccgtgttagccaggatggtctcgatctcctgacctcgtgatccacccgcctcggcctcccaaagtgctgggattacaggcgtgagccaccgcgcccggccgctctagaactagtggatcccccgggctgcag

SEQ ID NO: 40677 - DNA, 415 bp, Homo sapiens; identical to SEQ ID NO: 31708

SEQ ID NO: 40678 - DNA, 450 bp, Homo sapiens; identical to SEQ ID NO: 31709

SEQ ID NO: 40679 - DNA, 464 bp, Homo sapiens; identical to SEQ ID NO: 33306

SEQ ID NO: 40680 - DNA, 352 bp, Homo sapiens; identical to SEQ ID NO: 31711

SEQ ID NO: 40681 - DNA, 307 bp, Homo sapiens; identical to SEQ ID NO: 40388

SEQ ID NO: 40682 - DNA, 584 bp, Homo sapiens; identical to SEQ ID NO: 39151

SEQ ID NO: 40683 - DNA, 508 bp, Homo sapiens; identical to SEQ ID NO: 31714

SEQ ID NO: 40684 - DNA, 434 bp, Homo sapiens; identical to SEQ ID NO: 31715

SEQ ID NO: 40685 - DNA, 452 bp, Homo sapiens; identical to SEQ ID NO: 31716

SEQ ID NO: 40686 - DNA, 472 bp, Homo sapiens; identical to SEQ ID NO: 31717

SEQ ID NO: 40687 - DNA, 489 bp, Homo sapiens
tccaccgcggtggcggccgaggtactttaggctgagaaataaatagaagggtgagaaaaaagaacagtctttatagtcagtaagagtgaaaagagaaagatggtagttggggaaagacagatggggagaaaggttggctggttgttaataaaacagtagaggatgagcatgtattataaatgctggtgggaagaaaccttgtggcaaggagggtggtagtgttggagaagaaagagaggatatagtagaaagttaaagaggaactggaagcaggtgggatccaggacataggaaggggaagagccttgggcagaggtgagacatctgcaggagggaaggaactgagagaagggaaggtgtgcaaatgtggcaggaggagtttgagtaaagttccatctgatatcctctattttctctgtaaatcattctgaatgaagtatgagacaaagagatcaaaggctaaaaaaaaaaaaaaaaaaaaaaaaaaaa

SEQ ID NO: 40688 - DNA, 457 bp, Homo sapiens; identical to SEQ ID NO: 31719

SEQ ID NO: 40689 - DNA, 446 bp, Homo sapiens; identical to SEQ ID NO: 31594

SEQ ID NO: 40690 - DNA, 452 bp, Homo sapiens; identical to SEQ ID NO: 31716

SEQ ID NO: 40691 - DNA, 460 bp, Homo sapiens
actactatagggcgaattggagctccaccgcggtggcggccgaggtaccaaagagggcataataatcagtctcacagtagggttcaccatcctccaagtgaaaaacattgttccgaatgggctttccacaggctacacacacaaaacaggaaacatgccaagtttgtttcaacgcattgatgacttctccaaggatcttcctttggcatcgaccacattcaggggcaaagaatttctcatagcacagctcacaatacagggctcctttctcctctacaaatccaatgtaggccattgtatttttgcagtgagcgcagttgaattcttctgggtgccaagatttccccagtgccactaagaatggtcctctgacagaagaaaaagaggccaactaagtttgagaataaaatttctcccccgcgtacctgcccgggcgggcgcccggtcaggttccagtcgg

SEQ ID NO: 40692 - DNA, 593 bp, Homo sapiens; identical to SEQ ID NO: 31723

SEQ ID NO: 40693 - DNA, 550 bp, Homo sapiens; identical to SEQ ID NO: 31724

SEQ ID NO: 40694 - DNA, 453 bp, Homo sapiens; identical to SEQ ID NO: 31725

SEQ ID NO: 40695 - DNA, 556 bp, Homo sapiens; identical to SEQ ID NO: 31726

SEQ ID NO: 40696 - DNA, 611 bp, Homo sapiens; identical to SEQ ID NO: 31727

SEQ ID NO: 40697 - DNA, 492 bp, Homo sapiens
tccaccgcggtggcggccgaggtactgaggtgggtctagaggattagtctgtgaattgtagcctggattctgcagttgtggggtctgcctggtgctgagttttactgtggtggactcagtgttgggatccagcggaaaatcctgtgcttactttcctctcttcctgccaagtggagagtatgtcttttcatgctctgctgcctggaattggaaaagaggtgatttggataatgtaaaactgtccttcctatcctcttcaacgtatcttttattattattgtgctacaaccagacactgtgatctttcatctggttttcttagatgttgtaaagatattgtgtgcatggaccaggtatggtggctcatgcctgtaatcccattttgggaggccaaggcaggaggattgtttgagctcaacagtttgagaccagcctgggcaatatactggaccccacctctataaaaaaaaaaaaaaaaaaaaaaaaaaaacc

SEQ ID NO: 40698 - DNA, 365 bp, Homo sapiens; identical to SEQ ID NO: 31729

SEQ ID NO: 40699 - DNA, 454 bp, Homo sapiens; identical to SEQ ID NO: 31730

SEQ ID NO: 40700 - DNA, 457 bp, Homo sapiens; identical to SEQ ID NO: 31719

SEQ ID NO: 40701 - DNA, 401 bp, Homo sapiens; identical to SEQ ID NO: 31732

SEQ ID NO: 40702 - DNA, 430 bp, Homo sapiens; identical to SEQ ID NO: 31733

SEQ ID NO: 40703 - DNA, 447 bp, Homo sapiens; identical to SEQ ID NO: 33031

SEQ ID NO: 40704 - DNA, 399 bp, Homo sapiens; identical to SEQ ID NO: 31307

SEQ ID NO: 40705 - DNA, 452 bp, Homo sapiens; identical to SEQ ID NO: 31736

SEQ ID NO: 40706 - DNA, 450 bp, Homo sapiens; identical to SEQ ID NO: 31737

SEQ ID NO: 40707 - DNA, 561 bp, Homo sapiens; identical to SEQ ID NO: 31806

SEQ ID NO: 40708 - DNA, 452 bp, Homo sapiens; identical to SEQ ID NO: 31739

SEQ ID NO: 40709 - DNA, 227 bp, Homo sapiens; identical to SEQ ID NO: 31740

SEQ ID NO: 40710 - DNA, 425 bp, Homo sapiens; identical to SEQ ID NO: 31741

SEQ ID NO: 40711 - DNA, 471 bp, Homo sapiens; identical to SEQ ID NO: 31110

SEQ ID NO: 40712 - DNA, 217 bp, Homo sapiens; identical to SEQ ID NO: 31743

SEQ ID NO: 40713 - DNA, 447 bp, Homo sapiens; identical to SEQ ID NO: 31744

SEQ ID NO: 40714 - DNA, 446 bp, Homo sapiens; identical to SEQ ID NO: 31745

SEQ ID NO: 40715 - DNA, 389 bp, Homo sapiens; identical to SEQ ID NO: 31746

SEQ ID NO: 40716 - DNA, 179 bp, Homo sapiens; identical to SEQ ID NO: 31747

SEQ ID NO: 40717 - DNA, 665 bp, Homo sapiens; identical to SEQ ID NO: 36005

SEQ ID NO: 40718 - DNA, 565 bp, Homo sapiens; identical to SEQ ID NO: 37218

SEQ ID NO: 40719 - DNA, 458 bp, Homo sapiens; identical to SEQ ID NO: 31750

SEQ ID NO: 40720 - DNA, 383 bp, Homo sapiens; identical to SEQ ID NO: 31751

SEQ ID NO: 40721 - DNA, 512 bp, Homo sapiens; identical to SEQ ID NO: 31752

SEQ ID NO: 40722 - DNA, 599 bp, Homo sapiens; identical to SEQ ID NO: 31219

SEQ ID NO: 40723 - DNA, 430 bp, Homo sapiens; identical to SEQ ID NO: 31754

SEQ ID NO: 40724 - DNA, 428 bp, Homo sapiens; identical to SEQ ID NO: 31755

SEQ ID NO: 40725 - DNA, 397 bp, Homo sapiens; identical to SEQ ID NO: 31756

SEQ ID NO: 40726 - DNA, 442 bp, Homo sapiens; identical to SEQ ID NO: 31757

SEQ ID NO: 40727 - DNA, 466 bp, Homo sapiens; identical to SEQ ID NO: 31505

SEQ ID NO: 40728 - DNA, 430 bp, Homo sapiens; identical to SEQ ID NO: 31759

SEQ ID NO: 40729 - DNA, 428 bp, Homo sapiens; identical to SEQ ID NO: 31760

SEQ ID NO: 40730 - DNA, 435 bp, Homo sapiens; identical to SEQ ID NO: 31761

SEQ ID NO: 40731 - DNA, 452 bp, Homo sapiens; identical to SEQ ID NO: 31762

SEQ ID NO: 40732 - DNA, 558 bp, Homo sapiens
ctatatggcgaatggggccctctagatgcatgctcgagcggccgccagtgtgatggatatctgcagaattcggctttcgagcggccgcccgggcaggtactccagctagggcaagagagcgagaccctgtctcaataaataaataaataaataaataaataaataaaaacaaagttgattaagaaaggaagtataggccaggcacagtggctcacacctgtaatccttgcattttggaaggctgaggcaggaggatcactttaggcctggtgtgttcaagaccagcctggtcaacatagtgagacactgtctctaccaaaaaaaggaaggaagggacacatatcaaactgaaacaaaattagaaatgtaattatgttctaagtgcctccaagttcaaaacttattggaatgttgagagtgtggttacgaaatacgttaggaggacaaaaggaatgtgtaagtctttaatgccgatatctttagaaaacctaagcaaacttacaggtcctgctgaaactgcccactctgcaagaagaaatcatgatatagctttgccat

SEQ ID NO: 40733 - DNA, 214 bp, Homo sapiens; identical to SEQ ID NO: 31764

SEQ ID NO: 40734 - DNA, 412 bp, Homo sapiens; identical to SEQ ID NO: 31765

SEQ ID NO: 40735 - DNA, 472 bp, Homo sapiens; identical to SEQ ID NO: 31766

SEQ ID NO: 40736 - DNA, 611 bp, Homo sapiens; identical to SEQ ID NO: 39970
  misc_feature 494: n = A,T,C or G

SEQ ID NO: 40737 - DNA, 444 bp, Homo sapiens; identical to SEQ ID NO: 31768

SEQ ID NO: 40738 - DNA, 397 bp, Homo sapiens; identical to SEQ ID NO: 32504

SEQ ID NO: 40739 - DNA, 429 bp, Homo sapiens; identical to SEQ ID NO: 31770

SEQ ID NO: 40740 - DNA, 462 bp, Homo sapiens; identical to SEQ ID NO: 30910

SEQ ID NO: 40741 - DNA, 415 bp, Homo sapiens; identical to SEQ ID NO: 31772
  misc_feature 172: n = A,T,C or G

SEQ ID NO: 40742 - DNA, 431 bp, Homo sapiens; identical to SEQ ID NO: 31773

SEQ ID NO: 40743 - DNA, 670 bp, Homo sapiens; identical to SEQ ID NO: 30471

SEQ ID NO: 40744 - DNA, 561 bp, Homo sapiens; identical to SEQ ID NO: 31806

SEQ ID NO: 40745 - DNA, 410 bp, Homo sapiens; identical to SEQ ID NO: 31776

SEQ ID NO: 40746 - DNA, 602 bp, Homo sapiens; identical to SEQ ID NO: 31777
  misc_feature 264, 277, 450, 492: n = A,T,C or G

SEQ ID NO: 40747 - DNA, 409 bp, Homo sapiens; identical to SEQ ID NO: 31778

SEQ ID NO: 40748 - DNA, 441 bp, Homo sapiens; identical to SEQ ID NO: 31779

SEQ ID NO: 40749 - DNA, 447 bp, Homo sapiens; identical to SEQ ID NO: 31780

SEQ ID NO: 40750 - DNA, 483 bp, Homo sapiens; identical to SEQ ID NO: 31045

SEQ ID NO: 40751 - DNA, 622 bp, Homo sapiens; identical to SEQ ID NO: 31782

SEQ ID NO: 40752 - DNA, 415 bp, Homo sapiens; identical to SEQ ID NO: 31783

SEQ ID NO: 40753 - DNA, 299 bp, Homo sapiens; identical to SEQ ID NO: 31784

SEQ ID NO: 40754 - DNA, 590 bp, Homo sapiens; identical to SEQ ID NO: 30896
  misc_feature 443: n = A,T,C or G

SEQ ID NO: 40755 - DNA, 448 bp, Homo sapiens; identical to SEQ ID NO: 33149

SEQ ID NO: 40756 - DNA, 447 bp, Homo sapiens; identical to SEQ ID NO: 30521

SEQ ID NO: 40757 - DNA, 443 bp, Homo sapiens; identical to SEQ ID NO: 31601

SEQ ID NO: 40758 - DNA, 468 bp, Homo sapiens; identical to SEQ ID NO: 31790

SEQ ID NO: 40759 - DNA, 468 bp, Homo sapiens; identical to SEQ ID NO: 31790

SEQ ID NO: 40760 - DNA, 425 bp, Homo sapiens; identical to SEQ ID NO: 31791

SEQ ID NO: 40761 - DNA, 443 bp, Homo sapiens; identical to SEQ ID NO: 31474

SEQ ID NO: 40762 - DNA, 486 bp, Homo sapiens; identical to SEQ ID NO: 31793

SEQ ID NO: 40763 - DNA, 401 bp, Homo sapiens; identical to SEQ ID NO: 31794

SEQ ID NO: 40764 - DNA, 431 bp, Homo sapiens; identical to SEQ ID NO: 31795

SEQ ID NO: 40765 - DNA, 423 bp, Homo sapiens; identical to SEQ ID NO: 30984

SEQ ID NO: 40766 - DNA, 406 bp, Homo sapiens; identical to SEQ ID NO: 31797

SEQ ID NO: 40767 - DNA, 433 bp, Homo sapiens; identical to SEQ ID NO: 40390

SEQ ID NO: 40768 - DNA, 453 bp, Homo sapiens; identical to SEQ ID NO: 31799

SEQ ID NO: 40769 - DNA, 577 bp, Homo sapiens; identical to SEQ ID NO: 33297

SEQ ID NO: 40770 - DNA, 430 bp, Homo sapiens; identical to SEQ ID NO: 31801

SEQ ID NO: 40771 - DNA, 491 bp, Homo sapiens; identical to SEQ ID NO: 30404

SEQ ID NO: 40772 - DNA, 430 bp, Homo sapiens; identical to SEQ ID NO: 31804

SEQ ID NO: 40773 - DNA, 412 bp, Homo sapiens; identical to SEQ ID NO: 31805

SEQ ID NO: 40774 - DNA, 561 bp, Homo sapiens; identical to SEQ ID NO: 31806

SEQ ID NO: 40775 - DNA, 611 bp, Homo sapiens; identical to SEQ ID NO: 39970
  misc_feature 494: n = A,T,C or G

SEQ ID NO: 40776 - DNA, 459 bp, Homo sapiens; identical to SEQ ID NO: 31808

SEQ ID NO: 40777 - DNA, 561 bp, Homo sapiens; identical to SEQ ID NO: 31806

SEQ ID NO: 40778 - DNA, 353 bp, Homo sapiens; identical to SEQ ID NO: 31810

SEQ ID NO: 40779 - DNA, 444 bp, Homo sapiens; identical to SEQ ID NO: 31811

SEQ ID NO: 40780 - DNA, 431 bp, Homo sapiens; identical to SEQ ID NO: 31795

SEQ ID NO: 40781 - DNA, 604 bp, Homo sapiens; identical to SEQ ID NO: 39869
  misc_feature 9: n = A,T,C or G

SEQ ID NO: 40782 - DNA, 419 bp, Homo sapiens; identical to SEQ ID NO: 31814

SEQ ID NO: 40783 - DNA, 445 bp, Homo sapiens; identical to SEQ ID NO: 31815

SEQ ID NO: 40784 - DNA, 491 bp, Homo sapiens; identical to SEQ ID NO: 31816

SEQ ID NO: 40785 - DNA, 448 bp, Homo sapiens; identical to SEQ ID NO: 33359

SEQ ID NO: 40786 - DNA, 438 bp, Homo sapiens; identical to SEQ ID NO: 31818

SEQ ID NO: 40787 - DNA, 171 bp, Homo sapiens; identical to SEQ ID NO: 31819

SEQ ID NO: 40788 - DNA, 575 bp, Homo sapiens; identical to SEQ ID NO: 31820

SEQ ID NO: 40789 - DNA, 609 bp, Homo sapiens; identical to SEQ ID NO: 32039

SEQ ID NO: 40790 - DNA, 567 bp, Homo sapiens; identical to SEQ ID NO: 32094

SEQ ID NO: 40791 - DNA, 446 bp, Homo sapiens; identical to SEQ ID NO: 33635

SEQ ID NO: 40792 - DNA, 564 bp, Homo sapiens; identical to SEQ ID NO: 31824

SEQ ID NO: 40793 - DNA, 451 bp, Homo sapiens; identical to SEQ ID NO: 31825

SEQ ID NO: 40794 - DNA, 433 bp, Homo sapiens; identical to SEQ ID NO: 31826

SEQ ID NO: 40795 - DNA, 395 bp, Homo sapiens; identical to SEQ ID NO: 31827

SEQ ID NO: 40796 - DNA, 459 bp, Homo sapiens; identical to SEQ ID NO: 32091

SEQ ID NO: 40797 - DNA, 242 bp, Homo sapiens; identical to SEQ ID NO: 31829

SEQ ID NO: 40798 - DNA, 506 bp, Homo sapiens
ctatagggcgaattggagctccaccgcggtggcggccgaaaccagcttttaagtgagctcagcatattataaaggaatgaaagcaattagagcgtggactctaaaggtaggtgagacttgctgttccacttagaaacatagaaacataggaaactaaggactcgatggggacatcaatagtaggatggcttttaagagggctgaagtgtgtaaatatacacattaagctttgcagcaactctgtgccaaatcgaagttgttgcagacctggaattttagtttggtaaaggataactgtagttattttttaaataaaatgattcattagaattctttggttctctcatgataatttagcaagtttgtctctttcagaaagaaaagtttaagtggggttaatgggtacctcggccgctctagaactagtggatcccccgggctgcaggaattcgatatcaagcttatcgataccgtcgacctcgagggggggcccggtacccagcttt

SEQ ID NO: 40799 - DNA, 478 bp, Homo sapiens; identical to SEQ ID NO: 31831

SEQ ID NO: 40800 - DNA, 602 bp, Homo sapiens; identical to SEQ ID NO: 33602

SEQ ID NO: 40801 - DNA, 405 bp, Homo sapiens; identical to SEQ ID NO: 31833

SEQ ID NO: 40802 - DNA, 468 bp, Homo sapiens; identical to SEQ ID NO: 31969

SEQ ID NO: 40803 - DNA, 650 bp, Homo sapiens; identical to SEQ ID NO: 31835

SEQ ID NO: 40804 - DNA, 469 bp, Homo sapiens; identical to SEQ ID NO: 30603

SEQ ID NO: 40805 - DNA, 469 bp, Homo sapiens; identical to SEQ ID NO: 31837
  misc_feature 449, 450: n = A,T,C or G

SEQ ID NO: 40806 - DNA, 471 bp, Homo sapiens; identical to SEQ ID NO: 31866

SEQ ID NO: 40807 - DNA, 369 bp, Homo sapiens; identical to SEQ ID NO: 31839

SEQ ID NO: 40808 - DNA, 472 bp, Homo sapiens; identical to SEQ ID NO: 31994

SEQ ID NO: 40809 - DNA, 432 bp, Homo sapiens; identical to SEQ ID NO: 31842

SEQ ID NO: 40810 - DNA, 442 bp, Homo sapiens; identical to SEQ ID NO: 31843

SEQ ID NO: 40811 - DNA, 495 bp, Homo sapiens; identical to SEQ ID NO: 31845

SEQ ID NO: 40812 - DNA, 401 bp, Homo sapiens; identical to SEQ ID NO: 31846

SEQ ID NO: 40813 - DNA, 332 bp, Homo sapiens
cgactcactatagggcgaattggagctccaccgcggtggcggccgcataggcaagcaccggaagcaccccggcggccgcggtaatgctggtggtctgcatcaccaccggatcaacttcgacaaataccacccaggctactttgggaaagttggtatgaagcattaccacttaaagaggaaccagagcttttgcccaactggcaaacccttgacaaattgtgtgactttggtcagtgaacagacacgggtgaatgctgctaaaaacaagactggggtctgcttcccatcatttgatgttggtgcgaatcgggcctactaattaaagtttctgg

SEQ ID NO: 40814 - DNA, 586 bp, Homo sapiens; identical to SEQ ID NO: 31848

SEQ ID NO: 40815 - DNA, 397 bp, Homo sapiens; identical to SEQ ID NO: 31849

SEQ ID NO: 40816 - DNA, 396 bp, Homo sapiens; identical to SEQ ID NO: 31850

SEQ ID NO: 40817 - DNA, 506 bp, Homo sapiens; identical to SEQ ID NO: 31851

SEQ ID NO: 40818 - DNA, 251 bp, Homo sapiens; identical to SEQ ID NO: 31852

SEQ ID NO: 40819 - DNA, 472 bp, Homo sapiens; identical to SEQ ID NO: 31853

SEQ ID NO: 40820 - DNA, 473 bp, Homo sapiens; identical to SEQ ID NO: 31841

SEQ ID NO: 40821 - DNA, 552 bp, Homo sapiens; identical to SEQ ID NO: 33554

SEQ ID NO: 40822 - DNA, 450 bp, Homo sapiens; identical to SEQ ID NO: 31857

SEQ ID NO: 40823 - DNA, 203 bp, Homo sapiens; identical to SEQ ID NO: 31858

SEQ ID NO: 40824 - DNA, 653 bp, Homo sapiens; identical to SEQ ID NO: 31859
  misc_feature 53: n = A,T,C or G

SEQ ID NO: 40825 - DNA, 453 bp, Homo sapiens; identical to SEQ ID NO: 31860

SEQ ID NO: 40826 - DNA, 646 bp, Homo sapiens; identical to SEQ ID NO: 31861
  misc_feature 225: n = A,T,C or G

SEQ ID NO: 40827 - DNA, 468 bp, Homo sapiens; identical to SEQ ID NO: 31864

SEQ ID NO: 40828 - DNA, 384 bp, Homo sapiens; identical to SEQ ID NO: 31863

SEQ ID NO: 40829 - DNA, 496 bp, Homo sapiens; identical to SEQ ID NO: 31865
  misc_feature 237: n = A,T,C or G

SEQ ID NO: 40830 - DNA, 474 bp, Homo sapiens; identical to SEQ ID NO: 32048

SEQ ID NO: 40831 - DNA, 383 bp, Homo sapiens; identical to SEQ ID NO: 31867

SEQ ID NO: 40832 - DNA, 613 bp, Homo sapiens
atatggagtcgacccacgcgtccgttttaaatgatagagtcatggaaagctttactgatagagcgatggttgcagaaaaaaagacgagagaatattccaaatagacgaccaagtagcactttgggaggccgaggcgggcagatcacctgaggtcaggggttcaagaccagcctggccaacgtggtgaaaccctgactctactaaaaatacaaaaattagccaggcatggtggtgcatacctgtaatcccagctactcgggaggctgaggcaggagaatcacttgaacctgggaggtggaggttgcagtgagctgagatcatgccactgcactccagcctcgacagtaagactctgtctccaaaaaaaaaaaaaaaagggcggccgctagactagtctagagaaaaaacctcccacacctccccctgaacctgaaacataaaatgaatgcaattgttgttgttaacttgtttattgcagcttataatggttacaaataaagcaatagcatcacaaatttcacaaataaagcatttttttcactgcattctagttgtggtttgtccaaactcatcaatgtatcttatcatgtctggatccccgggtaccgagctc

SEQ ID NO: 40833 - DNA, 610 bp, Homo sapiens; identical to SEQ ID NO: 31869

SEQ ID NO: 40834 - DNA, 369 bp, Homo sapiens; identical to SEQ ID NO: 33691

SEQ ID NO: 40835 - DNA, 333 bp, Homo sapiens; identical to SEQ ID NO: 31871

SEQ ID NO: 40836 - DNA, 559 bp, Homo sapiens; identical to SEQ ID NO: 31872

SEQ ID NO: 40837 - DNA, 664 bp, Homo sapiens; identical to SEQ ID NO: 31907

SEQ ID NO: 40838 - DNA, 283 bp, Homo sapiens; identical to SEQ ID NO: 31875

SEQ ID NO: 40839 - DNA, 445 bp, Homo sapiens; identical to SEQ ID NO: 31876

SEQ ID NO: 40840 - DNA, 454 bp, Homo sapiens; identical to SEQ ID NO: 33519

SEQ ID NO: 40841 - DNA, 609 bp, Homo sapiens; identical to SEQ ID NO: 31878

SEQ ID NO: 40842 - DNA, 493 bp, Homo sapiens
aacaactcactatagggcgaattggagctccaccgcggtggcggccgcttatttttttttttttttttttttttttttgccttgttttgtttttgaaatggaatcttgctctgttgccccaaactggagtgcagtggtgcaatcctggctcactgcaacctccgcctttggagttcaagtgattctcccgccttaattaattctagaagtactctcgagggggggcccggtacccagcttttgttccctttagtgagggttaattgcgcgcttggcgtaatcatggtcatagctgtttcctgtgtgaaattgttatccgctcacaattccacacaacatacgagccggaagcataaagtgtaaagcctggggtgcctaatgagtgagctaactcacattaattgcgttgcgctcactgcccgctttccagtcgggaaacctgtcgtgccagctgcattaatgaatcggccaacccccggggagaggcggtttg

SEQ ID NO: 40843 - DNA, 604 bp, Homo sapiens; identical to SEQ ID NO: 31880

SEQ ID NO: 40844 - DNA, 398 bp, Homo sapiens; identical to SEQ ID NO: 31881

SEQ ID NO: 40845 - DNA, 385 bp, Homo sapiens; identical to SEQ ID NO: 31882

SEQ ID NO: 40846 - DNA, 441 bp, Homo sapiens; identical to SEQ ID NO: 31883

SEQ ID NO: 40847 - DNA, 451 bp, Homo sapiens; identical to SEQ ID NO: 31825

SEQ ID NO: 40848 - DNA, 314 bp, Homo sapiens
  misc_feature 12, 13: n = A,T,C or G
ctccaccgcggnntggcggccgagggtaccatgcagggcctcctacacctacctctctctgggcttctatttcgaccgcgatgatgtggctctggaaggcgtgagccacttcttccgcgaactggccgaggagaagcgcgagggctacgagcgtctcctgaagatgcaaaaccagcgtggcggccgctctagaactagtggatcccccgggctgcaggaattcgatatcaagcttatcgataccgtcgacctcgagggggggcccggtacccagcttttgttccctttagtgagggttaattgcgcgcttggcg

SEQ ID NO: 40849 - DNA, 636 bp, Homo sapiens; identical to SEQ ID NO: 31887

SEQ ID NO: 40850 - DNA, 478 bp, Homo sapiens; identical to SEQ ID NO: 31831

SEQ ID NO: 40851 - DNA, 479 bp, Homo sapiens; identical to SEQ ID NO: 31889

SEQ ID NO: 40852 - DNA, 525 bp, Homo sapiens; identical to SEQ ID NO: 31890

SEQ ID NO: 40853 - DNA, 590 bp, Homo sapiens; identical to SEQ ID NO: 31891

SEQ ID NO: 40854 - DNA, 474 bp, Homo sapiens; identical to SEQ ID NO: 31892

SEQ ID NO: 40855 - DNA, 458 bp, Homo sapiens; identical to SEQ ID NO: 31893

SEQ ID NO: 40856 - DNA, 636 bp, Homo sapiens; identical to SEQ ID NO: 31894

SEQ ID NO: 40857 - DNA, 495 bp, Homo sapiens; identical to SEQ ID NO: 31896

SEQ ID NO: 40858 - DNA, 493 bp, Homo sapiens; identical to SEQ ID NO: 31897

SEQ ID NO: 40859 - DNA, 587 bp, Homo sapiens; identical to SEQ ID NO: 32065

SEQ ID NO: 40860 - DNA, 474 bp, Homo sapiens; identical to SEQ ID NO: 31892

SEQ ID NO: 40861 - DNA, 388 bp, Homo sapiens; identical to SEQ ID NO: 31901

SEQ ID NO: 40862 - DNA, 514 bp, Homo sapiens; identical to SEQ ID NO: 31902

SEQ ID NO: 40863 - DNA, 474 bp, Homo sapiens; identical to SEQ ID NO: 32048

SEQ ID NO: 40864 - DNA, 378 bp, Homo sapiens
tacgactcatatagggcgaattgggccctctagatgcatgctcgagcggccgccagtgtgatggatatctgcagaattcgcccttagcgtggtcgcggccgaggtacttttattctttaagaatatagtctttagccaggtgcagtggtgtgtgcctgtagtctcagctatttgagaggctgaggtgagaggatcacttgagttcaggagttcaagaccagcctgggcaacatagcaagtccctggctcaaaaaaaaaaagtttcccattcatattaactccatcttttaaaaatgtcatgattacaaagtgaaaagatttggctttcttagaggctcaatcacagaggtgaaagtgaccttggaaatcatatactct

SEQ ID NO: 40865 - DNA, 389 bp, Homo sapiens; identical to SEQ ID NO: 31905

SEQ ID NO: 40866 - DNA, 664 bp, Homo sapiens; identical to SEQ ID NO: 31907

SEQ ID NO: 40867 - DNA, 558 bp, Homo sapiens
  misc_feature 348, 520: n = A,T,C or G
tatagggcgaattggagctccccgcggtggcggccgcccgggcaggtacgcgggggtattaaaatgttctttcagttagggccaaagggcatttaacttcaaggtaagacccattccaggacggcagagatcatgtctgtcttgcgtatccctgtgtgaattttgcctgacatgttgcaaacactccgtatggaagtcttgagggtcttctgccccagtcagaaaacctctgggagaacagttatccccagacctcagacgctcgacggatacatgagaagctttctttgatggattcgatgtcaggatctccatgtgaacttccacttagaggtgtcatgctatggngcctcagcgtcaccacatcgtttggacgtctgaccagtttcctgaatttgagagtctcttactttaaacatgagggatcagccctagaaaggaaaggaaagacacacgcaagagtctgcctctgactccaccggcggccactctcaggatgggtcctccagacgggatttanacagaactgttttgatagggacagtgctttctgttgct

SEQ ID NO: 40868 - DNA, 467 bp, Homo sapiens; identical to SEQ ID NO: 31909

SEQ ID NO: 40869 - DNA, 467 bp, Homo sapiens; identical to SEQ ID NO: 31910

SEQ ID NO: 40870 - DNA, 537 bp, Homo sapiens; identical to SEQ ID NO: 31911

SEQ ID NO: 40871 - DNA, 650 bp, Homo sapiens; identical to SEQ ID NO: 31835

SEQ ID NO: 40872 - DNA, 424 bp, Homo sapiens; identical to SEQ ID NO: 31913

SEQ ID NO: 40873 - DNA, 526 bp, Homo sapiens; identical to SEQ ID NO: 31914

SEQ ID NO: 40874 - DNA, 471 bp, Homo sapiens; identical to SEQ ID NO: 31915

SEQ ID NO: 40875 - DNA, 616 bp, Homo sapiens
cggggccccccctcggaagtcttctagaattaattaacgcggggatctgctgcagctcagggctggggggaataatgagagtcccttagaaggcccaagctggaagtgacctggagtgcaacgtcggaaaattaggctcggcctcatgatctgagctaaggttgttaataatcaggcttgaagcacaggtgagattatactgaggaacaggcagcggctggcattcccactgcatgtgtgtgtggggatgggcagacttattctccatctaaggagctgggttgagacgtcttgtccttctcttcactgcctgcctttaaaactttctccatgtcgcatctcctgaagaaaggcatccttcactggcataataaagaattgatgtgaaacatttttccatgtgatgtttatctttggagggatgaaataagaatttgtctttaaaagttgagtggtaatctcagatggtggagctctttgtgcatttattcctagctggacctgtgggcaccataggtgtgtgtacagtcgaggtgggcgtagagattctccccaagaccaagggttgccccatccttccttcggaggaaatatctgctggtccctccaccagtca

SEQ ID NO: 40876 - DNA, 610 bp, Homo sapiens; identical to SEQ ID NO: 31869

SEQ ID NO: 40877 - DNA, 650 bp, Homo sapiens; identical to SEQ ID NO: 31835

SEQ ID NO: 40878 - DNA, 545 bp, Homo sapiens
aattgggtcctctagatgcatgctcgagcggccgccagtgtgatggatatctgcagaattcggcttagcggccgcccgggcaggtacacagaaagggaggtgtcaacaaaagaagataagcccatacagtgcacacctcagaaagccaagccaatgcgggcagctgctgacctggggagggagaagatcctcaggccaccagtagaaaaatggaagagacaggatgacaaagacttaagagaaaaacgttgttttatttgtggaagagaagggcacattaaaaaggaatgcccacagtttaaaggctcttcaggtagcctttccagtaaatatatgactcagggaaaagcctcagcgaagaggacccagcaggaatcatgagggaaggaaaatgcagcactctaaatggccactcaggcgttcctattcactcggaaaattaggttcatttcacaggacacagcagtgtagatcaggcttcaacttaacatttaagggaaatgtcagatttttttttaatttaatgaaattgttaatgaggaaaa

SEQ ID NO: 40879 - DNA, 567 bp, Homo sapiens; identical to SEQ ID NO: 31922

SEQ ID NO: 40880 - DNA, 610 bp, Homo sapiens; identical to SEQ ID NO: 31869

SEQ ID NO: 40881 - DNA, 483 bp, Homo sapiens; identical to SEQ ID NO: 31925

SEQ ID NO: 40882 - DNA, 381 bp, Homo sapiens; identical to SEQ ID NO: 31926

SEQ ID NO: 40883 - DNA, 538 bp, Homo sapiens; identical to SEQ ID NO: 31927

SEQ ID NO: 40884 - DNA, 461 bp, Homo sapiens; identical to SEQ ID NO: 31928

SEQ ID NO: 40885 - DNA, 531 bp, Homo sapiens; identical to SEQ ID NO: 30497

SEQ ID NO: 40886 - DNA, 452 bp, Homo sapiens; identical to SEQ ID NO: 31930

SEQ ID NO: 40887 - DNA, 474 bp, Homo sapiens; identical to SEQ ID NO: 32048

SEQ ID NO: 40888 - DNA, 447 bp, Homo sapiens; identical to SEQ ID NO: 31932

SEQ ID NO: 40889 - DNA, 388 bp, Homo sapiens; identical to SEQ ID NO: 31933

SEQ ID NO: 40890 - DNA, 472 bp, Homo sapiens; identical to SEQ ID NO: 31853

SEQ ID NO: 40891 - DNA, 379 bp, Homo sapiens; identical to SEQ ID NO: 31937

SEQ ID NO: 40892 - DNA, 458 bp, Homo sapiens; identical to SEQ ID NO: 31938

SEQ ID NO: 40893 - DNA, 465 bp, Homo sapiens; identical to SEQ ID NO: 31939

SEQ ID NO: 40894 - DNA, 432 bp, Homo sapiens; identical to SEQ ID NO: 31940

SEQ ID NO: 40895 - DNA, 389 bp, Homo sapiens; identical to SEQ ID NO: 31941

SEQ ID NO: 40896 - DNA, 468 bp, Homo sapiens; identical to SEQ ID NO: 31942

SEQ ID NO: 40897 - DNA, 483 bp, Homo sapiens; identical to SEQ ID NO: 31925

SEQ ID NO: 40898 - DNA, 397 bp, Homo sapiens; identical to SEQ ID NO: 31944

SEQ ID NO: 40899 - DNA, 610 bp, Homo sapiens; identical to SEQ ID NO: 31869

SEQ ID NO: 40900 - DNA, 585 bp, Homo sapiens; identical to SEQ ID NO: 31946

SEQ ID NO: 40901 - DNA, 397 bp, Homo sapiens; identical to SEQ ID NO: 31948

SEQ ID NO: 40902 - DNA, 478 bp, Homo sapiens; identical to SEQ ID NO: 31949

SEQ ID NO: 40903 - DNA, 395 bp, Homo sapiens; identical to SEQ ID NO: 31952

SEQ ID NO: 40904 - DNA, 447 bp, Homo sapiens; identical to SEQ ID NO: 31953

SEQ ID NO: 40905 - DNA, 692 bp, Homo sapiens; identical to SEQ ID NO: 31954

SEQ ID NO: 40906 - DNA, 394 bp, Homo sapiens; identical to SEQ ID NO: 31955

SEQ ID NO: 40907 - DNA, 437 bp, Homo sapiens; identical to SEQ ID NO: 31956

SEQ ID NO: 40908 - DNA, 428 bp, Homo sapiens; identical to SEQ ID NO: 31957

SEQ ID NO: 40909 - DNA, 393 bp, Homo sapiens; identical to SEQ ID NO: 31945

SEQ ID NO: 40910 - DNA, 610 bp, Homo sapiens; identical to SEQ ID NO: 31869

SEQ ID NO: 40911 - DNA, 357 bp, Homo sapiens
ttggagctcaccgcggtggcggccgaggtacgcggggggcgccattttgtagagaaacaagcggagttaaccgaagagggggtcgaggagagccggagtcggggacccaggagtttcctgtgtccagcgctgctggagccgcctgaggtgccatgtttcagaacagagtaagacccctggtaaagaagaactgaagatattatacagataccagatatagcctaattacaaagaaagcattaacctgcctctgaggtgactaaaggggaataatggtgattttgcgccgggctcggccgctctagaactagtggatcccccgggctgcaggaattcgatatcaagcttatcgatacc

SEQ ID NO: 40912 - DNA, 463 bp, Homo sapiens
ctccaccgcggtggcggccgaggtacgcggggacttaaaattgagacacagtatattaagcagtttttgtaaggtgttagaataaaacttcaataatatcagaaacagaaatgtagaggatgcatgaggaacttactggattttatgacttcatcattatgttatttattacttctgataaataggcttgcttcatctgaatgcaaagtaatatataacctggaatttttaaagttttttttgtttttggcacgagagtatcacaggaaattcaaaggtttaactgcgtaagaaacaactgcaaaaccagtggctaaaaacaataaagaattattaggtaatgatgtgggttggaaattttcctgggatctgctggaccttgctttgctgctgttgccttgactcacttgtgcagcgccactctgcttggaacttcctgataagctagcagatggcttgggca

SEQ ID NO: 40913 - DNA, 402 bp, Homo sapiens; identical to SEQ ID NO: 31963

SEQ ID NO: 40914 - DNA, 445 bp, Homo sapiens; identical to SEQ ID NO: 31529

SEQ ID NO: 40915 - DNA, 486 bp, Homo sapiens; identical to SEQ ID NO: 31965

SEQ ID NO: 40916 - DNA, 443 bp, Homo sapiens; identical to SEQ ID NO: 33487

SEQ ID NO: 40917 - DNA, 373 bp, Homo sapiens; identical to SEQ ID NO: 31967

SEQ ID NO: 40918 - DNA, 422 bp, Homo sapiens; identical to SEQ ID NO: 30936

SEQ ID NO: 40919 - DNA, 468 bp, Homo sapiens; identical to SEQ ID NO: 31969

SEQ ID NO: 40920 - DNA, 192 bp, Homo sapiens; identical to SEQ ID NO: 31970

SEQ ID NO: 40921 - DNA, 610 bp, Homo sapiens; identical to SEQ ID NO: 31869

SEQ ID NO: 40922 - DNA, 406 bp, Homo sapiens
actcactatagggcgaattggagctccaccgcggtggcggccgaggtacgtctgacacagacaataaaaactgcacaagccagaatgcaaaacttcagtgagtggcggaaggaacatttctgcatttgacaagaaacataagcttttttttttttctttttttaaatggcggaacaaaaggttaaaaacagaaaagcaacaagaacaaagcagacccttacatttgacaaagtgcacttcacttggctccatgatctatttcttagaaagactaaacaaaagtcaagtcctacggtgtcgcgaggggtcagagggtttcaccctgtaacgtccggcccttttggtcccccttggggcagcatccctttcccaggtgtgtgctggacctgactctcggtcactgtga

SEQ ID NO: 40923 - DNA, 397 bp, Homo sapiens; identical to SEQ ID NO: 32033

SEQ ID NO: 40924 - DNA, 553 bp, Homo sapiens; identical to SEQ ID NO: 32095

SEQ ID NO: 40925 - DNA, 388 bp, Homo sapiens; identical to SEQ ID NO: 31933

SEQ ID NO: 40926 - DNA, 265 bp, Homo sapiens
acgatcactatagggcgaattggagctccaccgcggtggcggccgcccgggcaggtacataattggagatgaataatgattctcttagataaagaaacttgtccacccacctctaccacaaatgaaaatcctttttcttatagaactttttggccaagcaaaggctcatgatatctgtaatatctgtgatagataaagcattgaggataagttcttattccacagttccagcatgaacattctagtaatggactgattgggcctt

SEQ ID NO: 40927 - DNA, 455 bp, Homo sapiens; identical to SEQ ID NO: 31971

SEQ ID NO: 40928 - DNA, 347 bp, Homo sapiens; identical to SEQ ID NO: 31980

SEQ ID NO: 40929 - DNA, 610 bp, Homo sapiens; identical to SEQ ID NO: 31869

SEQ ID NO: 40930 - DNA, 445 bp, Homo sapiens; identical to SEQ ID NO: 31982

SEQ ID NO: 40931 - DNA, 268 bp, Homo sapiens
ttggagctccaccgcggtggcggccgcccgggcaggtactggatttatgcaaatgtcttttctgcgtcttttgagatgagtatcaggttttttttttccttttatcatctgatgatgaacttaatgtttccatttgtattaatggaatactaagtccctctgtgatttctgaaccaagctattcctaggcctgagttttattttgttgacacagaaataaattagaaggccaagcgtggtggcatgtgcctgtagtcctagttgctga

SEQ ID NO: 40932 - DNA, 400 bp, Homo sapiens; identical to SEQ ID NO: 31984

SEQ ID NO: 40933 - DNA, 307 bp, Homo sapiens; identical to SEQ ID NO: 31985

SEQ ID NO: 40934 - DNA, 717 bp, Homo sapiens; identical to SEQ ID NO: 31986

SEQ ID NO: 40935 - DNA, 306 bp, Homo sapiens; identical to SEQ ID NO: 31987

SEQ ID NO: 40936 - DNA, 465 bp, Homo sapiens; identical to SEQ ID NO: 31989

SEQ ID NO: 40937 - DNA, 455 bp, Homo sapiens; identical to SEQ ID NO: 31990

SEQ ID NO: 40938 - DNA, 235 bp, Homo sapiens; identical to SEQ ID NO: 31991

SEQ ID NO: 40939 - DNA, 649 bp, Homo sapiens
agctccaccgcggtggcggccgaggtaccacagttgctcacgggttcaccatcgcactttgttgcacatctgggttgtcctgagaggggagccggcaaccatgggaacctggatggggctgtgctgcttgttcgtgaccagatccagcttttcttctaaggatttacaagtagcctccagggcttgcaatttggcttcaatgctatccaaccgcaagcagattgtctggttgatggaatacaggaatgactggaagtgagaaaagaccggctttaggaagggtctcctgaactgtaagaagacaaccccaagaaacaccaaacagctatttcctgatctcaactctgtctatatccccgcgtacctgcccgggcggccgctctagaactagtggatcccccgggctgcaggaattcgatatcaagcttatcgataccgtcgacctcgagggggggcccggtacccagcttttgttccctttagtgagggttaattgcgcgcttggcgtaatcatggtcatagctgtttcctgtgtgaaattgttatccgctcacaattccacacaacatacgagccgggagcataaagtgtaaagcctggggtgcctaatgagtgagctaactcacattaattgcgttgcgctcactgc

SEQ ID NO: 40940 - DNA, 472 bp, Homo sapiens; identical to SEQ ID NO: 31994

SEQ ID NO: 40941 - DNA, 398 bp, Homo sapiens; identical to SEQ ID NO: 31995

SEQ ID NO: 40942 - DNA, 529 bp, Homo sapiens
  misc_feature 303: n = A,T,C or G
gactcactatagggcgaattggagctccaccgcggtggcggccgaggtacagggctgggtcctggggacaaagcagtgggcaaggcagagtgccatgttatagctggcgcaacagccaagggcagcagatgactgggagaacaaggtgatttcagagagtggtctatgctaggaagaaaaaacaggtttgtccttaggagtgagggttactttagatagggtgaccagtgagggcttcttggagacggtggcgtttgaactgagaccttaatgccaagaaacaacccccatagcaagacctgngcacagagggacctacaaaggcaacggcccagtgccagggactgagcttgggagctgaggaaataaaagccagcccttccccagctgtccattgcttgatctcatgcttttttctctccacttgagccagcctgagatagctttcgccactagccctggagaaggcaaggttttctgtccacaccctctctctgcttgcacactctgggccttcttagcttgatcc

SEQ ID NO: 40943 - DNA, 620 bp, Homo sapiens
  misc_feature 513: n = A,T,C or G
cgggcccccccctcggggtacttctagcaataattaacgcgggtaagctggggcttcatgacaatcactgggttcctgcctgccacagctttaatcgggcaatccataagaaagcaaaagggactgaagctgaagaggaatactaaagtccatgtgagaggcaacaaaaggaccggtttctaaagctgcaaaacacctagatacaccgttcaaatgagcgtagccccctgagtcatcactctagaagaatctgtacatcatcaggactgcattgctcaggcattttctaaactctaaatttacgagctgtacaaaaaaattggtcttgttgtttatagtggcatctcatgtttgaacccgggtggtatcccacagttggattcagttggctgtgaataactgcctgttttcctaaatcaaacccatcctcaaaggatgaagactcaccaccatccaggacattcagaagagttcactgcagatgctgcagatcagccactcttgatctggttntcatgtgggacacaaagctgtgactgcgtgaggggttaaagtgaccaagagcagagggcacacccttacttgatcatctgaagcaaaaaccagaccagggaaactag

SEQ ID NO: 40944 - DNA, 558 bp, Homo sapiens; identical to SEQ ID NO: 31998
  misc_feature 172, 304, 316, 323: n = A,T,C or G

SEQ ID NO: 40945 - DNA, 384 bp, Homo sapiens; identical to SEQ ID NO: 31999

SEQ ID NO: 40946 - DNA, 401 bp, Homo sapiens; identical to SEQ ID NO: 32000

SEQ ID NO: 40947 - DNA, 450 bp, Homo sapiens; identical to SEQ ID NO: 31857

SEQ ID NO: 40948 - DNA, 630 bp, Homo sapiens; identical to SEQ ID NO: 31988

SEQ ID NO: 40949 - DNA, 412 bp, Homo sapiens; identical to SEQ ID NO: 32003

SEQ ID NO: 40950 - DNA, 374 bp, Homo sapiens; identical to SEQ ID NO: 32005

SEQ ID NO: 40951 - DNA, 496 bp, Homo sapiens; identical to SEQ ID NO: 32006

SEQ ID NO: 40952 - DNA, 191 bp, Homo sapiens; identical to SEQ ID NO: 32007

SEQ ID NO: 40953 - DNA, 384 bp, Homo sapiens; identical to SEQ ID NO: 32008

SEQ ID NO: 40954 - DNA, 467 bp, Homo sapiens; identical to SEQ ID NO: 32010

SEQ ID NO: 40955 - DNA, 503 bp, Homo sapiens; identical to SEQ ID NO: 32011

SEQ ID NO: 40956 - DNA, 583 bp, Homo sapiens
tacgactactactactcactatagggcgaattggagctccaccgcggtggcggccgcccgggcaggtacttttttttctttttttttttttttggtagagatgggacttcctacgttgctcaggctcgtcttgaactcctgagttcaagtgatccacccaccttggcctttcaaagtgctgagattacaggtgtgagccaccacacctggccaaaataataaaattttaatcagtaaaaaaaaaaaaaaagaaaagtgtaaatgtgttcatccaacaaagcctttctttcacacatatgaaatataaatagatccatttaaatacgatatccagttgaaccagccctgaagggctttctgaattggacatgttctgtcgctaccagtggggcttcctggaagctggcccagagctggtcttgtccacgcagaggatctgaaagcaccctgtgtcctcgccatcaccctgccccaggacagcaacagaaagcactgtccctatcaaaacagttctgtttaaatcccgtctggaggacccatcctgagagtggtcgccggtggagtcagaagcagactcttgcgt

SEQ ID NO: 40957 - DNA, 473 bp, Homo sapiens; identical to SEQ ID NO: 32013

SEQ ID NO: 40958 - DNA, 467 bp, Homo sapiens; identical to SEQ ID NO: 32015

SEQ ID NO: 40959 - DNA, 553 bp, Homo sapiens; identical to SEQ ID NO: 32095

SEQ ID NO: 40960 - DNA, 453 bp, Homo sapiens; identical to SEQ ID NO: 32017

SEQ ID NO: 40961 - DNA, 394 bp, Homo sapiens; identical to SEQ ID NO: 32018

SEQ ID NO: 40962 - DNA, 470 bp, Homo sapiens; identical to SEQ ID NO: 32019

SEQ ID NO: 40963 - DNA, 594 bp, Homo sapiens; identical to SEQ ID NO: 32020

SEQ ID NO: 40964 - DNA, 452 bp, Homo sapiens; identical to SEQ ID NO: 32022

SEQ ID NO: 40965 - DNA, 247 bp, Homo sapiens
ctccaccgcggtggcggccgaggtacagatggggtttcaccatgttggccaggctggtcttgaactcctgacctcagatgatccacccgcctcagcctctcaaagtgttgagattacaggcttgagccattgcgccagccctacctttgttttcttaatagtaggaaaaatatgcctttatttctgttatgatttttcagagaggtagagataatagatgcaaactcttggaaggaaagctgtacct

SEQ ID NO: 40966 - DNA, 477 bp, Homo sapiens; identical to SEQ ID NO: 32024

SEQ ID NO: 40967 - DNA, 613 bp, Homo sapiens; identical to SEQ ID NO: 32025

SEQ ID NO: 40968 - DNA, 487 bp, Homo sapiens; identical to SEQ ID NO: 32026

SEQ ID NO: 40969 - DNA, 647 bp, Homo sapiens; identical to SEQ ID NO: 32027

SEQ ID NO: 40970 - DNA, 566 bp, Homo sapiens; identical to SEQ ID NO: 32028

SEQ ID NO: 40971 - DNA, 452 bp, Homo sapiens; identical to SEQ ID NO: 31923

SEQ ID NO: 40972 - DNA, 479 bp, Homo sapiens; identical to SEQ ID NO: 32032

SEQ ID NO: 40973 - DNA, 630 bp, Homo sapiens; identical to SEQ ID NO: 31988

SEQ ID NO: 40974 - DNA, 388 bp, Homo sapiens; identical to SEQ ID NO: 31901

SEQ ID NO: 40975 - DNA, 448 bp, Homo sapiens; identical to SEQ ID NO: 32035

SEQ ID NO: 40976 - DNA, 515 bp, Homo sapiens; identical to SEQ ID NO: 32036
  misc_feature 226: n = A,T,C or G

SEQ ID NO: 40977 - DNA, 479 bp, Homo sapiens; identical to SEQ ID NO: 32037

SEQ ID NO: 40978 - DNA, 391 bp, Homo sapiens; identical to SEQ ID NO: 32038

SEQ ID NO: 40979 - DNA, 650 bp, Homo sapiens; identical to SEQ ID NO: 31835

SEQ ID NO: 40980 - DNA, 458 bp, Homo sapiens; identical to SEQ ID NO: 32040

SEQ ID NO: 40981 - DNA, 477 bp, Homo sapiens; identical to SEQ ID NO: 32041

SEQ ID NO: 40982 - DNA, 609 bp, Homo sapiens; identical to SEQ ID NO: 32039

SEQ ID NO: 40983 - DNA, 572 bp, Homo sapiens; identical to SEQ ID NO: 32043

SEQ ID NO: 40984 - DNA, 480 bp, Homo sapiens
actactatagggcgaattggagctccaccgcggtggcggccgcccgggcaggtaccttttttttttttttttttttttttacaaatgaacaaatatttatttatcttttataacaagtaaggcaatgttgcttaaaggaagacaaacaaacataaaagattccgttgacaatgcattttttcatctgttcggcacaatgcttttgtcataatggagatgtgacagcaaactttccaggacattcagtcttcggcggcagcacttagggcagatgactggccgcttatagatgaggccaaagcaccaggtaggtggaaggttcttgcatcggttcgaaccccgacagcgcgccaacagacaacacgaggcagtggggagcaacatgctgttttaatgagcgcctgggtgcaggcgtgctgaggctgaaaatggcatcagccccgcgtacctcggccgctctagaactagtggatcccccgg

SEQ ID NO: 40985 - DNA, 452 bp, Homo sapiens; identical to SEQ ID NO: 32022

SEQ ID NO: 40986 - DNA, 621 bp, Homo sapiens; identical to SEQ ID NO: 32046

SEQ ID NO: 40987 - DNA, 370 bp, Homo sapiens; identical to SEQ ID NO: 32047

SEQ ID NO: 40988 - DNA, 474 bp, Homo sapiens; identical to SEQ ID NO: 32048

SEQ ID NO: 40989 - DNA, 487 bp, Homo sapiens
agggcgaattgggccctctagatgcatgctcgagcggccgccagtgtgatggatatctgcagaattcgccctttcgagcggccgcccgggcaggtacctaaccataccctctttggactgcagaaaactgatggcaacatctcggggagtggctgcccaccaaagaggaccctgagaaagaaaagagcataacctgggaaatgggctacatgggggcaagggacatggtgagcgggcaaagttgagatggtgttttccttgagtgaatgtctttcaaaactaacaacatactgtgtagttgtctaacatgctgatggaggaacactgctgggccctgaaatcctagctttgaatccattttttccctttagtattgtgagtagagggagaaaatgaccttatgttttcccccacgacacaagtcaccgtcattatggctttcatatcaagtatctgtttccctttgttccaattatttgaccaaatt

SEQ ID NO: 40990 - DNA, 567 bp, Homo sapiens; identical to SEQ ID NO: 32094

SEQ ID NO: 40991 - DNA, 474 bp, Homo sapiens; identical to SEQ ID NO: 32051

SEQ ID NO: 40992 - DNA, 596 bp, Homo sapiens; identical to SEQ ID NO: 32052

SEQ ID NO: 40993 - DNA, 349 bp, Homo sapiens; identical to SEQ ID NO: 32053
  misc_feature 322: n = A,T,C or G

SEQ ID NO: 40994 - DNA, 449 bp, Homo sapiens
gactactatagggcgaattggagctccaccgcggtggcggccgcccgggcaggtacggggggggagaccagcctacagccgcctgcatctgtatccagcgccaggtcccgccagtgccagctacgcgcgccccccagtcccgcacccgttctgcccaggctaagttagccctcaccatgccggtcaaaggaggcccaagggcatcaaatacctgctgttcggatttaacttcatcttctggcttgccgggattgctgtccttgccattggactatggctccgattcgactctcagaccaagagcatcttcgagcaagaaactaataataataattccagcttctacacaggagtctatattctgatcggagccggcgccctcatgatgctggtgggcttcctgggctgctgcggggctgtgcaggagtcccagtgcatgctgggactgt

SEQ ID NO: 40995 - DNA, 441 bp, Homo sapiens; identical to SEQ ID NO: 32055

SEQ ID NO: 40996 - DNA, 481 bp, Homo sapiens; identical to SEQ ID NO: 32056

SEQ ID NO: 40997 - DNA, 453 bp, Homo sapiens; identical to SEQ ID NO: 32057

SEQ ID NO: 40998 - DNA, 437 bp, Homo sapiens; identical to SEQ ID NO: 32058

SEQ ID NO: 40999 - DNA, 478 bp, Homo sapiens; identical to SEQ ID NO: 32059

SEQ ID NO: 41000 - DNA, 461 bp, Homo sapiens; identical to SEQ ID NO: 32416

SEQ ID NO: 41001 - DNA, 460 bp, Homo sapiens; identical to SEQ ID NO: 30978

SEQ ID NO: 41002 - DNA, 455 bp, Homo sapiens; identical to SEQ ID NO: 32062

SEQ ID NO: 41003 - DNA, 586 bp, Homo sapiens
ctactatagggcgaattggagctccaccgcggtggcggccgccggtggagtcagaggcagactcttgcgtgtgtctttcctttcctttctagggctgatccctcatgtttaaagtaagagactctcaaagtcaggaaactggtcagacgtccaaacgatgtggtgacgctgaggccccatagcatgacacctctaagtggaagttcacatggagatcctgacatcgaatccatcaaagaaagcttctcatgtatccgtcgagcgtctgaggtctggggataactgttctcccagaggttttctgactggggcagaagaccctcaagacttccatacggagtgtttgcaacatgtcaggcaaaattcacacagggatacgcatgacagacatgatctctaccgtcctggaatgggtcttaccttgaagttaaatgccctttggccctaactgaaagaacattttaataccaaattttaaaaactgagctccccgcgtacctcggccgctctagaactagtggatcccccgggctgcaggaattcgatatcaagcttatcgataccgtctacctcgagggggggcccg

SEQ ID NO: 41004 - DNA, 650 bp, Homo sapiens; identical to SEQ ID NO: 31835

SEQ ID NO: 41005 - DNA, 212 bp, Homo sapiens; identical to SEQ ID NO: 32064

SEQ ID NO: 41006 - DNA, 587 bp, Homo sapiens; identical to SEQ ID NO: 32065

SEQ ID NO: 41007 - DNA, 479 bp, Homo sapiens; identical to SEQ ID NO: 32066

SEQ ID NO: 41008 - DNA, 187 bp, Homo sapiens; identical to SEQ ID NO: 32067

SEQ ID NO: 41009 - DNA, 443 bp, Homo sapiens; identical to SEQ ID NO: 32069

SEQ ID NO: 41010 - DNA, 400 bp, Homo sapiens; identical to SEQ ID NO: 32070

SEQ ID NO: 41011 - DNA, 474 bp, Homo sapiens; identical to SEQ ID NO: 32048

SEQ ID NO: 41012 - DNA, 614 bp, Homo sapiens; identical to SEQ ID NO: 32072
  misc_feature 492, 530, 550: n = A,T,C or G

SEQ ID NO: 41013 - DNA, 402 bp, Homo sapiens; identical to SEQ ID NO: 32073

SEQ ID NO: 41014 - DNA, 393 bp, Homo sapiens; identical to SEQ ID NO: 32074

SEQ ID NO: 41015 - DNA, 213 bp, Homo sapiens; identical to SEQ ID NO: 32075

SEQ ID NO: 41016 - DNA, 449 bp, Homo sapiens; identical to SEQ ID NO: 32076

SEQ ID NO: 41017 - DNA, 467 bp, Homo sapiens; identical to SEQ ID NO: 31909

SEQ ID NO: 41018 - DNA, 386 bp, Homo sapiens; identical to SEQ ID NO: 32078

SEQ ID NO: 41019 - DNA, 472 bp, Homo sapiens; identical to SEQ ID NO: 31994

SEQ ID NO: 41020 - DNA, 610 bp, Homo sapiens; identical to SEQ ID NO: 31869

SEQ ID NO: 41021 - DNA, 636 bp, Homo sapiens
atacgactcatatagggcgaattggagctccaccgcggtggcggccgcccgggcaggtacgagtttcgtggcagcgcctccgctctgctagcccggggcccgggtcggcctaacgtcacttggctcggctgactcagatgacccggtttctagtgacgaagcaaaagtggggctttttcccttttctagtctgaagctctcaggaggaaagaaaaaaaaaagtctgtattctccagtctcccggggttgaactttgggtcaggaatcaggagggaggaagcaaagagcaggaggggcgcgagactgggccgcagcccgcgctcggaaggtggcgtgtacctcggccgctctagaactagtggatcccccgggctgcaggaattcgatatcaagcttatcgataccgtcgacctcgagggggggcccggtacccagcttttgttccctttagtgagggttaattgcgcgcttggcgtaatcatggtcatagctgtttcctgtgtgaaattgttatccgctcacaattccacacaacatacgagccgggagcataaagtgtaaagcctggggtgcctaatgagtgagctaactcacattaattgcgttgcgctcactgcccgctttccagtcgggaaa

SEQ ID NO: 41022 - DNA, 432 bp, Homo sapiens; identical to SEQ ID NO: 32083

SEQ ID NO: 41023 - DNA, 384 bp, Homo sapiens; identical to SEQ ID NO: 32084

SEQ ID NO: 41024 - DNA, 481 bp, Homo sapiens; identical to SEQ ID NO: 32056

SEQ ID NO: 41025 - DNA, 387 bp, Homo sapiens; identical to SEQ ID NO: 32086

SEQ ID NO: 41026 - DNA, 610 bp, Homo sapiens; identical to SEQ ID NO: 31869

SEQ ID NO: 41027 - DNA, 506 bp, Homo sapiens; identical to SEQ ID NO: 40798

SEQ ID NO: 41028 - DNA, 398 bp, Homo sapiens; identical to SEQ ID NO: 32089

SEQ ID NO: 41029 - DNA, 406 bp, Homo sapiens; identical to SEQ ID NO: 32090

SEQ ID NO: 41030 - DNA, 458 bp, Homo sapiens; identical to SEQ ID NO: 31947

SEQ ID NO: 41031 - DNA, 630 bp, Homo sapiens; identical to SEQ ID NO: 31988

SEQ ID NO: 41032 - DNA, 630 bp, Homo sapiens; identical to SEQ ID NO: 31988

SEQ ID NO: 41033 - DNA, 567 bp, Homo sapiens; identical to SEQ ID NO: 32094

SEQ ID NO: 41034 - DNA, 553 bp, Homo sapiens; identical to SEQ ID NO: 32095

SEQ ID NO: 41035 - DNA, 190 bp, Homo sapiens; identical to SEQ ID NO: 32096

SEQ ID NO: 41036 - DNA, 427 bp, Homo sapiens; identical to SEQ ID NO: 32097

SEQ ID NO: 41037 - DNA, 610 bp, Homo sapiens; identical to SEQ ID NO: 31869

SEQ ID NO: 41038 - DNA, 331 bp, Homo sapiens; identical to SEQ ID NO: 32099

SEQ ID NO: 41039 - DNA, 400 bp, Homo sapiens; identical to SEQ ID NO: 32100

SEQ ID NO: 41040 - DNA, 200 bp, Homo sapiens
gacttacttttttcctaattggagctccaccgcggtggcggccgctctagaactagtggattcccccgggctgcaggaatttcgattattcaagcttattcgaatccgtcgacctcgaggggggcccggtacccagcttttgttccctttagtgagggttaattgcgcgcttggcgtaatcatggtcatagctgtttcct

SEQ ID NO: 41041 - DNA, 599 bp, Homo sapiens; identical to SEQ ID NO: 32102
  misc_feature 519: n = A,T,C or G

SEQ ID NO: 41042 - DNA, 463 bp, Homo sapiens; identical to SEQ ID NO: 32103

SEQ ID NO: 41043 - DNA, 695 bp, Homo sapiens
  misc_feature 556, 587: n = A,T,C or G
tggagctccaccgcggtggcggccgaggtacaaagagtagctgccccttctcagggcagatgatgctttgagaacatactttggccattacccccagctttgaggaaaatgggctttggatgattattttatgttttagggacccccaacctcaggcaattcctacctcttcacctgaccctgcccccacttgccataaaacttagctaagttttgttttgtttttcagcgttaatgtaaaggggcagcagtgccaaaatataatcagagataaagcttaggtcaaagttcatagagttcccatgaactatatgactggccacacaggatcttttgtatttaaggattctgagattttgcttgagcaggattagataaggctgttctttaaatgtctgaaatggaacagatttcaaaaaaaaccccacaatctagggtgggaacaaggaaggaaagatgtgaataggctgatgggcaaaaaaccaatttacccatcagttccagccttctctcaaggagaggcaaagaaaggagatacagtggagacatctggaangttttctccactggaaaactgctactatctngttttatatttctggtaaaatatatgaggctacagaactaagaattaaaacctctttgtgtcccttggtcctggaacatttatgttccttttaaagaaacgaaaatca

SEQ ID NO: 41044 - DNA, 404 bp, Homo sapiens; identical to SEQ ID NO: 32105

SEQ ID NO: 41045 - DNA, 184 bp, Homo sapiens; identical to SEQ ID NO: 32106

SEQ ID NO: 41046 - DNA, 579 bp, Homo sapiens; identical to SEQ ID NO: 32107

SEQ ID NO: 41047 - DNA, 446 bp, Homo sapiens; identical to SEQ ID NO: 32188

SEQ ID NO: 41048 - DNA, 444 bp, Homo sapiens; identical to SEQ ID NO: 32109

SEQ ID NO: 41049 - DNA, 580 bp, Homo sapiens
gactactatatggcgaattggagctccaccgcggtggcggccgaggtcagatctgggaactaaatattaaaaatgagtgtggctggatatatggagaatgttgggcccagaaggaaccgtagagatcagatattacaacagctttgttttgagggttagaaatatgaaatgatttggttatgaacgcacagtttaggcagcagggccagaatcctgaccctctgccccgtggttatctcctgcccagcttggctgcctcatgtcatcacagtattccattttgtttgttgcatgtcttgtgaagccatcaagattttctcgtctgttttcctctcattggtaatgctcactttgtgacttcatttcaaatctgtaatcccgttcaaataaatatccacaacaggatctgttttcctgcccatcctttaaggaacacatcaattcattttctaatgtccttccctcacaagcgggaccaggcacagggcgaggctcatcgatgacccaagatggcggccgctctataactagtggatcccccgggctgcaggaattcgatatcaagcttatcgataccgtc

SEQ ID NO: 41050 - DNA, 396 bp, Homo sapiens; identical to SEQ ID NO: 32111

SEQ ID NO: 41051 - DNA, 413 bp, Homo sapiens
tacactactatagggcgaattggagctccaccgcggtggcggccgggcatttctcccagggatctctgtgcttccttttgtgcttcctgtgtgtgtggatatttaaaggggctggaaatgtgcaaaaacatgtcactacttagacattatattgtcatcttgctgtttctagtgatgttaattatctccatttcaccagatgtgtggcctcacatgggcaagtcaacaccctttcttatttctaacctctgtatcatcagggtccttcccaccatgcagatcttcctggtcttcctcggctgcagccacacaaatctcccctctgtttttctgatgccagcttctcggcccttgctatttttccccgcgtacctcggcccgtttagaactagtggatcccccgggctgcagga

SEQ ID NO: 41052 - DNA, 530 bp, Homo sapiens; identical to SEQ ID NO: 32113

SEQ ID NO: 41053 - DNA, 438 bp, Homo sapiens; identical to SEQ ID NO: 32114

SEQ ID NO: 41054 - DNA, 616 bp, Homo sapiens; identical to SEQ ID NO: 32115

SEQ ID NO: 41055 - DNA, 410 bp, Homo sapiens; identical to SEQ ID NO: 32116

SEQ ID NO: 41056 - DNA, 571 bp, Homo sapiens; identical to SEQ ID NO: 32117

SEQ ID NO: 41057 - DNA, 367 bp, Homo sapiens; identical to SEQ ID NO: 32119

SEQ ID NO: 41058 - DNA, 452 bp, Homo sapiens; identical to SEQ ID NO: 32120

SEQ ID NO: 41059 - DNA, 447 bp, Homo sapiens; identical to SEQ ID NO: 32121

SEQ ID NO: 41060 - DNA, 586 bp, Homo sapiens; identical to SEQ ID NO: 32122

SEQ ID NO: 41061 - DNA, 294 bp, Homo sapiens; identical to SEQ ID NO: 32123

SEQ ID NO: 41062 - DNA, 398 bp, Homo sapiens; identical to SEQ ID NO: 33789

SEQ ID NO: 41063 - DNA, 443 bp, Homo sapiens; identical to SEQ ID NO: 32125

SEQ ID NO: 41064 - DNA, 579 bp, Homo sapiens; identical to SEQ ID NO: 32126

SEQ ID NO: 41065 - DNA, 565 bp, Homo sapiens; identical to SEQ ID NO: 32127
  misc_feature 13, 472, 473, 474, 475, 476, 478, 480, 481, 487, 488, 490: n = A,T,C or G

SEQ ID NO: 41066 - DNA, 426 bp, Homo sapiens; identical to SEQ ID NO: 32128

SEQ ID NO: 41067 - DNA, 307 bp, Homo sapiens; identical to SEQ ID NO: 31441

SEQ ID NO: 41068 - DNA, 458 bp, Homo sapiens
acgactactatagggcgaattggagctccaccgcggtggcggccgaagcagtaggtgttctcctcaaacttgttggcactgtccgcaagactggggtgcacaactccatggttgcctgtcagccccaggtccacagttcggcccagggagtcccgaagcctccggccaacggtatccatgactgtgctcattttggcctgtttaagctcatggatcctggtagtcaggatgcggccgctctagaactagtggatcccccgggctgcaggaattcgatatcaagcttatcgataccgtcgacctcgagggggggcccggtacccagcttttgttccctttagtgagggttaattgcgcgcttggcgtaatcatggtcatagctgtttcctgtgtgaaattgttatccgctcacaattccacacaacatacgagccgggagcataaagtgtaaagcctgg

SEQ ID NO: 41069 - DNA, 462 bp, Homo sapiens; identical to SEQ ID NO: 32131

SEQ ID NO: 41070 - DNA, 410 bp, Homo sapiens; identical to SEQ ID NO: 36185

SEQ ID NO: 41071 - DNA, 424 bp, Homo sapiens; identical to SEQ ID NO: 32133

SEQ ID NO: 41072 - DNA, 397 bp, Homo sapiens; identical to SEQ ID NO: 32134

SEQ ID NO: 41073 - DNA, 446 bp, Homo sapiens; identical to SEQ ID NO: 32135

SEQ ID NO: 41074 - DNA, 693 bp, Homo sapiens; identical to SEQ ID NO: 32215
  misc_feature 365: n = A,T,C or G

SEQ ID NO: 41075 - DNA, 432 bp, Homo sapiens; identical to SEQ ID NO: 32137

SEQ ID NO: 41076 - DNA, 461 bp, Homo sapiens; identical to SEQ ID NO: 32138

SEQ ID NO: 41077 - DNA, 215 bp, Homo sapiens; identical to SEQ ID NO: 32139

SEQ ID NO: 41078 - DNA, 677 bp, Homo sapiens; identical to SEQ ID NO: 32140

SEQ ID NO: 41079 - DNA, 317 bp, Homo sapiens; identical to SEQ ID NO: 32141

SEQ ID NO: 41080 - DNA, 477 bp, Homo sapiens; identical to SEQ ID NO: 32142

SEQ ID NO: 41081 - DNA, 385 bp, Homo sapiens; identical to SEQ ID NO: 35877

SEQ ID NO: 41082 - DNA, 580 bp, Homo sapiens
ggccctctaaagcatgctcgagcggccgccagtgtgatggatatctgcagaattcggctttcgagcggccgcccgggcaggtactggtgctacaccatgcgctcgtggttcctgagggcacaattcattcattcgtgaaacagggcaaatttgagattcagacctccaaggctccaagctacattgctttattggaggcggccactccggatgatcccaatgaggagccgactgctcctcaaggcccttccttgttttaaacatcttggcatatatggcttctctattttaggagcagctgaaggtcccacgtgctcctcaaaagaaattaactcatctccaggtttgtctgtattttcctcaaaatcttcttcactatcctctcctccttcagcagcatcaccaccttcctctgcagaaattctttctgctggaggataagcctcattttccgattgaaacggttccgaggctgctttaactatagcccagtttgaccaggctgttagggggataaattttccttccttacaaacttgttttaaggcaattcccacctgttcccaatctttgaagtcca

SEQ ID NO: 41083 - DNA, 712 bp, Homo sapiens; identical to SEQ ID NO: 32146

SEQ ID NO: 41084 - DNA, 300 bp, Homo sapiens; identical to SEQ ID NO: 32147

SEQ ID NO: 41085 - DNA, 449 bp, Homo sapiens; identical to SEQ ID NO: 32148

SEQ ID NO: 41086 - DNA, 552 bp, Homo sapiens
aattgggctctctagatgcatgctcgagcggccgccagtgtgatggatatctgcagaattcggcttagcgttgtcgcggccgaggtctggtgtggagcccccaagttccccagtcattgagtctgaaactctgatagaagacgtgctgagacctctggaacaggcattggaggactgccatggtcacacaaagaaacaggtatgtgatgatatcagccgacgcttggcgctgcttcgagaacagtgggctggagggaagttgtcaatacctgtaaagaagaggatggcactgctagtgcaagaacttttacatcaccagtgggatgcagcagatgacattcaccgatcactcatggttgaccatgtgactgaggtcagtcagtggatggtgggagtaaaaagattaattgcagaaaagaagagtctatcttcagaggagaccatagaagagaaatttacagtggaacctgataaccatacaataccaggcttccaacagccatcataatgcctgtggctccccagactcacttcacctgactttctatgcct

SEQ ID NO: 41087 - DNA, 433 bp, Homo sapiens; identical to SEQ ID NO: 32184

SEQ ID NO: 41088 - DNA, 593 bp, Homo sapiens
ctcactatagggcgaattggagctccaccgcggtggcggccgaggttcttgggaagatggcggctgtgtcggtgtatgctccaccagttggaggcttctcttttgataactgccgcaggaatgccgtcttggaagccgattttgcaaagaggggatacaagcttccaaaggtccggaaaactggcacgaccatcgctggggtggtctataaggatggcatagttcttggagcagatacaagagcaactgaagggatggttgttgctgacaagaactgttcaaaaatacacttcatatctcctaatatttattgttgtggtgctgggacagctgcagacacagacatgacaacccagctcatttcttccaacctggagctccactccctctccactggccgtcttcccagagttgtgacagccaatcggatgctgaagcagatgcttttcaggtatcaaggttacattggtgcagccctagttttagggggagtagatgttactggacctcacctctacagcatctatcctcatggatcaactgataagttgccttatgtcaccatgggttctggctccttggcagcaatggct

SEQ ID NO: 41089 - DNA, 673 bp, Homo sapiens
  misc_feature 566: n = A,T,C or G
acgactcactatagggcgaattggagctccaccgcggtggcggccgaggtacgcgggattgtagtaaacttggaaccttggaaatgaccaggccaagactcaagcctccccagttctactgacctttgtccttaggtgtgaggtccagggttgctaggaaaagaaatcagcagacacaggtgtagaccagagtgtttcttaaatggtgtaattttgtcctctctgtgtcctggggaatactggccatgcctggagacatatcactcaatttctctgaggacacagataggatggggtgtctgtgttatttgtgggatacagagatgaaagaggggtgggatccacactgagagagtggagagtgacatgtgctggacactgtccatgaagcactgagcagaagctggaggcacaacgcaccagacactcacagcaaggatggagctgaaaacataacccactctgtcctggaggcactgggaagcctagagaaggctgtgagccaaggagggagggtcttcctttggcatgggatggggatgaagtaaggagagggactggacccnctggaagctgattcactatggggggaggtgtaatgaagtcctacagacaaccctcaaatttgatgatttcctaatagaactcacagaaataaagagctgttatactg

SEQ ID NO: 41090 - DNA, 420 bp, Homo sapiens; identical to SEQ ID NO: 32154

SEQ ID NO: 41091 - DNA, 316 bp, Homo sapiens; identical to SEQ ID NO: 32155

SEQ ID NO: 41092 - DNA, 257 bp, Homo sapiens; identical to SEQ ID NO: 32156

SEQ ID NO: 41093 - DNA, 458 bp, Homo sapiens; identical to SEQ ID NO: 32157

SEQ ID NO: 41094 - DNA, 573 bp, Homo sapiens; identical to SEQ ID NO: 33870
  misc_feature 145, 369: n = A,T,C or G

SEQ ID NO: 41095 - DNA, 446 bp, Homo sapiens; identical to SEQ ID NO: 32188

SEQ ID NO: 41096 - DNA, 506 bp, Homo sapiens; identical to SEQ ID NO: 32160

SEQ ID NO: 41097 - DNA, 393 bp, Homo sapiens
atacgactcctatagggcgaattggagctccaccgcggtggcggccgcccgggcaggtactttttttttttttttttttttttttttttttagccacacctggtttttgttaagacctcatcagtcctgggtgcttgccctcaattcctccatagctatgttagcatatttaatatcttttgctattaatccttaactagttaatccttaaagggctagttaatccttaactagtcccttcattttgtgcattatcttccagtattctccttctcttttttttacttcttccctgctacccatgtgctcttggtgggtagttaccaacatatacagaatctgcttccctttgcagcatttcatttgcataaagactggatggcactggtttgc

SEQ ID NO: 41098 - DNA, 450 bp, Homo sapiens; identical to SEQ ID NO: 32162

SEQ ID NO: 41099 - DNA, 540 bp, Homo sapiens; identical to SEQ ID NO: 32163

SEQ ID NO: 41100 - DNA, 431 bp, Homo sapiens; identical to SEQ ID NO: 32164

SEQ ID NO: 41101 - DNA, 382 bp, Homo sapiens; identical to SEQ ID NO: 32166

SEQ ID NO: 41102 - DNA, 259 bp, Homo sapiens; identical to SEQ ID NO: 32167
  misc_feature 223, 224, 241, 242: n = A,T,C or G

SEQ ID NO: 41103 - DNA, 442 bp, Homo sapiens; identical to SEQ ID NO: 32168

SEQ ID NO: 41104 - DNA, 475 bp, Homo sapiens; identical to SEQ ID NO: 32169

SEQ ID NO: 41105 - DNA, 172 bp, Homo sapiens; identical to SEQ ID NO: 32170

SEQ ID NO: 41106 - DNA, 446 bp, Homo sapiens; identical to SEQ ID NO: 32135

SEQ ID NO: 41107 - DNA, 461 bp, Homo sapiens; identical to SEQ ID NO: 32172

SEQ ID NO: 41108 - DNA, 382 bp, Homo sapiens; identical to SEQ ID NO: 32174

SEQ ID NO: 41109 - DNA, 316 bp, Homo sapiens; identical to SEQ ID NO: 31387
  misc_feature 293: n = A,T,C or G

SEQ ID NO: 41110 - DNA, 427 bp, Homo sapiens; identical to SEQ ID NO: 32176

SEQ ID NO: 41111 - DNA, 475 bp, Homo sapiens; identical to SEQ ID NO: 32169

SEQ ID NO: 41112 - DNA, 465 bp, Homo sapiens; identical to SEQ ID NO: 32178

SEQ ID NO: 41113 - DNA, 180 bp, Homo sapiens; identical to SEQ ID NO: 32180

SEQ ID NO: 41114 - DNA, 395 bp, Homo sapiens; identical to SEQ ID NO: 32181
  misc_feature 327, 334: n = A,T,C or G

SEQ ID NO: 41115 - DNA, 396 bp, Homo sapiens; identical to SEQ ID NO: 32182

SEQ ID NO: 41116 - DNA, 449 bp, Homo sapiens; identical to SEQ ID NO: 32183

SEQ ID NO: 41117 - DNA, 433 bp, Homo sapiens; identical to SEQ ID NO: 32184

SEQ ID NO: 41118 - DNA, 405 bp, Homo sapiens; identical to SEQ ID NO: 32185

SEQ ID NO: 41119 - DNA, 376 bp, Homo sapiens; identical to SEQ ID NO: 32186

SEQ ID NO: 41120 - DNA, 170 bp, Homo sapiens
tccaccgcggtggcggccgccacgctggttttgcatcttcaggagacgctcgtagccctcgcgcttctcctcggccagttcgcggaagaagtggctcacgccttccagagccacatcatcgcggtcgaaatagaagcccagagagaggtaggtgtaggaggcctgcaggt

SEQ ID NO: 41121 - DNA, 446 bp, Homo sapiens; identical to SEQ ID NO: 32188

SEQ ID NO: 41122 - DNA, 467 bp, Homo sapiens; identical to SEQ ID NO: 32189

SEQ ID NO: 41123 - DNA, 449 bp, Homo sapiens; identical to SEQ ID NO: 32190

SEQ ID NO: 41124 - DNA, 449 bp, Homo sapiens; identical to SEQ ID NO: 32191

SEQ ID NO: 41125 - DNA, 410 bp, Homo sapiens; identical to SEQ ID NO: 32192

SEQ ID NO: 41126 - DNA, 446 bp, Homo sapiens; identical to SEQ ID NO: 32188

SEQ ID NO: 41127 - DNA, 453 bp, Homo sapiens; identical to SEQ ID NO: 32993

SEQ ID NO: 41128 - DNA, 438 bp, Homo sapiens; identical to SEQ ID NO: 32196

SEQ ID NO: 41129 - DNA, 453 bp, Homo sapiens; identical to SEQ ID NO: 32197

SEQ ID NO: 41130 - DNA, 655 bp, Homo sapiens; identical to SEQ ID NO: 32198

SEQ ID NO: 41131 - DNA, 415 bp, Homo sapiens; identical to SEQ ID NO: 32199

SEQ ID NO: 41132 - DNA, 695 bp, Homo sapiens; identical to SEQ ID NO: 32200

SEQ ID NO: 41133 - DNA, 470 bp, Homo sapiens; identical to SEQ ID NO: 35796

SEQ ID NO: 41134 - DNA, 344 bp, Homo sapiens; identical to SEQ ID NO: 34638

SEQ ID NO: 41135 - DNA, 503 bp, Homo sapiens; identical to SEQ ID NO: 32011

SEQ ID NO: 41136 - DNA, 620 bp, Homo sapiens; identical to SEQ ID NO: 39327
  misc_feature 58, 95, 96, 106, 108, 109, 134, 135, 136, 146, 147, 167,168, 204: n = A,T,C or G

SEQ ID NO: 41137 - DNA, 684 bp, Homo sapiens; identical to SEQ ID NO: 32205

SEQ ID NO: 41138 - DNA, 414 bp, Homo sapiens; identical to SEQ ID NO: 32206
  misc_feature 127, 151: n = A,T,C or G

SEQ ID NO: 41139 - DNA, 603 bp, Homo sapiens
  misc_feature 55: n = A,T,C or G
gggccccccctcggaagtcttctagaattaattaacgcgggagagaagccctggnagaactcacacaccaacactgaggtgttgaggaacatgggctttgcagcaaaagcgatgaaatctgttcatgaaaacatggatctgaacaaaatagatgatttgatgcaagagatcacagagcaacaggatatcgcccaagaaatctcggaagcattttctcaacgggttggctttggtgatgactttgatgaggatgagttgatggcagaacttgaagaattggaacaggaggaattaaataagaagatgacaaatatccgccttccaaatgtgccttcctcttctctcccagcacagccaaatagaaaaccaggcatgtcgtccactgcacgtcgatcccgagcagcatcttcccagagggcagaagaagaggatgatgatatcaaacaattggcagcttgggctacctaaactaaaacacatttttgatacctaaattaatgagctatagataaaatataaaaaatgtttttaccaagttcagaagttaacaaagactctgctttataattatattgaatgaataattgtgttttaagcctccta

SEQ ID NO: 41140 - DNA, 663 bp, Homo sapiens; identical to SEQ ID NO: 32208

SEQ ID NO: 41141 - DNA, 623 bp, Homo sapiens; identical to SEQ ID NO: 33892
  misc_feature 47: n = A,T,C or G

SEQ ID NO: 41142 - DNA, 451 bp, Homo sapiens; identical to SEQ ID NO: 31072

SEQ ID NO: 41143 - DNA, 284 bp, Homo sapiens; identical to SEQ ID NO: 35580

SEQ ID NO: 41144 - DNA, 641 bp, Homo sapiens; identical to SEQ ID NO: 32212

SEQ ID NO: 41145 - DNA, 488 bp, Homo sapiens; identical to SEQ ID NO: 32213

SEQ ID NO: 41146 - DNA, 343 bp, Homo sapiens; identical to SEQ ID NO: 32214

SEQ ID NO: 41147 - DNA, 693 bp, Homo sapiens; identical to SEQ ID NO: 32215
  misc_feature 365: n = A,T,C or G

SEQ ID NO: 41148 - DNA, 446 bp, Homo sapiens; identical to SEQ ID NO: 32216

SEQ ID NO: 41149 - DNA, 455 bp, Homo sapiens; identical to SEQ ID NO: 32217

SEQ ID NO: 41150 - DNA, 450 bp, Homo sapiens; identical to SEQ ID NO: 32218

SEQ ID NO: 41151 - DNA, 625 bp, Homo sapiens; identical to SEQ ID NO: 32219

SEQ ID NO: 41152 - DNA, 601 bp, Homo sapiens; identical to SEQ ID NO: 32220
  misc_feature 391, 534: n = A,T,C or G

SEQ ID NO: 41153 - DNA, 636 bp, Homo sapiens; identical to SEQ ID NO: 38870
  misc_feature 345, 629: n = A,T,C or G

SEQ ID NO: 41154 - DNA, 596 bp, Homo sapiens; identical to SEQ ID NO: 32298

SEQ ID NO: 41155 - DNA, 491 bp, Homo sapiens; identical to SEQ ID NO: 32301

SEQ ID NO: 41156 - DNA, 510 bp, Homo sapiens; identical to SEQ ID NO: 32310

SEQ ID NO: 41157 - DNA, 547 bp, Homo sapiens
attggagctccaccgcggtggcggccgcttttttttttttttttttttttttttttgggaagcgacggggtctccctatgttgcccaaactggtcttgaactcctgggctcaagcgatcctcccatgttggtctcccaaaatgctgggattacaggcgtgagccaccatgcccagccagatgtaacaatttttaaagtcagtccgtagggttgaatttacctgtcatttctaatttgtcgacattaaaaacatcctaaatgtgtttcttggcacacttgcctgatcgtttccataaggtcagttcctaaaaatggaatcattgtgccagggtttgtacatttaaaatattgatccattttgccagactgccatccagcagggctctagcaatttacacatttaaggaggcacttaccctcatatgcccactttgtacttacatggccctgagagtgacagcctccttaaattttgcatccttccttctccccatcttactccaagccctgctaaggagatggcaaagtttcatgtccactgggcttt

SEQ ID NO: 41158 - DNA, 601 bp, Homo sapiens; identical to SEQ ID NO: 32220
  misc_feature 391, 534: n = A,T,C or G

SEQ ID NO: 41159 - DNA, 619 bp, Homo sapiens; identical to SEQ ID NO: 38869

SEQ ID NO: 41160 - DNA, 667 bp, Homo sapiens; identical to SEQ ID NO: 32312

SEQ ID NO: 41161 - DNA, 527 bp, Homo sapiens; identical to SEQ ID NO: 32229

SEQ ID NO: 41162 - DNA, 400 bp, Homo sapiens; identical to SEQ ID NO: 32230

SEQ ID NO: 41163 - DNA, 440 bp, Homo sapiens; identical to SEQ ID NO: 32372

SEQ ID NO: 41164 - DNA, 527 bp, Homo sapiens; identical to SEQ ID NO: 32229

SEQ ID NO: 41165 - DNA, 437 bp, Homo sapiens; identical to SEQ ID NO: 32233

SEQ ID NO: 41166 - DNA, 497 bp, Homo sapiens
gcgtatacgactcacttagggcgaattggagctccaccgcggtggcggccgctttttttttttttttttttttttttttttggaaggattacttatggaggttttattatttttatttatttttgagactgagtcttgctctgtcatcaggctggagtgcagtggctcactgcaacctccgcctcccaggttcaagcaattctcctgcctcagcctccctagtagctgggattacaggtgtccaccaccatgcccaattaatttttgtatttttggtacagacagggtttcaccatgttggccaggatggtctcgatctcgttgaccttgtgatccgcctgcctcggcctcccaaagtgctgggattacaggcgtgagccaccgcccctggactacttatggaggttttaaaaaatcttttaagtccaggcctgacgtttagagaaggttacaaaggcggccaggatctgagtatttccaaaaagctctggaggcag

SEQ ID NO: 41167 - DNA, 526 bp, Homo sapiens; identical to SEQ ID NO: 32235

SEQ ID NO: 41168 - DNA, 621 bp, Homo sapiens; identical to SEQ ID NO: 32299

SEQ ID NO: 41169 - DNA, 437 bp, Homo sapiens; identical to SEQ ID NO: 32233

SEQ ID NO: 41170 - DNA, 449 bp, Homo sapiens; identical to SEQ ID NO: 32238

SEQ ID NO: 41171 - DNA, 621 bp, Homo sapiens; identical to SEQ ID NO: 32299

SEQ ID NO: 41172 - DNA, 621 bp, Homo sapiens; identical to SEQ ID NO: 32299

SEQ ID NO: 41173 - DNA, 332 bp, Homo sapiens; identical to SEQ ID NO: 32241

SEQ ID NO: 41174 - DNA, 424 bp, Homo sapiens; identical to SEQ ID NO: 38880

SEQ ID NO: 41175 - DNA, 667 bp, Homo sapiens; identical to SEQ ID NO: 32312

SEQ ID NO: 41176 - DNA, 601 bp, Homo sapiens; identical to SEQ ID NO: 32220
  misc_feature 391, 534: n = A,T,C or G

SEQ ID NO: 41177 - DNA, 599 bp, Homo sapiens
tatagggcgaattggagctccaccgcggtggcggccgcttttttttttttttttttttttttttgggaaggagtttcactcctgttgccaaggctggagtgcaatggcgcaattaggctcactgcaacctcctcttcccgggctcaagtgattctcctgcctcagcctcccgagtagctgggattacaggtacccaccaccatgcccagctaattttttgtatttttaatagagatggggtttcaccatgttggccaggctggtcttgaactcctgacctcaggtgatccacctgcctcggcctcccaaagtgctgggattacaggtgtgagccatggtacccagccttcctcagcatttctgtctgtccccacacacaggctcagcagccagagaaagccaagggcatataggcagggcaacaacatctgtgcaccttgcggctgcctgctagtttcctagaaacatattctcagacatgcctaagaagaaatgcacttgtaggtgtttcaaacgcaggggtccctgagttaccaggataaaacccatagagtcccaacagacatctgtaccaaaagaggaaagcacttgattactga

SEQ ID NO: 41178 - DNA, 646 bp, Homo sapiens; identical to SEQ ID NO: 39096

SEQ ID NO: 41179 - DNA, 424 bp, Homo sapiens; identical to SEQ ID NO: 38880

SEQ ID NO: 41180 - DNA, 628 bp, Homo sapiens; identical to SEQ ID NO: 38917
  misc_feature 564, 593: n = A,T,C or G

SEQ ID NO: 41181 - DNA, 667 bp, Homo sapiens; identical to SEQ ID NO: 32312

SEQ ID NO: 41182 - DNA, 435 bp, Homo sapiens; identical to SEQ ID NO: 32250

SEQ ID NO: 41183 - DNA, 427 bp, Homo sapiens; identical to SEQ ID NO: 32251

SEQ ID NO: 41184 - DNA, 439 bp, Homo sapiens; identical to SEQ ID NO: 38886

SEQ ID NO: 41185 - DNA, 642 bp, Homo sapiens
ctcactataggcgaattggagctccaccgcggtggcggccgcttttttttttttttttttttttttttgagacaagatcttgtcctgtcacccaggctggaatactgtggtgcaatcatagctcactgcagcctcaaacttctgggctcaagtgatcctcccacctcagcctcctgagtagctgggaatgcaggcacataccaccatacctggctaattaaaaaaattttttttaatctcactgtattactgaagctggtctggaactcctggccttgaacgatcatctcagcctccccaaactctgggattacaggcatgaaccattacacctggcttgaagagaagaggttcttaatattgaagaagtccatttatctgtttttgttttttttcccctcatgtattgtgtttttggtattgtatctaagagattgttgcttaactcaagaccacaaagatctttttctatttttttcttctaagttttttgtagttctaggttttacatttaagtctccaatacattttgagttaaattttgtgtatggtgtgatgtatggatcaatgttcattttttttgcatatgaataaccattattttaacaccatttattgaaaagactatctttttgcccatga

SEQ ID NO: 41186 - DNA, 337 bp, Homo sapiens
ctatagggcgaattggagctccaccgcggtggcggccgcttttttttttttttttttttttttttttggaccaaaaagtgttttatttttcttgcagtagctttgttaatagcacaaaatcatgttttgtttttgccatttaaacattatcacacaatcctattctgaaagacaaatgttcattaaaaacaaagcaaaaataaaaattcacaccctttattacctaagattgtcatataaagggttaaagaaaaaagggaggggctttcttacaagccttttcacaagtgtcacattttctccttaaaagggaaggatttcaaaagaaaggggaaat

SEQ ID NO: 41187 - DNA, 491 bp, Homo sapiens; identical to SEQ ID NO: 32255

SEQ ID NO: 41188 - DNA, 621 bp, Homo sapiens; identical to SEQ ID NO: 32299

SEQ ID NO: 41189 - DNA, 431 bp, Homo sapiens; identical to SEQ ID NO: 32257

SEQ ID NO: 41190 - DNA, 598 bp, Homo sapiens
  misc_feature 15, 73: n = A,T,C or G
tacgactcactatanggcgaattggagctccaccgcggtggcggccgcttttttttttttttttttttttttnggagagacaaacatgggccacatttttaagacaaacatggaccacaaccatgctgagagaacttagagtgaagtttacatggctatctttcttagtattaaaattttacctgataaacatcaaacatacgaccaacatagcatataaagcagctctacagatattttcctactgcccaaaatatcatataatgcacatgtaggtcacatgtgagtaggcaagagattctggaacacagaagcaagacaacaggatcacagcaatttcagtatgctctgcttgttataggaaatccccagaacattctccaattactgaacaaaaaaagcaataaaactcagatttgtctgcctggggagaaataaacagaaatagaaagtgaatagcaaaacaaagctatctggtgaaaagacattcttacttggaaggagttaagattttgccccttccatgggtgtacttaatgaggcaagcgtcaagcggcctgacagcccgtggcacactgtctacagctgatgtcaatgg

SEQ ID NO: 41191 - DNA, 614 bp, Homo sapiens
cactataggggcgaattgggagctccaccgcggtggcggccgcttttttttttttttttttttttttgagggggagtcttgctctgtcaccaggctggagtgcagtggtgcaatcttggctcactgcaaccttcccctcctggctgagttaacttaggagagcttcctggagagggcagcctttgaagataggaaggatttcatgaagtctttactaggccactagagtagaagcagtgggagacttcctggagaagagctcatggaaagaaaaacctaccgctggccctttgggaactgctttgggcctctttagtcctaggctcacacgccccttagaaacaaagtaagaataaagccagggataatacagtgagtggccaagaacacagactctggagccagactacctgggtttgaatcccagttaccagccatgtgactttgatcaagttgcttaacctttgtgtgcttcagtttcctcatctgtaaaataaggggatggtaattgtgacttcccagaactatggtggagagcaaatgggttaagagtgtgccgctgtaaactgtaaagtgctgggctttcattgggaagtattacctttcattgctgc

SEQ ID NO: 41192 - DNA, 491 bp, Homo sapiens; identical to SEQ ID NO: 32255

SEQ ID NO: 41193 - DNA, 639 bp, Homo sapiens; identical to SEQ ID NO: 39094

SEQ ID NO: 41194 - DNA, 436 bp, Homo sapiens
  misc_feature 300, 301: n = A,T,C or G
agggaacaaaagctgggtaccgggccccccctcgagagtacttctagaattaattaacgcgggggaaaactgtcttacttaaacaaaatgtattttaggaaaatgcctgtttcaagggtttattactgttttataactaagagacttgggactttagtatacgaaaaggtgtcatttcaaatgggggaaaatgaattattcaacaaatgatcttgggacaactggatagccattcagaaaaaaagtgaagctggaacactataacatgctttaccccacaataaatcagagttaaatgtnnaaaaaacaaaaaaaagtcacattaaaaatggcggccgccaccgcggtggagctccaattcgccctatagtgagtcgtattacgcgcgctcactggccgtcgttttacaacgtcgcgactgggaaaaccctggcgt

SEQ ID NO: 41195 - DNA, 669 bp, Homo sapiens; identical to SEQ ID NO: 32263

SEQ ID NO: 41196 - DNA, 634 bp, Homo sapiens; identical to SEQ ID NO: 32242

SEQ ID NO: 41197 - DNA, 427 bp, Homo sapiens; identical to SEQ ID NO: 32251

SEQ ID NO: 41198 - DNA, 398 bp, Homo sapiens
gccagcgcgcaattaactcctcactaaagggaacaaaagctgggtaccgggccccccctcgagagtacttctagaattaattaaatgtgaaaagcaaatttgaaagcatcttagtctgtaaaactacttcatgtataaaaaataaacatttgacagaactctcagagcaaagctatctgagggattctttaaagcttccaatttatcaaattacctttttttttttggtcggcagggggaagtagtctcactctgttgcccagggtggagtgcaatggcaggatctcagctcactgcaacctttgtctcccaggttcaagtgattctcccacttcaacctcccgagtatctgggactactggcatacaccaccacacccggctaattttttgtatttt

SEQ ID NO: 41199 - DNA, 440 bp, Homo sapiens; identical to SEQ ID NO: 32267

SEQ ID NO: 41200 - DNA, 489 bp, Homo sapiens; identical to SEQ ID NO: 32268

SEQ ID NO: 41201 - DNA, 430 bp, Homo sapiens; identical to SEQ ID NO: 32269

SEQ ID NO: 41202 - DNA, 446 bp, Homo sapiens; identical to SEQ ID NO: 32285

SEQ ID NO: 41203 - DNA, 554 bp, Homo sapiens; identical to SEQ ID NO: 32274

SEQ ID NO: 41204 - DNA, 487 bp, Homo sapiens; identical to SEQ ID NO: 32350

SEQ ID NO: 41205 - DNA, 582 bp, Homo sapiens; identical to SEQ ID NO: 32273
  misc_feature 49: n = A,T,C or G

SEQ ID NO: 41206 - DNA, 644 bp, Homo sapiens; identical to SEQ ID NO: 39041
  misc_feature 558, 563: n = A,T,C or G

SEQ ID NO: 41207 - DNA, 489 bp, Homo sapiens; identical to SEQ ID NO: 32275

SEQ ID NO: 41208 - DNA, 619 bp, Homo sapiens; identical to SEQ ID NO: 32276

SEQ ID NO: 41209 - DNA, 677 bp, Homo sapiens; identical to SEQ ID NO: 38933

SEQ ID NO: 41210 - DNA, 491 bp, Homo sapiens; identical to SEQ ID NO: 32301

SEQ ID NO: 41211 - DNA, 487 bp, Homo sapiens; identical to SEQ ID NO: 32350

SEQ ID NO: 41212 - DNA, 628 bp, Homo sapiens; identical to SEQ ID NO: 38917
  misc_feature 564, 593: n = A,T,C or G

SEQ ID NO: 41213 - DNA, 427 bp, Homo sapiens
tatagggcgaattggagctccaccgcggtggcggccgcttttttttttttttttttttttttttgaaatatgcccacccatttcaggttgagccacggataaggagggcttagctcatgtctcctgtgggaattgaggcatctcaggaaacagtatagagttggtacagttagaatgagaagaagcctggggaaagaaaccaagagtgagaaatgcgtggctattttgacttagctggagcaaccctctcataacaggctgggaagtggacccgcgttaattaacgcgggggaaattgatgaacaaacaaaggtcatagtaaaagacagacttttggggataaaaacagaaactccaagtactgtatcaacaaatgcaagtacaccacaatcagtgagcagtgtggttcattatctggcaatggcac

SEQ ID NO: 41214 - DNA, 636 bp, Homo sapiens; identical to SEQ ID NO: 38870
  misc_feature 345, 629: n = A,T,C or G

SEQ ID NO: 41215 - DNA, 461 bp, Homo sapiens; identical to SEQ ID NO: 32283

SEQ ID NO: 41216 - DNA, 428 bp, Homo sapiens; identical to SEQ ID NO: 32336
  misc_feature 311: n = A,T,C or G

SEQ ID NO: 41217 - DNA, 489 bp, Homo sapiens; identical to SEQ ID NO: 32268

SEQ ID NO: 41218 - DNA, 582 bp, Homo sapiens; identical to SEQ ID NO: 32273
  misc_feature 49: n = A,T,C or G

SEQ ID NO: 41219 - DNA, 621 bp, Homo sapiens; identical to SEQ ID NO: 32299

SEQ ID NO: 41220 - DNA, 491 bp, Homo sapiens; identical to SEQ ID NO: 32301

SEQ ID NO: 41221 - DNA, 491 bp, Homo sapiens; identical to SEQ ID NO: 32301

SEQ ID NO: 41222 - DNA, 491 bp, Homo sapiens; identical to SEQ ID NO: 32301

SEQ ID NO: 41223 - DNA, 486 bp, Homo sapiens; identical to SEQ ID NO: 32224

SEQ ID NO: 41224 - DNA, 491 bp, Homo sapiens; identical to SEQ ID NO: 32301

SEQ ID NO: 41225 - DNA, 345 bp, Homo sapiens; identical to SEQ ID NO: 32293

SEQ ID NO: 41226 - DNA, 491 bp, Homo sapiens; identical to SEQ ID NO: 32301

SEQ ID NO: 41227 - DNA, 452 bp, Homo sapiens; identical to SEQ ID NO: 38950

SEQ ID NO: 41228 - DNA, 459 bp, Homo sapiens; identical to SEQ ID NO: 32296

SEQ ID NO: 41229 - DNA, 491 bp, Homo sapiens; identical to SEQ ID NO: 32301

SEQ ID NO: 41230 - DNA, 596 bp, Homo sapiens; identical to SEQ ID NO: 32298

SEQ ID NO: 41231 - DNA, 621 bp, Homo sapiens; identical to SEQ ID NO: 32299

SEQ ID NO: 41232 - DNA, 667 bp, Homo sapiens; identical to SEQ ID NO: 32312

SEQ ID NO: 41233 - DNA, 491 bp, Homo sapiens; identical to SEQ ID NO: 32301

SEQ ID NO: 41234 - DNA, 606 bp, Homo sapiens; identical to SEQ ID NO: 32302

SEQ ID NO: 41235 - DNA, 608 bp, Homo sapiens
  misc_feature 511, 585: n = A,T,C or G
taatacgactcactatagggcgaattggagctccaccgcggtggcggccgctttttttttttttttttttttttttttttgagacagggtctcactctgtcacccaggctggagtgcagtggcgcaatctcagctcactgcagcctctgcctcccaggttcaagcggttctcctgcctcagtctcccgagtagctgggattacaccaccacacctggctaatttttgtatttttggtatagacgggttttcgccatgttggccaggctggtgtcaactcctgatctcaagtgatctgccagcctcggcctcccaaagtgctattacaggcgtgagccaccacgcctggcttaggctgcttaaatattctttcttaggtatccttggttttggaaaaaaaaagaataacagaaaactaaaaattcccagtggcagtctctgtatcactggaatttaactttttgtttgtttgttttttgagatggagtctcgctctgttgcctaggatggcntccaatggcgtgatctcggatcactgcaagctccgcctcccgggttcacgccattctcctgcctcagcctcccnagtaactgggactacaggcgccc

SEQ ID NO: 41236 - DNA, 510 bp, Homo sapiens; identical to SEQ ID NO: 32310

SEQ ID NO: 41237 - DNA, 440 bp, Homo sapiens; identical to SEQ ID NO: 32267

SEQ ID NO: 41238 - DNA, 604 bp, Homo sapiens; identical to SEQ ID NO: 39037

SEQ ID NO: 41239 - DNA, 424 bp, Homo sapiens; identical to SEQ ID NO: 38880

SEQ ID NO: 41240 - DNA, 628 bp, Homo sapiens; identical to SEQ ID NO: 38917
  misc_feature 564, 593: n = A,T,C or G

SEQ ID NO: 41241 - DNA, 414 bp, Homo sapiens
gccagcgcgcaattaaccctcactaaagggaacaaaagctgggtaccgggccccccctcgagagtacttctagaattaattaaggcgggtggatcaactgtggtcaggagtttgagatcagccaggccaacctggtgaaaccccgtctctactaaaaatacaaaaattagctgggcgtgatggtgggcgcctgtaatcccagctacttgggaggctgaggcaggagaatcacttgaacccgggaggcggaggttgcagtgagccgagatcgcaccattgcactccagtctgggcaacagagtgagattccgtctcaaaaaaaaaaaaaaaaaaaaaaaaaaaaaaagcggccgccaccgcggtggagctccaattcgccctatagtgagtcgtattacgcgcgctcactggccg

SEQ ID NO: 41242 - DNA, 565 bp, Homo sapiens
  misc_feature 353: n = A,T,C or G
actaaagggaacaaaagctgggtaccgggccccccctcgagagtacttctagaattaattaaggcgggtgatagtgggtgttatatgttaatccattaaatttccattatgaaattagagcttgagcagataattaacaaaagaaatacaaatgacaaatagtgaatgatcaaactcaaaggcaattaaacttcagtttaaaaaattcaaagacgccgggcgcagtggctcacgcctgtaatcccagcactttgggagacagaggcgggtgaatcacctgaggtcaggttgctgtgagctgagatcacaccaccacactccagcctgtgtgacggagtaagactccatctaanataaaaacaaaagataaaaataaaaaaggcggccgccaccgcggtggagctccaattcgccctatagtgagtcgtattacgcgcgctcactggccgtcgttttacaacgtcgtgactgggaaaaccctggcgttacccaacttaatcgccttgcagcacatccccctttcgccagctggcgtaatagcgaagaggcccgcaccgatcgccct

SEQ ID NO: 41243 - DNA, 491 bp, Homo sapiens; identical to SEQ ID NO: 32301

SEQ ID NO: 41244 - DNA, 667 bp, Homo sapiens; identical to SEQ ID NO: 32312

SEQ ID NO: 41245 - DNA, 596 bp, Homo sapiens; identical to SEQ ID NO: 32298

SEQ ID NO: 41246 - DNA, 487 bp, Homo sapiens; identical to SEQ ID NO: 32314
  misc_feature 310, 311: n = A,T,C or G

SEQ ID NO: 41247 - DNA, 539 bp, Homo sapiens
cgggcccccccctcggggtacttctagaattaattaacgcggggaaagcggtggacactgcagagtgggcatccagccactgctacttccatgctgggatgagcagccagtgtagaataaaccctgtgtgcagtgaaacagtcagtgtgcagtatcctatggtgcatctaaacgtatgtacttgctgcaaatgcacatctacaaggacactcacgactattttcattcttgataccaccttcttatgacttgacaaagaaaattcaagcttttggctgagggtagtggctcgcacctgtaatcccagcactttgagaggccgaggtgggtgggtcacttgaggtcaggagttcgagaccagcctgaccaatattgtgaaatcctgtctttactaaaaatataaaaaatagcccggcacggtggcaggccctgtaatcccagctacttgggaggctgaggcggggaggcggaggctacagtgagctgagactgtgccactgcactccagcctgggggacagaagcagacacagtctcaaa

SEQ ID NO: 41248 - DNA, 621 bp, Homo sapiens; identical to SEQ ID NO: 32299

SEQ ID NO: 41249 - DNA, 435 bp, Homo sapiens
caattaaccctcactaaagtgaacaaaagctgggtaccgggccccccctcgagagtacttctagaattaattaaggcgggggcacaggactgtacttttggtagcggtgcggggccgcccgcggactttagccctgcatagagatgggtagaccctaatttggaacagccattgactgggcacaggccagcactttgggaggccgagaggccgaggcaggaggatcgcttgaggccaggagtgccagactgcgagactagcctgggtaacatagtgagaccctctcttcaaaaaaaaaaaaaaaaaaaaaaaagcctgtcacggtggcctgcgcctgtaccccagctactcgagaggatcgcctgagcccagtgaagctgcagcgagctgtgaggatgccaccgcactccggcctgggctaaaaagctagatcgc

SEQ ID NO: 41250 - DNA, 480 bp, Homo sapiens; identical to SEQ ID NO: 32318

SEQ ID NO: 41251 - DNA, 589 bp, Homo sapiens
ggagctccaccgcggtggcggccgctcgcttttttttttttttttttttgtagagacagtgtttttgccatgttgcccaggcttatcctgaactcctgtactcaagaaattctcctgcctcagccccacaaagtgctgggattacaggcgtgatcccaccatgctcagcccattcttttccttaatgggagagtccgttgccccacctcctttatgaacagttcttctcattgatgtgaaatgctaccaaataatattttttttctctttgtaatttccgattgaccaaataattatttactgggatcttatataaataaagactcttaagactttagctttttagtaaatattaaaattacttttttttgagacaaagtctcactctgtcacccaggctggagtgcagtggcacgatcatggctcactgcagcctccttcttgcaagttcaagcaatcctcacacctcaaccacctgagtagctgggaatacaggtgggcaccgctgtgctcggctaattttttaatttgggtagaggtgaggtgtcactgtattgcctaggttggtctcaaactcctgggctcaagc

SEQ ID NO: 41252 - DNA, 392 bp, Homo sapiens; identical to SEQ ID NO: 32320

SEQ ID NO: 41253 - DNA, 417 bp, Homo sapiens; identical to SEQ ID NO: 32321

SEQ ID NO: 41254 - DNA, 446 bp, Homo sapiens; identical to SEQ ID NO: 32322
  misc_feature 334: n = A,T,C or G

SEQ ID NO: 41255 - DNA, 667 bp, Homo sapiens; identical to SEQ ID NO: 32312

SEQ ID NO: 41256 - DNA, 658 bp, Homo sapiens; identical to SEQ ID NO: 38862
  misc_feature 186, 193, 220, 257, 270: n = A,T,C or G

SEQ ID NO: 41257 - DNA, 491 bp, Homo sapiens; identical to SEQ ID NO: 32255

SEQ ID NO: 41258 - DNA, 407 bp, Homo sapiens; identical to SEQ ID NO: 32326

SEQ ID NO: 41259 - DNA, 444 bp, Homo sapiens
accctactaagggaacaaaagctgggtaccgggccccccctcgagagtacttctagaattaattaacgcgggtagcctctgcactccaacctgggcaacatagcaagactccatctctaaaacacacacgtgcacacacacacacgcacacacataacaaaatgctcccaagtttttattagacccaaatgtttgctgtttattaccaaaaagataagattttctttttaataaaaagaaaaatggctgggtgcagtggctcacgcctgtaatccaagcactttgggaggctgaggcggggcaggtgaatcacttgaggtcaggagttcaagaccagcctggccaacatggtgaaaccctgtctctgcttaaaaaaaaaaaaaataaattagctgggcatgctggcaggtgcctgtaatcccagctactcaggaggctgaggca

SEQ ID NO: 41260 - DNA, 420 bp, Homo sapiens; identical to SEQ ID NO: 38962

SEQ ID NO: 41261 - DNA, 639 bp, Homo sapiens; identical to SEQ ID NO: 39094

SEQ ID NO: 41262 - DNA, 621 bp, Homo sapiens; identical to SEQ ID NO: 32299

SEQ ID NO: 41263 - DNA, 491 bp, Homo sapiens; identical to SEQ ID NO: 32301

SEQ ID NO: 41264 - DNA, 402 bp, Homo sapiens; identical to SEQ ID NO: 32332
  misc_feature 361, 385: n = A,T,C or G

SEQ ID NO: 41265 - DNA, 482 bp, Homo sapiens; identical to SEQ ID NO: 38875

SEQ ID NO: 41266 - DNA, 487 bp, Homo sapiens; identical to SEQ ID NO: 32350

SEQ ID NO: 41267 - DNA, 390 bp, Homo sapiens
ctcactatagggcgaattggagctccaccgcggtggcggccgctttttttttttttttttttttttttttttggaattattatttaatgagaaaaaatccacgtgtatacaacatttcaaaacagaagttaaatcattaaatagtactttttatttaaatgtttataaggcagatctatgagaatgatagaaaacatggtgtgtaatttgatagcaatattttggagattacagagttttagtaattaccaattacacagttaaaaagaagataatatattccaagcagatacaaaatatctaatgaaagatcaaggcaggaaaatgagtataactaattgacaatggaaaatcaattttaatgtgaattgcacattatcctttaaaagc

SEQ ID NO: 41268 - DNA, 428 bp, Homo sapiens; identical to SEQ ID NO: 32336
  misc_feature 311: n = A,T,C or G

SEQ ID NO: 41269 - DNA, 464 bp, Homo sapiens
actaaagggaacaaaagctgggtaccgggccccccctcgagagtacttctagaattaattaacgcgggcattgtgtgcagaagacctggactggaatctaacactgtgagtactccccaggatccgtgttcctctctttagcccaggcatgcagttacattacattttccaaccttccttgcagttagctacgatcacgtgactggatttctggccagtggaatgtgtgtggaagtgatgtgggccaattccaggcctggcctataaaaatcccccactttttgttctctttctccatccaccatctgcatggagagctcccagcactagagggagaaaaagccaccagagggaaggagcctgggtccctgaatcactgtgtagactacctgccaaacatacaccctgaattgttatggcaataacaaataaactcctaatgtgttaagccatttaaattctgg

SEQ ID NO: 41270 - DNA, 429 bp, Homo sapiens; identical to SEQ ID NO: 32297

SEQ ID NO: 41271 - DNA, 622 bp, Homo sapiens; identical to SEQ ID NO: 32339

SEQ ID NO: 41272 - DNA, 631 bp, Homo sapiens
tatagggcgaattggagctccaccgcggtggcggccgcttttttttttttttttttttttttttttgaagatggaatctcactctgtcacccaggctggagtgcagtggcatgatctcagctcactggaagctctgcctcccaggttcacaccattctcctgcctcagcctctcaagcagctgggactacaggcgccagccgccatgcctggctaattttttttggtattttttagtacagatggggtttcaccgtgttagccaggatggtctcgatctcctgacctcgtgatctgcccacttcagcctcccaaagtgctgggattacaggcatgagccaccatgcccggccgatttcacctttcaatggcaattactataagacaggaaagttatttatttttatatatttacctaattttaagttaccttatacaaccctcattaatagtctgttagaactagaatttaaactctatgtgaatatggaccttatttaaacaatgtatccctagcacctagacaatgcctaacctgtcacattaacttaatatatattttatttatatttttgggttatttattttttttgagacagactcttgctctgtcacccaggctggagtgtagt

SEQ ID NO: 41273 - DNA, 403 bp, Homo sapiens; identical to SEQ ID NO: 32370

SEQ ID NO: 41274 - DNA, 467 bp, Homo sapiens; identical to SEQ ID NO: 38948

SEQ ID NO: 41275 - DNA, 474 bp, Homo sapiens; identical to SEQ ID NO: 32343

SEQ ID NO: 41276 - DNA, 621 bp, Homo sapiens; identical to SEQ ID NO: 32299

SEQ ID NO: 41277 - DNA, 661 bp, Homo sapiens; identical to SEQ ID NO: 32346

SEQ ID NO: 41278 - DNA, 481 bp, Homo sapiens; identical to SEQ ID NO: 32347
  misc_feature 212: n = A,T,C or G

SEQ ID NO: 41279 - DNA, 493 bp, Homo sapiens; identical to SEQ ID NO: 32348

SEQ ID NO: 41280 - DNA, 441 bp, Homo sapiens; identical to SEQ ID NO: 38885

SEQ ID NO: 41281 - DNA, 487 bp, Homo sapiens; identical to SEQ ID NO: 32350

SEQ ID NO: 41282 - DNA, 429 bp, Homo sapiens; identical to SEQ ID NO: 32297

SEQ ID NO: 41283 - DNA, 516 bp, Homo sapiens
agctcttatggatgcagccaccactgagccttcccttgttattgtgtagccagaatgccgcaaaactaccatgcctaagcgaactgttgagagtacgtttcgatttctgactgtgttagcctggaagtgtcttgtcccaactcttgtgttctgagcattgaacgcctcgcatgccaacatgtatagttgaatgcatcaggtgcgattagcgagcatgatatcataaacgcatctgagcatgctcgtgtcggctattggcgtttgcctagatccgtacgcaaggacttttcaagtctcggaaggtttcttcaatctgcattcgcttcgaatagatattaacaagttgtttgggtgttcgaatgtcaacaggtaagttagttgctagaacccatggctcctttgccgacgctgagtacattctaggtgacgggtggtgacaatgagtccgggtcgagcgctgattctttcggcctttagagcgagatttatacaatagaatatggcatgagattggat

SEQ ID NO: 41284 - DNA, 521 bp, Homo sapiens; identical to SEQ ID NO: 32353
  misc_feature 488: n = A,T,C or G

SEQ ID NO: 41285 - DNA, 408 bp, Homo sapiens; identical to SEQ ID NO: 32354

SEQ ID NO: 41286 - DNA, 531 bp, Homo sapiens; identical to SEQ ID NO: 32355

SEQ ID NO: 41287 - DNA, 487 bp, Homo sapiens; identical to SEQ ID NO: 32350

SEQ ID NO: 41288 - DNA, 404 bp, Homo sapiens; identical to SEQ ID NO: 32357

SEQ ID NO: 41289 - DNA, 623 bp, Homo sapiens
gggcgaattggagctccaccgcggtggcggccgcttttttttttttttttttttttttttttggagacagggttttgacatgttggtcaggctggtcatgaactcctggcctcaagtgatccacctacctcggcctcccaaagtgctgggattacaggtgtgagccaccgcgcccaaccctgtgtttattcttaggtctgtactacgctttatgcctcagtttccacagttaaaacacgttattttattcctcacgttataggagcaatttgtattcataaacttggccttcaccttcaacttctgaagattttaatacagcgcaaatgatttggggtctgtgaattcagttttatttatttggctccttcctttaaggagtcaggctaatgcaagaaaatccaataattagatcttttggatttcaaataactggaagaggaagtggtgtttatctaatggtttaggcataatgcgtgttttttcccgtaggcctgtgtgtatatgtgtgtgtgtggttgttcttaacttgaagaattaaacacttgttttccccgttattaattctagaagtactcttgagggggggcccggtacccaacttttgttccctttaatgaggg

SEQ ID NO: 41290 - DNA, 657 bp, Homo sapiens; identical to SEQ ID NO: 32359

SEQ ID NO: 41291 - DNA, 467 bp, Homo sapiens; identical to SEQ ID NO: 38948

SEQ ID NO: 41292 - DNA, 483 bp, Homo sapiens; identical to SEQ ID NO: 39112

SEQ ID NO: 41293 - DNA, 384 bp, Homo sapiens; identical to SEQ ID NO: 32362

SEQ ID NO: 41294 - DNA, 564 bp, Homo sapiens; identical to SEQ ID NO: 32363
  misc_feature 481: n = A,T,C or G

SEQ ID NO: 41295 - DNA, 644 bp, Homo sapiens; identical to SEQ ID NO: 39041
  misc_feature 558, 563: n = A,T,C or G

SEQ ID NO: 41296 - DNA, 439 bp, Homo sapiens; identical to SEQ ID NO: 32365

SEQ ID NO: 41297 - DNA, 329 bp, Homo sapiens; identical to SEQ ID NO: 32366

SEQ ID NO: 41298 - DNA, 403 bp, Homo sapiens; identical to SEQ ID NO: 38891

SEQ ID NO: 41299 - DNA, 427 bp, Homo sapiens; identical to SEQ ID NO: 32368

SEQ ID NO: 41300 - DNA, 639 bp, Homo sapiens; identical to SEQ ID NO: 39094

SEQ ID NO: 41301 - DNA, 628 bp, Homo sapiens; identical to SEQ ID NO: 38917
  misc_feature 564, 593: n = A,T,C or G

SEQ ID NO: 41302 - DNA, 467 bp, Homo sapiens; identical to SEQ ID NO: 32371
  misc_feature 461: n = A,T,C or G

SEQ ID NO: 41303 - DNA, 440 bp, Homo sapiens; identical to SEQ ID NO: 32372

SEQ ID NO: 41304 - DNA, 436 bp, Homo sapiens; identical to SEQ ID NO: 41194
  misc_feature 300, 301: n = A,T,C or G

SEQ ID NO: 41305 - DNA, 478 bp, Homo sapiens; identical to SEQ ID NO: 32374
  misc_feature 236: n = A,T,C or G

SEQ ID NO: 41306 - DNA, 572 bp, Homo sapiens
atacgactcactatagggcgaattgggccctctagatgcatgctcgagcggccgccagtgtgatggatatctgcagaattcgccctttgagcggccgcccgggcaggtactttttttttttttttttttttttttttggggggtcctgagatctttatttctggatgttgctgtgtgttgggtataagatccagaacttgctaccagcctgaggagaaatcaaacacatggagaaaggaaagctgacagcccagagacccgcggggaaacaggccccgagttactggatacaggcaaccctaaaactgactgtccctctggactctacgtagtgagccaacacatttcctcattattttggatatgtttttttcagttgaaggcattctgattcaatacaggtgaaacttttctttgcaaattacaaagtgtgataactgttgctaaagtttggaatgtgcttagagggagatcatgaacaccaagacaaaaggcctggatgcaaccaatcactctgtttcacgtgacttttgtcaccatacaatttgtggcatttcctcattttttacatt

SEQ ID NO: 41307 - DNA, 412 bp, Homo sapiens; identical to SEQ ID NO: 32376

SEQ ID NO: 41308 - DNA, 394 bp, Homo sapiens; identical to SEQ ID NO: 32377

SEQ ID NO: 41309 - DNA, 460 bp, Homo sapiens; identical to SEQ ID NO: 32378

SEQ ID NO: 41310 - DNA, 507 bp, Homo sapiens; identical to SEQ ID NO: 32379
  misc_feature 405: n = A,T,C or G

SEQ ID NO: 41311 - DNA, 519 bp, Homo sapiens; identical to SEQ ID NO: 32380

SEQ ID NO: 41312 - DNA, 409 bp, Homo sapiens; identical to SEQ ID NO: 32381

SEQ ID NO: 41313 - DNA, 536 bp, Homo sapiens; identical to SEQ ID NO: 30716
  misc_feature 49: n = A,T,C or G

SEQ ID NO: 41314 - DNA, 378 bp, Homo sapiens; identical to SEQ ID NO: 32383

SEQ ID NO: 41315 - DNA, 392 bp, Homo sapiens; identical to SEQ ID NO: 32385

SEQ ID NO: 41316 - DNA, 455 bp, Homo sapiens; identical to SEQ ID NO: 32386

SEQ ID NO: 41317 - DNA, 521 bp, Homo sapiens; identical to SEQ ID NO: 30697

SEQ ID NO: 41318 - DNA, 480 bp, Homo sapiens; identical to SEQ ID NO: 32388

SEQ ID NO: 41319 - DNA, 462 bp, Homo sapiens; identical to SEQ ID NO: 32389

SEQ ID NO: 41320 - DNA, 533 bp, Homo sapiens; identical to SEQ ID NO: 32396

SEQ ID NO: 41321 - DNA, 432 bp, Homo sapiens; identical to SEQ ID NO: 32391

SEQ ID NO: 41322 - DNA, 448 bp, Homo sapiens; identical to SEQ ID NO: 33149

SEQ ID NO: 41323 - DNA, 477 bp, Homo sapiens
tacgactcactatagggcgaattggagctccaccgcggtggcggccgaggtacaatagagagcatcaatagcaaacttactcaagcaaagaaagataaagagtttgtttggaattaccagtgagagaagaataaataagaatgacaaggagtgaagaaagcctaccagacttattagataacatcaagggaaaaaaatttcatatttttagagttccagaaggcaaagagatgacaaaaggcatagaaaatatatttaacaggtcgggtgcggtggctcacacctgtaatcctagcactttgggaggctgaggtgggtggatcacctgaggtcaggaatttgagaccagcttgggcaacatggcgaaaccccgtctctatcaaaaatacaaaaaattagccaggcatggtggtgggtgcctgtaatcccagctactcgggaggctgaggcaggagaatcacttgaacctgagaggca

SEQ ID NO: 41324 - DNA, 412 bp, Homo sapiens; identical to SEQ ID NO: 32376

SEQ ID NO: 41325 - DNA, 414 bp, Homo sapiens; identical to SEQ ID NO: 32395
  misc_feature 311, 322, 333, 339, 340, 362, 370: n = A,T,C or G

SEQ ID NO: 41326 - DNA, 533 bp, Homo sapiens; identical to SEQ ID NO: 32396

SEQ ID NO: 41327 - DNA, 329 bp, Homo sapiens; identical to SEQ ID NO: 32397
  misc_feature 276: n = A,T,C or G

SEQ ID NO: 41328 - DNA, 450 bp, Homo sapiens; identical to SEQ ID NO: 32398

SEQ ID NO: 41329 - DNA, 412 bp, Homo sapiens; identical to SEQ ID NO: 32376

SEQ ID NO: 41330 - DNA, 501 bp, Homo sapiens
accctcactaaatggaacaaaagctgggtaccgggccccccctcgagagtacttctagaattaattaaggcggggtcgaagaagagtggacttttttgcactactagttccttctccctgtagctgtagtcgtagcaagtaaaggggttgtactgatgctttttaaggcatattatcaacatacagccatgacttgtccagagaatctcacctggcaaaaactcatagaagaaagagaaagaagatgaaatggctggttttcagatgtgtattctcattttatggaagacatgttgccagagtaaagcacaatatattcatcttgaaatgtaatactgagaagatatggaagttatggaagttgtggccttcagaattgacacttacggagagactataacagcgtgggtgagttgtgagggacaggaagcatgtcttaatggacttaaccaattttcgtcaactattcacagtaaaatctttcaatgtacaaaatttaat

SEQ ID NO: 41331 - DNA, 298 bp, Homo sapiens; identical to SEQ ID NO: 32407

SEQ ID NO: 41332 - DNA, 436 bp, Homo sapiens; identical to SEQ ID NO: 32402

SEQ ID NO: 41333 - DNA, 446 bp, Homo sapiens; identical to SEQ ID NO: 32403

SEQ ID NO: 41334 - DNA, 607 bp, Homo sapiens
ggccccccctcgaaagtcttctagaattaattaacgcgggtacacagttcacagtagggtttgtgctccaatgagaatctaatgctgctgctgatctgacagtaggcagagctcaggcagtaatgcttgcttgtccactgttcatctcctcccgtacagctaagttcctaacaggtaccagtgtctgaagcctggggactggcggctgctggtcaaggccacattagtttattgttaagtgcaaggtttctggtaacagaaataaagaattcaattgattcatcatcaagaccaaatatatttactaaagatctaccttaaattcattttttagcaggtagtatggcattgtggttaagaatttacatttgtgaacatttaccagctgatgaccgaggtgagcttctgtttcctcctgcataaacttgagattataaaaatcccctagttggctgggcacagtggctcacacctgtaatcccagcactttgggaggccgaggcaggcatcacgaggtcaggagatcaagaccatcctggccaacagggtgaaaccccgtctctactaaagatacaaaaattagctgggcgtggtgttgcacacctgt

SEQ ID NO: 41335 - DNA, 653 bp, Homo sapiens; identical to SEQ ID NO: 35035

SEQ ID NO: 41336 - DNA, 396 bp, Homo sapiens; identical to SEQ ID NO: 32406

SEQ ID NO: 41337 - DNA, 298 bp, Homo sapiens; identical to SEQ ID NO: 32407

SEQ ID NO: 41338 - DNA, 480 bp, Homo sapiens; identical to SEQ ID NO: 32408

SEQ ID NO: 41339 - DNA, 377 bp, Homo sapiens; identical to SEQ ID NO: 32409

SEQ ID NO: 41340 - DNA, 539 bp, Homo sapiens; identical to SEQ ID NO: 32410
  misc_feature 347: n = A,T,C or G

SEQ ID NO: 41341 - DNA, 665 bp, Homo sapiens; identical to SEQ ID NO: 32411

SEQ ID NO: 41342 - DNA, 458 bp, Homo sapiens; identical to SEQ ID NO: 32412

SEQ ID NO: 41343 - DNA, 478 bp, Homo sapiens; identical to SEQ ID NO: 32413

SEQ ID NO: 41344 - DNA, 392 bp, Homo sapiens; identical to SEQ ID NO: 32414

SEQ ID NO: 41345 - DNA, 398 bp, Homo sapiens; identical to SEQ ID NO: 32415

SEQ ID NO: 41346 - DNA, 461 bp, Homo sapiens; identical to SEQ ID NO: 32416

SEQ ID NO: 41347 - DNA, 367 bp, Homo sapiens; identical to SEQ ID NO: 32417

SEQ ID NO: 41348 - DNA, 476 bp, Homo sapiens; identical to SEQ ID NO: 32418

SEQ ID NO: 41349 - DNA, 671 bp, Homo sapiens
gcgtaatacgactactatagggcgaattggagctccaccgcggtggcggccgccatcttgggtcatcgatgagcctcgccctgtgcctggtcccgcttgtgagggaaggacattagaaaatgaattgatgtgttccttaaaggatgggcaggaaaacagatcctgttgtggatatttatttgaacgggattacagatttgaaatgaagtcacaaagtgagcattaccaatgagaggaaaacagacgagaaaatcttgatggcttcacaagacatgcaacaaacaaaatggaatactgtgatgacatgaggcagccaagctggggaggagataaccacggggcagagggtcaggattctggccctgctgcctaaactgtgcgttcataaccaaatcatttcatatttctaaccctcaaaacaaagctgttgtaatatctgatctctacggttccttctgggcccaacattctccatatatccagccacactcatttttaatatttagttcccagatctgtacctcggccgctctagaactagtggatcccccgggctgcaggaattcgatatcaagcttatcgataccgtcgacctcgagggggggcccggtacccagcttttgttccctttagtgagggttaattgcgcgcttggcgtaatcatggtcata

SEQ ID NO: 41350 - DNA, 637 bp, Homo sapiens; identical to SEQ ID NO: 36664

SEQ ID NO: 41351 - DNA, 445 bp, Homo sapiens; identical to SEQ ID NO: 32594

SEQ ID NO: 41352 - DNA, 485 bp, Homo sapiens; identical to SEQ ID NO: 32421

SEQ ID NO: 41353 - DNA, 510 bp, Homo sapiens; identical to SEQ ID NO: 32422

SEQ ID NO: 41354 - DNA, 509 bp, Homo sapiens; identical to SEQ ID NO: 32423

SEQ ID NO: 41355 - DNA, 389 bp, Homo sapiens; identical to SEQ ID NO: 32424

SEQ ID NO: 41356 - DNA, 396 bp, Homo sapiens; identical to SEQ ID NO: 32425

SEQ ID NO: 41357 - DNA, 469 bp, Homo sapiens
actactatagggcgaattggagctccaccgcggtggcggccgaggtacactcacacacacacacacacacagagctcttaacaactggtcctgagtagctctttgtaaattctttattgccaggagtgaaccctaaagtggctcacaagagtgccctatttctttcaattaactacaaggacaaacacatctcaaagttgagataagtgaccagtatgatttgccaaaattctaaagcgcactcaccatgaaatggataaaggttacctttggggatttgcactgcatggattctgtgaaaagcttgttggatattgtgatagagatagagaaatgaagtatattatataagatactatgaggttccctgcctttgcttcacatcccaggcttacaaacgtgccccataaacattccctctgtggctcttgcatttcatatatttatctaaactcttataatcaaatta

SEQ ID NO: 41358 - DNA, 402 bp, Homo sapiens; identical to SEQ ID NO: 32427

SEQ ID NO: 41359 - DNA, 406 bp, Homo sapiens; identical to SEQ ID NO: 32428

SEQ ID NO: 41360 - DNA, 408 bp, Homo sapiens; identical to SEQ ID NO: 32429

SEQ ID NO: 41361 - DNA, 399 bp, Homo sapiens; identical to SEQ ID NO: 32430

SEQ ID NO: 41362 - DNA, 411 bp, Homo sapiens; identical to SEQ ID NO: 32431

SEQ ID NO: 41363 - DNA, 410 bp, Homo sapiens; identical to SEQ ID NO: 32432

SEQ ID NO: 41364 - DNA, 416 bp, Homo sapiens; identical to SEQ ID NO: 32433

SEQ ID NO: 41365 - DNA, 407 bp, Homo sapiens
tacgactcactatagggcgaattggagctccaccgcggtggcggccgaggtacttaatcctggttggtttacccattctaaattatttatgtgagatagctatctatttggaaaaaagtaaagtgaaagtcttacctcaatccacactcaaaaatagtttactatatgacagatctatggcaggcagatttgatggctcaatgaactccaccctcccagtgttcacacctttatgtagttcccacttacagggagccaaaggtccgtgggacgtgaccaactcagcattccactggaggctatatgatcaaacagcaaactgtttatcatgaatgcaggatgtgagcaaactcaccattgctcctgccgacagaaggttttctggaggcaatcactccctggtgctg

SEQ ID NO: 41366 - DNA, 401 bp, Homo sapiens; identical to SEQ ID NO: 32435

SEQ ID NO: 41367 - DNA, 383 bp, Homo sapiens; identical to SEQ ID NO: 32436

SEQ ID NO: 41368 - DNA, 272 bp, Homo sapiens; identical to SEQ ID NO: 32437

SEQ ID NO: 41369 - DNA, 400 bp, Homo sapiens; identical to SEQ ID NO: 32438

SEQ ID NO: 41370 - DNA, 442 bp, Homo sapiens; identical to SEQ ID NO: 32439

SEQ ID NO: 41371 - DNA, 401 bp, Homo sapiens; identical to SEQ ID NO: 32440

SEQ ID NO: 41372 - DNA, 438 bp, Homo sapiens; identical to SEQ ID NO: 32441
  misc_feature 40: n = A,T,C or G

SEQ ID NO: 41373 - DNA, 378 bp, Homo sapiens; identical to SEQ ID NO: 32442

SEQ ID NO: 41374 - DNA, 593 bp, Homo sapiens
cgggcccccccctcggaagtcttctagaattaattaacgcggggggaagggtgatgtggctgcggcatcgccggcctcgctatgtctgccattttcaattttcagagtctattgactgtaatcttgctgcttatatgtacctgtgcttatattcgatccttggcacccagcctcctggacagaaataaaactggattgttgggtatattttggaagtgtgccagaattggtgaacggaagagtccttatgttgcagtatgctgtatagtaatggccttcagcatcctcttcatacagtagctggggaaaatgccagaatgtagttgccatcagatttgattgtgaacaaggactgactgcagaaaataatggaaaggatgtttaactcttttatctccgaacattgaatgagataaatttccagatgctgttctctattttaatgttattggaccaatgttctgtataaacaattaagatgtaaccatttaatagtctgtaacaatcaacctcagtactgtcactacaatattacattctgcaaatgttattctgttgtatcagatacaaaattttagtgaggtatctctaag

SEQ ID NO: 41375 - DNA, 201 bp, Homo sapiens; identical to SEQ ID NO: 32444
  misc_feature 38: n = A,T,C or G

SEQ ID NO: 41376 - DNA, 644 bp, Homo sapiens; identical to SEQ ID NO: 32445

SEQ ID NO: 41377 - DNA, 603 bp, Homo sapiens; identical to SEQ ID NO: 32446
  misc_feature 193, 194, 210, 216, 217, 243, 273: n = A,T,C or G

SEQ ID NO: 41378 - DNA, 324 bp, Homo sapiens; identical to SEQ ID NO: 32447
  misc_feature 42, 61: n = A,T,C or G

SEQ ID NO: 41379 - DNA, 613 bp, Homo sapiens; identical to SEQ ID NO: 32448

SEQ ID NO: 41380 - DNA, 557 bp, Homo sapiens; identical to SEQ ID NO: 32449

SEQ ID NO: 41381 - DNA, 643 bp, Homo sapiens; identical to SEQ ID NO: 32450

SEQ ID NO: 41382 - DNA, 608 bp, Homo sapiens; identical to SEQ ID NO: 32451

SEQ ID NO: 41383 - DNA, 506 bp, Homo sapiens; identical to SEQ ID NO: 39174

SEQ ID NO: 41384 - DNA, 386 bp, Homo sapiens; identical to SEQ ID NO: 32453
  misc_feature 158, 159, 229, 230, 243, 244, 312: n = A,T,C or G

SEQ ID NO: 41385 - DNA, 503 bp, Homo sapiens; identical to SEQ ID NO: 32539

SEQ ID NO: 41386 - DNA, 566 bp, Homo sapiens; identical to SEQ ID NO: 32455
  misc_feature 48, 87, 214, 215, 265, 270, 271, 310, 311, 323, 324: n = A,T,C or G

SEQ ID NO: 41387 - DNA, 471 bp, Homo sapiens; identical to SEQ ID NO: 32456
  misc_feature 31, 47, 65, 67, 71: n = A,T,C or G

SEQ ID NO: 41388 - DNA, 625 bp, Homo sapiens; identical to SEQ ID NO: 32457
  misc_feature 27, 28, 532, 597: n = A,T,C or G

SEQ ID NO: 41389 - DNA, 486 bp, Homo sapiens; identical to SEQ ID NO: 32458

SEQ ID NO: 41390 - DNA, 479 bp, Homo sapiens; identical to SEQ ID NO: 32459

SEQ ID NO: 41391 - DNA, 484 bp, Homo sapiens; identical to SEQ ID NO: 32460

SEQ ID NO: 41392 - DNA, 676 bp, Homo sapiens
tacgactcactatagggcgaattggagctccaccgcggtggcggccgcccgggcaggtaccaaagagggcataataatcagtctcacagtagggttcaccatcctccaagtgaaaaacattgttccgaatgggctttccacaggctacacacacaaaacaggaaacatgccaagtttgtttcaacgcattgatgacttctccaaggatcttcctttggcatcgaccacattcaggggcaaagaatttctcatagcacagctcacaatacagggctcctttctcctctacaaatccaatgtaggccattgtatttttgcagtgagcgcagttgaattcttctgggtgccaagatttccccagtgccactaagaatggtcctctgacagaagaaaaagaggccaactaagtttgagaataaaatttctagagttagcctggatatggacctcttttatgcaatgtccaaccaattaaatacttgctcaattttccttcttaaggactgaactcatgggtgttgggtgttgtaaattcacagagggactctgcattgatgtccccgcgtacctcggccgctctagaactagtggatcccccgggctggaggaattcgatatcaagcttatcgataccgtcgacctcgagggggggcccggtacccaacttttgttccct

SEQ ID NO: 41393 - DNA, 472 bp, Homo sapiens; identical to SEQ ID NO: 32462
  misc_feature 57: n = A,T,C or G

SEQ ID NO: 41394 - DNA, 478 bp, Homo sapiens; identical to SEQ ID NO: 32463

SEQ ID NO: 41395 - DNA, 489 bp, Homo sapiens; identical to SEQ ID NO: 32464

SEQ ID NO: 41396 - DNA, 576 bp, Homo sapiens
cgaattgggtaccgggccccccctcgaggtcgacggtatcgataagcttgatatcgaattcctgcagcccgggggatccactagttctagagcggccgcccgggcaggtacaaggtgctggagtcacctgcaatctcatatcctggtggaatgccatggttattaaagtgtgtttgtgatagtgtcgtcaaaaaaaaggtttttgaatagaaattacattctttgacaccctcagttctttcaaactttcaactctgcattttattgcattttctcatttaactgttagtatatgtttgaatataggctgaccttttttctctattgcactttcttctttttttctttttagaaaataagcaattaggggttagatgcaatatgaatataaaatagttctgtaaataccaaatattatttttagttctggaagttaaaaatactctccatagtaacgtgtgttataataataaatatttcttttgtttgacttttttaaaattctacaatggtaaaagctattttaatccatgttagcaatttaatttctattaattcattttactatcataatag

SEQ ID NO: 41397 - DNA, 423 bp, Homo sapiens; identical to SEQ ID NO: 32466

SEQ ID NO: 41398 - DNA, 486 bp, Homo sapiens; identical to SEQ ID NO: 32467

SEQ ID NO: 41399 - DNA, 485 bp, Homo sapiens; identical to SEQ ID NO: 32468

SEQ ID NO: 41400 - DNA, 558 bp, Homo sapiens; identical to SEQ ID NO: 32469
  misc_feature 131, 146: n = A,T,C or G

SEQ ID NO: 41401 - DNA, 451 bp, Homo sapiens; identical to SEQ ID NO: 32671

SEQ ID NO: 41402 - DNA, 547 bp, Homo sapiens; identical to SEQ ID NO: 32471

SEQ ID NO: 41403 - DNA, 478 bp, Homo sapiens; identical to SEQ ID NO: 32472
  misc_feature 165: n = A,T,C or G

SEQ ID NO: 41404 - DNA, 224 bp, Homo sapiens; identical to SEQ ID NO: 32473
  misc_feature 8, 52, 53, 55, 56, 64, 70, 71, 72, 96, 97, 107, 108, 122,130, 132, 137, 143, 154, 180, 201, 202, 204: n = A,T,C or G

SEQ ID NO: 41405 - DNA, 367 bp, Homo sapiens; identical to SEQ ID NO: 32474
  misc_feature 350: n = A,T,C or G

SEQ ID NO: 41406 - DNA, 434 bp, Homo sapiens; identical to SEQ ID NO: 32475

SEQ ID NO: 41407 - DNA, 318 bp, Homo sapiens; identical to SEQ ID NO: 32476

SEQ ID NO: 41408 - DNA, 477 bp, Homo sapiens; identical to SEQ ID NO: 32477

SEQ ID NO: 41409 - DNA, 473 bp, Homo sapiens; identical to SEQ ID NO: 32478

SEQ ID NO: 41410 - DNA, 426 bp, Homo sapiens; identical to SEQ ID NO: 32479

SEQ ID NO: 41411 - DNA, 501 bp, Homo sapiens; identical to SEQ ID NO: 32480

SEQ ID NO: 41412 - DNA, 486 bp, Homo sapiens; identical to SEQ ID NO: 32481

SEQ ID NO: 41413 - DNA, 449 bp, Homo sapiens; identical to SEQ ID NO: 32482

SEQ ID NO: 41414 - DNA, 519 bp, Homo sapiens; identical to SEQ ID NO: 32483

SEQ ID NO: 41415 - DNA, 430 bp, Homo sapiens; identical to SEQ ID NO: 32484

SEQ ID NO: 41416 - DNA, 515 bp, Homo sapiens; identical to SEQ ID NO: 32485

SEQ ID NO: 41417 - DNA, 517 bp, Homo sapiens; identical to SEQ ID NO: 32486

SEQ ID NO: 41418 - DNA, 402 bp, Homo sapiens; identical to SEQ ID NO: 32487

SEQ ID NO: 41419 - DNA, 462 bp, Homo sapiens; identical to SEQ ID NO: 32488

SEQ ID NO: 41420 - DNA, 407 bp, Homo sapiens; identical to SEQ ID NO: 32489

SEQ ID NO: 41421 - DNA, 408 bp, Homo sapiens; identical to SEQ ID NO: 32490

SEQ ID NO: 41422 - DNA, 400 bp, Homo sapiens; identical to SEQ ID NO: 32491

SEQ ID NO: 41423 - DNA, 448 bp, Homo sapiens; identical to SEQ ID NO: 32492

SEQ ID NO: 41424 - DNA, 412 bp, Homo sapiens; identical to SEQ ID NO: 32493

SEQ ID NO: 41425 - DNA, 406 bp, Homo sapiens; identical to SEQ ID NO: 32494

SEQ ID NO: 41426 - DNA, 397 bp, Homo sapiens; identical to SEQ ID NO: 32495

SEQ ID NO: 41427 - DNA, 402 bp, Homo sapiens; identical to SEQ ID NO: 32496

SEQ ID NO: 41428 - DNA, 403 bp, Homo sapiens; identical to SEQ ID NO: 32497

SEQ ID NO: 41429 - DNA, 407 bp, Homo sapiens; identical to SEQ ID NO: 32498

SEQ ID NO: 41430 - DNA, 418 bp, Homo sapiens; identical to SEQ ID NO: 32500

SEQ ID NO: 41431 - DNA, 396 bp, Homo sapiens; identical to SEQ ID NO: 32501

SEQ ID NO: 41432 - DNA, 402 bp, Homo sapiens; identical to SEQ ID NO: 32506

SEQ ID NO: 41433 - DNA, 410 bp, Homo sapiens; identical to SEQ ID NO: 32503

SEQ ID NO: 41434 - DNA, 397 bp, Homo sapiens; identical to SEQ ID NO: 32504

SEQ ID NO: 41435 - DNA, 403 bp, Homo sapiens; identical to SEQ ID NO: 32505

SEQ ID NO: 41436 - DNA, 402 bp, Homo sapiens; identical to SEQ ID NO: 32506

SEQ ID NO: 41437 - DNA, 396 bp, Homo sapiens; identical to SEQ ID NO: 32507

SEQ ID NO: 41438 - DNA, 602 bp, Homo sapiens; identical to SEQ ID NO: 33064

SEQ ID NO: 41439 - DNA, 376 bp, Homo sapiens; identical to SEQ ID NO: 32510

SEQ ID NO: 41440 - DNA, 374 bp, Homo sapiens; identical to SEQ ID NO: 32512

SEQ ID NO: 41441 - DNA, 400 bp, Homo sapiens; identical to SEQ ID NO: 32513

SEQ ID NO: 41442 - DNA, 587 bp, Homo sapiens; identical to SEQ ID NO: 32514
  misc_feature 209, 313: n = A,T,C or G

SEQ ID NO: 41443 - DNA, 470 bp, Homo sapiens; identical to SEQ ID NO: 33429

SEQ ID NO: 41444 - DNA, 398 bp, Homo sapiens; identical to SEQ ID NO: 32517

SEQ ID NO: 41445 - DNA, 646 bp, Homo sapiens; identical to SEQ ID NO: 32518

SEQ ID NO: 41446 - DNA, 522 bp, Homo sapiens; identical to SEQ ID NO: 32520

SEQ ID NO: 41447 - DNA, 638 bp, Homo sapiens
  misc_feature 613: n = A,T,C or G
ctatagggcgaattgggccctctagatgcatgctcgagcggccgccagtgtgatggatatctgcagaattcgccctttcgagcggccgcccgggcaggtacgcgggacatcaatgcagagtccctctgtgaatttacaacacccaacacccatgagttcagtccttaagaaggaaaattgagcaagtatttaattggttggacattgcataaaagaggtccatatccaggctaactctagaaattttattctcaaacttagttggcctctttttcttctgtcagaggaccattcttagtggcactggggaaatcttggcacccagaagaattcaactgcgctcactgcaaaaatacaatggcctacattggatttgtagaggagaaaggagccctgtattgtgagctgtgctatgagaaattctttgcccctgaatgtggtcgatgccaaaggaagatccttggagaagtcatcaatgcgttgaaacaaacttggcatgcttcctgttttgtgtgtgtagcctgtggaaagcccattcggaacaatgtttttcacttggaggatggcgaaccctactgtgagactgattattatgccctctttggtacgcggngagcctcgtgccgggagtcgccgca

SEQ ID NO: 41448 - DNA, 510 bp, Homo sapiens; identical to SEQ ID NO: 32522

SEQ ID NO: 41449 - DNA, 461 bp, Homo sapiens; identical to SEQ ID NO: 32550

SEQ ID NO: 41450 - DNA, 369 bp, Homo sapiens; identical to SEQ ID NO: 32524

SEQ ID NO: 41451 - DNA, 413 bp, Homo sapiens; identical to SEQ ID NO: 32525

SEQ ID NO: 41452 - DNA, 253 bp, Homo sapiens; identical to SEQ ID NO: 32526

SEQ ID NO: 41453 - DNA, 452 bp, Homo sapiens; identical to SEQ ID NO: 32527

SEQ ID NO: 41454 - DNA, 312 bp, Homo sapiens; identical to SEQ ID NO: 32528

SEQ ID NO: 41455 - DNA, 269 bp, Homo sapiens; identical to SEQ ID NO: 32529

SEQ ID NO: 41456 - DNA, 514 bp, Homo sapiens; identical to SEQ ID NO: 32530

SEQ ID NO: 41457 - DNA, 634 bp, Homo sapiens; identical to SEQ ID NO: 32531

SEQ ID NO: 41458 - DNA, 418 bp, Homo sapiens; identical to SEQ ID NO: 32532
  misc_feature 67, 123: n = A,T,C or G

SEQ ID NO: 41459 - DNA, 515 bp, Homo sapiens
  misc_feature 371: n = A,T,C or G
gcgtccgctggtgcatggcagattggtcttgccgattttgtgggaattattgacaatcgttaccccaaaacaaaaatcttccagtttttaaaattgactacttggattttacctaaagttaccaaacataagcctttaaaaaatgctctggcagtgtttactgatggttccagcaatggaaaagtggcttacaccgggccaaaagaatgagtcatcaaaactcagtatcacttgactcaaagagcagagttggttgccgtcattacagtgttaacaagattttaatcagtctattaacattgtatcagattctgcatatgtagtacaggctacaaaggatattgagagagccctaatcaaatacattatgngatgatcagttaaacccgctgtttaatttgttacaacaaaatgtaagaaaaagaaatttcccattttatattactcatattcgagcacacactaatttaccagggcctttaactaaagcaaatgaacaagctgacttgctagta

SEQ ID NO: 41460 - DNA, 516 bp, Homo sapiens; identical to SEQ ID NO: 32534

SEQ ID NO: 41461 - DNA, 445 bp, Homo sapiens; identical to SEQ ID NO: 32535

SEQ ID NO: 41462 - DNA, 456 bp, Homo sapiens; identical to SEQ ID NO: 32536

SEQ ID NO: 41463 - DNA, 489 bp, Homo sapiens; identical to SEQ ID NO: 32537

SEQ ID NO: 41464 - DNA, 338 bp, Homo sapiens; identical to SEQ ID NO: 32538

SEQ ID NO: 41465 - DNA, 503 bp, Homo sapiens; identical to SEQ ID NO: 32539

SEQ ID NO: 41466 - DNA, 562 bp, Homo sapiens
  misc_feature 536: n = A,T,C or G
tccaccgcggtggcggccgaggtactctgagccctaacagctacttagccaaccacttcttctctgagctatatcagagccacctatctctagctgcctatttgttccagaagaattcaacccaggggaatggttttgccacccaggcatagggaaacgagggggcttttaaattcacagagattagaagtccagacaatgcaggaaattcacagataatatccaaagtagccaacctgccctccaaaataaaattctgatttgacccagtgaggtaagcccaggtaaggtgagcttcacttcctgccagccgtctccaagagtctgttctagtttcatctgtccagtttaaagcaggcttctctttccactcaagtgtttggattccagattcaaaagaagttttaaaaatcaggacttacctcatttacctaaagattctgggtgggaaatccaatagctgtggctgatggaggggaggcagcaggctgcaatctcaccagctcctatagggatggggcaccacgggtgttatnccccgcgtacctgcccgggcggccgc

SEQ ID NO: 41467 - DNA, 492 bp, Homo sapiens; identical to SEQ ID NO: 32541

SEQ ID NO: 41468 - DNA, 368 bp, Homo sapiens; identical to SEQ ID NO: 32542
  misc_feature 41, 42, 43, 44, 45, 46, 77, 79, 80, 85, 244, 245, 314, 315,340, 341: n = A,T,C or G

SEQ ID NO: 41469 - DNA, 427 bp, Homo sapiens; identical to SEQ ID NO: 32543

SEQ ID NO: 41470 - DNA, 507 bp, Homo sapiens; identical to SEQ ID NO: 32544

SEQ ID NO: 41471 - DNA, 523 bp, Homo sapiens; identical to SEQ ID NO: 36753
  misc_feature 486: n = A,T,C or G

SEQ ID NO: 41472 - DNA, 449 bp, Homo sapiens; identical to SEQ ID NO: 32546

SEQ ID NO: 41473 - DNA, 481 bp, Homo sapiens; identical to SEQ ID NO: 32547
  misc_feature 431: n = A,T,C or G

SEQ ID NO: 41474 - DNA, 346 bp, Homo sapiens; identical to SEQ ID NO: 32548

SEQ ID NO: 41475 - DNA, 442 bp, Homo sapiens; identical to SEQ ID NO: 32549

SEQ ID NO: 41476 - DNA, 513 bp, Homo sapiens; identical to SEQ ID NO: 32626
  misc_feature 222: n = A,T,C or G

SEQ ID NO: 41477 - DNA, 480 bp, Homo sapiens; identical to SEQ ID NO: 32551

SEQ ID NO: 41478 - DNA, 471 bp, Homo sapiens; identical to SEQ ID NO: 32552

SEQ ID NO: 41479 - DNA, 461 bp, Homo sapiens; identical to SEQ ID NO: 33269

SEQ ID NO: 41480 - DNA, 455 bp, Homo sapiens; identical to SEQ ID NO: 32554

SEQ ID NO: 41481 - DNA, 479 bp, Homo sapiens; identical to SEQ ID NO: 32555

SEQ ID NO: 41482 - DNA, 527 bp, Homo sapiens; identical to SEQ ID NO: 32556

SEQ ID NO: 41483 - DNA, 638 bp, Homo sapiens; identical to SEQ ID NO: 41447
  misc_feature 613: n = A,T,C or G

SEQ ID NO: 41484 - DNA, 392 bp, Homo sapiens; identical to SEQ ID NO: 32558

SEQ ID NO: 41485 - DNA, 635 bp, Homo sapiens; identical to SEQ ID NO: 34307

SEQ ID NO: 41486 - DNA, 474 bp, Homo sapiens; identical to SEQ ID NO: 32560

SEQ ID NO: 41487 - DNA, 467 bp, Homo sapiens; identical to SEQ ID NO: 32561

SEQ ID NO: 41488 - DNA, 250 bp, Homo sapiens; identical to SEQ ID NO: 32562

SEQ ID NO: 41489 - DNA, 429 bp, Homo sapiens; identical to SEQ ID NO: 32563

SEQ ID NO: 41490 - DNA, 566 bp, Homo sapiens
cgggccccccctcgagagtctttgattaattaacgcggggaacaagccctgaaaaattggtttggaagtagcgttaaaaacctggtgattaaatgacaacaagaacgtgagaagagatttttccaaaatccatttagtgtgtttggacagaaacaaaggaaagataactctttgttaaattggttaatagaggatttgaacactttgtttgctgtagacaaaacatctttatcttaaaactgtaatctttctaacttctgttgcatgcattgctgcatttccttttttacatgtgctctcatttattttcacggcaaatgcatttttagacagagtctgtgggataattattgccattaattagttttgatatttcttttttaatgatattttcatttattcccttttgctagctggattgccttttgcaattcttacttcaaggcatacccccttccaacgaggagtattctgtaatgatgagtccatcaagtacccttacaaagaagacaccataccttatgcgttattaggtggaataatcattccattcagtattatcgtta

SEQ ID NO: 41491 - DNA, 481 bp, Homo sapiens; identical to SEQ ID NO: 32565

SEQ ID NO: 41492 - DNA, 590 bp, Homo sapiens; identical to SEQ ID NO: 36591

SEQ ID NO: 41493 - DNA, 478 bp, Homo sapiens; identical to SEQ ID NO: 32567
  misc_feature 158: n = A,T,C or G

SEQ ID NO: 41494 - DNA, 450 bp, Homo sapiens; identical to SEQ ID NO: 32568

SEQ ID NO: 41495 - DNA, 489 bp, Homo sapiens; identical to SEQ ID NO: 32569

SEQ ID NO: 41496 - DNA, 430 bp, Homo sapiens; identical to SEQ ID NO: 32570

SEQ ID NO: 41497 - DNA, 444 bp, Homo sapiens; identical to SEQ ID NO: 34063

SEQ ID NO: 41498 - DNA, 451 bp, Homo sapiens; identical to SEQ ID NO: 32572

SEQ ID NO: 41499 - DNA, 459 bp, Homo sapiens; identical to SEQ ID NO: 32573

SEQ ID NO: 41500 - DNA, 472 bp, Homo sapiens; identical to SEQ ID NO: 33414

SEQ ID NO: 41501 - DNA, 326 bp, Homo sapiens; identical to SEQ ID NO: 32575

SEQ ID NO: 41502 - DNA, 459 bp, Homo sapiens; identical to SEQ ID NO: 32576

SEQ ID NO: 41503 - DNA, 400 bp, Homo sapiens; identical to SEQ ID NO: 32577

SEQ ID NO: 41504 - DNA, 385 bp, Homo sapiens; identical to SEQ ID NO: 32578

SEQ ID NO: 41505 - DNA, 534 bp, Homo sapiens; identical to SEQ ID NO: 32579

SEQ ID NO: 41506 - DNA, 433 bp, Homo sapiens; identical to SEQ ID NO: 32580

SEQ ID NO: 41507 - DNA, 658 bp, Homo sapiens; identical to SEQ ID NO: 32642

SEQ ID NO: 41508 - DNA, 643 bp, Homo sapiens; identical to SEQ ID NO: 32450

SEQ ID NO: 41509 - DNA, 512 bp, Homo sapiens; identical to SEQ ID NO: 32583

SEQ ID NO: 41510 - DNA, 433 bp, Homo sapiens; identical to SEQ ID NO: 32584

SEQ ID NO: 41511 - DNA, 470 bp, Homo sapiens; identical to SEQ ID NO: 32585

SEQ ID NO: 41512 - DNA, 432 bp, Homo sapiens; identical to SEQ ID NO: 32586

SEQ ID NO: 41513 - DNA, 361 bp, Homo sapiens; identical to SEQ ID NO: 32587

SEQ ID NO: 41514 - DNA, 435 bp, Homo sapiens; identical to SEQ ID NO: 32588

SEQ ID NO: 41515 - DNA, 621 bp, Homo sapiens
ctatagggcgaattggagctccaccgcggtggcggccgaggtaccaaagagggcataataatcagtctcacagtagggttcaccatcctccaagtgaaaaacattgttccgaatgggctttccacaggctacacacacaaaacaggaaacatgccaagtttgtttcaacgcattgatgacttctccaaggatcttcctttggcatcgaccacattcaggggcaaagaatttctcatagcacagctcacaatacagggctcctttctcctctacaaatccaatgtaggccattgtatttttgcagtgagcgcagttgaattcttctgggtgccaagatttccccagtgccactaagaatggtcctctgacagaagaaaaagaggccaactaagtttgagaataaaatttctagagttagcctggatatggacctcttttatgcaatgtccaaccaattaaatacttgctcaattttccttcttaaggactgaactcatgggtgttgggtgttgtaaattcacagagggactctgcattgatgtccccgcgtacctgcccgggcggccgctcgataatacggttatccacagaatcaagggataacgcaagaaagaacatgtg

SEQ ID NO: 41516 - DNA, 493 bp, Homo sapiens; identical to SEQ ID NO: 33403

SEQ ID NO: 41517 - DNA, 436 bp, Homo sapiens; identical to SEQ ID NO: 32591

SEQ ID NO: 41518 - DNA, 513 bp, Homo sapiens; identical to SEQ ID NO: 32592

SEQ ID NO: 41519 - DNA, 408 bp, Homo sapiens; identical to SEQ ID NO: 30571

SEQ ID NO: 41520 - DNA, 676 bp, Homo sapiens; identical to SEQ ID NO: 41392

SEQ ID NO: 41521 - DNA, 573 bp, Homo sapiens
gactactatagggcgaattggagctccaccgcggtggcggccgcccgggcaggtaccagttgtaaaattaccaggaaccgccatgcctcaagatcgccctgttttctggcttcatcaatgactgcatgcagtgcaccaccctgtccactacgtgatgctgtaggattaagtctcacagtgggcggctgaggatacagcgccgcgtcctgtgttgctggtgaattagacgccatcgctgtgggttgctggtatggtgccgtgctatttggcacaggacacaccgcttgaggtctgtattgaacctctgaaggaggccgatactgaagctcggttggcaaccggtattgataaactaccagcggttgggtcttattttctaccggctgatattgtggatactgtatctgagttggcattgccgggatagagactctgtccctttctacttgattttctcttggggtttgtgcttgtctaacctgcgtttgaggttgtaatgttacaggcatctgaaccgcgggaggaggagttgatggcgatcgtggtttaggctctgatggccccaatgattct

SEQ ID NO: 41522 - DNA, 398 bp, Homo sapiens; identical to SEQ ID NO: 32596

SEQ ID NO: 41523 - DNA, 397 bp, Homo sapiens; identical to SEQ ID NO: 32597

SEQ ID NO: 41524 - DNA, 484 bp, Homo sapiens
atacgactcactatagggcgaattggagctccaccgcggtggcggccgaggtaccagttgtaaaattaccaggaaccgccatgcctcaagatcgccctgttttctggcttcatcaatgactgcatgcagtgcaccaccctgtccactacgtgatgctgtaggattaagtctcacagtgggcggctgaggatacagcgccgcgtcctgtgttgctggtgaattagacgccatcgctgtgggttgctggtatggtgccgtgctatttggcacaggacacaccgcttgaggtctgtattgaacctctgaaggaggccgatactgaagctcggttggcagccggtattgataaactaccagcggttgggtcttattttctaccggctgatattgtggatactgtatctgagttggcattgccgggatagagactctgtccctttctacttgattttctcttggggtttgtgcttgtctaacctgcgtt

SEQ ID NO: 41525 - DNA, 452 bp, Homo sapiens; identical to SEQ ID NO: 32599

SEQ ID NO: 41526 - DNA, 508 bp, Homo sapiens; identical to SEQ ID NO: 34139

SEQ ID NO: 41527 - DNA, 420 bp, Homo sapiens; identical to SEQ ID NO: 32601

SEQ ID NO: 41528 - DNA, 496 bp, Homo sapiens
attggagctccaccgcggtggcggccgaggtacagatctgggaactaaatattaaaaatgagtgtggctggatatatggagaatgttgggcccagaaggaaccgtagagatcagatattacaacagctttgttttgagggttagaaatatgaaatgatttggttatgaacgcacagtttaggcagcagggccagaatcctgaccctctgccccgtggttatctcctccccagcttggctgcctcatgtcatcacagtattccattttgtttgttgcatgtcttgtgaagccatcaagattttctcgtctgttttcctctcattggtaatgctcactttgtgacttcatttcaaatctgtaatcccgttcaaataaatatccacaacaggatctgttttcctgcccatcctttaaggaacacatcaattcattttctaatgtccttccctcacaagcgggaccaggcccaaggcgaggcttatcgatgacccaagat

SEQ ID NO: 41529 - DNA, 646 bp, Homo sapiens; identical to SEQ ID NO: 36473

SEQ ID NO: 41530 - DNA, 429 bp, Homo sapiens
tagggcgaattggagctccaccgcggtggcggccgcccgggcaggtacttaggaagaccacagctagatggacaaacagcattgggaggccttagccctgctcctctcaattccatcctgtagagaacaggagtcaggagccgctggcgggagacagcatgtcacccaggactctgccggtgcagaatatgaacaatgccatgttcttgcagaaaacgcttagcccgagtttcataggaggtaatcaccagacagctgcagaatgtagaacactgagtaggacagctgacctgtctccttcacatagtccatgtcaccacaaatcacacaacaaaaaggagaggatatattttgggttcaaaaaaagtaaaaagataatgtagctgcatttctttagttattttgggccccaaatatttcctcatcttt

SEQ ID NO: 41531 - DNA, 484 bp, Homo sapiens; identical to SEQ ID NO: 32605

SEQ ID NO: 41532 - DNA, 389 bp, Homo sapiens; identical to SEQ ID NO: 32606

SEQ ID NO: 41533 - DNA, 575 bp, Homo sapiens
ttgggccctctagatgcatgctcgagcggccgccagtgtgatggatatctgcagaattcggcttagcgtggtcgcggccgaggtacaaaaatgaggcaggtgtattttctcccatctaacaggggatgaccacatgaaaagaactggtggcctgtgtgtcccatggtcttacagggcagtggtggagggtggcccggtcatccactttcatatgatttcatgtatttggaaataaaaactcatggatagtgactggaagtggatcagtggttacccataaattcattgccaagtgcaatgtccagacgaatatttcctaggttttcttccaggatttttatagtcagaggatgtaatcttatgccaacgggtcttaataatcaaatgactccacagtgagaatcattactctgaaaaattgattttgttataatgatggaaatttaaatattttgaaagtaaaaacacatgccacctttttcctagaactctgcaaggcaaattgctgtaagacaggcagaggaagcacaatatatatatatatccaaaatataatttgcagtgaaaaaaaaaaa

SEQ ID NO: 41534 - DNA, 392 bp, Homo sapiens; identical to SEQ ID NO: 32608

SEQ ID NO: 41535 - DNA, 413 bp, Homo sapiens; identical to SEQ ID NO: 32609

SEQ ID NO: 41536 - DNA, 406 bp, Homo sapiens; identical to SEQ ID NO: 32610

SEQ ID NO: 41537 - DNA, 406 bp, Homo sapiens; identical to SEQ ID NO: 32611

SEQ ID NO: 41538 - DNA, 410 bp, Homo sapiens; identical to SEQ ID NO: 32612
  misc_feature 268, 325: n = A,T,C or G

SEQ ID NO: 41539 - DNA, 412 bp, Homo sapiens; identical to SEQ ID NO: 32613

SEQ ID NO: 41540 - DNA, 408 bp, Homo sapiens; identical to SEQ ID NO: 32614

SEQ ID NO: 41541 - DNA, 465 bp, Homo sapiens; identical to SEQ ID NO: 35015

SEQ ID NO: 41542 - DNA, 443 bp, Homo sapiens
ctactatagggcgaattggagctccaccgcggtggcggccgcccgggcaggtacgcgggggagttcagtccttaagaaggaaaattgagcaagtatttaattggttggacattgcataaaagaggtccatatccaggctaactctagaaattttattctcaaacttagttggcctcttttttttctgtcagaggaccattcttagtggcactggggaaatcttggcacccagaagaattcaactgcgctcactgcaaaaatacaatggcctacattggatttgtagaggagaaaggagccctgtattgtgagctgtgctatgagaaattctttgcccctgaatgtggtcgatgccaaaggaagatccttggagaagtcatcaatgcgttgaaacaaacttggcatgtttcctgttttgtgtgtgtagcctgtggaaagcccat

SEQ ID NO: 41543 - DNA, 631 bp, Homo sapiens; identical to SEQ ID NO: 32617

SEQ ID NO: 41544 - DNA, 614 bp, Homo sapiens; identical to SEQ ID NO: 32618

SEQ ID NO: 41545 - DNA, 556 bp, Homo sapiens; identical to SEQ ID NO: 32619
  misc_feature 391: n = A,T,C or G

SEQ ID NO: 41546 - DNA, 605 bp, Homo sapiens; identical to SEQ ID NO: 32620

SEQ ID NO: 41547 - DNA, 619 bp, Homo sapiens
  misc_feature 571, 572: n = A,T,C or G
ccgggccccccctcggaagtcttctagaattaattaacgcgggggaggggagagcccgagcgctggagttggtgctgggaaacccggggctaatgttgacaacaggctcgagattgtcctgggtcacataatgccagctgagcgtaaaaagccagcaagtatggaagaaaaagactctttaccaaacaacaaggaaaagactgcagtgaaaggcggacagtgagcagcaaggagaggccaaaagacgatatcaagctcactgccaagaaggaggtcagcaaggcccctgaagacaagaagaagagactggaagatgataagagaaaaaaggaagacaaggaacgcaagaaaaaagacgaagaaaaggtgaagacagaggaagaatcaaagaaaaaagaagaggaagaaaaaaagaaacaccaaaaaaaaaaaaaaaagcggccgccaccgcggtggagctccaattcgccctatagtgagtcgtattacgcgcgctcactggccgtcgttttacaacgtcgtgactgggaaaaccctggcgttacccaacttaatcgccttgcagcgcatnncccctttcgccagctgggcgtaatagcgaagaggcccgcaccgatcg

SEQ ID NO: 41548 - DNA, 532 bp, Homo sapiens; identical to SEQ ID NO: 32622

SEQ ID NO: 41549 - DNA, 520 bp, Homo sapiens; identical to SEQ ID NO: 32623

SEQ ID NO: 41550 - DNA, 558 bp, Homo sapiens; identical to SEQ ID NO: 32624
  misc_feature 164: n = A,T,C or G

SEQ ID NO: 41551 - DNA, 658 bp, Homo sapiens; identical to SEQ ID NO: 32642

SEQ ID NO: 41552 - DNA, 513 bp, Homo sapiens; identical to SEQ ID NO: 32626
  misc_feature 222: n = A,T,C or G

SEQ ID NO: 41553 - DNA, 379 bp, Homo sapiens; identical to SEQ ID NO: 32627

SEQ ID NO: 41554 - DNA, 397 bp, Homo sapiens; identical to SEQ ID NO: 32628

SEQ ID NO: 41555 - DNA, 386 bp, Homo sapiens; identical to SEQ ID NO: 32629

SEQ ID NO: 41556 - DNA, 398 bp, Homo sapiens; identical to SEQ ID NO: 32630
  misc_feature 361, 362, 364: n = A,T,C or G

SEQ ID NO: 41557 - DNA, 400 bp, Homo sapiens; identical to SEQ ID NO: 32631

SEQ ID NO: 41558 - DNA, 624 bp, Homo sapiens; identical to SEQ ID NO: 32632
  misc_feature 522, 535, 538: n = A,T,C or G

SEQ ID NO: 41559 - DNA, 704 bp, Homo sapiens; identical to SEQ ID NO: 32633

SEQ ID NO: 41560 - DNA, 399 bp, Homo sapiens; identical to SEQ ID NO: 32634

SEQ ID NO: 41561 - DNA, 633 bp, Homo sapiens; identical to SEQ ID NO: 32635

SEQ ID NO: 41562 - DNA, 489 bp, Homo sapiens; identical to SEQ ID NO: 32636

SEQ ID NO: 41563 - DNA, 530 bp, Homo sapiens; identical to SEQ ID NO: 32637

SEQ ID NO: 41564 - DNA, 608 bp, Homo sapiens; identical to SEQ ID NO: 32638

SEQ ID NO: 41565 - DNA, 536 bp, Homo sapiens; identical to SEQ ID NO: 30716
  misc_feature 49: n = A,T,C or G

SEQ ID NO: 41566 - DNA, 548 bp, Homo sapiens; identical to SEQ ID NO: 32640

SEQ ID NO: 41567 - DNA, 500 bp, Homo sapiens; identical to SEQ ID NO: 32641

SEQ ID NO: 41568 - DNA, 658 bp, Homo sapiens; identical to SEQ ID NO: 32642

SEQ ID NO: 41569 - DNA, 580 bp, Homo sapiens; identical to SEQ ID NO: 32643
  misc_feature 535: n = A,T,C or G

SEQ ID NO: 41570 - DNA, 579 bp, Homo sapiens; identical to SEQ ID NO: 37241

SEQ ID NO: 41571 - DNA, 562 bp, Homo sapiens; identical to SEQ ID NO: 32645

SEQ ID NO: 41572 - DNA, 539 bp, Homo sapiens; identical to SEQ ID NO: 32646

SEQ ID NO: 41573 - DNA, 600 bp, Homo sapiens
ggcgaattgggccctctagatgcatgctcgagcggccgccagtgtgatggatatctgcagaattcgccctttcgagcggccgcccgggcaggtacatttttattatccttataccagttataacttcattcatggtcctgatcctggcatccgtgaaagttgcagttactcctcagtgatgagaacaacttcccaaaacagctttgcaagggcaggagaatgattagaactgccatcccagcaaggcacgatattcctatctccatccagagtagggcagtcactgcgatcgcctgcagtggtcctgcccacaggaagtgtaagaacactgtcacctgatcaaacttgttcacatcattggacagcagattgactatctggcctgtggttgtcttccccatggccatgttactaagacgaagtgcatctgacagagaacaagcaattattttttcaatgaagcaaagttaccagtgtttctcattaatgtagaaaactaaagtttggttccaataaagtgtccatgttatagtttaaaagagttcacatccaatgtacctcggccgcgaccacgctaagggcgaattccagcacactggc

SEQ ID NO: 41574 - DNA, 538 bp, Homo sapiens
  misc_feature 515: n = A,T,C or G
tccaccgcggtggcggccgcccgggcaggtacttgggatatattggtgaacaaaacagaaatgtctgtgccttcttggatcatgtgttttagaattatgagaattaaatgaaaataaatattcaatatggtgccagacacatagaggtgcccacagtgtcttatctcactttcttcctgcttgccatatcttttccatcagggccaaagagaatgggaagtgggaagaaataaacttcatatttcatttgtatagctgtggagagtagcaggccctgggtccctttggggaggtcatgcgaactgggcatggccttctgtcaagaattattagaccaggcatggtggctcatgcctgtaatcctagcactttgggaggctgaggcaggaggattgcttgaggccaggagtttgagaccagcatagccaacatggtgaaaccctgtctctaataaaattaaaaattagccggcatggtggcacatgcctgaaatctcaggtctccaggaggctgangcatgagaattgcttgaacctgg

SEQ ID NO: 41575 - DNA, 594 bp, Homo sapiens; identical to SEQ ID NO: 32649

SEQ ID NO: 41576 - DNA, 454 bp, Homo sapiens; identical to SEQ ID NO: 32650

SEQ ID NO: 41577 - DNA, 393 bp, Homo sapiens; identical to SEQ ID NO: 32651

SEQ ID NO: 41578 - DNA, 476 bp, Homo sapiens; identical to SEQ ID NO: 32652

SEQ ID NO: 41579 - DNA, 512 bp, Homo sapiens; identical to SEQ ID NO: 32653

SEQ ID NO: 41580 - DNA, 467 bp, Homo sapiens; identical to SEQ ID NO: 32654

SEQ ID NO: 41581 - DNA, 658 bp, Homo sapiens; identical to SEQ ID NO: 32642

SEQ ID NO: 41582 - DNA, 585 bp, Homo sapiens
atacgactcactatagggcgaattgggccctctagatgcatgctcgagcggccgccagtgtgatggatatctgcagaattcgcccttagcgtggtcgcggccgaggtacatctacctaaaggactattatgtggaataatacatactaatgaagtatcacatgatttaaagactacaataaaaccaaacatgcttataacattaagaaaaacaataaagatacatgattgaaaccaagttgaaaaatagcatatgccttggaggaaatgtgctcaaattactaatgatttagtgttgtccctactttctctctcttttttctttcttttttttttattatggttagctgtcacatacaactttttttttttgagatggggtctcgctctgtcaccaggctggagtgcagtggcgcgatctcggctcactgcaacctccacatcccatgttgaagtaattcttctgcctcagcctcccgagtagctgggactagaggaacgtgccaccatgactggctaattttctgtattttttagtagagacagagtttcaccatgttggccaggatggtctcgatctcctgac

SEQ ID NO: 41583 - DNA, 587 bp, Homo sapiens
gcgaatgggccctctaaatgcatgctcgacggccgccagtgtgatggatatctgcagaattcggcttagcgtggtcgcggccgaggtacttttttttactttggcaacaaatatttatacatacaagatgctagttcatttgaatatttctcccaacttatccaaggatctccagctctaacaaaatggtttatttttatttaaatgtcaatagttgttttttaaaatccaaatcagaggtgcaggccaccagttaaatgccgtctatcaggttttgtgccttaagagactacagagtcaaagctcatttttaaaggagtaggacaaagttgtcacaggtttttgttgttgtttttattgcccccaaaattacatgttaatttccatttatatcagggattctatttacttgaagactgtgaagttgccattttgtctcattgttttctttgacataactaggatccattatttcccctgaaggcttcttgttagaaaatagtacctgcccgggcggccgctcgaaagccgaattccagcacactggcggccgttactagtggatccgagctcggtaccaagcttgg

SEQ ID NO: 41584 - DNA, 423 bp, Homo sapiens; identical to SEQ ID NO: 32815

SEQ ID NO: 41585 - DNA, 606 bp, Homo sapiens; identical to SEQ ID NO: 36757

SEQ ID NO: 41586 - DNA, 444 bp, Homo sapiens; identical to SEQ ID NO: 32842

SEQ ID NO: 41587 - DNA, 477 bp, Homo sapiens; identical to SEQ ID NO: 32661

SEQ ID NO: 41588 - DNA, 671 bp, Homo sapiens; identical to SEQ ID NO: 38621

SEQ ID NO: 41589 - DNA, 646 bp, Homo sapiens; identical to SEQ ID NO: 36473

SEQ ID NO: 41590 - DNA, 521 bp, Homo sapiens; identical to SEQ ID NO: 32664

SEQ ID NO: 41591 - DNA, 577 bp, Homo sapiens
  misc_feature 521: n = A,T,C or G
acgactcactatagggcgaattggagctccaccgcggtggcggccgcccgggcaggtaccaaagagggcataataatcagtctcacagtagggttcaccatcctccaagtgaaaaacattgttccgaatgggctttccacaggctacacacacaaaacaggaaacatgccaagtttgtttcaacgcattgatgacttctccaaggatcttcctttggcatcgaccacattcaggggcaaagaatttctcatagcacagctcacaatacagggctcctttctcctctacaaatccaatgtaggccattgtatttttgcagtgagcgcagttgaattcttctgggtgccaagatttccccagtgccactaagaatggtcctctgacagaaaaaaaagaggccaactaagtttgagaataaaatttctagagttagcctggatatggacctcttttatgcaatgtccaaccaattaaatacttgctcaattttccttcttaaggactgaactcatgggtgttgngtgttgtaaattcacagagggactctgcattgatgtgaaaagaaaacgggagacgt

SEQ ID NO: 41592 - DNA, 606 bp, Homo sapiens; identical to SEQ ID NO: 33276
  misc_feature 597: n = A,T,C or G

SEQ ID NO: 41593 - DNA, 463 bp, Homo sapiens; identical to SEQ ID NO: 32667

SEQ ID NO: 41594 - DNA, 463 bp, Homo sapiens; identical to SEQ ID NO: 32668

SEQ ID NO: 41595 - DNA, 461 bp, Homo sapiens; identical to SEQ ID NO: 33380

SEQ ID NO: 41596 - DNA, 446 bp, Homo sapiens; identical to SEQ ID NO: 32670

SEQ ID NO: 41597 - DNA, 451 bp, Homo sapiens; identical to SEQ ID NO: 32671

SEQ ID NO: 41598 - DNA, 450 bp, Homo sapiens; identical to SEQ ID NO: 32672

SEQ ID NO: 41599 - DNA, 513 bp, Homo sapiens; identical to SEQ ID NO: 32626
  misc_feature 222: n = A,T,C or G

SEQ ID NO: 41600 - DNA, 443 bp, Homo sapiens; identical to SEQ ID NO: 33052

SEQ ID NO: 41601 - DNA, 563 bp, Homo sapiens; identical to SEQ ID NO: 33586

SEQ ID NO: 41602 - DNA, 446 bp, Homo sapiens; identical to SEQ ID NO: 32676

SEQ ID NO: 41603 - DNA, 478 bp, Homo sapiens
ctactatagggcgaattggagctccaccgcggtggcggccgcccgggcaggtactgaggctgtatcagccacagcctctccccatccctccagccttatctgtcatcaccatcaacccctcccatgcacctaaacaaaatctaacttgtaattccttgaacatgtcaggcatacattattccttctgcctgagaagctcttccttgtctcttaaatctagaatgatgtaaagttttgaataagttgactatcttacttcatgcaaagaagggacacatatgagattcatcatcacatgagacagcaaatactaaaagtgtaatttgattataagagtttagataaatatatgaaatgcaagatccacagagggaatgtttatggggcacgtttgtaagcctgggatgtgaagcaaaggcagggaacctcataggatcttatataatatacttcatttctctatctctatcacaatatc

SEQ ID NO: 41604 - DNA, 407 bp, Homo sapiens; identical to SEQ ID NO: 32678

SEQ ID NO: 41605 - DNA, 436 bp, Homo sapiens; identical to SEQ ID NO: 32434

SEQ ID NO: 41606 - DNA, 402 bp, Homo sapiens; identical to SEQ ID NO: 32680

SEQ ID NO: 41607 - DNA, 341 bp, Homo sapiens; identical to SEQ ID NO: 32681

SEQ ID NO: 41608 - DNA, 462 bp, Homo sapiens; identical to SEQ ID NO: 33419

SEQ ID NO: 41609 - DNA, 475 bp, Homo sapiens; identical to SEQ ID NO: 36986

SEQ ID NO: 41610 - DNA, 415 bp, Homo sapiens; identical to SEQ ID NO: 32684

SEQ ID NO: 41611 - DNA, 236 bp, Homo sapiens; identical to SEQ ID NO: 32685

SEQ ID NO: 41612 - DNA, 345 bp, Homo sapiens; identical to SEQ ID NO: 32686

SEQ ID NO: 41613 - DNA, 448 bp, Homo sapiens; identical to SEQ ID NO: 38537

SEQ ID NO: 41614 - DNA, 658 bp, Homo sapiens; identical to SEQ ID NO: 32642

SEQ ID NO: 41615 - DNA, 422 bp, Homo sapiens; identical to SEQ ID NO: 32689

SEQ ID NO: 41616 - DNA, 608 bp, Homo sapiens; identical to SEQ ID NO: 36699

SEQ ID NO: 41617 - DNA, 424 bp, Homo sapiens; identical to SEQ ID NO: 32691

SEQ ID NO: 41618 - DNA, 513 bp, Homo sapiens; identical to SEQ ID NO: 32626
  misc_feature 222: n = A,T,C or G

SEQ ID NO: 41619 - DNA, 408 bp, Homo sapiens; identical to SEQ ID NO: 32693

SEQ ID NO: 41620 - DNA, 448 bp, Homo sapiens; identical to SEQ ID NO: 33163

SEQ ID NO: 41621 - DNA, 403 bp, Homo sapiens; identical to SEQ ID NO: 32695

SEQ ID NO: 41622 - DNA, 429 bp, Homo sapiens; identical to SEQ ID NO: 32696

SEQ ID NO: 41623 - DNA, 520 bp, Homo sapiens; identical to SEQ ID NO: 36617
  misc_feature 24: n = A,T,C or G

SEQ ID NO: 41624 - DNA, 462 bp, Homo sapiens; identical to SEQ ID NO: 33362

SEQ ID NO: 41625 - DNA, 407 bp, Homo sapiens
gcgtaatacgactcactatagggcgaattggagctccaccgcggtggcggccgaggtacagatctcatcaggtatgagggcagtctctgacgcgaacgtctcttcctcgtggtttttattgtcagtattcacacgaagtttaagtctcctagtgggcacccagacgggattgacgatctcctggtaaaacacaagcataccctcttccccacgttataattgttccaggttcccaggtattggtttgggagtttttccatgacactggcttgccttcgtttagggagaattttttgcctgtataatggcatttagctgcagtcagagtattgtttttaggaacatttagaaagcttaaacaatgctaaatataattgggagtggggagtagttaaattatgctttta

SEQ ID NO: 41626 - DNA, 332 bp, Homo sapiens; identical to SEQ ID NO: 32700

SEQ ID NO: 41627 - DNA, 608 bp, Homo sapiens; identical to SEQ ID NO: 36699

SEQ ID NO: 41628 - DNA, 421 bp, Homo sapiens; identical to SEQ ID NO: 32702

SEQ ID NO: 41629 - DNA, 393 bp, Homo sapiens; identical to SEQ ID NO: 32703

SEQ ID NO: 41630 - DNA, 602 bp, Homo sapiens; identical to SEQ ID NO: 33064

SEQ ID NO: 41631 - DNA, 482 bp, Homo sapiens; identical to SEQ ID NO: 33407

SEQ ID NO: 41632 - DNA, 461 bp, Homo sapiens; identical to SEQ ID NO: 36564

SEQ ID NO: 41633 - DNA, 370 bp, Homo sapiens
ctactatagggcgaattgggccctctagatgcatgctcgagcggccgccagtgtgatggatatctgcagaattcgccctttcgagcggccgcccgggcaggtactttgcaaatgattatcgagtagttaaccaatttgccagacattatcagactggacagccactgccaaaaaatatggtgtctcgtctttgtgaatctaaaaaggtttgtgctgcagctgatatgcaacttcaggtcttttatgccactctggatcaaatctaccatgggaagcatcccctgaggaattcaaccacagacattctcaaggaaacacaagagaaattctatggcctaccatatgttccaaatactgcctggcagctgca

SEQ ID NO: 41634 - DNA, 414 bp, Homo sapiens; identical to SEQ ID NO: 32708

SEQ ID NO: 41635 - DNA, 573 bp, Homo sapiens
cgactactatatggcgaattggagctccaccgctgcggcggccgcccgggcaggtacgcggggagagtccctctgtgaatttacaacacccaacacccatgagttcagtccttaagaaggaaaattgagcaagtatttaattggttggacattgcataaaagaggtccatatccaggctaactctagaaattttattctcaaacttagttggcctctttttcttctgtcagaggaccattcttagtggcactggggaaatcttggcacccagaagaattcaactgcgctcactgcaaaaatacaatggcctacattggatttgtagaggagaaaggagccctgtattgtgagctgtgctatgagaaattctttgcccctgaatgtggtcgatgccaaaggaagatccttggagaagtcatcaatgcgttgaaacaaacttggcatgtttcctgttttgtgtgtgtagcctgtggaaagcccattcggaacaatgtttttcacttggaggatggtgaaccctactgtgagactgattattatgccctttttggtacctcggccgctctagaact

SEQ ID NO: 41636 - DNA, 461 bp, Homo sapiens
cgactcactatagggcgaattggagctccaccgcggtggcggccgcccgggcaggtaccgaggtcattttgcttcctatagactgcgaccttttggcaaaagctgttctaactccatctcagcatttacaattccatacctggtggtcagaggaggcccgcctgcaggctcagctaaatcgggctgatggcattccaattactcaggctcagctcacaggctccgataattactctgatactactgctcatttaggctttgatgctctcaccacagaacaagtaacaaaggtgtgtatgagagcttgggataaattacgcaccccaggtcaagcttctgtttcttttactattgttaaacagggtcacaatgaattatatcttgattttttagcttaattacaagaagctgttgaaaaatctgtctctgatgaacacactcaagggattcttcttcatatg

SEQ ID NO: 41637 - DNA, 389 bp, Homo sapiens; identical to SEQ ID NO: 32682

SEQ ID NO: 41638 - DNA, 417 bp, Homo sapiens
actactatagggcgaattggagctccaccgcggtggcggccgcccgggcaggtacgcggggataatggaacagatataaaaggactgtatgaggcaaaagaagtcttctgggaatctccacaccctgaagacacagtgagttagcaccaccaccaggaattggcctttcagctctgtgcctgtctccagtcaggctggaataagtctcctcatatttgcaagctcggccctcccctggaatctaaagcctcctcagccttctgagtcagcctgaaaggaacaggccgaactgctgtatgggctctactgccagtgtgacctcaccctctccagtcacccctcctcagttccagctatgaggttcctgcaaacttcacacaatgccacctttggtgcttattggtaatcccagggatt

SEQ ID NO: 41639 - DNA, 420 bp, Homo sapiens; identical to SEQ ID NO: 34385

SEQ ID NO: 41640 - DNA, 448 bp, Homo sapiens; identical to SEQ ID NO: 38537

SEQ ID NO: 41641 - DNA, 467 bp, Homo sapiens; identical to SEQ ID NO: 33170

SEQ ID NO: 41642 - DNA, 419 bp, Homo sapiens
ctactatagggcgaattgggccctctagatgcatgctcgagcggccgccagtgtgatggatatctgcagaattcgcccttagcgtggtcgcggccgaggtacgcgtcacagtagatagtgtcctatagccactggaatgtcctaaaccgaatgaatctgactctggtgacctttcaaacagaagtcacatgagctccttcatttggttgtagttcttcttagaaggtgtgataaccacgatctcagggaaagaattagaaatggggtgttggaccattcttacaaccaatacagaattccacagcccaattgccatgctgtttcttaccttggatgttcaatttgatgtcatccaattaaaataccatggacaaaagtcaacttttcatttttttaaatttattttgcttattacggaa

SEQ ID NO: 41643 - DNA, 429 bp, Homo sapiens; identical to SEQ ID NO: 33060

SEQ ID NO: 41644 - DNA, 602 bp, Homo sapiens; identical to SEQ ID NO: 33064

SEQ ID NO: 41645 - DNA, 313 bp, Homo sapiens; identical to SEQ ID NO: 32719

SEQ ID NO: 41646 - DNA, 445 bp, Homo sapiens; identical to SEQ ID NO: 32966

SEQ ID NO: 41647 - DNA, 670 bp, Homo sapiens; identical to SEQ ID NO: 30471

SEQ ID NO: 41648 - DNA, 608 bp, Homo sapiens; identical to SEQ ID NO: 36699

SEQ ID NO: 41649 - DNA, 451 bp, Homo sapiens
gcgaattggagctccaccgcggtggcggccgcccgggcaggtacgcgggacatcaatgcagagtccctctgtgaatttacaacacccaacacccatgagttcagtccttaagaaggaaaattgagcaagtatttaattggttggacattgcataaaagaggtccatatccaggctaactctagaaattttattctcaaacttagttggcctcttttttttctgtcagaggaccattcttagtggcactggggaaatcttggcacccagaagaattcaactgcgctcactgcaaaaatacaatggcctacattggatttgtagaggagaaaggagccctgtattgtgagctgtgctatgagaaattctttgcccctgaatgtggtcgatgccaaaggaagatccttggagaagtcatcaatgcgttgaaacaaacttggcatgtttcctgtt

SEQ ID NO: 41650 - DNA, 230 bp, Homo sapiens; identical to SEQ ID NO: 32724

SEQ ID NO: 41651 - DNA, 555 bp, Homo sapiens
  misc_feature 28: n = A,T,C or G
ccgggccccccctcgaaatacttctagnattaattaacgcggggggggaagccatctgccttcgagcctgccactgaaatgcaaaagtctgtcccaaataaagccttggaattgaaaaatgaacaaacattgagagcagatgagatactcccatcagaatccaaacaaaaggactatgaagaaaattcttgggatactgagagtctctgtgagactgtttcacagaaggatgtgtgtttacccaaggctgcgcatcaaaaagaaatagataaaataaatggaaaattagaagggtctcctgttaaagatggtcttctgaaggctaactgcggaatgaaagtttctattccaactaaagccttagaattgatggacatgcaaactttcaaagcagagcctcccgagaagccatctgccttcgagcctgccattgaaatgcaaaagtctgttccaaataaagccttggaattgaagaatgaacaaacattgagagcagatgagatactcccatcagaaatcaaacaaaggactatgaagaaagttcttgggattctg

SEQ ID NO: 41652 - DNA, 441 bp, Homo sapiens; identical to SEQ ID NO: 33251
  misc_feature 199, 200: n = A,T,C or G

SEQ ID NO: 41653 - DNA, 438 bp, Homo sapiens; identical to SEQ ID NO: 36619

SEQ ID NO: 41654 - DNA, 470 bp, Homo sapiens; identical to SEQ ID NO: 33429

SEQ ID NO: 41655 - DNA, 394 bp, Homo sapiens
ctactatagggcgaattggagctccaccgcggtggcggccgaggtaccggccctccaagtagtgtttgcgaatacacgtcctgttgtgaaagaggtgaggagaaaggagtaggaaggctcagaggacataacaggcaaaaagaaacaagagaggtaaataaaaagaattaatctaatggcttcacccggcttaggcgcagttttaaggggcctgacccaggcttcgggacccatgtttctagttgggctctgttggcctttttgttgtgggagtgatgaatccaagcaggaattccatccaccttcagaaccgttggcgtcgtgaggatgatggtggtgagggtcccttctcaagcaggaagtgaggtcccttctttctggaaacttttttaac

SEQ ID NO: 41656 - DNA, 608 bp, Homo sapiens; identical to SEQ ID NO: 36699

SEQ ID NO: 41657 - DNA, 559 bp, Homo sapiens; identical to SEQ ID NO: 34615

SEQ ID NO: 41658 - DNA, 461 bp, Homo sapiens; identical to SEQ ID NO: 41636

SEQ ID NO: 41659 - DNA, 445 bp, Homo sapiens; identical to SEQ ID NO: 32594

SEQ ID NO: 41660 - DNA, 442 bp, Homo sapiens; identical to SEQ ID NO: 32734

SEQ ID NO: 41661 - DNA, 565 bp, Homo sapiens; identical to SEQ ID NO: 33278

SEQ ID NO: 41662 - DNA, 429 bp, Homo sapiens; identical to SEQ ID NO: 32736

SEQ ID NO: 41663 - DNA, 434 bp, Homo sapiens; identical to SEQ ID NO: 32737

SEQ ID NO: 41664 - DNA, 444 bp, Homo sapiens; identical to SEQ ID NO: 33116

SEQ ID NO: 41665 - DNA, 448 bp, Homo sapiens; identical to SEQ ID NO: 38537

SEQ ID NO: 41666 - DNA, 426 bp, Homo sapiens; identical to SEQ ID NO: 32740

SEQ ID NO: 41667 - DNA, 428 bp, Homo sapiens; identical to SEQ ID NO: 32741

SEQ ID NO: 41668 - DNA, 486 bp, Homo sapiens
ctatagggcgaattggagctccaccgcggtggcggccgcccgggcaggtacccctccaagccggacaacccgggcgaggacgcaccagcggaggacatggccagatactactcagcgctgcggcactacatcaacctcatcaccaggcagagatatggaaaacgatctagcccagagacactgatttcagacctcttgatgagagaaagcacagaaaatgttcccagaactcggcttgaagaccctgcaatgtggtgatgggaaatgagacttgctctctggccttttcctattttcagcccatatttcatcgtgtaaaacgagaatccacccatcctaccaatgcatgcagccactgtgctgaattctgcaatgttttcctttgtcatcattgtatatatgtgtgtttaaataaagtatcatgcatccaaaaaaaaaaaaaaaaaagtacctcgggcgctctagaactaggggatcccccgggct

SEQ ID NO: 41669 - DNA, 292 bp, Homo sapiens; identical to SEQ ID NO: 32743
  misc_feature 232: n = A,T,C or G

SEQ ID NO: 41670 - DNA, 610 bp, Homo sapiens
actatagggcgaattgggccctctagatgcatgctcgagcggccgccagtgtgatggatatctgcagaattcgccctttcgagcggccgcccgggcaggtacgaaaaaatcaggccactaagcccactgttaatatagacgcagaccaattgttaggaacaggtccaaattggagcaccattaaccaacaatcagtgatgcagaatgaggctattgaacaagtaagggctatttgcctcagggcctggggaaaaattcaggacccaggaacagctttccctattaattcaattagacgaggctctaaagagccatatcctgactttgtggcaagattacaagatgctgctcaaaagtctattacagatgacaatgcccgaaaagttattgtagaattaatggcctatgaaaatgcaaatccagaatgtcaagtcggccataaagccattaaaaggaaaagttccagcaagagttgatgtaattacagaatatgtgaaggcttgtgatgggattggaggagctatgcataaggcaatgctaatggctcaagcaatgaaggggctcactctaggaggacaagttagaacatttgggaaaaaatgttataatt

SEQ ID NO: 41671 - DNA, 411 bp, Homo sapiens; identical to SEQ ID NO: 32757

SEQ ID NO: 41672 - DNA, 431 bp, Homo sapiens; identical to SEQ ID NO: 32746

SEQ ID NO: 41673 - DNA, 604 bp, Homo sapiens
atacgactcactatagggcgaattggagctccaccgcggtggcggccgcccgggcaggtaccattcctctaaatttactacctaattctttgcctttaattgtccccatgggggtcactggccctttacctcaaggttcggtgggcctggtgttaggcagggcatccacctcatgatactaaaggtatcatagttcatactagtctcattaattctgattcctctgatgagattaaacttatgtaaacttatggtgtctgccaaagttcctgtttccattccggccagtgagtcaattgctcaattacttttactacctaacattgttttaaacaaaggagataagacatggggccctgggatgggctccagcggtgaaaaagccgcttattggattaatgtaatttctaaacaatggcctacctgcaccatacacattcaaggaaaaaaggttgagggcctagttgatactggggctgatgtttctattaattcctctaatttatggccttcctcctggcttaaacatcccactaacatgaaactaaaaggtgttaaaaaagctgaaaaagttcaccagaacacatttatcttggcttgcact

SEQ ID NO: 41674 - DNA, 476 bp, Homo sapiens; identical to SEQ ID NO: 33561

SEQ ID NO: 41675 - DNA, 436 bp, Homo sapiens; identical to SEQ ID NO: 31643

SEQ ID NO: 41676 - DNA, 448 bp, Homo sapiens; identical to SEQ ID NO: 32492

SEQ ID NO: 41677 - DNA, 393 bp, Homo sapiens; identical to SEQ ID NO: 32703

SEQ ID NO: 41678 - DNA, 380 bp, Homo sapiens; identical to SEQ ID NO: 32752

SEQ ID NO: 41679 - DNA, 416 bp, Homo sapiens; identical to SEQ ID NO: 32753

SEQ ID NO: 41680 - DNA, 418 bp, Homo sapiens; identical to SEQ ID NO: 32754

SEQ ID NO: 41681 - DNA, 440 bp, Homo sapiens; identical to SEQ ID NO: 32755

SEQ ID NO: 41682 - DNA, 414 bp, Homo sapiens; identical to SEQ ID NO: 32783

SEQ ID NO: 41683 - DNA, 608 bp, Homo sapiens; identical to SEQ ID NO: 36699

SEQ ID NO: 41684 - DNA, 443 bp, Homo sapiens; identical to SEQ ID NO: 37061

SEQ ID NO: 41685 - DNA, 437 bp, Homo sapiens; identical to SEQ ID NO: 32847

SEQ ID NO: 41686 - DNA, 335 bp, Homo sapiens; identical to SEQ ID NO: 32962

SEQ ID NO: 41687 - DNA, 394 bp, Homo sapiens; identical to SEQ ID NO: 32761
  misc_feature 338: n = A,T,C or G

SEQ ID NO: 41688 - DNA, 236 bp, Homo sapiens; identical to SEQ ID NO: 32762

SEQ ID NO: 41689 - DNA, 391 bp, Homo sapiens
ggagctccaccgcggtggcggccgcccgggcaggtacattggatgtgaactcttttaaactataacatggacactttattggaaccaaactttagttttctacattaatgagaaacactggtaactttgcttcattgaaaaaataattgcttgttctctgtcagatgcacttcgtcttagtaacatggccatggggaagacaaccacaggccagatagtcaatctgctgtccaatgatgtgaacaagtttgatcaggtgacagtgttcttacacttcctgtgggcaggaccactgcaggcgatcgcagtgactgccctactctggatggagataggaatatcgtgccttgctgggatggcagttctaatcattctcactgcccttgcaaag

SEQ ID NO: 41690 - DNA, 437 bp, Homo sapiens; identical to SEQ ID NO: 32764
  misc_feature 76, 422: n = A,T,C or G

SEQ ID NO: 41691 - DNA, 439 bp, Homo sapiens
ctatagggcgatttgtagctccaccgcggtggcggccgcccgggcaggtactttttttttttttttttttttttttggtagagacagggtttcaccatgttggccaggatgatcttgatctcttgacctcatgatccgcccgtcttggcctcccaaagtgctgggatcacaggcgtgagccaccacacctggccctctatttattctctttaaagagagagaaaactatgagaggccaaaattatttaattaaatctttaccttagcacaagggaaaaaaatggaatttgcctaatataggtgatgaagcatacacaatgaatagaaacaatcacattttagtaaaaggcaaaaatttgagacttataagctatatggtagcttatttttgggtggggaagaaatgagaaaagaatataacatctcttactggtatgac

SEQ ID NO: 41692 - DNA, 407 bp, Homo sapiens; identical to SEQ ID NO: 32766

SEQ ID NO: 41693 - DNA, 608 bp, Homo sapiens; identical to SEQ ID NO: 36699

SEQ ID NO: 41694 - DNA, 411 bp, Homo sapiens; identical to SEQ ID NO: 32757

SEQ ID NO: 41695 - DNA, 425 bp, Homo sapiens; identical to SEQ ID NO: 32922

SEQ ID NO: 41696 - DNA, 445 bp, Homo sapiens; identical to SEQ ID NO: 32966

SEQ ID NO: 41697 - DNA, 445 bp, Homo sapiens; identical to SEQ ID NO: 32978

SEQ ID NO: 41698 - DNA, 329 bp, Homo sapiens; identical to SEQ ID NO: 32772
  misc_feature 270: n = A,T,C or G

SEQ ID NO: 41699 - DNA, 311 bp, Homo sapiens; identical to SEQ ID NO: 32773

SEQ ID NO: 41700 - DNA, 566 bp, Homo sapiens
taccgagctcggatccactagtaacggccgccagtgtgctggaattcggcttagcgcggtcgcggccgaggtactggaacgtttgtcagtgagtttcatctccaaagtctaccctacatagggaattgtcgaaatgagttagtacaactgagttcgtgtggaaccctggaaagaaaacaatagccccatgcaacacgttccgggctgatgcgtacatgtttatgtctagtcactgtgcgaagcacataaaaacacctgaggtgagtgtgctgaagggcgaattttgtccttttggggagcccatgatctaaacatctataaccaaaatgtcaaatcataacgtcagcttaggctctagttctctttgatgaaagatttaaagcaatagactataatagttacccggcagactaaaaaatctgcctttaattcttttgattggaatttttttttacaaagtctggagcatggaaacaaatgaaaattgaacctgcttattttttacgatggtgcattgatggccccaacagaactttctaaaatcatgcgatcaacatatatgatag

SEQ ID NO: 41701 - DNA, 532 bp, Homo sapiens
ctccaccgcggtggcggccgaggtactgtgaaagtttcacatacggatcactggctccaaagagtcctttttggcgagatcaattccagaaacaacttttactctgagaatacgggactctcccgagtgttacttgctcaaatgcgagacgtctcatttaggagaatacaatattaaaggtttagtgcattaaaggaaagctggaaaactcaagggcagagcaagttctgaagagtatgcggaagtcgtggctgcagccaagggtaactttccactgccgggtgacaaggtcacaggagagaagttttaacttgactcccaggaaagcagtctacacggttgttcctctctggaaatggcttcctctgtgtccccgcgtacctgcccgggcggccgctctagaactagtggatcccccgggctgcaggaattcgatatcaagcttatcgataccgtcgacctcgagggggggcccggtacccagcttttgttccctttagtgagggttaattgcgcgcttggcgtaatcatg

SEQ ID NO: 41702 - DNA, 410 bp, Homo sapiens; identical to SEQ ID NO: 32776
  misc_feature 360: n = A,T,C or G

SEQ ID NO: 41703 - DNA, 500 bp, Homo sapiens; identical to SEQ ID NO: 34312
  misc_feature 430: n = A,T,C or G

SEQ ID NO: 41704 - DNA, 437 bp, Homo sapiens; identical to SEQ ID NO: 32778

SEQ ID NO: 41705 - DNA, 434 bp, Homo sapiens; identical to SEQ ID NO: 32779

SEQ ID NO: 41706 - DNA, 446 bp, Homo sapiens; identical to SEQ ID NO: 32676

SEQ ID NO: 41707 - DNA, 410 bp, Homo sapiens; identical to SEQ ID NO: 37090

SEQ ID NO: 41708 - DNA, 587 bp, Homo sapiens; identical to SEQ ID NO: 32514
  misc_feature 209, 313: n = A,T,C or G

SEQ ID NO: 41709 - DNA, 447 bp, Homo sapiens; identical to SEQ ID NO: 33017

SEQ ID NO: 41710 - DNA, 445 bp, Homo sapiens; identical to SEQ ID NO: 32784

SEQ ID NO: 41711 - DNA, 431 bp, Homo sapiens; identical to SEQ ID NO: 32785

SEQ ID NO: 41712 - DNA, 435 bp, Homo sapiens; identical to SEQ ID NO: 33432

SEQ ID NO: 41713 - DNA, 443 bp, Homo sapiens; identical to SEQ ID NO: 33052

SEQ ID NO: 41714 - DNA, 476 bp, Homo sapiens; identical to SEQ ID NO: 33561

SEQ ID NO: 41715 - DNA, 428 bp, Homo sapiens; identical to SEQ ID NO: 32789

SEQ ID NO: 41716 - DNA, 424 bp, Homo sapiens; identical to SEQ ID NO: 32790

SEQ ID NO: 41717 - DNA, 592 bp, Homo sapiens; identical to SEQ ID NO: 39600

SEQ ID NO: 41718 - DNA, 388 bp, Homo sapiens; identical to SEQ ID NO: 32792

SEQ ID NO: 41719 - DNA, 608 bp, Homo sapiens; identical to SEQ ID NO: 36699

SEQ ID NO: 41720 - DNA, 448 bp, Homo sapiens
atagggcgaattggagctccaccgcggtggcggccgaggtacatctacctaaaggactattatgtggaataatacatactaatgaagtattacatgatttaaagactacaataaaaccaaacatgcttataacattaagaaaaacaataaagatacatgattgaaaccaagttgaaaaatagcatatgccttggaggaaatgtgctcaaattactaatgatttagtgttgtccctactttctctctcttttttctttcttttttttattatggttagctgtcacatacaacttttttttttttttgagatggggtctcgctctgtcaccaggctggagtgcggtggcgcgatctcggctcactgcaacctccacatcccatgttgaagtaattcttctgcctcggcctcccgagtagctgggactagaggaacgtgccaccatgactg

SEQ ID NO: 41721 - DNA, 401 bp, Homo sapiens; identical to SEQ ID NO: 32795

SEQ ID NO: 41722 - DNA, 565 bp, Homo sapiens; identical to SEQ ID NO: 33278

SEQ ID NO: 41723 - DNA, 486 bp, Homo sapiens; identical to SEQ ID NO: 38070

SEQ ID NO: 41724 - DNA, 623 bp, Homo sapiens; identical to SEQ ID NO: 32798

SEQ ID NO: 41725 - DNA, 463 bp, Homo sapiens; identical to SEQ ID NO: 33307

SEQ ID NO: 41726 - DNA, 432 bp, Homo sapiens; identical to SEQ ID NO: 32800

SEQ ID NO: 41727 - DNA, 432 bp, Homo sapiens
tacgactactatagggcgaattggagctccaccgcggtggcggccgaggtacgttcaatccggggaatgatgacatgttcaatggcatttacacgcctgttggttatcttaatagcttcatccaaagtaacaaaagaagtctgcagagaagctagttccaccagtagttccactgctttggcataattcctctttaatttaagccaactgttccccacctctggctaaaccagtcagttcataactgtcagttccttcatggtaatgttcaaatactggcaaagtaacacctgctacattatctttcttcgctcgaatcttcacttgcgctttattgacatttttggataactgtagtgcttgaagttcacctgctgtgaacttggcttcagcttagtgaaaagggcagctttctctcatcactttcgccca

SEQ ID NO: 41728 - DNA, 482 bp, Homo sapiens; identical to SEQ ID NO: 33166

SEQ ID NO: 41729 - DNA, 200 bp, Homo sapiens
ggcgaattggagctccaccgcggtggcggccgccatcttgggtcatcgatgagcctcgccctgtgcctggtcccgcttgtgagggaaggacattagaaaatgaattgatgtgttccttaaaggatgggcaggaaaacagatcctgttgtggatatttatttgaacgggattacagatttgaaatgaagtcacaaagtgag

SEQ ID NO: 41730 - DNA, 630 bp, Homo sapiens; identical to SEQ ID NO: 32804
  misc_feature 580: n = A,T,C or G

SEQ ID NO: 41731 - DNA, 439 bp, Homo sapiens; identical to SEQ ID NO: 32805
  misc_feature 135: n = A,T,C or G

SEQ ID NO: 41732 - DNA, 571 bp, Homo sapiens; identical to SEQ ID NO: 32806
  misc_feature 545: n = A,T,C or G

SEQ ID NO: 41733 - DNA, 515 bp, Homo sapiens; identical to SEQ ID NO: 32807
  misc_feature 11: n = A,T,C or G

SEQ ID NO: 41734 - DNA, 445 bp, Homo sapiens
atacgactcactatagggcgaattggagctccaccgcggtggcggccgcccgggcaggtacgcggggacatcaatgcagagtccctctgtgaatttacaacacccaacacccatgagttcagtccttaagaaggaaaattgagcaagtatttaattggttggacattgcataaaagaggtccttatccaggctaactctagaaattttattctcaaacttagttggcctcttttttttctgtcagaggaccattcttagtggcactggggaaatcttggcacccagaagaattcaactgcgctcactgcaaaaatacaatggcctacattggatttgtagaggagaaaggagccctgtattgtgagctgtgctatgagaaattctttgcccctgaatgtggtcgatgccaaaggaagatccttggagaagtcatcaatgcgttga

SEQ ID NO: 41735 - DNA, 608 bp, Homo sapiens; identical to SEQ ID NO: 36699

SEQ ID NO: 41736 - DNA, 505 bp, Homo sapiens; identical to SEQ ID NO: 33122
  misc_feature 474: n = A,T,C or G

SEQ ID NO: 41737 - DNA, 671 bp, Homo sapiens; identical to SEQ ID NO: 38621

SEQ ID NO: 41738 - DNA, 438 bp, Homo sapiens; identical to SEQ ID NO: 32812

SEQ ID NO: 41739 - DNA, 661 bp, Homo sapiens; identical to SEQ ID NO: 32813
  misc_feature 11: n = A,T,C or G

SEQ ID NO: 41740 - DNA, 468 bp, Homo sapiens
attggagctccaccgcggtggcggccgaggtacatttggtggaactgagaaatggcataacaccaaatttaatatatgtcagatgttactatgattatcattcaatctcatagttttgtcatggcccaatttatcctcatttgtgcctcaacaaattgaactgttaacaaaggaatctctggtcctgggtaatggctgagcaccactgagcatttccattccagttggcttcttgggtttgctagctgcatcactagtcatcttaaataaatgaagttttaacatttctccagtgatttttttatctcacctttgaagatactatgttatgtgattaaataaagaacttgagaagaacaggtttcattaaacataaaaatcatgtacacgccaattttctggatgggcaatacttatgttcacaggaaatgctttaaaatattcagaaaataattaaatggcaatgga

SEQ ID NO: 41741 - DNA, 472 bp, Homo sapiens; identical to SEQ ID NO: 32574

SEQ ID NO: 41742 - DNA, 658 bp, Homo sapiens; identical to SEQ ID NO: 32642

SEQ ID NO: 41743 - DNA, 266 bp, Homo sapiens; identical to SEQ ID NO: 32817

SEQ ID NO: 41744 - DNA, 476 bp, Homo sapiens
tacgactactatagggcgaattggagctccaccgcggtggcggccgggcatttctcccagggatctctgtgcttccttttgtgcttcctgtgtgtgtggatatttaaaggggctggaaatgtgcaaaaacatgtcactacttagacattatattgtcatcttgctgtttctagtgatgctaattatctccatttcagcagatgtgtggcctcagatggtaaagtcagcagcctttcttatttctcacctctgtatcatcaggtccttcccaccatgcagaatcttctgggcttccttcgctggagcccacacaaaatctcccttctgtttttctccccgcgtccctgcccggccggccccttctaaacctagggggatcccccgggcttgcaggaattcgatatcaagcttatcgataccgtcgacctcgagggggggcccggtacccagcttttgttccctttagtgagggttaa

SEQ ID NO: 41745 - DNA, 425 bp, Homo sapiens; identical to SEQ ID NO: 32819

SEQ ID NO: 41746 - DNA, 470 bp, Homo sapiens; identical to SEQ ID NO: 33429

SEQ ID NO: 41747 - DNA, 462 bp, Homo sapiens; identical to SEQ ID NO: 33419

SEQ ID NO: 41748 - DNA, 418 bp, Homo sapiens; identical to SEQ ID NO: 32822

SEQ ID NO: 41749 - DNA, 420 bp, Homo sapiens; identical to SEQ ID NO: 32823

SEQ ID NO: 41750 - DNA, 601 bp, Homo sapiens
  misc_feature 517: n = A,T,C or G
ccgggccccccctcggaagtcttctagaattaattaacgcgggacaacaggaaggaccattgctgcatactccttgaccagcaacttttttgaagatatttttaagtgcagagtaggcctctattcctgtatgtaattgttcattttcagcacctggaacctcatctatcgggtctggaaggaatacagcagttcgaaagccgcgtccatttctctccttcagtagtgcagaaatgagtccgattcaccagtacacacagaactgtaccagttcaacctagcaaaagaagaaaagtttccactgtacttaaaatttacagctgactcaaattgcctcacagaattatttgatgtagaaggctagttgtcttacttcagatcagcaggacagttgggctctcagactcatgaccactgagtttgcttgtgttgaaactgtggtttcatccaacatatgctattggacatgattattattccattcaaatggattacagacttcttgaggacaggacanacttatctctcatggtgtttttttagaatacttttataaccaagggagaaaccatgccagctgttaccattcaacttcttaagc

SEQ ID NO: 41751 - DNA, 542 bp, Homo sapiens
tacgactcactatagggcgaattggagctccaccgcggtggcgcgtggtcgcggccgaggtacatctacctaaaggactattatgtggaataatacatactaatgaagtattacatgatttaaagactacaataaaaccaaacatgcttataacattaagaaaaacaataaagatacatgattgaaaccaagttgaaaaatagcatatgccttggaggaaatgtgctcaaattactaatgatttagtgttgtccctactttctctctcttttttctttctttttttttattatggttagctgtcacatacaacttttttttttttttttgagatggggtctcgctctgtcaccaggctggagtgcagtggcgcgatctcggctcactgcaacctccacatcccatgttgaagtaattcttctgcctcagcctcccgagtagctgggactagaggaacgtgccaccatgactggctaattttctgtattttttagtagaaacagagtttcaccatgttggccaggatggtctcgatctcctga

SEQ ID NO: 41752 - DNA, 473 bp, Homo sapiens; identical to SEQ ID NO: 33047
  misc_feature 427: n = A,T,C or G

SEQ ID NO: 41753 - DNA, 500 bp, Homo sapiens; identical to SEQ ID NO: 34312
  misc_feature 430: n = A,T,C or G

SEQ ID NO: 41754 - DNA, 537 bp, Homo sapiens; identical to SEQ ID NO: 33037

SEQ ID NO: 41755 - DNA, 416 bp, Homo sapiens; identical to SEQ ID NO: 32829

SEQ ID NO: 41756 - DNA, 448 bp, Homo sapiens; identical to SEQ ID NO: 32492

SEQ ID NO: 41757 - DNA, 413 bp, Homo sapiens; identical to SEQ ID NO: 32831

SEQ ID NO: 41758 - DNA, 437 bp, Homo sapiens; identical to SEQ ID NO: 32673

SEQ ID NO: 41759 - DNA, 443 bp, Homo sapiens; identical to SEQ ID NO: 32718

SEQ ID NO: 41760 - DNA, 424 bp, Homo sapiens; identical to SEQ ID NO: 32834

SEQ ID NO: 41761 - DNA, 261 bp, Homo sapiens; identical to SEQ ID NO: 32835

SEQ ID NO: 41762 - DNA, 605 bp, Homo sapiens
  misc_feature 376: n = A,T,C or G
tccaccgcggtggcggccgaggtacgcttcccttggcaccatgttataccatctgtgctgggctgaatagtgtccccccaaaattgaataatgtccccccaaaattcgtgtataccctgaacattagaatgtgatcttacttggtattacttggtatagggtgttgtagaaataatcaaataaagatgaggtcatactgcatcagggtagaccctaaattcaatgaccaggatttttataagtgaaaggagaggcggattcagagaaaaagacacagacacacacagagagaagacagccatgtgaagacacaagcataaattgaagtgacacagctacaagccaaggaatgccaaaaattgctggtaaccaccanaagtaggaagaggcaaaggggagtttttttccagagaccttggcgggagcatggccatgccaacaacttgatatcagacttgtaatccctacatctatggcagaataaatttgtgttattttaagccactaagtatgtgctaatttcttatggcaaccctaggacattgatgtgccattggagtagcctgttaccactttgagaacaagaagctcactttgatgctccc

SEQ ID NO: 41763 - DNA, 425 bp, Homo sapiens; identical to SEQ ID NO: 32819

SEQ ID NO: 41764 - DNA, 562 bp, Homo sapiens
ctatagggcgaattggagctccaccgcggtggcggccgaggtacatgggactacaggcacgccccaccatgcccagctcatttttgtatttttagtagagacagggtttcaccatgttggccaggatgatcttgatctcttgacctcatgatccgcccctcttggcctccaaagtgctggatcacaggcgtgagccaccacacctggccctctatttattctctttaaagagagagaaaactatgagaggccaaaattatttaattaaatctttaccttagcacaagggaaaaaatggaatttgcctaatataggtgatgaagcatacacaatgaacagaaacaatcacattttagtaaaaggcaaaaatttgagacttataagctatatggtagcttatttttgggtggggaagaaatgagaaaagaatataacatctcttactggcatgacacattttgataaaaaatcttattgtcctttcctactagaatgatccactgtaaggcaaaaataatatacaagcaaagtttttttttggagacggagtctcactctgtca

SEQ ID NO: 41765 - DNA, 658 bp, Homo sapiens; identical to SEQ ID NO: 32642

SEQ ID NO: 41766 - DNA, 188 bp, Homo sapiens; identical to SEQ ID NO: 32840

SEQ ID NO: 41767 - DNA, 425 bp, Homo sapiens; identical to SEQ ID NO: 33071

SEQ ID NO: 41768 - DNA, 444 bp, Homo sapiens; identical to SEQ ID NO: 32842

SEQ ID NO: 41769 - DNA, 469 bp, Homo sapiens
agggcgaattggagctccaccgcggtggcggccgcccgggcaggtacatgggactacaggcacgccccaccatgcccagctcatttttgtatttttagtagagacagggtttcaccatgttggccaggatgatcttgatctcttgacctcatgatccgcccctcttggcctcccaaagtgctgggatcacaggcgtgagccaccacacctggccctctatttattctctttaaagagagagaaaactaggagaggccaaaattatttaattaaatctttaccttagcacaagggaaaaaatggaatttgcctaatataggtgatgaagcatacacaatgaacagaaacaatcacattttagtaaaaggcaaaaatttgagacttataagctatatggtagcttatttttgggtggggaagaaatgagaaaagaatataacatctcttactggcatgacacattttgata

SEQ ID NO: 41770 - DNA, 369 bp, Homo sapiens; identical to SEQ ID NO: 32768

SEQ ID NO: 41771 - DNA, 537 bp, Homo sapiens; identical to SEQ ID NO: 33037

SEQ ID NO: 41772 - DNA, 441 bp, Homo sapiens
acgactactatagggcgaattggagctccaccgcggtggcggccgaggtactggtgccaatattgccatggtgagctcctctctaatgtcttccagggcaccaatatctgcccatgtcacattagggacagtgacaaagccttcccttttggcagagggttggactgaggatagagcaacaatgaaatcattcagttcaatgcacagtccttgcatctgctcctctgagaggggatcttggtctcttagcaaccccagcagcctttgtaattcatcctgtgtttcagaagtgggctcagttcccagcctttcctcctggactcctttagatgacaaatcttccatttcaggatttttcttctgctgttcctgtagcttcattaagactctattgactgcacacattgctgcctctcggcacagtgccatgagatcagcacc

SEQ ID NO: 41773 - DNA, 437 bp, Homo sapiens; identical to SEQ ID NO: 32847

SEQ ID NO: 41774 - DNA, 445 bp, Homo sapiens; identical to SEQ ID NO: 32848

SEQ ID NO: 41775 - DNA, 411 bp, Homo sapiens; identical to SEQ ID NO: 32849

SEQ ID NO: 41776 - DNA, 444 bp, Homo sapiens
tacgactcactatagggcgaattggagctccaccgcggtggcggccgaggtacaagaaaaaatcaaacaatcacatcaaaaagtgggcgaaggatatgaacagacacttatcaaaagaagacatttatgcagccaacagacacatgaaaaaatgttcatcatcactggtcatcagagaaatgcaaatcaaaaccacaatccgggaggtcttgccaaagaccacctgggctttccgggcaacgggctagagcttctgggaagcagtcgtggccctttggagattccacggcttcggatccctactgcaggatgctccactgtgtctgccggcctctggcgttttgctgaggggtaacctcggaatggctagaaacaagaacactgagatggcccagtcgtgccccaggcattcccgcacacgtggtggcaaagaaaggcgcgcag

SEQ ID NO: 41777 - DNA, 462 bp, Homo sapiens; identical to SEQ ID NO: 33419

SEQ ID NO: 41778 - DNA, 608 bp, Homo sapiens; identical to SEQ ID NO: 36699

SEQ ID NO: 41779 - DNA, 527 bp, Homo sapiens; identical to SEQ ID NO: 33247

SEQ ID NO: 41780 - DNA, 407 bp, Homo sapiens
  misc_feature 342: n = A,T,C or G
tactatagggcgaattggagctccaccgcggtggcggccgccatcttgggtcatcgatgagcctcgccctgtgcctggtcccgcttgtgagggaaggacattagaaaatgaattgatgtgttccttaaaggatgggcaggaaaacagatcctgttgtggatatttatttgaacgggattacagatttgaaaatgaagtcacaaagtgagcattaccaatgagaggaaaacagacgagaaaatcttgatggcttcacaagacatgcaacaaacaaaatggaatactgtgatggcatgaggcagccaagctggggaggagataaccacggggcagagggtcagngattctggccctgctgcctaaactgtgcgttcataaccaaatcatttcatatttctaaccctcaa

SEQ ID NO: 41781 - DNA, 396 bp, Homo sapiens; identical to SEQ ID NO: 32855

SEQ ID NO: 41782 - DNA, 473 bp, Homo sapiens; identical to SEQ ID NO: 33047
  misc_feature 427: n = A,T,C or G

SEQ ID NO: 41783 - DNA, 490 bp, Homo sapiens; identical to SEQ ID NO: 33183

SEQ ID NO: 41784 - DNA, 447 bp, Homo sapiens; identical to SEQ ID NO: 33017

SEQ ID NO: 41785 - DNA, 421 bp, Homo sapiens; identical to SEQ ID NO: 32859

SEQ ID NO: 41786 - DNA, 490 bp, Homo sapiens; identical to SEQ ID NO: 33183

SEQ ID NO: 41787 - DNA, 693 bp, Homo sapiens
acgactcactatagggcgaattgtgccctctagatgcatgctcgagcggccgccagtgtgatggatatctgcagaattcgccctttcgagcggccgcccgggcaggtacgcggggagaaaaacagaggggagatttgtgtggctgcagccgagggagaccaggaagatctgcatggtgggaaggacctgatgatacagaggtctgtaggccatgggaatgggtttggaattttattcaaagagctatgggaagtgactagaaggtttaaagttggggaagaggttttgtgtttctgttatatttgtgttttatacaaattactctggttgctgtgttgataggacagcagaagggtaggagcagggacaccagttaagttattgcaatggttaaggtgagaggtggtggctgggcctaggcctttttggagtgaacaagctatttgcttggcttccatgatccttctccctccactggaatggaaggtacctcggccgcgaccacgctaagggcgaattccagcacactggcggccgttactagtggatccgagctcggtaccaagcttggcgtaatcatggtcatagctgtttcctgtgtgaaattgttatccgctcacaattccacacaacatacgagccggaagcataaagtgtaaagcctggggtgcctaatgagtgagctaactcaca

SEQ ID NO: 41788 - DNA, 454 bp, Homo sapiens; identical to SEQ ID NO: 34610

SEQ ID NO: 41789 - DNA, 427 bp, Homo sapiens; identical to SEQ ID NO: 32863

SEQ ID NO: 41790 - DNA, 432 bp, Homo sapiens; identical to SEQ ID NO: 32911

SEQ ID NO: 41791 - DNA, 421 bp, Homo sapiens; identical to SEQ ID NO: 32865

SEQ ID NO: 41792 - DNA, 659 bp, Homo sapiens; identical to SEQ ID NO: 34124

SEQ ID NO: 41793 - DNA, 424 bp, Homo sapiens; identical to SEQ ID NO: 32834

SEQ ID NO: 41794 - DNA, 504 bp, Homo sapiens; identical to SEQ ID NO: 34221

SEQ ID NO: 41795 - DNA, 415 bp, Homo sapiens; identical to SEQ ID NO: 32869

SEQ ID NO: 41796 - DNA, 419 bp, Homo sapiens; identical to SEQ ID NO: 32704

SEQ ID NO: 41797 - DNA, 448 bp, Homo sapiens; identical to SEQ ID NO: 32871

SEQ ID NO: 41798 - DNA, 500 bp, Homo sapiens; identical to SEQ ID NO: 34312
  misc_feature 430: n = A,T,C or G

SEQ ID NO: 41799 - DNA, 387 bp, Homo sapiens
tacactactatagggcgaattggagctccaccgcggtggcggccgcccgggcaggtacgttgaaatattaggggcaggttcccccaatatctggcgcccaacgtggttttctttttcctaagtgcatgtgggaacccgattccctttggtaggtgcggagaaatgttcatcggtccagtccacagaaatgcttgttcggctccccgacgattggtgagttgtctgtgtattgtccggggtaactatgggtcacgcagagtctaaacattatgcttatctctgctatattaaattcctgttaaaatgggggagttcgggttcccatggaaaatatggtcaccctattcagggcagtggaagaacactgtccttggtttcctgaaaagg

SEQ ID NO: 41800 - DNA, 542 bp, Homo sapiens
ctatagggcgaattggagctccaccgcggtggcggccgaggtacgcggggacatcaatgcagagtccctctgtgaatttacaacacccaacacccatgagttcagtccttaagaaggaaaattgagcaagtatttaattggttggacattgcataaaagaggtccatatccaggctaactctagaaattttattctcaaacttagttggcctctttttcttctgtcagaggaccattcttagcggcactggggaaatcttggcacccagaagaattcaactgcgctcactgcaaaaatacaatggcctacattggatttgtagaggagaaaggagccctgtattgtgagctgtgctatgagaaattctttgcccctgaatgtggtcgatgccaaaggaagatccttggagaagtcatcaatgcgttgaaacaaacttggcatgtttcctgttttgtgtgtgtagcctgtggaaagcccattcggaacaatgtttttcacttggaggatggtgaaccctactgtgagactgattattatgccc

SEQ ID NO: 41801 - DNA, 440 bp, Homo sapiens; identical to SEQ ID NO: 33110

SEQ ID NO: 41802 - DNA, 410 bp, Homo sapiens; identical to SEQ ID NO: 32876

SEQ ID NO: 41803 - DNA, 173 bp, Homo sapiens; identical to SEQ ID NO: 32877

SEQ ID NO: 41804 - DNA, 520 bp, Homo sapiens; identical to SEQ ID NO: 33186
  misc_feature 383: n = A,T,C or G

SEQ ID NO: 41805 - DNA, 409 bp, Homo sapiens; identical to SEQ ID NO: 32878

SEQ ID NO: 41806 - DNA, 447 bp, Homo sapiens; identical to SEQ ID NO: 32992

SEQ ID NO: 41807 - DNA, 393 bp, Homo sapiens; identical to SEQ ID NO: 32881
  misc_feature 340, 351: n = A,T,C or G

SEQ ID NO: 41808 - DNA, 441 bp, Homo sapiens; identical to SEQ ID NO: 33177

SEQ ID NO: 41809 - DNA, 414 bp, Homo sapiens; identical to SEQ ID NO: 32904

SEQ ID NO: 41810 - DNA, 587 bp, Homo sapiens; identical to SEQ ID NO: 32514
  misc_feature 209, 313: n = A,T,C or G

SEQ ID NO: 41811 - DNA, 419 bp, Homo sapiens; identical to SEQ ID NO: 32856

SEQ ID NO: 41812 - DNA, 449 bp, Homo sapiens; identical to SEQ ID NO: 32886

SEQ ID NO: 41813 - DNA, 512 bp, Homo sapiens; identical to SEQ ID NO: 33082

SEQ ID NO: 41814 - DNA, 467 bp, Homo sapiens; identical to SEQ ID NO: 33170

SEQ ID NO: 41815 - DNA, 580 bp, Homo sapiens
  misc_feature 426: n = A,T,C or G
cgcgcgtaatacgactcactatagggcgaattggagctccaccgcggtggcggccgccatcttgggtcatcgatgagcctcgccctgtgcctggtcccgcttgtgagggaaggacattagaaaatgaattgatgtgttccttaaaggatgggcaggaaaacagatcctgttgtggatatttatttgaacgggattacagatttgaaatgaagtcacaaagtgagcattaccaatgagaggaaaacagacgagaaaatcttgatggcttcacaagacatgcaacaaacaaaatggaatactgtgatgacatgaggcagccaagctggggaggagataaccacggggcagagggtcaggattctggccctgctgcctaaactgtgcgttcataaccaaatcatttcatatttctaaccctcaaaacanagctgttgtaatatctgatctctacggttccttctgggcccaacattctccatatatccagccacactcatttttaatatttagttcccagatctgtacctcggccgctctagaactagtggatcccccgggctgcaggaattcgatatcaagc

SEQ ID NO: 41816 - DNA, 427 bp, Homo sapiens; identical to SEQ ID NO: 32890

SEQ ID NO: 41817 - DNA, 417 bp, Homo sapiens; identical to SEQ ID NO: 32873
  misc_feature 363: n = A,T,C or G

SEQ ID NO: 41818 - DNA, 404 bp, Homo sapiens; identical to SEQ ID NO: 32892

SEQ ID NO: 41819 - DNA, 658 bp, Homo sapiens; identical to SEQ ID NO: 32642

SEQ ID NO: 41820 - DNA, 399 bp, Homo sapiens; identical to SEQ ID NO: 32894

SEQ ID NO: 41821 - DNA, 415 bp, Homo sapiens
ctatagggcgtttggagctccaccgcggtggcggccgcccgggcaggtacgcggggaggctcctggggtggtgtccaaatcactcattgtttgtgaaagctgagctcacagcaaaacaagccaccatgaagctgtcggtgtgtctcctgctggtcacgctggccctctgctgctaccaggccaatgccgagttctgcccagctcttgtttctgagctgttagacttcttcttcattagtgaacctctgttcaagttaagtcttgccaaatttgatgcccctccggaagctgttgcagccaagttaggagtgaagagatgcacggatcagatgtcccttcagaaacgaagcctcattgcggaagtcctgggggaaatattgaagaaatgttttgggtgaccatgtaaaaactttca

SEQ ID NO: 41822 - DNA, 442 bp, Homo sapiens; identical to SEQ ID NO: 32896

SEQ ID NO: 41823 - DNA, 560 bp, Homo sapiens; identical to SEQ ID NO: 36712

SEQ ID NO: 41824 - DNA, 443 bp, Homo sapiens; identical to SEQ ID NO: 32718

SEQ ID NO: 41825 - DNA, 472 bp, Homo sapiens; identical to SEQ ID NO: 33363

SEQ ID NO: 41826 - DNA, 454 bp, Homo sapiens; identical to SEQ ID NO: 34610

SEQ ID NO: 41827 - DNA, 700 bp, Homo sapiens; identical to SEQ ID NO: 36914

SEQ ID NO: 41828 - DNA, 619 bp, Homo sapiens
ctccaccgcggtggcggccgcccgggcaggtacagtattggaaatggatctgtctttggtaaagatcagcctataattcttgtgctgttggatatcacccccatgatgggtgtcctggacggtgtcctaatggaactgcaagactgtgcccttcccctcctgaaagatgtcatcgcaacagataaagaagacgttgccttcaaagacctggatgtggccattcttgtgggctccatgccaagaagggaaggcatggagagaaaagatttactgaaagcaaatgtgaaaatcttcaaatcccagggtgcagccttagataaatacgccaagaagtcagttaaggttattgttgtgggtaatccagccaataccaactgcctgactgcttccaagtcagctccatccatccccaaggagaacttcagttgcttgactcgtttggatcacaaccgagctaaagctcaaattgctcttaaacttggtgtgactgctaatgatgtaaagaatgtcattatctggggaaaccattcctcgactcagtatccagatgtcaactatgccaaggtgaaattgcaaggaaaggaagttggtgtttatgaagctctgaaagatgacagct

SEQ ID NO: 41829 - DNA, 417 bp, Homo sapiens; identical to SEQ ID NO: 32951

SEQ ID NO: 41830 - DNA, 443 bp, Homo sapiens; identical to SEQ ID NO: 33051

SEQ ID NO: 41831 - DNA, 566 bp, Homo sapiens; identical to SEQ ID NO: 41490

SEQ ID NO: 41832 - DNA, 451 bp, Homo sapiens; identical to SEQ ID NO: 32953

SEQ ID NO: 41833 - DNA, 513 bp, Homo sapiens; identical to SEQ ID NO: 32626
  misc_feature 222: n = A,T,C or G

SEQ ID NO: 41834 - DNA, 413 bp, Homo sapiens
atacactactatagggcgaattggagctccaccgcggtggcggccgcccgggcaggtacagatctcatcaggtatgagggcagtctctgacgcgaacgtctcttcctcgtggtttttattgtcagtattcacacgaagtttaagtctcctagtgggcacccagacgggattgacgatctcctggtaaaacacaagcataccctcttccccacgttataattgttccaggttcccaggtattggtttgggagtttttccatgacactggcttgccttcgtttagggagaattttttgcctgtataatggcatttagctgcagtcagagtattgtttttaggaacatttagaaagcttaaacaatgctaaatataattgggagtggggaagtagttaaattattgcttttaaacc

SEQ ID NO: 41835 - DNA, 425 bp, Homo sapiens; identical to SEQ ID NO: 32909

SEQ ID NO: 41836 - DNA, 445 bp, Homo sapiens; identical to SEQ ID NO: 32910

SEQ ID NO: 41837 - DNA, 432 bp, Homo sapiens; identical to SEQ ID NO: 32911

SEQ ID NO: 41838 - DNA, 655 bp, Homo sapiens; identical to SEQ ID NO: 33301

SEQ ID NO: 41839 - DNA, 461 bp, Homo sapiens; identical to SEQ ID NO: 32550

SEQ ID NO: 41840 - DNA, 611 bp, Homo sapiens; identical to SEQ ID NO: 36835

SEQ ID NO: 41841 - DNA, 542 bp, Homo sapiens; identical to SEQ ID NO: 41800

SEQ ID NO: 41842 - DNA, 417 bp, Homo sapiens; identical to SEQ ID NO: 32916

SEQ ID NO: 41843 - DNA, 415 bp, Homo sapiens; identical to SEQ ID NO: 32917

SEQ ID NO: 41844 - DNA, 390 bp, Homo sapiens; identical to SEQ ID NO: 32918

SEQ ID NO: 41845 - DNA, 425 bp, Homo sapiens; identical to SEQ ID NO: 32919

SEQ ID NO: 41846 - DNA, 371 bp, Homo sapiens; identical to SEQ ID NO: 32920

SEQ ID NO: 41847 - DNA, 439 bp, Homo sapiens; identical to SEQ ID NO: 32921

SEQ ID NO: 41848 - DNA, 448 bp, Homo sapiens; identical to SEQ ID NO: 32492

SEQ ID NO: 41849 - DNA, 435 bp, Homo sapiens; identical to SEQ ID NO: 32923

SEQ ID NO: 41850 - DNA, 430 bp, Homo sapiens; identical to SEQ ID NO: 32924
  misc_feature 335: n = A,T,C or G

SEQ ID NO: 41851 - DNA, 633 bp, Homo sapiens; identical to SEQ ID NO: 32635

SEQ ID NO: 41852 - DNA, 473 bp, Homo sapiens; identical to SEQ ID NO: 33047
  misc_feature 427: n = A,T,C or G

SEQ ID NO: 41853 - DNA, 407 bp, Homo sapiens; identical to SEQ ID NO: 32927

SEQ ID NO: 41854 - DNA, 419 bp, Homo sapiens; identical to SEQ ID NO: 32928

SEQ ID NO: 41855 - DNA, 638 bp, Homo sapiens; identical to SEQ ID NO: 41447
  misc_feature 613: n = A,T,C or G

SEQ ID NO: 41856 - DNA, 462 bp, Homo sapiens; identical to SEQ ID NO: 33271

SEQ ID NO: 41857 - DNA, 434 bp, Homo sapiens; identical to SEQ ID NO: 32931

SEQ ID NO: 41858 - DNA, 441 bp, Homo sapiens; identical to SEQ ID NO: 32932

SEQ ID NO: 41859 - DNA, 414 bp, Homo sapiens; identical to SEQ ID NO: 32933

SEQ ID NO: 41860 - DNA, 410 bp, Homo sapiens; identical to SEQ ID NO: 32934

SEQ ID NO: 41861 - DNA, 437 bp, Homo sapiens; identical to SEQ ID NO: 33097

SEQ ID NO: 41862 - DNA, 587 bp, Homo sapiens
ctccaccgcggtggcggccgcccgggcaggtacttcaaatgggtcactgaatatcttcaaattgtatgtaaattttggaggggaagtggtatatgcagatttttttttctggaaagaagaccaatcacttttgccaaattctcaaacaggcccatatttctctcacacacatgcgtgcgcatgcgcacacgcgcgcgcgcacacacacacacacgttaagatgcgaagaatcactgtcataaaatgtcatatttctaatttctgtaaatggggagaattcctcaagcttatataaaagtgatgtaaataattcagttacaattataaaagaaatggtatcacagcaaatccctttggcaccccactgaaaatttctctctgatgtttaaaacaccatttctatgcttactcttacagctgtattaataatcagataaggggtttatttcttgtctattttgcttagcatattaccaaatctggttcatatgaactcatgggtaaaatctaaaaatgttcatgaattattcttcatgaatttttcacaaagcattaatgtatgaaaaagtgaacaatataacatcagc

SEQ ID NO: 41863 - DNA, 324 bp, Homo sapiens
tactatagggcgaattggagctccaccgcggtggcggccgcccgggcaggtacctctgctcagttttgctgtgaatctaaaactactctatataaagtctataaaaaactaaaacaaaaactaaacccctgaagattggaattttgcaagacggagtagctgttcctcagagaacagctatgtccccctcttggccagcactggcttgaaacttaccgggtgcaacatgaaatttctgtttcgtagcaagtgcatgtctcacagttgtcagtctgccactccgagtttattgggtgttttgtttcctttgagatccatgcattt

SEQ ID NO: 41864 - DNA, 431 bp, Homo sapiens; identical to SEQ ID NO: 33002

SEQ ID NO: 41865 - DNA, 446 bp, Homo sapiens; identical to SEQ ID NO: 33189

SEQ ID NO: 41866 - DNA, 432 bp, Homo sapiens; identical to SEQ ID NO: 32940

SEQ ID NO: 41867 - DNA, 443 bp, Homo sapiens; identical to SEQ ID NO: 37061

SEQ ID NO: 41868 - DNA, 417 bp, Homo sapiens; identical to SEQ ID NO: 32942

SEQ ID NO: 41869 - DNA, 414 bp, Homo sapiens; identical to SEQ ID NO: 32943

SEQ ID NO: 41870 - DNA, 406 bp, Homo sapiens; identical to SEQ ID NO: 32944
  misc_feature 323: n = A,T,C or G

SEQ ID NO: 41871 - DNA, 443 bp, Homo sapiens; identical to SEQ ID NO: 32945

SEQ ID NO: 41872 - DNA, 451 bp, Homo sapiens; identical to SEQ ID NO: 32671

SEQ ID NO: 41873 - DNA, 565 bp, Homo sapiens; identical to SEQ ID NO: 33278

SEQ ID NO: 41874 - DNA, 658 bp, Homo sapiens; identical to SEQ ID NO: 32642

SEQ ID NO: 41875 - DNA, 633 bp, Homo sapiens; identical to SEQ ID NO: 32635

SEQ ID NO: 41876 - DNA, 560 bp, Homo sapiens; identical to SEQ ID NO: 36712

SEQ ID NO: 41877 - DNA, 439 bp, Homo sapiens; identical to SEQ ID NO: 36725

SEQ ID NO: 41878 - DNA, 431 bp, Homo sapiens; identical to SEQ ID NO: 32952

SEQ ID NO: 41879 - DNA, 451 bp, Homo sapiens; identical to SEQ ID NO: 32953

SEQ ID NO: 41880 - DNA, 442 bp, Homo sapiens; identical to SEQ ID NO: 33111

SEQ ID NO: 41881 - DNA, 530 bp, Homo sapiens; identical to SEQ ID NO: 32637

SEQ ID NO: 41882 - DNA, 420 bp, Homo sapiens
ggcgaattgtagctccaccgcggtggcggccgaggtactttactgaaaaccaggttatattctaaagaagaaagaaggcaggatagtgcttttgaacaagcctatttccattttgaaagtagatttcaggctaggtgcggtggctcacacctgtaatctcagcactttgggaggccaaggcaggcagatcacttgaggtcaggagttcgagaccagcctgaccaacatggtgagaccctgtctctactaaaaatacaaaaattagctgggtgtggtggcggcgcctgtaatcccagctacttgggaggctaaggcatgagaattgcttgaacccaggaggtggaggctgcagtgagccgagatcacgacactgcactccagctgtgtgacagaatgagaccatctccaaaaaaaaaaagt

SEQ ID NO: 41883 - DNA, 270 bp, Homo sapiens; identical to SEQ ID NO: 32957

SEQ ID NO: 41884 - DNA, 560 bp, Homo sapiens; identical to SEQ ID NO: 36712

SEQ ID NO: 41885 - DNA, 444 bp, Homo sapiens; identical to SEQ ID NO: 32959

SEQ ID NO: 41886 - DNA, 349 bp, Homo sapiens; identical to SEQ ID NO: 32960

SEQ ID NO: 41887 - DNA, 606 bp, Homo sapiens
  misc_feature 412: n = A,T,C or G
gactactatatggtatattgcgaattgtgccctctagatgcatgctcgagcggccgccagtgtgatggatatctgcagaattcgccctttcgagcggccgcccgggcaggtacatagatttaaaaggtgttagaaggcaaaatgttaagtcatggtcaatgtcttaaaaaagagttaatataattaaatctgagcatactgcaaaaagattaaatcttaaaaatattttgggaaaaaagctataattttctttctgaaaaatttaatcttaagtgatatttactaagaaatatatactgcaaaccacaataacaatgatcttctcaaaatttgcctaattgcttcacaaatgagtcaacttacaaagaagaaagcacagaaaattgcttttaaatatataactccttaattntcctgataatcaaatgaaaatttagtccatcccaattaatacaaattagactcatgcttaatgtaagatatcattatatatttcttaacaacataaaagttcaagcatttttggaaagcacagactgtgttattctaaaaaaggaaaaaaaagaaaaaaatatttaaccacagaaaatttggaatatttatata

SEQ ID NO: 41888 - DNA, 392 bp, Homo sapiens; identical to SEQ ID NO: 33424

SEQ ID NO: 41889 - DNA, 608 bp, Homo sapiens; identical to SEQ ID NO: 36699

SEQ ID NO: 41890 - DNA, 399 bp, Homo sapiens
actactatagggcgaattggagctccaccgcggtggcggccgaggtactatatgccatggatgtgaatttcccatagaagctggtgacatgttcctggaagctctgggccacacctggcatgacacttgctttgtatgctcagtgtgttgtgaaagtttggaaggtcagacctttttctccaagaaggacaagccccttgtgtaagaaacatgctcattctgtgaatttttgaaagtcaacagttcaggagaagagaaggaatttgaagagaaaaaggaaaattaaaattactaattaatttttagattcaatatttatatggagttttgaaaaataattagtgggccctgaaagggaataaaattccagcctttaaaaaaccaagttctgaggaaaat

SEQ ID NO: 41891 - DNA, 445 bp, Homo sapiens; identical to SEQ ID NO: 32978

SEQ ID NO: 41892 - DNA, 445 bp, Homo sapiens; identical to SEQ ID NO: 32966

SEQ ID NO: 41893 - DNA, 441 bp, Homo sapiens; identical to SEQ ID NO: 37013

SEQ ID NO: 41894 - DNA, 445 bp, Homo sapiens; identical to SEQ ID NO: 32968

SEQ ID NO: 41895 - DNA, 478 bp, Homo sapiens; identical to SEQ ID NO: 33515

SEQ ID NO: 41896 - DNA, 444 bp, Homo sapiens; identical to SEQ ID NO: 32970

SEQ ID NO: 41897 - DNA, 445 bp, Homo sapiens; identical to SEQ ID NO: 32971

SEQ ID NO: 41898 - DNA, 449 bp, Homo sapiens; identical to SEQ ID NO: 32972

SEQ ID NO: 41899 - DNA, 470 bp, Homo sapiens
ctactatagggcgaattggagctccaccgcggtggcggccgcccgggcaggtacgaaaaaatcaggctactaagcccactgttaatatagacgcagaccaattgttaggaacaggtccaaattggagcaccattaaccaacaatcagtgatgcagaatgaggctattgaacaagtaagggctatttgcctcagggcctggggaaaaattcaggacccaggaacagctttccctattaattcaattagacaaggctctaaagagccatatcctgactttgtggcaagattacaagatgctgctcaaaagtctattacagatgacaatgcccgaaaagttattgtagaattaatggcctatgaaaatgcaaatccagaatgtcagtcggccataaagccattaaaaggaaaagttccagcaggagttgatgtaattacagaatatgtgaaggcttgtgatgggattggagga

SEQ ID NO: 41900 - DNA, 424 bp, Homo sapiens; identical to SEQ ID NO: 32974

SEQ ID NO: 41901 - DNA, 461 bp, Homo sapiens; identical to SEQ ID NO: 33380

SEQ ID NO: 41902 - DNA, 371 bp, Homo sapiens
tatacgactcacttagggcgaattggagctccaccgcggtggcggccgaggtacgatatatgaaggagcttccaacatccagttgaacaccattgcaaagcatatcgatgcagaatactgacgtctataggagtgggacccctccctggtgtcactgctgtaaaattttaaacggttgtgtcttgttgggagtaagtgccttgcgtgggaataaacttccacagcattcgaatattttaatgaagcccttagtcagggtcctggtgttggcctttttggttttctcttttcaggctgtttaacttaggcacaggagatccacttttaaacttgggaaataagcacctgtatttttttccaaaactgttttt

SEQ ID NO: 41903 - DNA, 431 bp, Homo sapiens; identical to SEQ ID NO: 32977

SEQ ID NO: 41904 - DNA, 445 bp, Homo sapiens; identical to SEQ ID NO: 32978

SEQ ID NO: 41905 - DNA, 449 bp, Homo sapiens; identical to SEQ ID NO: 32979

SEQ ID NO: 41906 - DNA, 621 bp, Homo sapiens; identical to SEQ ID NO: 38709

SEQ ID NO: 41907 - DNA, 440 bp, Homo sapiens; identical to SEQ ID NO: 32981

SEQ ID NO: 41908 - DNA, 451 bp, Homo sapiens; identical to SEQ ID NO: 32671

SEQ ID NO: 41909 - DNA, 412 bp, Homo sapiens
ctataggcgaattggagctccaccgcggtggcggccgcgcattcctgcagggatctctgtgcttccttttgtgctccctgtgtgtgtggatatttaaaggggctggaaatgtgcaaaaacatgtcactacttagacattatattgtcatcttgctgtttctagtgatgttaattatctccatttcagcagatgtgtggccttagatggtaaaagtagcagccttatcttatttctcacctctgtatcatcaggtccttcccaccatgcagatcttcctgatctccctcggctgcagccacacaaatctcccctctgtttttctccccgcgtacctgcccgggcggccgctctagaactagtggatcccccgggctgcaggaattcgatatcaagcttatcgataccgtcgac

SEQ ID NO: 41910 - DNA, 602 bp, Homo sapiens; identical to SEQ ID NO: 33064

SEQ ID NO: 41911 - DNA, 240 bp, Homo sapiens; identical to SEQ ID NO: 32985

SEQ ID NO: 41912 - DNA, 462 bp, Homo sapiens; identical to SEQ ID NO: 33419

SEQ ID NO: 41913 - DNA, 454 bp, Homo sapiens; identical to SEQ ID NO: 32987

SEQ ID NO: 41914 - DNA, 602 bp, Homo sapiens; identical to SEQ ID NO: 33064

SEQ ID NO: 41915 - DNA, 515 bp, Homo sapiens; identical to SEQ ID NO: 32807
  misc_feature 11: n = A,T,C or G

SEQ ID NO: 41916 - DNA, 439 bp, Homo sapiens; identical to SEQ ID NO: 32990

SEQ ID NO: 41917 - DNA, 471 bp, Homo sapiens
gggcgaattggagctccaccgcggtggcggccgcccgggcaggtactgaggctgtatacagccacagcctctccccatccctccagccttatctgtcatcaccagtcaacccctcccatgcacctaaacaaaatctaacttgtaattccttgaacatgtcaggcatacattattccttctgcctgagaagctcttccttgtctcttaaatctagaatgatgtaaagttttgaataagttgactatcttacttcatgcaaagaagggacacatatgagattcatcatcacatgagacagcaaatactaaaagtgtaatttgattataagagtttagataaatatatgaaatgcaagagccacagagggaatgtttatggggcacgtttgtaagcctgggatgtgaagcaaaggcagggaacctcatagtatcttatataatatacttcatttctctatctctatcacaatat

SEQ ID NO: 41918 - DNA, 565 bp, Homo sapiens; identical to SEQ ID NO: 33278

SEQ ID NO: 41919 - DNA, 453 bp, Homo sapiens; identical to SEQ ID NO: 32993

SEQ ID NO: 41920 - DNA, 439 bp, Homo sapiens; identical to SEQ ID NO: 32994
  misc_feature 434: n = A,T,C or G

SEQ ID NO: 41921 - DNA, 468 bp, Homo sapiens; identical to SEQ ID NO: 32995
  misc_feature 200: n = A,T,C or G

SEQ ID NO: 41922 - DNA, 444 bp, Homo sapiens; identical to SEQ ID NO: 32996

SEQ ID NO: 41923 - DNA, 558 bp, Homo sapiens
catgctctagcggccgccagtgtgatggatatctgcagaattcggcttagcgtggtcgcggccgaggtacaacaccatctggcttctctattttgaaactccacaccaggttaatcttgtccatggctgtggcttaaatctaaagtcaggttctggtgttttctggaatccatgcctaggtctttgattctgaaaccaaatctggattctggactcttctgcattgattgctaaagcaagtttttgtttggtagcataacctgggtaaggtttttgagtgaaagtattgatgaggattttcaattgatcttctgtgaatttggtgcaattgcacctatgatttgttgctaccatcttgtgtgaagaggggtcttcaactatgcagaaagagagttctggaggctgagctactgtctgggagactgcttacagctcattttttaaaaagaaaggtcacatataatacaatataaaattcacaaatctaaagcttatggttttctgggttttgacaaatgaaaactcctgtgcaacttcaagccttaccaggatatggat

SEQ ID NO: 41924 - DNA, 608 bp, Homo sapiens; identical to SEQ ID NO: 36699

SEQ ID NO: 41925 - DNA, 465 bp, Homo sapiens; identical to SEQ ID NO: 32999

SEQ ID NO: 41926 - DNA, 448 bp, Homo sapiens; identical to SEQ ID NO: 33000

SEQ ID NO: 41927 - DNA, 505 bp, Homo sapiens; identical to SEQ ID NO: 33122
  misc_feature 474: n = A,T,C or G

SEQ ID NO: 41928 - DNA, 612 bp, Homo sapiens; identical to SEQ ID NO: 33156

SEQ ID NO: 41929 - DNA, 425 bp, Homo sapiens
ctatagggcgaattggagctccaccgcggtggcggccgaggtacattggatgtgaactcttttaaactataacatggacactttattggaaccaaactttagttttctacattaatgagaaacactggtaactttgcttcattgaaaaaataattgcttgttctctgtcagatgcacttcgtcttagtaacatggccatggggaagacaaccacaggccagatagtcaatctgctgtccaatgatgtgaacaagtttgatcaggtgacagtgttcttacacttcctgtgggcaggaccactgcaggcgatcgcagtgactgccctactctggatggagataggaatatcgtgccttgctgggatggcagttctaatcattctcctgcccttgcaaagctgttttgggaagttgttctcatcactg

SEQ ID NO: 41930 - DNA, 659 bp, Homo sapiens; identical to SEQ ID NO: 34124

SEQ ID NO: 41931 - DNA, 449 bp, Homo sapiens; identical to SEQ ID NO: 33005

SEQ ID NO: 41932 - DNA, 658 bp, Homo sapiens; identical to SEQ ID NO: 32642

SEQ ID NO: 41933 - DNA, 447 bp, Homo sapiens; identical to SEQ ID NO: 33017

SEQ ID NO: 41934 - DNA, 398 bp, Homo sapiens
tacgactactatagggcgaattggagctccaccgcggtggcggccgcccgggcaggtacttttttttttttttttttttttttggatttttagtagagacagggtttcaccatgttggccaggatgatcttgatctcttgacctcatgatccgcccgtcttggcctcccaaagtgctgggatcacaggcgtgagccaccacacctggccctctatttattctctttaaagagagagaaaactatgagaggccaaaattatttaattaaatctttaccttagcgcaagggaaaaaatggaatttgcctaatataggtgatgaagcatacacaatgaacagaaacaatcacattttagtaaaaggcaaaaatttgagacttataagctatatggtagctt

SEQ ID NO: 41935 - DNA, 421 bp, Homo sapiens; identical to SEQ ID NO: 33009

SEQ ID NO: 41936 - DNA, 467 bp, Homo sapiens; identical to SEQ ID NO: 33010

SEQ ID NO: 41937 - DNA, 445 bp, Homo sapiens; identical to SEQ ID NO: 31529

SEQ ID NO: 41938 - DNA, 416 bp, Homo sapiens; identical to SEQ ID NO: 33012

SEQ ID NO: 41939 - DNA, 445 bp, Homo sapiens; identical to SEQ ID NO: 32978

SEQ ID NO: 41940 - DNA, 465 bp, Homo sapiens
actactatagggcgaattggagctccaccgcggtggcggccgcccgggcaggtacgcggggacatcaatgcagagtccctctgtgaatttacaacacccaacacccatgagttcagtccttaagaaggaaaattgagcaagtatttaattggttggacattgcataaaagaggtccatatccaggctaactctagaaattttattctcaaacttagttggcctctttttcttctgtcagaggaccattcttagtggcactggggaaatcttggcacccagaagaattcaactgcgctcactgcaaaaatacaatggcctacattggatttgtagaggagaaaggagccctgtattgtgggctgtgctatgagaaattctttgcccctgaatgtggtcgatgccaaaggaagatccttggagaagtcatcaatgcgttgaaacaaacttggcatgtttcctgtttt

SEQ ID NO: 41941 - DNA, 456 bp, Homo sapiens; identical to SEQ ID NO: 33015

SEQ ID NO: 41942 - DNA, 173 bp, Homo sapiens; identical to SEQ ID NO: 33016

SEQ ID NO: 41943 - DNA, 447 bp, Homo sapiens; identical to SEQ ID NO: 33017

SEQ ID NO: 41944 - DNA, 542 bp, Homo sapiens
acagtagtatttaacctgggtgtgaggaagaaggaggaaattttctggtgaataccgaagagcaaagagcagcaggtcagcaggaatgactaatgtttttctatgcacgtttaatggaaaattcatgtaggatattttgagtaggtaattggataaccagcatttataactcgcatcctactagtttgactctcactaataagacttgtcaaagatccaagaatctgaaagttgatgataaatgtccatgtgtatcaccatcaatgatcaaaagttagcatccacagacatagaatgggacagatgaacttaatggataaagatgaatatcggagttgttccttttagggaatgatactctccatgacctgtgtgagtcacagctgccagaaaagagcgagcaaggagcatatgaaggcagcacagcaaattcagtcctagagtgccctgcttgacttcatgtcatagttctgacttctaaaaaaatcattttctgcaaaatacactttgattttttccccgcttgcagcctgcaaccaaac

SEQ ID NO: 41945 - DNA, 432 bp, Homo sapiens; identical to SEQ ID NO: 33019

SEQ ID NO: 41946 - DNA, 521 bp, Homo sapiens; identical to SEQ ID NO: 39789

SEQ ID NO: 41947 - DNA, 440 bp, Homo sapiens; identical to SEQ ID NO: 33021

SEQ ID NO: 41948 - DNA, 448 bp, Homo sapiens; identical to SEQ ID NO: 32492

SEQ ID NO: 41949 - DNA, 446 bp, Homo sapiens; identical to SEQ ID NO: 33023

SEQ ID NO: 41950 - DNA, 621 bp, Homo sapiens; identical to SEQ ID NO: 41515

SEQ ID NO: 41951 - DNA, 515 bp, Homo sapiens; identical to SEQ ID NO: 32807
  misc_feature 11: n = A,T,C or G

SEQ ID NO: 41952 - DNA, 445 bp, Homo sapiens; identical to SEQ ID NO: 33026

SEQ ID NO: 41953 - DNA, 505 bp, Homo sapiens; identical to SEQ ID NO: 33122
  misc_feature 474: n = A,T,C or G

SEQ ID NO: 41954 - DNA, 444 bp, Homo sapiens; identical to SEQ ID NO: 33164

SEQ ID NO: 41955 - DNA, 442 bp, Homo sapiens; identical to SEQ ID NO: 33029

SEQ ID NO: 41956 - DNA, 451 bp, Homo sapiens; identical to SEQ ID NO: 33030

SEQ ID NO: 41957 - DNA, 447 bp, Homo sapiens; identical to SEQ ID NO: 33031

SEQ ID NO: 41958 - DNA, 565 bp, Homo sapiens; identical to SEQ ID NO: 33278

SEQ ID NO: 41959 - DNA, 448 bp, Homo sapiens; identical to SEQ ID NO: 33033

SEQ ID NO: 41960 - DNA, 464 bp, Homo sapiens; identical to SEQ ID NO: 33439

SEQ ID NO: 41961 - DNA, 611 bp, Homo sapiens; identical to SEQ ID NO: 33035
  misc_feature 188, 218, 219, 576: n = A,T,C or G

SEQ ID NO: 41962 - DNA, 577 bp, Homo sapiens; identical to SEQ ID NO: 33036
  misc_feature 558: n = A,T,C or G

SEQ ID NO: 41963 - DNA, 611 bp, Homo sapiens; identical to SEQ ID NO: 36835

SEQ ID NO: 41964 - DNA, 617 bp, Homo sapiens; identical to SEQ ID NO: 33038

SEQ ID NO: 41965 - DNA, 571 bp, Homo sapiens; identical to SEQ ID NO: 33039

SEQ ID NO: 41966 - DNA, 480 bp, Homo sapiens; identical to SEQ ID NO: 33040

SEQ ID NO: 41967 - DNA, 545 bp, Homo sapiens; identical to SEQ ID NO: 33041

SEQ ID NO: 41968 - DNA, 562 bp, Homo sapiens; identical to SEQ ID NO: 33042

SEQ ID NO: 41969 - DNA, 612 bp, Homo sapiens
tgggccctctagatgcatgctcgagcggccgccagtgtgatggatatctgcagaattcggcttagcgtggtcgcggccgaggttgggtatactatgtgccaggcacgattccaagcccctgatacattctctacattttacagatgggggaaggaggtccagagatgttaaatacttgcccaaggtcatacagaaagtggaacactgggatttgaacaaggttttggttgggcatcttctcctatgggagctcagaaatatctgttgtctagccctttctcagcctcccaaccttctcggttccttacctatgtcacagctgactttgagctaaagtcatctcggggcagctaggtgcctatgtgagctggcgttcatttctcactgtttctccttccaaatacctccaggaagaaaagcaagtcctttttggtccaagacattaaaaaagccaggctcagtggctcatgcctataatcccaacacttggggaggctgaggcaggaggatcgcttgagcccgggagctggagaccagcctggacatgttaacatagcaagacccctctacagaaaatgttaaaaatgagctgggtgtggtggcgcacacctg

SEQ ID NO: 41970 - DNA, 658 bp, Homo sapiens; identical to SEQ ID NO: 32642

SEQ ID NO: 41971 - DNA, 658 bp, Homo sapiens; identical to SEQ ID NO: 32642

SEQ ID NO: 41972 - DNA, 464 bp, Homo sapiens; identical to SEQ ID NO: 33046

SEQ ID NO: 41973 - DNA, 470 bp, Homo sapiens; identical to SEQ ID NO: 33429

SEQ ID NO: 41974 - DNA, 446 bp, Homo sapiens; identical to SEQ ID NO: 32670

SEQ ID NO: 41975 - DNA, 465 bp, Homo sapiens; identical to SEQ ID NO: 41940

SEQ ID NO: 41976 - DNA, 579 bp, Homo sapiens
cctactaaagggaacaaaagctggagctccaccgcggtggcggccgaggtactaagggaggcagttaaagaagttttaaactgagttatttctcagaaccccaaataagagttcagcctatctatggctctgctaatattgattttaaaactataacgttcatctttttcttgctttaaattcaagctgtttttaaaatcaaatctttatccccaaccaaaatgtagattttttagttcaccagagaacttcaactgacctaattaaaactaaaagttcctagctgcttaaatgtttatgtaaaacaaaaagaaaaagttgaagttccggaaaaaatacttagacatttccgtaatgtagtcactgcctcatttgcttcatcaatactaacagtcgttttttttaagtcaagatatttcaagtagaataaaaacacttcatatatgtatatttaatgagacaaaaacttgattcttagttcacagacatacaccaaaatgttcagcacaaatactcaagaaaaatgagatatccaccaaaagaacaagtcttattttctacttccatacttagattttc

SEQ ID NO: 41977 - DNA, 638 bp, Homo sapiens; identical to SEQ ID NO: 41447
  misc_feature 613: n = A,T,C or G

SEQ ID NO: 41978 - DNA, 443 bp, Homo sapiens; identical to SEQ ID NO: 33052

SEQ ID NO: 41979 - DNA, 588 bp, Homo sapiens
gagcgcgcgtaatacgactcactatagggcgaattgggtaccgggccccccctcgaggtcgacggtatcgataagcttgatatcgaattcctgcagcccgggggatccactagttctagagcggccgcccgggcaggtacactgtttccatgttatgtttctacacattgctacctcagtgctcctggaaacttagcttttgatgtctccaagtagtccaccttcatttaactctttgaaactgtatcatctttgccaagtaagagtggtggcctatttcagctgctttgacaaaatgactggctcctgacttaacgttctataaatgaatgtgctgaagcaaagtgcccatggtggcggcgaagaagagaaagatgtgttttgttttggactctctgtggtcccttccaatgctgtgggtttccaaccaggggaagggtcccttttgcattgccaagtgccataaccatgagcactactctaccatggttctgcctcctggccaagcaggctggtttgcaagaatgaaatgaatgattctacagctaggacttaaccttgaaatggaaagtcttgcaatcccatttg

SEQ ID NO: 41980 - DNA, 467 bp, Homo sapiens; identical to SEQ ID NO: 33170

SEQ ID NO: 41981 - DNA, 372 bp, Homo sapiens; identical to SEQ ID NO: 33055

SEQ ID NO: 41982 - DNA, 429 bp, Homo sapiens; identical to SEQ ID NO: 33056

SEQ ID NO: 41983 - DNA, 451 bp, Homo sapiens; identical to SEQ ID NO: 33057

SEQ ID NO: 41984 - DNA, 451 bp, Homo sapiens; identical to SEQ ID NO: 41649

SEQ ID NO: 41985 - DNA, 476 bp, Homo sapiens; identical to SEQ ID NO: 32644

SEQ ID NO: 41986 - DNA, 461 bp, Homo sapiens; identical to SEQ ID NO: 33380

SEQ ID NO: 41987 - DNA, 443 bp, Homo sapiens; identical to SEQ ID NO: 33061

SEQ ID NO: 41988 - DNA, 428 bp, Homo sapiens; identical to SEQ ID NO: 33062

SEQ ID NO: 41989 - DNA, 461 bp, Homo sapiens; identical to SEQ ID NO: 33380

SEQ ID NO: 41990 - DNA, 602 bp, Homo sapiens; identical to SEQ ID NO: 33064

SEQ ID NO: 41991 - DNA, 378 bp, Homo sapiens; identical to SEQ ID NO: 37034

SEQ ID NO: 41992 - DNA, 602 bp, Homo sapiens; identical to SEQ ID NO: 33064

SEQ ID NO: 41993 - DNA, 435 bp, Homo sapiens; identical to SEQ ID NO: 33067

SEQ ID NO: 41994 - DNA, 608 bp, Homo sapiens; identical to SEQ ID NO: 36699

SEQ ID NO: 41995 - DNA, 403 bp, Homo sapiens; identical to SEQ ID NO: 33069

SEQ ID NO: 41996 - DNA, 459 bp, Homo sapiens; identical to SEQ ID NO: 33197

SEQ ID NO: 41997 - DNA, 425 bp, Homo sapiens; identical to SEQ ID NO: 33071

SEQ ID NO: 41998 - DNA, 326 bp, Homo sapiens; identical to SEQ ID NO: 33072

SEQ ID NO: 41999 - DNA, 504 bp, Homo sapiens; identical to SEQ ID NO: 33996

SEQ ID NO: 42000 - DNA, 670 bp, Homo sapiens; identical to SEQ ID NO: 30471

SEQ ID NO: 42001 - DNA, 425 bp, Homo sapiens; identical to SEQ ID NO: 33075

SEQ ID NO: 42002 - DNA, 445 bp, Homo sapiens; identical to SEQ ID NO: 33382

SEQ ID NO: 42003 - DNA, 428 bp, Homo sapiens; identical to SEQ ID NO: 33077

SEQ ID NO: 42004 - DNA, 431 bp, Homo sapiens; identical to SEQ ID NO: 32746

SEQ ID NO: 42005 - DNA, 430 bp, Homo sapiens; identical to SEQ ID NO: 33079

SEQ ID NO: 42006 - DNA, 588 bp, Homo sapiens; identical to SEQ ID NO: 41979

SEQ ID NO: 42007 - DNA, 216 bp, Homo sapiens
actactatagggcgaattggagctccaccgcggtggcggccgaggtacttctgtcttccagttttccacttcaaacttctatcttctacaaattgtttcatcctaccactcccaattaatctttccattttcgtctgcgtttagtaaatgcgttaactaggctttaaatgacgcaattctccctgcgtcatggatttcaaggtctttttaatcacc

SEQ ID NO: 42008 - DNA, 512 bp, Homo sapiens; identical to SEQ ID NO: 33082

SEQ ID NO: 42009 - DNA, 444 bp, Homo sapiens; identical to SEQ ID NO: 33083

SEQ ID NO: 42010 - DNA, 715 bp, Homo sapiens; identical to SEQ ID NO: 33084

SEQ ID NO: 42011 - DNA, 407 bp, Homo sapiens; identical to SEQ ID NO: 33085

SEQ ID NO: 42012 - DNA, 433 bp, Homo sapiens; identical to SEQ ID NO: 33086

SEQ ID NO: 42013 - DNA, 449 bp, Homo sapiens; identical to SEQ ID NO: 33087

SEQ ID NO: 42014 - DNA, 504 bp, Homo sapiens; identical to SEQ ID NO: 33996

SEQ ID NO: 42015 - DNA, 257 bp, Homo sapiens; identical to SEQ ID NO: 33089

SEQ ID NO: 42016 - DNA, 441 bp, Homo sapiens; identical to SEQ ID NO: 33090

SEQ ID NO: 42017 - DNA, 428 bp, Homo sapiens
actactatagggcgaattggagctccaccgcggtggcggccgaggtactggctggccaccaaagcacacggagattctgtcaggcgctgagacaccacagccttttcaatcttgtccttaagggctttatctttcatccaattcagcagaggctcaaattctttctcaactgcttcacgactctccttagttttctcactttcatcgaacttcactccttccttggcaacattctggaacctcttcccatcaaattcgggaagggcctgaatacagtattcatccacaggttctgtgaggtaaataacttcatagcccttcttcagaagtcgctcaacaaatggagaagattcagcctcttttctgctggacccagccatgaagtagattttgtcttgtttttccttcattctttccacatactggtc

SEQ ID NO: 42018 - DNA, 505 bp, Homo sapiens; identical to SEQ ID NO: 33122
  misc_feature 474: n = A,T,C or G

SEQ ID NO: 42019 - DNA, 465 bp, Homo sapiens; identical to SEQ ID NO: 32999

SEQ ID NO: 42020 - DNA, 462 bp, Homo sapiens; identical to SEQ ID NO: 33330

SEQ ID NO: 42021 - DNA, 462 bp, Homo sapiens; identical to SEQ ID NO: 33419

SEQ ID NO: 42022 - DNA, 250 bp, Homo sapiens; identical to SEQ ID NO: 33096

SEQ ID NO: 42023 - DNA, 437 bp, Homo sapiens; identical to SEQ ID NO: 33097

SEQ ID NO: 42024 - DNA, 461 bp, Homo sapiens; identical to SEQ ID NO: 33380

SEQ ID NO: 42025 - DNA, 343 bp, Homo sapiens; identical to SEQ ID NO: 33099

SEQ ID NO: 42026 - DNA, 448 bp, Homo sapiens; identical to SEQ ID NO: 33100

SEQ ID NO: 42027 - DNA, 450 bp, Homo sapiens; identical to SEQ ID NO: 33101

SEQ ID NO: 42028 - DNA, 427 bp, Homo sapiens; identical to SEQ ID NO: 33102

SEQ ID NO: 42029 - DNA, 424 bp, Homo sapiens; identical to SEQ ID NO: 33103

SEQ ID NO: 42030 - DNA, 420 bp, Homo sapiens; identical to SEQ ID NO: 33104

SEQ ID NO: 42031 - DNA, 447 bp, Homo sapiens; identical to SEQ ID NO: 33105

SEQ ID NO: 42032 - DNA, 547 bp, Homo sapiens
aaagggaacaaaagctgggtaccgggccccccctcgagagtacttctagaattaattaaggcgggccctcatgctaaggcatggcaccaattcaagtgtcacgacattccattctcctaagtagataagaggacatttagaaaaatctagtaacatgtttggattatccttagctattttgctgaacttatgataacgtcagaaaatactttttacttggttattttccaaccttgacccagtttcccctgaaaagctgcgaactataattacctgtacgaagaattgcttcattccagtaatgaaataaatctcatttttttctctggttgagtctttcttgggccccttcaaagttgcatacattaacctgacccatccaacccagggctgtagagccaaagtaaactcctaggaaaccatcagtgctggaaaaaagggtctgggaatcctagctttggccctaaggagatacacgaagtgttcctgaactccaggcatgcagtgcctactgctccagaaaagtaactactgggtgggcttgctg

SEQ ID NO: 42033 - DNA, 506 bp, Homo sapiens; identical to SEQ ID NO: 39174

SEQ ID NO: 42034 - DNA, 470 bp, Homo sapiens; identical to SEQ ID NO: 41899

SEQ ID NO: 42035 - DNA, 413 bp, Homo sapiens; identical to SEQ ID NO: 33109

SEQ ID NO: 42036 - DNA, 440 bp, Homo sapiens; identical to SEQ ID NO: 33110

SEQ ID NO: 42037 - DNA, 505 bp, Homo sapiens; identical to SEQ ID NO: 33122
  misc_feature 474: n = A,T,C or G

SEQ ID NO: 42038 - DNA, 409 bp, Homo sapiens; identical to SEQ ID NO: 33112

SEQ ID NO: 42039 - DNA, 454 bp, Homo sapiens; identical to SEQ ID NO: 36953

SEQ ID NO: 42040 - DNA, 467 bp, Homo sapiens; identical to SEQ ID NO: 33170

SEQ ID NO: 42041 - DNA, 445 bp, Homo sapiens; identical to SEQ ID NO: 34460

SEQ ID NO: 42042 - DNA, 444 bp, Homo sapiens; identical to SEQ ID NO: 33116

SEQ ID NO: 42043 - DNA, 454 bp, Homo sapiens; identical to SEQ ID NO: 33117

SEQ ID NO: 42044 - DNA, 504 bp, Homo sapiens; identical to SEQ ID NO: 33996

SEQ ID NO: 42045 - DNA, 396 bp, Homo sapiens
ctactatagggcgaattggagctccaccgcggtggcggccgcccgggcaggtacagatctgggaactaaatattaaaaatgagggtggctggatatatggagaatgttgggcccagaaggaaccgtagagatcagatattacaacagctttgttttgagggttagaaatatgaaatgatttggttatgaacgcacaggttaggcagcagggccagaatcctgaccctctgccccgtggttatctcctccccagcttggctgcctcatgtcatcacagtattccattttgtttgttgcatgccttgtgaagccatcaagattttctcgtctgttttcctttcattggtaatgctcactttgtgacttcatttcaaatctgtaatcccgttcaaataa

SEQ ID NO: 42046 - DNA, 455 bp, Homo sapiens; identical to SEQ ID NO: 34411

SEQ ID NO: 42047 - DNA, 424 bp, Homo sapiens; identical to SEQ ID NO: 33121

SEQ ID NO: 42048 - DNA, 505 bp, Homo sapiens; identical to SEQ ID NO: 33122
  misc_feature 474: n = A,T,C or G

SEQ ID NO: 42049 - DNA, 419 bp, Homo sapiens; identical to SEQ ID NO: 33123

SEQ ID NO: 42050 - DNA, 444 bp, Homo sapiens; identical to SEQ ID NO: 33116

SEQ ID NO: 42051 - DNA, 408 bp, Homo sapiens; identical to SEQ ID NO: 33125

SEQ ID NO: 42052 - DNA, 505 bp, Homo sapiens; identical to SEQ ID NO: 33122
  misc_feature 474: n = A,T,C or G

SEQ ID NO: 42053 - DNA, 433 bp, Homo sapiens; identical to SEQ ID NO: 33258

SEQ ID NO: 42054 - DNA, 509 bp, Homo sapiens; identical to SEQ ID NO: 33128
  misc_feature 218, 219, 248, 263: n = A,T,C or G

SEQ ID NO: 42055 - DNA, 590 bp, Homo sapiens; identical to SEQ ID NO: 33129

SEQ ID NO: 42056 - DNA, 526 bp, Homo sapiens; identical to SEQ ID NO: 33130
  misc_feature 184: n = A,T,C or G

SEQ ID NO: 42057 - DNA, 546 bp, Homo sapiens; identical to SEQ ID NO: 33131

SEQ ID NO: 42058 - DNA, 545 bp, Homo sapiens; identical to SEQ ID NO: 33132

SEQ ID NO: 42059 - DNA, 449 bp, Homo sapiens; identical to SEQ ID NO: 34807

SEQ ID NO: 42060 - DNA, 474 bp, Homo sapiens; identical to SEQ ID NO: 33134
  misc_feature 295, 464: n = A,T,C or G

SEQ ID NO: 42061 - DNA, 531 bp, Homo sapiens; identical to SEQ ID NO: 33135
  misc_feature 465, 519: n = A,T,C or G

SEQ ID NO: 42062 - DNA, 455 bp, Homo sapiens; identical to SEQ ID NO: 32386

SEQ ID NO: 42063 - DNA, 476 bp, Homo sapiens; identical to SEQ ID NO: 32644

SEQ ID NO: 42064 - DNA, 280 bp, Homo sapiens; identical to SEQ ID NO: 33138

SEQ ID NO: 42065 - DNA, 379 bp, Homo sapiens; identical to SEQ ID NO: 33139

SEQ ID NO: 42066 - DNA, 394 bp, Homo sapiens; identical to SEQ ID NO: 33140

SEQ ID NO: 42067 - DNA, 399 bp, Homo sapiens; identical to SEQ ID NO: 33141

SEQ ID NO: 42068 - DNA, 608 bp, Homo sapiens; identical to SEQ ID NO: 36699

SEQ ID NO: 42069 - DNA, 366 bp, Homo sapiens; identical to SEQ ID NO: 33143

SEQ ID NO: 42070 - DNA, 420 bp, Homo sapiens; identical to SEQ ID NO: 33144

SEQ ID NO: 42071 - DNA, 608 bp, Homo sapiens; identical to SEQ ID NO: 36699

SEQ ID NO: 42072 - DNA, 435 bp, Homo sapiens; identical to SEQ ID NO: 33146

SEQ ID NO: 42073 - DNA, 443 bp, Homo sapiens; identical to SEQ ID NO: 33147

SEQ ID NO: 42074 - DNA, 565 bp, Homo sapiens; identical to SEQ ID NO: 33278

SEQ ID NO: 42075 - DNA, 448 bp, Homo sapiens; identical to SEQ ID NO: 33149

SEQ ID NO: 42076 - DNA, 522 bp, Homo sapiens; identical to SEQ ID NO: 33150
  misc_feature 182: n = A,T,C or G

SEQ ID NO: 42077 - DNA, 524 bp, Homo sapiens; identical to SEQ ID NO: 33283

SEQ ID NO: 42078 - DNA, 499 bp, Homo sapiens; identical to SEQ ID NO: 33152
  misc_feature 408: n = A,T,C or G

SEQ ID NO: 42079 - DNA, 658 bp, Homo sapiens; identical to SEQ ID NO: 32642

SEQ ID NO: 42080 - DNA, 556 bp, Homo sapiens; identical to SEQ ID NO: 33154
  misc_feature 52, 243, 253, 386: n = A,T,C or G

SEQ ID NO: 42081 - DNA, 424 bp, Homo sapiens; identical to SEQ ID NO: 33155
  misc_feature 411: n = A,T,C or G

SEQ ID NO: 42082 - DNA, 612 bp, Homo sapiens; identical to SEQ ID NO: 33156

SEQ ID NO: 42083 - DNA, 606 bp, Homo sapiens; identical to SEQ ID NO: 33276
  misc_feature 597: n = A,T,C or G

SEQ ID NO: 42084 - DNA, 484 bp, Homo sapiens; identical to SEQ ID NO: 33158

SEQ ID NO: 42085 - DNA, 482 bp, Homo sapiens; identical to SEQ ID NO: 33160

SEQ ID NO: 42086 - DNA, 470 bp, Homo sapiens; identical to SEQ ID NO: 33429

SEQ ID NO: 42087 - DNA, 476 bp, Homo sapiens; identical to SEQ ID NO: 33358

SEQ ID NO: 42088 - DNA, 448 bp, Homo sapiens; identical to SEQ ID NO: 33163

SEQ ID NO: 42089 - DNA, 444 bp, Homo sapiens; identical to SEQ ID NO: 33164

SEQ ID NO: 42090 - DNA, 439 bp, Homo sapiens; identical to SEQ ID NO: 33165

SEQ ID NO: 42091 - DNA, 573 bp, Homo sapiens; identical to SEQ ID NO: 41521

SEQ ID NO: 42092 - DNA, 628 bp, Homo sapiens; identical to SEQ ID NO: 37325

SEQ ID NO: 42093 - DNA, 476 bp, Homo sapiens; identical to SEQ ID NO: 33358

SEQ ID NO: 42094 - DNA, 448 bp, Homo sapiens; identical to SEQ ID NO: 33169

SEQ ID NO: 42095 - DNA, 524 bp, Homo sapiens; identical to SEQ ID NO: 33283

SEQ ID NO: 42096 - DNA, 451 bp, Homo sapiens; identical to SEQ ID NO: 33171

SEQ ID NO: 42097 - DNA, 451 bp, Homo sapiens; identical to SEQ ID NO: 33172
  misc_feature 201: n = A,T,C or G

SEQ ID NO: 42098 - DNA, 492 bp, Homo sapiens; identical to SEQ ID NO: 33173

SEQ ID NO: 42099 - DNA, 434 bp, Homo sapiens; identical to SEQ ID NO: 33174

SEQ ID NO: 42100 - DNA, 476 bp, Homo sapiens; identical to SEQ ID NO: 33358

SEQ ID NO: 42101 - DNA, 409 bp, Homo sapiens; identical to SEQ ID NO: 33176

SEQ ID NO: 42102 - DNA, 608 bp, Homo sapiens; identical to SEQ ID NO: 36699

SEQ ID NO: 42103 - DNA, 460 bp, Homo sapiens; identical to SEQ ID NO: 33178

SEQ ID NO: 42104 - DNA, 441 bp, Homo sapiens; identical to SEQ ID NO: 33179

SEQ ID NO: 42105 - DNA, 658 bp, Homo sapiens; identical to SEQ ID NO: 32642

SEQ ID NO: 42106 - DNA, 479 bp, Homo sapiens; identical to SEQ ID NO: 33181

SEQ ID NO: 42107 - DNA, 526 bp, Homo sapiens; identical to SEQ ID NO: 33182
  misc_feature 498: n = A,T,C or G

SEQ ID NO: 42108 - DNA, 658 bp, Homo sapiens; identical to SEQ ID NO: 32642

SEQ ID NO: 42109 - DNA, 570 bp, Homo sapiens; identical to SEQ ID NO: 33184

SEQ ID NO: 42110 - DNA, 513 bp, Homo sapiens; identical to SEQ ID NO: 33185

SEQ ID NO: 42111 - DNA, 606 bp, Homo sapiens; identical to SEQ ID NO: 33276
  misc_feature 597: n = A,T,C or G

SEQ ID NO: 42112 - DNA, 429 bp, Homo sapiens; identical to SEQ ID NO: 34855

SEQ ID NO: 42113 - DNA, 481 bp, Homo sapiens
tatagggcgtattggagctccaccgcggtggcggccgaggtacgtaaatggggtgaattattttactgacctgtggaatgtgatggacacgctggggcttttttacttcatagcaggaattgtatttcggctccactcttctaataaaagctctttgtattctggacgagtcattttctgtctggactacattattttcactctaagattgatccacatttttactgtaagcagaaacttaggacccaagattataatgctgcagaggatgctgatcgatgtgttcttcttcctgttcctctttgcggtgtggatggtggcctttggcgtggccaggcaagggatccttaggcagaatgagcagcgctggaggtggatattccgttcggtcatctacgagccctacctggccatgttcggccaggtgcccagtgacgtggatggtacctgcccgggcggccgctcgactctagaactagtg

SEQ ID NO: 42114 - DNA, 446 bp, Homo sapiens; identical to SEQ ID NO: 33189

SEQ ID NO: 42115 - DNA, 441 bp, Homo sapiens; identical to SEQ ID NO: 33190

SEQ ID NO: 42116 - DNA, 438 bp, Homo sapiens; identical to SEQ ID NO: 33191

SEQ ID NO: 42117 - DNA, 461 bp, Homo sapiens; identical to SEQ ID NO: 33380

SEQ ID NO: 42118 - DNA, 504 bp, Homo sapiens; identical to SEQ ID NO: 33996

SEQ ID NO: 42119 - DNA, 461 bp, Homo sapiens; identical to SEQ ID NO: 33194

SEQ ID NO: 42120 - DNA, 546 bp, Homo sapiens
tacgactcactatagggcgaattgcgccctctagatgcatgctcgagcggccgccagtgtgatggatatctgcagaattcgccctttcgagcggccgcccgggcaggtactgaggctgtatacagccacagcctctccccatccctccagccttatctgtcatcaccatcaacccctcccatgcacctaaacaaaatctaacttgtaattccttgaacatgtcaggcatacattattccttctgcctgagaagctcttccttgtctcttaaatctagaatgatgtaaagttttgaataagttgactatcttacttcatgcaaagaagggacacatatgagattcatcatcacatgagacagcaaatactaaaagtgtaatttgattataagagtttagataaatatatgaaatgcaagagccacagagggaatgtttatggggcacgtttgtaagcctgggatgtgaagcaaaggcagggaacctcatagtatcttatataatatacttcatttctctatctctatcacaatatccaacaagcttt

SEQ ID NO: 42121 - DNA, 467 bp, Homo sapiens; identical to SEQ ID NO: 33010

SEQ ID NO: 42122 - DNA, 608 bp, Homo sapiens; identical to SEQ ID NO: 36699

SEQ ID NO: 42123 - DNA, 451 bp, Homo sapiens
tagggcgaattggagctccaccgcggtggcggccgcccgggcaggtacgcggggggttttccggaagccgccagttcttttagaactcatcaaattgaagctgttccaaccagctctgcaagtgatggatttaaggcaaatcttgtttttaaggagattgagaagaaacttgaagaggaaggggaacagtttgtgaagaaaatcggtggtatttttgccttcaaggtgaaagatggccctgggggtaaagaggccacctgggtggtggatgtgaagaatggcaaaggatcagtgcttcctaactcagataagaaggctgactgcacaatcacaatggctgactcagacttcctggctttaatgactggtaaaatgaatccttagtcggccttcttttaaggcaaattgaaaatcactggcaacatgggtctcgctatgaaattacaaaatc

SEQ ID NO: 42124 - DNA, 556 bp, Homo sapiens; identical to SEQ ID NO: 40082
  misc_feature 390, 485: n = A,T,C or G

SEQ ID NO: 42125 - DNA, 465 bp, Homo sapiens; identical to SEQ ID NO: 33420

SEQ ID NO: 42126 - DNA, 430 bp, Homo sapiens; identical to SEQ ID NO: 30884

SEQ ID NO: 42127 - DNA, 404 bp, Homo sapiens
actactatagggcgaattggagctccaccgcggtggcggccgtgcagggtgaactccccttccttctcaatcagccacttgttttgaacaaacttctgcagcacctgctccgcttccttcttcctcatcttcttgcctttaagttgatcaaccaggttcaatatgtttgtggaagacgcaaagccggtttctgagtcaataatcagttccagagcctttctaaacaaatccagttcattctctgcaaaatccgtagccattttggaaattgaagttgtagcaagattcaccaacgcataaatgggtctcccatcatcttccgtgactcctctctttatctcaatatacaaggactccaagacactgttaatgttgttgatgaagtcctccaacttatctacggt

SEQ ID NO: 42128 - DNA, 463 bp, Homo sapiens
ccacgcgtccgctgggaatagcgaatgcatatcaaaaggcttcatttcttttgttctttcatgaggcttgtagcacatcaaattttgaatgtcttcttttaaagctatgtgcgcacacacgcacgcacacacatatgcgggcacacacacacatcctccctctgaactgatggtgtttagtatcgataacattttctttcttggtaatacgaggtaaatgaggggggcaaaaacttatgacttctgagtaaaatgccatgtcttctatattccgtgagctgcacagtcttgcaggaatgctccacatttcagagtaaatctgaaactggcttaaaagctccaaatcctcccttgtatgtggtatgagtgtgccttcatctccagctgtcagagccaaatcgcccacctgctcatccaagtgatgcctaatcagacatttaaggattctgaacttgatcctgtc

SEQ ID NO: 42129 - DNA, 421 bp, Homo sapiens
tcactataccggcgaattggtgctccaccgcggtggcggccgaggtacaattgaagtatgtgcagtttattgcatgtaaataaaccttttaaaaattaaccgatacaagttgacttacatgaccagaaagctcttgaaaaactctcctgttttctcccctatttttattcttgcatgcccttatagactgtgttaacacattttctaatcttacggttcttttgtgtctacatttctccaggtcaatataactatcaccataatttcttggtttctctttagttcatcagtaattatgagtaatgtattgaaatgttaatgatatgttcatgcattcagaatcctctgctctccgatctacataatagtgaattatgctgtcaacgattacacagtatattgctttttttttctttttttg

SEQ ID NO: 42130 - DNA, 304 bp, Homo sapiens
actactatagggcgaattggagctccaccgcggtggcggccgaggtacgcggggaggctcctggggtggagtccaaatcactcattgtttgtgaaagctgagctcacagcaaaacaagccaccatgaagctgtcggtgtgtctcctgctggtcacgctggccctctgctgctaccaggccaatgcccgattctgcccagctcttgtttctgagctgttagacttcttcttcattagtgaacctttgttcaagttaagttcttgccaaatttgatggccccttccggaagcttgtttgcagccaa

SEQ ID NO: 42131 - DNA, 257 bp, Homo sapiens
cgactactatagggcgaattggagctccaccgcggtggcggccgcccgggcaggtacatgggactacaggcacgccccaccatgcccagctcatttttgtatttttagtagagacagggtttcaccatgttggccacgatgatcttgatctgttgacctgatgatccgcccgtctgtggcctcccaaagtggctgaatctcaggcggtagaccaccaagctggccctcgatttattctcttttaaagagagagaaaa

SEQ ID NO: 42132 - DNA, 418 bp, Homo sapiens; identical to SEQ ID NO: 34543

SEQ ID NO: 42133 - DNA, 506 bp, Homo sapiens
cctgttccttgttggtaaatgaacaacaagaacataattatgtgaatttttcttgatttatatggaacctatgaataattactgaataattcatgtgattgcttttattggcagagctgaaaactcatccccgtgtgacctcaagtaagccatgtaactctgtgaacctgcagttttatcatttttaaaataaagaaacatgacagattttcattatgacacagaatgtcaggtctcccagatgccagaaaatacatttacttaaagccgttgatacgtcttaaagcggtttccttacagtgtcattggaggacagtgtggagtgcagagagacatgctttgaaatgggattgatccagtgctccttccttcactaccacatgaatgctgggcagcccagggtcaacccaccgcaccctcaactcagacggttacctggcacgctggccacagtctacctcactcttatcagagtctgagctactggcagtgctttcagctgtgag

SEQ ID NO: 42134 - DNA, 439 bp, Homo sapiens
tactataaggcgaataggagctccaccgcggtggcggccgcccgggcaggtacaaaaatttgaaagtgtgacaatgacaattatgaaatcctgtgactgaaagtcccctcgagtgcactctgtggtgcacatgcgcccgcccacacaaactctggcatggaaacataaactaatgcaaaccagtgctacccagaagcaccaacacgtgtgttctccattccaccaatcacagaccagtatctactccaaacatccagtaacgaaaactatggcatcttcccaggaacagcaaggcaggcttcttactcacgatgaaccagcacgaataaacccagcaaaaagagaactgcatacttaaatttaggatagtcattcatgaggatcgtcacaattccaatataaggaacaaatcccctggctctccccacaacatcttttt

SEQ ID NO: 42135 - DNA, 425 bp, Homo sapiens
ctactatagggcgaattggagctccaccgcggtggcggccgaggtaccgaggtcattttgcttcctatagactgccaccttttggcaaaagctgttctaactccatctcagcatttacaattccacacctggtggtcagaggaggcccgcctgcaggctcagctaaatcgggctgatggcattccaattactcaggctcagctcacaggctccgataattactctgatactactgctcatttaggctttgatgctctcaccacggaacaagtaacaaaggtgtgtatgagagcttgggataaattacgcaccccaggccaagcttctgtttcttttactattgttaaacagggtcacaatgaattatatcttgattttttagctaaattacaagatgctgttgaaaaatctgtctctgatgagca

SEQ ID NO: 42136 - DNA, 390 bp, Homo sapiens
tacgactcactatagggcgaattggagctccaccgcggtggcggccgcccgggcaggtacgggacttgtctccaggagacatgtctgggaagaagagctagactggagaatcatgagcatgttcaggtgaaaacatgtgagtggataagagcaagagggtgagaacacagaccaaggggctaagggacagactgtgttcagtatttgggtatggaacttgtttttgctacttgctagttctaagaccaggctcagactctaacttctctgtaatgtgggaataatgacagcacttaccttataagattttacaaagattaaaatatcatatataacagcacttaacacaagtaagaattcagtaaatgttgactgttattactattgtct

SEQ ID NO: 42137 - DNA, 327 bp, Homo sapiens
  misc_feature 10: n = A,T,C or G
ggccctctanatgcatgctcgagcggccgccagtgtgatggatatctgcagaattcggcttcgagcggccgcccgggcaggtacaagatgctgcttgacataaagacacggctggagcaggagatcgctacttaccgcagcctgctcgagggccaggatgccaagatggctggcattggcatcagggaagcctcttcaggaggtggtggtagcagcagcaatttccacatcaatgtagaagagtcagtggatggacaggtggtttcttcccacaagagagaaatctaagtgtctattgcaggagaaacgtcccttgccactccccac

SEQ ID NO: 42138 - DNA, 611 bp, Homo sapiens
  misc_feature 64, 65: n = A,T,C or G
gcgcgtaatacgactcactatagggcgaattggagctccaccgcggtggcggccgaggtacttnnttttttttttttttttttttttgtaaattctttattgccaggagtgaaccctaaagtggctcacaagagtgccctatttctttcaattaactacaaggacaaacacatctcaaagttgagataagtgaccagtatgatttgccaaaattctaaagcgcactcaccatgaaatggataaaggttacctttggggatttgcactgcatgaattctgtgaaaagcttgttggatattgtgatagagatagagaaatgaagtatattatataagatactatgaggttccctgcctttgcttcacatcccaggcttacaaacgtgccccataaacattccctctgtggctcttgcatttcatatatttatctaaactcttataatcaaattacacttttagtatttgctgtctcatgtgatgatgaatctcatatgtgtcccttctttgcatgaagtaagataggcaacttattcaaaactttacatcattctagatttaagagacaaggaagagcttctcaggcagaaggaataatgtatgcctgacatg

SEQ ID NO: 42139 - DNA, 420 bp, Homo sapiens; identical to SEQ ID NO: 34540

SEQ ID NO: 42140 - DNA, 453 bp, Homo sapiens; identical to SEQ ID NO: 33216

SEQ ID NO: 42141 - DNA, 496 bp, Homo sapiens
ctatacgactactatagggcgaattggagctccaccgcggtggcggccgcccgggcaggtacattatatgacaatgcacattagccagcaagtcttttataggtggtttcagcagcaacgataagtaatgcagaattcagctccagcactttatttcaaaagaaatttcctgcctccctccaagatgcagggtgaggaggtagcttggggttgctattggaagaggaatccagtttgctactttgtgtcaccccttgccattcttttatccccagttaattattatctgcatataatataaatctgctagaccataaattaacagctttcaggacagatgccttgaaagttcttagggaggttaaacaaatattgtagcctaaaacctcctctataacaaacatgcacacaatggaagtgatgtcgtaagtgagtgatggggcaggaaggacctagggctctgtctcgactataaaatcaccttgccccaaacaaa

SEQ ID NO: 42142 - DNA, 484 bp, Homo sapiens; identical to SEQ ID NO: 41524

SEQ ID NO: 42143 - DNA, 410 bp, Homo sapiens
ccacgcgtccggtggctggaagacatggccactccagtcggtgttgagcacggcgagcagtctcaggcctttagtgatgatgattaaaggtggtggctgtggccttgaaaacagtcatgtgaaaactcatcaccttaaggtgttaagtgtaaggatcttcatgatgaaatttctgtaaatggtgcagtcagcctcagtttccaaagccggaaaaggatcctctagtagccacggtgtggcagctgctctgaaccaggacctggacccggacccaaagtgccatgtctttaatgttagctcccagcgatgccagatgggatcagcacagccctgcctctgctgctaattgttcctctaaagtaatcgccatgcgttctttgggcttcatctttaaaggaatgaagcaactg

SEQ ID NO: 42144 - DNA, 460 bp, Homo sapiens
ctactatagggcgaattggagctccaccgcggtggcggccgaggtacagactccctggttgctgaacatcctgtatcttggatcatccacaatagcaactttgtttttcatccaggttattttaggcttaggatttcctctcacactgcagtttagggtggcattgtaaccagctatggcataggtgttaaccaaaggctgagtaaacatgggtgcctctgagaaatcaaagtcttcatacactggatttttgtagattttaccatccctggcgatcactgcactctctttagtcatggtggcatcctcactgaggccacacatgttttcagaaaagacccggaagtaatattcattccctatgaccaattcagtaatggtggcactggttcgatgataatgctcaatgacagtaaaccattccatgctcttcttgtcagccttctgaatggtatagcct

SEQ ID NO: 42145 - DNA, 440 bp, Homo sapiens
tacgactcactatagggcgaattggagctccaccgcggtggcggccgcccgggcaggtacttttttttttttttttttttttttttttttttttatactttgatatttattaacaaaaatggtccaaaaaaggattgagtcaaaattacaaagtgattaagagttaaaacaaaagttgttctttattggagtttttggggggactttaaccagttccccaaagctgtttttatctcctaaaataggacttaaatgacatcactcaagtgacagattttaatagaaactcctcctctttccttctgtcaaagcaaaatatagtgaaagtctctgttgttacctcaaacctcctttcctaataagtgtgcatgcctgtagatggattgggatgcagtgaagagagaagttaaacaaaaaggttaaaaaaaaaaaaaaggcca

SEQ ID NO: 42146 - DNA, 423 bp, Homo sapiens
  misc_feature 317, 391: n = A,T,C or G
tacgactcactatagggcgaattggagctccaccgcggtggcggccgcccgggcaggtacagatctgggaactaaatattaaaaatgagtgtggctggatatatggagaatgttgggcccagaaggaaccgtagagatcagatattacaacagctttgttttgagggttagaaatatgaaatgatttggttatgaacgcacagtttaggcagcagggccagaatcctgaccctctgccccgtggttatctcctccccagcttggctgcctcatgtcatcacagtatttccatttttgtttgttgcattgtcttgtgnaagccatcaagaaattttctccgtctgggttttccttcttcattggtaatgggctcactttttgtgactttcanttttcaaatctgtaattcccgtttcaaaataa

SEQ ID NO: 42147 - DNA, 446 bp, Homo sapiens; identical to SEQ ID NO: 33223

SEQ ID NO: 42148 - DNA, 154 bp, Homo sapiens
ataaggcgaattggagctccaccgcggtggcggccgcccgggcaggtactcttggcttagtccatattgtcggatgatctccagtggtggaagatgagtgtgctgattggattaattccgagttggaatataatgaatggttagtagtcctttt

SEQ ID NO: 42149 - DNA, 658 bp, Homo sapiens; identical to SEQ ID NO: 32642

SEQ ID NO: 42150 - DNA, 458 bp, Homo sapiens; identical to SEQ ID NO: 34421

SEQ ID NO: 42151 - DNA, 358 bp, Homo sapiens
gcgaattggagctccaccgcggtggcggccgcccgggcaggtacctgcaggatccaattgtgtccattgatctctcagagtggctgaggataatagagtttcttcttcaaggtctcaaggtctgaagcatcccacagaatgatcctactgaataactcccataagctgctggccctatacaaatccttggccaggagtatccctgagtccctgaaggtgtatggctctgtgtatcacatcaatcacgggaaccccttcaacatggaggtgctggtggattcctggcctgaatatcagatgggtattatccggcctcaaaagcaggagatgactgatgacatggatttatacacaaacg

SEQ ID NO: 42152 - DNA, 410 bp, Homo sapiens
gagctccaccgcggtggcggccgaggtacatgggactacaggcacgccccaccatgcccagctcatttttgtatttttagtggagacagggtttcaccatgttggccaggatgatcttgatctcttgacctcatgatccgcccctcttggcctcccaaagtgctgggatcacaggcgtgagccaccacacctggccctctatttattctctttaaagagagagaaaactatgagaggccaaaattatttaattaaatctttaccttagcacaagggaaaaaatggaatttgcctaatataggtgatgaagcatacacaatgaacagaaacaatcacattttagtaaaaggcaaaaatttgagacttataagctatatggtagcttatttttgggtggggaagaaatgaga

SEQ ID NO: 42153 - DNA, 457 bp, Homo sapiens
cgtaatacgactactatagggcgaattggagctccaccgcggtggcggccgaggtacgtccacggtcagccttgcggtaagcttgtgtgcttagaggaacccagggtaacgatggggcaaactgaaagtaaatatgcctcttatctcagctttattaaaattcttttaagaagagggggagttagagcttctacagaaaatctaattacgctatttcaaacaatagaacaattctgcccatggtttccagaacagggaactttagatctaaaagattgggaaaaaattggcaaagaattaaaacaagcaaatagggaaggtaaaatcatcccacttacagtatgaaatgattgggccattattaaagcaactttagaaccatttcaaacaggagaagatattgtttcagtttctgatgcccctaaaagctgtgtaacagattgtgaagaagaggcag

SEQ ID NO: 42154 - DNA, 446 bp, Homo sapiens
atagggcgaattggagctccaccgcggtggcggccgcccgggcaggtactttttttttttttttcgaaaaaaaagacatttattcagcgtcacgatcagactgttacatttagcaatcaacagcatggggtgcaaaaaaaaaaatctacattaaaaccctttgttggaatgctttacactttccacagaacagaaactaaaataacctgttatacaattagtcacaaatacagtcctcgagttttttgcccatacacatgagtatttgtctaaaacatgtcttctttgtagcagctaggccctgccaccactgtgcttggctgagttcacaaatctgttgtaacctgtagcttccctgtcacttctctggctctcctctcctgctaagctttgtttcctaattaaaatcttttgccactgccataactactgctgctgctgggaac

SEQ ID NO: 42155 - DNA, 488 bp, Homo sapiens; identical to SEQ ID NO: 33621

SEQ ID NO: 42156 - DNA, 395 bp, Homo sapiens; identical to SEQ ID NO: 31300

SEQ ID NO: 42157 - DNA, 163 bp, Homo sapiens; identical to SEQ ID NO: 33233
  misc_feature 138, 152, 153, 154: n = A,T,C or G

SEQ ID NO: 42158 - DNA, 466 bp, Homo sapiens
actactatagggcgaattggagctccaccgcggtggcagcggccgcccgggcaggtaccttatggatgacttcacaagagatccactgtatatcctggacaacaaccacacacatttgctgctcgtggacaatggctgtcatggacatcccactgtcgaagcaaagctccggaatcagctagagaagtatatctctgagcgcactattcaagattccaactatggtggcaagatccccattgtgtgttttgcccaaggaggtggaaaagagactttgaaagccatcaatacctccatcaaaaataaaattccttgtgtggtggtggaaggctcgggccagatcgctgatgtgatcgctagcctggtggaggtggaggatgccctgacatcttctgccgtcaaggagaagctggtgcgctttttaccccgcacggtgtcccggctgcctgaggaggagactgagagt

SEQ ID NO: 42159 - DNA, 120 bp, Homo sapiens; identical to SEQ ID NO: 33235

SEQ ID NO: 42160 - DNA, 450 bp, Homo sapiens
ttggagctccaccgcggtggcggccgaggtactgagatcttttattttgtttccactcagattgaggtaggtaagatttggacatttctctgccaggacttccaagcctccagaaattatattatcactaagctccaattttcgaagtttatttaagctgggaagccgggccagcgaacttagttccacattagccatactcagaaattctagttctttgaaagtatcattcaggccttcaatttccccattgacacacaggcaattatcaaggactaactctgtcacctcctccggggatctgttccttaactccaggttaatcttcttcttcatctccatgtcctcctcttgctcttcagctactactctccttttccctttcctgccttccccaatacccccaacccaaaatttttaagagatttagaaatgaatgaaaaggaacgc

SEQ ID NO: 42161 - DNA, 417 bp, Homo sapiens; identical to SEQ ID NO: 33237

SEQ ID NO: 42162 - DNA, 414 bp, Homo sapiens; identical to SEQ ID NO: 33238

SEQ ID NO: 42163 - DNA, 436 bp, Homo sapiens
cgactactatagggcgaattggagctccaccgcggtggcggccgcccgggcaggtacgcggggtgacacacacacacacacacagcacctgcacgcagatgcacacatctctagtcaaatgaggctctcagctttttgataggggctttttgatacgtgtataaccaatactttattctcactgtagtcaaggactcattgcaattcagaaatgagaagctgatccggaactccactacagctcaaagaaattctcgaatgttctcacctattaacagttattaaaatggaagaagctggggatgaaattgtgagcaatgccatctcctacgctctatacaaagccttcagcaccagtgagcaagacaaggataactggaatgggcagctgaagcttctgctggagtggaaccagctggacttagccaatgatgag

SEQ ID NO: 42164 - DNA, 532 bp, Homo sapiens
acataaagggaacaaaagctgggtaccgggccccccctcgagagtacttctagaattaattaaggcgggacggaatagagccaagtaagtgggcaaccataattggtcaatgtgtaagggtgacatttggttatgaagagctaaaagacaaggaaacaaactacttttttgttgaaccttggtttgagatacataatgaagagcttgactatgctgtcctgaaactgaaggaaaatggacaacaagtacctatggaactatataatggaattactcctgtgccacttagtgggttgatacatattattggccatccatatggagaaaaaaagcagattgatgcttgtgctgtgatccctcagggtcagcgagcaaagaaatgtcaggaacgtgttcagtctaaaaaagcagaaagtccagagtatgtccatatgtatactcaaagaagtttccagaaaataattcacaaccctgatgtgattacctatgacactgaatttttctttggggctttcggctcccctgtgtttga

SEQ ID NO: 42165 - DNA, 602 bp, Homo sapiens; identical to SEQ ID NO: 33064

SEQ ID NO: 42166 - DNA, 492 bp, Homo sapiens
catgctcgagcggccgccagtgtgatggatatctgcagaattcggctttcgagcggccgcccgggcaggtacagactggtccaggttcctggaggtcacactctggggctgccagccaaagggtgcccttaagttggagtgtgggtgacttcctgaacagagctggcactggggagggggtgctcggggtcctttctcttctaacaggccccagttttgtctcaatgacagtgtttctacacctgtgggttatgacaaagacaactgccaaagaatcttcaagaaggaggactgcaagtatatcgtggtggagaagaaggacccaaaaaagacctgttctgtcagtgaatggataatctaatgtgcttctagtaggcacagggctcccaggccaggcctcattctcctctggcctctaatagtcaatgattgtgtagccatgcctatcagtaaaaagatttttgagtaaaaaaaaaaaaaaaaaaaaaaaaa

SEQ ID NO: 42167 - DNA, 400 bp, Homo sapiens; identical to SEQ ID NO: 33243

SEQ ID NO: 42168 - DNA, 406 bp, Homo sapiens; identical to SEQ ID NO: 33244

SEQ ID NO: 42169 - DNA, 407 bp, Homo sapiens; identical to SEQ ID NO: 33245

SEQ ID NO: 42170 - DNA, 398 bp, Homo sapiens; identical to SEQ ID NO: 33246

SEQ ID NO: 42171 - DNA, 482 bp, Homo sapiens; identical to SEQ ID NO: 33166

SEQ ID NO: 42172 - DNA, 391 bp, Homo sapiens; identical to SEQ ID NO: 33248

SEQ ID NO: 42173 - DNA, 436 bp, Homo sapiens; identical to SEQ ID NO: 32434

SEQ ID NO: 42174 - DNA, 440 bp, Homo sapiens
tacgactcactatagggcgaattggagctccaccgcggtggcggccgcccgggcaggtacgcgggggggcatcacggacctaccaatatgtgatgtcacccctggtggcccagctgtgtcatggagaaactccagctgggcccagagattctgcagcgggaaaatccaaggcttatttatgccaggctgagtggatttggccagtcaggaagcttctgccggttagctggccacgatatcaactatttggctttgtcaggtgttctctcaaaaattggcagaagtggtgagaatccgtatgccccgctgaatctcctggctgactttgctggtggtggccttatgtgtgcactgggcattataatggctctttttgaccgcacacgcactggcaagggtcaggtcattgatgcaaatatggtggaaggaacagcatattt

SEQ ID NO: 42175 - DNA, 441 bp, Homo sapiens; identical to SEQ ID NO: 33251
  misc_feature 199, 200: n = A,T,C or G

SEQ ID NO: 42176 - DNA, 183 bp, Homo sapiens; identical to SEQ ID NO: 33252

SEQ ID NO: 42177 - DNA, 416 bp, Homo sapiens; identical to SEQ ID NO: 33253

SEQ ID NO: 42178 - DNA, 265 bp, Homo sapiens
gcggccgcccgggcaggtacgtccacggtctgccttgcggtaagcttgtgtgcttagaggaacccagggtaacgatggggcaaactgaaagtaaatatgcctcttatctcagctttattaaaattcttttaagaagagggggagttagagcttctaccaaaaatctatttacgctatttcaaacattagaacaattctgcccatggtttccagaacagggaactttagatctaaaagattgggaaaaaattggcaaagaattaaa

SEQ ID NO: 42179 - DNA, 448 bp, Homo sapiens; identical to SEQ ID NO: 32905

SEQ ID NO: 42180 - DNA, 458 bp, Homo sapiens
tacactactatagggcgaattggagctccaccgcggtggcggccgcccgggcaggtacgtgacaggagtgactatttctttctaactggagtcagccctccatatccttgggatccacatccaaggattcaaccaacctcagatgggaaatattcaaaagaacaaacaaacaatttaaaaaaaagaaaaacaatagaacaattaaaaataataccaatttaaaaatacagtataacaactatctacatggcatttacatttattgggtattataagtgatctagagtaatctaaagtgtatggggaaatgtgcataggctatatataaatactatgctattttacagggacttgagcatccttctgtggattttggtatccaagggtttcaggaaccaatcccccatggataccaagagatgactagactcatatcaaaatatcttctgacttcaaat

SEQ ID NO: 42181 - DNA, 445 bp, Homo sapiens; identical to SEQ ID NO: 33257

SEQ ID NO: 42182 - DNA, 557 bp, Homo sapiens
ctatagggcgaattggagctccaccgcggtggcggccgcccgggcaggtacttgtgcatgaataaatttattcttcttttctgttgcagatataaatatttctgattgtgccattttgattacccaactaggaaaagagagagagagacagagaataacatagggcttttgaatggaacacctgaaatatcaaaagagcacattaaattcttttttaaaagtttctcacataatttgaacaaagagaaaagcaatctcaatagctcagaggaaattgcagaagattgctggtaaccaggcatcttgtctacccagtctttgcctccaaggacaggccagaggcttcaggtcagtgtcaggtgtgtgtgattgttggtgttaggaaaggaggtaaatggttcaagcagggactgccattccatgccactcatgaggtttcagatatgtctggataacattagccaggctgcaacaacaacaaacccaccagttcatttataaataattagatagataaacaacaggaagattgagatagagacagagaagagatggcg

SEQ ID NO: 42183 - DNA, 186 bp, Homo sapiens; identical to SEQ ID NO: 33259

SEQ ID NO: 42184 - DNA, 447 bp, Homo sapiens; identical to SEQ ID NO: 33017

SEQ ID NO: 42185 - DNA, 488 bp, Homo sapiens; identical to SEQ ID NO: 33409

SEQ ID NO: 42186 - DNA, 485 bp, Homo sapiens; identical to SEQ ID NO: 33422

SEQ ID NO: 42187 - DNA, 606 bp, Homo sapiens; identical to SEQ ID NO: 33263
  misc_feature 495: n = A,T,C or G

SEQ ID NO: 42188 - DNA, 344 bp, Homo sapiens; identical to SEQ ID NO: 33264
  misc_feature 193: n = A,T,C or G

SEQ ID NO: 42189 - DNA, 359 bp, Homo sapiens; identical to SEQ ID NO: 33265

SEQ ID NO: 42190 - DNA, 437 bp, Homo sapiens
actattggtatagggcgaattgggccctctagatgcatgctcgagcggccgccagtgtgatggatatctgcagaattcggctttcgagcggccgcccgggcaggtactttgaacctgttgttcctttacctgatctagttgaagtatccagtggtgaggaaaatgaacaagttgtttttagtcacagggcagaaatctgcagatatgataaagatgttggtcaatggaaagaaaggggcattggtgatataaagattttacagaattatgataataagcaagttcgtatagtgatgagaagggaccaagtattaaaactttgtgccaatcacagaataactccagacatgagtttgcaaaatatgaaagggacagaaagagtattgggtgtggactgcatgtgattttgcagatggagaaagaaaggtagagcattt

SEQ ID NO: 42191 - DNA, 464 bp, Homo sapiens; identical to SEQ ID NO: 33267

SEQ ID NO: 42192 - DNA, 423 bp, Homo sapiens
tacgactactatagggcgaattggagctccaccgcggtggcggccgaggtacgcggggaggcattgaggcagccagcgcaggggcttctgctgagggggcaggcggagtttgaggaaaccgcagataagtttttttctctttgaaagatagagattaatacaactacttaaaaaatatagtcaataggttactaagatattgcttagcgttaagtttttaacgtaattttaatagcttaagattttaagagaaaatatgaagacttagaagagtagcatgaggaaggaaaagataaaaggtttctaaaacatgacggaggttgagatgaagcttcttcatggagtaaaaaatgtatttaaaagaaaattgagagaaaggactacagagccccgaattaataccaatagaagggcaatgctttt

SEQ ID NO: 42193 - DNA, 482 bp, Homo sapiens
tacactactatagggcgaattggagctccaccgcggtggcggccgcccgggcaggtacgcggggacatcaatgcagagtccctctgtgaatttacaacacccaacacccatgagttcagtccttaagaaggaaaattgagcaagtatttaattggttggacattgcataaaagaggtccatatccaggctaactctagaaattttattctcaaacttagttggcctctttttcttctgtcagaggaccattcttagtggcactggggaaatcttggcacccagaagaattcaactgcgctcactgcaaaaatacaatggcctacattggatttgtagaggagaaaggagccctgtattgtgagctgtgctatgagaaattctttgcccctgaatgtggtcgacgccaaaggaagatccttggagaagtcatcaatgcgttgaaacaaacttggcatgtttcctgttttgtgtgtgtagcctg

SEQ ID NO: 42194 - DNA, 465 bp, Homo sapiens
tacgactactatagggcgaattggagctccaccgcggtggcggccgaggtactattctatcattattgtataacggttttcaaaccagtgggcacacagagaacctcactctgtaataacaatgaggaatagccatggcgatctccagcaccaatctctccatgttttccacagctcctccagccaacccaaatagcgcctgctatagtgtaaacaatcctggcggttctagcccttgtccctctcttagtgttctttaatcagataactgcctggaagcctttcattttacacgccctgaagcagtcttctttgctagttgaattatgtggtgtgtttttccgtaataagcaaaataaatttaaaaaaatgaaaagttgacttttgtccatggtattttaattggatgacatcaaattgaacatccaaggtaagaaacagcatggcaattgggctgtggaattc

SEQ ID NO: 42195 - DNA, 462 bp, Homo sapiens; identical to SEQ ID NO: 33271

SEQ ID NO: 42196 - DNA, 407 bp, Homo sapiens; identical to SEQ ID NO: 41780
  misc_feature 342: n = A,T,C or G

SEQ ID NO: 42197 - DNA, 460 bp, Homo sapiens
atacgactcactatagggcgaattggagctccaccgcggtggcggccgcccgggcaggtacttactttttaagaattagagacagtaactccaaaaataattgtccttttttctttctttttttttttacaataaggctcttgaaaattgtcattacttgtgttttcctatacattcatctgtgtgaaagcctttttcttctttgatttaaaaaaattaactatacagttaatggtttagaacttagaactacttagaattaatgctaaagtgtcagtaagaaattaatttagcttcaataattgtgactggcctcaggaattctcccttccacacctgcccacctcacctcacctcacctcaccgcaccgcaccgcaccagagccagagcagctgcttgtctgcagcaggacacagttcctacatacgtttcagttctttcatggtaagctcaatggac

SEQ ID NO: 42198 - DNA, 428 bp, Homo sapiens
ctactatagggcgaattggagctccaccgcggtggcggccgaggtacccctccaagccggacaacccgggcgaggacgcaccagcggaggacatggccagatactactcagcgctgcgacactacatcaacctcatcaccaggcagagatatggaaaacgatccagcccagagacactgatttcagacctcttgatgagagaaagcacagaaaatgttcccagaactcggcttgaagaccctgcaatgtggtgatgggaaatgagacttgctctctggccttttcctattttcagcccatatttcatcgtgtaaaacgagaatccacccatcctaccaatgcatgcagccactgtgctgaattctgcaatgttttcctttgtcatcattgtatatatgtgtgtttaaataaagtatcatgcattcaaa

SEQ ID NO: 42199 - DNA, 574 bp, Homo sapiens; identical to SEQ ID NO: 33279

SEQ ID NO: 42200 - DNA, 606 bp, Homo sapiens; identical to SEQ ID NO: 33276
  misc_feature 597: n = A,T,C or G

SEQ ID NO: 42201 - DNA, 593 bp, Homo sapiens; identical to SEQ ID NO: 33277

SEQ ID NO: 42202 - DNA, 573 bp, Homo sapiens; identical to SEQ ID NO: 41521

SEQ ID NO: 42203 - DNA, 658 bp, Homo sapiens; identical to SEQ ID NO: 32642

SEQ ID NO: 42204 - DNA, 670 bp, Homo sapiens; identical to SEQ ID NO: 30471

SEQ ID NO: 42205 - DNA, 594 bp, Homo sapiens; identical to SEQ ID NO: 33281

SEQ ID NO: 42206 - DNA, 509 bp, Homo sapiens; identical to SEQ ID NO: 33282

SEQ ID NO: 42207 - DNA, 526 bp, Homo sapiens; identical to SEQ ID NO: 33130
  misc_feature 184: n = A,T,C or G

SEQ ID NO: 42208 - DNA, 691 bp, Homo sapiens; identical to SEQ ID NO: 33284
  misc_feature 612, 644: n = A,T,C or G

SEQ ID NO: 42209 - DNA, 506 bp, Homo sapiens; identical to SEQ ID NO: 33285
  misc_feature 414: n = A,T,C or G

SEQ ID NO: 42210 - DNA, 554 bp, Homo sapiens; identical to SEQ ID NO: 33286

SEQ ID NO: 42211 - DNA, 652 bp, Homo sapiens; identical to SEQ ID NO: 33287

SEQ ID NO: 42212 - DNA, 475 bp, Homo sapiens; identical to SEQ ID NO: 33288
  misc_feature 62: n = A,T,C or G

SEQ ID NO: 42213 - DNA, 676 bp, Homo sapiens; identical to SEQ ID NO: 33289
  misc_feature 595, 638: n = A,T,C or G

SEQ ID NO: 42214 - DNA, 681 bp, Homo sapiens; identical to SEQ ID NO: 33290

SEQ ID NO: 42215 - DNA, 521 bp, Homo sapiens; identical to SEQ ID NO: 32664

SEQ ID NO: 42216 - DNA, 563 bp, Homo sapiens; identical to SEQ ID NO: 33586

SEQ ID NO: 42217 - DNA, 463 bp, Homo sapiens; identical to SEQ ID NO: 33293

SEQ ID NO: 42218 - DNA, 441 bp, Homo sapiens; identical to SEQ ID NO: 33294

SEQ ID NO: 42219 - DNA, 586 bp, Homo sapiens
  misc_feature 76: n = A,T,C or G
gcgaattggagctccaccgcggtggcggccgcccgggcaggtaccaaagagggcataataatcagtctcacagtanggttcaccatcctccaagtgaaaaacattgttccgaatgggctttccacaggctacacacacaaaacaggaaacatgccaagtttgttcaacgcattgatgacttctccaaggatcttcctttggcatcgaccacattcaggggcaaagaatttctcatagcacagctcacaatacagggctcctttctcctctacaaatccaatgtaggccattgtatttttgcagtgagcgcagttgaattcttctgggtgccaagatttccccagtgccactaagaatggtcctctgacagaaaaaaaagaggccaactaagtttgagaataaaatttctagagttagcctggatatggacctcttttatgcaatgtccaaccaattaaatacttgctcaattttccttcttaaggactgaactcatgggtgttgggtgttgtaaattcacagagggactctgcattgatgtccccgcgtacctcggccgctctagaactagtggatcccccgggct

SEQ ID NO: 42220 - DNA, 460 bp, Homo sapiens; identical to SEQ ID NO: 33296

SEQ ID NO: 42221 - DNA, 577 bp, Homo sapiens; identical to SEQ ID NO: 33297

SEQ ID NO: 42222 - DNA, 529 bp, Homo sapiens
  misc_feature 60, 68: n = A,T,C or G
cgtaatacgctcactatacggcgaattgggtacgggccccccctcgaggtcgacggtatncgataagncttgatatcggaattccgtgcagcccggggggatccactagttctagagcggccgaggtaccaggacagtgcatggcacatgttgtatctcccacttcacccttctagaccatcccagaagatctataagatttcatctgggaaatcactaggagttcttgggggggaaagaaggaagattgttggttggaataaaaacagggttgaatgagttccagaaagcagggttctcaacctcgtggacagcaatctgcagaagaagagaacttcaaaaaaccaactagaagcaacatgcagagaagtaaaatgagaggggcctcctcaggaaagaagacagctggtccacagcagaaaaatcttgaaccagctctcccaggaagatggggtggtcgctctgcagagaacccccttcaggatccgtgaggaagaccagaaagaacaagcagaagactcctggaaac

SEQ ID NO: 42223 - DNA, 573 bp, Homo sapiens; identical to SEQ ID NO: 41635

SEQ ID NO: 42224 - DNA, 617 bp, Homo sapiens; identical to SEQ ID NO: 37208
  misc_feature 478, 553: n = A,T,C or G

SEQ ID NO: 42225 - DNA, 655 bp, Homo sapiens; identical to SEQ ID NO: 33301

SEQ ID NO: 42226 - DNA, 475 bp, Homo sapiens; identical to SEQ ID NO: 33302
  misc_feature 360: n = A,T,C or G

SEQ ID NO: 42227 - DNA, 445 bp, Homo sapiens; identical to SEQ ID NO: 33303

SEQ ID NO: 42228 - DNA, 542 bp, Homo sapiens; identical to SEQ ID NO: 33304
  misc_feature 298, 301, 303, 305, 307, 309, 312, 313, 320, 321: n = A,T,C or G

SEQ ID NO: 42229 - DNA, 605 bp, Homo sapiens
cgggccccccctcggggtacttctagaattaattaacgcggggaaggtcacgacctcgcaaaaacttttcaagagcaacaaggaagaattctgctgcgaagaacacagtgtacggatcctccgcatattatctcaacagaggacagtagctcaggaggcagcttcaaacggtgacctgtggcctgggccatctcttcgtcatgtgcttcacttttccctgtttccctgtgaactggcttccatggttctgtagggtagtgagtcggggttgtggctgcagcagagcaggagatgcttgcctgagtgggagcaacccacccccgtgtccccaatgcctcactcctggcttctagtgcagccctttgtagactcacctcgcaagaaggaagatctgcctggagacctgatcccagtccagctttttgaccataggtcatctttgtccccttgctcctttgcatcatgtcataaaatttgaggatatcagctgattattttttcttccaagaatgaaaatcaagcagaattgattcctacacgaaaaaaaaaaaaaagcggccgccaccgcggtggagctccaattcgccctatagtgagtcgtatta

SEQ ID NO: 42230 - DNA, 464 bp, Homo sapiens; identical to SEQ ID NO: 33306

SEQ ID NO: 42231 - DNA, 608 bp, Homo sapiens; identical to SEQ ID NO: 36699

SEQ ID NO: 42232 - DNA, 519 bp, Homo sapiens; identical to SEQ ID NO: 32483

SEQ ID NO: 42233 - DNA, 385 bp, Homo sapiens; identical to SEQ ID NO: 33309

SEQ ID NO: 42234 - DNA, 414 bp, Homo sapiens; identical to SEQ ID NO: 33310

SEQ ID NO: 42235 - DNA, 473 bp, Homo sapiens; identical to SEQ ID NO: 33047
  misc_feature 427: n = A,T,C or G

SEQ ID NO: 42236 - DNA, 433 bp, Homo sapiens; identical to SEQ ID NO: 33086

SEQ ID NO: 42237 - DNA, 428 bp, Homo sapiens; identical to SEQ ID NO: 33313

SEQ ID NO: 42238 - DNA, 475 bp, Homo sapiens; identical to SEQ ID NO: 36986

SEQ ID NO: 42239 - DNA, 444 bp, Homo sapiens; identical to SEQ ID NO: 33315

SEQ ID NO: 42240 - DNA, 288 bp, Homo sapiens; identical to SEQ ID NO: 33316

SEQ ID NO: 42241 - DNA, 429 bp, Homo sapiens; identical to SEQ ID NO: 32696

SEQ ID NO: 42242 - DNA, 432 bp, Homo sapiens; identical to SEQ ID NO: 33318

SEQ ID NO: 42243 - DNA, 370 bp, Homo sapiens
gcgaattggagctccaccgcggtggcggccgcccgggcaggtacccccgaatctaaaataaaagcagaaattatatgaaaaaactggggtgggagttggaaggaactttagatatgtaataaatttgtttgaaaactgttaatttctcatgctttcattaaaaaataattttcctcaagaaacccccaaattctccaccttagtgaatgaaaagtgcatttgaatttcaagaaggtatgggcatgagaaccttgcagttttctaatttgtggagacaaaataatttttataacaccaaccagaggtttcctctacaaaccccttgtaattcctttctgagcttctcttccttctagaatcttggggcatc

SEQ ID NO: 42244 - DNA, 439 bp, Homo sapiens; identical to SEQ ID NO: 33092

SEQ ID NO: 42245 - DNA, 375 bp, Homo sapiens; identical to SEQ ID NO: 33321

SEQ ID NO: 42246 - DNA, 457 bp, Homo sapiens; identical to SEQ ID NO: 33322

SEQ ID NO: 42247 - DNA, 441 bp, Homo sapiens; identical to SEQ ID NO: 33177

SEQ ID NO: 42248 - DNA, 412 bp, Homo sapiens; identical to SEQ ID NO: 33324

SEQ ID NO: 42249 - DNA, 465 bp, Homo sapiens; identical to SEQ ID NO: 33531

SEQ ID NO: 42250 - DNA, 602 bp, Homo sapiens; identical to SEQ ID NO: 33064

SEQ ID NO: 42251 - DNA, 403 bp, Homo sapiens; identical to SEQ ID NO: 34891

SEQ ID NO: 42252 - DNA, 418 bp, Homo sapiens; identical to SEQ ID NO: 33328

SEQ ID NO: 42253 - DNA, 617 bp, Homo sapiens; identical to SEQ ID NO: 37208
  misc_feature 478, 553: n = A,T,C or G

SEQ ID NO: 42254 - DNA, 462 bp, Homo sapiens; identical to SEQ ID NO: 33330

SEQ ID NO: 42255 - DNA, 467 bp, Homo sapiens; identical to SEQ ID NO: 33170

SEQ ID NO: 42256 - DNA, 196 bp, Homo sapiens; identical to SEQ ID NO: 33332

SEQ ID NO: 42257 - DNA, 439 bp, Homo sapiens; identical to SEQ ID NO: 33333

SEQ ID NO: 42258 - DNA, 175 bp, Homo sapiens; identical to SEQ ID NO: 33334

SEQ ID NO: 42259 - DNA, 400 bp, Homo sapiens; identical to SEQ ID NO: 33335

SEQ ID NO: 42260 - DNA, 444 bp, Homo sapiens; identical to SEQ ID NO: 33336

SEQ ID NO: 42261 - DNA, 354 bp, Homo sapiens; identical to SEQ ID NO: 33337

SEQ ID NO: 42262 - DNA, 485 bp, Homo sapiens; identical to SEQ ID NO: 33422

SEQ ID NO: 42263 - DNA, 535 bp, Homo sapiens
tggactccccgcggtggcggccgcccgggcaggtactacaataatcctcaagatactgaaagtaatgccaagtgaaagaccagggggtgggtggagggctaatgggctggacgaaatagccacttgattgctagttcatacaagatgtggcagcaactccttttctggctggagatcttggatgtcacatcttagaatcaggtggcaaagcatctgtgaagggcaatgtggcatcccagacagtgggtggtgagatcaggaagaaaaaatggaaatcaacagatggtggatcctacagctgagaactgattcttcaatttgacatggttggcataaacattttaaatggagcttggtaaagatcaggttattttaccattgaccaagctcttggcttctaaaaggtcctaaatttttgtttcctttgctttcacgagtgtttatttgctttccaggaacttcagggaaaaaggttaagtaatggagggaggaaagagggagggggttggcagatcaaacacaggacttaaaagtc

SEQ ID NO: 42264 - DNA, 489 bp, Homo sapiens
  misc_feature 371, 388, 414: n = A,T,C or G
ctactatagggcgaattggagctccaccgcggtggcggccgcccgggcaggtactgaggctgtatacagccacagcctctccccatccctccagccttatctgtcatcaccatcaacccctcccatgcacctaaacaaaatctaacttgtaattccttgaacatgtcaggcatacattattccttctgcctgagaagctcttccttgtctcttaaatctagaatgatgtaaagttttgaataagttgactatcttacttcatgcaaagaagggacacatatgagattcatcatcacatgagacagcaaatactaaaagtgtaatttgattataagagtttagataaatatatgaaatgcaagagccacagnagggaatgtttatgggngcacgtttgtaagcctggggatgtgnaagcaaagggcagagaacctcatagtatcttatataatatactttcatttctctatctctatcacaatatccaac

SEQ ID NO: 42265 - DNA, 460 bp, Homo sapiens; identical to SEQ ID NO: 33341

SEQ ID NO: 42266 - DNA, 424 bp, Homo sapiens; identical to SEQ ID NO: 33342

SEQ ID NO: 42267 - DNA, 423 bp, Homo sapiens
atacgactcactatagggcgaattggagctccaccgcggtggcggccgcccgggcaggtactgtttactaaattatagcactgcaataagacatttcgccaatatgatattgaagcataacaagttatttcataaggaatggtagttatctaacattctaagcaaatttggcagtgtgacttggggggggcgcagtgctgtccctgacacaatgacagccttactctctaaattagtaacttccgtaggagaccccagaagcacacctccctcccagcagtgaaagccgaggattcccgttttgattagcaggcgccttctgttcacgataaagggataagaatcaggcagtgatggcagcggagttcatgcttcattaaggcaggcattgcaaactagttcagaggagagaatccacgatga

SEQ ID NO: 42268 - DNA, 472 bp, Homo sapiens; identical to SEQ ID NO: 33344

SEQ ID NO: 42269 - DNA, 658 bp, Homo sapiens; identical to SEQ ID NO: 32642

SEQ ID NO: 42270 - DNA, 480 bp, Homo sapiens; identical to SEQ ID NO: 33346

SEQ ID NO: 42271 - DNA, 428 bp, Homo sapiens; identical to SEQ ID NO: 33347

SEQ ID NO: 42272 - DNA, 477 bp, Homo sapiens; identical to SEQ ID NO: 33348

SEQ ID NO: 42273 - DNA, 467 bp, Homo sapiens; identical to SEQ ID NO: 33349

SEQ ID NO: 42274 - DNA, 445 bp, Homo sapiens; identical to SEQ ID NO: 33350

SEQ ID NO: 42275 - DNA, 459 bp, Homo sapiens; identical to SEQ ID NO: 33351

SEQ ID NO: 42276 - DNA, 472 bp, Homo sapiens; identical to SEQ ID NO: 33352

SEQ ID NO: 42277 - DNA, 481 bp, Homo sapiens; identical to SEQ ID NO: 33353

SEQ ID NO: 42278 - DNA, 474 bp, Homo sapiens; identical to SEQ ID NO: 33354

SEQ ID NO: 42279 - DNA, 473 bp, Homo sapiens; identical to SEQ ID NO: 33355

SEQ ID NO: 42280 - DNA, 602 bp, Homo sapiens; identical to SEQ ID NO: 33064

SEQ ID NO: 42281 - DNA, 535 bp, Homo sapiens; identical to SEQ ID NO: 42263

SEQ ID NO: 42282 - DNA, 562 bp, Homo sapiens; identical to SEQ ID NO: 33042

SEQ ID NO: 42283 - DNA, 448 bp, Homo sapiens; identical to SEQ ID NO: 32871

SEQ ID NO: 42284 - DNA, 634 bp, Homo sapiens; identical to SEQ ID NO: 36752
  misc_feature 600, 622: n = A,T,C or G

SEQ ID NO: 42285 - DNA, 433 bp, Homo sapiens; identical to SEQ ID NO: 33361

SEQ ID NO: 42286 - DNA, 462 bp, Homo sapiens; identical to SEQ ID NO: 33362

SEQ ID NO: 42287 - DNA, 472 bp, Homo sapiens; identical to SEQ ID NO: 33363

SEQ ID NO: 42288 - DNA, 418 bp, Homo sapiens
ctactatagggcgaattggagctccaccgcggtggcggccgggcatttctcccagggatctctgtgcttccttttgtgcttcctgtgtgtgtggatatttaaaggggctggaaatgtgcaaaaacatgtcactacttagacattatattgtcatcttgctgtttctagtgatgttaattatctccatttcagcagatgtgtggcctcagatggtaaagtcagcagcctttcttatttctcacctctgtatcatcaggtccttcccaccatgcagatcttcctggtctccctcggctgcagccacacaaatctcccctctgtttttctcccgcgtacctgcccgggcggccgctctagaactagtggatcccccgggctgcaggaatttcgatatcaagcttatcgataccgtcgacct

SEQ ID NO: 42289 - DNA, 459 bp, Homo sapiens; identical to SEQ ID NO: 30818

SEQ ID NO: 42290 - DNA, 608 bp, Homo sapiens; identical to SEQ ID NO: 36699

SEQ ID NO: 42291 - DNA, 451 bp, Homo sapiens; identical to SEQ ID NO: 41649

SEQ ID NO: 42292 - DNA, 658 bp, Homo sapiens; identical to SEQ ID NO: 32642

SEQ ID NO: 42293 - DNA, 466 bp, Homo sapiens; identical to SEQ ID NO: 33369

SEQ ID NO: 42294 - DNA, 608 bp, Homo sapiens; identical to SEQ ID NO: 36699

SEQ ID NO: 42295 - DNA, 477 bp, Homo sapiens; identical to SEQ ID NO: 33371

SEQ ID NO: 42296 - DNA, 587 bp, Homo sapiens; identical to SEQ ID NO: 32514
  misc_feature 209, 313: n = A,T,C or G

SEQ ID NO: 42297 - DNA, 407 bp, Homo sapiens; identical to SEQ ID NO: 33373

SEQ ID NO: 42298 - DNA, 406 bp, Homo sapiens; identical to SEQ ID NO: 33374

SEQ ID NO: 42299 - DNA, 397 bp, Homo sapiens; identical to SEQ ID NO: 33375

SEQ ID NO: 42300 - DNA, 404 bp, Homo sapiens; identical to SEQ ID NO: 33376

SEQ ID NO: 42301 - DNA, 405 bp, Homo sapiens
tacgactactatagggcgaattggagctccaccgcggtggcggccgcccgggcaggtacgcggggactgtagtcaaggactcattgcaattcagaaatgagaagctgatccggaactccactacagctcaaagaaattctcgaatgttctcacctattaacagttattaaaatggaagaagctggggatgaaattgtgagcaatgccatctcctacgctctatacaaagccttcagcaccagtgagcaagacaaggataactggaatgggcagctgaagcttctgctggagtggaaccagctggacttagccaatgatgagattttcaccaatgaccgccgatgggagtctgctgaccttcaagaagtcatgtttacggctctcataaaggacagacccaagttt

SEQ ID NO: 42302 - DNA, 406 bp, Homo sapiens; identical to SEQ ID NO: 31339

SEQ ID NO: 42303 - DNA, 249 bp, Homo sapiens
cgtatacactactatagggcgaattggagctccaccgcggtggcggccgcccgggcaggtacagatctgggaactaaatattaaaaatgagtgtggctggatatatggagaatgttgggcccagaaggaaccgtagagatcatatattacaacagctttgttttgagggttagaaatatgaaatgatttggttatgaacgcacagtttaggcagcagggccagaatcctgaccctatgccccgtggtta

SEQ ID NO: 42304 - DNA, 461 bp, Homo sapiens; identical to SEQ ID NO: 33380

SEQ ID NO: 42305 - DNA, 226 bp, Homo sapiens
tactatagggcgaattggagctccaccgcggtggcggccgcccgggcaggtactgaggctgtatacagccacagcctctccccatccctccagccttatctgtcatcaccatcaacccctcccatgcacctaaacaaaatctaacttgtaattccttgaacatgtcaggcatacattattccttctgcctgagaagctcttccttgtctcttaaatctagaatgat

SEQ ID NO: 42306 - DNA, 445 bp, Homo sapiens; identical to SEQ ID NO: 33382

SEQ ID NO: 42307 - DNA, 561 bp, Homo sapiens
tccaccgcggtggcggccgcccgggcaggtaccatgatcataatattgctcattccttaacaagtattatgattctgatgttagcacaatgtctgtaatatttcactgtgggtgtcctttcctttctctaataccttggcagctctgtagaaaaaaacctcatgctccctttacgttcgcttctgctttgattttcctactctaggtttatattcgaagcacagacgttgaccggactttgatgagtgctatgacaaacctggcagccctgtttcccccagaaggtgtcagcatctggaatcctatcctactctggcagcccatcccggtgcacacagttcctctttctgaagatcaggtcagtatactgggaaaaccaggagatttcagatggacctagaatgaggaaggcaggctactcaacagttgtggatttgggagtctggacactccttgagttgtgcagttttaattctttcttaaataaagatacaaaggacaatttaggacatggaaaaccctagctaagagagagtaggaaccaaatttctctttggatct

SEQ ID NO: 42308 - DNA, 345 bp, Homo sapiens
gcgaattggagctccaccgcggtggcggccgaggtacaaacttagaagaagattggaagatagaaacaagatagaaaatgaaaatattgtcaagagtttcagatagaaaatgaaaaacaagctaagacaagtattggagaagtatagaagatagaaaaatataaagccaaaaattggataaaatagcactgaaaaaatgaggaaattattggtaaccaatttattttaaaagcccatcaatttaatttctggtggtgcagaagttagaaggtaaagcttgagaagatgagggtgtttacgtagaccagaaccaatttaaaagaatacttgaagctagaaggggaa

SEQ ID NO: 42309 - DNA, 435 bp, Homo sapiens; identical to SEQ ID NO: 33385

SEQ ID NO: 42310 - DNA, 215 bp, Homo sapiens; identical to SEQ ID NO: 33386

SEQ ID NO: 42311 - DNA, 471 bp, Homo sapiens; identical to SEQ ID NO: 36993

SEQ ID NO: 42312 - DNA, 488 bp, Homo sapiens; identical to SEQ ID NO: 33415

SEQ ID NO: 42313 - DNA, 415 bp, Homo sapiens
tatagggcgaattgggccctctagatgcatgctcgagcggccgccagtgtgatggatatctgcagaattcggcttagcgtggtcgcggccgaggtacacactgccatttttgtattttaaaggaaaaatgactttcattcccaactgattatgacctttcaggatgtcgtcaagtgatgctttcagttgtaacacgtgacttggtgctgtccctgctggtctaagtagaactgtagattcatatgggctggtgttcctgtgcgctgtgggtgtggtgattcagcctggcatttctaccataagtttttggtctgctgatttgctgccctgtcttctcttactttactttatcaatacctggcaaaactgacccagaattacctttcctcatgggcaaaggggggatttatgggtg

SEQ ID NO: 42314 - DNA, 477 bp, Homo sapiens; identical to SEQ ID NO: 31014

SEQ ID NO: 42315 - DNA, 472 bp, Homo sapiens; identical to SEQ ID NO: 33391

SEQ ID NO: 42316 - DNA, 377 bp, Homo sapiens
cgaattggagctccaccgcggtggcggccgcccgggcaggtacgcggggaggcattgaggcagccagcgcaggggcttctgctgagggggcaggcggagcttgaggaaaccgcagataagtttttttctctttgaaagatagagattaatacaactacttaaaaaatatagtcaataaggtactaagatattgcttagcgttaagtttttaacgtaattttaatagcttaagattttaagagaaaatatgaagacttagaagagtagcatgaggaaggaaaagataaaaggtttctaaaacatgacggaggttggagatgaaagcttctttcatggaggtaaaaaaatgtattttaaaaagaaaattttgagagaaa

SEQ ID NO: 42317 - DNA, 484 bp, Homo sapiens; identical to SEQ ID NO: 41524

SEQ ID NO: 42318 - DNA, 462 bp, Homo sapiens; identical to SEQ ID NO: 33394

SEQ ID NO: 42319 - DNA, 472 bp, Homo sapiens; identical to SEQ ID NO: 33395

SEQ ID NO: 42320 - DNA, 608 bp, Homo sapiens; identical to SEQ ID NO: 36699

SEQ ID NO: 42321 - DNA, 468 bp, Homo sapiens; identical to SEQ ID NO: 33397

SEQ ID NO: 42322 - DNA, 560 bp, Homo sapiens
  misc_feature 509: n = A,T,C or G
tccaccgcggtggcggccgaggtactctgggggcaaaggaaaagcgctagaggataaggatgtaactttcttcaaattaagccatcctgacccgtggtagagattagccactaagaaatagtggaaacaaataactgtttcactcttgagtgttagcatggaagagattctggttgaaatcctagtcctgccactttctggttacagaaacttacattacttttcttttgatgtttcaaggagataggagttaaagaaaaatgaacaccagattactagaacattcttatagagttgcccaaagatggaatggacaccttccagagtggaggggagggagtaggattggacagtagtcctcacctgggagcacttcttccccctgaccccacacctgcctcccagggacgtttgacagttttggattgcacaaaactgaggggtgagagttgctgctatatctagtgagcagaagccagagatgcttccaaataccttacgaagcatangacagccctcacggaaagaattatctagctccaaatgttaatgatgctgac

SEQ ID NO: 42323 - DNA, 474 bp, Homo sapiens; identical to SEQ ID NO: 33399

SEQ ID NO: 42324 - DNA, 574 bp, Homo sapiens; identical to SEQ ID NO: 33279

SEQ ID NO: 42325 - DNA, 491 bp, Homo sapiens; identical to SEQ ID NO: 33401

SEQ ID NO: 42326 - DNA, 670 bp, Homo sapiens; identical to SEQ ID NO: 30471

SEQ ID NO: 42327 - DNA, 513 bp, Homo sapiens; identical to SEQ ID NO: 32626
  misc_feature 222: n = A,T,C or G

SEQ ID NO: 42328 - DNA, 506 bp, Homo sapiens; identical to SEQ ID NO: 39174

SEQ ID NO: 42329 - DNA, 479 bp, Homo sapiens; identical to SEQ ID NO: 33405

SEQ ID NO: 42330 - DNA, 506 bp, Homo sapiens; identical to SEQ ID NO: 39174

SEQ ID NO: 42331 - DNA, 482 bp, Homo sapiens; identical to SEQ ID NO: 33407

SEQ ID NO: 42332 - DNA, 346 bp, Homo sapiens; identical to SEQ ID NO: 30985
  misc_feature 278, 338, 339: n = A,T,C or G

SEQ ID NO: 42333 - DNA, 573 bp, Homo sapiens; identical to SEQ ID NO: 41521

SEQ ID NO: 42334 - DNA, 461 bp, Homo sapiens; identical to SEQ ID NO: 33410

SEQ ID NO: 42335 - DNA, 616 bp, Homo sapiens; identical to SEQ ID NO: 39180

SEQ ID NO: 42336 - DNA, 565 bp, Homo sapiens; identical to SEQ ID NO: 33278

SEQ ID NO: 42337 - DNA, 337 bp, Homo sapiens; identical to SEQ ID NO: 33413

SEQ ID NO: 42338 - DNA, 472 bp, Homo sapiens; identical to SEQ ID NO: 33414

SEQ ID NO: 42339 - DNA, 488 bp, Homo sapiens; identical to SEQ ID NO: 33415

SEQ ID NO: 42340 - DNA, 493 bp, Homo sapiens; identical to SEQ ID NO: 33416

SEQ ID NO: 42341 - DNA, 658 bp, Homo sapiens; identical to SEQ ID NO: 32642

SEQ ID NO: 42342 - DNA, 505 bp, Homo sapiens; identical to SEQ ID NO: 33122
  misc_feature 474: n = A,T,C or G

SEQ ID NO: 42343 - DNA, 462 bp, Homo sapiens; identical to SEQ ID NO: 33419

SEQ ID NO: 42344 - DNA, 465 bp, Homo sapiens; identical to SEQ ID NO: 33420

SEQ ID NO: 42345 - DNA, 481 bp, Homo sapiens; identical to SEQ ID NO: 33421

SEQ ID NO: 42346 - DNA, 485 bp, Homo sapiens; identical to SEQ ID NO: 33422

SEQ ID NO: 42347 - DNA, 573 bp, Homo sapiens; identical to SEQ ID NO: 41521

SEQ ID NO: 42348 - DNA, 573 bp, Homo sapiens; identical to SEQ ID NO: 41521

SEQ ID NO: 42349 - DNA, 446 bp, Homo sapiens; identical to SEQ ID NO: 33425

SEQ ID NO: 42350 - DNA, 575 bp, Homo sapiens; identical to SEQ ID NO: 35911

SEQ ID NO: 42351 - DNA, 471 bp, Homo sapiens; identical to SEQ ID NO: 36993

SEQ ID NO: 42352 - DNA, 466 bp, Homo sapiens; identical to SEQ ID NO: 33428

SEQ ID NO: 42353 - DNA, 470 bp, Homo sapiens; identical to SEQ ID NO: 33429

SEQ ID NO: 42354 - DNA, 462 bp, Homo sapiens; identical to SEQ ID NO: 33430
  misc_feature 309, 437: n = A,T,C or G

SEQ ID NO: 42355 - DNA, 463 bp, Homo sapiens; identical to SEQ ID NO: 33431

SEQ ID NO: 42356 - DNA, 467 bp, Homo sapiens; identical to SEQ ID NO: 33170

SEQ ID NO: 42357 - DNA, 527 bp, Homo sapiens; identical to SEQ ID NO: 33247

SEQ ID NO: 42358 - DNA, 467 bp, Homo sapiens; identical to SEQ ID NO: 33434

SEQ ID NO: 42359 - DNA, 459 bp, Homo sapiens; identical to SEQ ID NO: 33435

SEQ ID NO: 42360 - DNA, 445 bp, Homo sapiens; identical to SEQ ID NO: 33436

SEQ ID NO: 42361 - DNA, 482 bp, Homo sapiens; identical to SEQ ID NO: 42193

SEQ ID NO: 42362 - DNA, 496 bp, Homo sapiens; identical to SEQ ID NO: 32582

SEQ ID NO: 42363 - DNA, 608 bp, Homo sapiens; identical to SEQ ID NO: 36699

SEQ ID NO: 42364 - DNA, 485 bp, Homo sapiens; identical to SEQ ID NO: 33422

SEQ ID NO: 42365 - DNA, 467 bp, Homo sapiens; identical to SEQ ID NO: 33441
  misc_feature 179: n = A,T,C or G

SEQ ID NO: 42366 - DNA, 482 bp, Homo sapiens; identical to SEQ ID NO: 42193

SEQ ID NO: 42367 - DNA, 505 bp, Homo sapiens; identical to SEQ ID NO: 33122
  misc_feature 474: n = A,T,C or G

SEQ ID NO: 42368 - DNA, 500 bp, Homo sapiens; identical to SEQ ID NO: 34312
  misc_feature 430: n = A,T,C or G

SEQ ID NO: 42369 - DNA, 602 bp, Homo sapiens; identical to SEQ ID NO: 33064

SEQ ID NO: 42370 - DNA, 417 bp, Homo sapiens
ctactatagggcgaattgtagctccaccgcggtggcggccgcccgggcaggtacttcttttttttttttttttttttttgatttttttcagcctgtgatcacttcattccaatcaatttatggggccgagacttgttacaacaatggcatgcagagattactatcccagcctccctatacagccccaggaataaaaaaatcatgactaaaatgggatagctccctaaaaagggactaggaaagaagtcccaattgaggctgaaaaaaatcaaaaaagaaaaggaatagggcatcctttttaggagcggtcactgtagagcctccaaaacccattccatttacttgggggaaaaaaaaacaactgtttggtaaatcagcagcgcttccaaaacaaaaactggaggctttacatttatt

SEQ ID NO: 42371 - DNA, 341 bp, Homo sapiens; identical to SEQ ID NO: 33370

SEQ ID NO: 42372 - DNA, 310 bp, Homo sapiens; identical to SEQ ID NO: 33448

SEQ ID NO: 42373 - DNA, 461 bp, Homo sapiens; identical to SEQ ID NO: 33269

SEQ ID NO: 42374 - DNA, 452 bp, Homo sapiens; identical to SEQ ID NO: 33450

SEQ ID NO: 42375 - DNA, 417 bp, Homo sapiens; identical to SEQ ID NO: 33451

SEQ ID NO: 42376 - DNA, 413 bp, Homo sapiens; identical to SEQ ID NO: 33011

SEQ ID NO: 42377 - DNA, 299 bp, Homo sapiens
ctatagggcgaattggagctccaccgcggtggcggccgcccgggcaggtacgcggggccttctctcttcctcggcgctgcctacggaggtggcagccatctccttctcggcatcatggccgccctcagaccccttgtgaagcccaagatcgtcaaaaagagaaccaagaagttcatccggcaccaattcagacccgatatggtcaaaattaacgcgtaacttggcgtgaaatcccagaggcatttgacatacaggggttcgtatgaaggttcaaggggccagatacttgatgctccaac

SEQ ID NO: 42378 - DNA, 401 bp, Homo sapiens; identical to SEQ ID NO: 33454

SEQ ID NO: 42379 - DNA, 563 bp, Homo sapiens; identical to SEQ ID NO: 33586

SEQ ID NO: 42380 - DNA, 425 bp, Homo sapiens; identical to SEQ ID NO: 33456

SEQ ID NO: 42381 - DNA, 594 bp, Homo sapiens; identical to SEQ ID NO: 33457
  misc_feature 530: n = A,T,C or G

SEQ ID NO: 42382 - DNA, 561 bp, Homo sapiens; identical to SEQ ID NO: 31806

SEQ ID NO: 42383 - DNA, 506 bp, Homo sapiens; identical to SEQ ID NO: 39174

SEQ ID NO: 42384 - DNA, 360 bp, Homo sapiens; identical to SEQ ID NO: 33460

SEQ ID NO: 42385 - DNA, 469 bp, Homo sapiens; identical to SEQ ID NO: 33461

SEQ ID NO: 42386 - DNA, 539 bp, Homo sapiens; identical to SEQ ID NO: 33462

SEQ ID NO: 42387 - DNA, 476 bp, Homo sapiens; identical to SEQ ID NO: 33463
  misc_feature 66: n = A,T,C or G

SEQ ID NO: 42388 - DNA, 462 bp, Homo sapiens; identical to SEQ ID NO: 33464

SEQ ID NO: 42389 - DNA, 468 bp, Homo sapiens; identical to SEQ ID NO: 35502

SEQ ID NO: 42390 - DNA, 443 bp, Homo sapiens; identical to SEQ ID NO: 33466

SEQ ID NO: 42391 - DNA, 447 bp, Homo sapiens; identical to SEQ ID NO: 33105

SEQ ID NO: 42392 - DNA, 440 bp, Homo sapiens; identical to SEQ ID NO: 33468

SEQ ID NO: 42393 - DNA, 349 bp, Homo sapiens; identical to SEQ ID NO: 33469

SEQ ID NO: 42394 - DNA, 449 bp, Homo sapiens; identical to SEQ ID NO: 33470

SEQ ID NO: 42395 - DNA, 413 bp, Homo sapiens; identical to SEQ ID NO: 33693
  misc_feature 374: n = A,T,C or G

SEQ ID NO: 42396 - DNA, 508 bp, Homo sapiens
acgactcactatagggcgaattggagctccaccgcggtggcggccgcccgggcaggtactttaaaaagaaaacagcctaatccttctttgcctatgcacgacgcgggcaattatacacaagtcccgaagcagcgctgggagcgtaagtgcgggcagagcactgcgccgtttgggaacgcaactttgaggagacagtgcggtggacttcagtgaagttccttatgacttcccctgaaattgcttccttatcatgggggcaaatgaaagtaaaaggctctaatacaacctataaggactgcaaagtatggccagggggtagtcggacttgggattggagagaaacaggaactgagcattctcctggtgtgcagcctgcagatgtgaaggaagttgttgagaagggtgtacctcggccgctctagaactagtggatcccccgggctgcaggaattcgatatcaagcttatcgataccgtcgacctcgagggggggcccggtacccagcttt

SEQ ID NO: 42397 - DNA, 459 bp, Homo sapiens
gctccaccgcggtggcggccgcttttttttttttttttttttttttttttttcgaccataataataggatatccaaataaagactaaaccggtgggtctgaaaacacaggcttatccatcccacttacaggcaaggcaaatgctgcttcttgaaatggtcccaccatggaccctttggtcatccaacccaagtcacccccttgcctggctttatcttcactatactgggcggccacttcattgaatctcatcccagactttaacttttccatggcttccatgattttgccatgtttttcacataaaatgtgtctgacctttactgcattgccaccacctttgggaccttgagccttcttgtcagcactgtcactcccaaaggctgcttccccctttccccgccttaaattaattctaaaaatactttttagggggggcccggtacccaacttttgttcc

SEQ ID NO: 42398 - DNA, 459 bp, Homo sapiens; identical to SEQ ID NO: 33474

SEQ ID NO: 42399 - DNA, 460 bp, Homo sapiens; identical to SEQ ID NO: 33475

SEQ ID NO: 42400 - DNA, 615 bp, Homo sapiens; identical to SEQ ID NO: 33688
  misc_feature 171, 468: n = A,T,C or G

SEQ ID NO: 42401 - DNA, 455 bp, Homo sapiens; identical to SEQ ID NO: 33477

SEQ ID NO: 42402 - DNA, 424 bp, Homo sapiens; identical to SEQ ID NO: 33478

SEQ ID NO: 42403 - DNA, 420 bp, Homo sapiens
tccaccgcggtggcggccgaggtacgcgggggtggctgagctccggggtgtgtggacgccgctttgttgcctgagatgaagttggagcccttgtttttgacattggatcctatactgtgagagctggttatgctggtgaggactgccccaaggtggattttcctacagctattggtatggtggtagaaagagatgacggaagcacattaatggaaatagatggcgataaaggcaaacaaggcggtcccacctactacatagatactaatgctctgcgtgttccgagggagaatatggaggccatttcacctctaaaaaatgggatggttgaagactgggatagtttccaagctattttggatcatacctacaaaatgcatgtcaaatcagaagccagtctccatcctgttcttatgtcag

SEQ ID NO: 42404 - DNA, 450 bp, Homo sapiens; identical to SEQ ID NO: 33480

SEQ ID NO: 42405 - DNA, 442 bp, Homo sapiens; identical to SEQ ID NO: 33481

SEQ ID NO: 42406 - DNA, 398 bp, Homo sapiens; identical to SEQ ID NO: 33482

SEQ ID NO: 42407 - DNA, 446 bp, Homo sapiens; identical to SEQ ID NO: 33483

SEQ ID NO: 42408 - DNA, 446 bp, Homo sapiens; identical to SEQ ID NO: 33484

SEQ ID NO: 42409 - DNA, 459 bp, Homo sapiens
actactatagggcgaattggagctccaccgcggtggcggccgcccgggcaggtacgcgggagaggagggggaggaagccggcggccagaaacggcagtggcagcagcgtccggagcagccgcagccttctggaagctccaggcggtctttctgccgagcctcggtcccggcccccatcctccccgccccatcggttgttgtctgggcggatttaaacagtcaagtaaaatcaagctgggtaatcatggcagaaggtggatttgatccctgtgaatgtgtttgctctcatgaacatgcaatgagaagactgatcaatctgttacggcagtcccagtcctactgcacagacacagagtgtcttcaggaattaccgggaccctctggtgataatggcatcagtgttacaatgatcttggtagcctggatggttattgcattgatcttgttcttactgagacc

SEQ ID NO: 42410 - DNA, 432 bp, Homo sapiens; identical to SEQ ID NO: 33486

SEQ ID NO: 42411 - DNA, 443 bp, Homo sapiens; identical to SEQ ID NO: 33487

SEQ ID NO: 42412 - DNA, 342 bp, Homo sapiens; identical to SEQ ID NO: 33488

SEQ ID NO: 42413 - DNA, 475 bp, Homo sapiens
gactcactatagggcgaattggagctccaccgcggtggcggccgcccgggcaggtacgcgggggctgatgccattttcagcctcagtacgcctgcacccaggcgctcattaaaacagcatgttgctccccactgcctcgtgttgtctgttggcgcgctgtcggggttcgaaccgatacaagaaccttccacctacctggtgctttggcctcatctataagcttttccactgtcctgaaacaagatagagaatctgagcggccagtcatctgccctaagtgctgccgccgaagactgaatgtcctggaaagtttgctgtcacatctccattatgacaaaagcattgtgccgaacagatgaaaaaaatgcattgtcaacggaatcttttatgtttgtttgtcttcctttaagcaacattgccttacttgttataaaagataaataaatatttgttcattacaaaaaaaaaaaaaaaa

SEQ ID NO: 42414 - DNA, 441 bp, Homo sapiens; identical to SEQ ID NO: 33490

SEQ ID NO: 42415 - DNA, 404 bp, Homo sapiens; identical to SEQ ID NO: 33491
  misc_feature 32: n = A,T,C or G

SEQ ID NO: 42416 - DNA, 591 bp, Homo sapiens
ctactatagggcgaattggagctccaccgcggtggcggccgcccgggcaggtacgcggggagagaagtttccgggactggtgagtagtgggcgatttaaaaacccgcgagtgtagttgtggccttcgcggtaggtgccggttggggccggctgtgattgttatcttggtgctgcagaggacagcagaagaggagattgggtcagaaaactgccctgccgcaccagagcacagcgcactagtgggacaggggtcctgactcagacttaactggctgtgtctcgtggtttttcactgtcctggaaaaggcctgaagtggcactgaaatgaggcatagatgaggtaacgtcgagggagcggtttgcaggttgcaaaggggccctactgatgctgcttaatagtaaacagtgcttactctaggacgggagttgtttccagctttacgtgtaaatctcgcgatattgtggcctgggcactatttccattaaggaggaaactgcacaggataagtcatttacctgctgttgcacagctctggctctaggattcaagctggcttcagagtcggtgctcttaaccgccatactatgttg

SEQ ID NO: 42417 - DNA, 700 bp, Homo sapiens; identical to SEQ ID NO: 33493
  misc_feature 436: n = A,T,C or G

SEQ ID NO: 42418 - DNA, 610 bp, Homo sapiens; identical to SEQ ID NO: 33494

SEQ ID NO: 42419 - DNA, 685 bp, Homo sapiens; identical to SEQ ID NO: 33495
  misc_feature 142, 412: n = A,T,C or G

SEQ ID NO: 42420 - DNA, 504 bp, Homo sapiens; identical to SEQ ID NO: 33496

SEQ ID NO: 42421 - DNA, 484 bp, Homo sapiens
tacactactatagggcgaattggagctccaccgcggtggcggccgaggtaccattgatagaagtccagtagtcttgccacattggtttatgagggcatcttggagtggaaaagagcgattatcgggggctttgaaaacagctgcaaaccagggaggaaaatcatctggcccctgctctgaggacagacatgtgctaccaggcccactggcctggaccctgaaaggccagccacgcccccgcttggccctgaggtgcatggggtgtggcacacaccctaacctgtgctattcaccttggccacacagccagaccccacagcctacaaacaccacaccatactgcaatgctggggaccaaagccaggctctgtgggcccaggtcagccagcagctccctcgggaaccccaggcacacggagttgcttcccctcttgagggtttgaagcataagccaagggctgactctttttttttttcttgggtt

SEQ ID NO: 42422 - DNA, 436 bp, Homo sapiens; identical to SEQ ID NO: 33498

SEQ ID NO: 42423 - DNA, 511 bp, Homo sapiens; identical to SEQ ID NO: 33499

SEQ ID NO: 42424 - DNA, 227 bp, Homo sapiens; identical to SEQ ID NO: 33500

SEQ ID NO: 42425 - DNA, 395 bp, Homo sapiens
tacgactcactatagggcgaattggagctccaccgcggtggcggccgaggtacttcttgtggtgcagcagcagaaccaagccgccccctagcagcatgagccctggggcacccagggccactgccatgatgcccaggactagtggggacaagccgtccactggagggaagcccacacccaggagcatcgaccagctgaggtagtgttggtcccaatagccagggcctgtggaagccccgaacgtcagattgaaggcacagaagttattctgggacccaaagaaggctcggacaatgggtgactggaagacggccgctctagaactagtggatcccccgggctgcaggaattcgatatcaagcttatcgataccgtcgacctcgagggggggcccg

SEQ ID NO: 42426 - DNA, 238 bp, Homo sapiens; identical to SEQ ID NO: 33502

SEQ ID NO: 42427 - DNA, 357 bp, Homo sapiens; identical to SEQ ID NO: 33695

SEQ ID NO: 42428 - DNA, 154 bp, Homo sapiens
tccaccgcggtggcggccgccatgcccacggcgcaacccatcacgaagcccattttgacacggtcgaagcagcttggctgggactgtccgtagggacccacggccaccggcatctcacctcgctcgcgggctgggtcgctcagctctcccgcgt

SEQ ID NO: 42429 - DNA, 460 bp, Homo sapiens; identical to SEQ ID NO: 33505

SEQ ID NO: 42430 - DNA, 443 bp, Homo sapiens; identical to SEQ ID NO: 33506

SEQ ID NO: 42431 - DNA, 447 bp, Homo sapiens; identical to SEQ ID NO: 32509

SEQ ID NO: 42432 - DNA, 642 bp, Homo sapiens
  misc_feature 483: n = A,T,C or G
gcgaattggagctccaccgcggtggcggccgaggtacaaagccttcatgtgcttgtattgaacggatacaattccgctgagttagattccaaattctaacctctccatcacacgccccagaaaggacagtagccagcttctctggatgctttgccaagcaattgactccatcacggtgaccatccagcgaagcaaggaatggttttgcaaatactcgttccagtttggtagcatttaaagctcttatatattctcgtgggacctcaaaaggatgtaaagcaggatcatagtttcttggaactctctgtaagtccaacttggtttcgcggacataattgtccggattccggctcagcatcttcaccttcatctcggttgctcttccggccgctctagaactagtggatcccccgggctgcaggaattcgatatcaagcttatcgataccgtcgacctcgagggggggcccggtacccagctttngttccctttagtgagggttaattgcgcgcttggcgtaatcatggtcatagctgtttcctgtgtgaaattgttatccgctcacaattccacacaacatacgaagccggagcataaagtgtaaagcctggggtgcctaatgagtgagctaactcacattaa

SEQ ID NO: 42433 - DNA, 366 bp, Homo sapiens; identical to SEQ ID NO: 33509

SEQ ID NO: 42434 - DNA, 369 bp, Homo sapiens; identical to SEQ ID NO: 33510

SEQ ID NO: 42435 - DNA, 393 bp, Homo sapiens; identical to SEQ ID NO: 33511

SEQ ID NO: 42436 - DNA, 397 bp, Homo sapiens; identical to SEQ ID NO: 33512

SEQ ID NO: 42437 - DNA, 481 bp, Homo sapiens; identical to SEQ ID NO: 33514

SEQ ID NO: 42438 - DNA, 478 bp, Homo sapiens; identical to SEQ ID NO: 33515

SEQ ID NO: 42439 - DNA, 479 bp, Homo sapiens; identical to SEQ ID NO: 33516

SEQ ID NO: 42440 - DNA, 481 bp, Homo sapiens; identical to SEQ ID NO: 33514

SEQ ID NO: 42441 - DNA, 426 bp, Homo sapiens; identical to SEQ ID NO: 33518

SEQ ID NO: 42442 - DNA, 454 bp, Homo sapiens; identical to SEQ ID NO: 33519

SEQ ID NO: 42443 - DNA, 471 bp, Homo sapiens; identical to SEQ ID NO: 35359

SEQ ID NO: 42444 - DNA, 317 bp, Homo sapiens; identical to SEQ ID NO: 33521

SEQ ID NO: 42445 - DNA, 402 bp, Homo sapiens
  misc_feature 316, 336, 337, 362: n = A,T,C or G
cagggtgagggatatctgcagaattcgccctttcgagcggccgcccgggcaggtacactcacacacacacacacacacacacagagctcttaacaactggtcctgagtagctctttgtaaattctttattgccaggagtgaaccctaaagtggctcacaagagtgccctatttctttcaattaactacaaggacaaacacatctcaaagttgagataagtgaccagtatgatttgccaaaattctaaagcgcactcaccatgaaatggataaaggttacctttggggatttgcactgcatgaatttctgtgaaaangcttgttggatatttgtganntagagatagagaaattgaagtatanttattataagatactaccgagggttcccttgccttttgct

SEQ ID NO: 42446 - DNA, 409 bp, Homo sapiens
ctactatagggcgaattggagctccaccgcggtggcggccgaggtacgcgggggattttttgattttccaatttccacaatgtgatggtgttttcgacagagttcctcagtggtccctggataagaatgttaaggaaattggtgtctcaactttggtgctatctgtagcattctgtccaactcaggcattgaggcagccagcgcaggggcttctgctgagggggtaggcggagcttgaggaaaccgcagataagtttttttctctttgaaagatagagattaatacaactacttaaaaaatatagtcaataggttactaagatattgcttagcgttaagtttttaacgtaattttaatagcttaagattttaagagaaaatatgaagacttagaagagtagcatgagga

SEQ ID NO: 42447 - DNA, 197 bp, Homo sapiens; identical to SEQ ID NO: 33525

SEQ ID NO: 42448 - DNA, 564 bp, Homo sapiens
tactatagggcgaattggagctccaccgcggtggcggccgcccgggcaggtacagggcacaatgtgctgggctcgggctcttgatttcttttcggcttgagaaggtgcgggcgatccaaagccccccggggactgcgtgtagccgccggctcccccgtatgaggagctgccatagctttcgaatccactgttccacatcttggtcacgattctccgcaaagaggccgagaaggtgcgggtctgggggaatagcggaaaaccacagaacgcggccgctctagaactagtggatcccccgggctgcaggaattcgatatcaagcttatcgataccgtcgacctcgagggggggcccggtacccagcttttgttccctttagtgagggttaattgcgcgcttggcgtaatcatggtcatagctgtttcctgtgtgaaattgttatccgctcacaattccacacaacatacgagccgggagcataaagtgtaaagcctggggtgcctaatgagtgagctaactcacattaattgcgttgcgctcactgcccgctttccagtcgggaaa

SEQ ID NO: 42449 - DNA, 464 bp, Homo sapiens; identical to SEQ ID NO: 33527

SEQ ID NO: 42450 - DNA, 229 bp, Homo sapiens; identical to SEQ ID NO: 33528
  misc_feature 181: n = A,T,C or G

SEQ ID NO: 42451 - DNA, 501 bp, Homo sapiens; identical to SEQ ID NO: 33529

SEQ ID NO: 42452 - DNA, 480 bp, Homo sapiens; identical to SEQ ID NO: 33530
  misc_feature 56, 57, 80: n = A,T,C or G

SEQ ID NO: 42453 - DNA, 465 bp, Homo sapiens; identical to SEQ ID NO: 33531

SEQ ID NO: 42454 - DNA, 436 bp, Homo sapiens
atacgactactatagggcgaattggagctccaccgcggtggcggccgaggtacgcgggttttcttttcgccatcttttgtctttccgtggagctgtcgccatgaaggtcgagctgtgcagttttagcgggtacgcgggtgaagatcctcaccgagcgcggctacagcttcaccaccacggccgctctagaactagtggatcccccgggctgcaggaattcgatatcaagcttatcgataccgtcgacctcgagggggggcccggtacccagcttttgttccctttagtgagggttaattgcgcgcttggcgtaatcatggtcatagctgtttcctgtgtgaaattgttatccgctcacaattccacacaaacatacgagccgggagcataaagtgtaaagcctggggtgcctaatgagtgagcttacttacattaa

SEQ ID NO: 42455 - DNA, 451 bp, Homo sapiens; identical to SEQ ID NO: 33533

SEQ ID NO: 42456 - DNA, 471 bp, Homo sapiens; identical to SEQ ID NO: 35434

SEQ ID NO: 42457 - DNA, 453 bp, Homo sapiens; identical to SEQ ID NO: 33535

SEQ ID NO: 42458 - DNA, 266 bp, Homo sapiens; identical to SEQ ID NO: 33536

SEQ ID NO: 42459 - DNA, 450 bp, Homo sapiens; identical to SEQ ID NO: 33537

SEQ ID NO: 42460 - DNA, 457 bp, Homo sapiens; identical to SEQ ID NO: 33538

SEQ ID NO: 42461 - DNA, 642 bp, Homo sapiens; identical to SEQ ID NO: 42432
  misc_feature 483: n = A,T,C or G

SEQ ID NO: 42462 - DNA, 448 bp, Homo sapiens; identical to SEQ ID NO: 33540

SEQ ID NO: 42463 - DNA, 456 bp, Homo sapiens; identical to SEQ ID NO: 33541

SEQ ID NO: 42464 - DNA, 685 bp, Homo sapiens; identical to SEQ ID NO: 35314

SEQ ID NO: 42465 - DNA, 465 bp, Homo sapiens; identical to SEQ ID NO: 33543
  misc_feature 219, 220, 221: n = A,T,C or G

SEQ ID NO: 42466 - DNA, 475 bp, Homo sapiens; identical to SEQ ID NO: 33544

SEQ ID NO: 42467 - DNA, 126 bp, Homo sapiens; identical to SEQ ID NO: 33545

SEQ ID NO: 42468 - DNA, 387 bp, Homo sapiens
actactatagggcgaattgggccctctagatgcatgctcgagcggccgccagtgtgatggatatctgcagaattcggcttagcgtggtcgcggccgaggtacaaacattttacaaaaaagaacattaccaatatcagtggcagtaagggcaagctgaagaataaatagactgagtttccgggcaatgtctgtcctcaaagacatccaaactgcgttcaggcagctgaaacaggcttctttcccagtgacaagcatatgtggtcagtaatacaaacgatggtaaatgaggctactacataggcccagttaacaaactcctcttctcctcgggtaggccatgatacaagtggaactcatcaaataatttaaacccaaggcgataacaac

SEQ ID NO: 42469 - DNA, 658 bp, Homo sapiens
ctatacggcgaattggagctccaccgcggtggcggccgccatcttgggtcatcgatgagcctcgccctgtgcctggtcccgcttgtgagggaaggacattagaaaatgaattgatgtgttccttaaaggatgggcaggaaaacagatcctgttgtggatatttatttgaacgggattacagatttgaaatgaagtcacaaagtgagcattaccaatgagaggaaaacagacgagaaaatcttgatggcttcacaagacatgcaacaaacaaaatggaatactgtgatgacatgaggcagccaagctggggaggagataaccacggggcagagggtcaggattctggccctgctgcctaaactgtgcgttcataaccaaatcatttcatatttctaaccctcaaaacaaagctgttgtaatatctgatctctacggttccttctgggcccaacattctccatatatccagccacactcatttttaatatttagttcccagatctgtacctcggccgctctagaactagtggatcccccgggctgcaggaattcgatatcaagcttatcgataccgtcgacctcgagggggggcccggtacccagcttttgttccctttagtgagggttaattgcgcgcttggcgtaatcatggtcatag

SEQ ID NO: 42470 - DNA, 562 bp, Homo sapiens
gaattggagctccaccgcggtggcggccgcccgggcaggtacacctgcaggacccaggagagcctgttgcggttcttgcccgaagcaccgagatagccagctcagtgtccctgcagcaggagcagaaccagctctggcccaggtgggtgggtggcagcactttcctagccatggctgcagccacgcctaggcaggaaacagcagagagtctggagggatgcaacaccaggagtaacaggcagcctcctctgttcttaatgagtgatggtcaggcccttcagcacctggataggcatggtgggtggtcctaagcttgaagctgcaccccagacctcggccgctctagaactagtggatcccccgggctgcacgaattcgatatcaaggttatcgataccgtcgacctcgagggggggcccggtacccagcttttgttccctttagtgagggttaattgcgcgcttggcgtaatcatggtcatagctggttcctgtgggaaattgttatccgctcacaattccacacaacatacgagccgggagcataaagtgtaaagcctggg

SEQ ID NO: 42471 - DNA, 440 bp, Homo sapiens; identical to SEQ ID NO: 33549

SEQ ID NO: 42472 - DNA, 392 bp, Homo sapiens; identical to SEQ ID NO: 33683

SEQ ID NO: 42473 - DNA, 468 bp, Homo sapiens; identical to SEQ ID NO: 35502

SEQ ID NO: 42474 - DNA, 564 bp, Homo sapiens; identical to SEQ ID NO: 33552

SEQ ID NO: 42475 - DNA, 523 bp, Homo sapiens; identical to SEQ ID NO: 33553

SEQ ID NO: 42476 - DNA, 552 bp, Homo sapiens; identical to SEQ ID NO: 33554

SEQ ID NO: 42477 - DNA, 532 bp, Homo sapiens; identical to SEQ ID NO: 41701

SEQ ID NO: 42478 - DNA, 401 bp, Homo sapiens; identical to SEQ ID NO: 33696

SEQ ID NO: 42479 - DNA, 389 bp, Homo sapiens; identical to SEQ ID NO: 33557

SEQ ID NO: 42480 - DNA, 481 bp, Homo sapiens
gactcactatagggcgaattggagctccaccgcggtggcggccgcccgggcaggtacaatcggtgccatcagcatctccaggtctccatttagcttcctgctgatctgccgtttctgaatgagtctcatcctgcacttgcagaatggtgcagtttgggcagatatagtcttccccattcctttccaaaagcctccctcgagcctcagaaatgcccacacaatcgccatgaaacccattctttacagcggtcacagcaaatcataaacctgttgttgtgaggctggcggcaaatgcaatacagggcgttggggtcgtaaccctcacattcaggcttcggtcggcccaagtctccaggctcctcatctttgatgtcctgagccgcctttccctccaacttactctctctgtcatctttcccagcctgggacacaaccccctgatcgttctcgggctcctgcttactgggcaggacgccctcca

SEQ ID NO: 42481 - DNA, 389 bp, Homo sapiens; identical to SEQ ID NO: 33559

SEQ ID NO: 42482 - DNA, 475 bp, Homo sapiens; identical to SEQ ID NO: 33560

SEQ ID NO: 42483 - DNA, 476 bp, Homo sapiens; identical to SEQ ID NO: 33561

SEQ ID NO: 42484 - DNA, 206 bp, Homo sapiens; identical to SEQ ID NO: 33562

SEQ ID NO: 42485 - DNA, 481 bp, Homo sapiens; identical to SEQ ID NO: 33564

SEQ ID NO: 42486 - DNA, 356 bp, Homo sapiens; identical to SEQ ID NO: 35199

SEQ ID NO: 42487 - DNA, 223 bp, Homo sapiens; identical to SEQ ID NO: 33566

SEQ ID NO: 42488 - DNA, 397 bp, Homo sapiens; identical to SEQ ID NO: 33567

SEQ ID NO: 42489 - DNA, 359 bp, Homo sapiens; identical to SEQ ID NO: 33568

SEQ ID NO: 42490 - DNA, 399 bp, Homo sapiens; identical to SEQ ID NO: 33569
  misc_feature 260: n = A,T,C or G

SEQ ID NO: 42491 - DNA, 504 bp, Homo sapiens; identical to SEQ ID NO: 33570

SEQ ID NO: 42492 - DNA, 209 bp, Homo sapiens; identical to SEQ ID NO: 33571

SEQ ID NO: 42493 - DNA, 505 bp, Homo sapiens; identical to SEQ ID NO: 33610

SEQ ID NO: 42494 - DNA, 602 bp, Homo sapiens; identical to SEQ ID NO: 33602

SEQ ID NO: 42495 - DNA, 486 bp, Homo sapiens; identical to SEQ ID NO: 33574

SEQ ID NO: 42496 - DNA, 637 bp, Homo sapiens
actatagggcgaattggagctcctccgcggtggcggccgaggtactgagatactgcatttctctcagccctctcccttaagccaagagagctgaagctgatgtttgatggttaccttttggtatatatgtcatggcatgagaaagaatcactgctttagtctgtagaagctttgtcgtcctttgccatgccctggggagggagcaggaccatcctttgcacccatcagagcattcctagttcttttgttgccagatacgtaagagtggttgagtttacaggtgtctgcatctctctttagcagaaagatggggtttcaaatgtgttgcctctttccaattttgctatgcctatcagtagtcagatattttggggagaagggaaaaatccaaggtaaatgtgaggttcttacagtgaattacttttcaaaagaaatttctgctaccaaggggcatttgggaagtggctgtgtggagaagttttcattgtaatgcgaacatattgccaaaaaatattgtacctgcccgggcggccgctctagaactagtggatcccccgggctgcaggaattcgatatcaagcttatcgataccgtcgacctccagggggggcccggtacccagcttttgttcccttta

SEQ ID NO: 42497 - DNA, 475 bp, Homo sapiens; identical to SEQ ID NO: 33616

SEQ ID NO: 42498 - DNA, 443 bp, Homo sapiens; identical to SEQ ID NO: 33487

SEQ ID NO: 42499 - DNA, 463 bp, Homo sapiens; identical to SEQ ID NO: 33578

SEQ ID NO: 42500 - DNA, 462 bp, Homo sapiens; identical to SEQ ID NO: 33579

SEQ ID NO: 42501 - DNA, 472 bp, Homo sapiens; identical to SEQ ID NO: 33580

SEQ ID NO: 42502 - DNA, 502 bp, Homo sapiens; identical to SEQ ID NO: 33581

SEQ ID NO: 42503 - DNA, 383 bp, Homo sapiens; identical to SEQ ID NO: 33582

SEQ ID NO: 42504 - DNA, 400 bp, Homo sapiens; identical to SEQ ID NO: 33583

SEQ ID NO: 42505 - DNA, 390 bp, Homo sapiens; identical to SEQ ID NO: 33584

SEQ ID NO: 42506 - DNA, 555 bp, Homo sapiens; identical to SEQ ID NO: 33585
  misc_feature 533: n = A,T,C or G

SEQ ID NO: 42507 - DNA, 563 bp, Homo sapiens; identical to SEQ ID NO: 33586

SEQ ID NO: 42508 - DNA, 604 bp, Homo sapiens; identical to SEQ ID NO: 33587

SEQ ID NO: 42509 - DNA, 592 bp, Homo sapiens; identical to SEQ ID NO: 33588

SEQ ID NO: 42510 - DNA, 685 bp, Homo sapiens; identical to SEQ ID NO: 33589

SEQ ID NO: 42511 - DNA, 529 bp, Homo sapiens; identical to SEQ ID NO: 33590

SEQ ID NO: 42512 - DNA, 614 bp, Homo sapiens; identical to SEQ ID NO: 33591

SEQ ID NO: 42513 - DNA, 715 bp, Homo sapiens; identical to SEQ ID NO: 33084

SEQ ID NO: 42514 - DNA, 387 bp, Homo sapiens
ctcactatagggcgaattggagctccaccgcggtggcggccgtggtggtgaagctgtagccgcgctcggtgaggatcttcacccgcgtacccgctaaaactgcacagctcgaccttcatggcgacagctccacggaaagacaaaagatggcgaaaagaaaacccgcgtacctcggccgctctagaactagtggatcccccgggctgcaggaattcgatatcaagcttatcgataccgtcgacctcgagggggggcccggtacccagcttttgttccctttagtgagggttaattgcgcgcttggcgtaatcatggtcatagctgtttcctgtgtgaaattggtatccgctcacaattccacacaacatacgagccgggagcataaag

SEQ ID NO: 42515 - DNA, 662 bp, Homo sapiens; identical to SEQ ID NO: 33594

SEQ ID NO: 42516 - DNA, 628 bp, Homo sapiens; identical to SEQ ID NO: 33595

SEQ ID NO: 42517 - DNA, 531 bp, Homo sapiens; identical to SEQ ID NO: 33596

SEQ ID NO: 42518 - DNA, 541 bp, Homo sapiens; identical to SEQ ID NO: 33597

SEQ ID NO: 42519 - DNA, 616 bp, Homo sapiens; identical to SEQ ID NO: 33598

SEQ ID NO: 42520 - DNA, 553 bp, Homo sapiens; identical to SEQ ID NO: 33599

SEQ ID NO: 42521 - DNA, 605 bp, Homo sapiens; identical to SEQ ID NO: 33600
  misc_feature 303, 384: n = A,T,C or G

SEQ ID NO: 42522 - DNA, 534 bp, Homo sapiens; identical to SEQ ID NO: 33601
  misc_feature 310: n = A,T,C or G

SEQ ID NO: 42523 - DNA, 602 bp, Homo sapiens; identical to SEQ ID NO: 33602

SEQ ID NO: 42524 - DNA, 606 bp, Homo sapiens; identical to SEQ ID NO: 33603

SEQ ID NO: 42525 - DNA, 689 bp, Homo sapiens; identical to SEQ ID NO: 33604

SEQ ID NO: 42526 - DNA, 666 bp, Homo sapiens; identical to SEQ ID NO: 33605

SEQ ID NO: 42527 - DNA, 582 bp, Homo sapiens; identical to SEQ ID NO: 33606

SEQ ID NO: 42528 - DNA, 628 bp, Homo sapiens; identical to SEQ ID NO: 33607

SEQ ID NO: 42529 - DNA, 581 bp, Homo sapiens; identical to SEQ ID NO: 33608

SEQ ID NO: 42530 - DNA, 633 bp, Homo sapiens; identical to SEQ ID NO: 33609

SEQ ID NO: 42531 - DNA, 505 bp, Homo sapiens; identical to SEQ ID NO: 33610

SEQ ID NO: 42532 - DNA, 650 bp, Homo sapiens; identical to SEQ ID NO: 31835

SEQ ID NO: 42533 - DNA, 533 bp, Homo sapiens; identical to SEQ ID NO: 33612

SEQ ID NO: 42534 - DNA, 194 bp, Homo sapiens; identical to SEQ ID NO: 33613

SEQ ID NO: 42535 - DNA, 433 bp, Homo sapiens
actactatagggcgaattgggccctctagatgcatgctcgagcggccgccagtgtgatggatatctgcagaattcgccctttcgagcggccgcccgggcaggtactgtgggtgatatttgcctttagtgcactcttctccttcagagtaaagtggttggcggtggttatcatgggtgtggtgctacaaggtgccaacctgtatggttacatcaggtgtaaggtgcgcagcagaaagcatttaaccagcatggctacttcatattttggaaagcagtttttaagacaaaacactggagatgatcagacttcctgaatagaggaagcttatgtgctttgttacattggggaacaactgaagagattcttgactcaaccttttagagcttagtccatgttgcaacgaggagtgttggctttgtttttccacttaaa

SEQ ID NO: 42536 - DNA, 321 bp, Homo sapiens
tccaccgcggtggcggccgcccgggcaggtacttataccagctaagcagcagtaaactgaaagtaaaaagcatagctagctagagagatgaataaacagcaatgtttatgtcctgcagccagatgacaatgcactgttgcagaagaatgagtttcagacctttgcagctttggccttctctagctgctgaagctgttccagggcagggcctggtgtcgtggtgtccagaggaagatcccatacactaccaccttcccaaactgtaagacaacaaaagaaacaacgagggatgacagagcttacacacatggtgacatatcc

SEQ ID NO: 42537 - DNA, 475 bp, Homo sapiens; identical to SEQ ID NO: 33616

SEQ ID NO: 42538 - DNA, 485 bp, Homo sapiens
tccaccgcggtggcggccgaggtacgcgggggaggaagagtgagggttccaacttttctgcttatctgggaggtgttgggcgcggacagtcgagatgtcagagaaaaagcagccggtagacttaggtctgttagaggaagacgacgagtttgaagagttccctgccgaagactgggctggcttagatgaagatgaagatgcacatgtctgggaggataattgggatgatgacaatgtagaggatgacttctctaatcagttacgagctgaactagagaaacatggttataagatggagacttcatagcatccagaagaagtgttgaagtaacctaaacttgacctgcttaatacattctagggcagagaacccaggatgggacactaaaaaaatgtgtttatttcattatctgcttggatttatttgtgtttttgtaacacaaaaaataaatgttttgatataatcttgaaaaaaaaaaaaaaaa

SEQ ID NO: 42539 - DNA, 392 bp, Homo sapiens
atacgactactatagggcgaattggagctccaccgcggtggcggccgaggtacttattacatataggaaaagattttccatgacatagtggtaatccgcccgactgctgtctggcagaaaacaggcggcaaacacaatgatggcatttagaccgtccccatagtatcctgaatctcctccgtgagaaatgactctcctgtagggctcgatgaccttcatgtcaatgcgctgctcttgttctccaatgaccactgtcctccaaagccggttgtcctcccgttcctcttcggccgctctagaactagtggatcccccgggctgcaggaattcgatatcaagcttatcgataccgtcgacctcgagggggggcccggtacccagcttttgttccc

SEQ ID NO: 42540 - DNA, 394 bp, Homo sapiens
gcgtatacgactcactatagggcgaattggagctccaccgcggtggcggccgcggagatggaggatttgctcgacttggacgaggagcttcgctacagcttggctacctccagggccaagatgggtcgccgagctcaacaggagtcagcgcaggccgagaatcacctcaatggcaagaattcctctttgactctgactggagagacttcctctgctaaattacctcgctgccgacagggaggctgggcaggtgattccgtgaaggcttcgaagtttaggaggaaggcttctgaagaaatagaagagtacctcggccgctctagaactagtggatcccccgggctgcaggaattcgatatcaagcttatcgataccgtcgacctcgagggggggc

SEQ ID NO: 42541 - DNA, 197 bp, Homo sapiens; identical to SEQ ID NO: 33622

SEQ ID NO: 42542 - DNA, 200 bp, Homo sapiens; identical to SEQ ID NO: 33623

SEQ ID NO: 42543 - DNA, 458 bp, Homo sapiens
cgactactatagggcgaattggagctccaccgcggtggcggccgaggtacctggatcctgctcctctgggttgaaacccgggcgccgccaagatgccggcttaccactcttctctcatggatcctgataccaaactcatcggaaacatggcactgttgcctatcagaagtcaattcaaaggacctgcccccagagagacaaaagatacagatattgtggatgaagccatctattacttcaaggccaatgtcttcttcaaaaactatgaaattaagaatgaagctgataggaccttgatatatataactctctacatttctgaatgtctgaagaaactgcaaaagtgcaattccaaaagccaaggtgagaaagaaatgtatacgctgggaatcactaattttcccattcctggagagcctggttttccacttaacgcaatttatgccaaacctgcaaac

SEQ ID NO: 42544 - DNA, 387 bp, Homo sapiens; identical to SEQ ID NO: 33625

SEQ ID NO: 42545 - DNA, 386 bp, Homo sapiens; identical to SEQ ID NO: 33626

SEQ ID NO: 42546 - DNA, 380 bp, Homo sapiens; identical to SEQ ID NO: 33627

SEQ ID NO: 42547 - DNA, 395 bp, Homo sapiens; identical to SEQ ID NO: 33628

SEQ ID NO: 42548 - DNA, 369 bp, Homo sapiens; identical to SEQ ID NO: 33630
  misc_feature 187: n = A,T,C or G

SEQ ID NO: 42549 - DNA, 396 bp, Homo sapiens; identical to SEQ ID NO: 33631

SEQ ID NO: 42550 - DNA, 383 bp, Homo sapiens; identical to SEQ ID NO: 33632

SEQ ID NO: 42551 - DNA, 472 bp, Homo sapiens; identical to SEQ ID NO: 33633

SEQ ID NO: 42552 - DNA, 507 bp, Homo sapiens
ctcactatagggcgaattggagctccaccgcggtggcggccgaggtactcggaggatatctgtcaacctccggactttccctgcctcaagcagctggtggcctacgtgcagctcaacatgccaggctcagacctggagtgccgtgcccaccttctcctggcccagctggagcactcggaacccattgaggcagagcctgaggctctgtcaccagtgccagctctaaaaccaactccagagctcgagctagctctaacaccagctcgagcacccagcccagtgccggctccagccccggagccagagccagctccaacaccagctccaggttcagagctagaagtagctccagcaccagctgcggagctccagcaggctccagagccagctgtgggactagaatcggctccagcgccagctctggaactagagccagctccagaacaggatccagctccctcacaaactctagagctggagccagctccagcaccagttccatcatta

SEQ ID NO: 42553 - DNA, 446 bp, Homo sapiens; identical to SEQ ID NO: 33635

SEQ ID NO: 42554 - DNA, 489 bp, Homo sapiens; identical to SEQ ID NO: 33636

SEQ ID NO: 42555 - DNA, 715 bp, Homo sapiens; identical to SEQ ID NO: 33084

SEQ ID NO: 42556 - DNA, 446 bp, Homo sapiens; identical to SEQ ID NO: 33635

SEQ ID NO: 42557 - DNA, 442 bp, Homo sapiens; identical to SEQ ID NO: 33639

SEQ ID NO: 42558 - DNA, 339 bp, Homo sapiens; identical to SEQ ID NO: 33640
  misc_feature 226, 283, 284: n = A,T,C or G

SEQ ID NO: 42559 - DNA, 188 bp, Homo sapiens; identical to SEQ ID NO: 33641

SEQ ID NO: 42560 - DNA, 460 bp, Homo sapiens
atacactactatagggcgaattggagctccaccgcggtggcggccgaggtacctgcaggcctcctacacctacctctctctgggcttctatttcgaccgcgatgatgtggctctggaaggcgtgagccacttcttccgcgaactggccgaggagaagcgcgagggctacgagcgtctcctgaagatgcaaaaccagcgtggcggccgctctagaactagtggatcccccgggctgcaggaattcgatatcaagcttatcgataccgtcgacctcgagggggggcccggtacccagcttttgttccctttagtgagggttaattgcgcgcttggcgtaatcatggtcatagctgtttcctgtgtgaaattgttatccgctcacaattccacacaacatacgagccgggagcataaagtgtaaagcctggggtgcctaatgagtgagctaactcacattaat

SEQ ID NO: 42561 - DNA, 465 bp, Homo sapiens; identical to SEQ ID NO: 33717

SEQ ID NO: 42562 - DNA, 700 bp, Homo sapiens; identical to SEQ ID NO: 33493
  misc_feature 436: n = A,T,C or G

SEQ ID NO: 42563 - DNA, 442 bp, Homo sapiens; identical to SEQ ID NO: 33645

SEQ ID NO: 42564 - DNA, 441 bp, Homo sapiens; identical to SEQ ID NO: 33190

SEQ ID NO: 42565 - DNA, 423 bp, Homo sapiens; identical to SEQ ID NO: 33647

SEQ ID NO: 42566 - DNA, 447 bp, Homo sapiens; identical to SEQ ID NO: 33648

SEQ ID NO: 42567 - DNA, 189 bp, Homo sapiens; identical to SEQ ID NO: 33649

SEQ ID NO: 42568 - DNA, 387 bp, Homo sapiens
actactatagggcgaattgggccctctagatgcatgctcgagcggccgccagtgtgatggatatctgcagaattcgccctttcgagcggccgcccgggcaggtacgcgggggcagcaggcgtgcagtttcccggctctccgcgcggccggggaaggtcagcgccgtaatggcgttcttggcgtcgggaccctacctgacccatcagcaaaaggtgttgcggctttataagcgggcgctacgccacctcgagtcgtggtgcgtccagagagacaaataccgatactttgcttgtttgatgagagcccggtttgaagaacataagaatgaaaaggatatggcgaaggccacccagctgctgaaggaggccgaggaagaattctggtacc

SEQ ID NO: 42569 - DNA, 484 bp, Homo sapiens
tacactactatagggcgaattggagctccaccgcggtggcggccgaggtaccactggcatcgtgatggactccggtgacggggtcacccacactgtgcccatctacgaggggtatgccctcccccatgccatcctgcgtctggacctggctggccgggacctgactgactacctcatgaagatcctcaccgagcgcggctacagcttcaccaccacggccgctctagaactagtggatcccccgggctgcaggaattcgatatcaagcttatcgataccgtcgacctcgagggggggcccggtacccagcttttgttccctttagtgagggttaattgcgcgcttggcgtaatcatggtcatagctgtttcctgtgtgaaattgttatccgctcacaattccacacaacatacgagccgggagcataaagtgtaaagcctggggtgcctaatgagtgagctaactcacattaattgcgttgcgc

SEQ ID NO: 42570 - DNA, 236 bp, Homo sapiens; identical to SEQ ID NO: 33652

SEQ ID NO: 42571 - DNA, 341 bp, Homo sapiens
gcgaattggtgctccaccgcggtggcggccgcccgggcaggtactcttgtgagagaagttacatgttcattgttaaggaaattatatgtaaatcacaaagatcatggtctgtgaataatgtgccatatctcacaaaatatggtcattggaatcttattaaaattatctacaggtgacttcagtttccattctccaccctctgccttaagatacgaagccttgacatgaccacatcccagtcagcataagctccttctagatggcgggatatctcagttcctgcttcatagctacgtcggccatgaagtaagcgccagttatcaaaagtaatcacatcacct

SEQ ID NO: 42572 - DNA, 315 bp, Homo sapiens; identical to SEQ ID NO: 33654

SEQ ID NO: 42573 - DNA, 658 bp, Homo sapiens
  misc_feature 575: n = A,T,C or G
gggccctgtcagatgcatgctcgagcggccgccagtgtgatggatatctgcagaattcggcttagcgtggtcgcgggcgaggtactccctaatgaatggttatgcaggcaggagaacttctcaggaagagaaaaggagaagactaactctacagagatttttgaaagactccgtgggatctcagcaatttgttaacactgctagggcccttcactgcatagggaggcatatggactgccatgggtctccaggctcatgttccaagcaagaatagggtaagtaactgtgaattaccctacaagcagtaataagtttattataataatatttttatacatttttggatgcacccaacccactctaaagaatgtcagtgactttatacaaaagaggaagcatctagattggcattgtgaacataatgcatatgggcgcggcgggagctctagagcctagtggttaaaaccgtggcctctggaatatgactacctggacttgaatgctcactctgccatttattaactgcatgacctttgaaaaataacttttctatccttcggtccctcatgtgtaanatgaggataataactacttatctcacggcgttgttctaagtattaaatgggataatacaggtaaagtacctgcccgggcggcc

SEQ ID NO: 42574 - DNA, 208 bp, Homo sapiens
actacttagggcgaattggagctccaccgcggtggcggccgcccgggcaggtactcttgtgagagaagttacatgttcattgttaaggaaattatatgtaaatcacaaagatcatggtctgtgaataatgtgccatatctcacaaaatatggtcattggaatcttattaaaattatctacaggtgacttcagtttccattctccaccc

SEQ ID NO: 42575 - DNA, 367 bp, Homo sapiens; identical to SEQ ID NO: 36950
  misc_feature 340, 341: n = A,T,C or G

SEQ ID NO: 42576 - DNA, 336 bp, Homo sapiens; identical to SEQ ID NO: 33658

SEQ ID NO: 42577 - DNA, 483 bp, Homo sapiens; identical to SEQ ID NO: 33660

SEQ ID NO: 42578 - DNA, 427 bp, Homo sapiens; identical to SEQ ID NO: 33662

SEQ ID NO: 42579 - DNA, 505 bp, Homo sapiens; identical to SEQ ID NO: 33663

SEQ ID NO: 42580 - DNA, 503 bp, Homo sapiens; identical to SEQ ID NO: 33664

SEQ ID NO: 42581 - DNA, 210 bp, Homo sapiens; identical to SEQ ID NO: 33665

SEQ ID NO: 42582 - DNA, 174 bp, Homo sapiens; identical to SEQ ID NO: 33666

SEQ ID NO: 42583 - DNA, 484 bp, Homo sapiens; identical to SEQ ID NO: 33667

SEQ ID NO: 42584 - DNA, 498 bp, Homo sapiens; identical to SEQ ID NO: 33668

SEQ ID NO: 42585 - DNA, 146 bp, Homo sapiens; identical to SEQ ID NO: 33670

SEQ ID NO: 42586 - DNA, 484 bp, Homo sapiens; identical to SEQ ID NO: 33671

SEQ ID NO: 42587 - DNA, 474 bp, Homo sapiens
tacgactcactatagggcgaattggagctccaccgcggtggcggccgaggtaccagacccgacaggaccagtgcatctataacaccacctacctgaatgtccagcgggaaaatgggaccatctccagatacgtgggaggccaagagcatttcgctcacttgctgatcctcagggacaccaagacctacatgcttgcttttgacgtgaacgatgagaagaactgggggctgtctgtctatgctgacaagccagagacgaccaaggagcaactgggagagttctacgaagctctcgactgcttgcgcattcccaagtcagatgtcgtgtacctgcccgggcggccgctctagaactagtggatcccccgggctgcaggaattcgatatcaagcttatcgataccgtcgacctcgagggggggcccggtacccagcttttgttccctttagtgagggttaattgcgcgcttggcgta

SEQ ID NO: 42588 - DNA, 465 bp, Homo sapiens; identical to SEQ ID NO: 33673

SEQ ID NO: 42589 - DNA, 577 bp, Homo sapiens; identical to SEQ ID NO: 35087

SEQ ID NO: 42590 - DNA, 606 bp, Homo sapiens; identical to SEQ ID NO: 33676
  misc_feature 60: n = A,T,C or G

SEQ ID NO: 42591 - DNA, 554 bp, Homo sapiens; identical to SEQ ID NO: 33677

SEQ ID NO: 42592 - DNA, 699 bp, Homo sapiens; identical to SEQ ID NO: 33678

SEQ ID NO: 42593 - DNA, 359 bp, Homo sapiens; identical to SEQ ID NO: 33679

SEQ ID NO: 42594 - DNA, 365 bp, Homo sapiens; identical to SEQ ID NO: 33682

SEQ ID NO: 42595 - DNA, 399 bp, Homo sapiens; identical to SEQ ID NO: 33569
  misc_feature 260: n = A,T,C or G

SEQ ID NO: 42596 - DNA, 388 bp, Homo sapiens; identical to SEQ ID NO: 33687

SEQ ID NO: 42597 - DNA, 615 bp, Homo sapiens; identical to SEQ ID NO: 33688
  misc_feature 171, 468: n = A,T,C or G

SEQ ID NO: 42598 - DNA, 394 bp, Homo sapiens; identical to SEQ ID NO: 33689

SEQ ID NO: 42599 - DNA, 369 bp, Homo sapiens; identical to SEQ ID NO: 33691

SEQ ID NO: 42600 - DNA, 406 bp, Homo sapiens; identical to SEQ ID NO: 33692

SEQ ID NO: 42601 - DNA, 413 bp, Homo sapiens; identical to SEQ ID NO: 33693
  misc_feature 374: n = A,T,C or G

SEQ ID NO: 42602 - DNA, 390 bp, Homo sapiens; identical to SEQ ID NO: 33694

SEQ ID NO: 42603 - DNA, 357 bp, Homo sapiens; identical to SEQ ID NO: 33695

SEQ ID NO: 42604 - DNA, 401 bp, Homo sapiens; identical to SEQ ID NO: 33696

SEQ ID NO: 42605 - DNA, 387 bp, Homo sapiens; identical to SEQ ID NO: 42514

SEQ ID NO: 42606 - DNA, 394 bp, Homo sapiens; identical to SEQ ID NO: 33698

SEQ ID NO: 42607 - DNA, 398 bp, Homo sapiens; identical to SEQ ID NO: 33699

SEQ ID NO: 42608 - DNA, 398 bp, Homo sapiens; identical to SEQ ID NO: 33699

SEQ ID NO: 42609 - DNA, 392 bp, Homo sapiens; identical to SEQ ID NO: 33702

SEQ ID NO: 42610 - DNA, 307 bp, Homo sapiens
tagggcgaattggagctccaccgcggtggcggccgtggcgggggtcacaggcagccatcatgttcttggcatcgaagacctgctgggtgagttccggcactgtgagagctcgatactgctggcttccacggctggtgagaggggcaaagccaggcataaagaaatggagacgtgggaaggggaccatgttgactgccaacttgcggaggtcagcattgagctggccagggaaacggaggcaggtggtgacaccactcatggtggctgagacaaggtggttcagatccccgtaggttggtgtggtcag

SEQ ID NO: 42611 - DNA, 443 bp, Homo sapiens
cactactatagggcgaattggagctccaccgcggtggcggccgaggtaccccgccatggaaccaaacaccacgtcaactggaactcttcttgcaaacgaaggctgaagatcaagaatgacattctcacaccacagcacagcttaaatacttctttgacaaaaataataataaattatatttgactcagaaaataaattctgttcagcagagtgacaggagggtccattcattgcattgcacgaggggctctacggaggggtgaggatgggtgcaggatgccacagtgacaagggacatggggtgcgggcccagcagcacaggttgaagttagctgacgcatgcttttggcttttatcccacgggcgggtagtggccggacccctggctgtggcctgtcccaagtgagactgcaactgtccccttcctcctcaagtccgtcttg

SEQ ID NO: 42612 - DNA, 414 bp, Homo sapiens
gcgaattggagctccaccgcggtggcggccgagctggtttcctgcccagcctggggcaaacctagccggaaggccgaggtcccattgttggcgctgaggtgtctggcctgaggtcaatggtgcaaaggagccgccaccgggcatgtctgcctggagtgctgtgctgtgtttaatcaggggatccatgcccctgggattcttttttctttcttgctttcttccttggccaagagaagggcttacaggcatggacatgcaggttggcaaacgggcttgactttggctgatttaaaaagtgagaaagaaagtaaaaaaggttaatttttccttcctctgtaagatatcccagcttaaaaaaaaaaaaaaaaaaaataagggtccttggccgttttagaactagtggatcccccgggc

SEQ ID NO: 42613 - DNA, 320 bp, Homo sapiens
tccaccgcggtggcggccgcctccaggaacgccgaccactccactttaggtatcatacgcgccacgaagttggggttgaattccacagggcagatacggacctcggtggcctggaggcgcagggggaagccacgggaccccaccccccgcacatgcgagctcagcagattgtgggtaagcagtttcatgtcgccgcacaaactctcgccaggccggaaccggaaaaaggtcgtcctccgctccccgcgtacctcggccgctctagaactagtggatcccccgggctgcaggaattcgatatcaagcttatcgataccgtc

SEQ ID NO: 42614 - DNA, 414 bp, Homo sapiens; identical to SEQ ID NO: 42612

SEQ ID NO: 42615 - DNA, 322 bp, Homo sapiens; identical to SEQ ID NO: 31821

SEQ ID NO: 42616 - DNA, 444 bp, Homo sapiens; identical to SEQ ID NO: 36874

SEQ ID NO: 42617 - DNA, 533 bp, Homo sapiens
  misc_feature 520: n = A,T,C or G
ccgggccccccctcggaagtcttctagaattaattaacgcggggtccccccgaccaattggcaaccactgaccagtttttccacagtctgaattttgctgactttatgacctcatggtatcacttagcatgcttctctgttccgtttgtgtcttgtaaattgatagagttaatttgctttttttgttttaagaatgctttggctggacgtggtggctcatgcctgtaatcccagcactttggaaggccgaggcgggcggatcacctgaggtcaggagttcgaaaccagcctggccaacatggcaaaaccccgtctctactaaaaatacaaaaattagctgggcgtggtggtgggcgcctataatcccagctactcgggtggctgaggcaggagaatcgcttgaacccaggaggtggaggttgcagtgagccgagatagcattacggcactccaccctgggcaacagagcaagactccatctcaacaaaaaaaagaaaagaaaagaaaaactgcagcatanaagtgatgtgaac

SEQ ID NO: 42618 - DNA, 166 bp, Homo sapiens; identical to SEQ ID NO: 33714

SEQ ID NO: 42619 - DNA, 409 bp, Homo sapiens
ccgcgtcaagatcctactgagcgaggctcgttaccaccacgcgacggaaatcggcgcgacatcagagaagctggctacgtgccctggacttgagcaggagatggccaccgcgatctcctttttggagaagagctcagctgcccgatggccggcatcacattgcaatgagcggttccggtgtccggaggcgctgttccagccttccttcctgggtatggaatcttgcggcatccacgagaccaccttcaactccatcatgaagtgtgacgtggacatccgcaaagacctgtacgccaacacggtgctgtcgggcggcaccaccatgtatccgggcattgctgacaggatgcagaaggagatcaccgccctggcgcccagcaccatggaagatcaagatcatcgcaccccc

SEQ ID NO: 42620 - DNA, 527 bp, Homo sapiens
gtatactactcactatagggcgaattggagctccaccgcggtggcggccgacgtacgcgggatgatatataaaccttaaatgaaaaaaatgatctattgcagatatttgatgtagttttcttttttaaattaatcagaaaccccacttccattgtattgtctgacacatgctctcaatatatacataaatgggaaatgtcgattttcaataatagacttatatgcaggctgtcgttccggttatgttgtgtaagtcaactcttcagcctcattcactgtcctggcttttatttaaagaaaaaaaaggcagtattccctttttaaatgagctttcaggaagttgctgagaaatggggtggaatagggaactgtaatggccactgaagcacgtgagagaccctcgcaaaatgatgtgaaaggaccagtttcttgaagtccagtgtttccacggctggatacctgtgtgtctccataaaagtcctgtcaccaaagacgttaaaggcattttattccagcctcttctagag

SEQ ID NO: 42621 - DNA, 465 bp, Homo sapiens; identical to SEQ ID NO: 33717

SEQ ID NO: 42622 - DNA, 461 bp, Homo sapiens; identical to SEQ ID NO: 33718

SEQ ID NO: 42623 - DNA, 428 bp, Homo sapiens
actactatagggcgaattggagctccaccgcggtggcggccgaggtactgtgctgagaaatgggccccttgccagatgctcccctctccttcctctctgcgaggcagaagtcagaaggtagagattgctggcaaaactgtgaagtcccaccctggggtctcaaccccaactccactgagggcaacctccctgacgtgtgtgactaggcagtaagggtggcggttgatggcggccgctctagaactagtggatcccccgggctgcaggaattcgatatcaagcttatcgataccgtcgacctcgagggggggcccggtacccagcttttgttccctttagtgagggttaattgcgcgcttggcgtaatcatggtcatagctgtttcctgtgtgaaattgttatccgctcacaattccacacaacatacg

SEQ ID NO: 42624 - DNA, 618 bp, Homo sapiens
  misc_feature 598: n = A,T,C or G
cgagctcggatccactagtaacggccgccagtgtgctggaatttcgagcggccgcccgggcaggtacagcttctgtggagtagaaggacttccctttctcgttgcaccacaagcaaatcttgccaacaccaactttctctcccaagtatttaatcagtcccttaatatctgaaagatattctatatcaggaataaagaaactgtggtctttggtcatgtgaagccacattcttcatcagcgagctggaatgatgggaacaaaataagcagtccgtgatagggatggcaccaaggggtgggccttcctcagcctcttcctcctctgcatcctgctccaccacatcgtccattgcttcagtatcctcacattccaattcttcatcagaatcaatatcttcccaatcgtctccatccaggtcctcttcctcctcctcgctgtcctcctcctgctgctttgccaacttcttcgcctgctgttcaaaccactggagccggtgtggtttctcactcgggtctcggtcgtgggtcccacggccaccagtacctcggccgcgaccacgctaagccgaattctgcagatatccatcacactggcggncgctcgagcatgcatctaga

SEQ ID NO: 42625 - DNA, 463 bp, Homo sapiens
tacgactactatagggcgaattggagctccaccgcggtggcggccgcccgggcaggtaccatgatacccctggaccccgagaggccctgagccaactccgggtgctctgctgtgagtggctgaggcccgagatccacaccaaggagcagatcctggagctactggtgctggagcagttcctgaccatcctgccccaggagctccaggcctgggtgcaggagcattgcccggagagcgctgaagaggctgtcactctcctcgaagatctggagcgggaactggatgagccaggacaccaggtctcaactcctccaaacgaacagaaaccggtgtgggagaagatatcctcctcaggaactgcaaaggaatccccgagcagcatgcagccacagcccttggagaccagtcacaaatacgagtcttgggggcccctgtacctcggccgctctagaactagtggatc

SEQ ID NO: 42626 - DNA, 604 bp, Homo sapiens
  misc_feature 17: n = A,T,C or G
cgaattgggccctctanatgctgctcgagcggccgccagtgtgatggatatctgcagaattcggcttagcgtggtcgcggccgaggtgacagttttaaaatctcttctaacaaagaaactgcacggtagcaaggactagcggttctcaaagcccttctttttcagtgttctcattcaccttggcacccaagtatgtttaacaggccatgcattaaaaataaatacaaaaatataaaagccgcttaaagggaacttacaaactgacaatctctcctctgtatttgtgttcatagtggctgggagtttaattatatgcacaaaagttaggagccacttgtttctgcacagactgtaggagcaagatgaggagatgggcaggttttggtaagagcccccagttctggtggacaggcatacttgtggcattgggtgcggcattgctgggaggaccacgtcttgggaggcgattgacttttggtttgtaatttccctttaaacaagaagagatggctcacattttccatatatatctcaatgaatgtacctgcccgggcggccgctcgaaagccgaattccagcacactggcggccgttactagtggat

SEQ ID NO: 42627 - DNA, 467 bp, Homo sapiens; identical to SEQ ID NO: 33726

SEQ ID NO: 42628 - DNA, 155 bp, Homo sapiens
gccgggcatttctccagggatctttgtgcttccttttgtgcttcctgtgtgtgtggatatttaaaggggctggaaatgtgcagaaacatgtcactacttagacattatattgtcatcttgctgtttctagtgatgttaattatcttcatttcaac

SEQ ID NO: 42629 - DNA, 703 bp, Homo sapiens
  misc_feature 505: n = A,T,C or G
cgacccacgcgtccgaacttatacatggcctaaaatgtttctacaaattagagtttgtcacttattccatttgtacctaagagaaaaataggctcagttagaaaaggactccctggccaggcgcagtgacttacgcctgtaatctcagcactttgggaggccaaggcaggcagatcacgaggtcaggagttcgagaccatcctggccaacatggtgaaaccccgtctctactaaaaatataaaaattagctgggtgtggtggcaggagcctgtaatcccagctacacaggaggctgaggcacgagaatcacttgaactcaggagatggaggtttcagtgagccaagatcacaccactgcactccagcctggcaacagagcgagactccatctcaaaaaaaaaaaaaaagtaagaaagaaaaggactcccttagaatgggaaagaaaaatcataaaatattgagctgatgcctgtatatagaaattaagcgtttctcgaaagctgntctatgttttgctgttattttagtctttattctcttcctttaggtggagaaacaaagtaccaatttgaagggattttttttattttgtcttttggtttctgtcagtagaaataaccatatgtgctaaccaaatttctgtgaagaatgttttcatggttatcattatatctaactataacctcccccataagtatgaag

SEQ ID NO: 42630 - DNA, 313 bp, Homo sapiens
tccaccgcggtggcggccgaggtacataggtttatctcctattggaatattttctttatataggcgttttttttttctttttttttggaaacagagtcttgctctgttgcccaggctggagtgcagtggcccaaccggagctcactgcaacctccacttcccgggttcaagtgattgtcccacctcaccctcctgaatagctgggattacaggtgcatgctaccatgcctgtctctactaaaaatacaaaaattgtttacctctgtttttcataatagaaatagaaaaggtaaaattgcttttcttctgaaaa

SEQ ID NO: 42631 - DNA, 482 bp, Homo sapiens
actatagggcgaattggagctccaccgcggtggcggccgcacacacagccaggcgctaggctccctgcgggacctcgggaagggggaagagcgtcaacaatttacggagggtccagccgctgggtcagattgagacaaaccattgtgtggttgggtttgggtcagcaggctggagagggttctgttctttttgatcattatcggttgggggccccaagggagggtcttgggagccacctgagccccaaagctgggaaattcctcagagctgctcatgtcaggagccttctcactgctgctggcggtccagggtgcgtcccgcaccacaaagcctctggaaggtgccttggcctcttcgtgtgctgggggtttcatgtatacctgcagcgcctcactgtccaccacgtcagctaggtattcctcctccaggttgaggatgtggtcgatggcttcctccacattctctgggagccccgtcacag

SEQ ID NO: 42632 - DNA, 383 bp, Homo sapiens
ggcgaattggagctccaccgcggtggcggccggttctgggcgtgagggctcggatgtcaccgggtggccctccttcagccagttccggaagccaccattgagcactgatacggtgcggtggccaaacacacggaacatccaccagacccggggagcatagaagctgcccaggtgttcacccccgcgtacctcggccgctctagaactagtggatcccccgggctgcaggaattcgatatcaagcttatcgataccgtcgacctcgagggggggcccggtacccagcttttgttccctttagtgagggttaattgcgcgcttggcgtaatcatggtcatagctgtttcctgtgtgaaattgttatccgctcacaattccacaca

SEQ ID NO: 42633 - DNA, 107 bp, Homo sapiens; identical to SEQ ID NO: 33734

SEQ ID NO: 42634 - DNA, 416 bp, Homo sapiens
cgactactatagggcgaattggagctccaccgcggtggcggccgaggtacccctccaagccggacaacccgggcgaggacgcaccagcggaggacatggccagatactactcagcgctgcgacactacatcaacctcatcaccaggcaaagatatggaaaacgatctagcccagagacactgatttcagacctcttgatgagagaaagcacagaaaatgttcccaggactcggcttgaagaccctgcaatgtggtgatgggaaatgagacttgctctctggccttttcctattttcagcccatatttcatcgtgtaaaacgagaatccacccatcctaccaatgcatgcagccactgtgctgaattctgcaatgttttcctttggcatcattgtatatatgtgtgtttaaataaag

SEQ ID NO: 42635 - DNA, 500 bp, Homo sapiens
tacactactatagggcgaattggagctccaccgcggtggcggccgaggtacctgcaggcctcctacacctacctctctctgggcttctatttcgaccgcgatgatgtggctctggaaggcgtgagccacttcttccgcgaactggccgaggagaagcgcgagggctacgagcgtctcctgaagatgcaaaacccacgtggcggccgctctagaactagtggatcccccgggctgcaggaattcgatatcaagcttatcgataccgtcgacctcgagggggggcccggtacccagcttttgttccctttagtgagggttaattgcgcgcttggcgtaatcatggtcatagctgtttcctgtgtgaaattgttatccgctcacaattccacacaacatacgagccgggagcataaagtgtaaagcctggggtgcctaatgagtgagctaactcacattaattgcgttgcgctcactgcccgctttccagtcgggaaacctgg

SEQ ID NO: 42636 - DNA, 474 bp, Homo sapiens; identical to SEQ ID NO: 33737

SEQ ID NO: 42637 - DNA, 640 bp, Homo sapiens
tactatagggcgaattggagctccaccgcggtggcggccgttcctctaagtctccgccacgcaggaaacaaaagcgatagaaggtccgttcctgtcctccggtgctttgatgagttcaggctgaagccgatgggggaggaggagaagctgcaagttaacagctgaagaataagttcatgaaaaaattgccacgtgatgcagaagcttccaacgtgcttgttggggaggttgactttttggatactcctttcattgcctttgttaggctacagcaggctgtcatgctgggtgccctgactgaagttcctgtgcccacaaggttcttgttcattctcttaggtcctaaggggaaagccaagtcctaccacgagattggcagagccattgccaccctgatgtctgatgaggtgttccatgacattgcttataaagcaaaagacaggcacgacctgattgctggtattgatgagttcctagatgaagtcatcgtccttccacctggggaatgggatccagcaattaggatagagcctcctaagagtcttccatcctctgacaaaagaaagaatatgtacctcggccgctctagaactagtggatcccccgggctgcaggaattcgatatcaagcttattgatac

SEQ ID NO: 42638 - DNA, 369 bp, Homo sapiens
cgtcatggatatctgcataattcgccctttcgagcggccgcccgggcaggtacaccaaggtggtgcattaccggaagtggatcaaggacaccatcgtggccaacccctgagcacccctatcaaccccctattgtagtaaacttggaaccttggaaatgaccaggccaagactcaagcctccccagttctactgacctttgtccttaggtgtgaggtccagggttgctaggaaaagaaatcagcagacacaggtgtagaccagagtgtttcttaaatggtgtaattttgtcctctctgtgtcctggggaatactggccatgcctggagacatatcactcaatttctctgaggacacagataggatggggt

SEQ ID NO: 42639 - DNA, 185 bp, Homo sapiens; identical to SEQ ID NO: 33740

SEQ ID NO: 42640 - DNA, 466 bp, Homo sapiens; identical to SEQ ID NO: 33741

SEQ ID NO: 42641 - DNA, 487 bp, Homo sapiens
  misc_feature 444: n = A,T,C or G
gcggggcttctcgcctaacgccgccaacatggtgttcaggcgcttcgtggaggttggccgggtggcctatgtctcctttggacctcatgccggaaaattggtcgcgattgtagatgttattgatcagaacagggctttggtcgatggaccttgcactcaagtgaggagacaggccatgcctttcaagtgcatgcagctcactgatttcatcctcaagtttccgcacagtgcccaccagaagtatgtccgacaagcctggcagaaggcagacatcaatacaaaatgggcagccacacgatgggccaagaagattgaagccagagaaaggaaagccaagatgacagattttgatcgttttaaagttatgaaggcaaagaaaatgaggaacagaataatcaagaatgaagttaagaagcttcaaaaggcagctctcctgaaagcttnctcccaaaaagcacctggtactaaaggtactgctgctgctgct

SEQ ID NO: 42642 - DNA, 170 bp, Homo sapiens; identical to SEQ ID NO: 33743

SEQ ID NO: 42643 - DNA, 289 bp, Homo sapiens; identical to SEQ ID NO: 35109

SEQ ID NO: 42644 - DNA, 536 bp, Homo sapiens
gtacccagctcggatccactagtaacggccgccagtgtgctggaattcggcttcgagcggccgcccgggcaggtaccaaaccaaagccgtcatcattgcaatgatcatcactgcggtggtatccatttcagtcaccatcttctgctttcagaccaaggtggacttcacctcgtgcacaggcctcttctgtgtcctgggaattgtgctcctggtgactgggattgtcactagcattgtgctctacttccaatacgtttactggctccacatgctctatgctgctctgggggccatttgtttcaccctgttcctggcttacgacacacagctggtcctggggaaccggaagcacaccatcagccccgaggactacatcactggcgccctgcagatttacacagacatcatctacatcttcacctttgtgctgcagctgatgggggatcgcaattaaggagcaagcccccattttcacccgatcctgggctctcccttcaagctagaggggctggccctatgactgtggtctgggcttt

SEQ ID NO: 42645 - DNA, 504 bp, Homo sapiens; identical to SEQ ID NO: 33746

SEQ ID NO: 42646 - DNA, 363 bp, Homo sapiens; identical to SEQ ID NO: 33747

SEQ ID NO: 42647 - DNA, 442 bp, Homo sapiens
gggcgaattgcagctccaccgcggtggcggccgaggtacgttcctggcaatggcttcagcctcatcggggctccacacggacagcccctgcctccgggtgaaacgtcggtctcgccgcagccaggtgggcttccagcaagtcggtgtggatacctatggtggtgggatctggagcacctgatttgacccgaaactgactctggctggacgcgtcattgtcaagtgccttacctcacgtcggttggagcagcatctggtgcacgtggagcggcccattcttcgcatcccacacctggccatccatctgcagcgaaatatcaactaaaactttgggcccaacacagagatgcatctagtccccattcttgccacagccatccaggaggagctggagaaggggactcctgagccagggcctctcaatgctgtggatgagcggcac

SEQ ID NO: 42648 - DNA, 471 bp, Homo sapiens; identical to SEQ ID NO: 33750

SEQ ID NO: 42649 - DNA, 392 bp, Homo sapiens; identical to SEQ ID NO: 33683

SEQ ID NO: 42650 - DNA, 181 bp, Homo sapiens; identical to SEQ ID NO: 33752

SEQ ID NO: 42651 - DNA, 460 bp, Homo sapiens; identical to SEQ ID NO: 35744

SEQ ID NO: 42652 - DNA, 486 bp, Homo sapiens; identical to SEQ ID NO: 33754

SEQ ID NO: 42653 - DNA, 475 bp, Homo sapiens; identical to SEQ ID NO: 42413

SEQ ID NO: 42654 - DNA, 481 bp, Homo sapiens; identical to SEQ ID NO: 33756

SEQ ID NO: 42655 - DNA, 366 bp, Homo sapiens; identical to SEQ ID NO: 33757

SEQ ID NO: 42656 - DNA, 399 bp, Homo sapiens; identical to SEQ ID NO: 33758

SEQ ID NO: 42657 - DNA, 360 bp, Homo sapiens; identical to SEQ ID NO: 33759

SEQ ID NO: 42658 - DNA, 385 bp, Homo sapiens; identical to SEQ ID NO: 33760

SEQ ID NO: 42659 - DNA, 386 bp, Homo sapiens; identical to SEQ ID NO: 33762

SEQ ID NO: 42660 - DNA, 393 bp, Homo sapiens
tccaccgcggtggcggccgcttttttttattttttttttttttttttaaagacggggggtgggtgtgtcacccaaactaaaattcttttttctctatctcggctcactgcaagctttgcctcccggtttcacgccattcttctgcctcagcctcccgagtagctgggactacaggtgcccgccaccatgcccggctgatttctttttgtatttttagtaaaaaccgattttcaccgtgttatccaagatggtcttaatctcctgacctcgtgatccgcccgccttaattaattctagaagttactctcgagggggggcccggtacccaacttttgttcccttttaatgagggttaattgcgcgcttggcgttaatcatggtcatagctgtttc

SEQ ID NO: 42661 - DNA, 559 bp, Homo sapiens
aataaggggaacacatgctgggtgccgggccccccctcgagagtacttctagaattaattgaggcgggaggtgcccggcaaccctaggagcccggcgcggggcacgatgggacgcccccgggaagaggcggagctgggttcgagcgctggggctgcggttgggaaactactggaggatgtggtgcaccagaataagagaataaaccaagaaacaggaagacgtgatccaggcaacaggatattccagtatagaatttaattctggagtgtgagcaggaaccagttaactacattcattgtccaacccccactggtttgaaagaagactccaaattcttggcatatgaatcagctgttcggtagctccaccttatccctgcggcgaagcagcagaaccgccaatggcggcacctctggattcacactgtgggtggtgaggccttccgctgaaggaggtactggtggatgctctcaccatctcgctttacccaggcagcattcagcagaatattttcacaacactgctggatggtacgctcagctgaaggagctgggtgac

SEQ ID NO: 42662 - DNA, 407 bp, Homo sapiens; identical to SEQ ID NO: 33769

SEQ ID NO: 42663 - DNA, 508 bp, Homo sapiens; identical to SEQ ID NO: 33825

SEQ ID NO: 42664 - DNA, 177 bp, Homo sapiens; identical to SEQ ID NO: 33766

SEQ ID NO: 42665 - DNA, 246 bp, Homo sapiens; identical to SEQ ID NO: 33767

SEQ ID NO: 42666 - DNA, 198 bp, Homo sapiens; identical to SEQ ID NO: 33768

SEQ ID NO: 42667 - DNA, 407 bp, Homo sapiens; identical to SEQ ID NO: 33769

SEQ ID NO: 42668 - DNA, 440 bp, Homo sapiens
ctactatagggcgaattggagctccaccgcggtggcggccgtcgccatggtgaagctgagcaaagaggccaagcagagactacagcagctcttcaaggggagccagtttgccattcgctggggctttatccctcttgtgatttacctgggatttaagaggggtgcagatcccggaatgcctgaaccaactgttttgagcctactttggggaattaaaggaatatttggtcttctggatttggaggcaatcagcggacagcatggaagatgtgtgctctggctcggataagagatgggacatcattcagtcactagttggatggcacaaggctcttcacagacgcatctgtagcagagtggaacttgtacctcggccgctctagaactagtggatcccccgggctgcaggaattcgatatcaagcttatcgataccgtcga

SEQ ID NO: 42669 - DNA, 409 bp, Homo sapiens; identical to SEQ ID NO: 33771

SEQ ID NO: 42670 - DNA, 409 bp, Homo sapiens; identical to SEQ ID NO: 34236

SEQ ID NO: 42671 - DNA, 397 bp, Homo sapiens; identical to SEQ ID NO: 32134

SEQ ID NO: 42672 - DNA, 400 bp, Homo sapiens; identical to SEQ ID NO: 33774

SEQ ID NO: 42673 - DNA, 425 bp, Homo sapiens; identical to SEQ ID NO: 33775

SEQ ID NO: 42674 - DNA, 484 bp, Homo sapiens
tatacgactactatagggcgaattggagctccaccgcggtggcggccgcccgggcaggtacgcggggaagaaatagcaagtgccgagaagctggcatcagaaaaacagaggggagatttgtgtggctgcagccgagggagaccaggaagatctgcatggtgggaaggacctgatgatacagaggtgagaaataagaaaggctgctgactttaccatctgaggccacacatctgctgaaatggagataattaacatcactagaaacagcaagatgacaatataatgtctaagtagtgacatgtttttgcacatttccagcccctttaaatatccacacacacaggaagcacaaaaggaagcacagagatccctgggagaaatgcccggccgctctagaactagtggatcccccgggctgcaggaattcgatatcaagcttatcgataccgtcgacctcgagggggggcccggtacccagcttttg

SEQ ID NO: 42675 - DNA, 357 bp, Homo sapiens; identical to SEQ ID NO: 33777

SEQ ID NO: 42676 - DNA, 398 bp, Homo sapiens
catgctcgagcggccgccagtgtgatggatatctgcagaattcgcccttagcgtggtcgcggccgaggtactgccagattcgtctaaatgtctgtcatgtccagatttactttgcttctgttactgccagagttactagagatatcataataggataagaaggccctcatatgacctgcacagctcattttccttctgaaagaaactactacctaggagaatctaagctatagcagggatgatttatgcaaatttgaactagcttctttgttcacaattcagttcctcccaaccaaccagtcttcacttcaagagggccacactgcaacctcagcttaacatgaataacaaagactggctcaggagcagggcttgcccaagcatggttggatcaccgg

SEQ ID NO: 42677 - DNA, 396 bp, Homo sapiens
gtatacgactactatagggcgaattggagctccaccgcggtggcggccgcccgggcaggtacgcggggagaaaaacagaggggagatttgtgtggctgcagccgagggagaccaggaagatctgcatggtgggaaggacctgatgatacagaggtgagaaataagaaaggctgctgactttaccatctgaggccacacatctgctgaaatggagataattaacatcactagaaacagcaagatgacaatataatgtctaagtagtgacatgtttttgcacatttccagcccctttaaatatccacacacacaggaggcacaaaaggaagcacagagatccctgggagaaatgcccggccgccatcttgggtcatcgatgagcctcgccctgtgcct

SEQ ID NO: 42678 - DNA, 123 bp, Homo sapiens; identical to SEQ ID NO: 33780

SEQ ID NO: 42679 - DNA, 416 bp, Homo sapiens
gcgaattggagctccaccgcggtggcggccgaggtacttttttttttttttttttttttgcagtataacagctctttatttctgtgagttctactaggaaatcatcaaatctgagggttgtctggaggacttcaatacacctccccccatagtgaatcagcttccagggggtccagtccctcttcttacttcatccccatcccatgccaaaggaagaccctccctccttggctcacagccttctctaggcttcccagtgcctccaggacagagtgggttatgttttcagctccatccttgctgagagtgtctggtgcgttgtgtctccagcttctgctcagtgcttcatggacagtgtccagcacatgtcactctccactctctcagtgtggatcccacccctctttcatctctgt

SEQ ID NO: 42680 - DNA, 406 bp, Homo sapiens
actactatagggcgaattggagctccaccgcggtggcggccgccagctctttgatgtgttcccaggcccgctgcacatgggcagattccaccgtgcgagaacagatggcaaagcgcaggacaaacttgtccctgaggtgacatggaaccaagtggatttttttggcactgtttattctttgcagaagagcttcattcactttgttggaaccctttagccgaaagcagacaagccccagaatgacttccacacagatttcaaagcggggatcctggcgcaccagtgactcaaaccccgcgtacctcggccgctctagaactagtggatcccccgggctgcaggaattcgatatcaagcttatcgataccgtcgacctcgagggggggcccggtacccagcttttgtt

SEQ ID NO: 42681 - DNA, 510 bp, Homo sapiens
cgcgcgtaatacgactcactatagggcgaattggagctccaccgcggtggcggccgaggtaccagattcagcccatttggccccgacgcctctgttctcggaatccgggtgctgcggattgaggtcccggttcctaacggactgcaagatggagggaggcgggaacctaggaggcctgattaagatggtccatctactggtcttgtcaggtgcctggggcatgcaaatgtgggtgaccttcgtctcaggcttcctgcttttccgaagccttccccgacataccttcggactagtgcagagcaaactcttccccttctacttccacatctccatgggctgtgccttcatcaacctctgcatcttggcttcacagcatgcttgggctcagctcacattctgggaggccagccaactttacctgctgttcctgagccttacgctggccactgtcaacgcccactggctggaaccccgcaccacagctgccatgtgggccctgcaaaccgtgga

SEQ ID NO: 42682 - DNA, 407 bp, Homo sapiens; identical to SEQ ID NO: 33769

SEQ ID NO: 42683 - DNA, 419 bp, Homo sapiens; identical to SEQ ID NO: 33785

SEQ ID NO: 42684 - DNA, 199 bp, Homo sapiens; identical to SEQ ID NO: 33786

SEQ ID NO: 42685 - DNA, 175 bp, Homo sapiens; identical to SEQ ID NO: 33787

SEQ ID NO: 42686 - DNA, 282 bp, Homo sapiens
cgactcactatagggcgaattggagctccaccgcggtggcggccgaggtacagatctgggaactaaatattaaaaatgagtgtggctggatatatggagaatgttgggcccagaaggaaccgtagagatcagatattacaacagctttgttttgagggttagaaatatgaaatgatttgggttatgaaacgcacagttttagtgcagcaagggcccagaaatcctgcacccttcttgacccagtggattatgctccatccccagacttgcgctgcactcatg

SEQ ID NO: 42687 - DNA, 350 bp, Homo sapiens
  misc_feature 209: n = A,T,C or G
tacactactatagggcgaattggagctccaccgcggtggcggccgaggtacattagaatcaaccttttcaaaaatatgcaatttctgtccttgaagcctagggagtgggatgcagccacattaagactcatgattaagcaccttattgtgttaatcatgatataaagagccttgtataacacaaaagccgagatcgcgccactgcactntagcctgggtgacagagtgggattctgtccgctcccgccaaaaaaaaaggagaaggtctaccctgcaagaggtggagagagctagtggcttggatctttggggtgcacatgggaattgtgggcccacagtgtctggtgaaa

SEQ ID NO: 42688 - DNA, 363 bp, Homo sapiens
cactactatagggcgaattggagctccaccgcggtggcggccggggcagaagttgagaccacccagcagaggagctaggccagtccatctgcatttgtcacccaagaactcttaccatgaagaccctcctactgttggcagtgatcatgatctttggcctactgcaggcccatgggaatttggtgaatttccacagaatgatcaagttgacgacaggaaaggaagccgcactcagttatggcttctatggctgccactgtggcgtgggtggcagaggatcccccaaggatgcaacggatcgctgctgtgtcactcatgactgttgctacaaacgtctggagaaacgtggatgtggcaccaaat

SEQ ID NO: 42689 - DNA, 196 bp, Homo sapiens; identical to SEQ ID NO: 33791

SEQ ID NO: 42690 - DNA, 404 bp, Homo sapiens; identical to SEQ ID NO: 33792

SEQ ID NO: 42691 - DNA, 183 bp, Homo sapiens; identical to SEQ ID NO: 33793

SEQ ID NO: 42692 - DNA, 417 bp, Homo sapiens
actcacttcggtagggcgaattggagctccaccgcggtggcggccgaggtactccttagggcgcttcaggagctcaggggcctcctgggattcctcatcttggtttttccgtcggcatttctgctgcttccgagtcagggcttccttcgtttgtttttccgcctgcttgatggacttcccgcctgccttcagctccttcagctttttctcttgcttctcatactgtttcagcagttctttctgcttctgctggtactattgcggccgctctagaactagtggatcccccgggctgcaggaattcgatatcaagcttatcgataccgtcgacctcgagggggggcccggtacccagcttttgttccctttagtgagggttaattgcgcgcttggcgtaatcatggtcatagctgtttc

SEQ ID NO: 42693 - DNA, 462 bp, Homo sapiens
  misc_feature 418, 419: n = A,T,C or G
tccaccgcggtggcggccgaggtacgcgggggctctaagctgcagcaagagaaactgtgtgtgaggggaagaggcctgtttcgctgtcgggtctctagttcttgcacgctctttaagagtctgcactggaggaactcctgccattaccagctcccttcttgcagaagggagggggaaacatacatttattcatgccagtctgttgcatgcaggctttttggcttcctaccttgcaacaaaataattgcaccaactccttagtgccgattccgcccacagagagtcctggagccacagtcttttttgctttgcattgtaggagagggactaagtgctagagactatgtcgctttcctgagctgccgagagcgctcgtgaactggaatcaactgcttcaaaaaaaaaaaaaaaaaaaaannggttccccccccgggggggccttttaaaaaatagggacccccc

SEQ ID NO: 42694 - DNA, 591 bp, Homo sapiens
cgactcactataggggcgaattggagctccaccgcggtggcggccgcccgggcaggtgaggacacgaggcggcgggctggagacatggaccgcggcgagcaaggtctgctgagaacagacccagtccctgaggaaggagaagatgttgctgccacgatcagtgccacagagaccctctcggaagaggagcaggaagagctaagaagagaacttgcaaaggtagaagaagaaatccagactctgtctcaagtgttagcagcaaaagagaagcatctagcagagatcaagcggaaacttggaatcaattctctacaggaactaaaacagaacattgccaaagggtggcaagacgtgacagcaacatctgcttacaagaagacatctgaaaccttatcccaggctggacagaaggcctcagctgctttttcgtctgttggctcagtcatcaccaaaaagctggaagatgtaaaaaactccccaacttttaaatcatttgaagaaaaggtcgaaaacttaaagtctaaagtagggggaaccaagcctgctggtggtgattttggagaagtcttgaattcggctacaaatgctagt

SEQ ID NO: 42695 - DNA, 394 bp, Homo sapiens
gtaatacgactactatagggcgaattggagctccaccgcggtggcggccgcccgggcaggtactgacgaccagggccagctgttctagagcgggaattagaggctagagcggctgaaatggttgtttggtgatgacactggggtccttccatctctggggcccactctcttctgtcttcccatgggaagtgccactgggatccctctgccctgtcctcctgaatacaagctgactgacattgactgtgtctgtggaaaatgggagctcttgttgtggagagcatagtaaattttcagagaacttgaagccaaaaggatttaaaaccgctgctctaaagaaaagaaaactggaggctgggcgcagtggctcacgcctgccttggcctcccaaagg

SEQ ID NO: 42696 - DNA, 414 bp, Homo sapiens; identical to SEQ ID NO: 33799

SEQ ID NO: 42697 - DNA, 308 bp, Homo sapiens
tcactatagggcgaattggagctccaccgcggtggcggccgaggtacttttttttttttttttttttttggaaagcgctgatcctgtttatttggcaggaaaacgagacaatccagcagcccaggagggacaggtggacttaatcctcctcctcgtcgtctccagccccagccccaccctggcccttcttggcattcttcctcttcacgcggcccgggcggccgctctagaactagtggatcccccgggctgcaggaattcgatatcaagcttatcgataccgtcgacctcgagggggggcccggtac

SEQ ID NO: 42698 - DNA, 167 bp, Homo sapiens; identical to SEQ ID NO: 33801

SEQ ID NO: 42699 - DNA, 415 bp, Homo sapiens; identical to SEQ ID NO: 33803

SEQ ID NO: 42700 - DNA, 421 bp, Homo sapiens; identical to SEQ ID NO: 33804

SEQ ID NO: 42701 - DNA, 407 bp, Homo sapiens; identical to SEQ ID NO: 33805

SEQ ID NO: 42702 - DNA, 419 bp, Homo sapiens; identical to SEQ ID NO: 33806

SEQ ID NO: 42703 - DNA, 453 bp, Homo sapiens; identical to SEQ ID NO: 34952

SEQ ID NO: 42704 - DNA, 397 bp, Homo sapiens; identical to SEQ ID NO: 32134

SEQ ID NO: 42705 - DNA, 454 bp, Homo sapiens; identical to SEQ ID NO: 33964

SEQ ID NO: 42706 - DNA, 300 bp, Homo sapiens; identical to SEQ ID NO: 33810
  misc_feature 223, 253: n = A,T,C or G

SEQ ID NO: 42707 - DNA, 512 bp, Homo sapiens; identical to SEQ ID NO: 33082

SEQ ID NO: 42708 - DNA, 411 bp, Homo sapiens; identical to SEQ ID NO: 33812

SEQ ID NO: 42709 - DNA, 405 bp, Homo sapiens; identical to SEQ ID NO: 33813

SEQ ID NO: 42710 - DNA, 410 bp, Homo sapiens; identical to SEQ ID NO: 33814

SEQ ID NO: 42711 - DNA, 409 bp, Homo sapiens; identical to SEQ ID NO: 33815

SEQ ID NO: 42712 - DNA, 487 bp, Homo sapiens
gactcactatagggcgatttggagctccaccgcggtggcggccgcccgggcaggtactttggtaagcttgttgttgtccaagtgaagctccctcagatgaggcgtgttggccagagagccattgtcaacagcagagatgctgttgaaactcaatcccaacttagccaaattattcagtcctttcaggctagctgcatcaactctgctgattttggtggccatcaagatgtaattccgtaagggaaggaggaagaccttgaggaatgctggtgatattggtatcagcaatgcggatgtaggagagcttcttcattccctggaaagccccattttcaattcctgagctcttcagcggattggtgcccagttctatgacaatcatctggttcagtccattgaaagtaacttttcgcactttggtgatctcattctcatgggcacgcagctcctgaagagttttgggcattttttctggcaattccttcag

SEQ ID NO: 42713 - DNA, 470 bp, Homo sapiens; identical to SEQ ID NO: 33802

SEQ ID NO: 42714 - DNA, 644 bp, Homo sapiens; identical to SEQ ID NO: 33820

SEQ ID NO: 42715 - DNA, 605 bp, Homo sapiens; identical to SEQ ID NO: 33821
  misc_feature 42, 126, 127, 147: n = A,T,C or G

SEQ ID NO: 42716 - DNA, 448 bp, Homo sapiens; identical to SEQ ID NO: 33822

SEQ ID NO: 42717 - DNA, 479 bp, Homo sapiens; identical to SEQ ID NO: 32555

SEQ ID NO: 42718 - DNA, 453 bp, Homo sapiens; identical to SEQ ID NO: 33903

SEQ ID NO: 42719 - DNA, 508 bp, Homo sapiens; identical to SEQ ID NO: 33825

SEQ ID NO: 42720 - DNA, 460 bp, Homo sapiens; identical to SEQ ID NO: 33826

SEQ ID NO: 42721 - DNA, 508 bp, Homo sapiens; identical to SEQ ID NO: 33825

SEQ ID NO: 42722 - DNA, 508 bp, Homo sapiens; identical to SEQ ID NO: 33825

SEQ ID NO: 42723 - DNA, 437 bp, Homo sapiens; identical to SEQ ID NO: 33927

SEQ ID NO: 42724 - DNA, 451 bp, Homo sapiens; identical to SEQ ID NO: 33831

SEQ ID NO: 42725 - DNA, 513 bp, Homo sapiens; identical to SEQ ID NO: 33817

SEQ ID NO: 42726 - DNA, 421 bp, Homo sapiens; identical to SEQ ID NO: 33833

SEQ ID NO: 42727 - DNA, 444 bp, Homo sapiens; identical to SEQ ID NO: 33834

SEQ ID NO: 42728 - DNA, 477 bp, Homo sapiens; identical to SEQ ID NO: 33947

SEQ ID NO: 42729 - DNA, 286 bp, Homo sapiens; identical to SEQ ID NO: 33836

SEQ ID NO: 42730 - DNA, 427 bp, Homo sapiens; identical to SEQ ID NO: 33837

SEQ ID NO: 42731 - DNA, 450 bp, Homo sapiens; identical to SEQ ID NO: 33838

SEQ ID NO: 42732 - DNA, 436 bp, Homo sapiens; identical to SEQ ID NO: 33839

SEQ ID NO: 42733 - DNA, 431 bp, Homo sapiens
gcgaattggagctccaccgcggtggcggccgaggtacgcggggcagacactgaccttcagcgcctcggctccagcgccatggcgccctccaggaagttcttcgttgggggaaactggaagatgaacgggcggaagcagagtctgggggagctcatcggcactctgaacgcggccaaggtgccggccgctctagaactagtggatcccccgggctgcaggaattcgatattcaagctttatcgataccgtcgacctcgagggggggcccggtacccagcttttgttcccttttaagtgagggttaattgcgcgcttggcgtaatcatggtcatagctgtttcctgtgtgaaattgttatccgctcacaattccacaacaaacatacaagccgggagcataaaggtgtaaagcctggggtgcctaatgagtga

SEQ ID NO: 42734 - DNA, 346 bp, Homo sapiens; identical to SEQ ID NO: 33843

SEQ ID NO: 42735 - DNA, 391 bp, Homo sapiens
tactatagggcgaattggagctccaccgcggtggcggccgccacgctggttttgcatcttcaggagacgctcgtagccctcgcgcttctcctcggccaattcgcggaagaagtggctcacgccttccagagccacatcatcgcggtcgaaatagaagcccagagagaggtaggtgtaggaggcctgcaggtacctcggccgctctagaactagtggatcccccgggctgcaggaattcgatatcaagcttatcgataccgtcgacctcgagggggggcccggtacccagcttttgttccctttagtgagggttaattgcgcgcttggcgtaatcatggtcatagctgtttcctgtgtgaaattgttatccgctcacaattccacacaacat

SEQ ID NO: 42736 - DNA, 457 bp, Homo sapiens; identical to SEQ ID NO: 33845

SEQ ID NO: 42737 - DNA, 421 bp, Homo sapiens; identical to SEQ ID NO: 33846

SEQ ID NO: 42738 - DNA, 468 bp, Homo sapiens; identical to SEQ ID NO: 33847

SEQ ID NO: 42739 - DNA, 551 bp, Homo sapiens
gcgaattggagctccaccgcggtggcggccgaggtacacagcaggcttttcaggcagggcacatggctcagggccccatgatgtgataccttgaagcacaccattacagacaagtggacccccagaatcacccccacaagtgtctttaccacctgtccagagcccagcacacaacatgaactctgtcaccttctcagagtaagctctagcacacatgtcattggacaggagatggaggctcacacactgaagactcctggggcgcaagaactcctctggttcgatgctgccccagcctgaggcgtagcaggtggtccccagtgctggctcctgggtgggcaggcccaggaccttcacaacatctgtgatcttggcaggctctgacaggcggagcagcatgaggtcatggctggagtcttcatctggtctaaggctttgatgcttcagaaggctcatattgtaaagcgggtgtgggaagctgtggctgacagggaccctctggcctgtgtcttcaggctcaaacaggttgtgccgacccagccagacctggc

SEQ ID NO: 42740 - DNA, 573 bp, Homo sapiens; identical to SEQ ID NO: 41521

SEQ ID NO: 42741 - DNA, 508 bp, Homo sapiens; identical to SEQ ID NO: 33825

SEQ ID NO: 42742 - DNA, 469 bp, Homo sapiens; identical to SEQ ID NO: 33851

SEQ ID NO: 42743 - DNA, 670 bp, Homo sapiens; identical to SEQ ID NO: 30471

SEQ ID NO: 42744 - DNA, 479 bp, Homo sapiens; identical to SEQ ID NO: 33854

SEQ ID NO: 42745 - DNA, 407 bp, Homo sapiens; identical to SEQ ID NO: 33769

SEQ ID NO: 42746 - DNA, 412 bp, Homo sapiens; identical to SEQ ID NO: 33856

SEQ ID NO: 42747 - DNA, 233 bp, Homo sapiens; identical to SEQ ID NO: 33857

SEQ ID NO: 42748 - DNA, 322 bp, Homo sapiens; identical to SEQ ID NO: 33858

SEQ ID NO: 42749 - DNA, 418 bp, Homo sapiens; identical to SEQ ID NO: 33859

SEQ ID NO: 42750 - DNA, 437 bp, Homo sapiens; identical to SEQ ID NO: 33861

SEQ ID NO: 42751 - DNA, 475 bp, Homo sapiens
tactatagggcgaattggagctccaccgcggtggcggccgcgaattagttcgcgcgcagattgccatttgcggcatgagcacctggagcaaaaggtctctgagccaggaagatgctcctcagacacctagaccagtggcagaaattgtgccatccttcatcaacaaagatacagaaaccataaatatgatgtcagaatttgttgctaatttgccacaggagctgaagttaaccctgtctgagatgcagccagcattaccacagctacaacaacatgtacctcggccgctctagaactagtggatcccccgggctgcaggaattcgatatcaagcttatcgataccgtcgacctcgagggggggcccggtacccagcttttgttccctttagtgagggttaattgcgcgcttggcgtaatcatggtcatagctgtttcctgtgtgaaattgttatccgctcacaattccacacaac

SEQ ID NO: 42752 - DNA, 447 bp, Homo sapiens; identical to SEQ ID NO: 33863

SEQ ID NO: 42753 - DNA, 508 bp, Homo sapiens
tcgaccacgcgtccgattctaataaggttgtgacacgacaccctgatctgaagactgatggttttggcattgacacatgtcgcagcatggtggccgtgatggatagcgacaccacaggcaagctgggctttgaggaattcaagtacttgtggaacaacatcaaaaggtggcaggccatatacaaacagtcacactgaccgatcagggaccatttgcagtagtgaactcccaggtgcctttgaggcagcagggttccacctgaatgagcatctctataacatgatcatccgacgctactcagatgaaagtgggaacatggattttgacaacttcatcagctgcttggtcaggctggacgccatgttccgtgccttcaaatctcttgacaaagatggcactggacaaatccaggtgaacatccaggagtggctgcagctgactatgtattcctgaactggagccccagacccgccccttcaccgccttgctataggagtcacctggagcc

SEQ ID NO: 42754 - DNA, 636 bp, Homo sapiens; identical to SEQ ID NO: 37432

SEQ ID NO: 42755 - DNA, 521 bp, Homo sapiens; identical to SEQ ID NO: 33867

SEQ ID NO: 42756 - DNA, 626 bp, Homo sapiens; identical to SEQ ID NO: 33869

SEQ ID NO: 42757 - DNA, 573 bp, Homo sapiens; identical to SEQ ID NO: 33870
  misc_feature 145, 369: n = A,T,C or G

SEQ ID NO: 42758 - DNA, 458 bp, Homo sapiens; identical to SEQ ID NO: 33986

SEQ ID NO: 42759 - DNA, 456 bp, Homo sapiens; identical to SEQ ID NO: 33872

SEQ ID NO: 42760 - DNA, 449 bp, Homo sapiens; identical to SEQ ID NO: 33873
  misc_feature 371: n = A,T,C or G

SEQ ID NO: 42761 - DNA, 446 bp, Homo sapiens; identical to SEQ ID NO: 33874

SEQ ID NO: 42762 - DNA, 449 bp, Homo sapiens; identical to SEQ ID NO: 33875

SEQ ID NO: 42763 - DNA, 449 bp, Homo sapiens; identical to SEQ ID NO: 33876

SEQ ID NO: 42764 - DNA, 441 bp, Homo sapiens; identical to SEQ ID NO: 33877

SEQ ID NO: 42765 - DNA, 439 bp, Homo sapiens; identical to SEQ ID NO: 33907

SEQ ID NO: 42766 - DNA, 463 bp, Homo sapiens; identical to SEQ ID NO: 33880

SEQ ID NO: 42767 - DNA, 461 bp, Homo sapiens; identical to SEQ ID NO: 33881

SEQ ID NO: 42768 - DNA, 462 bp, Homo sapiens; identical to SEQ ID NO: 33882

SEQ ID NO: 42769 - DNA, 623 bp, Homo sapiens; identical to SEQ ID NO: 36573

SEQ ID NO: 42770 - DNA, 387 bp, Homo sapiens
atacgactcactatagggcgaattggagctccaccgcggtggcggccgaggtacgcgggggcagcctaaagcccgggacaggcacacaggcccaggtgtgtaggccacagcagccgcagtcctgaaaggctgcaacacccagacctccaggagagaccaggcccaggatgcctcgcctgttcttgttccacctgctagaattctgtttactactgaaccaattttccagagcagtcgcggccaaatggaaggacgatgttattaaattatgcggccgctctagaactagtggatcccccgggctgcaggaattcgatatcaagcttatcgataccgtcgacctcgaggggggggcccggtacccagcttttgttccctttagtgagg

SEQ ID NO: 42771 - DNA, 634 bp, Homo sapiens; identical to SEQ ID NO: 37060

SEQ ID NO: 42772 - DNA, 428 bp, Homo sapiens; identical to SEQ ID NO: 33888

SEQ ID NO: 42773 - DNA, 671 bp, Homo sapiens; identical to SEQ ID NO: 33889

SEQ ID NO: 42774 - DNA, 513 bp, Homo sapiens; identical to SEQ ID NO: 33817

SEQ ID NO: 42775 - DNA, 565 bp, Homo sapiens; identical to SEQ ID NO: 33891

SEQ ID NO: 42776 - DNA, 623 bp, Homo sapiens; identical to SEQ ID NO: 33892
  misc_feature 47: n = A,T,C or G

SEQ ID NO: 42777 - DNA, 534 bp, Homo sapiens; identical to SEQ ID NO: 33893

SEQ ID NO: 42778 - DNA, 518 bp, Homo sapiens; identical to SEQ ID NO: 33894
  misc_feature 309: n = A,T,C or G

SEQ ID NO: 42779 - DNA, 403 bp, Homo sapiens
actactatagggcgaattggagctccaccgcggtggcggccgcataatttaataacatcgtccttccatttggccgcgactgctctggaaaattggttcagtagtaaacagaattctagcaggtggaacaagaacaggcgaggcatcctgggcctggtctctcctggaggtctgggtgttgcagcctttcaggactgcggctgctgtggcctacacacctgggcctgtgtccccgcgtacctcggccgctctagaactagtggatcccccgggctgcaggaattcgatatcaagcttatcgataccgtcgacctcgagggggggcccggtacccagcttttgttccctttagtgagggttaattgcgcgcttggcgtaatcatggtcatagctgtttcctgtg

SEQ ID NO: 42780 - DNA, 516 bp, Homo sapiens; identical to SEQ ID NO: 33896
  misc_feature 362, 478: n = A,T,C or G

SEQ ID NO: 42781 - DNA, 489 bp, Homo sapiens; identical to SEQ ID NO: 33897

SEQ ID NO: 42782 - DNA, 522 bp, Homo sapiens; identical to SEQ ID NO: 33898

SEQ ID NO: 42783 - DNA, 467 bp, Homo sapiens; identical to SEQ ID NO: 33899

SEQ ID NO: 42784 - DNA, 602 bp, Homo sapiens; identical to SEQ ID NO: 33900
  misc_feature 40: n = A,T,C or G

SEQ ID NO: 42785 - DNA, 444 bp, Homo sapiens; identical to SEQ ID NO: 33902

SEQ ID NO: 42786 - DNA, 453 bp, Homo sapiens; identical to SEQ ID NO: 33903

SEQ ID NO: 42787 - DNA, 585 bp, Homo sapiens
  misc_feature 10: n = A,T,C or G
ggccctctanatgctgctcgagcggccgccagtgtgatggatatctgcagaattcggcttagcgtggtcgcggccgaggtacacatatcctgagctatccacagtccccgaactctgcaacattgctttcaggtgatagagacaagatggtccatgcaaatgagctgacacaagtcatgtcgtgtgcaatcaagataggatcccagacatcttcagaatggtttacagtcacaagaaataaagttccaatgaagtggttggcatttggaagcacactgttttaaatatatctccctgaaggtatgtttatatattagtgcactggtcaatatctgacactatctgtcattttattgcaaaaggatatcagggcaattaataggagggatcttagcactactttagacaatctttaaagcctgggtaagattcattagctacccaagtggcatttctgacttcaaattgtagtatcatgcaagatttatactgtattaatggagcctggagtaactctacatttaattatttccattatggggtaaacagcacttgaattaatacaatttagccgactgatgcagt

SEQ ID NO: 42788 - DNA, 633 bp, Homo sapiens; identical to SEQ ID NO: 39217

SEQ ID NO: 42789 - DNA, 439 bp, Homo sapiens; identical to SEQ ID NO: 33907

SEQ ID NO: 42790 - DNA, 407 bp, Homo sapiens; identical to SEQ ID NO: 37116

SEQ ID NO: 42791 - DNA, 443 bp, Homo sapiens; identical to SEQ ID NO: 33909

SEQ ID NO: 42792 - DNA, 505 bp, Homo sapiens; identical to SEQ ID NO: 33911

SEQ ID NO: 42793 - DNA, 542 bp, Homo sapiens; identical to SEQ ID NO: 33912

SEQ ID NO: 42794 - DNA, 394 bp, Homo sapiens; identical to SEQ ID NO: 33913

SEQ ID NO: 42795 - DNA, 532 bp, Homo sapiens; identical to SEQ ID NO: 33914

SEQ ID NO: 42796 - DNA, 204 bp, Homo sapiens; identical to SEQ ID NO: 33915

SEQ ID NO: 42797 - DNA, 410 bp, Homo sapiens
cgactcacttagggcgaattggagctccaccgcggtggcggccgcataatttaataacatcgtccttccatttggccgcgactgctctggaaaattggttcagtagtaaacagaattctagcaggtggaacaagaacaggcgaggcatcctgggcctggtctctcctggaggtctgggtgttgcagcctttcaggactgcggctgctgtggcctacacacctgggcctgtgtgcctgtcccgggctttaggctgctttccctccccgcgtacctcggccgctctagaactagtggatcccccgggctgcaggaattcgatatcaagcttatcgataccgtcgacctcgagggggggcccggtacccagcttttgttccctttagtgagggttaattgcgcgcttggcgta

SEQ ID NO: 42798 - DNA, 413 bp, Homo sapiens; identical to SEQ ID NO: 33920

SEQ ID NO: 42799 - DNA, 481 bp, Homo sapiens; identical to SEQ ID NO: 33921

SEQ ID NO: 42800 - DNA, 527 bp, Homo sapiens; identical to SEQ ID NO: 33247

SEQ ID NO: 42801 - DNA, 450 bp, Homo sapiens; identical to SEQ ID NO: 33923

SEQ ID NO: 42802 - DNA, 470 bp, Homo sapiens; identical to SEQ ID NO: 33924

SEQ ID NO: 42803 - DNA, 443 bp, Homo sapiens; identical to SEQ ID NO: 33926
  misc_feature 211: n = A,T,C or G

SEQ ID NO: 42804 - DNA, 437 bp, Homo sapiens; identical to SEQ ID NO: 33927

SEQ ID NO: 42805 - DNA, 430 bp, Homo sapiens; identical to SEQ ID NO: 33928

SEQ ID NO: 42806 - DNA, 459 bp, Homo sapiens; identical to SEQ ID NO: 36964

SEQ ID NO: 42807 - DNA, 169 bp, Homo sapiens; identical to SEQ ID NO: 33930

SEQ ID NO: 42808 - DNA, 435 bp, Homo sapiens; identical to SEQ ID NO: 33929

SEQ ID NO: 42809 - DNA, 526 bp, Homo sapiens
  misc_feature 439: n = A,T,C or G
acgactcactatagggcgaattggagctccaccgcggtggcggccgcccgggcaggtacgcgggggagtttcacgcgcgtatgctttgcccgccatggccgcagtcaaggagcctttggagttccatgccaagcggtcttggcgccccgaggaggcagtagaagatccggacgaggaggatgaggataatactagtgaagccgagaatgggttctccctggaggaagtgttacggctcggaggcaccaagcaagattaccttatgctggctactttggatgagaatgaggaagtgatagatggaggcaaaaaaaggagcaatcgatgaccttcagcaaggtgaattggaagcatttattcaaaatcttaatttggcgaagtatacaaaagcttccttaattgaagaagatgaaccagctgaaaaagaaaattccagctnattaaaaataaaaaaaatatattaagtacctcggccgctctagaactagtggatcccccgggctgcaggaattcgatatcaagctta

SEQ ID NO: 42810 - DNA, 397 bp, Homo sapiens; identical to SEQ ID NO: 32134

SEQ ID NO: 42811 - DNA, 317 bp, Homo sapiens; identical to SEQ ID NO: 33935

SEQ ID NO: 42812 - DNA, 465 bp, Homo sapiens; identical to SEQ ID NO: 33936

SEQ ID NO: 42813 - DNA, 400 bp, Homo sapiens; identical to SEQ ID NO: 33937

SEQ ID NO: 42814 - DNA, 462 bp, Homo sapiens; identical to SEQ ID NO: 33938

SEQ ID NO: 42815 - DNA, 467 bp, Homo sapiens; identical to SEQ ID NO: 33939

SEQ ID NO: 42816 - DNA, 319 bp, Homo sapiens; identical to SEQ ID NO: 33940

SEQ ID NO: 42817 - DNA, 455 bp, Homo sapiens; identical to SEQ ID NO: 33941

SEQ ID NO: 42818 - DNA, 405 bp, Homo sapiens; identical to SEQ ID NO: 33942

SEQ ID NO: 42819 - DNA, 470 bp, Homo sapiens; identical to SEQ ID NO: 33944

SEQ ID NO: 42820 - DNA, 470 bp, Homo sapiens; identical to SEQ ID NO: 33944

SEQ ID NO: 42821 - DNA, 467 bp, Homo sapiens; identical to SEQ ID NO: 33945

SEQ ID NO: 42822 - DNA, 477 bp, Homo sapiens; identical to SEQ ID NO: 33947

SEQ ID NO: 42823 - DNA, 450 bp, Homo sapiens; identical to SEQ ID NO: 33948

SEQ ID NO: 42824 - DNA, 459 bp, Homo sapiens; identical to SEQ ID NO: 33950

SEQ ID NO: 42825 - DNA, 420 bp, Homo sapiens; identical to SEQ ID NO: 33951

SEQ ID NO: 42826 - DNA, 447 bp, Homo sapiens; identical to SEQ ID NO: 33952

SEQ ID NO: 42827 - DNA, 458 bp, Homo sapiens; identical to SEQ ID NO: 33953

SEQ ID NO: 42828 - DNA, 455 bp, Homo sapiens; identical to SEQ ID NO: 33954

SEQ ID NO: 42829 - DNA, 415 bp, Homo sapiens; identical to SEQ ID NO: 33955

SEQ ID NO: 42830 - DNA, 396 bp, Homo sapiens; identical to SEQ ID NO: 42045

SEQ ID NO: 42831 - DNA, 469 bp, Homo sapiens
agggcaattgagctccccgcggtggcggccgcggccactgtaaccaagaaagtggctaagagcccaaagaaggccaaggttgcgaagcccaagaaagctgccaaaagtgctgctaaggctgtgaagcccaaggccgctaagcccaaggttgtcaagcctaagaaggcggcgcccaagaagaaataggcgaacgcctacttctaaaacccaaaaggctcttttcagagccaccactgatctcaataaaagagctggataatttctttaaaaaaaaaaaaaaaaaaaaaaaaaggtgcctcggccgctctagaactagtggatcccccgggctgcaggaattcgatatcaagcttatcgataccgtcgacctcgagggggggcccggtacccagcttttgttccctttagtgagggttaattgcgcgcttggcgtaatcatggtcatagctgtttcctgtgtgaaattgtt

SEQ ID NO: 42832 - DNA, 655 bp, Homo sapiens; identical to SEQ ID NO: 33961

SEQ ID NO: 42833 - DNA, 671 bp, Homo sapiens; identical to SEQ ID NO: 33962
  misc_feature 628: n = A,T,C or G

SEQ ID NO: 42834 - DNA, 461 bp, Homo sapiens; identical to SEQ ID NO: 33963

SEQ ID NO: 42835 - DNA, 454 bp, Homo sapiens; identical to SEQ ID NO: 33964

SEQ ID NO: 42836 - DNA, 447 bp, Homo sapiens; identical to SEQ ID NO: 33965

SEQ ID NO: 42837 - DNA, 565 bp, Homo sapiens; identical to SEQ ID NO: 33966
  misc_feature 458, 459, 460, 464: n = A,T,C or G

SEQ ID NO: 42838 - DNA, 618 bp, Homo sapiens; identical to SEQ ID NO: 33967

SEQ ID NO: 42839 - DNA, 401 bp, Homo sapiens; identical to SEQ ID NO: 33968

SEQ ID NO: 42840 - DNA, 397 bp, Homo sapiens; identical to SEQ ID NO: 33969

SEQ ID NO: 42841 - DNA, 451 bp, Homo sapiens
ctactatagggcgaattggagctccaccgcggtggcggccgaggtaccttactgagaaattcatcagctttttcctaccaaaggcagacatctaaccgttccgaaccctcaggggagatcaacatagacagcagtggtgaaacagttggatctggagaaagatgtgtcatggcaatgctgagaaggaggatcagggatgagaagaccaacgttaggaagtctgcactgcaggtattagtgagtattttgaaacactgtgatgtctcacgcatgaaggaagacctgtggattctgcaggaccagtgtcgggaccctgcagtgtctgtccggaagcaggccctccagtctcttaatgaactcttatggctcagcctaaatgcgtgcagatccagaaagcctgtgtgcggggggtggtaccggcggcgatggactggtagagcactgtgcagga

SEQ ID NO: 42842 - DNA, 521 bp, Homo sapiens; identical to SEQ ID NO: 33980

SEQ ID NO: 42843 - DNA, 278 bp, Homo sapiens; identical to SEQ ID NO: 33973

SEQ ID NO: 42844 - DNA, 437 bp, Homo sapiens; identical to SEQ ID NO: 32673

SEQ ID NO: 42845 - DNA, 406 bp, Homo sapiens; identical to SEQ ID NO: 33976

SEQ ID NO: 42846 - DNA, 620 bp, Homo sapiens; identical to SEQ ID NO: 39327
  misc_feature 58, 95, 96, 106, 108, 109, 134, 135, 136, 146, 147, 167,168, 204: n = A,T,C or G

SEQ ID NO: 42847 - DNA, 513 bp, Homo sapiens; identical to SEQ ID NO: 33817

SEQ ID NO: 42848 - DNA, 620 bp, Homo sapiens; identical to SEQ ID NO: 39327
  misc_feature 58, 95, 96, 106, 108, 109, 134, 135, 136, 146, 147, 167,168, 204: n = A,T,C or G

SEQ ID NO: 42849 - DNA, 620 bp, Homo sapiens; identical to SEQ ID NO: 39327
  misc_feature 58, 95, 96, 106, 108, 109, 134, 135, 136, 146, 147, 167,168, 204: n = A,T,C or G

SEQ ID NO: 42850 - DNA, 578 bp, Homo sapiens; identical to SEQ ID NO: 33981

SEQ ID NO: 42851 - DNA, 620 bp, Homo sapiens; identical to SEQ ID NO: 39327
  misc_feature 58, 95, 96, 106, 108, 109, 134, 135, 136, 146, 147, 167,168, 204: n = A,T,C or G

SEQ ID NO: 42852 - DNA, 643 bp, Homo sapiens
tgtatacgactcactatagggcgaattgcgccctctagatgcatgctcgagcggccgccagtgtgatggatatctgcagaattcgccctttcgagcggccgcccgggcaggtacatgaagttcacattgtcaaagattatcactccttcatggggccaggctggtggtgggcgtttctgatattcccaaggtgcttctttttcaaggtctgtgtattcaatgaccctttctactgagatcatcatattctcaacttcagcactttgtcgaacacaccactgaaacatccccatgagcgtgagggcataggacagtgccaaaccaacctgcccggcatccagagtttttgccagaatcagggacccaaaggcaacgatgatgacaaacatggcacagatggcatccagacggacggcgaaccagcgggacgttgtcaaaaacaagaaccaagcctctgaatgtaaatcctggtgtgcatcaaacagttcctgacacctctcttctgctttgtatgcccggatggtccagagcccctggagagaagatgacaagtgggaaaacactggactccgagttgtagattccaggcgcttcacatctcttgacgtttccaaaaaatatcgccgaagaaaaatgaaaatga

SEQ ID NO: 42853 - DNA, 513 bp, Homo sapiens; identical to SEQ ID NO: 33984

SEQ ID NO: 42854 - DNA, 607 bp, Homo sapiens; identical to SEQ ID NO: 33985

SEQ ID NO: 42855 - DNA, 454 bp, Homo sapiens; identical to SEQ ID NO: 33987

SEQ ID NO: 42856 - DNA, 564 bp, Homo sapiens
ggcgaattgtgccctctagatgcatgctcgagcggccgccagtgtgatggatatctgcagaattcgccctttcgagcggccgcccgggcaggtacattttagaaagtgaaatgctgtggacatttaaggtggagccactgtgagagtctagggggatagatggtattcgtctcagaatgaaacgaatacacccctctcagagccctttccaaggatcccctccttctttcagctccttccctccacctcaatacacactcccgtcccaggaacctaacctcatctagaaataccagggccagcatgccttacacctagaggtttggttggcttcagagaaacttctggaggctaaaagcagccaagaagaatcagccactacatgctgggcctggatgaacagagcagtgagctgtgatggggctggggctggggcccaggaagagcaagcaggagagtttgtatgcaccgtgattcaaatattataacaaaaatcatcgatcatgtgttaagcactttacagttcccaaagcactttcccatccatgccctgatgatctttga

SEQ ID NO: 42857 - DNA, 508 bp, Homo sapiens; identical to SEQ ID NO: 33989

SEQ ID NO: 42858 - DNA, 455 bp, Homo sapiens
tacgactcactatagggcgaattggagctccaccgcggtggcggccgaggtactagtcagtatgctgtagtattaatcagtaggtcaagttcagtgaagtaaaggagaattgaattcttgaagttcacatttaggcaaaaatttggcgttttaggaggtgagtataagacatgatctttatagaaaacgctgatgataaaaacagcgctctctgttaggtgcctttatgcttgactccattgtcatcttttcttaagaaactaagctcaggactgggtgcaatggctcatgtctgtaatcccagcactttgggaggctgaggctataggatcagttgagctcaggagttcaagatcagcctgggcaacatagctagacctcgtctctactaaaaaacaaacaaacaaaaaacaaaaaaaaaacccccaaaaaaaccaacaaaccagcttggcatg

SEQ ID NO: 42859 - DNA, 505 bp, Homo sapiens; identical to SEQ ID NO: 33991
  misc_feature 408: n = A,T,C or G

SEQ ID NO: 42860 - DNA, 467 bp, Homo sapiens; identical to SEQ ID NO: 33992

SEQ ID NO: 42861 - DNA, 501 bp, Homo sapiens
tccaccgcggtggcggccgaggtacatacttcagaggctagttggcaggagtcactaagttaatccatgcacagtgttcagcccagtgcctggcacacagtgggtgctcaaacaacagcttctctccctgcatgttggtcattagggtcacaggctctgaagtcaggctcctagggtaatatcctgtccctatcactttcaattgtaggaagatgggcaaattacatacccccataagctttaattttcttactataaaacagagataataattgtatctaccttatgggttattgcaagcagcacatacagtcacccaaataaagtatataagagtatcttgtaagttcccagtaagtgctcactcctatgatattgatgttccccatttgaattcctgtggtattatgcaatcatctgtgcaataggaaccggattagcagagggtcctgggattctggcagaaaaagaccagagcttagtggcccatcagaaattggc

SEQ ID NO: 42862 - DNA, 494 bp, Homo sapiens; identical to SEQ ID NO: 33994

SEQ ID NO: 42863 - DNA, 506 bp, Homo sapiens; identical to SEQ ID NO: 33995
  misc_feature 456: n = A,T,C or G

SEQ ID NO: 42864 - DNA, 504 bp, Homo sapiens; identical to SEQ ID NO: 33996

SEQ ID NO: 42865 - DNA, 437 bp, Homo sapiens; identical to SEQ ID NO: 33997

SEQ ID NO: 42866 - DNA, 397 bp, Homo sapiens; identical to SEQ ID NO: 33998

SEQ ID NO: 42867 - DNA, 403 bp, Homo sapiens; identical to SEQ ID NO: 30544

SEQ ID NO: 42868 - DNA, 401 bp, Homo sapiens; identical to SEQ ID NO: 34000
  misc_feature 136: n = A,T,C or G

SEQ ID NO: 42869 - DNA, 399 bp, Homo sapiens; identical to SEQ ID NO: 34001

SEQ ID NO: 42870 - DNA, 438 bp, Homo sapiens
tacgactcactatagggcgaattggagctccaccgcggtggcggccgaggtacagatctgggaactaaatattaaaaatgagtgtggctggatatatggagaatgttgggcccagaaggaaccgtagagatcagatattacaacagctttgttttgagggttagaaatatgaaatgatttggttatgaacgcacagtttaggcagcagggccagaatcctgaccctctgccccgtggttatctcctccccagcttggctgcctcatgtcatcacagtattccattttgtttgttgcatgtcttgtgaagccatcaagattttctcgtctgttttcctctcattggtaatgctcactttgtgacttcatttcaaatctgtaatcccgttcaaataaatatccacaacaggatctgttttcctgcccatcctttaaggaa

SEQ ID NO: 42871 - DNA, 402 bp, Homo sapiens; identical to SEQ ID NO: 34003

SEQ ID NO: 42872 - DNA, 439 bp, Homo sapiens; identical to SEQ ID NO: 34004

SEQ ID NO: 42873 - DNA, 516 bp, Homo sapiens; identical to SEQ ID NO: 34005

SEQ ID NO: 42874 - DNA, 334 bp, Homo sapiens; identical to SEQ ID NO: 34006

SEQ ID NO: 42875 - DNA, 415 bp, Homo sapiens; identical to SEQ ID NO: 34007

SEQ ID NO: 42876 - DNA, 365 bp, Homo sapiens; identical to SEQ ID NO: 34008

SEQ ID NO: 42877 - DNA, 228 bp, Homo sapiens
  misc_feature 65, 95, 129, 189: n = A,T,C or G
ccccgcggtggcggccgcccgggcaggtacgcgggggggggggggggtcctttataaaattaaantttttaaaattaaaaaaaaaattaaatttntttttttatttaaaattattaaaaaaaaaaattntttttttttttttttttaaaattttaaaaataaaaatttttttaaattttttatttattnaaaaaatttttttttttttttttaatttttaaaaatttt

SEQ ID NO: 42878 - DNA, 420 bp, Homo sapiens; identical to SEQ ID NO: 34010
  misc_feature 390: n = A,T,C or G

SEQ ID NO: 42879 - DNA, 417 bp, Homo sapiens; identical to SEQ ID NO: 34011

SEQ ID NO: 42880 - DNA, 446 bp, Homo sapiens; identical to SEQ ID NO: 34012

SEQ ID NO: 42881 - DNA, 449 bp, Homo sapiens; identical to SEQ ID NO: 34013

SEQ ID NO: 42882 - DNA, 431 bp, Homo sapiens; identical to SEQ ID NO: 34014

SEQ ID NO: 42883 - DNA, 520 bp, Homo sapiens
gtcgacccacgcgtccggcagaaccctgcccttctttgttgactgaggaaagctcgctccctgcccaggtttttcattgttgatcgaaattaacaccaggtggtgaatagagcccctcctaaggttgctcaggataaatcatttattaaataggtctgcttatcaggaggggcgtgaaggctcccaaaaggaaatgctggcacctgggcccagaagccagggcctctaactcctggggttgatttcttcagtgaagttgcaccctacaaagggaatatggccaaagcggcactcaactgaaggctgatatcaggcgattagacagccatgcattctgcgtttgtctggaatggattgtagagagatggacttatatgaggactaccagtccccgtttgattttgatgcaggagtgaacaaaagctatctctacttgtctcctagtggaaattcatctccaccggatcacctactcttcagaattttggtctgctgagaacagacccagtccctgaggaag

SEQ ID NO: 42884 - DNA, 422 bp, Homo sapiens; identical to SEQ ID NO: 34016

SEQ ID NO: 42885 - DNA, 460 bp, Homo sapiens; identical to SEQ ID NO: 34017

SEQ ID NO: 42886 - DNA, 440 bp, Homo sapiens; identical to SEQ ID NO: 34018

SEQ ID NO: 42887 - DNA, 456 bp, Homo sapiens; identical to SEQ ID NO: 39297

SEQ ID NO: 42888 - DNA, 423 bp, Homo sapiens; identical to SEQ ID NO: 34020

SEQ ID NO: 42889 - DNA, 594 bp, Homo sapiens; identical to SEQ ID NO: 34021

SEQ ID NO: 42890 - DNA, 596 bp, Homo sapiens; identical to SEQ ID NO: 34022

SEQ ID NO: 42891 - DNA, 538 bp, Homo sapiens; identical to SEQ ID NO: 34023

SEQ ID NO: 42892 - DNA, 582 bp, Homo sapiens; identical to SEQ ID NO: 34024

SEQ ID NO: 42893 - DNA, 584 bp, Homo sapiens; identical to SEQ ID NO: 34025

SEQ ID NO: 42894 - DNA, 490 bp, Homo sapiens; identical to SEQ ID NO: 34026

SEQ ID NO: 42895 - DNA, 589 bp, Homo sapiens; identical to SEQ ID NO: 34027

SEQ ID NO: 42896 - DNA, 497 bp, Homo sapiens; identical to SEQ ID NO: 34028
  misc_feature 13: n = A,T,C or G

SEQ ID NO: 42897 - DNA, 560 bp, Homo sapiens
tccaccgcggtggcggccgaggtactctgctcagcatggccacgtaggttttttgtttgttttgttttgttctttttttgagacggagtctcactctgttacccaggctggaatgcagtggcgcaatcttggctcactttaacctccacttccctggttcaagcaattcccctgcctttgcctcccgagtagctgggattacaggcacacaccaccacgcccagctagtttttttgtatttttagtagaggcggggtttcaccatgcaagcccagctggccatgtaggttttaaagcaaggggcgtgaagagggcacagtgaggtatgtggctgttctcgtggtagttcattcggcctaaatagacctggcattaaatttcaagaaggatttgacattttctcttcttgacccttctctttaaagggtaaaatattaatgtttagaatgacaaagatgaattattacaataaatctgatgtacctgcccgggcggccgctctagaactagtggatcccccgggctgcaggaattcgatatcaagcttatcgataccgtcg

SEQ ID NO: 42898 - DNA, 240 bp, Homo sapiens; identical to SEQ ID NO: 34030
  misc_feature 32, 65: n = A,T,C or G

SEQ ID NO: 42899 - DNA, 500 bp, Homo sapiens; identical to SEQ ID NO: 34031
  misc_feature 50, 79: n = A,T,C or G

SEQ ID NO: 42900 - DNA, 418 bp, Homo sapiens; identical to SEQ ID NO: 34032
  misc_feature 63, 68, 69: n = A,T,C or G

SEQ ID NO: 42901 - DNA, 426 bp, Homo sapiens; identical to SEQ ID NO: 34033

SEQ ID NO: 42902 - DNA, 425 bp, Homo sapiens; identical to SEQ ID NO: 34034

SEQ ID NO: 42903 - DNA, 477 bp, Homo sapiens; identical to SEQ ID NO: 34035

SEQ ID NO: 42904 - DNA, 479 bp, Homo sapiens; identical to SEQ ID NO: 34036

SEQ ID NO: 42905 - DNA, 465 bp, Homo sapiens; identical to SEQ ID NO: 34037

SEQ ID NO: 42906 - DNA, 495 bp, Homo sapiens; identical to SEQ ID NO: 34038

SEQ ID NO: 42907 - DNA, 483 bp, Homo sapiens; identical to SEQ ID NO: 34039
  misc_feature 443: n = A,T,C or G

SEQ ID NO: 42908 - DNA, 482 bp, Homo sapiens; identical to SEQ ID NO: 34040
  misc_feature 64: n = A,T,C or G

SEQ ID NO: 42909 - DNA, 409 bp, Homo sapiens; identical to SEQ ID NO: 34041
  misc_feature 38: n = A,T,C or G

SEQ ID NO: 42910 - DNA, 491 bp, Homo sapiens; identical to SEQ ID NO: 34042

SEQ ID NO: 42911 - DNA, 618 bp, Homo sapiens
gagctccaccgcggtggcggccgaggtacggcaatacaattacagtttaaatcagcaatctatgatgctttgctatggaagccctagcaaatgaatacaaagacattctaagtaaaagaaggggaaagaaaggaagagatggtctcagtagagatgaactcaggtgcagaatctgagtctcagcacaaggactactatgcagaagtgggtaaaggaatgagaacactcaggagctcggtgggcacacagtcatggggactaggcagttccaaggattgaaatacggataagcaggtcgagaaaagcgacatccagagaacttgtagatgagtgctccgtggtttgtgacattgaaaaatgagacaatgcctgcctcatagtctaggaaaaccccaatacgacagggaggcacagccataaagagagtcaaaaccttgggatcagaagaggaggagtcctcaaaagcattatattcacatgtattctgtaatcctataacccagtagccatattgaggtctatatctggagtaaacttttgaataatttacacttggatcaaaagcaaacccagagctcttccttttattcagactacttattttactgtgtacctgcc

SEQ ID NO: 42912 - DNA, 211 bp, Homo sapiens; identical to SEQ ID NO: 34044

SEQ ID NO: 42913 - DNA, 480 bp, Homo sapiens; identical to SEQ ID NO: 34045

SEQ ID NO: 42914 - DNA, 408 bp, Homo sapiens; identical to SEQ ID NO: 34046
  misc_feature 38, 63: n = A,T,C or G

SEQ ID NO: 42915 - DNA, 444 bp, Homo sapiens; identical to SEQ ID NO: 34047
  misc_feature 48, 49, 70, 73: n = A,T,C or G

SEQ ID NO: 42916 - DNA, 367 bp, Homo sapiens; identical to SEQ ID NO: 34048

SEQ ID NO: 42917 - DNA, 440 bp, Homo sapiens; identical to SEQ ID NO: 34049

SEQ ID NO: 42918 - DNA, 397 bp, Homo sapiens; identical to SEQ ID NO: 34114

SEQ ID NO: 42919 - DNA, 222 bp, Homo sapiens; identical to SEQ ID NO: 34051

SEQ ID NO: 42920 - DNA, 213 bp, Homo sapiens; identical to SEQ ID NO: 34052
  misc_feature 69: n = A,T,C or G

SEQ ID NO: 42921 - DNA, 419 bp, Homo sapiens; identical to SEQ ID NO: 34053

SEQ ID NO: 42922 - DNA, 339 bp, Homo sapiens; identical to SEQ ID NO: 34054

SEQ ID NO: 42923 - DNA, 348 bp, Homo sapiens; identical to SEQ ID NO: 34055

SEQ ID NO: 42924 - DNA, 550 bp, Homo sapiens; identical to SEQ ID NO: 34056

SEQ ID NO: 42925 - DNA, 326 bp, Homo sapiens; identical to SEQ ID NO: 34057
  misc_feature 197, 223, 289, 298, 311, 312, 313: n = A,T,C or G

SEQ ID NO: 42926 - DNA, 544 bp, Homo sapiens; identical to SEQ ID NO: 34058
  misc_feature 130: n = A,T,C or G

SEQ ID NO: 42927 - DNA, 590 bp, Homo sapiens; identical to SEQ ID NO: 34059

SEQ ID NO: 42928 - DNA, 478 bp, Homo sapiens; identical to SEQ ID NO: 34060

SEQ ID NO: 42929 - DNA, 479 bp, Homo sapiens; identical to SEQ ID NO: 34061

SEQ ID NO: 42930 - DNA, 603 bp, Homo sapiens; identical to SEQ ID NO: 34062
  misc_feature 119, 133: n = A,T,C or G

SEQ ID NO: 42931 - DNA, 444 bp, Homo sapiens; identical to SEQ ID NO: 34063

SEQ ID NO: 42932 - DNA, 380 bp, Homo sapiens; identical to SEQ ID NO: 34064

SEQ ID NO: 42933 - DNA, 441 bp, Homo sapiens; identical to SEQ ID NO: 34065

SEQ ID NO: 42934 - DNA, 427 bp, Homo sapiens; identical to SEQ ID NO: 34066

SEQ ID NO: 42935 - DNA, 370 bp, Homo sapiens; identical to SEQ ID NO: 34067

SEQ ID NO: 42936 - DNA, 490 bp, Homo sapiens; identical to SEQ ID NO: 34068

SEQ ID NO: 42937 - DNA, 623 bp, Homo sapiens
tagctgtttcctgtggtaaaacgaaccggcagatgcatgctcaagcgggctcccttgtgatggatatctgcacaattcggctttcgagcggccgcccgggcaggtacagaaatacatttcaactgatttaagtccaacaccagtgaaaggagaaattatggcaccaaaactttccctcttctatcatacgatgatttaaattatgattcaaactacatttctcttttctaggctttgtcccataaaaatttgtgcagtttttcaacattagaattcttaattctattggaaacaaagcaaaacaaaacacagacaaaaccaaaccagacctcaagtcaacaaatctattgggatattgtttacgaacaaagtccaccttaagcattggtcctcaaaacagagctcctcaaaatattaggtgctgtgctcattacagaatcaaactgatcacactgattgaaaacttcctcaatgaaattttcaatcaacaacatgcttgaaataaaagtcaaacagtgttccaaccacttgatttcaaaccaagtagattatacgtttacaaacactaaaaaaaggtgtgtcatttataaatacggaaggaacaaaaacatcactgcatcaat

SEQ ID NO: 42938 - DNA, 470 bp, Homo sapiens; identical to SEQ ID NO: 34070

SEQ ID NO: 42939 - DNA, 474 bp, Homo sapiens; identical to SEQ ID NO: 34071

SEQ ID NO: 42940 - DNA, 434 bp, Homo sapiens; identical to SEQ ID NO: 30728

SEQ ID NO: 42941 - DNA, 438 bp, Homo sapiens; identical to SEQ ID NO: 34073

SEQ ID NO: 42942 - DNA, 419 bp, Homo sapiens; identical to SEQ ID NO: 34074

SEQ ID NO: 42943 - DNA, 519 bp, Homo sapiens; identical to SEQ ID NO: 34075

SEQ ID NO: 42944 - DNA, 439 bp, Homo sapiens
  misc_feature 196: n = A,T,C or G
ctatagggcgaattgggccctctagatgcatgctcgagcggccgccagtgtgatggatatctgcagaattcgcccttagcgtggtcgcggccgaggtacgatcttggctcactgcaacctctccctcccgggttcaagtgattctcgtgcctcagcctcttgagtagctgggattacaggcgcgtgccactgcgtncgggctaatttttgtatttttagtagagatggggtttcaccatgttggccaggctgatctcaaactcctgacctcatgtggtccacccaccttggcctcccaaagtgctgggattacaggcgtgagccaccacgctcagcctacaagcaattttttaaaaactgacacctattactgataaaattctctgtttaaaatcctatttactattttaaagataagtattagtttttttttaaatac

SEQ ID NO: 42945 - DNA, 113 bp, Homo sapiens; identical to SEQ ID NO: 34077

SEQ ID NO: 42946 - DNA, 383 bp, Homo sapiens; identical to SEQ ID NO: 34078

SEQ ID NO: 42947 - DNA, 402 bp, Homo sapiens; identical to SEQ ID NO: 34079

SEQ ID NO: 42948 - DNA, 449 bp, Homo sapiens
gcgaattggagctccaccgcggtggcggccgaggtactttttttttttttttttttttttttttttaggaagacttgaaaagggttgtaggtcagaggaaaaaaaaatcagaagggagaaaggatttaataatctttattggcaggaggttcatatttctaacttaaatctatagcccaaatcatttcctcttgctttgtttttaaagatcaagaacttcaatttcccatcctttacatggtgaaggccttcatatatttggggtatgttattaaatcacacctcagccttcagttctggccgaaaataccaatcaatcagtctttttttgtgaattttactttccaaacttttaataatctccatgactttttctttgtgctcctctccatgtattacagagtcttacttagaaaaatccacaagatgatccaacctttattaatggc

SEQ ID NO: 42949 - DNA, 402 bp, Homo sapiens; identical to SEQ ID NO: 34082

SEQ ID NO: 42950 - DNA, 405 bp, Homo sapiens; identical to SEQ ID NO: 34084

SEQ ID NO: 42951 - DNA, 394 bp, Homo sapiens
tacgactcactatagggcgaattggagctccaccgcggtggcggccgcccgggcaggtacagatacatagctgattaggcagatggtttaaaggaggactgcagggtagagaagcaagcagagtgggcgcctctttaggaagtgacacagcctgcatgtgcagtatggccgtgaaggggcagataccatagcacacctaactcaacaggatcttacttgaactgctgtgagttggtcaagtcagggcacttctgctcttcaggctcctctaggtcacacctttgaccaccctacatctgtttcctctttcaggctccagtagtagtcttaaaagtgaagtttatctaaggataagcacatgcctatcttgctcactgctgtgtccccacttttt

SEQ ID NO: 42952 - DNA, 400 bp, Homo sapiens
gactactatagggcgaattggagctccaccgcggtggcggccgaggtactttttttttttttttttttttttctgagtagctctttgtaaattctttattgccaggagtgaaccctaaagtggctcacaagagtgccctatttctttcaattaactacaaggacaaacacattttaaagttgagataagtgaccagtatgatttgccaaaattctaaagcgcactcaccatgaaatggataaaggttacctttggggatttgcactgcatgaattctgtgaaaagcttgttggatattgtgatagagatagagaaatgaagtatattatataagatactatgaggttccctgcctttgcttcacatcccaggcttacaaacgtgccccataaacattccc

SEQ ID NO: 42953 - DNA, 447 bp, Homo sapiens; identical to SEQ ID NO: 34086

SEQ ID NO: 42954 - DNA, 409 bp, Homo sapiens; identical to SEQ ID NO: 34087

SEQ ID NO: 42955 - DNA, 402 bp, Homo sapiens; identical to SEQ ID NO: 34088

SEQ ID NO: 42956 - DNA, 313 bp, Homo sapiens; identical to SEQ ID NO: 34089

SEQ ID NO: 42957 - DNA, 405 bp, Homo sapiens; identical to SEQ ID NO: 34090

SEQ ID NO: 42958 - DNA, 412 bp, Homo sapiens; identical to SEQ ID NO: 34091

SEQ ID NO: 42959 - DNA, 397 bp, Homo sapiens; identical to SEQ ID NO: 34092

SEQ ID NO: 42960 - DNA, 475 bp, Homo sapiens
cactactatagggcgaattggagctccaccgcggtggcggccgcccgggcaggtactaaatgaaggcatgccaatttatcgtagaccatatgaaaagggtcgcctaatcatcgaatttaaggtaaactttcctgagaatggctttctctctcctgataaactgtctttgctggaaaaactcctacccgagaggaaggaagtggaagagactgatgagatggaccaagtagaactggtggactttgatccaaatcaggaaagacggcgccactacaatggagaagcatatgaggatgatgaacatcatcccagaggtggtgttcagtgtcagacctcttaatgggccagtgaataacactcactgctggcatttaatgtgcagtagtgaatgagtgaaggactgtaatcataatatgctcactacttgctcttgtttttgttttaataaactatagtagtgttttaaaaagttaaa

SEQ ID NO: 42961 - DNA, 408 bp, Homo sapiens; identical to SEQ ID NO: 34094

SEQ ID NO: 42962 - DNA, 404 bp, Homo sapiens; identical to SEQ ID NO: 34096

SEQ ID NO: 42963 - DNA, 474 bp, Homo sapiens; identical to SEQ ID NO: 34097

SEQ ID NO: 42964 - DNA, 486 bp, Homo sapiens; identical to SEQ ID NO: 38070

SEQ ID NO: 42965 - DNA, 188 bp, Homo sapiens; identical to SEQ ID NO: 34099
  misc_feature 37, 48, 143, 159: n = A,T,C or G

SEQ ID NO: 42966 - DNA, 407 bp, Homo sapiens; identical to SEQ ID NO: 34100

SEQ ID NO: 42967 - DNA, 404 bp, Homo sapiens; identical to SEQ ID NO: 34101

SEQ ID NO: 42968 - DNA, 505 bp, Homo sapiens
ctactatagggcgaattggagctccaccgcggtggcggccgaggtacccagaaaataagaaagggttccaaaatgaagaatcgctccttttgcaaaccttatggtaacaaatataatatttataaaaagtgaattaggtaatatgttaatggagaaataaacatcattatgaaatgctatcttaaacaaaaaataagagaaaatattagtttaaaaatagaacttatagtcgatttaaaaaagcaagaccaaactcttagctatgcacaagaaagttactttacacattcacaaatataaaaggatgagaaaacatggattatgaaaatatgaaccgaaataaagctatagtagctgtgcaaatttcagacaaaatagacatcagaaaagacttttaggacttaacagggatattacataggataaagttaccagttttttttaaagatgccaaaaaagacttaacaaatatataatagaggaagaataccccattcattgtgat

SEQ ID NO: 42969 - DNA, 458 bp, Homo sapiens; identical to SEQ ID NO: 34104

SEQ ID NO: 42970 - DNA, 395 bp, Homo sapiens; identical to SEQ ID NO: 34105

SEQ ID NO: 42971 - DNA, 386 bp, Homo sapiens; identical to SEQ ID NO: 34106

SEQ ID NO: 42972 - DNA, 395 bp, Homo sapiens; identical to SEQ ID NO: 34107

SEQ ID NO: 42973 - DNA, 380 bp, Homo sapiens; identical to SEQ ID NO: 34108

SEQ ID NO: 42974 - DNA, 375 bp, Homo sapiens; identical to SEQ ID NO: 34109

SEQ ID NO: 42975 - DNA, 408 bp, Homo sapiens; identical to SEQ ID NO: 35554

SEQ ID NO: 42976 - DNA, 385 bp, Homo sapiens; identical to SEQ ID NO: 34111

SEQ ID NO: 42977 - DNA, 378 bp, Homo sapiens; identical to SEQ ID NO: 34112

SEQ ID NO: 42978 - DNA, 383 bp, Homo sapiens; identical to SEQ ID NO: 34113

SEQ ID NO: 42979 - DNA, 397 bp, Homo sapiens; identical to SEQ ID NO: 34114

SEQ ID NO: 42980 - DNA, 368 bp, Homo sapiens; identical to SEQ ID NO: 34115
  misc_feature 105, 123: n = A,T,C or G

SEQ ID NO: 42981 - DNA, 373 bp, Homo sapiens; identical to SEQ ID NO: 34117

SEQ ID NO: 42982 - DNA, 499 bp, Homo sapiens
  misc_feature 341: n = A,T,C or G
ctaaagggaacaaaagctgggtaccgggccccccctcgagagtacttctagaattaattaaggcggggatagcaggtgtaataagactatcgtcttcctacacataggaggctcattctctggacacactatcacctattacattttactgattaacaaataaattggaatttaaaaatatcgatatcaccatgatttaatccagatctgggattatgtagctaaacattgtgatgattattatttaaaaccattatttaataagagtaaaaatatgtgaatctggatatatttaaaaaaagaaatttgatgcccagataatatattaggcactactgatnttttagttaaattgatgcactacacttttgatgtttgaagttacaaacctgtaatttttttgtaaaggaaataattgccaaatacctaggcccattgctgacgattagttctaaaatcttattcctcctcttctcccctcacttttccctacttcctc

SEQ ID NO: 42983 - DNA, 616 bp, Homo sapiens; identical to SEQ ID NO: 34119
  misc_feature 491, 608, 609, 610: n = A,T,C or G

SEQ ID NO: 42984 - DNA, 462 bp, Homo sapiens; identical to SEQ ID NO: 34120

SEQ ID NO: 42985 - DNA, 405 bp, Homo sapiens; identical to SEQ ID NO: 34121

SEQ ID NO: 42986 - DNA, 206 bp, Homo sapiens; identical to SEQ ID NO: 34122

SEQ ID NO: 42987 - DNA, 621 bp, Homo sapiens; identical to SEQ ID NO: 34123

SEQ ID NO: 42988 - DNA, 614 bp, Homo sapiens; identical to SEQ ID NO: 34882
  misc_feature 13: n = A,T,C or G

SEQ ID NO: 42989 - DNA, 392 bp, Homo sapiens; identical to SEQ ID NO: 34126

SEQ ID NO: 42990 - DNA, 409 bp, Homo sapiens; identical to SEQ ID NO: 34127

SEQ ID NO: 42991 - DNA, 404 bp, Homo sapiens; identical to SEQ ID NO: 34128

SEQ ID NO: 42992 - DNA, 413 bp, Homo sapiens; identical to SEQ ID NO: 34129

SEQ ID NO: 42993 - DNA, 409 bp, Homo sapiens; identical to SEQ ID NO: 34130

SEQ ID NO: 42994 - DNA, 398 bp, Homo sapiens; identical to SEQ ID NO: 34131
  misc_feature 228: n = A,T,C or G

SEQ ID NO: 42995 - DNA, 409 bp, Homo sapiens; identical to SEQ ID NO: 34132

SEQ ID NO: 42996 - DNA, 591 bp, Homo sapiens
tactatagggcgaattggagctccaccgcggtggcggccgccatcttgggtcatcgatgagcctcgccctgtgcctggtcccgcttgtgagggaaggacattagaaaatgaattgatgtgttccttaaaggatgggcaggaaaacagatcctgttgtggatatttatttgaacgggattacagattgaaatgaagtcacaaagtgagcattaccaatgagaggaaaacagacgagaaaatcttgatggcttcacaagacatgcaacaaacaaaatggaatactgtgatgacatgaggcagccaagctggggaggagataaccacggggcagagggtcaggattctggccctgctgcctaaactgtgcgttcataaccaaatcatttcatatttctaaccctcaaaacaaagctgttgtaatatctgatctctacggttccttctgggcccaacattctccatatatccagccacactcatttttaatatttagttcccagatctgtacctcggccgctctagaactagtggatcccccgggctgcaggaattcgatatcaagcttatcgataccgtcgacctcgagggggg

SEQ ID NO: 42997 - DNA, 459 bp, Homo sapiens; identical to SEQ ID NO: 34134

SEQ ID NO: 42998 - DNA, 676 bp, Homo sapiens
  misc_feature 337, 347: n = A,T,C or G
actcactatagggcgaattgggccctctagatgcatgctcgagcggccgccagtgtgatggatatctgcagaattcgccctttcgagcggccgcccgggcaggtaccatgagaaattgtagactttactcctatattctctttccaagccctaggattagccatttttccaagaaatgttgcatacattctgctatgaaaggaaccaaaactcaaatcttgattctgggtgtattttttgttaatttgctgtcttttcttgtagaacctctcaggtaatgactctaggaggtatgtgttgtgtattaacccatatatacacacatatataaactatntatttaattnttatacctatattatgctaaacttggaaatatattgacacatctgccctgagttaataccacatgaatgtttattacctaccttctattcctgtccctaacctcgcactccaaccgtgaggaaccccctcctgccacaccccgtctattccctttgtagtccagttccaggatttctgtagagtggaaccagattgtgtatgttctgctcttttgtggaacatcaccagctggggtacctcggccgcgaccacgctaagggcgaattccagcacactggcggccgttactagtggatccgagctcggtaccaagcttggcgtaatcatg

SEQ ID NO: 42999 - DNA, 552 bp, Homo sapiens
cgaattgggctcctctagatgcatgctcgagcggccgccagtgtgatggatatctgcagaattcggcttagcgtggtcgcggccgaggtacttggagtttccttgtagtagtaagtatagagtttgatgataagtaaacgtcccttaacaaaaacctcaaccttattactatcccattaaaaaacagcaaatacttactgagttcttgtaagagctaatgtcattgtaagatttaaaactaagggcttttatcactttgcaaattattttttaaatgcattcatcatttgacagtgttctctcatttcttaaaatgcgagtcatcttccaaaagagttgtttttaactgccctaaacatttttggggaagtatgcagggtttaaatttttaagtataattagttctgaattaaaatatgcacatggaacttgtctggcagactgatgcaatagttaaacaactgcagaattactattaatgtaaacaatccatttgaaagtcaatcagctgctcccattaaaatattatttaaaatacaatacccacagcat

SEQ ID NO: 43000 - DNA, 409 bp, Homo sapiens
ccgcggtggcggccgcccgggcaggtacgcggggtagctgagcagcttctaaataacacagccactcaactgacataccatggattatgtgaactaacttcaacggttcaggaaggagaactttgtgtgttctttcggaataatcattttagcaccatgaccaaatacaagggtcaactgtgtttgttggtaacggaccaggggtttcttactgaagagaaagttgtttgggaaagcctacacaacgtagatggtgatggaaatttctgtgactcataatttcatcttcgacctccttcagatcctgaaactgtatacaaaggacaacaagatcagatagatcaggattatcttatggcattatctctacaacaagaacagcagagccaagagatcaattgggaacaaa

SEQ ID NO: 43001 - DNA, 451 bp, Homo sapiens; identical to SEQ ID NO: 34138

SEQ ID NO: 43002 - DNA, 508 bp, Homo sapiens; identical to SEQ ID NO: 34139

SEQ ID NO: 43003 - DNA, 295 bp, Homo sapiens; identical to SEQ ID NO: 34140

SEQ ID NO: 43004 - DNA, 515 bp, Homo sapiens; identical to SEQ ID NO: 34141
  misc_feature 50, 51, 434: n = A,T,C or G

SEQ ID NO: 43005 - DNA, 565 bp, Homo sapiens; identical to SEQ ID NO: 34142

SEQ ID NO: 43006 - DNA, 530 bp, Homo sapiens; identical to SEQ ID NO: 34143

SEQ ID NO: 43007 - DNA, 495 bp, Homo sapiens; identical to SEQ ID NO: 34144

SEQ ID NO: 43008 - DNA, 614 bp, Homo sapiens
gactcactatagggcgaattgggccctctagatgcatgctcgagcggccgccagtgtgatggatatctgcagaattcggcttagcgtggtcgcggccgaggtacacattcccaactgtgacaagaagggattttataagaaaaagcagtgtcgcccttccaaaggcaggaagcggggcttctgctggtgtgtggataagtatgggcagcctctcccaggctacaccaccaaggggaaggaggacgtgcactgctacagcatgcagagcaagtagacgcctgccgcaaggttaatgtggagctcaaatatgccttattttgcacaaaagactgccaaggacatgaccagcagctggctacagcctcgatttatatttctgtttgtggtgaactgattttttttaaaccaaagtttagaaagaggtttttgaaatgcctatggtttctttgaatggtaaacttgagcatcttttcactttccagtagtcagcaaagagcagtttgaattttcttgtcgcttcctatcaaaatattcagagactcgagcacagcacccagacttcatgcgcccgtggaatgctcaccacatgttggtcgaagcggccgaccactgac

SEQ ID NO: 43009 - DNA, 612 bp, Homo sapiens; identical to SEQ ID NO: 34146
  misc_feature 438, 439, 440, 462: n = A,T,C or G

SEQ ID NO: 43010 - DNA, 616 bp, Homo sapiens; identical to SEQ ID NO: 34147

SEQ ID NO: 43011 - DNA, 501 bp, Homo sapiens; identical to SEQ ID NO: 34148

SEQ ID NO: 43012 - DNA, 439 bp, Homo sapiens; identical to SEQ ID NO: 34149
  misc_feature 281, 282, 283, 287, 288, 289, 290, 294, 295: n = A,T,C or G

SEQ ID NO: 43013 - DNA, 501 bp, Homo sapiens
  misc_feature 416: n = A,T,C or G
cgtgggaaggcaatccagagcccatatgacattatgcagggtcagggatccgggttctttctatattgttcctccccattctcaacctgtagcttttttttttttttttggtagagatggggtcattgctatgttgcccaggctggccttgaagtccagggcttaagtgatcctcctgccttggcctcccaaagtgctggtgttacaggtgtgagccaccacacctggccaacatgtggctttcagttcttacttgaagacagctgctctagctagaaacttcctatcggcatctgagccagctggtagagggcattacctcccccacccccaagaacacttcttggaagttacacacaatacataaacttcaatttaaacagttgcttggtcccactagccatgaagctggaggngacgtaatattcatctgggttgtcatgggccaaattaacattttggatttctgtaggaagatgagaattggataatgggcacctt

SEQ ID NO: 43014 - DNA, 250 bp, Homo sapiens; identical to SEQ ID NO: 34151

SEQ ID NO: 43015 - DNA, 470 bp, Homo sapiens; identical to SEQ ID NO: 34152
  misc_feature 317, 375, 429: n = A,T,C or G

SEQ ID NO: 43016 - DNA, 237 bp, Homo sapiens; identical to SEQ ID NO: 34153

SEQ ID NO: 43017 - DNA, 494 bp, Homo sapiens; identical to SEQ ID NO: 34154

SEQ ID NO: 43018 - DNA, 317 bp, Homo sapiens; identical to SEQ ID NO: 34155

SEQ ID NO: 43019 - DNA, 513 bp, Homo sapiens; identical to SEQ ID NO: 34156

SEQ ID NO: 43020 - DNA, 387 bp, Homo sapiens
tccaccgcggtggcggccgcccgggccaggacttttttttttttttttttttttttgttagggggtcttgtcatgttgcccaggctgctcttgaactcctgggctcaagcaatcctcctgcctcccaaagtgctgggattacaggcataagccattgtgcctggccctcttggtaattttgtattactgacccatactctgctccttggctataaattcccacttgcttatgctgatatttggagttaagtccattcaccctctaccactgcaaaatcccattacatttgtctatatacctgtcataatggccctgaataaagtcttccttactgtgctttaacaattctcattgaataatttttttaaacatgtatagcttaatta

SEQ ID NO: 43021 - DNA, 436 bp, Homo sapiens; identical to SEQ ID NO: 34158

SEQ ID NO: 43022 - DNA, 410 bp, Homo sapiens; identical to SEQ ID NO: 30418

SEQ ID NO: 43023 - DNA, 379 bp, Homo sapiens; identical to SEQ ID NO: 34160

SEQ ID NO: 43024 - DNA, 513 bp, Homo sapiens; identical to SEQ ID NO: 34161

SEQ ID NO: 43025 - DNA, 358 bp, Homo sapiens; identical to SEQ ID NO: 34162

SEQ ID NO: 43026 - DNA, 283 bp, Homo sapiens; identical to SEQ ID NO: 34163

SEQ ID NO: 43027 - DNA, 493 bp, Homo sapiens
  misc_feature 181, 182, 235, 259, 260, 286, 293, 302, 303, 336, 337, 356,357, 388, 389, 414, 421, 461, 462, 463, 482: n = A,T,C or G
gactcactatagggcgaattgggccctctagatgcatgctcgagcggccgccagtgtgatggatatctgcagaattcgccctttcgagcggccgcccgggcaggtactttttttttttttttaacctttttgtttaacttctctcttcactgcatcccaatccatctacaggcatgcacanncttattaggaaagggaggtttgaggtaacaacagagacctttcactatatttntgctttgaccagaagggaaagagnngaggagtttctattaaaatctgtcancttgagntgatgtcanntttaagtccctattttagggagaataaaaacanngctttggggacctggttannaagtcccccagaaactaccaataaagaacannacttttgttttaacctcttaatcanctttgtnaattttgacctcaatccttttctggaaaccatttttgctnnnataaatatcaaagtgtaanaaaaaaaaaaa

SEQ ID NO: 43028 - DNA, 459 bp, Homo sapiens; identical to SEQ ID NO: 34165

SEQ ID NO: 43029 - DNA, 214 bp, Homo sapiens; identical to SEQ ID NO: 34166

SEQ ID NO: 43030 - DNA, 451 bp, Homo sapiens; identical to SEQ ID NO: 34167

SEQ ID NO: 43031 - DNA, 478 bp, Homo sapiens; identical to SEQ ID NO: 34169

SEQ ID NO: 43032 - DNA, 481 bp, Homo sapiens; identical to SEQ ID NO: 42113

SEQ ID NO: 43033 - DNA, 464 bp, Homo sapiens; identical to SEQ ID NO: 34171

SEQ ID NO: 43034 - DNA, 535 bp, Homo sapiens; identical to SEQ ID NO: 34172

SEQ ID NO: 43035 - DNA, 572 bp, Homo sapiens; identical to SEQ ID NO: 30597

SEQ ID NO: 43036 - DNA, 461 bp, Homo sapiens; identical to SEQ ID NO: 34174
  misc_feature 337, 349: n = A,T,C or G

SEQ ID NO: 43037 - DNA, 462 bp, Homo sapiens; identical to SEQ ID NO: 34175

SEQ ID NO: 43038 - DNA, 286 bp, Homo sapiens; identical to SEQ ID NO: 34176

SEQ ID NO: 43039 - DNA, 168 bp, Homo sapiens; identical to SEQ ID NO: 34177

SEQ ID NO: 43040 - DNA, 437 bp, Homo sapiens; identical to SEQ ID NO: 34178

SEQ ID NO: 43041 - DNA, 432 bp, Homo sapiens; identical to SEQ ID NO: 34179

SEQ ID NO: 43042 - DNA, 375 bp, Homo sapiens; identical to SEQ ID NO: 34180

SEQ ID NO: 43043 - DNA, 118 bp, Homo sapiens; identical to SEQ ID NO: 34181

SEQ ID NO: 43044 - DNA, 603 bp, Homo sapiens; identical to SEQ ID NO: 34062
  misc_feature 119, 133: n = A,T,C or G

SEQ ID NO: 43045 - DNA, 401 bp, Homo sapiens; identical to SEQ ID NO: 34183

SEQ ID NO: 43046 - DNA, 414 bp, Homo sapiens; identical to SEQ ID NO: 34184

SEQ ID NO: 43047 - DNA, 430 bp, Homo sapiens; identical to SEQ ID NO: 34185

SEQ ID NO: 43048 - DNA, 163 bp, Homo sapiens; identical to SEQ ID NO: 34186

SEQ ID NO: 43049 - DNA, 363 bp, Homo sapiens; identical to SEQ ID NO: 34187

SEQ ID NO: 43050 - DNA, 448 bp, Homo sapiens
tatagggagtcgaccccgcgtccgggcctatgagcctgtgtgggccattggtactggcaagactgcaacaccccaacaggcccaggaagtacacgagaagctccgaggatggctgaagtccaacgtctctgatgcggtggctcagagcacccgtatcatttatggaggctctgtgactggggcaacctgcaaggagctggccagccagcctgatgtggatggcttccttgtgggtggtgcttccctcaagcccgaattcgtggacatcatcaatgccaaacaatgagccccatccatcttccctacccttcctgccaagccagggactaagcagcccagaagcccagtaactgccctttccctgcatatgcttctgatggtgtcatctgctccttcctgtggcctcatccaaactgtatcttcctttactgtttatatcttcaccctg

SEQ ID NO: 43051 - DNA, 487 bp, Homo sapiens; identical to SEQ ID NO: 34189

SEQ ID NO: 43052 - DNA, 634 bp, Homo sapiens
ggcgaattggagctccaccgcggtggcggccgaggtactattattttctaacaggaatttgctatttcaaatatattatctgagatgtctatatatttatattttgagatactatacaaatttgagccaatgacatagaattttacaaatcaagaagcttattctggggccatttcttttgacgttttctctaaactactaaagaggcattaatgatacataaattacattatctacatttacagcatttaaaatgtgttcagcatgaaatattagctacagggaaagctaaataaattaaacatggaataaagatttgtccttaaaaataatctacaagaagactttgatatttgtttttcacaagtgaagcattcttataaagtgtcataacctttttggggaaactatgggaaaaaatggagaaactctgaagggttttaagtatcttacctgaagctacagactccataacctctctttacagggagctcctgcagcccctacagaaatgagtggctgagattcttgattgcatagcagagcttctcatctaaaccctttccctttttagtgtctgtgtatcagtataaaagttctataaactgtagttacttattttaatcccaaagca

SEQ ID NO: 43053 - DNA, 467 bp, Homo sapiens; identical to SEQ ID NO: 34191

SEQ ID NO: 43054 - DNA, 473 bp, Homo sapiens
tactatagggcgaattggatctccaccgcggtggcggccgcccgggcaggttcagtggcacgatctcggctcactgcttcctgcgcctcctgggttcaggcgattctcttgcctcagcctcctgagtagctgggattacaggcacccatcaccatgtccagctaatttttgtatttttagtagagacagggttttcccatgttggccaggctggtctcgatctcctgacctcaaatgatccgcccacctcggcctcccaaagtgctgggatgacagttgtgagccaccacactcagcctgctctttctaatatttgaaacttgttagacaatttgctacccatctaatgtgatattttaggaatccaatatgcatggcttattatttcttaaaaaaaatattcttttacctgtcacctgaatttaatagtgccttttatgttacacaacttagcactttccagaaacaaaaac

SEQ ID NO: 43055 - DNA, 472 bp, Homo sapiens; identical to SEQ ID NO: 34193

SEQ ID NO: 43056 - DNA, 605 bp, Homo sapiens; identical to SEQ ID NO: 41762
  misc_feature 376: n = A,T,C or G

SEQ ID NO: 43057 - DNA, 239 bp, Homo sapiens; identical to SEQ ID NO: 34195

SEQ ID NO: 43058 - DNA, 411 bp, Homo sapiens; identical to SEQ ID NO: 34196

SEQ ID NO: 43059 - DNA, 466 bp, Homo sapiens
ggcgaattgtagctccaccgcggtggcggccgaggtactcttttcctttatttctttgactggccgactcttagggaaaatagaaagaacctatgttgaaatattgggggcgggttcccccgatacttttggacatatatccagtagtgggactgctggatcatatagaagttctatttttagttttctcacaaacctccatactgttttccataatggctaaactaatttacattcctaccaacagtatatataagtccctcttctctgcgtctttgccagcatttgttattttttgtctttttgataatagccagtctaactgaagtgtcatggagaaactccagctgggcccagagattctgcagcgggaaaatccaaggcttatttatgccaggctgagtggatttggccagtcaggaagcttctgccggttagctggccacgatatcaactatttggcttt

SEQ ID NO: 43060 - DNA, 405 bp, Homo sapiens; identical to SEQ ID NO: 34198

SEQ ID NO: 43061 - DNA, 483 bp, Homo sapiens; identical to SEQ ID NO: 34199

SEQ ID NO: 43062 - DNA, 472 bp, Homo sapiens; identical to SEQ ID NO: 34193

SEQ ID NO: 43063 - DNA, 323 bp, Homo sapiens; identical to SEQ ID NO: 34201

SEQ ID NO: 43064 - DNA, 410 bp, Homo sapiens; identical to SEQ ID NO: 34202

SEQ ID NO: 43065 - DNA, 341 bp, Homo sapiens; identical to SEQ ID NO: 34203

SEQ ID NO: 43066 - DNA, 366 bp, Homo sapiens
gtaatacgactactatagggcgaattggagctccaccgcggtggcggccgaggtacttttttttttttttttttttttgagacggactcttgctcttttgcccagactggagtgcagtggcgcaatctcgggtcactgcaagctctgcctcctgggttcatgccatcttcctgcctcagcctcctgagtagctgggaccacaggagtgcacaattacactcggctaattttttgtagttttggtggagacagggtttcaccatgttgcccaggctggtcttgaattcctgagctcaagtgatccgcctgccttggcctcccaaagtgctgggattgcaggcgtgagccaccacgcccgcctggcct

SEQ ID NO: 43067 - DNA, 495 bp, Homo sapiens
ggcgaattggagctccaccgcggtggcggccgcccgggcaggtactccatgttggttggtagtattttaaatctgaagcattttcagaggctaaggcaattcagactgcacagctgtcaactcaggagtcccattaaactgactctaaaaattcctaaaagaaggcatgatttattataagcaaatggctaacctggcttttttggtaatagaattttaaatgaaaataaaattatacaagatacacattgtttggatttttaaaaactctattaaatgtttaagtggttgtgaatatgaggaataattaaatgttaaccccagctgattagtgaacatataagaaaatggggggaactgatcccaaaagatcttctcttctaaggagaacttcacttgaggggcaaacactagaagatacaattgttattgtaaaacaaacactaatgagagtctgtcaaataattttaaaagaaaatagaacgcatttgcaac

SEQ ID NO: 43068 - DNA, 451 bp, Homo sapiens; identical to SEQ ID NO: 34206

SEQ ID NO: 43069 - DNA, 377 bp, Homo sapiens; identical to SEQ ID NO: 34207

SEQ ID NO: 43070 - DNA, 593 bp, Homo sapiens
ccccccctcgagagtcttctagaattaattaacgcgggatgatttttatgattttttccctctaattatagaaagttaaataatgtatttaccatgaaaaatgtttctaatattaaatagaacatatcagttgcaaagttcctaatgtgtatttttaaagcacatatctgaataaattgcctagatagaaaaaaaattatcacgagtaaaatttagtgttcaaaacattgagacactcttcacctattgtatgaccaaataaaggttatgctgcttgtttttcttttgtgcctttgtttacccctaattgagataagcagtttgacttactagattacaactttggcagttcaaagtctttgttgaagactttgaggaaaaagatttggaaaaattgttgactttcggccgggcatgatggctcacgcctgtaatcccagcactttgggaggccgaggtggcggatcacctgaggtcaggagttcgagaccagcctggccaacatggtgaaatcccgtctctactaaaaaaaaaaaaaaaagcggccgccaccgcggtggagctccaattcgccctatagtgagtcgtattac

SEQ ID NO: 43071 - DNA, 470 bp, Homo sapiens
agggcgaattggagctccaccgcggtggcggccgcccgggcaggtacttttttttttttttttttttttgtcgagattatggtatcactatgttgccctggctgatctcaaatgtttgacctcaagggatctttcttccacagcctccttaagtgctaggattatatgcatgatacaccatgcctattgtagagtattacattattttcaaagtcttattctaagagccatttattgcctttggcctaaataactcaatataatatctctgaaactttttttgacaaattttggggcatgatgatgagagaagggggtttgaaactttctaataagagttaacttagagccatttaagaaaggaaaaaacacaaattatcagaaaaacaaaagtaagatcaagtgcaaaaggttctgtggcaaagatgatgagaataaagaatatatggtttgggactcatgggggcttt

SEQ ID NO: 43072 - DNA, 318 bp, Homo sapiens; identical to SEQ ID NO: 34210

SEQ ID NO: 43073 - DNA, 415 bp, Homo sapiens; identical to SEQ ID NO: 34211

SEQ ID NO: 43074 - DNA, 485 bp, Homo sapiens; identical to SEQ ID NO: 34212

SEQ ID NO: 43075 - DNA, 395 bp, Homo sapiens; identical to SEQ ID NO: 34213

SEQ ID NO: 43076 - DNA, 490 bp, Homo sapiens; identical to SEQ ID NO: 35013

SEQ ID NO: 43077 - DNA, 476 bp, Homo sapiens; identical to SEQ ID NO: 34215

SEQ ID NO: 43078 - DNA, 474 bp, Homo sapiens; identical to SEQ ID NO: 34216

SEQ ID NO: 43079 - DNA, 492 bp, Homo sapiens; identical to SEQ ID NO: 34217

SEQ ID NO: 43080 - DNA, 544 bp, Homo sapiens; identical to SEQ ID NO: 34058
  misc_feature 130: n = A,T,C or G

SEQ ID NO: 43081 - DNA, 448 bp, Homo sapiens; identical to SEQ ID NO: 34219

SEQ ID NO: 43082 - DNA, 417 bp, Homo sapiens; identical to SEQ ID NO: 34220

SEQ ID NO: 43083 - DNA, 504 bp, Homo sapiens; identical to SEQ ID NO: 34221

SEQ ID NO: 43084 - DNA, 504 bp, Homo sapiens; identical to SEQ ID NO: 34221

SEQ ID NO: 43085 - DNA, 442 bp, Homo sapiens; identical to SEQ ID NO: 34223

SEQ ID NO: 43086 - DNA, 473 bp, Homo sapiens; identical to SEQ ID NO: 34224

SEQ ID NO: 43087 - DNA, 416 bp, Homo sapiens; identical to SEQ ID NO: 34225

SEQ ID NO: 43088 - DNA, 636 bp, Homo sapiens
cccccctcgagagtcttctagaattaattaacgcggggggcgaagttctgcgctggtcggcggagtagcaagtggccatggggagcctcagcggtctgcgcctggcagcaggaagctgttttaggttatgtgaaagagatgtttcctcatctctaaggcttaccagaagctctgatttgaagagaataaatggattttgcacaaaaccacaggaaagtcccggagctccatcccgcacttacaacagagtgcctttacacaaacctacggattggcagaaaaagatcctcatatggtcaggtcgcttcaaaaaggaagatgaaatcccagagactgtctcgttggagatgcttgatgctgcaaagaacaagatgcgagtgaagatcagctatctaatgattgccctgacggtggtaggatgcatcttcatggttattgagggcaagaaggctgcccaaagacacgagactttaacaagcttgaacttagaaaagaaagctcgtctgaaagaggaagcagctatgaaggccaaaacagagtagcagaggtatccgtgttggctggattttgaaaatccaggaattatgttataacgtgcctgtattaaaaaggatgtggtatgaggatccatttcat

SEQ ID NO: 43089 - DNA, 384 bp, Homo sapiens; identical to SEQ ID NO: 34227

SEQ ID NO: 43090 - DNA, 503 bp, Homo sapiens; identical to SEQ ID NO: 34228

SEQ ID NO: 43091 - DNA, 559 bp, Homo sapiens; identical to SEQ ID NO: 34615

SEQ ID NO: 43092 - DNA, 415 bp, Homo sapiens; identical to SEQ ID NO: 34230

SEQ ID NO: 43093 - DNA, 482 bp, Homo sapiens; identical to SEQ ID NO: 34231

SEQ ID NO: 43094 - DNA, 440 bp, Homo sapiens; identical to SEQ ID NO: 34232

SEQ ID NO: 43095 - DNA, 600 bp, Homo sapiens
cccccctcgagagtcttctagaattaattaacgcgggactgaactgattgggagaagccaccgctaccaccgaaaagagaacctggagtactgtatcatggtcattggggtccccaacgtgggcaagtcctccctcatcaactccctccggaggcagcacctcaggaaaggtactggcgcgtgcggctgatcacctcaggaaaggtactggcgcgtgtggctgatgtgctgatgccaccatctttcttggaggggacgtgcccgaggagcactgccagtcttctgctgaccccgcagccccagagcacatcttgtctcgttcagtccagttcacaggagggctgaacagtgggaccaggtcgttctgtgaatttcacacttaatttttctctcttttaaaatctttaacatgaagatggcttttctaaactttgatatttgttcatttatttaaatccctttggccgggtgcatggctcacgcctgtaatcccagcactttgagaggccgaggcgggcggatcatgaggtcaggagattgagaccattcttgctgaaacggtgaaaccccgtctctactaaaatacgaaaaattaggtgg

SEQ ID NO: 43096 - DNA, 470 bp, Homo sapiens
cggatttcactcgtacggccgccagtgtgctggaattcggctttcgagcggccgcccgggcaggtacttggtattgtattttttataaataagatttttatgtaaagcttagaatttgatttacagggaccttgctgcagtaaataccatctcaattttgtgccactggttcagctgttagcacagtaaaaaaatcatttgtatcaaaggggcaaatgctttattaaggtagtaaaagggaacattacttctgcttttaggaagttactgcaagcacaagcatttgtgcttttaagcaaattaaagtagtaaaagaaaaacttaagtgaaacctttgccatcttcatgttttataatataaagcttacccaacaccagttaagccatggttaacctaaatgcctcatgccccagttcagcaaaaggaggaaaatgtgcctgcctcacagtcatcaatctttttaaatctt

SEQ ID NO: 43097 - DNA, 515 bp, Homo sapiens; identical to SEQ ID NO: 38742

SEQ ID NO: 43098 - DNA, 419 bp, Homo sapiens
actactatagggcgaattggagctccaccgcggtggcggccgcccgggcaggtaccagggcagcaacccaatcagtgacatttgggctatccacgcgctgcggatcgtggctaagtatctgaagagggccgtcaacagcactgacaaatgaagaagaagaatgagtctcagggcaccttcctggagtggccctcgccatccagggaccagcgcgttgcctcccccggcgcttttacatcacatgagcagctgacagcgtatttattatgcctttgctgaaacagttgatgagaaatatgtttcccttcagttttcatttagaagacaaggcggtcgtttgaataacttgcctgatttttcttcctaccgagtagcttttctttttttttcaccatatctttccctaaggcagctcctta

SEQ ID NO: 43099 - DNA, 401 bp, Homo sapiens; identical to SEQ ID NO: 34237

SEQ ID NO: 43100 - DNA, 458 bp, Homo sapiens; identical to SEQ ID NO: 34238

SEQ ID NO: 43101 - DNA, 369 bp, Homo sapiens; identical to SEQ ID NO: 34239

SEQ ID NO: 43102 - DNA, 162 bp, Homo sapiens; identical to SEQ ID NO: 34240

SEQ ID NO: 43103 - DNA, 524 bp, Homo sapiens
tccaccgcggtggcggccgaggtacacccagtggctcatatttaacttcccccagcttcccaattcaaactggggggaaaaaactaaatcattgggagttacttgccaacttggaagttgatatttctttactttttccattctaagactttaagttctctggcatgagtttatctgcaatcataaactaaacaattacctaaacccaccccaccaatcccaaccgtaacaggccactgccaactaattgccaatatttgcccctcccctttaataaaacttttaagaagtcacattattggaaaacttaacttcaacatttggcctactcaagctcttctgaagttctcctgagatgactgaatatgaaccaaagctgcactgtgctgtacctgcccgggcggccgctctagaactagtggatcccccgggctgcaggaattcgatatcaagcttatcgataccgtcgacctcgagggggggcccggtacccagcttttgttccctttagtgagggttaattg

SEQ ID NO: 43104 - DNA, 259 bp, Homo sapiens; identical to SEQ ID NO: 34242

SEQ ID NO: 43105 - DNA, 208 bp, Homo sapiens; identical to SEQ ID NO: 34243

SEQ ID NO: 43106 - DNA, 488 bp, Homo sapiens
tacaggttattagaatagggaagggacaccttgggcccaggagtgagtgtttcttcttttacaggtgtaactaaaaaagctagttggtctaacttgtgtgtctttgtcctataagcctctgcaggtgtgcgagcaggattgctctgcaacaaaagcctccacccagccacatcttgggaaaagaatggccacttcttggggcacagtctttttcatgctggtggtatcctgtgtttgcagcgctgtctcccacaggaaccagcagacttggtttgagggtatcttcctgtcttccatgtgccccatcaatgtcagcgccagcaccttgtatggaattatgtttgatgcagggagcactggaactcgaattcatgtttacacctttgtgcagaaaatgccaggacagcttccaattctagaaggggaagtttttgattctgtgaagccaggactttctgcttttgtagatcaacctaagcagggtgctg

SEQ ID NO: 43107 - DNA, 419 bp, Homo sapiens; identical to SEQ ID NO: 34245

SEQ ID NO: 43108 - DNA, 403 bp, Homo sapiens; identical to SEQ ID NO: 34246

SEQ ID NO: 43109 - DNA, 243 bp, Homo sapiens; identical to SEQ ID NO: 34247

SEQ ID NO: 43110 - DNA, 469 bp, Homo sapiens; identical to SEQ ID NO: 34248

SEQ ID NO: 43111 - DNA, 586 bp, Homo sapiens
cgcgcgtaatacgactcactatagggcgaattggagctccaccgcggtggcggccgccatcttgggtcatcgatgagcctcgccctgtgcctggtcccgcttgtgagggaaggacattagaaaatgaattgatgtgttccttaaaggatgggcaggaaaacagatcctgttgtggatatttatttgaacggattacagatttgaaatgaagtcacaaagtgagcattaccaatgagaggaaaacagacgagaaaatcttgatggcttcacaagacatgcaacaaacaaaatggaatactgtgatgacatgaggcagccaagctggggaggagataaccacggggcagagggtcaggattctggccctgctgcctaaactgtgcgttcataaccaaatcatttcatatttctaaccctcaaaacaaagctgttgtaatatctgatctctacggttccttctgggcccaacattctccatatatccagccacactcatttttaatatttagttcccagatctgtacctcggccgctctagaactagtggatcccccgggctgcaggaattcgatatcaagcttatcga

SEQ ID NO: 43112 - DNA, 578 bp, Homo sapiens
ctcactatagggcgaattggagctccaccgcggtggcggccgaggtacccacacggtttaagcaaactaaaagaacactgacactttctcagagaacagggatgggaactttctatctgcccattagtatctaccccaagctacgaagacttccattcctcttattaagcattcagcaactacatttagtgcctactatgccagtgatgcaagaatggataagacagtccctacactcaaggataacgcctctagtaggtgagagacaaaccgattaattctgcataagggataagtgctgtatgcgggaagcaatccaatgagggctctgaggatggcaaaggaagggttcctggaggatttacatttaactggtgccttgaaaggtgtgtagaagttggcaagatcaaaagggagtagagtccaggtggagaagagaaaagagcagggcaggctggatggcatggctcacacctgtaatcccagcactttgggaggccatggagggaggattgaggccaggagtttgagaccagcctgggtgacattaaaagaccctgtctcaaagaaaacgaaag

SEQ ID NO: 43113 - DNA, 187 bp, Homo sapiens; identical to SEQ ID NO: 34251

SEQ ID NO: 43114 - DNA, 266 bp, Homo sapiens; identical to SEQ ID NO: 34252

SEQ ID NO: 43115 - DNA, 460 bp, Homo sapiens; identical to SEQ ID NO: 34253

SEQ ID NO: 43116 - DNA, 561 bp, Homo sapiens
  misc_feature 31: n = A,T,C or G
caccgcggtggcggccgtagtacatactatnggcctcccactgtgtcgcacgagcatctcaaactccacatgtctcaaactaaactcaccatcacatcactctctatcctttcaaaattgctctctcttgtttgcctcattcagtgaacagagctacaattcactgtttgccagctcagaaaccttgctttcctctttgactcccctcaactcttccctgtcctagcagttaattgccaaatcttgctttcacttctttatgacttttggagtccctatactttttttcagtttcatggtccagattacttaaatgagtgatgtttctgcttctagtcttctcccccttccatttcaatctgttcttcacattgaagcttagattagttttctaaaatgcaaatgtatcatataaacccctacctttaatacctttagttgttagtcactgaaatctcaactctacctccattaaaagatgctactaagggccgggcgcagtggctcacaccgtaattccagcactttgagagacctaggagggtggatcacctaaggtca

SEQ ID NO: 43117 - DNA, 425 bp, Homo sapiens
actactatagggcaattggagctcaccgcggtggcggccgcccgggcaggtactttttttttttttttttttttttgtatttgggagaaggggtcagggagcaccttacctctagtggacaagggccctgagctttacacagcccttcgtatttattagggcaaaaaaaataggagggtgggggggtggaagaaggggtcggctgctcagttcagagtaggcttgcaagactgcattctctagatgtcgcagtaaataacctcggtgccagggagtgattgcctccagcaaaccttatgttggcaggagcagtcctgagtttgctcacatcctgtattcatgataaacagtttgctgtttgatcatatagcctccagcagaatgctgagttggtcacgtcccacaggcctttggctccctgcata

SEQ ID NO: 43118 - DNA, 420 bp, Homo sapiens
gcgtatacgactcactatagggcgaattggagctccaccgcggtggcggccgcccgggcaggtacccaatgctgatttgtcatctctctagattttactttttcatattgaaattctttttttagtctattctcttgtagcttttgttacatccaatgatcatttgcctctctccaggcactaccaaactcattactgtggatagtttctgcctttacaggcttagaattgacaaattgagagacacattttttttcaattctcaaaacaactagactctttccagcagatttgctaaggcacactagaagaaatgtaaaaatctcacattcttgttctagttaatacatgggagaatattactaatacatacatttgttttctacatttgtggttgccttatacatctccttcacgttt

SEQ ID NO: 43119 - DNA, 452 bp, Homo sapiens
ctccccgggggcggcgccggcggtccaactaactgacagccttcataatatgaaacattaattaacaaggacccgttagggcttcaatgatgctgagtctggaaaaggggaggagacccttgggaggactccaggcagctgtgctcccagggctcatgttctctactggattagggatagtcacctctgaaatctccaccctgatgattggagtgaaacggagtgaacatgagcccagctgagagaggagcaggaatgtgtgaaaaacagctgctctccttgtcccagctttgtgattgagccctctgtcttgctctctctgccttccctgtgtctttcttctcttaccagagcatctgtttgcagaggtaacattaccttccccagccacaggtatgtggaatacggtgaggaaaaaaaaattaaaaaaaatgcaagctgtcaggatgctt

SEQ ID NO: 43120 - DNA, 357 bp, Homo sapiens; identical to SEQ ID NO: 34258

SEQ ID NO: 43121 - DNA, 530 bp, Homo sapiens; identical to SEQ ID NO: 38812

SEQ ID NO: 43122 - DNA, 572 bp, Homo sapiens; identical to SEQ ID NO: 30597

SEQ ID NO: 43123 - DNA, 440 bp, Homo sapiens; identical to SEQ ID NO: 34261

SEQ ID NO: 43124 - DNA, 478 bp, Homo sapiens; identical to SEQ ID NO: 34262

SEQ ID NO: 43125 - DNA, 335 bp, Homo sapiens; identical to SEQ ID NO: 34263

SEQ ID NO: 43126 - DNA, 572 bp, Homo sapiens; identical to SEQ ID NO: 30945
  misc_feature 121: n = A,T,C or G

SEQ ID NO: 43127 - DNA, 332 bp, Homo sapiens; identical to SEQ ID NO: 34265

SEQ ID NO: 43128 - DNA, 320 bp, Homo sapiens; identical to SEQ ID NO: 34266

SEQ ID NO: 43129 - DNA, 427 bp, Homo sapiens; identical to SEQ ID NO: 34267

SEQ ID NO: 43130 - DNA, 335 bp, Homo sapiens; identical to SEQ ID NO: 34263

SEQ ID NO: 43131 - DNA, 390 bp, Homo sapiens; identical to SEQ ID NO: 34269

SEQ ID NO: 43132 - DNA, 519 bp, Homo sapiens; identical to SEQ ID NO: 32483

SEQ ID NO: 43133 - DNA, 401 bp, Homo sapiens; identical to SEQ ID NO: 38527

SEQ ID NO: 43134 - DNA, 372 bp, Homo sapiens; identical to SEQ ID NO: 34272

SEQ ID NO: 43135 - DNA, 333 bp, Homo sapiens; identical to SEQ ID NO: 34273

SEQ ID NO: 43136 - DNA, 376 bp, Homo sapiens; identical to SEQ ID NO: 36314

SEQ ID NO: 43137 - DNA, 373 bp, Homo sapiens; identical to SEQ ID NO: 34275

SEQ ID NO: 43138 - DNA, 430 bp, Homo sapiens; identical to SEQ ID NO: 32570

SEQ ID NO: 43139 - DNA, 393 bp, Homo sapiens; identical to SEQ ID NO: 34277

SEQ ID NO: 43140 - DNA, 324 bp, Homo sapiens; identical to SEQ ID NO: 34278

SEQ ID NO: 43141 - DNA, 393 bp, Homo sapiens
ctactcatctagtacgggcgagattggagctccaccgcggtggcggccgaggtacagttgcctttctcattgactatgctgttggtggggaaaactgctttctcatgaggggaagggttagatttcatagagatgctctgagctaatcacataaacaagagggtttgacctggcagcctctgaggcagtcaaggaggtcaagaaatcctttcagctaaaggcctagtcaggtgggactagttgccaagatcctctctgcagaactgcccaaacgtagctctctttgaccaggaagcccggaagtcagaccatcttctcaggccctgccaaattcccatcctcagtcctgtggcctgatgcgggaacattttatccaagcaaaccactggcttt

SEQ ID NO: 43142 - DNA, 580 bp, Homo sapiens
ctccaccgcggtggcggccgcccgggcaggtacaagcgattctcctgtcccagcctcccaagtagctgggattacaggcatgtgctaccacgcctggctgattttttttgtatttagtagggatttcaccatgttagtcaggctggtcttgaactcctgaccttaggtgatccatctgcttcggcctcccaaagtgctgggattataggcgtgcagcctaattttgtatttgttgtagagatggggttttaccgtgttgcccaggctggtctttaactcctgggctcaaacaatctgcctgcctcagcctcccaagggattacaggcatgagcaactgcccagcccaggattattgtatgtatttttgctaggggattccctggaatgctgcttagttcaagatatttccatttcctctgaagaagctagggtgtacctcggccgctctagaactagtggatcccccgggctgcaggaattcgatatcaagcttatcgataccgtcgacctcgagggggggcccggtacccagcttttgttccctttagtgagggttaattgcgcgcttggcgtaatcat

SEQ ID NO: 43143 - DNA, 465 bp, Homo sapiens
gctccaccgcggtggcggccgaggtacaatagcaaaaatcaaagagcacagactgttttttcaagaacagaaaaatctctaatgctgaaagatatagtagaaagcagatttctttggggacattaatcaattagtttataattcattatgaagatttctcttttttattccggggagagtctgctacatttgaagttaatgttccattcacaccattttctgcaaaaagaaaagaatccatgttactctcttttataaataaatgcaagttataatctttatatgtaaagataccttcagaaaagaaaatgtaaaatccaattcactcaggtgaaatttacttaccagtatttaaccaatcacaaaacctggtaacatttttaacacaatgaactgaaagtagcaaattaaaagaaaactactattaaaagcagaaaaaagtgacagcaccgaaaacttttaagt

SEQ ID NO: 43144 - DNA, 379 bp, Homo sapiens; identical to SEQ ID NO: 34282
  misc_feature 197, 198, 266, 323, 332, 333: n = A,T,C or G

SEQ ID NO: 43145 - DNA, 416 bp, Homo sapiens; identical to SEQ ID NO: 34283
  misc_feature 190, 380: n = A,T,C or G

SEQ ID NO: 43146 - DNA, 647 bp, Homo sapiens; identical to SEQ ID NO: 34284

SEQ ID NO: 43147 - DNA, 558 bp, Homo sapiens; identical to SEQ ID NO: 34285

SEQ ID NO: 43148 - DNA, 532 bp, Homo sapiens; identical to SEQ ID NO: 34286

SEQ ID NO: 43149 - DNA, 464 bp, Homo sapiens; identical to SEQ ID NO: 34287

SEQ ID NO: 43150 - DNA, 595 bp, Homo sapiens; identical to SEQ ID NO: 34288

SEQ ID NO: 43151 - DNA, 475 bp, Homo sapiens
actatagggcgaattggagctccaccgcggtggcggccgggcgcagtggctcacacctgtaatcccagcactttgtaaggccgaggtgggcggatcacaaggtcaggagttcgagaccaacctgaccaacatggtgaaaccctgtctctactaaaaatacacaaaaaaattggccgggcatggtggcacgcgcctgtaatcccagctactcagaaggctgaggcaggagaatcacttgaacccgggaggcagaggttgcagtgagctgagatcatgccgctgcacttcagcctgggggacagagagagactctgtctcaaaaaaaagaaaaaaagatgaggaaataatcaatcttcttctgatcaatttgtccatagttctggaaaagctactgcacagagtaggagaggaaactatttgctctctgtaatactgaaaaactgagagtgctattttaacttgtcaataactaaaa

SEQ ID NO: 43152 - DNA, 503 bp, Homo sapiens; identical to SEQ ID NO: 34290
  misc_feature 342: n = A,T,C or G

SEQ ID NO: 43153 - DNA, 321 bp, Homo sapiens
ttggagctccaccgcggtggcggccgtgcgtagactagtcagcttctggtgtgtgactagagctgggcttgtcgtcccctccagcttcagctgtgcatagactggtcagcctccagagtgaccagagcagggctgtcgtcctcagcagcagcttggtctcatctcaggatcggctgagttggatgatctgggtcttgctggctgttccacttgtcctgaactgctggtttcagctgactgtggtggacctatggcatgattccagcaaatttaacagcagtgggagtggacaagaatacagtacctcggccgctctagaac

SEQ ID NO: 43154 - DNA, 395 bp, Homo sapiens; identical to SEQ ID NO: 34292

SEQ ID NO: 43155 - DNA, 394 bp, Homo sapiens; identical to SEQ ID NO: 34293

SEQ ID NO: 43156 - DNA, 395 bp, Homo sapiens; identical to SEQ ID NO: 34294

SEQ ID NO: 43157 - DNA, 565 bp, Homo sapiens; identical to SEQ ID NO: 34295
  misc_feature 383, 384, 385, 387, 388: n = A,T,C or G

SEQ ID NO: 43158 - DNA, 511 bp, Homo sapiens; identical to SEQ ID NO: 34296
  misc_feature 63: n = A,T,C or G

SEQ ID NO: 43159 - DNA, 494 bp, Homo sapiens; identical to SEQ ID NO: 34297

SEQ ID NO: 43160 - DNA, 347 bp, Homo sapiens; identical to SEQ ID NO: 34298

SEQ ID NO: 43161 - DNA, 614 bp, Homo sapiens; identical to SEQ ID NO: 34299

SEQ ID NO: 43162 - DNA, 528 bp, Homo sapiens; identical to SEQ ID NO: 34300
  misc_feature 176, 263, 340: n = A,T,C or G

SEQ ID NO: 43163 - DNA, 321 bp, Homo sapiens
tccaccgcggtggcggccgcccgggcaggtacgcgggaccgagaagaagatgaagaagatgcatacgaacgaagaaaacttgaaagaaaactccgagagaaagaagctgcttatcaagagcgccttaagaattgggaaatcagagaacgaaagaaaacccgggaatatgagaaagaagctgaaagagaagaagaaagaagaagagaaatggccaaagaagctaaacgactaaaagaattcttagaagactatgatgatgatagagatgaccccaaatattacagaggaagtgctcttcagaaaaggttgcgtaaaaaaaaa

SEQ ID NO: 43164 - DNA, 284 bp, Homo sapiens; identical to SEQ ID NO: 34301
  misc_feature 211, 212, 238, 247, 248, 276: n = A,T,C or G

SEQ ID NO: 43165 - DNA, 373 bp, Homo sapiens; identical to SEQ ID NO: 34302

SEQ ID NO: 43166 - DNA, 631 bp, Homo sapiens; identical to SEQ ID NO: 34303

SEQ ID NO: 43167 - DNA, 450 bp, Homo sapiens; identical to SEQ ID NO: 34304

SEQ ID NO: 43168 - DNA, 538 bp, Homo sapiens; identical to SEQ ID NO: 34305

SEQ ID NO: 43169 - DNA, 614 bp, Homo sapiens; identical to SEQ ID NO: 34306

SEQ ID NO: 43170 - DNA, 635 bp, Homo sapiens; identical to SEQ ID NO: 34307

SEQ ID NO: 43171 - DNA, 655 bp, Homo sapiens; identical to SEQ ID NO: 34308

SEQ ID NO: 43172 - DNA, 681 bp, Homo sapiens; identical to SEQ ID NO: 34309
  misc_feature 11: n = A,T,C or G

SEQ ID NO: 43173 - DNA, 661 bp, Homo sapiens; identical to SEQ ID NO: 34310

SEQ ID NO: 43174 - DNA, 550 bp, Homo sapiens; identical to SEQ ID NO: 34311

SEQ ID NO: 43175 - DNA, 500 bp, Homo sapiens; identical to SEQ ID NO: 34312
  misc_feature 430: n = A,T,C or G

SEQ ID NO: 43176 - DNA, 545 bp, Homo sapiens; identical to SEQ ID NO: 34313

SEQ ID NO: 43177 - DNA, 558 bp, Homo sapiens; identical to SEQ ID NO: 34314
  misc_feature 453: n = A,T,C or G

SEQ ID NO: 43178 - DNA, 512 bp, Homo sapiens; identical to SEQ ID NO: 34315
  misc_feature 360, 463: n = A,T,C or G

SEQ ID NO: 43179 - DNA, 529 bp, Homo sapiens; identical to SEQ ID NO: 34316
  misc_feature 90: n = A,T,C or G

SEQ ID NO: 43180 - DNA, 530 bp, Homo sapiens; identical to SEQ ID NO: 34317

SEQ ID NO: 43181 - DNA, 175 bp, Homo sapiens; identical to SEQ ID NO: 34318

SEQ ID NO: 43182 - DNA, 585 bp, Homo sapiens; identical to SEQ ID NO: 34319

SEQ ID NO: 43183 - DNA, 436 bp, Homo sapiens; identical to SEQ ID NO: 34320

SEQ ID NO: 43184 - DNA, 402 bp, Homo sapiens; identical to SEQ ID NO: 34321

SEQ ID NO: 43185 - DNA, 563 bp, Homo sapiens; identical to SEQ ID NO: 34322
  misc_feature 10: n = A,T,C or G

SEQ ID NO: 43186 - DNA, 167 bp, Homo sapiens; identical to SEQ ID NO: 34323

SEQ ID NO: 43187 - DNA, 189 bp, Homo sapiens; identical to SEQ ID NO: 34324

SEQ ID NO: 43188 - DNA, 185 bp, Homo sapiens; identical to SEQ ID NO: 34325

SEQ ID NO: 43189 - DNA, 425 bp, Homo sapiens; identical to SEQ ID NO: 34326

SEQ ID NO: 43190 - DNA, 622 bp, Homo sapiens; identical to SEQ ID NO: 34327

SEQ ID NO: 43191 - DNA, 629 bp, Homo sapiens; identical to SEQ ID NO: 37512

SEQ ID NO: 43192 - DNA, 459 bp, Homo sapiens; identical to SEQ ID NO: 34329

SEQ ID NO: 43193 - DNA, 322 bp, Homo sapiens; identical to SEQ ID NO: 34330

SEQ ID NO: 43194 - DNA, 329 bp, Homo sapiens; identical to SEQ ID NO: 34331

SEQ ID NO: 43195 - DNA, 440 bp, Homo sapiens; identical to SEQ ID NO: 34332

SEQ ID NO: 43196 - DNA, 320 bp, Homo sapiens; identical to SEQ ID NO: 34333

SEQ ID NO: 43197 - DNA, 461 bp, Homo sapiens; identical to SEQ ID NO: 41636

SEQ ID NO: 43198 - DNA, 461 bp, Homo sapiens; identical to SEQ ID NO: 33194

SEQ ID NO: 43199 - DNA, 451 bp, Homo sapiens; identical to SEQ ID NO: 34337

SEQ ID NO: 43200 - DNA, 284 bp, Homo sapiens; identical to SEQ ID NO: 34338

SEQ ID NO: 43201 - DNA, 493 bp, Homo sapiens
gactactatagggcgaattggagctccaccgcggtggcggccgaggtacgcgggggggcatcacggacctaccaatatgtgatgtcacccctggtggcccagctgtgtcatggagaaactccagctgggcccagagattctgcagcgggaaaatccaaggcttatttatgccaggctgagtggatttggccagtcaggaagcttctgccggttagctggccacgatatcaactatttggctttgtcaggtgttctctcaaaaattggcagaagtggtgagaatccgtatgccccgctgaatctcctggctgactttgctggtggtggccttatgtgtgcactgggcattataatggctctttttgaccgcacacgcactggcaagggtcaggtcattgatgcaaatatggtggaaggaacagcatatttaagttcttttctgtggaaaactcagaaattgagtctgtgggaagcacctcgaggacagaacatg

SEQ ID NO: 43202 - DNA, 456 bp, Homo sapiens; identical to SEQ ID NO: 34340

SEQ ID NO: 43203 - DNA, 478 bp, Homo sapiens; identical to SEQ ID NO: 34341
  misc_feature 191, 192: n = A,T,C or G

SEQ ID NO: 43204 - DNA, 294 bp, Homo sapiens; identical to SEQ ID NO: 34342
  misc_feature 196, 205, 214, 262: n = A,T,C or G

SEQ ID NO: 43205 - DNA, 458 bp, Homo sapiens; identical to SEQ ID NO: 34343

SEQ ID NO: 43206 - DNA, 507 bp, Homo sapiens; identical to SEQ ID NO: 34344

SEQ ID NO: 43207 - DNA, 609 bp, Homo sapiens; identical to SEQ ID NO: 30476

SEQ ID NO: 43208 - DNA, 496 bp, Homo sapiens; identical to SEQ ID NO: 39312

SEQ ID NO: 43209 - DNA, 417 bp, Homo sapiens
  misc_feature 60: n = A,T,C or G
gtattctactcactatagggcgaattggagctccaccgcggtggcggccgaggtactttntttttttttttttttttttttagtgtgtgtttatttttttatatttttttttatttttatttttggcagccacaggagttttagccatttcagatgccttgctccccacaatttggaagattccttggatttgaccaagtcaggaagagatgggagaaaagtgaaacaacaacaataaaaccccaaacataaacaaacagaaagagttaagcaaaacaaacaaatgcacaattcatatgattactgagtgttctaatgctaaggagaaattaaaagcagctggtgggtaatcttacattttaatcattaaggaaaaattttaagacaaaactttaattcagctacttacctggaaat

SEQ ID NO: 43210 - DNA, 428 bp, Homo sapiens; identical to SEQ ID NO: 34348

SEQ ID NO: 43211 - DNA, 469 bp, Homo sapiens; identical to SEQ ID NO: 34349

SEQ ID NO: 43212 - DNA, 421 bp, Homo sapiens; identical to SEQ ID NO: 34350

SEQ ID NO: 43213 - DNA, 428 bp, Homo sapiens; identical to SEQ ID NO: 34351

SEQ ID NO: 43214 - DNA, 454 bp, Homo sapiens; identical to SEQ ID NO: 34352
  misc_feature 422: n = A,T,C or G

SEQ ID NO: 43215 - DNA, 454 bp, Homo sapiens; identical to SEQ ID NO: 34353

SEQ ID NO: 43216 - DNA, 397 bp, Homo sapiens; identical to SEQ ID NO: 34354

SEQ ID NO: 43217 - DNA, 440 bp, Homo sapiens
actactatagggcgaattggagctccaccgcggtggcggccgaggtacttttttttttttttttttttttggagacgggctcactctgtcagccacgctggagtgcagtgacatgatcttgactcatggcaggcttgacctcctgggctcaaggaccacctcccaagtagctgagaccacaggtttgccccatcacacctggccgatttttatttttttgtagagatggggttgtccaggctggtctcaagctcctgagctcaagcaatgtgcccgccttggcttcccaaagtgctgggattataggcgtaaaccactgcacgcagcctaccctctgcctttttaagatgatgtatttatttaatttttgccatcattggtgcttcaccttcctgcgaaggaaattccagagcctgtatttaagctacctaggcttttac

SEQ ID NO: 43218 - DNA, 409 bp, Homo sapiens
gcgaattggttctccaccgcggtggcggccgcccgggcaggtacgatcttggctcactgcaacctctccctcctgggttcaagtgattctcgtgcctcagcctcttgagtagctgggattacaggcgcgtgccactgcgtccggctaatttttgtatttttagtagagatggggtttcaccatgttggccaggctgatctcaaactcctgacctcatgtggtccacccaccttggcctaccaaagtgctgggattacaggcgtgagccaccgcgctcatcctacaagcaattttttaaaaactgacacctattactgataaaattctctgtttaaaatcctatttactattttaaagataagtattagttttttttttaaatacaataattctgttattgataaaattt

SEQ ID NO: 43219 - DNA, 427 bp, Homo sapiens; identical to SEQ ID NO: 34357
  misc_feature 317, 367: n = A,T,C or G

SEQ ID NO: 43220 - DNA, 541 bp, Homo sapiens
tcggatccactagtaacggccgccagtgtgctggaattcggctttcgagcggccgcccgggcaggtacatctgactatattccactggctttacacggctcgctttagggattgccacgctcagccgcacaggcttagaccccagtcccactgctccctggcactccgtcagggctcgcttctgttccagttcatctgtgaatttcacaaaaccataacccttagacacgcctgtctggtccaaaaccaccttgcctccccgacaggaggggtagactttgacgaagaattcatacagcatgccatcatccacgtccggggtcaggtcccccacaaagagggaatactcagggctgttatctggttgtttcccgtaagtggcatagttcagtttaaaacgtttcgcaagtgtggctcctggaaggggtttcccattaattttatgcaaacacttctcagctgtggccaaatctgcaaattctacaaagcagtagccagctgggatcccagtgaggcggtttcggataattttgacgctcat

SEQ ID NO: 43221 - DNA, 416 bp, Homo sapiens; identical to SEQ ID NO: 34359

SEQ ID NO: 43222 - DNA, 566 bp, Homo sapiens
agggcgaattgggtaccgggccccccctcgaggtcgacggtatcgataagcttgatatcgaattcctgcagcccgggggatccactagttctagagcggccgcccgggcaggtgtgaccggaggcggcggcggcgagcggttccttgtgggctagaagaatcctgcaaaaatgtctctctatccatctctcgaagacttgaaggtagacaaagtaattcaggctcaaactgctttttctgcaaaccctgccaatccagcaattttgtcagaagcttctgctcctatccctcacgatggaaatctctatcccagactgtatccagagctctctcaatacatggggctgagtttaaatgaagaagaaatacgtgcaaatgtggccgtggtttctggtgcaccacttcaggggcagttggtagcaagaccttccagtataaactatatggtggctcctgtaactggtaatgatgttggaattcgtagagcagaaattaagcaagggattcgtgaagtcattttgtgtaaggatcaagatggaaaaattggactcaggcttaaatcaata

SEQ ID NO: 43223 - DNA, 336 bp, Homo sapiens; identical to SEQ ID NO: 34361

SEQ ID NO: 43224 - DNA, 425 bp, Homo sapiens; identical to SEQ ID NO: 34362

SEQ ID NO: 43225 - DNA, 339 bp, Homo sapiens
tccaccgcggtggcggccgaggtactcagcaaaaagctgagttattagaaaatggacactagcctgtgcttgtgggcataaattctccatctatgagaaggcatgaattgaggcactatattgattacattatgtcgtttattctcatacaactctctattgtagaaacgatttctagccccatcttcaagatgggaaatggaagcctagagaaacttcatttttctcctatatttgtatttagcaattgctattgctgccataagaaaataacacagggtggcttgaacaacagaaatttattttctcacagttctggaggctggaagtccaagatca

SEQ ID NO: 43226 - DNA, 383 bp, Homo sapiens
ctatagggcgaattggagctccaccgcggtggcggccgcccgggcaggtaccatctatggaaaaagcaatggaaaatgaagtgtcaatcaaataatgcacccttggctgacacaaattaattgaagctaaacctagaacccttctttctcaccaagatggcaacttctcccaattgttctaaattataaaatccccggttatctgtcactttacccactccccctctccccagtccgatctgttgccaaatcctgtagtttctacctccataacggaactcgcaatcatctccttccatttctctccattccaaatctagaagaaaaaagaaaccaaatacatttagtttcatcagcaagttagaacctttctgtcaaaaatt

SEQ ID NO: 43227 - DNA, 465 bp, Homo sapiens
cgccctggcggccgcccgggcaggtacgcggggagagaaggcccggaggggctctgcgttctgtagtggcgctgcttgggcccgtggcggattgtaagctgctggttttgcggctgggaagagcggcgagagggttcggcatttttcgtcgggatccccgcaaggatgagtgctgccagagagtctcacccgcatggggtgaagcgttcagcctccccagacgacgatctgggatctagcaattgggaggcagcagacttgggtaatgaagagagaaaacaaaagttcttgagacttatgggtgcaggaaagaaagaacatactggtcgtcttgttataggagatcacaaatcaacatctcacttccgaaccggttagaaagtaaagtgtaattaaaatggaagtgctaaattcagaatatgaagtatgtgttcatgtttcaggatattctactttggcatgtaa

SEQ ID NO: 43228 - DNA, 601 bp, Homo sapiens
ccgggccccccctcgagagtcttctagaattaattaacgcgggtgctttggccggtaaactcttataaaacataaaggaatcgattaatccctaacttgatggaacaagctttgaaatactttgttcctgtctgccctgatggttaaactaaagaaggagggaggggaggagacagaatcagccagtcagattctgggcccttcccttttcactaccaagcaatctttaataataaggccacaaaatgaggttgccaaggcttagtggggtggtgggaaagaccccaccactacactaaagtcaagggacaaaatgaggtacccaaatagctctgcaaatagatgaaaaagaattagaactcttgagggtttctttctttttggtggcaggtagagagaaggaataaagcttatggaaaaactggaaaatactgctacttcatacatcaaaggtaaccttacattctccgtaagtgaatgttttaactagaattaaggaaaaaaaaaaaaaaagcggccgccaccgcggtggagctccaattcgccctatagtgagtcgtattacgcgcgctcactggccgtcgttttacaacgtcgtgac

SEQ ID NO: 43229 - DNA, 427 bp, Homo sapiens; identical to SEQ ID NO: 34367

SEQ ID NO: 43230 - DNA, 440 bp, Homo sapiens; identical to SEQ ID NO: 34368

SEQ ID NO: 43231 - DNA, 410 bp, Homo sapiens; identical to SEQ ID NO: 34369

SEQ ID NO: 43232 - DNA, 415 bp, Homo sapiens; identical to SEQ ID NO: 34370

SEQ ID NO: 43233 - DNA, 534 bp, Homo sapiens
  misc_feature 161: n = A,T,C or G
ggcgaattggagctccaccgcggtggcggccgaggtactcatcaaaccagctttggattgcttgtgaccatgagctggaggcacttgacatgtagagattctcaccacattttagacttgtcattcgatcctttgggttactgtgtctgtaattgcactgngtttgcccacttttgggcatttgctgcagcctctttgttccattccatcttcagcatgtttctggcagggggagatactgctctcctcagttcattgtgcttattcacaatctccctttgcacttgtgtttgggtggttaacaaagcagtaaaagcgggatccttatcttcatttgctggaaaagatggaagcagcccagcaaccaggaacaacagcactgggaataatgtcattgcagtggtttccagagcaggatgaagtatttgtttcatctattgacagaaggaaagtgcccccgcgtacctgcccggcggccgctctagaactagtggatcccccgggctgcaagaattcgatatcaagcttatcgat

SEQ ID NO: 43234 - DNA, 416 bp, Homo sapiens; identical to SEQ ID NO: 34372

SEQ ID NO: 43235 - DNA, 662 bp, Homo sapiens; identical to SEQ ID NO: 30578

SEQ ID NO: 43236 - DNA, 428 bp, Homo sapiens; identical to SEQ ID NO: 34374

SEQ ID NO: 43237 - DNA, 564 bp, Homo sapiens
aattgggcccctctagatgcatgctcgagcggccgccagtgtgatggatatctgcagaattcggcttaacgtggtcgcggccgaggtcgcccatagccggacggggatctgagctggcaggatgaatgtgggggtggcacacagcgaagtaaaccccaacacccgagtgatgaatagccgaggcatctggctggcctacatcatcttggtaggattgctgcatatggttctactcagcatccccttcttcagcattcctgttgtctggaccctgaccaacgtcatccataacctggctacgtatgtcttccttcatacggtgaaagggacaccctttgagactcctgaccaaggaaaggctcggctactgacacactgggagcaaatggactatgggctccagtttacctcttcccgcaagttcctcagcatctctcctattgtgctctatctcctggccagcttctataccaagtatgatgctgcgcacttcctcatcaacacagcctcattgctaagtgtacctgcccgggcggccgctcgaaattccagcacactggcggg

SEQ ID NO: 43238 - DNA, 570 bp, Homo sapiens
ccattaagagtggatgtagctaagagcttagctaacattgccttttcactctatttttctcagatattgtaagcattctgtttttcaatattgtagttaattttttggctttcaacagcagccctagtaatggtggagttgttaattaatgtgtatattgtactgaatttctgtcagttaaggggttcactgctttggtggaaattggtggaaattgctagcaggttccacgatgtttatttttttctccatgttgtatatcattaccatttcacatacgcgtttctatttttcttcctctcctcctgatctccttaaaaatgaatctagagttggtggctttttccccctcctctttggccagttccacagttcagttcttcctgaaaacagggatgatgaacttgtaggatcaggacaaatgtgtgtttttcaaaaacttaaggctgggtgtgaaacaccttctgtggacaaggatttgtaaacttctctcctccctccagctgcggccccagcctaactgatagttacttgattcagtgtgctagacacttaaatagcatctatgtc

SEQ ID NO: 43239 - DNA, 427 bp, Homo sapiens; identical to SEQ ID NO: 34387

SEQ ID NO: 43240 - DNA, 497 bp, Homo sapiens
agtcgacgcgtaagacgtgttttgcgacccggcaccaccgtagtttttacggcggccgcccgctcaggtacccagagtgcagagccgcatttccagcatgcaggggctgctcagcgtttagtcacatcaagaaatagaacagaattcagccatggccccaagaaagagaggtggaccatgttgcattcatcttttgctgtttccgaaataatgatcacccagaaatcacgtatcggctgcgaaatgatagcaactttgcgcttcagaccatggaaccagcattgcccatgccccctgtggaggagctggatgtcatgttcagtgaactggtggtgagtcccagttttctatcctggcattggtggggagccagagaaggagaagaggagaggatgtgaatgagttggtttggtttgacatggacttttccttttcagtgaaatggcccccattcacctttatgtctgcaccctcactgtcagcactaaacctgtgga

SEQ ID NO: 43241 - DNA, 463 bp, Homo sapiens
tacgactactatagggcgaattggagctccaccgcggtggcggccgcccgggcaggtactttttttttttttttttttttttttttgatttttttcagcctccctatacagccccaggaataaaaaaatcatgactaaaatgggatagctccctaaaaagggactaggaaagaagtcccaattgaggctgaaaaaaatcaaaaaaagaaaaggaatagggcatcctttttaggagcggtcactgtagagcctccaaaacccattccattaacttgggggaaaaaaaacaactgtatggtaaatcagcagcgcttccaaaacaaaaactggaggctttacatttattagcaaagaaacaattagaaaaaggacattgagccttcattttcgccttggaattctgtttgtaattcaaaaaaaatccggcagatggcgtataatgccgtaattcaacccagggggc

SEQ ID NO: 43242 - DNA, 391 bp, Homo sapiens
cgtatacgactcactatagggcgaattggagctccaccgcggtggcggccgcccgggcaggtacatagaatatgaacacagcacacacatgagagacgcaagtgccaaatgccttggcctgggcttcacgtgtcaagcccaacacagtcttaagaataagcagatatgagaaggagatgagaagtgagtccaggccaatggcggagatgatgacgataaggccatagacgacattgacccggatatcatcacaggccagcttcatgacatcttggtgtaggcagtaggaatgggaaaggatattggagcggcagaagggcagctgcttgatgaagacaggaaggggtgccatcagtgcagccccccgcaccacagcagccacaccaatttt

SEQ ID NO: 43243 - DNA, 417 bp, Homo sapiens; identical to SEQ ID NO: 34381

SEQ ID NO: 43244 - DNA, 398 bp, Homo sapiens; identical to SEQ ID NO: 34382

SEQ ID NO: 43245 - DNA, 437 bp, Homo sapiens
atagggcgaattggagctccaccgcggtggcggccgcccgggcaggtacgatcttggctcactgcaacctctccctcccgggttcaagtgattctcgtgcctcagcctcttgagtagctgggattacaggcgcgtgccactgcgtccggctaatttttgtatttttagtagagatggggtttcaccatgttggccaggctgatctcaaactcctgacctcatgtggtccacccaccttggcctcccaaagtgctgggattacaggcgtgagccaccgcgctcagcctacaagcaattttttaaaaactggcacctattactgataaaattctctgtttaaaatcctatttactattttaaagataagtattagtttttttttaaatacaataattctgttattgataaaatttaaggcattttcattgccttttgca

SEQ ID NO: 43246 - DNA, 424 bp, Homo sapiens; identical to SEQ ID NO: 34384

SEQ ID NO: 43247 - DNA, 420 bp, Homo sapiens; identical to SEQ ID NO: 34385

SEQ ID NO: 43248 - DNA, 428 bp, Homo sapiens; identical to SEQ ID NO: 34386

SEQ ID NO: 43249 - DNA, 570 bp, Homo sapiens; identical to SEQ ID NO: 40617

SEQ ID NO: 43250 - DNA, 416 bp, Homo sapiens; identical to SEQ ID NO: 34388

SEQ ID NO: 43251 - DNA, 212 bp, Homo sapiens; identical to SEQ ID NO: 31118

SEQ ID NO: 43252 - DNA, 418 bp, Homo sapiens; identical to SEQ ID NO: 34390

SEQ ID NO: 43253 - DNA, 417 bp, Homo sapiens; identical to SEQ ID NO: 43209
  misc_feature 60: n = A,T,C or G

SEQ ID NO: 43254 - DNA, 407 bp, Homo sapiens; identical to SEQ ID NO: 34392

SEQ ID NO: 43255 - DNA, 416 bp, Homo sapiens; identical to SEQ ID NO: 34393

SEQ ID NO: 43256 - DNA, 448 bp, Homo sapiens; identical to SEQ ID NO: 34394

SEQ ID NO: 43257 - DNA, 447 bp, Homo sapiens; identical to SEQ ID NO: 34395

SEQ ID NO: 43258 - DNA, 444 bp, Homo sapiens; identical to SEQ ID NO: 34396

SEQ ID NO: 43259 - DNA, 348 bp, Homo sapiens; identical to SEQ ID NO: 34397

SEQ ID NO: 43260 - DNA, 446 bp, Homo sapiens; identical to SEQ ID NO: 34398

SEQ ID NO: 43261 - DNA, 446 bp, Homo sapiens; identical to SEQ ID NO: 34399

SEQ ID NO: 43262 - DNA, 434 bp, Homo sapiens
agggcgaattggagctccaccgcggtggcggccgaggtacgcgggggggaaccgggcggagcggccaacatggcggaacgcaggagacacaagaagcggatccaggaagttggtgaaccatctaaagaagagaaggctgtggccaagtatcttcgattcaactgtccaacaaagtccaccaatatgatgggtcaccgggttgattattttattgcttcaaaagcagtggactgtcttttggattcaaagtgggcaaaggccaagaaaggagaggaagctttatttacaaccagggagtctgtggttgactactgcaacaggcttttaaagaagcagttttttcaccgagccctaaaagtaatgaaaatgaaatatgataaagacataaagaaagaaaaagataaaggaaaagctgaaagtggaaaagaagaaga

SEQ ID NO: 43263 - DNA, 504 bp, Homo sapiens; identical to SEQ ID NO: 34221

SEQ ID NO: 43264 - DNA, 335 bp, Homo sapiens; identical to SEQ ID NO: 34402

SEQ ID NO: 43265 - DNA, 415 bp, Homo sapiens
tatagggcgaattggagctccaccgcggtggcggccgcccgggcaggtacagcagaactgcatgatcagctgtatggtagccttgaaaaccaacaggccacaatcacagtgaaaacctcaggttggcagccactggaggatacaaaatgagtttggatctccttcaatgccccattcccagagaactgtcattatttgacctgctggtagttccctaaaggacgtgcaaggatgtttttatttgactggacacttgaagcttgccctgtatgaacagcccccatcttcccatgcttgtcaaaaatcagaggcaactaacactgcggcttcctgagagtctcactctgtcacccaggctggagagcaattgcacaaacacttggctcactgcagcctcaactttttgtcctcaagt

SEQ ID NO: 43266 - DNA, 412 bp, Homo sapiens
tactactatagggcgaattggagctccaccgcggtggcggccgcccgggcaggtactttttttttttttttttttttttttttttttaggcaatgtctcactcttgtcacccaagttggagtgaactggtgccattatataaagcttactgcagcctcagactcttacactcaagcagttcttccaccttggcctgccaaacagctggtattacaggcataagccactgtgccccaaccttactagccattttttaaatgctgaaaagccacatgtgactaggggctacaccattggacaggtcagatacagaacatttctatcatctcaaaggactattggacagaattgctttaaggaattatcctcattataaaatgattagtatgcttgagctcaaaaaaattaactc

SEQ ID NO: 43267 - DNA, 478 bp, Homo sapiens; identical to SEQ ID NO: 33515

SEQ ID NO: 43268 - DNA, 211 bp, Homo sapiens; identical to SEQ ID NO: 34406

SEQ ID NO: 43269 - DNA, 422 bp, Homo sapiens
tacactactatagggcgaattggagctccaccgcggtggcggccgacgtacttttttttttttttttttttgtaactgttggggggaaaaaggctttttaacccatttttgaagagggtgaagtttggagaacaaatttaaaaaccatcagtcatgtgagcagattttttagaagggataggagacacgcgcacacacacacacacacgaaacttgaaatggctttgctttggctgtcgccttctgccgtgtgccacatgagcttgtgatctgggaagccggggcacccccgttttgtttctctgggcggttgtggcagctgaaggcggacgttgtttcctaaccataggtggaacgaggagacgggagcgagtgggctttccaccagcacatcactatgcatctgttccaggaaagaagaa

SEQ ID NO: 43270 - DNA, 425 bp, Homo sapiens; identical to SEQ ID NO: 34408

SEQ ID NO: 43271 - DNA, 274 bp, Homo sapiens
cactatagggcgaattggagctccaccgcggtggcggccgcccgggcaggtacgcggggaggcattgaggcagccagcgcaggggcttctgctgagggggcaggcggagcttgaggaaaccgcagataagtttttttctctttgaaagatagagattaatacaactacttaaaaaatatagtccaataggttactaagatattgcttagcgttaaagtttttaacgtaaattttaaatagcttaagattttttaagagaaaatatgaaagactt

SEQ ID NO: 43272 - DNA, 455 bp, Homo sapiens; identical to SEQ ID NO: 42858

SEQ ID NO: 43273 - DNA, 455 bp, Homo sapiens; identical to SEQ ID NO: 34411

SEQ ID NO: 43274 - DNA, 385 bp, Homo sapiens
agggcgaattggagctccaccgcggtggcggccgaggtacgcgggtaatcaggctttttaaatgatgtaattcccactgtaatagcatagggattttgggagcagctgctggtggcttgggacatcagtggggccaagggttctctgtccctggttcaactgtgatttggctttcccgtgtctttcctggtgatgccttgtttggggttctgtgggtttgggtgggaagagggccatctgcctgaatgtaacctgctagctctccgaaggccctgcgggcctggcttgtgtgagcgtgtggacagtggtggccgcgctgtgcctgctcgtgttgcctacatgtccctggctgttgaggcgctgcttcagcctgcacccctccctt

SEQ ID NO: 43275 - DNA, 434 bp, Homo sapiens
gcgaattgtagctccaccgcgctggcggccgcccgggcaggttcatgggactacaggcacgccccaccattgctccagctcatttttgtatttttagtagagacagggtttcaccatgttggccaggatgatcttgatctcttgacctcatgatccgcccgtcttggcctcccaaagtgctgggatcacaggcgtgagccaccacacctggccctctatttattctctttaaagagagagaaaactatgagaggccaaaattatttaattaaatctttaccttagcacaagggaaaaaaatggaatttgcctaatataggtgatgaagcatacacaatgaatagaaacaatcacattttagtaaaaggcaaaaatttgagacttataagctatatggtagcttatttttgggtggggaagaaatgagaaaagaa

SEQ ID NO: 43276 - DNA, 212 bp, Homo sapiens; identical to SEQ ID NO: 34414

SEQ ID NO: 43277 - DNA, 398 bp, Homo sapiens; identical to SEQ ID NO: 34415

SEQ ID NO: 43278 - DNA, 388 bp, Homo sapiens; identical to SEQ ID NO: 34416

SEQ ID NO: 43279 - DNA, 414 bp, Homo sapiens
ctactatagggcgaattggagctccaccgcggtggcggccgaggtacatgatagggaggagtgaggcaggtgggcactggagggctgtttcctctggcacagttgaactagagggtcactttccactcataattggtttcctaggtctaagtcaccacacctggggctgaagcaagtcttgcctgtgcaccaagcgtggccttggaccctggagagatgcaaggctcagttctccagtgttgaagtggaaggactcccaactgaaggagatctttctctccccacctccagctcttttcccttacaaatgaccagggtgcaagtcgagaggcagaggcacctcctggtgcaactccaccacagtcttacagagaactcatcttggtgggacccaaagcccagccttggcatgaa

SEQ ID NO: 43280 - DNA, 443 bp, Homo sapiens; identical to SEQ ID NO: 34862

SEQ ID NO: 43281 - DNA, 147 bp, Homo sapiens; identical to SEQ ID NO: 34419

SEQ ID NO: 43282 - DNA, 458 bp, Homo sapiens; identical to SEQ ID NO: 34421

SEQ ID NO: 43283 - DNA, 397 bp, Homo sapiens
tacgactactatagggcgaattggagctccaccgcggtggcgggcaggtacgcggggctcttccggggacgttgtctgcaggcactcagaatggtccagcgtttgacataccgacgtaggctttcctacaatacagcctctaacaaaactaggctgtcccgaacccctggtaatagaattgtttacctttataccaagaaggttgggaaagcaccaaaatctgcatgtggtgtgtgcccaggcagacttcgaggggttcgtgctgtaagacctaaagttcttatgagattgtccaaaacaaagaaacatgtcagcagggcctatggtggttccatgtgtgctaaatgtgttcgtgacaggatcaagcgtgctttccttatcgaggagcagaaaatcg

SEQ ID NO: 43284 - DNA, 349 bp, Homo sapiens
ggagctccaccgcggtggcggccgaggtacttccctgtgaaaagttcaggggccatatggattggtgtccccacaatgctgcctgacatcatggcctctggcttgcagaatcctaagtcagtgatcttggcacggttctgcttatccagcagcacatttttcagtttgatatcacgatggacaagtccctggctgtgcaggaagcggattccctccaccacatctagtgctatctgcaaacgcgtttccagggtcaacccagccttcagccctgtgtagagatcccggtgtagccgctccataatgaggagcacagcaatgctggagccaccaccatagttgtagtcaa

SEQ ID NO: 43285 - DNA, 397 bp, Homo sapiens; identical to SEQ ID NO: 34424

SEQ ID NO: 43286 - DNA, 478 bp, Homo sapiens
cactcactatagggcgaattggagctccaccgcggtggcggccgcccgggcaggtggagaaggacagctgcttttttatatagattaaaagaaatctcaatcttcaaagtttctatttactgtaacagtagatggtttcaaagaagcacttggccgggcacggtggctcacacctgtaatcccagcactctgggagggttgagcaggcgatcatgaagttaggagttagagaccagcctggccaacatggtgaaaccctcgtctctactaaaaatacaaaaattagccaagtgtggtggtgcatgcctgtaatcccacctactcgggaggctgaggcaggagaattgcttgaatccaggaggcggaggttgcagtgagccgagatcatgccactgcactctagcctgggcaacagagtaagactgtgtcttaaaaaaaaaaaaaaaacaccaacagaacaacagcatttctagaacaa

SEQ ID NO: 43287 - DNA, 432 bp, Homo sapiens
ctatagggcgaattggagctccaccgcggtggcggccgcccgggcaggtacaatattagatattaaaaatggattcaagagaagttactaagaaatgctgacatactgtatatacaaatttttagttcaatatatgccattatataaagcaccaagagtaatgcctttataaatcaagccagtttttatgactctgtttctaatctttgtaacccttttacatttgttccaatatacacacatcataaatgttacttgctcaacacttcaccgatttggtctcaacttaaaaatatatatgtaggcaaaaattaatgtcaaaaggaactgttctaacagttacaagagaaaatagtaaatatttggaattaaactgtcatgaacaaagaaagaaaaggttagtttcaaagtgctaggcacatcaagtgagta

SEQ ID NO: 43288 - DNA, 410 bp, Homo sapiens; identical to SEQ ID NO: 30774

SEQ ID NO: 43289 - DNA, 457 bp, Homo sapiens; identical to SEQ ID NO: 34429

SEQ ID NO: 43290 - DNA, 174 bp, Homo sapiens; identical to SEQ ID NO: 34430

SEQ ID NO: 43291 - DNA, 308 bp, Homo sapiens; identical to SEQ ID NO: 34431

SEQ ID NO: 43292 - DNA, 602 bp, Homo sapiens; identical to SEQ ID NO: 33064

SEQ ID NO: 43293 - DNA, 424 bp, Homo sapiens; identical to SEQ ID NO: 30688

SEQ ID NO: 43294 - DNA, 468 bp, Homo sapiens
cgactactatagggcgaattggagctccaccgcggtggcggccgcccgggcaggacttaaattttaaaaatttagatttcagattaaagtcttgcaaaaggggcagactaggtgcctcatgactataatcccagcaatttggaaggctgaggcgggaggattgtttgagcccaggagttcgagaccagcctgggcaacatagtgagacttcatctccacaaaaaattagccagtgtggttatgctagtctatagtctcagctactcaggaggctgaagtgggaggaccacttatgcccaggaaaccaaggctgcagtgagccatgatcataccactgcactgcacttcagcctgggagacagaacaagacagaccctgtcgccccacacctcccctatacccccggaaaaaagtgcaaaaaaaaaaaactagggtgagagccatgaaatagctgaaggactgtctgaa

SEQ ID NO: 43295 - DNA, 448 bp, Homo sapiens
tactatagggcgaattggagctccaccgcggtggcggccgaggtactttttttttttttttttttttttttttctggacacagggtcttgctgttgcccaggctggagtgcaggggcatgaccatagctcactgcagccttgacttccttaactcaagcaatcctcttgcctcagcctcctgtagcactgtaggcacacacaactatgcctggctaattttaacatttttctttcaccttcttgacccttatcttctatacccggctaattttttgtagagacagtgtcttgctatgttgtccaagctggtcttgaattcctcgcctcaagcaatccttccacctcagcttcctgagtgttaggattacaggcatgagccactgcacctggcctccaacaggtaattttagaacatttttccctctacactaattaccctcctataac

SEQ ID NO: 43296 - DNA, 473 bp, Homo sapiens
  misc_feature 376, 377, 380, 382: n = A,T,C or G
ctactatagggcgaattggagctccaccgcggtggcggccgcccgggcaggtactcatggagggcaccaccaagaacttcctcttcaatttctccctgtagccgcccacaccagccctggtcttggaggctgctgaaccacgattatgctgccatcagtgaaggaagctgaaattgtgaaagtgaaacaccatggctggtcatgtgccagatgatgttgtgttctgcaaagtatctccaatcctgggttggatccagtaggtgcacttgggcacccaaaccggaaacagggattcttgttccttaaacacaagacattccaatgagaaagctgctctcagatgagttgcagatcaggcaggaggagatggaggtgnnctngncttcccaaaattgctgaaactagaagaccaaggccacctctgagaggcagagacccacttgagtacctgggccgatctagaactagtggat

SEQ ID NO: 43297 - DNA, 519 bp, Homo sapiens; identical to SEQ ID NO: 32483

SEQ ID NO: 43298 - DNA, 391 bp, Homo sapiens; identical to SEQ ID NO: 34438

SEQ ID NO: 43299 - DNA, 242 bp, Homo sapiens; identical to SEQ ID NO: 34439

SEQ ID NO: 43300 - DNA, 442 bp, Homo sapiens; identical to SEQ ID NO: 34440

SEQ ID NO: 43301 - DNA, 458 bp, Homo sapiens; identical to SEQ ID NO: 34441

SEQ ID NO: 43302 - DNA, 458 bp, Homo sapiens; identical to SEQ ID NO: 31133

SEQ ID NO: 43303 - DNA, 184 bp, Homo sapiens; identical to SEQ ID NO: 34443

SEQ ID NO: 43304 - DNA, 392 bp, Homo sapiens
tacgactactatagggcgaattggagctccaccgcggtggcggccgaggtactttttttttttttttttttttttttttttttagtagagatgtggttttgccatgttggccaggctggtctcgaactcctgacctcaagtgatctgcccaccatccataatatttaaataagcatattgacttcttcttaaactaagggttaaatataatattttattttaatagttcaggttcatgtatctcatatcttatgctcaagttaataattcctatttgctatacatttatgaaaaagccttataaatggttttaataataaatagatattttaatatttaataataaatagatatttattgggaatctaaccttggaaaatttttcccaaata

SEQ ID NO: 43305 - DNA, 444 bp, Homo sapiens; identical to SEQ ID NO: 34445

SEQ ID NO: 43306 - DNA, 578 bp, Homo sapiens
tccaccgcggtggcggccgaggtacatcacagttctcagcttcagatcagtaactgtgggatgtgcaatagaacaatcagaatgcacatgcctatgctttatcctagatgtgttactttagaattttggaggtggtagctggataagtgcatcgtggaaaagcttctcagtgtattctgacacactcctttcatgaagaggcattgactataccataaaccctagaaatacgtcattggcaatgctactgttttaaaggagagaaaggcatctttttgtttttgacccagaatggcattgcctataacaggtgaaaggggatcatgctatgttaacaggaatcaacattatccatttttgaagagttcattaaacaggcaatatttatttggttgtctgttctatgttaggagctttcagttcagcactcaggcagcaaataaggtaatgcctgtgcatatgctcggtcctttctgtctgtccaaagctcccctcttctccattccccttttgcctcagtaactcgtctattaagatgtaaatcaagaaatgccttctgtctcagggaagcccttacc

SEQ ID NO: 43307 - DNA, 427 bp, Homo sapiens; identical to SEQ ID NO: 34447

SEQ ID NO: 43308 - DNA, 414 bp, Homo sapiens; identical to SEQ ID NO: 34448

SEQ ID NO: 43309 - DNA, 423 bp, Homo sapiens; identical to SEQ ID NO: 34449

SEQ ID NO: 43310 - DNA, 427 bp, Homo sapiens; identical to SEQ ID NO: 34450

SEQ ID NO: 43311 - DNA, 406 bp, Homo sapiens; identical to SEQ ID NO: 34451

SEQ ID NO: 43312 - DNA, 144 bp, Homo sapiens; identical to SEQ ID NO: 34452

SEQ ID NO: 43313 - DNA, 185 bp, Homo sapiens; identical to SEQ ID NO: 34454

SEQ ID NO: 43314 - DNA, 320 bp, Homo sapiens
caccgcggtggcggccgaggtactgtgcgctgaagtgattaatttacatattcattcttgctctgtgatatttaggtgtttgtttttggttagtgcatttattctgttaaaatttaaaatacatttgtgttttttatcctgttttaagtatatatatgtggaatgtatatataggatgtatacacagacacactcagacacatattttaatttagatttctagaagggaaattttaattaaaaataggtgaacattttaaatgacctaatacatatttagtccacattgaaactttggcattttgtcattgccattaaaa

SEQ ID NO: 43315 - DNA, 486 bp, Homo sapiens
ctatagggcgaattggagctccaccgcggtggcggccgctttttttttttttttttttttttttttttgggattacaaagctacttttaatactttggggtgagccccacaggaataaaaaacactgggaaggggtaaccccctcacccccgggagtggcccagggggagagaggctacctgaggggaaggaagcacaaaagggacccgctgcagactcagggcaaagggaatgccatcggtgctgggacctgtgagcactacaggaggaaacgcgagcgtggtgggactggctccaggcacacaggcgaagggcaagagggttggacacgaagccacaaagctacttgggttcctccttcttctcgtttgcctttttctgcttctgctgcatgatctccgagtccctctgcttgcgggcggcagcagaaagcccgtcatctcggcgctttcccttaaccgagtcgctctgctttttcatattctt

SEQ ID NO: 43316 - DNA, 460 bp, Homo sapiens; identical to SEQ ID NO: 34457

SEQ ID NO: 43317 - DNA, 214 bp, Homo sapiens; identical to SEQ ID NO: 34458

SEQ ID NO: 43318 - DNA, 447 bp, Homo sapiens; identical to SEQ ID NO: 34459

SEQ ID NO: 43319 - DNA, 445 bp, Homo sapiens; identical to SEQ ID NO: 34460

SEQ ID NO: 43320 - DNA, 395 bp, Homo sapiens; identical to SEQ ID NO: 34461

SEQ ID NO: 43321 - DNA, 405 bp, Homo sapiens; identical to SEQ ID NO: 34462

SEQ ID NO: 43322 - DNA, 444 bp, Homo sapiens; identical to SEQ ID NO: 34463

SEQ ID NO: 43323 - DNA, 287 bp, Homo sapiens; identical to SEQ ID NO: 34464

SEQ ID NO: 43324 - DNA, 455 bp, Homo sapiens; identical to SEQ ID NO: 34465

SEQ ID NO: 43325 - DNA, 433 bp, Homo sapiens; identical to SEQ ID NO: 34466

SEQ ID NO: 43326 - DNA, 437 bp, Homo sapiens; identical to SEQ ID NO: 34467

SEQ ID NO: 43327 - DNA, 439 bp, Homo sapiens; identical to SEQ ID NO: 34468

SEQ ID NO: 43328 - DNA, 470 bp, Homo sapiens
actatagggcgaattggagctccaccgcggtggctggccgccccggccagggacctttacttttttttttttttttttttaaagacaaggtcttgctctgttgtccaggcctggacaacacagcatgtgcagtggcgtgaacatggctcactgcagcctcgacttcccaggctgaagtgatcctcccgtctcagcttgagagtagctggaaccacaggtgtgtgccaccatgcccagctagtttttaaacttcttgtagagatggggtcttgtcatgttgcccaggctggtcttgaacttctgggctcaagcgatcctcctgccttggcctctcaaagtgctgggattacaggcgtgagccactgtgctacaccaaatgttgacaaggctgtgtgcaacctgaattgtcatacatttgtggtgaaaggataaaatgatacaatcactttgaaaaaaggtcttaaccagtg

SEQ ID NO: 43329 - DNA, 325 bp, Homo sapiens; identical to SEQ ID NO: 34470

SEQ ID NO: 43330 - DNA, 453 bp, Homo sapiens
gtatacgactactatagggcgaattggagctccaccgcggtggcggccgcccgggcaggtacagcagccggatgtcaggtgactgcaacctccaccccctgggctcaaccgatcctgccacttcagcctccagaggagctgggaccacagacacgcactaccaagtcaggctaagtttttggttttttttggtagagagggggtttcatcatgttgccaggctggtcttgaggggctgagctcaagcgatcctcaggctcccaacgtgctgggattataggcatgagccactgcacccagccaaattgcttcattttttattactccatacttcctacataagatacttcctacacctggccaaattgcttcattttttaaaaatatattttatttaatgtagtctcactctgttgccctggctggagtgcagtggcatgatctcagctcact

SEQ ID NO: 43331 - DNA, 174 bp, Homo sapiens; identical to SEQ ID NO: 34472

SEQ ID NO: 43332 - DNA, 621 bp, Homo sapiens
ccgggccccccctcggggtacttctagaattaattaacgcgggtatcataaaattacttcagcaagcagttataccatgcttaagccaagtagaaaattagaatgtttcagccaaaaatagaaagtctcagcaacgccatagatgatttaaaaaaagtagaaaattttcaactgaaaaatacagtagccaaaacaaaaagcttagtagatggattcaacagcagaagagagtggggagaggagagaatcagtggacctgaaaatagaaattacccaataagaacaatagagagaaaatcaactgggggaagaaaaccaaccaaccaacaaacagagcttcaggggcatttggaacagtaacaaaagatctaacatttatttcattggagtcccaggggaatagaaagtgggtaggactgaaaagaaaagtacttgaagaactaatggttgaaaattttctgaatttggcaaaagaaataaacctacagattcaataagctggctgaatccaaagaaaactacagcaagacacattcatagtcaaatttttgaaaactaaaaccagaaaaaggttgaaagcgatgagaaatgacaccctatgtatgttagtgaaacaagtaa

SEQ ID NO: 43333 - DNA, 153 bp, Homo sapiens; identical to SEQ ID NO: 34474

SEQ ID NO: 43334 - DNA, 610 bp, Homo sapiens
  misc_feature 540: n = A,T,C or G
gcgcgtaatacgactcactatagggcgaattggagctccaccgcggtggcggccgaggtacgcggggcttcacgaggtggaaacaagatggaggattcggcctcggcctcgctgtcttctgcagccgctactggaacctccacctcgactccagcggccccgacagcacggaagcagctggataaagaacaggttagaaaggcagtggacgctctcttgacgcattgcaagtccaggaaaaacaattatgggttgcttttgaatgagaatgaaagtttatttttaatggtggtattatggaaaattccaagtaaagaactgagggtcagattgaccttgcctcatagtattcgatcagattcagaagatatctgtttatttacgaaggatgaacccaattcaactcctgaaaagacagaacagttttatagaaagcttttaaacaagcatggaattaaaaccgtttctcagattatctccctccaaactctaaagaaggaatataaatcctatgaagccaagctccgccttctgagcagntttgatttcttccttactgatgccagaattaggcggctcttaccctcactcattgggagacatttctatc

SEQ ID NO: 43335 - DNA, 309 bp, Homo sapiens
tccaccgcggtggcggccgcccgggcaggtacattttcctttgtggcatggtggcctgaaatactgtgaggtttaacaatgaaggcaggtgactggtgaggagagttccagccactggattctccctcagtcccctgtgctgtggcccttggtgacccctagatttcagtgcccctgcctgacactggagtccctctataaagaagcccctttctagctagctagctgttccatcccgcacacccccacagaagccttttgctgccattagtaagcacgcctctattttctcacctgtgattgatcatg

SEQ ID NO: 43336 - DNA, 160 bp, Homo sapiens; identical to SEQ ID NO: 34477

SEQ ID NO: 43337 - DNA, 181 bp, Homo sapiens; identical to SEQ ID NO: 34478

SEQ ID NO: 43338 - DNA, 437 bp, Homo sapiens; identical to SEQ ID NO: 34479

SEQ ID NO: 43339 - DNA, 400 bp, Homo sapiens; identical to SEQ ID NO: 34480

SEQ ID NO: 43340 - DNA, 521 bp, Homo sapiens; identical to SEQ ID NO: 30382

SEQ ID NO: 43341 - DNA, 432 bp, Homo sapiens; identical to SEQ ID NO: 30938

SEQ ID NO: 43342 - DNA, 452 bp, Homo sapiens; identical to SEQ ID NO: 34483

SEQ ID NO: 43343 - DNA, 397 bp, Homo sapiens; identical to SEQ ID NO: 31756

SEQ ID NO: 43344 - DNA, 410 bp, Homo sapiens; identical to SEQ ID NO: 34485

SEQ ID NO: 43345 - DNA, 432 bp, Homo sapiens; identical to SEQ ID NO: 34486

SEQ ID NO: 43346 - DNA, 432 bp, Homo sapiens; identical to SEQ ID NO: 32940

SEQ ID NO: 43347 - DNA, 453 bp, Homo sapiens; identical to SEQ ID NO: 34488

SEQ ID NO: 43348 - DNA, 347 bp, Homo sapiens; identical to SEQ ID NO: 34489

SEQ ID NO: 43349 - DNA, 330 bp, Homo sapiens; identical to SEQ ID NO: 34490

SEQ ID NO: 43350 - DNA, 550 bp, Homo sapiens
tccaccgcggtggcggccgcccgggcaggtacaactttgctatttattagctggtccttgacatgaccaggttagcaaggtagaaagattacaaaggttggcatgaagaaggtaggcttgtatgagtgatggtggatgataacaaatctggggaaatgaaatgaactacagacaggacacatgcgatgtgcttcagagtgtgcagcttttccaatcaaggaaagcttcgtgcaggaggccaaacagaacctgaacgctgcagtatgacctcagggactcacatcactttctgaaatatctaacaaaaatcgcatttctgctgttgcactctgaattcctagaacttgtgcgtgaaccatttcactgcattcattttccccatgttattctttaaccagccttctttcttgatcacattcctagatctgagatgttttcctttcagtcttttcggcataagacctaattacatagctagttgtccagtaatgtctgggaagagaaaaccttaagtttgtcatctctcagtaggacaccccggctaaagcct

SEQ ID NO: 43351 - DNA, 462 bp, Homo sapiens; identical to SEQ ID NO: 33419

SEQ ID NO: 43352 - DNA, 582 bp, Homo sapiens; identical to SEQ ID NO: 34024

SEQ ID NO: 43353 - DNA, 260 bp, Homo sapiens; identical to SEQ ID NO: 34494

SEQ ID NO: 43354 - DNA, 404 bp, Homo sapiens; identical to SEQ ID NO: 34495

SEQ ID NO: 43355 - DNA, 220 bp, Homo sapiens; identical to SEQ ID NO: 34496

SEQ ID NO: 43356 - DNA, 186 bp, Homo sapiens; identical to SEQ ID NO: 34497

SEQ ID NO: 43357 - DNA, 416 bp, Homo sapiens; identical to SEQ ID NO: 34498

SEQ ID NO: 43358 - DNA, 424 bp, Homo sapiens
cgactactatagggcgaattggagctccaccgcggtggcggccgcccgggcaggtactatttaagccaattaattaaccatgatcactcaaacttaggcaatatgatacttatcatcttcatatacaaagaaaaatggataaactgcctataacaatatagcattaaaaatcctattgatgttcaatattctgtggctattaacactgtggggtgtttttaaaagtcaaaaatactgaactgtttagaaaattctgcatagtagtagtattacattgtgaattttattttcaaatttgatcaataaagatgaaaataataaaattaagcagtcaaaagaagtagcaaaaacaagatagtcattcatatatacagaacatatagattcatttctagttgattcaatcctatttatgtatttaaaa

SEQ ID NO: 43359 - DNA, 159 bp, Homo sapiens; identical to SEQ ID NO: 34500

SEQ ID NO: 43360 - DNA, 333 bp, Homo sapiens
acgactcactatagggtcgattgggccctctagatgcatgctcgagcggccgccagtgtgatggatatctgcagaattcgcccttagcgtggtcgcggccgaggtacgcgggggggcatcacggacctaccaatatgtgatgtcacccctggtggcccagctgtgtcatggagaaactccagctgggcccagagattctgcagcgggaaaatccaaggcttatttatgccaggctgagtggatttggccagtcaggaagcttctgccggttagctggccacgatatcaactatttggctttgtcaggtgttctctcaaaaattggcagaagtg

SEQ ID NO: 43361 - DNA, 330 bp, Homo sapiens; identical to SEQ ID NO: 34490

SEQ ID NO: 43362 - DNA, 422 bp, Homo sapiens; identical to SEQ ID NO: 34503

SEQ ID NO: 43363 - DNA, 307 bp, Homo sapiens; identical to SEQ ID NO: 34504

SEQ ID NO: 43364 - DNA, 206 bp, Homo sapiens; identical to SEQ ID NO: 34505

SEQ ID NO: 43365 - DNA, 435 bp, Homo sapiens; identical to SEQ ID NO: 34506

SEQ ID NO: 43366 - DNA, 412 bp, Homo sapiens
atacgactcactatagggcgaattggagctccaccgcggtggcggccgggcacagtggttcacacctgtaatcccaacactttgggaggctgaggcgggtggatcacaaggtcaggagatcgagaccatcctggccaacatggtgaaactctgtctctactaaaaaatacagaaaattagccagtcatggtggcacgttcctctagtcccagctactcgggaggctgaggcagaagaattacttcaacatgggatgtggaggttgcagtgagccgagatcgcgccactgcactccagcctggtgacagagcgagaccccatctcaaaaaaaaaaaaaagttgtatgtgacagctaaccataataaaaaaaaagaaagaaaaaagagagagaaagttgggacaacactaaatc

SEQ ID NO: 43367 - DNA, 160 bp, Homo sapiens; identical to SEQ ID NO: 34508

SEQ ID NO: 43368 - DNA, 445 bp, Homo sapiens; identical to SEQ ID NO: 34800

SEQ ID NO: 43369 - DNA, 342 bp, Homo sapiens; identical to SEQ ID NO: 34510
  misc_feature 310: n = A,T,C or G

SEQ ID NO: 43370 - DNA, 352 bp, Homo sapiens; identical to SEQ ID NO: 34511
  misc_feature 300, 329: n = A,T,C or G

SEQ ID NO: 43371 - DNA, 446 bp, Homo sapiens
gcgaattgggccctctagatgcatgctcgagcggccgccagtgtgatggatatctgcagaattcgccctttcgagcggccgcccgggcaggtacatgggactacaggcacgccccaccatgcccagctcatttttgtatttttagtagagacagggtttcaccatgttggccaggatgatcttgatctcttgacctcatgatccgcccctcttggcctcccaaagtgctgggatcacaggcgtgagccaccacacctggccctctatttattctctttaaagagagagaaaactatgagaggccaaaattatttaattaaatctttaccttagcacaagggaaaaaatggaatttgcctaatataggtgatgaagcatacacaatgaacagaaacaatcacattttagtaaaaggcaaaaatttgagacttataagctatatggta

SEQ ID NO: 43372 - DNA, 462 bp, Homo sapiens
tactatagggcgaattggagctccaccgcggtggcggccgcccgggcaggtacgcggggtcccagagagctcgtaggggaggacagtcaagggactcaagcgtctctcttgactccccttctctcgctgtgcagtggcggcgccgaggggtcgacgctcagggctaatctctatgagtcaccctcgaggccccgggtaatattgggtggatcacaagaactaatctttcatgatttggaaaccggaaggaaagaagcacttttgtagctgacttacctcaatgacatgaccagtgtctgagcctacaactgcgctatcttccctggatttttcttcaccttttccttactcatgagccaggtatgtgtttttagttccataaaaaagagccctagccaggcgtggtggctcacgcctgtagtctcagcactttgggaggctgtggcgggcagaccacttgac

SEQ ID NO: 43373 - DNA, 259 bp, Homo sapiens; identical to SEQ ID NO: 34514

SEQ ID NO: 43374 - DNA, 335 bp, Homo sapiens; identical to SEQ ID NO: 34515

SEQ ID NO: 43375 - DNA, 395 bp, Homo sapiens; identical to SEQ ID NO: 34516

SEQ ID NO: 43376 - DNA, 237 bp, Homo sapiens; identical to SEQ ID NO: 34517

SEQ ID NO: 43377 - DNA, 414 bp, Homo sapiens
tatagggcgaattggagctccaccgcggtggcggccgaggtactcaacaaataatagctgacaagtttgatagccagaaaacggcaaagctgggatgcaaacccaagcagtctgactcccaagcctcttaaccattcttaagagaccacctacctccattcttcttcgaacacatgtttttcctgtttgccacctgaatacgtggaaccaccatccacccagctggttaaaccagaatcactcagaaatctacctctccttcatattattcataactgccagtgttaaaattctaattgctggccaggcacggtggctcatgccagtaatcctagaactttgggaggccgcggcagggtggattccgaggtcaggagatcgagaccatcctggctaacatggtgaaaccccgtc

SEQ ID NO: 43378 - DNA, 550 bp, Homo sapiens
cgggcccccccctcgaggtacttctagaattaattaacgcgggggaaaaacagttaaaaagctatggcagtaagaaaggtgagaggtggtggtggcttagacaaggatgggagcagtggaggtggtttaaaaaaaaaaaaagtgatgggattctagatatatatttgaaggtgcagccagtaggactttataagtcttagtgcctgaccatttaaaaattgtgatgtttgtggccctttttcttaatacataatttaagatgacagtaggtcatcgtacttatcacgtcttttccattctcatgtttctgtacacaaggagctggcatcttctgaagaatcttatctaaactttttgggcttttttttttttagagaaaatcattagtcccattcttcttttgaatgctacttttccttctctaaaaactgaccatgaattatattctcattcatcaatttcttatttctttgtcagaaaagcagttagcattttttattattatgcaagtattcaacattcattgtaaaaaaaaaaaaaaaagcggccg

SEQ ID NO: 43379 - DNA, 401 bp, Homo sapiens; identical to SEQ ID NO: 31732

SEQ ID NO: 43380 - DNA, 401 bp, Homo sapiens; identical to SEQ ID NO: 34524

SEQ ID NO: 43381 - DNA, 270 bp, Homo sapiens; identical to SEQ ID NO: 34522

SEQ ID NO: 43382 - DNA, 410 bp, Homo sapiens; identical to SEQ ID NO: 34523
  misc_feature 355: n = A,T,C or G

SEQ ID NO: 43383 - DNA, 401 bp, Homo sapiens; identical to SEQ ID NO: 34524

SEQ ID NO: 43384 - DNA, 419 bp, Homo sapiens
ccgaggtacctggtgaacagcttctacttccatatgatctttcttttaagatgcagattaagcaaaatatcaacccaaagggtggtccctgatggcccaccagccctgtgcctggctcgtttcctatgtttcctagatttggtttcagacttgctcctcctgcagacactccctaaccagcatccttgcagaaaactggtgaactagaaaaggtctgtgtgggtcacgtggccacccaacaccacagcagtgtctaaggtatgcgtgggagcctgcacagcaggagcggggtcttctggagacccgcatgagatgcaaagggcagtggacaaggagccaagggaggtggctctagtcacgctggtatggtgccagcttgaggatgctgggcaagtcccgagccgtctgccttcctagta

SEQ ID NO: 43385 - DNA, 404 bp, Homo sapiens
tatagggcgaattggagctccaccgcggtggcggccgcccgggcaggtacgcgggggggcatcacggacctaccaatatgtgatgtcacccctggtggcccagctgtgtcatggagaaactccagctgggcccagagattctgcagcgggaaaatccaaggcttatttatgccaggctgagtggatttggccagtcaggaagcttctgccggttagctggccacgatatcaactatttggctttgtcaggtggaaggaacagcatatttaagttcttttctgtggaaaactcagaaattgagtctgtgggaagcacctcgaggacagaacatgttggatggtggagcacctttctatacgacttacaggacagcagatggggaattcatggctgttggagcaat

SEQ ID NO: 43386 - DNA, 551 bp, Homo sapiens
  misc_feature 341: n = A,T,C or G
ccctctagatgcatgctcgagcggccgccagtgtgatggatatctgcagaattcgccctttcgagcggccgcccgggcaggtacagtagtgcactcttggctcactgtagcctcgacctccggggctcaagtgatcctcctgccttagccccacaagtagtgggactataggcacacaccaccatgcccatctaagtttttgtattttatgtagagaccaggtttcaccatgttgcccaggctgatcttgacctcctgagctcaagtgatctgcccacctcggactcccaaaatgctgggattataggcgtaaaccaccatgcctggccttaaatcaactntagagtcaacatctcttatcactggagcttctagagaaactccatcacgtggtgctctctttcctgatgtgttgtgcccaaatagcttgttctcatcagatgacttatttgctatgatatatatacttcaagagctgctatatgtattacatacatcaaatctttctgtaaagtttgatttttgtttctttaaaaggaacataaatgttc

SEQ ID NO: 43387 - DNA, 385 bp, Homo sapiens; identical to SEQ ID NO: 34528

SEQ ID NO: 43388 - DNA, 446 bp, Homo sapiens
acgactactatagggcgaattggagctccaccgcggtggcggccgcccgggcaggtacagcactgtaggcaagtaaacgaaaccaaaggctggctcccctggccgaggcctgggactgatgcaagacagccagccagtcacctccgcctcccatgaacctcttggaaaacttctcctgtcccacttctgccaccctccagctccttgagagagccagagttgagaagaaaatgagcctgaagttgaaagggaaagttcttgcctgaaacagtgctgggaataagtccagaccatttccctcaagagccacctcttcactccttaagccagaggacaccacaaagacacagttaatggcctctcatgccactcctcaggtggcttgtgagggcagccagtgagggactgcaggatttcagggaagtagcttagatggcccactcaga

SEQ ID NO: 43389 - DNA, 418 bp, Homo sapiens; identical to SEQ ID NO: 31412

SEQ ID NO: 43390 - DNA, 418 bp, Homo sapiens; identical to SEQ ID NO: 34531

SEQ ID NO: 43391 - DNA, 328 bp, Homo sapiens; identical to SEQ ID NO: 34532

SEQ ID NO: 43392 - DNA, 576 bp, Homo sapiens
gactcactatagggcgaattgggccctctagatgcatgctcgagcggccgccagtgtgatggatatctgcagaattcgccctttcgagcggccgcccgggcaggtacaaagagtagctgccccttctcagggcagatgatgctttgagaacatactttggccattacccccagctttgaggaaaatgggctttggatgattattttatgttttagggacccccaacctcaggcaattcctacctcttcacctgaccctgcccccacttgccataaaacttagctaagttttgttttgtttttcagcgttaatgtaaaggggcagcagtgccaaaatataatcagagataaagcttaggtcaaagttcatagagttcccatgaactatatgactggccacacaggatcttttgtatttaaggattctgagattttgcttgagcaggattagataaggctgttctttaaatgtctgaaatggaacagatttcaaaaaaaaaccccacaatctagggtgggaacaaggaaggaaagatgtgaataggctgatgggcaaaaaaccaatttacccatcagt

SEQ ID NO: 43393 - DNA, 429 bp, Homo sapiens; identical to SEQ ID NO: 34534

SEQ ID NO: 43394 - DNA, 541 bp, Homo sapiens
gcgaattgggccctctagatgcatgctcgagcggccgccagtgtgatggatatctgcagaattcggcttcgagcggccgcccgggcaggtactagggcaggtggagttggcatgaacttaacagcagcagatactgtgatttttgttgacagtgactttaatcctcagaatgacttgcaagcagctgccagggctcatcgcattggccaaaacaagtctgttaaagttattcggctgattggtcgagacactgcggaagaaatagtctataggaaagcagcctccaaactgcagctcaccaacatgatcatagaaggaggccattttactctgggagcccagaaacccgctgccgatgctgacctccagttgagtgagatactcaaatttggtttggataaactgctggcctctgaggggagcaccatggatgaaatagacctggagtccatcctgggagaaacaaaagatggccagtgggtctctgatgccttgcctgcagcagaaggagggagcagagatcaagaggaaggaaaaaatc

SEQ ID NO: 43395 - DNA, 260 bp, Homo sapiens; identical to SEQ ID NO: 34536

SEQ ID NO: 43396 - DNA, 414 bp, Homo sapiens; identical to SEQ ID NO: 34537

SEQ ID NO: 43397 - DNA, 559 bp, Homo sapiens
agctccaccgcggtggcggccgaggtacgatcttggctcactgcaacctctccctcccgggttcaagtgattctcgtgcctcagcctcttgagtagctgggattacaggcgcgtgccactgcgtccggctaatttttgtatttttagtaagatggggtttcaccatgttggccaggctgatctcaaactcctgacctcatgtggtccacccaccttggcctcccaaagtgctgggattacaggcgtgagccaccacgctcagcctacaagcaattttttaaaaactgacacctattactgataaaattctctgtttaaaatcctatttactattttaaagataagtattagttttttttaaatacaataattctgttattgataaaatttaaggcattttcattgccttttgcagatttactcataactacctaacaaggaaagaaggtataattatttcagattggattatttattctaaaattaaattcttcactaatttattctaagatgaatttaatagtccatcaggaaattggttttataaagcttattttat

SEQ ID NO: 43398 - DNA, 417 bp, Homo sapiens; identical to SEQ ID NO: 34539

SEQ ID NO: 43399 - DNA, 420 bp, Homo sapiens; identical to SEQ ID NO: 34540

SEQ ID NO: 43400 - DNA, 476 bp, Homo sapiens
atagggcgaattgggccctctagatgcatgctcgagcggccgccagtgtgatggatatctgcagaattcgccctttcgagcggccgcccgggcaggtacatgggactacaggcacgccccaccatgcccagctcatttttgtatttttagtagagacagggtttcaccatgttggccaggatgatcttgatctcttgacctcatgatccgcccctcttggcctcccaaagtgctgggatcacaggcgtgagccaccacacctggccctctatttattctctttaaagagagagaaaactatgagaggccaaaattatttaattaaatctttaccttagcacaagggaaaaaatggaatttgcctaatataggtgatgaagcatacacaatgaacagaaacaatcacattttagtaaaaggcaaaaatttgagacttataagctatatggtagcttatttttgggtggggaagaaat

SEQ ID NO: 43401 - DNA, 426 bp, Homo sapiens; identical to SEQ ID NO: 34542
  misc_feature 369: n = A,T,C or G

SEQ ID NO: 43402 - DNA, 609 bp, Homo sapiens; identical to SEQ ID NO: 30476

SEQ ID NO: 43403 - DNA, 361 bp, Homo sapiens; identical to SEQ ID NO: 34544

SEQ ID NO: 43404 - DNA, 365 bp, Homo sapiens; identical to SEQ ID NO: 34545

SEQ ID NO: 43405 - DNA, 340 bp, Homo sapiens; identical to SEQ ID NO: 34546

SEQ ID NO: 43406 - DNA, 400 bp, Homo sapiens
actactatagggcgaattgggccctctagatgcatgctcgagcggccgccagtgtgatggatatctgcagaattcgcccttagcgtggtcgcggccgaggtacagtagtgcactcttggctcactgtagcctcgacctccggggctcaagtgatcctcctgccttagccccacaagtagtgggactataggcacacagcaccatgcccatctaagtttttgtattttatgtagagacaaggtttcaccatgttgcccaggctgatcttgagctcctgagctcaagtgatctgcccaccttggactcccaaaatgctgggattataggcgtaaaccaccatgcctggccttaaatcaactttagagtcaacatctcttatcactggagcttctggagaaac

SEQ ID NO: 43407 - DNA, 427 bp, Homo sapiens; identical to SEQ ID NO: 34548

SEQ ID NO: 43408 - DNA, 391 bp, Homo sapiens; identical to SEQ ID NO: 34549

SEQ ID NO: 43409 - DNA, 127 bp, Homo sapiens; identical to SEQ ID NO: 34550

SEQ ID NO: 43410 - DNA, 387 bp, Homo sapiens; identical to SEQ ID NO: 34551

SEQ ID NO: 43411 - DNA, 374 bp, Homo sapiens; identical to SEQ ID NO: 34552

SEQ ID NO: 43412 - DNA, 607 bp, Homo sapiens; identical to SEQ ID NO: 41334

SEQ ID NO: 43413 - DNA, 395 bp, Homo sapiens; identical to SEQ ID NO: 34554

SEQ ID NO: 43414 - DNA, 540 bp, Homo sapiens
cgggcccccccctcgaaagtcttctagaattaattaacgcggggggaggagaaagatggagtagcttggaaagattccagcactgagccgtgggccggtcatgagccacgataaaaaatgccagtttggcaaactcagcactcctgttccctgctcaggtatatgcgatctctactgagaagcaagcacaaaagtagacaaaagtattaatgagtatttcctttctccataagtgcaggactgttactcactactaaactctaccaagaatggaaacaaagaatattttctgaagatttttttgaagattaatttataccctataaaataaaacttgttagcttcgatgaagtcacttcatcttctctcctaccttatttttttaaataagtttttaggtcctgacattgacatcaaatacatgcacaccagaaaggcatttgcaccaccgtccccactcattagcgtacagagtgccttgctgtctcggctatagtacccccctgagctctagtggtaaactatctgctgtgaaaaaaa

SEQ ID NO: 43415 - DNA, 333 bp, Homo sapiens; identical to SEQ ID NO: 34556
  misc_feature 86: n = A,T,C or G

SEQ ID NO: 43416 - DNA, 301 bp, Homo sapiens
tccccgggtggcggccgccgggcaggtaccagaacagtcaagtcctgaatgcttggtgagacatatgatcatttgctttctgcaataattgccatagacttatttcttagtccccctaccccaaatgctaaattgaaaccctaccttttttttccagaatatcctgattatgaacttgatgaaagataccaagaaggtatctttgtaaggcaaggtggcgtcatcagacttaccataccaatcaaaggaaaaccattcccaatatgtaaatggaccaaggaaggccaggatattagtaagc

SEQ ID NO: 43417 - DNA, 416 bp, Homo sapiens; identical to SEQ ID NO: 34558

SEQ ID NO: 43418 - DNA, 386 bp, Homo sapiens; identical to SEQ ID NO: 34559

SEQ ID NO: 43419 - DNA, 441 bp, Homo sapiens
tatagggcgaattggagctccaccgcggtggcggccgcccgggcaggtactggctgcaaatataccatgaggtgtgtcaactgtataattccaggctcgtaggaaatatccatcctctgtgaacactaatatctttgggatgttatcccctctctgaaggtatacaaaaaataacttcttaagatcagcttaaaggaaaggtaatctgtatcttggcgaagaaaaaaaataactgagaattttactacaaaaaccactttcaaaatctaacatatctttcacattcgaaaccaaaatacttgagaccaactcaaaaataaattgcacaattagcatgatataaacgcatatggtcagttactacagcaagacaggaagggctgttacttccttttgtggtcataattttttttaaaatctctatttaccttacttgaccta

SEQ ID NO: 43420 - DNA, 412 bp, Homo sapiens; identical to SEQ ID NO: 31805

SEQ ID NO: 43421 - DNA, 392 bp, Homo sapiens; identical to SEQ ID NO: 34562

SEQ ID NO: 43422 - DNA, 340 bp, Homo sapiens
  misc_feature 52: n = A,T,C or G
tccaccgcggtggcggccgcccgggcaggtacatttgcttttaaaccaacanatgctgggaagggggcactgaatacttacacactgatagaactgcccacgctgacctccagtcacaaagcgcttcccatctggattccaagccacacttgtcaaactgtcttcatgagactggctcatttttgtccttagttctcctgtctataaggaaataaaactgtaaatgaggccttcaagatacccctctaaaggaaatatgtgagaaaaaaaaataactgggatgtctggctggtttcccagttcattctaagtagagtaatgaattaagtgaccctacaaa

SEQ ID NO: 43423 - DNA, 160 bp, Homo sapiens; identical to SEQ ID NO: 34564

SEQ ID NO: 43424 - DNA, 416 bp, Homo sapiens; identical to SEQ ID NO: 34565
  misc_feature 349: n = A,T,C or G

SEQ ID NO: 43425 - DNA, 399 bp, Homo sapiens; identical to SEQ ID NO: 34566

SEQ ID NO: 43426 - DNA, 385 bp, Homo sapiens; identical to SEQ ID NO: 34567

SEQ ID NO: 43427 - DNA, 419 bp, Homo sapiens; identical to SEQ ID NO: 30907

SEQ ID NO: 43428 - DNA, 410 bp, Homo sapiens; identical to SEQ ID NO: 31685
  misc_feature 212: n = A,T,C or G

SEQ ID NO: 43429 - DNA, 334 bp, Homo sapiens; identical to SEQ ID NO: 34570

SEQ ID NO: 43430 - DNA, 454 bp, Homo sapiens; identical to SEQ ID NO: 34610

SEQ ID NO: 43431 - DNA, 453 bp, Homo sapiens
gactcactatagggcgaattggagctccaccgcggtggcggccgccatcttgggtcatcgatgagcctcgccctgtgcctggtcccgcttgtgagggaaggacattagaaaatgaattgatgtgttccttaaaggatgggcaggaaaacagatcctgttgtggatatttatttgaacgggattacagatttgaaatgaagtcaccaaagtgagcattaccaatgagaggaaaacagacgagaaaatcttgatggcttcacaagacatgcaacaaacaaaatggaatactgtgatgacatgaggcagccaagctggggaggagataaccacggggcagagggtcaggattctggccctgctgcctaaactgtgcgttcataaccaaatcatttcatatttctaaccctcaaaaaaagctgttgtaatatctgatctctacggttccttctgggc

SEQ ID NO: 43432 - DNA, 454 bp, Homo sapiens
actcacttagggcgaattggagctccaccgcggtggcggccgcccgggcaggacatggtggatgattttaaatcaccctagtgtgctgagaccttgagaataaagtgtgtgattggtttcatacttgaagacggatataaaggaagaatatttcctttatgtgtttctccagaatggtgcctgtttctctctgggtctcaatgcctgggactggaggttgatagtttaagtgtgttcttaccgcctcctttttcctttaatcttatttttgatgaacacatatataggagaacatctatcctatgaataagaacctggtcatgctttactcctgtattgttattttgttcatttccaattgattctctacttttcccttttttgtattatgtgactaattagttggcatattgttaaaagtctctcaaattaggccagattctaaaacatgctg

SEQ ID NO: 43433 - DNA, 454 bp, Homo sapiens
attggagctccaccgcggtggcggccgaggtactttttttttttttttttttttttttttggaatgtaaattgtttttaatatatttaagagcacacagaagtcttgatttataaaaaaataaatatataacatgacaaatttactgatgatcctggagctctgaggtcaaactctttaaatgatcagtgaaaacataaaaccatccctgatctgttaacacacacaggagcatattccagttgtaaaaaacaaattccttgaaggctcagaacgaacaaaaatcagtctttatggcagaaagcacatccaaagctaggcaatgaagttcagcctgggccacgtgaacctttcaccagccagcctataacctatggagccaggacaggaaagcatgatccttcagctcatgacgccacccaggctttcagacaactgcagaatgaaagagtccc

SEQ ID NO: 43434 - DNA, 355 bp, Homo sapiens
cactactatagggcgaattggagctccaccgcggtggcggccgcccgggcaggtaccaaagagggcataataatcagtctcacagtagggttcaccatcctccaagtgaaaaacattgttccgaatgggctttccacaggctacacacacaaaacaggaaacatgccaagtttgtttcaacgcattgatgacttctccaaggatcttcctttggcatcgaccacattcaggggcaaagaatttctcatagcacagctcacaatacagggctcctttctcctctacaaatccaatgtaggccattgtatttttgcagtgagcgcagttgaattcttctgggtgccaagattttccc

SEQ ID NO: 43435 - DNA, 544 bp, Homo sapiens; identical to SEQ ID NO: 39183

SEQ ID NO: 43436 - DNA, 477 bp, Homo sapiens
ctacagggcgaattggagctccaccgcggtggcggccgccatcttgggtcatcgatgagcctcgccctgtgctttgtcccgcttgtgagggaaggacattagaaaatgaattgatgtgttccttaaaggatgggcaggaaaacagatcctgttgtggatatttatttgaacgggattacagatttgaaatgaagtcacaaagtgagcattaccaatgagaggaaaacagacgagaaaatcttgatggcttcacaagacatgcaacaagcaaaatggaatactgtgatgacatgaggcagccaagctggggaggagataaccacggggcagagggtcaggattctggccctgctgcctaaactgtgcgttcataaccaaatcatttcatatttctaaccctcaaaacaaagctgttgtaatatctgatctctacggttccttctgggcccaacattctccatatatccagccacactc

SEQ ID NO: 43437 - DNA, 413 bp, Homo sapiens; identical to SEQ ID NO: 34578

SEQ ID NO: 43438 - DNA, 374 bp, Homo sapiens
tacgactcactatatggcgaattgggccctctagatgcatgctcgagcggccgccagtgtgatggatatctgcagaattcgccctttcgagcggccgcccgggcaggtacagaaaaggtgaatctgtgttctgtatattctgcctaaggcaaagaaatgtttagctctctttaaaatagttccataattttttctaaaaagctttgcttgaaaactgtaagcttcccatatctggagcatttcactttaaatatttggataaatatgttaccttcttacttggacatttcatgtgtttagggattgtcttctaaattcttcctaattcatatagctgctaacacttcccgcagagctaaaccattacagatatg

SEQ ID NO: 43439 - DNA, 469 bp, Homo sapiens
cgcgtaatacgactactatagggcgaattggagctccaccgcggtggcggccgcccgggcaggtacagatctgggaactaaatattaaaaatgagtgtggctggatatatggagaatgttgggcccagaaggaaccgtagagatcagatattacaacagctttgttttgagggttagaaatatgaaatgatttggttatgaacgcacagtttaggcagcagggccagaatcctgaccctctgccccgtggttatctcctccccagcttggctgcctcatgtcatcacagtattccattttgtttgttgcatgtcttgtgaagccatcaagattttctcgtctgttttcctctcattggtaatgctcactttgtgacttcatttcaaatctgtaatcccgttcaaataaatatccacaacaggatctgttttcctgcccatcctttaaggaacacatcaattcattttct

SEQ ID NO: 43440 - DNA, 424 bp, Homo sapiens; identical to SEQ ID NO: 34581

SEQ ID NO: 43441 - DNA, 429 bp, Homo sapiens
tatagggcgaattgggccctctagatgcatgctcgagcggccgccagtgtgatggatatctgcagaattcgcccttagcgtggtcgcggccgaggtacagtaaaaatagaatataaaaaaaatgctacacatgtgtagggcagtttcattataatttgtccatctttgactgaaacattattattcagcgtatgactatatatacaagaaaacatacacacacacacacacacacatacacacatctggttttttttttttgagatggagtttcactcttgttgcccaagctggagtgcaatggcgcgatctcggctcactgcaacctctgcctcccaggttcaagcgattctcttgcctcagcctccaagtagctgggattacaggcacgcactaccatgcccggccaattttttgtatctttagtag

SEQ ID NO: 43442 - DNA, 448 bp, Homo sapiens; identical to SEQ ID NO: 38291

SEQ ID NO: 43443 - DNA, 600 bp, Homo sapiens
tccaccgcggtggcggccgcccgggcaggtacacattttaaaaatactaagtatccctccattaaataagcattttctggccaccgtgaggaccatgggaaagtatactgtgtagacaacatgaacacatatgaaacaattaaagggcagtgcaaagcagaaaacaataaagtgatcaattcaactgcagaattcactgcctaaggttttggcaataaaaataggtaagtgtttgaactatattttcttttgatgcttttggagtggtgtttttatttcatttcttaatatatttttcaagagaaattatctaatctagtttatctaaatcttttgagacatttcctatccgccttctcccttttccctggcaaaggagctcaacctgtgaaagtgcaaatgtgtgagctgcgtgtctctgcttaatcgttaatgctctgccattttccaaagcaactgtaattagtacctcggccgctctagaactagtggatcccccgggctgcaggaattcgatatcaagcttatcgataccgtcgacctcgagggggggcccggtacccagcttttgttccctttagtgagggttaattgcgcgct

SEQ ID NO: 43444 - DNA, 446 bp, Homo sapiens
ctactatagggcgaattggagctccaccgcggtggcggccgcccgggcaggtacgcggggaggcattgaggcagccagcgcaggggcttctgctgagggggcaggcggagcttgaggaaaccgcagataagtttttttctctttgaaagatagagattaatacaactacttaaaaaatatagtcaataggttactaagatattacttagcgttaagtttttaacgtaattttaatagcttaagattttaagagaaaatatgaagacttagaagagtagcatgaggaaggaaaagataaaaggtttctaaaacatgacggaggttgagatgaagcttcttcatggagtaaaaaatgtatttaaaagaaaattgagagaaaggactacagagccccgaattaataccaatagaagggcaatgcttttagattaaaatgaaggtgactt

SEQ ID NO: 43445 - DNA, 316 bp, Homo sapiens
tccaccgcggtggcggccgcccgggcaggtacagcattattagctggggctttcactgaaaaccccaggtctctttctattgtccccatatggttggagtcacaagagtgggagagatggccaagctctctgcagaggatcctggcagcagcctgaaccctcttgctacttccatcaaaggaaaaaaaaaatcaaatatttacccccacgagcttataatattacagagaactccaccatcctgccctgcaaaatatcctgggatttgactaatactagagctgcttttctagtccttgagtgactaggaaggaag

SEQ ID NO: 43446 - DNA, 477 bp, Homo sapiens
ttggagctccaccgcggtggcggccgccgggcaggtacaaaaagtatatgccagataaacttgcaagattggatccaagactattttgtaaggctttgtttaaagctttgggcttaaatgaaaatgactacaagtttgggttaaccaaagtattttttagacctggcaagtttgcagaatttgatcagatcatgaagtctgaccctgaccacttagcagagttggttaaagagtcaatcactggctcacatgcagtcgctggaagaaagttcagtggtgctcactctcagtcatcaaattgaaaaacaaaataaaatatcgagctgaagcctgcattaaaatgcaaaaaactattcgaatgtggctttgcaagaggagacacaaacctcgcattgatggtctggttaaggtgggcacactgaaaaaacgacttgataaatttaatgaggtagtcagtgtgttgaaagatggaaaacc

SEQ ID NO: 43447 - DNA, 466 bp, Homo sapiens
atagggcgaattggagctccaccgcggtggcggccgaggtactgcaccactctggaaaaaatgccttcaggttccttcccatcccccaaggcagcagcaaatccttcgtgtcgcctcctactggccaaggcagccaaagatttgaaagtctttggctcgtagatggccagatccgctaggactttcctgttgagctccaccttgcactttactaaattcccaatgagcgctggatacttcagtccatgttcctggctagcagctgtaattcgattaatccagagggtcctcatgttctttttcttcaggtatcgggctttggtgcatttcacaaaggctcgaatcacggttctgaccgccaacctgtagcagcgatttttccttccccggaagtgcctggcgtgcttcagcacctcctggatccgaaagtagcggtcggtgacgcgattccgcagccagagctgcg

SEQ ID NO: 43448 - DNA, 422 bp, Homo sapiens; identical to SEQ ID NO: 34683

SEQ ID NO: 43449 - DNA, 416 bp, Homo sapiens
tactatagggcgaattggagctccaccgcggtggcggccgccatcttgggtcatcgatgagcctcgccctgtgcctggtcccgcttgtgagggaaggacattagaaaatgaattgatgtgttccttaaaggatgggcaggaaaacagatcctgttgtggatatttatttgaacgggattacagatttgaaattgaagtcacaaagtgagcattaccaatgagaggaaaacagacgagaaaatcttgatggcttcacaagacatgcaacaaacaaagtggaatactgtgatgacatgaggcagccaagctggggaggagataaccacggggcagagggtcaggattctggccctgctgcctaaactgtgcgttcataacccaatcattttatatttctaaccctcaaaacaaagctg

SEQ ID NO: 43450 - DNA, 218 bp, Homo sapiens
tacgactcactatagggcgaattggagctccaccgcggtggcggccgccatcttgggtcatcgatgagcctcgccctgtgcctggtcccgcttgtgagggaaggacattagaaaatgaattgatgtgttccttaaaggatgggcaggaaaacagatcctgttgtggatatttatttgaacgggattacagatttgaaatgaaagtcacaatagtgagc

SEQ ID NO: 43451 - DNA, 317 bp, Homo sapiens
  misc_feature 252, 261: n = A,T,C or G
tactatagggcgaattggagctccaccgcggtggcggccgccatcttgggtcatcgatgagcctcgccctgtgcctggtcccgcttgtgagggaaggacattagaaaatgaattgatgtgttccttaaaggatgggcaggaaaacagatcctgttgtggatatttatttgaacgggattacagaatttgaaaatgaattcacaaagtgagcattaccaatgagaggaaaacagacgagaaaatcttgatggncttcacaangacatgtcaacaaaacaaatatggaaatactttgtgatgacatttgaggcaggcca

SEQ ID NO: 43452 - DNA, 440 bp, Homo sapiens
acgactcactatagggcgaattggagctccaccgcggtggcggccgaggtacccatcacgtgccagacacgttatctggagatagagatgtaaacaagacagagttcctgcctcaagcaacccaccatctagtaggcggaagacagactataaatacataatgcaagataatttctgatggtggcaagtgctccaaagacaatatgacagttaaataaagcaactgagtagagggagagggaaaaagcaactggggagaggaacatttatggctgagagatcaggaaaggcttctttggcgaaaagacactggagctgaagcctgaaggaagaaggctgagtggtgcggcagggctgggagttgcaggaagagctgacagcaagccccgtttgatggggggaagctggtgaaggatggcagagtccatgcagggcaccgt

SEQ ID NO: 43453 - DNA, 447 bp, Homo sapiens
atacgactactatagggcgaattggagctccaccgcggtggcggccgaggtacttgattttttatcagatggcctggaaaacccagtctcacaaaaatatgaaattatcagaaggattatagtgcaatcttatgttgaaagaatgaactacctcactagtagttcacgtgatgtctgacagatgttgagtttcattgtgtttgtgtgttcaaatttttaaatattctgagatactcttgtgaggtcactctaatgccctgggtgccttggcacagttttagaaataccagttgaaaatatttgctcaggaatatgcaactaggaaggggcagaatcagaatttaagctttcatattctagccttcagtcttgttcttcaaccatttttaggaactttcccataaggttatgttttccagcccaggcatggaaggatcacttgaggcc

SEQ ID NO: 43454 - DNA, 68 bp, Homo sapiens; identical to SEQ ID NO: 34597

SEQ ID NO: 43455 - DNA, 426 bp, Homo sapiens; identical to SEQ ID NO: 34598

SEQ ID NO: 43456 - DNA, 430 bp, Homo sapiens
aatacgactcactatagggcgaattggagctccaccgcggtggcggccgaggtacaagtgaagaaacaaggaggcacttcctgtaggagcactgatgtgccttgtccacactcccctctgagctttactggtaagagagctccgactgaacatgctgagcagttgagcacttttccatcagcaacaacagcgaggatggaaatggaaaggaaccgaactaaaatgcatttccctttgcagggcagagagctaagctcttaggaatagtgttatagaaataagcaccctaacttcaattcctgaaaatgttggttaatggagagaattttggagtttcacttaatattttcccatcggtcgccataaataagtcttcaggcgctcctagaagagtcccagcccaaggctcgattaaggaccacactgcagg

SEQ ID NO: 43457 - DNA, 343 bp, Homo sapiens; identical to SEQ ID NO: 34600

SEQ ID NO: 43458 - DNA, 414 bp, Homo sapiens; identical to SEQ ID NO: 34601

SEQ ID NO: 43459 - DNA, 678 bp, Homo sapiens; identical to SEQ ID NO: 36512

SEQ ID NO: 43460 - DNA, 420 bp, Homo sapiens
aattgggccctctagatgcatgctcgagcggccgccagtgtgatggatatctgcagaattcgcccttagcgtggtcgcggccgaggtacccctccaagccggacaacccgggcgaggacgcaccagcggaggacatggccagatactactcggcgctgcgacactacatcaacctcatcaccaggcagagatatggaaaacgatccagcccagagacactgatttcagacctcttgatgagagaaagcacagaaaatgttcccagaactcggcttgaagaccctgcaatgtggtgatgggaaatgagacttgctctctggccctttcctattttcagcccatatttcatcgtgtaaaaacgagaatccacccatcctaccaatgcatgcagccactgtgctgaattctgcaatgttttcc

SEQ ID NO: 43461 - DNA, 155 bp, Homo sapiens; identical to SEQ ID NO: 34604

SEQ ID NO: 43462 - DNA, 445 bp, Homo sapiens
cgactactatagggcgaattggagctccaccgcggtggcggccgcccgggcaggtacaagaattgctggaacctgggaggcggaggttgcagtgaaccaagattgcaccactgcactccagccggggtgacagagtgagactccgactgaaaataaataaataaataaataaataaataaataaatattatggatggtgaagggaatggtatagaattggagagattatcttactgaacacctgtagtcccagctttctctggaagtggtcgtatttgagcaggatgtgcacaaggcaattgaaatgcccataattagtttctcagctttgaatacactataaactcactggctgaaggaggaaattttagaaggaagctactaaaagatctaatttgaaaaactacaaaagcattaactaaaaaagtttattttccttttgtct

SEQ ID NO: 43463 - DNA, 452 bp, Homo sapiens; identical to SEQ ID NO: 34606

SEQ ID NO: 43464 - DNA, 446 bp, Homo sapiens
gcgaattggagctccaccgcggtggcggccgcccgggcaggtacgaccttggctcactgcaacctctccctcccgggttcaagtgattctcgtgcctcagcctcttgagtagctgggattacaggcgcgtgccactgcgtccggctaatttttgtatttttagtagagatggggtttcaccatgttggccaggctgatctcaaactcctgacctcatgtggtccacccaccttggcctcccaaagtgctgggattacaggcgtgagccaccacgctcagcctacaagcaattttttaaaaactgacacctattactgataaaattctctgtttaaaatcctatttactattttaaagataagtattagttttttttaaatacaataattctgttattgataaaatttaaggcattttcattgccttttgcagatttactcataact

SEQ ID NO: 43465 - DNA, 321 bp, Homo sapiens; identical to SEQ ID NO: 34608

SEQ ID NO: 43466 - DNA, 430 bp, Homo sapiens; identical to SEQ ID NO: 30864

SEQ ID NO: 43467 - DNA, 454 bp, Homo sapiens; identical to SEQ ID NO: 34610

SEQ ID NO: 43468 - DNA, 450 bp, Homo sapiens; identical to SEQ ID NO: 34611

SEQ ID NO: 43469 - DNA, 371 bp, Homo sapiens; identical to SEQ ID NO: 34612

SEQ ID NO: 43470 - DNA, 159 bp, Homo sapiens; identical to SEQ ID NO: 34613

SEQ ID NO: 43471 - DNA, 130 bp, Homo sapiens; identical to SEQ ID NO: 34614
  misc_feature 107: n = A,T,C or G

SEQ ID NO: 43472 - DNA, 559 bp, Homo sapiens; identical to SEQ ID NO: 34615

SEQ ID NO: 43473 - DNA, 404 bp, Homo sapiens; identical to SEQ ID NO: 34495

SEQ ID NO: 43474 - DNA, 422 bp, Homo sapiens; identical to SEQ ID NO: 34617

SEQ ID NO: 43475 - DNA, 441 bp, Homo sapiens
actactatagggcgaattggagctccaccgcggtggcggccgcccgggcaggtaccatacacaaggacatagcacctttgattagaagtatgttcaatacattattgtgaactacactaaaaataatgatttttcataagcaaaattctcagagtaacctgcaaaaacatccaccagatgaactgggttgaaaacaattaacagttccctctctaatgcaagttgcttctcagtattgggcaagttttctgtcttggtgtttaagtaaaaaggcatcttttatttgtgttaattccttgcaaacatagtgaatgttgtgagtagttattttcactactgcccagacaaaaggaaaataaacttttttagttaatgcttttgtagtttttcaaattagatcttttagtagcttccttctaaaatttcctccttcagccactg

SEQ ID NO: 43476 - DNA, 257 bp, Homo sapiens; identical to SEQ ID NO: 34619

SEQ ID NO: 43477 - DNA, 401 bp, Homo sapiens
gtaatacgactcactatagggcgaattggagctccaccgcggtggcggccgcccgggcaggtaccattcttatctcagaatgctgtaaaccatcagtagaagcagtttagatttggactgcatggtaaaatgaaaagtaataaccctccaaccacaacctagtcagggtattaataattatatgtagcaagaaaacaaagaagaaaataatattgaaaaaatggagattccccaaccagtttcatatttgaaggatctgagttgtatttttattaaggaaattttttttctgaatactgtcttccaaaatgttaacattaaaatctgaatcagaggactctgaatggaaaagaagtttgatcactgacacctagggctctgaagcgtgtgtggccacatgg

SEQ ID NO: 43478 - DNA, 181 bp, Homo sapiens; identical to SEQ ID NO: 34621

SEQ ID NO: 43479 - DNA, 471 bp, Homo sapiens; identical to SEQ ID NO: 40207

SEQ ID NO: 43480 - DNA, 561 bp, Homo sapiens; identical to SEQ ID NO: 31806

SEQ ID NO: 43481 - DNA, 388 bp, Homo sapiens; identical to SEQ ID NO: 34624

SEQ ID NO: 43482 - DNA, 371 bp, Homo sapiens; identical to SEQ ID NO: 34625

SEQ ID NO: 43483 - DNA, 392 bp, Homo sapiens; identical to SEQ ID NO: 34626

SEQ ID NO: 43484 - DNA, 289 bp, Homo sapiens
tccaccgcggtggccgagcggccgcccgggcaggtacgcgggggtggatcacaaggtcaggagatcaagacgattctggctaacatggtgaaaccccgtctctactaaaaatacaaaaaaattagccgggtgtggtggcgggcgcctgtagtcccagctactcaggaggctgaggcaggagaatggcgtgaacctgggaggtggagcttgcagtgagccaagatcacaccactgcactccagaatgggagagagagtgagactttctcaaaaaaaaaaaaaaaaaaaaa

SEQ ID NO: 43485 - DNA, 518 bp, Homo sapiens
agtgttaggaaaacactcccggtgacagctggtcttccaagagagtttttggtaactatcgcctcttggtcttctgacaccattgccaggaacggggcactttttcgtcttgtagttaggccctcgggaaacctttctaagttttttttaactccctcaaaaaaaggtttatgaaacgctgaacctcaagtttcatagacgtctttgtacactaaaaattctgcagcagaatatttttaaacattcgcagttttttgtaagctatatttttgtatatttaattgctattttaaaattttaatgcattttgctaatcactcctcaaaaataaaacatgcatgtaattgactcaaacgtgtaaataaaagcaaattttggaaaaaaaaaaaaaagcggccgccaccgcggtggagctccaattcgccctatagtgagtcgtattacgcgcgctcactggccgtcgttttacaacgtcgtgactgggaaaaccctggcgttacccaacttaatcgccttgc

SEQ ID NO: 43486 - DNA, 370 bp, Homo sapiens; identical to SEQ ID NO: 34629

SEQ ID NO: 43487 - DNA, 466 bp, Homo sapiens; identical to SEQ ID NO: 34630

SEQ ID NO: 43488 - DNA, 412 bp, Homo sapiens; identical to SEQ ID NO: 32376

SEQ ID NO: 43489 - DNA, 446 bp, Homo sapiens; identical to SEQ ID NO: 34632

SEQ ID NO: 43490 - DNA, 130 bp, Homo sapiens; identical to SEQ ID NO: 34633

SEQ ID NO: 43491 - DNA, 391 bp, Homo sapiens; identical to SEQ ID NO: 34634

SEQ ID NO: 43492 - DNA, 483 bp, Homo sapiens
gactactatgggcgaatgggagctccaccgcggtggcggccgaggtacagtagtgcactcttggctcactgtagcctcgacctccggggctcaagtgatcctcctgccttagccccacaagtagtgggactataggcacacagcaccatgcccatctaagtttttgtattttatgtagagacaaggtttcaccatgttgcccaggctgatcttgagctcctgagctcaagtgatctgcccaccttggactcccaaaatgctgggattataggcgtaaaccaccatgcctggccttaaatcaactttagagtcaacatctcttatcactggagcttctggagaaactccatcacgtggtgctctctttcctgatgtgttgtgcccaaatagcttgttctcatcagatgacttatttgctatgatatatatacttcaagagctgctatatgtattacatacatcaaatctttctggaaagtttga

SEQ ID NO: 43493 - DNA, 572 bp, Homo sapiens; identical to SEQ ID NO: 39307

SEQ ID NO: 43494 - DNA, 569 bp, Homo sapiens
acgactcactatagggcgaatgggagctccaccgcggtggcggccgaggtacatgtaatatgcagaggtgtttgtgagctgcagcagtagtgtatcatttgcatcttttgaacaattgtctttgggatccattgtgatgacatctgtctttattggaggaaagataattcttgatcaactccgtttttattattctcatgtctgacgatacatctgtgttctttgtccagtgacttttctggcaccgttaaccagctaaatttcatgtatgtgtcgttagtcttcatggtgttcccctcctgggatcccagaatcgtgttgctcttcttttcttgccaatgcatcttaataacatcagggaaaaatttctcaagaagacaaaggtatgttccagccttctggagctttgtttcagcaattgaaggaagaaaaatagtgggcttgggggaaacatctgcatcaagttgtttatcaagtgccaggcattctggtaggtaatttccatatttaatttcatttaatctttataacatccactttagataaatagtctccattatcttctttgt

SEQ ID NO: 43495 - DNA, 638 bp, Homo sapiens
cgcgtaatacgactcactatagggcgaattggagctccaccgcggtggcggccgcccgggcaggtacagtagtgcactcttggctcactgtagcctcgacctccggggctcaagtgatcctcctgccttagccccacaagtagtgggactataggcacacagcaccatgcccatctaagtttttgtattttatgtagagacaaggtttcaccatgttgcccaggctgatcttgagctcctgagctcaagtgatctgcccaccttggactcccaaaatgctgggattataggcgtaaaccaccatgcctggccttaaatcaactttagagtcaacatctcttatcactggagcttctggagaaactccatcacgtggtgctctctttcctgatgtgttgtgcccaaatagcttgttctcatcagatgacttatttgctatgatatatatacttcaagagctgctatatgtattacatacatcaaatctttctgtaaagtttgatttttgtttctttaaaaggaacataaatgttccaggaccaagggacacaaagaggttttaatttttagttctgtagcctcatatattttaacagaaatataaaaacagatggtagcagttttccagtggagaaaac

SEQ ID NO: 43496 - DNA, 428 bp, Homo sapiens; identical to SEQ ID NO: 34639

SEQ ID NO: 43497 - DNA, 570 bp, Homo sapiens
cgacccacgcgtccgtactcattggagcatgaaccctattgtgaactgctcatctgagggatctaggttgtgtgcttcatatgagaaactaatgcctgatgatctgtcactgtctcactttgcccccagatgagaccatctagttgcagaaaaataagctcagagtttccacggattctacattatgatgtgtattctcattttatggaagacatgttgccagagtaaagcacaatatattcatcttgaaatgtaatactgagaagatatggaagttatggaagttgtggccttcagaattgacacttacggagagactagaacagcgtgggtgagttgtgaggggcaggaagcatgtcttaatggacttaaccaattttcgtcaactattcacagtaaaatctttcaatgtacaaaatttaataatctgataaacaataaacaaaatatttgaataggcatttttcataagacgtacaaagggcagacaggcatacgaaaaggtgctcaacatttttgatcatcagacaaatgcaaatcaaaactacaatgagatattacgtgactcag

SEQ ID NO: 43498 - DNA, 454 bp, Homo sapiens; identical to SEQ ID NO: 33117

SEQ ID NO: 43499 - DNA, 446 bp, Homo sapiens; identical to SEQ ID NO: 43464

SEQ ID NO: 43500 - DNA, 416 bp, Homo sapiens; identical to SEQ ID NO: 34643

SEQ ID NO: 43501 - DNA, 436 bp, Homo sapiens; identical to SEQ ID NO: 34644

SEQ ID NO: 43502 - DNA, 427 bp, Homo sapiens; identical to SEQ ID NO: 34645
  misc_feature 305: n = A,T,C or G

SEQ ID NO: 43503 - DNA, 300 bp, Homo sapiens; identical to SEQ ID NO: 34646

SEQ ID NO: 43504 - DNA, 448 bp, Homo sapiens; identical to SEQ ID NO: 31011

SEQ ID NO: 43505 - DNA, 446 bp, Homo sapiens; identical to SEQ ID NO: 34648
  misc_feature 190: n = A,T,C or G

SEQ ID NO: 43506 - DNA, 453 bp, Homo sapiens
tatagggcgaattggagctccaccgcggtggcggccgaggtactttttttttttttttttttttttttttttttagagagcaagtgatttattaaagcaagacgttgaaacctttacattctgcagtgaagatcagggtgtcattgaaagacagtggaaaccaggatgaaagtttttacatgtcacacactacatttcttcaatattttcaccaggacttccgcaatgaggcttcgtttctgaagggacatctgatccgtgcatctcttcactcctaacttggctgcaacagcttccggaggggcatcaaatttggcaagacttaacttgaacagaggttcactaatgaagaagaagtctaacagctcaaaaacaagagctgggcaaaactcggcattggcctggtagcagcagagggccagcgtgaccagcaggagacacaccgacagcttc

SEQ ID NO: 43507 - DNA, 416 bp, Homo sapiens
tatagggctaattggagctccaccgcggtggcggccgaggtacttcatttaatttttgcctcttacagtctgatatcctgttgggcattctggacaacttggacccagtcatgttcttcaaatgcccttccccagagcctgccagcctggaggagctcccagaggtctacccagaaggacccagttccttaccagcctccctttctctgtcagtggggacgtcatcagccaagctggaagccattaatgaactaattcgttttgaccacatatataccaagcccctagtcttagagataccctctgagacagagagccaagctaatgtggtagtgaaaatcgaggaagcacctctcagcccctcagagaatgatcaccctgaattcattgtctcagtgaaggaagaacctgtagaa

SEQ ID NO: 43508 - DNA, 453 bp, Homo sapiens; identical to SEQ ID NO: 34651

SEQ ID NO: 43509 - DNA, 419 bp, Homo sapiens; identical to SEQ ID NO: 34652
  misc_feature 331: n = A,T,C or G

SEQ ID NO: 43510 - DNA, 394 bp, Homo sapiens; identical to SEQ ID NO: 34653

SEQ ID NO: 43511 - DNA, 328 bp, Homo sapiens; identical to SEQ ID NO: 34654

SEQ ID NO: 43512 - DNA, 589 bp, Homo sapiens
  misc_feature 16, 541: n = A,T,C or G
cgaatgggccctctanatgctgctcgagcggccgccagtgtgatggatatctgcagaattcggcttagcgtggtcgcggccgaggtactttttatttaaatgtttataaggcagatctatgagaatgatagaaaacatggtgtgtaatttgatagcaatattttggagattacagagttttagtaattaccaattacacagttaaaaagaagataatatattccaagcagatacaaaatatctaatgaaagatcaaggcaggaaaatgagtataactaattgacaatggaaaatcaattttaatgtgaattgcacattatcctttaaaagctttcaaaagaaagaattattgcagtctagttaattcagacagtgttaaatggtatcaggataaagaactgaagggcagaaagaattaattttcacttcatgtaacacacccagatttacaatggcttaaatgcaggaaaaagcagtggaagtagggaagtagtcaaggtctttctggtctctaatctgccttactctttgggtgtggctntgatcctctggagacagctgccagggctcctgttatatccacaatccc

SEQ ID NO: 43513 - DNA, 451 bp, Homo sapiens; identical to SEQ ID NO: 34656

SEQ ID NO: 43514 - DNA, 442 bp, Homo sapiens; identical to SEQ ID NO: 34657

SEQ ID NO: 43515 - DNA, 192 bp, Homo sapiens; identical to SEQ ID NO: 34658

SEQ ID NO: 43516 - DNA, 446 bp, Homo sapiens; identical to SEQ ID NO: 34659

SEQ ID NO: 43517 - DNA, 442 bp, Homo sapiens; identical to SEQ ID NO: 34660

SEQ ID NO: 43518 - DNA, 295 bp, Homo sapiens; identical to SEQ ID NO: 34661

SEQ ID NO: 43519 - DNA, 438 bp, Homo sapiens; identical to SEQ ID NO: 34662

SEQ ID NO: 43520 - DNA, 443 bp, Homo sapiens; identical to SEQ ID NO: 34663

SEQ ID NO: 43521 - DNA, 443 bp, Homo sapiens; identical to SEQ ID NO: 34664

SEQ ID NO: 43522 - DNA, 439 bp, Homo sapiens; identical to SEQ ID NO: 34665

SEQ ID NO: 43523 - DNA, 471 bp, Homo sapiens
tacactactatagggcgaattggagctccaccgcggtggcggccgcccgggcaggtacgcggggaggcgcttgccagtgcaatctgggcgatcgcttcctggtcctcgcctcctccgctgtctccctggagttcttgcaagtcggccaggatgtctcagtgtagacccttgtctgagaccgagctatgtggggcgacctctggctcctcccgcctgcctctgccaatccgggcactgggacagaggctgagtttgagaaagctgcagaggaggttaggcaccttaagaccaagccatcggatgaggagatgctgttcatctatggccactacaaacaagcaactgtgggcgacataaatacagaatggcccgggatgttggacttcacgggcaaggccaagtgggatgcctggaatgagctgaaagggacttccaaggaagatgccatgaaagcttacatcaacaaagtag

SEQ ID NO: 43524 - DNA, 458 bp, Homo sapiens
tacgactcactatagggcgaattgggccctctagatgcatgctcgagcggccgccagtgtgatggatatctgcagaattcgcccttagcgtggtcgcggccgaggtacttgggaggctgaggcaggaaaattcttgaacccaggagacggaagttgcagtgagctgagatcacaccactgcactccagcctggtgacagagcaagactccggctcttaaaaaaaaaaaaaaaaaaaaaggagagagagagaataaatagaaaagaatgtggctgggaattgtgaatcagaagattataccccccaattgtttttcaatccccttttctcaaataataaattagttaaatcagtttctgagttatgccactggctgatgaagagttgagaggtctctttgcagaatgatctttttgtttcgttttgtttcttcttctgcatttaaaaattaaaagattg

SEQ ID NO: 43525 - DNA, 478 bp, Homo sapiens; identical to SEQ ID NO: 43286

SEQ ID NO: 43526 - DNA, 424 bp, Homo sapiens; identical to SEQ ID NO: 34669
  misc_feature 374, 383: n = A,T,C or G

SEQ ID NO: 43527 - DNA, 372 bp, Homo sapiens; identical to SEQ ID NO: 34670

SEQ ID NO: 43528 - DNA, 551 bp, Homo sapiens
  misc_feature 18: n = A,T,C or G
cgtccgtggggaccgcanagtgagagtcgcgcccgggagtccgccgcctgcgccaggatggagttcgtgaaatgccttggccaccccgaagagttctacaacctggtgcgcttccggatcgggggcaagcggaaggtgatgcccaagatggaccaggactcgctcagcagcagcctgaaaacttgctacaagtatctcaatcagaccagtcgcagtttcgcagctgttatccaagcgctggatggggaaatgcgcaacgcagtgtgcatattttatctggttctccgagctctggacacactggaagatgacatgaccatcagtgtggaaaagaaggtcccgctgttacacaactttcactctttcctttaccaaccagactggcggttcatggagagcaaggagaaggatcgccaggtgctggaggacttcccaacgatctcccttgagtttagaaatctggctgagaaataccaaacagtgattgccgacatttgccggagaatgggcattgggatggcagagttttttgataagcatgtgacctctga

SEQ ID NO: 43529 - DNA, 407 bp, Homo sapiens; identical to SEQ ID NO: 34672
  misc_feature 50, 51, 52: n = A,T,C or G

SEQ ID NO: 43530 - DNA, 201 bp, Homo sapiens; identical to SEQ ID NO: 34673

SEQ ID NO: 43531 - DNA, 362 bp, Homo sapiens; identical to SEQ ID NO: 34674

SEQ ID NO: 43532 - DNA, 411 bp, Homo sapiens; identical to SEQ ID NO: 34675

SEQ ID NO: 43533 - DNA, 599 bp, Homo sapiens
  misc_feature 560: n = A,T,C or G
tgctcgagcggccgccagtgtgatggatatctgcagaattcggcttagcgtggtcgcggccgaggtactgctagtaaaaccaatgaatgtttaactccttcataagcaaaattatttttatgtgatctctaagaaattcctcctttcacatttttctgttttcatacaggtcctcatgctgataccgccagtggatgccagaatttgcagtgtggttttcgagcctgctgccgctctggcgaatgacccttgacttctgatctttgtctacttcatttagctgagcaggctttctttcatgcactttactcatagcacatttcttgtgttaaccatccctttttgagcgtgacttgttttggccccatttcttacaacttcagaaatcttaatttaccagtgaattgtaatgttgtttctcttgcaaattatacttttggtttagaaagggattaggtcttttcaaaagggtgagaacagtcttacatttttcttttaaatgaaacgctttaaagaatgttggtaatgccatgtcatttaaagtatttcatagataattntgagttttaaagtccatggaggtgattggttctctttac

SEQ ID NO: 43534 - DNA, 576 bp, Homo sapiens
gaattgggccctctagatgcatgctcgagcggccgccagtgtgatggatatctgcagaattcggctttcgagcggccgcccgggcaggtgtggattcagtgaatctaggaagacagcagcagacaggattccaggaaccagtgtttgatgaagctaggactgaggagcaagcgagcaagcagcagttcgtggtgaagataggaaaagagtccaggagccagtgcgatttggtgaaggaagctaggaagaaggaaggagcgctaacgatttggtggtgaagctaggaaaaaggattccaggaaggagcgagtgcaatttggtgatgaaggtagcaggcggcttggcttggcaaccacacggaggaggcgagcaggcgttgtgcgtagaggatcctagaccagcatgccagtgtgccaaggccacagggaaagcgagtggttggtaaaaatccgtgaggtcggcaatatgttgtttttctggaacttacttatggtaaccttttatttattttctaatataatggggggagtttcgtacctcggccgcgaccacgctaagccgaattccagcacactg

SEQ ID NO: 43535 - DNA, 419 bp, Homo sapiens
tacgactcactatagggcgaattggagctccaccgcggtggcggccgcccgggcaggtacaaagagtagctgccccttctcaggcaatgatgctttgagaacatactttggccattacccccactttgagaaaatgggctttggatgattattttatgtttaggacccccaacctcagcaattctccttttaacagaccctgcccccacttgccataaaacttagctaagttttgttttgtttttcagcgttaatgtaaaggggcagcagtgccaaaatataatcagagataaagcttaggtcaaagttcatagagttcccatgaactatatgactggccacacaggatcttttgtatttaaggattctgagattttgcttgagcaggattagataaggctgttctttaaatgtctgat

SEQ ID NO: 43536 - DNA, 409 bp, Homo sapiens; identical to SEQ ID NO: 34679

SEQ ID NO: 43537 - DNA, 306 bp, Homo sapiens; identical to SEQ ID NO: 34680
  misc_feature 44: n = A,T,C or G

SEQ ID NO: 43538 - DNA, 325 bp, Homo sapiens; identical to SEQ ID NO: 34681

SEQ ID NO: 43539 - DNA, 386 bp, Homo sapiens; identical to SEQ ID NO: 34682

SEQ ID NO: 43540 - DNA, 422 bp, Homo sapiens; identical to SEQ ID NO: 34683

SEQ ID NO: 43541 - DNA, 420 bp, Homo sapiens; identical to SEQ ID NO: 34684

SEQ ID NO: 43542 - DNA, 460 bp, Homo sapiens
agggcgaattgggccctctagatgcatgctcgagcggccgccagtgtgatggatatctgcagaattcgcccttagcgtggtcgcggccgaggtacaaaaagaacaatataattttcacatgaacccttggctgtagttgcctttcctagctccactctaaggctaggcatcttcaaagacgttttcccatatgctgtcttaattcttttcactcattcacccttcttcccaatcatctggctggcatcctcacaattgagttgaagctgttcctcctaaaacaatcctgacttttattttgccaaaatcaatacaatcctttgaattttttatctgcataaattttacagtagaatatgatcaaaccttcatttttaaacctctcttctctttgacaaaacttccttaaaaaagaatacaagataatataggtaaataccctccactcaaggaggtagaa

SEQ ID NO: 43543 - DNA, 458 bp, Homo sapiens
taatacactactatagggcgaattggagctccaccgcggtggcggccgcccgggcaggtaccttcattgcgatcaaaccagatggggtccagcggggtcttgtgggagagattatcaagcgttttgagcagaaaggattccgccttgttggtctgaaattcatgcaagcttccgaagatcttctcaaggaacactacgttgacctgaaggaccgtccattctttgccggcctggtgaaatacatgcactcagggccggtagttgccatggtctgggaggggctgaatgtggtgaagacgggccgagtcatgctcggggagaccaaccctgcagactccaagcctgggaccatccgtggagacttctgcatacaagttggcaggaacattatacatggcagtgattctgtggagagtgcagagaaggagatcggcttgtggcttcaccctgaggaactg

SEQ ID NO: 43544 - DNA, 444 bp, Homo sapiens; identical to SEQ ID NO: 31290

SEQ ID NO: 43545 - DNA, 413 bp, Homo sapiens; identical to SEQ ID NO: 34688

SEQ ID NO: 43546 - DNA, 418 bp, Homo sapiens
cactactatagggcgaattggagctccaccgcggtggcggccgaggtacttgtatggggctgtcactgacttgacatgctgctgcagttccttggtcagctgatccttgtcatgggacaggaactgtggggtcaggacaataaaggccttcaccacccagaggcattaatgatgtcattactcctccccaggaaacaaatgtagccctcttcatccatctttcctctgtccccagtgttgtagaagtccccacattccactttagctgtcttctctgggtcaccctcatagcacatgaagaggctcacaggcctgacaggtttgattctgatgccaatgtttccttctgtgttaggtggcaggatgccgcccttgtcatcaatgacctggacgtcataggggtggagtggccttcccc

SEQ ID NO: 43547 - DNA, 267 bp, Homo sapiens; identical to SEQ ID NO: 34690

SEQ ID NO: 43548 - DNA, 441 bp, Homo sapiens; identical to SEQ ID NO: 33251
  misc_feature 199, 200: n = A,T,C or G

SEQ ID NO: 43549 - DNA, 416 bp, Homo sapiens; identical to SEQ ID NO: 34388

SEQ ID NO: 43550 - DNA, 426 bp, Homo sapiens; identical to SEQ ID NO: 34693

SEQ ID NO: 43551 - DNA, 447 bp, Homo sapiens
ctactatagggcgaattggagctccaccgcggtggcggccgaggtacatgggactacaggcacgccccaccatgcccagctcatttttgtatttttagtagagacagggtttcaccatgttggccaggatgatcttgatctcttgacctcatgatccgcccgtcttggcctcccaaagtgctgggatcacaggcgtgagccaccacacctggccctctatttattctctttaaagagagagaaaactatgagaggccaaaattatttaattaaatctttaccttagcacaagggaaaaaaatggaatttgcctaatataggtgatgaagcatacacaatgaatagaaacaatcacattttagtaaaaggcaaaaatttgagacttataagctatatggtagcttatttttgggtggggaagaaatgagaaaagaatataacatctct

SEQ ID NO: 43552 - DNA, 439 bp, Homo sapiens
gcgaattggatctccaccgcggtggcggccgcccgggcaggtacagatctgggaactaaatattaaaaatgagtgtggctggatatatggagaatgttgggcccagaaggaaccgtagagatcagatattacaacagctttgttttgagggttagaaatatgaaatgatttggttatgaacgcacagtttaggcagcagggccagaatcctgaccctctgccccgtggttatctcctccccagcttggctgcctcatgtcatcacagtattccattttgtttgttgcatgtcttgtgaagccatcaagattttctcgtctgttttcctctcattggtaatgctcactttgtgacttcatttcaaatctgtaatcccgttcaaataaatatccacaacaggatctgttttcctgcccatcctttaaggaacacatcaatt

SEQ ID NO: 43553 - DNA, 467 bp, Homo sapiens; identical to SEQ ID NO: 33168

SEQ ID NO: 43554 - DNA, 408 bp, Homo sapiens; identical to SEQ ID NO: 34697
  misc_feature 195, 197, 208: n = A,T,C or G

SEQ ID NO: 43555 - DNA, 437 bp, Homo sapiens; identical to SEQ ID NO: 34698

SEQ ID NO: 43556 - DNA, 443 bp, Homo sapiens; identical to SEQ ID NO: 34699

SEQ ID NO: 43557 - DNA, 432 bp, Homo sapiens; identical to SEQ ID NO: 34700

SEQ ID NO: 43558 - DNA, 159 bp, Homo sapiens
ccaccgcggtggcggccgaggtacttttttttttttttttttttttttttttttttttttttttttttttttttttttttttttttttttttttttttttctttccgcccccgggccggtttttcccccccggggggggggaaaaaaaaaaaaaaaaaa

SEQ ID NO: 43559 - DNA, 427 bp, Homo sapiens; identical to SEQ ID NO: 34702

SEQ ID NO: 43560 - DNA, 518 bp, Homo sapiens
cgcttccttctgaagtgtcgctagttgctgcctcgtatctcaggtttttctctgtttttgagaaatggacagttttttgaccaggatgtgacttcatgtttcctatggtgacttctaaaaccagcacagaatgatatgactcaacacagaccgacttggttatggggatgatgagccgcacagacctcactagttgtgcacaaataatgtgctatgatggggtgtaaagtgaaggcagaagagggtcagccgcattgttatgatactgggaaagtgctggtcaacgatttgagttagtttttagatatacattgaaatctttaatcagacattctcaagtttcacacagtagtttttgatgttatgtacacacacaccaaatgtgtaacagttcaccacttccagagtgtggtcatgcccaaaacatgtttaagaaaggaaaggcagtagctccttgctaacgatgtttcaggaggtttggggcacttggttttaatgagcttttgtcatttagggct

SEQ ID NO: 43561 - DNA, 401 bp, Homo sapiens; identical to SEQ ID NO: 34704

SEQ ID NO: 43562 - DNA, 368 bp, Homo sapiens; identical to SEQ ID NO: 34705
  misc_feature 302, 331, 332, 333, 348, 351, 359, 360: n = A,T,C or G

SEQ ID NO: 43563 - DNA, 441 bp, Homo sapiens; identical to SEQ ID NO: 34706

SEQ ID NO: 43564 - DNA, 192 bp, Homo sapiens; identical to SEQ ID NO: 34707

SEQ ID NO: 43565 - DNA, 631 bp, Homo sapiens; identical to SEQ ID NO: 34708

SEQ ID NO: 43566 - DNA, 184 bp, Homo sapiens; identical to SEQ ID NO: 34709

SEQ ID NO: 43567 - DNA, 494 bp, Homo sapiens; identical to SEQ ID NO: 34710

SEQ ID NO: 43568 - DNA, 635 bp, Homo sapiens; identical to SEQ ID NO: 34711

SEQ ID NO: 43569 - DNA, 182 bp, Homo sapiens; identical to SEQ ID NO: 34712

SEQ ID NO: 43570 - DNA, 676 bp, Homo sapiens; identical to SEQ ID NO: 42998
  misc_feature 337, 347: n = A,T,C or G

SEQ ID NO: 43571 - DNA, 430 bp, Homo sapiens; identical to SEQ ID NO: 34714

SEQ ID NO: 43572 - DNA, 537 bp, Homo sapiens; identical to SEQ ID NO: 34715

SEQ ID NO: 43573 - DNA, 429 bp, Homo sapiens
  misc_feature 403: n = A,T,C or G
ccaccgcggtggcggccgcccgggcaggtacgtgaatgtttgcctagaagtcctgttccctatataataatactttgataatcatttcaaatgccaacccttccttaatataaaagttttgcgttatgttaaataaactatttttttctttattcttttcttttagctttatcttcaagccaggatgaagggagactgggcaagactcttacgccccacactgcaatttggtcttgttgccgtatccatttatgtgggcctttctcgagtttctgattataaacaccactggagcgatgtgttgactggactcattcagggagctctggttgcaatattagttgtaagtatacaggtcaacagcctacatcttgatattgctaaacatttatataagtaaatnaaaaaaaaaaaaaaaaaaaaaaaaaa

SEQ ID NO: 43574 - DNA, 424 bp, Homo sapiens; identical to SEQ ID NO: 34717

SEQ ID NO: 43575 - DNA, 417 bp, Homo sapiens
cgtaatacgactactatagggtcgattggagctccaccgcggtggcggccgaggtaccatttgccttttgggctcaagcgattctcctgcctcagcctcccaagtagctgggattacaggcacctgccaccatgcccggctaatttttgtaattttagtagagacagggtttcaccatgttgcccaggctggtttcgaactcctgacctcaggtgatccacccgcctcggcctcccaaagtgctgggattacaggcttgagcccccgcgcccagccatcaaaatgctttttatttctgcatatgttgaatactttttacaatttaaaaaaatgatctgttttgaaggcaaaattgcaaatcttgaaattaagaaggcaaaaatgtaaaggagtcaaaactataaatcaagtatttgg

SEQ ID NO: 43576 - DNA, 410 bp, Homo sapiens; identical to SEQ ID NO: 34720

SEQ ID NO: 43577 - DNA, 351 bp, Homo sapiens; identical to SEQ ID NO: 34721

SEQ ID NO: 43578 - DNA, 372 bp, Homo sapiens; identical to SEQ ID NO: 34722

SEQ ID NO: 43579 - DNA, 433 bp, Homo sapiens; identical to SEQ ID NO: 34723

SEQ ID NO: 43580 - DNA, 483 bp, Homo sapiens; identical to SEQ ID NO: 43492

SEQ ID NO: 43581 - DNA, 570 bp, Homo sapiens; identical to SEQ ID NO: 40617

SEQ ID NO: 43582 - DNA, 461 bp, Homo sapiens
  misc_feature 233, 308: n = A,T,C or G
ccggcaggtacacgaataccgagagtgaatgctgaaggaatgatccccattggtggtgaccctcaggtgagactagggtgcctgtgtttcagcaaagcctgtgcaattggaatgcagggctcctaagattccatgacacccctaccttctaattctgttattgcaactgcagacggttacctggcacgctggccacaatctacctcactcttatcagagtctgagcagtgctntcagctctgagttgaggcacctcgaaccttgtttttgtggtgaaggatcctaaagtgctgtggggagtgatcacnatttttcacaacattaagttaagaatttcagttactgacatccctcagttctgattaaacctatttgatttcaccagtttttaacccatcatatgtttgggtttcttctccccagtccctgactccacctcttctgccacaaacgtcaacatg

SEQ ID NO: 43583 - DNA, 320 bp, Homo sapiens; identical to SEQ ID NO: 34727

SEQ ID NO: 43584 - DNA, 222 bp, Homo sapiens; identical to SEQ ID NO: 34728

SEQ ID NO: 43585 - DNA, 448 bp, Homo sapiens
cgcgcgtaatacgactcactatagggcgaattggagctccaccgcggtggcggccgaggtactttttttttttttttttttaagaattgtaaaattttattttccacacatcaatattcttattaacacagcttgattgaaagaattctgaccagtggctggtcattacatgcagtggctcatgcctgtaaccagcactttgagaggcccaggcgggcggatcacctgaggtccggagttcaagactagcctgacaaacatggagaaaccccatccctactaaaaatacaaaattagctgggcgtggtggcacatgcctgtaatcctagctactcaagaggctgaagcagaatcacttgaaccttggaggcggaggtcgtggtgggctgagatcatgccattgcactccagcctgggcaacaagagtgaaactccagctcaaaaaaaa

SEQ ID NO: 43586 - DNA, 221 bp, Homo sapiens; identical to SEQ ID NO: 34730

SEQ ID NO: 43587 - DNA, 430 bp, Homo sapiens; identical to SEQ ID NO: 34731

SEQ ID NO: 43588 - DNA, 383 bp, Homo sapiens
actactatagggcgaattggagctccaccgcggtggcggccgaggtactgtggcatggcgcagtgggtgacagatggccacatagcggtcaaaagccatggccagcagcactgtggattccatgccagataaggagtggatggcaaacatctgtagcagacaagcatcaaactggatggtagtggaattgaaccagaagatggccagcattttgggcatggatgaggtggagatgaggatgtcaatgcctgaaagcatgcaaagaaatatatacatgggctcatgcaggctgtgctcagtccgcacaatgtagatgattgtcaagttacctagcacagcaataaggtagagggagcacaatgggaaggccaaccagaactgag

SEQ ID NO: 43589 - DNA, 432 bp, Homo sapiens; identical to SEQ ID NO: 34733

SEQ ID NO: 43590 - DNA, 401 bp, Homo sapiens
cgactcactatagggcgaattggagctccaccgcggtggcggccgaggtacgcgggggcagcagagcgaaaggtggtggagtcctgaaggagggcctgatgtcttcatcattctcaaattcttaggacggtcgggccctggaaggaacgctctcggaattggccgcggaaaccgatctgcccgttgggtttgtgaaacagagaaagataggcggccatggtccaaccttgaaggcttatcaggagggcagacttcaaaagctactaaaaatgaacggccctgaagatcttcccaagtcctatgactatgaccttatcatcattggaggtggctcaggaggtctggcagctgctaaggaggcagcccaatatggcaagaaggtgaatggtcctggactttgt

SEQ ID NO: 43591 - DNA, 273 bp, Homo sapiens; identical to SEQ ID NO: 34735

SEQ ID NO: 43592 - DNA, 437 bp, Homo sapiens; identical to SEQ ID NO: 34736

SEQ ID NO: 43593 - DNA, 561 bp, Homo sapiens; identical to SEQ ID NO: 31806

SEQ ID NO: 43594 - DNA, 424 bp, Homo sapiens; identical to SEQ ID NO: 34738

SEQ ID NO: 43595 - DNA, 438 bp, Homo sapiens; identical to SEQ ID NO: 36619

SEQ ID NO: 43596 - DNA, 435 bp, Homo sapiens; identical to SEQ ID NO: 34740

SEQ ID NO: 43597 - DNA, 445 bp, Homo sapiens; identical to SEQ ID NO: 34741

SEQ ID NO: 43598 - DNA, 215 bp, Homo sapiens; identical to SEQ ID NO: 34742

SEQ ID NO: 43599 - DNA, 439 bp, Homo sapiens; identical to SEQ ID NO: 34743

SEQ ID NO: 43600 - DNA, 159 bp, Homo sapiens; identical to SEQ ID NO: 34744

SEQ ID NO: 43601 - DNA, 469 bp, Homo sapiens; identical to SEQ ID NO: 34745

SEQ ID NO: 43602 - DNA, 469 bp, Homo sapiens; identical to SEQ ID NO: 34746

SEQ ID NO: 43603 - DNA, 473 bp, Homo sapiens
  misc_feature 32, 389, 391, 402: n = A,T,C or G
taccggggccccccctcgagaatacttctagnattaattaacgcggggtccaaaggtgaccaaatgacgagccctcgcctctttcttctgaagagtactctataaatctagtggaaacatttctgcacaaactagattctggacaccagtgtgcggaaatgcttctgctacatttttagggtttgtctacattttttgggctctggataaggaattaaaggagtgcagcaataactgcactgtctaaaagtttgtgcttattttcttgtaaatttgaatattgcatattgaaatttttgtttatgatctatgaatgtttttcttaaaatttacaaagctttgtaaattagattttctttaataaaatgccatttgtgcaagaaaaaaananaaaaaaaaaanaaaaaaaaaaaaaaaaaaaaaaaattaaaaaaaaaaaaaaaggcggccgccaccgggggggacctccaatt

SEQ ID NO: 43604 - DNA, 458 bp, Homo sapiens
gcgcgtaatacgactcactatagggcgaattggagctccaccgcggtggcggccgcccgggcaggtacgcggggaagcgatgaaatccaaaggtgaatcttttggttggtgattttgatgatagccacaaagcaagcaggctgtatggtagccttgaaaaccaacaggccacaatcacagtgaaaacctcaggttggcagccactggaggatacaaaatgagtttggatctccttcaatgccccattcccagagaactgtcattatttgacctgctggtagttccctaaaggacgtgcaaggatgtttttatttgactggacacttgaagcttgccctgtatgaacagcccccatcttcccatgcttgtcaaaaatcagaggcaactaacactgcggcttcctgagagtctcactctgtcacccaggctggagagcaattgcacaaacacttggctca

SEQ ID NO: 43605 - DNA, 287 bp, Homo sapiens; identical to SEQ ID NO: 34749

SEQ ID NO: 43606 - DNA, 429 bp, Homo sapiens; identical to SEQ ID NO: 34750

SEQ ID NO: 43607 - DNA, 420 bp, Homo sapiens; identical to SEQ ID NO: 34795

SEQ ID NO: 43608 - DNA, 420 bp, Homo sapiens; identical to SEQ ID NO: 34752

SEQ ID NO: 43609 - DNA, 485 bp, Homo sapiens; identical to SEQ ID NO: 33422

SEQ ID NO: 43610 - DNA, 578 bp, Homo sapiens; identical to SEQ ID NO: 30972
  misc_feature 523: n = A,T,C or G

SEQ ID NO: 43611 - DNA, 360 bp, Homo sapiens; identical to SEQ ID NO: 33460

SEQ ID NO: 43612 - DNA, 550 bp, Homo sapiens
gtatacgactcactatagggcgaatgggagctccaccgcggtggcggccgccatcttgggtcatcgatgagcctcgccctgtgcctggtcccgcttgtgagggaaggacattagaaaatgaattgatgtgttccttaaaggatgggcaggaaaacagatcctgttgtggatatttatttgaacggattacagatttgaaatgaagtcacaaagtgagcattaccaatgagaggaaaacagacgagaaaatcttgatggcttcacaagacatgcaacaaacaaaatggaatactgtgatgacatgaggcagccaagctggggaggagataaccacggggcagagggtcaggattctggccctgctgcctaaactgtgcgttcataaccaaatcatttcatatttctaaccctcaaaacaaagctgttgtaatatctgatctctacggttccttctgggcccaacattctccatatatccagccacactcatttttaatatttagttcccagatctgtacctcggccgctctagaactagtggatcccccgg

SEQ ID NO: 43613 - DNA, 442 bp, Homo sapiens
atacgactcactatagggcgaattggagctccaccgcggtggcggccgcccgggcaggtacagtagtgcactcttggctcactgtagcctcgacctccggggctcaagtgatcctcctgccttagccccacaagtagtgggactataggcacacagcaccatgcccatctaagtttttgtattttatgtagagacaaggtttcaccatgttgcccaggctgatcttgagctcctgagctcaagtgatctgcccaccttggactcccaaaatgctgggattataggcgtaaaccaccatgcctggccttaaatcaactttagagtcaacatctcttatcactggagcttctggagaaactccatcacgtggtgctctctttcctgatgtgttgtgcccaaatagcttgttctcatcagatgacttatttgctatgatatatat

SEQ ID NO: 43614 - DNA, 658 bp, Homo sapiens; identical to SEQ ID NO: 32642

SEQ ID NO: 43615 - DNA, 436 bp, Homo sapiens; identical to SEQ ID NO: 34762

SEQ ID NO: 43616 - DNA, 435 bp, Homo sapiens; identical to SEQ ID NO: 34763

SEQ ID NO: 43617 - DNA, 372 bp, Homo sapiens; identical to SEQ ID NO: 34272

SEQ ID NO: 43618 - DNA, 93 bp, Homo sapiens; identical to SEQ ID NO: 34765
  misc_feature 83: n = A,T,C or G

SEQ ID NO: 43619 - DNA, 486 bp, Homo sapiens
tacgactcactatagggcgaattggagctccaccgcggtggcggccgcccgggcaggtacaaggctaagcattttaactttatactggaaaaaaaatcaaacaaaggggagggataaaggacttagtcatctttgcactggaaaacaaaatatgtaattaaattcccatagctgcatgtaacattgaattcttccaggttaaaaaaaaaagttaatcctgtgatattaatggaatgacattttgaggtcttgagaatgggcacaaaagtgggaaatgaatttcagtatgggcaaagacactgaggatgatgttgattagataattcactccgtaatgatcatgctgtgtgctagtaagtataaccctggaaagatcttgagatgcttcccagcctgttcacagatcccctgggccagaacactccttaggaaaaacagtcagctacatattaggcagcaacacgaaggggtctttgaacaaaatga

SEQ ID NO: 43620 - DNA, 556 bp, Homo sapiens; identical to SEQ ID NO: 40082
  misc_feature 390, 485: n = A,T,C or G

SEQ ID NO: 43621 - DNA, 451 bp, Homo sapiens
cgcgtaatacgactcactatagggcgaattggagctccaccgcggtggcggccgaggtactttttttttttttttttttttttgggatggagtcttgctctgtctcccaagctggagtgcagtggtgctacctcggctcactgcaacctccgtctcctgggttcaagcaagcgattctcctgcctcagcctcccgagtagctgggactacaggcatgcgccaccacgcccagctaatttttgtatttttcatagagacagggtttcaccatgttggctgggatggtctggatctcctgacctcgtgatccacctgcctcagcctcccaaagtgctgggattacagaagtgagtcaccacacctggcctcctactatagtgcttctcatgtgaatgtttcattctcatagtgcccaactttagtttttaattttggaaacttcttatctata

SEQ ID NO: 43622 - DNA, 449 bp, Homo sapiens
acgactactatagggcgaattggagctccaccgcggtggcggccgaggtacttttttttttttttttttgagacggaatcttgctctgtcgcccaggccggagtgcagtggcgcgatctcagctcactgcaagctccgcctcccgggtttgcgccattctcctgcctcagtctcctgagtagctgggactacaggcacccgccaccacacccggctaattttttcgtatttttagtagagacagggtttcactgtgttagccaggatggtctcgatctcctgacctcaggatctgcccgccttggcctcccaaagtgctgggattacaggcgtgagccaccgcgcccggccccaaaagccttttttaaaatgggaaactcgtgtagtgccattcccttctacaaaattctgacatccttccagtgtctgcttactcttggtcacaaaat

SEQ ID NO: 43623 - DNA, 445 bp, Homo sapiens; identical to SEQ ID NO: 34770

SEQ ID NO: 43624 - DNA, 470 bp, Homo sapiens
ctactatagggcgaattggagctccaccgcggtggcggccgaggtacctgtgttcatatcctgaactgcaccaaggaatagctccatgctaaactgtcttggctaaaatacaaccagtgccatcattcctaatcagactaataaacagaatgtcttttaaggtaatgagttagatggctgtgtttaggttttgttcaggatttactttggattctcctgccttaagacccaaagaaagttatattgagtttttattgatgattctatgtgtttttaacagagtgtgataggtgaattaaacatattaaaagagttctatagcatctgttcagaaaagattatatactatacaaactattcaagtcatacaaaaccatttttcattgtctttcaaaatgagaagaatcctattcagcacgcttctcctcctgaggtggttcatactgagcaagctttgctttcagtttttt

SEQ ID NO: 43625 - DNA, 97 bp, Homo sapiens; identical to SEQ ID NO: 34772

SEQ ID NO: 43626 - DNA, 444 bp, Homo sapiens; identical to SEQ ID NO: 33195

SEQ ID NO: 43627 - DNA, 523 bp, Homo sapiens
  misc_feature 47: n = A,T,C or G
gggccccccctcggaagtcttctagaattaattaacgcgggtgttgngaaaaaacttgattggtcatttaggagttcattgtttctcaacctaattatattttggctcagtatactcttaactgtttttaggataattaaaaggaactcctaagagagctaggatgctgttggaggagtaagtatgcatgaaacaatcataatttaactaatttgcccacaaatgttagcaggaaaatataccaaaaattagattttgttttccattcgttatttttcttaatttctaacataatttttaaacaaaactgagagatgtttgtcaaaacacctcccaagtgatgatttccattagaatatgaactagacacttttcctccagtgggataagagccagattttcctaatcacaaaaattaaggcatggtcaggcaaaggagtttacatgaaaagttttgcaaaattagtattactttgaaaatttcaagctatttggccactgcaaccagggagtcacttaattc

SEQ ID NO: 43628 - DNA, 673 bp, Homo sapiens
gtaatacgactcactatagggcgaattggagctccaccgcggtggcggccgaggtgtccagcaccagctaagaggcacctgctgccaacacgatgcaagcccgttgtgtttccgagctttttttaaaaaaaatctgtagcaccgggcatggtgcatgcctgtaatcccagccactcaggaggctgaggcagggaggatccattgagcccaggagtccagcctgggcaaaatagcgagagaccctgaatctgaaagtaatgataaaataaaaagaatataaatgaggtctcgttgatgctggacaattcaagaattcagacttgaaccttaaacctaggaaaagttactttgtatcaggattctaacaattatgcttcatatttgtgaagtcctttaaaacataattttctcaagttctttctttgagacctcaatctgtcttagcattttgtaactaataactgaaattttattcaaaggaattgtaaaccttaaaccaccaatttatttccatgtgaaaaagtgttatatatgacaagtgttttttgattgtaattgcgttaaatcttttgagagtgtaaatgccgggctaggcaattgcagttaatacatacaggggttagtgaagggcttattaagttgtaggggaagcaagctgggaagaatcagatca

SEQ ID NO: 43629 - DNA, 438 bp, Homo sapiens
tatagggcgaattggagctccaccgcggtggcggccgcccgggcaggtaccactgcactccagcctgggtgacagagtgagactccgtctccaaaaaaaaactttgcttgtatattatttttgccttacagtggatcattctagtaggaaaggacaataagattttttatcaaaatgtgtcatgccagtaagagatgttatattcttttctcatttcttccccacccaaaaataagctaccatatagcttataagtctcaaatttttgccttttactaaaatgtgattgtttctgttcattgtgtatgcttcatcacctatattaggcaaattccattttttcccttgcgctaaggtaaagatttaattaaataattttggcctctcatagttttctctctctttaaagagaataaatagagggccaggtgtggcggc

SEQ ID NO: 43630 - DNA, 381 bp, Homo sapiens
tagggcgaattggagctccaccgcggtggcggccgggcatttctcccagggatctctgtgcttccttttgtgcttcctgtgtgtgtggatatttaaaggggctggaaatgtgcaaaaacatgtcactacttagacattatattgtcatcttgctgtttctagtgatgttaattatctccatttcagcagatgtgtggcctcagatggtaaagtcagcagcctttcttatttctcacctctgtatcatcaggtccttcccaccatgcagatcttcctggtctccctcggctgcagccacacaaatctcccctctgtttttctccccgcgtacctcggccgctctagaactagtggatcccccgggctgcaggaattcgatat

SEQ ID NO: 43631 - DNA, 419 bp, Homo sapiens
atacgactcactatagggcgaattggagctccaccgcggtggcggccgcccgggcaggtacagggaaatactactggaaacaaaattaagtgtagaaacagaccagaccagaatatacatgctgattcccgttacatgaaaggtccagcgccaggcgggcaggcagccagccacagaaaagggagaggggcccgggaggaagtggctagacctgacgctaggcaccaggggaggcggggaaggagggcagaggcaggagagttcactgtgagagctcaacaaggagtagctgctgccaaacatctacattcatttacccgcatttcacagacacaggcttggggaggttaagtaacttgctcccagacataaagttgccaagtagtccagtcaggattcgaaccagctccagtgcccta

SEQ ID NO: 43632 - DNA, 545 bp, Homo sapiens
tccaccgcggtggcggccgcccgggcaggtacacagactagcttccatttctctcatagaggtcatttttggcatttaaaacacatacttttagaaaacagatttggatgtatgtaaacacagggttaatccaccacactctggatgctagagctgttgacaaagtcatgctttgcagattttaaaataaactttttgttactcttacagcttggtattttcccctcctattttttttacctcctctaaataaacctctttgttaaataattgatgtttctggatcatagaaaatagtaagtttaaaatacagaatatttccaagctaactacaaatctgatgacagttttttgagtgtgcacttttccttttatttcttaggtcctttttggtcctttgcaaacatagtaagattccatatttgtgtcccaactgtggtaatattgctgacttcttactggaaaacagtcagctctaggtagcatttcttctgtgtggtatttaagttaaattattaccagaaaaaaaaaaaaaaaaaaaaaaa

SEQ ID NO: 43633 - DNA, 546 bp, Homo sapiens; identical to SEQ ID NO: 42120

SEQ ID NO: 43634 - DNA, 449 bp, Homo sapiens
tacactactatagggcgaattggagctccaccgcggtggcggccgcccgggcaggtacatcggagcgtgcaggctgcgttccgtccttacgatgaagaccacgatgcagtttccaaacattgccactacatacatggaaaggagggggaagccaacccagaaatgggctttctctaatcctgggataccaataagcacaaaggtggcatgtgtgaagttgcaggaactcatagctggaactgaggaggggtgactggagagggtgaggtcacactggcagtagagcccatacagcagttcggcctgttcctttcaggctgactcagaaggctgaggaggctttagattccaggggagggccgagcttgcaaatatgaggagacttattccagcctgactggagacaggcacagagctgaaaggccaattcctggtggtggtgctaactc

SEQ ID NO: 43635 - DNA, 578 bp, Homo sapiens
gatccttagtaacggccgccagtgtgctggaattcggcttagcgtggtcgcggccgaggtttttttttttttttatatataatattcaactttatttcaaatataccaattttaaaatttatcaatatacccattacgattctttctgagtgacataccacacaaattcaatacggattctctaaagaatcctcttaggctacttcactcaaagtctctgcagctgcctgcactgtgaaggctgcaacataaatctgtctcttcacttctccccaggccttggaagggtccactttgctttcaatatcaaacagagcatcataaattcctgggaatgactcccctgcatacttgttgtggctgcttggagcatagatgacatgcctataaaaaggcctgtctggtaaccctaatggatcaataaatgctctttccagaaacatgagttgatcattcatcattcttaatactattgggttgcttttgtcaaagtcctggagtctctcactgaacttggaagcaatttctgtaaaattctttactgcagaaaaaagtgaatcaaatgatacactgtatgt

SEQ ID NO: 43636 - DNA, 441 bp, Homo sapiens
ctatagggcgaattggagctccaccgcggtggcggccgcccgggcaggtactttttttttttttttttttttgggtatgaccaagttggccacaattatagcaggctccaagaaaagaatcagtcgagccagtttggttgccgtgcttcatggccggtgcccacagaatagctctgtgggtcttcgatccaacgccttcacaagctttaatatatgcaggcaacacctcatgatcaggtaaattttgacgtaagatggaatgcacggccattttacactcatgggtcgcattttgaaaagctaacatatgaagaagaataccttgagtgtgctcatcagagacagatttttcaacagcatcttgtaatttagcttaaaaatcaagatataattcattgtgaccctgtttaacaatagtgaaagaaacagaagcttggcctg

SEQ ID NO: 43637 - DNA, 652 bp, Homo sapiens
  misc_feature 604: n = A,T,C or G
ctactatagggcgaattggagctccaccgcggtggcggccgaggtacaaagagtagctgccccttctcagggcagatgatgctttgagaacatactttggccattacccccagctttgaggaaaatgggctttggatgattattttatgttttagggacccccaacctaggcaattcctacctcttcacctgaccctgcccccacttgccataaaacttagctaagttttgttttgtttttcagcgttaatgtaaaggggcagcagtgccaaaatataatcagagataaagcttaggtcaaagttcatagagttcccatgaactatatgactggccacacaggatcttttgtatttaaggattctgagattttgcttgagcaggattagataaggctgttctttaaatgtctgaaatggaacagatttcaaaaaaaaccccacaatctagggtgggaacaaggaaggaaagatgtgaataggctgatgggcaaaaaaccaatttacccatcagttccagccttctctcaaggagaggcaaagaaaggagatacagtggaaacattttgaaagttttctccactggaaaactgctactatctggnttttatattctggtaaaaatatgaggctacagaactaaaaattaaaac

SEQ ID NO: 43638 - DNA, 447 bp, Homo sapiens; identical to SEQ ID NO: 34785

SEQ ID NO: 43639 - DNA, 476 bp, Homo sapiens
tatacactactatagggcgaattggagctccaccgcggtggcggccgcccgggcaggtacaagaattgctggaacctgggaggcggaggttgcagtgaaccaagattgcaccactgcactccagccggggtgacagagtgagactccgactgaaaataaataaataaataaataaataaataaataaattaatattatggatggtgaagggaatggtatagaattggagagattatcttactgaacacctgtagtcccagctttctctggaagtggtggtatttgagcaggatgtgcacaaggcaattgaaatgcccataattagtttctcagctttgaatacactataaactcagtggctgaaggaggaaattttagaaggaagctactaaaagatctaatttgaaaaactacaaaagcattaactaaaaaagtttattttccttttgtctgggcagtagtgaaaataactactc

SEQ ID NO: 43640 - DNA, 204 bp, Homo sapiens; identical to SEQ ID NO: 34787

SEQ ID NO: 43641 - DNA, 469 bp, Homo sapiens
ctactatagggcgaattggagctccaccgcggtggcggccgaggtacggttcagcctgtgatcacttcattccaatcaatttatggggccgagacttgttacaacaatggcatgcagagattactatcccagcctccctatacagccccaggaataaaaaaatcatgactaaaatgggatagctcccctaaaaagggactaggaaagaagtcccaattgaggctgaaaaaaatcaaaaaagaaaaggaatagggcatcctttttaggagcggtcactgtagagcctccaaaacccattccattaacttggggaaaaaaaaacaactgtatggtaaatcagcagcgcttccaaaacaaaaactggaggctttacacttattagcaaagaaacaattagaaaaaggacattgagccttcattttcgccttggaattctgtttgtaattcagaaaaaatccggcagatggcg

SEQ ID NO: 43642 - DNA, 452 bp, Homo sapiens
tatagggcgaattggagctccaccgcggtggcggccgcccgggcaggtacactggagactggagcctgcagatggcatggctctgcggctcaccttgctgcagttggtggtggtgacagagactgcagcttgactgtagtgaatttggaaattatctgtctggaagctctgagtttatcttgggacctcaagaggagaggatcacccaactcacagcaatcaaactccaaatggtgctataaactgaaccacacatggacacgtcagtcttccgaggacctttagatcaaccccaggaggagccctagctgctgttccccattcgacgcccctttccagcaggaagtagccagaagacatcgtcgcccaaacctctaacagcagttagtgcggcatctccacaggggggaatgttgtaggagttattgataaattattttaggcagatagag

SEQ ID NO: 43643 - DNA, 324 bp, Homo sapiens; identical to SEQ ID NO: 34790

SEQ ID NO: 43644 - DNA, 399 bp, Homo sapiens; identical to SEQ ID NO: 34791

SEQ ID NO: 43645 - DNA, 444 bp, Homo sapiens
actactatagggcgaattgtagctccaccgcggtggcggccgaggtacccagaaaataagaaagggttccaaaatgaagaatcgctccttttgcaaaccttatggtaacaaatataatatttataaaaagtgaattaggtaatatgttaatggagaaataaacatcattatgaaatgctatcttaaacaaaaaataagagaaaatattagtttaaaaatagaacttatagtcgatttaaaaaagcaagaccaaactcttagctatgcacaagaaagttactttacacattcacaaatataaaaggatgagaaaacatggattatgaaaatatgaaccgaaatgaagctatagtagctgtgcaaatttcagacaaaatagacatcagaaaagacttttaggacttaacagggatattacataggataaagttaccactttctttt

SEQ ID NO: 43646 - DNA, 402 bp, Homo sapiens; identical to SEQ ID NO: 30900

SEQ ID NO: 43647 - DNA, 420 bp, Homo sapiens; identical to SEQ ID NO: 34795

SEQ ID NO: 43648 - DNA, 466 bp, Homo sapiens; identical to SEQ ID NO: 31227

SEQ ID NO: 43649 - DNA, 405 bp, Homo sapiens; identical to SEQ ID NO: 34797

SEQ ID NO: 43650 - DNA, 436 bp, Homo sapiens; identical to SEQ ID NO: 34798

SEQ ID NO: 43651 - DNA, 420 bp, Homo sapiens; identical to SEQ ID NO: 34799

SEQ ID NO: 43652 - DNA, 445 bp, Homo sapiens; identical to SEQ ID NO: 34800

SEQ ID NO: 43653 - DNA, 449 bp, Homo sapiens; identical to SEQ ID NO: 34801

SEQ ID NO: 43654 - DNA, 329 bp, Homo sapiens
tccaccgcggtggcggccgcccgggcaggtacagtatgggcaagtgggagttaatttataaccaaggatcagggtggggttggtgggtggaaaaatcacaaagagaaaacatcaagggtaagggggattctggctaaaccaaccaaacaggattcttgctgaagacaggctgggtgatcagacatcacctgtggcacggtggaggctgaggaacccgatcagatatccagagtgatcagataccgagggtgggaggttctggctaaactgactgagcaaggtttttttgctaaaactggattttacaaggaaatgcacagatggcctac

SEQ ID NO: 43655 - DNA, 353 bp, Homo sapiens; identical to SEQ ID NO: 34803

SEQ ID NO: 43656 - DNA, 409 bp, Homo sapiens; identical to SEQ ID NO: 34804

SEQ ID NO: 43657 - DNA, 422 bp, Homo sapiens; identical to SEQ ID NO: 30929

SEQ ID NO: 43658 - DNA, 433 bp, Homo sapiens; identical to SEQ ID NO: 34806
  misc_feature 140: n = A,T,C or G

SEQ ID NO: 43659 - DNA, 449 bp, Homo sapiens; identical to SEQ ID NO: 34807

SEQ ID NO: 43660 - DNA, 458 bp, Homo sapiens; identical to SEQ ID NO: 34808

SEQ ID NO: 43661 - DNA, 292 bp, Homo sapiens; identical to SEQ ID NO: 34809

SEQ ID NO: 43662 - DNA, 458 bp, Homo sapiens; identical to SEQ ID NO: 34810

SEQ ID NO: 43663 - DNA, 313 bp, Homo sapiens; identical to SEQ ID NO: 34811

SEQ ID NO: 43664 - DNA, 467 bp, Homo sapiens; identical to SEQ ID NO: 34812

SEQ ID NO: 43665 - DNA, 427 bp, Homo sapiens; identical to SEQ ID NO: 32890

SEQ ID NO: 43666 - DNA, 308 bp, Homo sapiens; identical to SEQ ID NO: 34814

SEQ ID NO: 43667 - DNA, 455 bp, Homo sapiens; identical to SEQ ID NO: 31398

SEQ ID NO: 43668 - DNA, 450 bp, Homo sapiens; identical to SEQ ID NO: 33013

SEQ ID NO: 43669 - DNA, 463 bp, Homo sapiens
acgactactatagggcgaattgggccctctagatgcatgctcgagcggccgccagtgtgatggatatctgcagaattcgccctttcgagcggccgcccgggcaggtacttgtcatggagctggcactgcggcgctctcccgtcccgcggtggttgctgctgctgccgctgctgctgggcctgaacgcaggagctgtcattgactggcccacagaggagggcaaggaagtatgggattatgtgacggtccgcaaggatgcctacatgttctggtggctctattatgccaccaactcctgcaagaacttctcagaactgcccctggtcatgtggcttcagggcggtccaggcggttctagcactggatttggaaactttgaggaaattgggccccttgacagtgatctcaaaccacggaaaaccacctggctccaggctgccagtcctcctatttggggataatc

SEQ ID NO: 43670 - DNA, 420 bp, Homo sapiens; identical to SEQ ID NO: 31656

SEQ ID NO: 43671 - DNA, 349 bp, Homo sapiens
atacgactactatagggcgaattggagctccaccgcggtggcggccgcccgggcaggtactgggattataggcgtgagccaccgcgtctggcctctaacgagatatttctaaaggttaggccttcagtcaagaattttaaagctggatcttagaggttatctaaactaacctctccatttcatagataaggaaagtgagtcccagaaaagcactggtttggacaagttcagaaagctaaacagtgactgtggatgtatgattctgtctcttaactcctaatccaaatgtcttctcactagataaggctgtgccttctacatttgaaggctcaaaccccatggatggatg

SEQ ID NO: 43672 - DNA, 165 bp, Homo sapiens; identical to SEQ ID NO: 34820

SEQ ID NO: 43673 - DNA, 401 bp, Homo sapiens; identical to SEQ ID NO: 34821

SEQ ID NO: 43674 - DNA, 380 bp, Homo sapiens
gactcactatagggcgaattggagctccaccgcggtggcggccgaggtacaagaattgctggaacctgggaggcggaggttgcagtgaaccaagattgcaccactgcactccagccggggtgacagagtgagactcctactgaaaataaataaataaataaataaataaataaataaatattatggatggtgaagggaatggtatagaattggagagattatcttactgaacacctgtagatccagctttctctggaagtggtcgttatttgagcaggatgtgcacaaggcaatttgaaatgccccataattagttttctcagcctttgaatacactattaaacttcactggctttaaggaggcaaatttttattaagga

SEQ ID NO: 43675 - DNA, 526 bp, Homo sapiens; identical to SEQ ID NO: 42809
  misc_feature 439: n = A,T,C or G

SEQ ID NO: 43676 - DNA, 355 bp, Homo sapiens; identical to SEQ ID NO: 34824

SEQ ID NO: 43677 - DNA, 457 bp, Homo sapiens; identical to SEQ ID NO: 34825

SEQ ID NO: 43678 - DNA, 382 bp, Homo sapiens; identical to SEQ ID NO: 34826

SEQ ID NO: 43679 - DNA, 444 bp, Homo sapiens; identical to SEQ ID NO: 34827

SEQ ID NO: 43680 - DNA, 430 bp, Homo sapiens; identical to SEQ ID NO: 34828

SEQ ID NO: 43681 - DNA, 296 bp, Homo sapiens
accgtgggcttctggcacaccccatcattgctcctgccacatgactttccaatgcaaagccaaactgtaaagatttgaataaatagctactttttcaaatgcacagatatcaatacacagctacaaggatcaagaacaattacagaaacgtgacatcaccaaaaggacaaaaaaatttccagcgattgaccctaaagaaatagagatatattaactctctgaaaaataattcaaaataatcgttttaaggaaacttgacaataattataatatgcaacagaaatccttgaactgaa

SEQ ID NO: 43682 - DNA, 449 bp, Homo sapiens
ctcactatagggcgaattggagctccaccgcggtggcggccgcccgggcaggtaccttttttttttttcttttttttttttttttttttttccgtctccccaaagctttatctgtcttgactttttaaaaaagtttgggggcagattctgaattggctaaaagacatgcatttttaaaactagcaactcttatttctttcctttaaaaatacatagcattaaatcccaaatcctatttaaagacctgacagcttgagaaggtcactactgcatttataggaccttctggtggttctgctgttacgtttgaagtctgacaatccttgagaatctttgcatgcagaggaggtaagaggtattggattttcacagaggaagaacacagcgcaaaatgaagggccaggcttactgagctgtccagtggagggctcatgggtgggacatggaaa

SEQ ID NO: 43683 - DNA, 444 bp, Homo sapiens; identical to SEQ ID NO: 31811

SEQ ID NO: 43684 - DNA, 422 bp, Homo sapiens; identical to SEQ ID NO: 30936

SEQ ID NO: 43685 - DNA, 519 bp, Homo sapiens
atacgactcactatagggcgaattggagctccaccgcggtggcggccgaggtacgtccacggtcagccttgcggtaagcttgtgtgcttagaggaacccagggtaacgatggggcaaactgaaagtaaatatgcctcttatctcagctttattaaaattcttttaagaagagggggagttagagcttctacagaaaatctaattacgctatttcaaacaatagaacaattctgcccatggtttccagaacagggaactttagatctaaaagattgggaaaaaattggcaaagaattaaaacaagcaaatagggaaggtaaaatcatcccacttacagtatggaatgattgggccattattaaagcaactttagaaccatttcaaacaggagaagatattgtttcagtttctgatgcccctaaaagctgtgtaacagattgtgaagaagaggcagggacagaatcccagcaaggaacggaaagttcacattgtaaatatgtagcagagtctgtaatggct

SEQ ID NO: 43686 - DNA, 432 bp, Homo sapiens; identical to SEQ ID NO: 34834

SEQ ID NO: 43687 - DNA, 489 bp, Homo sapiens; identical to SEQ ID NO: 40687

SEQ ID NO: 43688 - DNA, 429 bp, Homo sapiens; identical to SEQ ID NO: 31445

SEQ ID NO: 43689 - DNA, 454 bp, Homo sapiens; identical to SEQ ID NO: 34838

SEQ ID NO: 43690 - DNA, 133 bp, Homo sapiens; identical to SEQ ID NO: 34839

SEQ ID NO: 43691 - DNA, 436 bp, Homo sapiens; identical to SEQ ID NO: 34840

SEQ ID NO: 43692 - DNA, 205 bp, Homo sapiens; identical to SEQ ID NO: 34841

SEQ ID NO: 43693 - DNA, 458 bp, Homo sapiens; identical to SEQ ID NO: 34808

SEQ ID NO: 43694 - DNA, 415 bp, Homo sapiens; identical to SEQ ID NO: 31371

SEQ ID NO: 43695 - DNA, 428 bp, Homo sapiens
tactcacttagggcgaattggagctccaccgcggtggcggccgacgggaaagaggtgctggagtatctgggtaaccctgctaattacccggtgtccattcaatttggccggccctgcctcacttctaatgagaagcttatgctggcctccatgttccactcgctctttgccatcggctcccagctgtctcctgaacagggaagctcaggcattgagatgctggagacagacacattcaaattgcattgctaccagacactgacagggatcaagtttgtggttctagcagatcctaggcaagctggaatagattctcttctccgaaagatttatgagatttactcaaactttgccctcaagaatccattctattccttagaaatgcctatcaggtgtgagctctttgaccagaacctgaagctagctct

SEQ ID NO: 43696 - DNA, 475 bp, Homo sapiens; identical to SEQ ID NO: 34845
  misc_feature 189: n = A,T,C or G

SEQ ID NO: 43697 - DNA, 446 bp, Homo sapiens; identical to SEQ ID NO: 34846

SEQ ID NO: 43698 - DNA, 574 bp, Homo sapiens; identical to SEQ ID NO: 34847

SEQ ID NO: 43699 - DNA, 458 bp, Homo sapiens; identical to SEQ ID NO: 34848

SEQ ID NO: 43700 - DNA, 441 bp, Homo sapiens; identical to SEQ ID NO: 31648

SEQ ID NO: 43701 - DNA, 333 bp, Homo sapiens; identical to SEQ ID NO: 34850

SEQ ID NO: 43702 - DNA, 425 bp, Homo sapiens; identical to SEQ ID NO: 34851

SEQ ID NO: 43703 - DNA, 423 bp, Homo sapiens; identical to SEQ ID NO: 34852

SEQ ID NO: 43704 - DNA, 238 bp, Homo sapiens; identical to SEQ ID NO: 34853

SEQ ID NO: 43705 - DNA, 448 bp, Homo sapiens; identical to SEQ ID NO: 35842

SEQ ID NO: 43706 - DNA, 429 bp, Homo sapiens; identical to SEQ ID NO: 34855

SEQ ID NO: 43707 - DNA, 439 bp, Homo sapiens; identical to SEQ ID NO: 34856

SEQ ID NO: 43708 - DNA, 518 bp, Homo sapiens
atacgactcactatagggcgaattgggccctctagatgcatgctcgagcggccgccagtgtgatggatatctgcagaattcgcccttagcgtggtcgtggccgaggtacttttttttttttttttttttttgttaaaacttcatttatttaagatgactagtgatgcagctagcaaacccaaggagccaactggaatggaaatgctcagtggtgctcagccattacccaggaccagagattcctttgttaacagttcaatttgttgaggcacaagtgaggataaattggaccatgacaaaactatgagattgaatgataatcatagtaacatctgacatatattaaatttggtgttatgccatttctcagttccaccaaatgtacctgcccgggcggccgctcgaaagggcgaattccagcacactggcggccgttactagtggatccgagctcggtaccaaacttggcgtaatcatggtcatagctgtttcctgtgtgaaattgttatccgctcaca

SEQ ID NO: 43709 - DNA, 605 bp, Homo sapiens; identical to SEQ ID NO: 41762
  misc_feature 376: n = A,T,C or G

SEQ ID NO: 43710 - DNA, 438 bp, Homo sapiens; identical to SEQ ID NO: 34859
  misc_feature 302, 303, 309: n = A,T,C or G

SEQ ID NO: 43711 - DNA, 426 bp, Homo sapiens; identical to SEQ ID NO: 34860

SEQ ID NO: 43712 - DNA, 557 bp, Homo sapiens; identical to SEQ ID NO: 34861
  misc_feature 145, 175, 176, 209, 295, 296, 368, 369, 379, 430: n = A,T,C or G

SEQ ID NO: 43713 - DNA, 443 bp, Homo sapiens; identical to SEQ ID NO: 34862

SEQ ID NO: 43714 - DNA, 548 bp, Homo sapiens; identical to SEQ ID NO: 34863

SEQ ID NO: 43715 - DNA, 574 bp, Homo sapiens; identical to SEQ ID NO: 34864

SEQ ID NO: 43716 - DNA, 577 bp, Homo sapiens; identical to SEQ ID NO: 34865
  misc_feature 545: n = A,T,C or G

SEQ ID NO: 43717 - DNA, 533 bp, Homo sapiens; identical to SEQ ID NO: 34866
  misc_feature 399, 446: n = A,T,C or G

SEQ ID NO: 43718 - DNA, 624 bp, Homo sapiens
ccctctagatgcatgctcgagcggccgccagtgtgatggatatctgcagaattcgccctttcgagcggccgcacgggcaggtacccagaaaataagaaagggttccaaaatgaagaatcgctccttttgcaaaccttatggtaacaaatataatattataaaaagtgaattaggtaatatgttaatggagaaataaacatcattatgaaatgctatcttaaacaaaaaataagagaaaatattagtttaaaaatagaacttatagtcgatttaaaaaagcaagaccaaactcttagctatgcacaagaaagttactttacacattcacaaatataaaaggatgagaaaacatggattatgaaaatatgaaccgaaatgaagctatagtagctgtgcaaatttcagacaaaatagacatcagaaaagacttttaggacttaacagggatattacataggataaagttaccacttttttttaaagatgccaaaaaagacttaacaaatatataatagaagaagaataccccattcattgtgatttacagaacgtgacaaaagaaataaagatgtcagtgacaccatgcacggaagggtgtcctggggactgaggcttctttgtacc

SEQ ID NO: 43719 - DNA, 452 bp, Homo sapiens; identical to SEQ ID NO: 34868
  misc_feature 399, 422: n = A,T,C or G

SEQ ID NO: 43720 - DNA, 579 bp, Homo sapiens; identical to SEQ ID NO: 34869

SEQ ID NO: 43721 - DNA, 516 bp, Homo sapiens; identical to SEQ ID NO: 34870

SEQ ID NO: 43722 - DNA, 315 bp, Homo sapiens; identical to SEQ ID NO: 34871
  misc_feature 78, 129, 130: n = A,T,C or G

SEQ ID NO: 43723 - DNA, 504 bp, Homo sapiens; identical to SEQ ID NO: 34872
  misc_feature 372: n = A,T,C or G

SEQ ID NO: 43724 - DNA, 387 bp, Homo sapiens; identical to SEQ ID NO: 34873
  misc_feature 184: n = A,T,C or G

SEQ ID NO: 43725 - DNA, 412 bp, Homo sapiens; identical to SEQ ID NO: 34874

SEQ ID NO: 43726 - DNA, 515 bp, Homo sapiens; identical to SEQ ID NO: 33291
  misc_feature 363: n = A,T,C or G

SEQ ID NO: 43727 - DNA, 408 bp, Homo sapiens; identical to SEQ ID NO: 34876

SEQ ID NO: 43728 - DNA, 600 bp, Homo sapiens; identical to SEQ ID NO: 34877
  misc_feature 524: n = A,T,C or G

SEQ ID NO: 43729 - DNA, 699 bp, Homo sapiens; identical to SEQ ID NO: 34878

SEQ ID NO: 43730 - DNA, 686 bp, Homo sapiens; identical to SEQ ID NO: 34879

SEQ ID NO: 43731 - DNA, 523 bp, Homo sapiens; identical to SEQ ID NO: 34880
  misc_feature 57: n = A,T,C or G

SEQ ID NO: 43732 - DNA, 613 bp, Homo sapiens; identical to SEQ ID NO: 34881

SEQ ID NO: 43733 - DNA, 614 bp, Homo sapiens; identical to SEQ ID NO: 34882
  misc_feature 13: n = A,T,C or G

SEQ ID NO: 43734 - DNA, 433 bp, Homo sapiens; identical to SEQ ID NO: 34883

SEQ ID NO: 43735 - DNA, 380 bp, Homo sapiens; identical to SEQ ID NO: 34884

SEQ ID NO: 43736 - DNA, 416 bp, Homo sapiens; identical to SEQ ID NO: 34885

SEQ ID NO: 43737 - DNA, 368 bp, Homo sapiens; identical to SEQ ID NO: 34886

SEQ ID NO: 43738 - DNA, 325 bp, Homo sapiens; identical to SEQ ID NO: 34887

SEQ ID NO: 43739 - DNA, 438 bp, Homo sapiens; identical to SEQ ID NO: 34888

SEQ ID NO: 43740 - DNA, 463 bp, Homo sapiens
actactatagggcgaattgtagctccaccgcggtggcggccgaggtactttttttttttttttttttttttgttttttttttttttttttttttggcatcaaaaagctttatttccatttggtccaaggcttgttaggatagttaaaaaagctgcctattggctggagggagaggcttaggcagaagccctattactttgcaaggggcccttcaaaagtcgctgggctcaaaaggctcttagtcgtgcttgaaagtgagcctttcgaagagatactcgcccagcccagcctccgggccacccagcctgtggaggttggtcaggtggtcacccatcttcttgataagcttcacttcctcatctaggaagggagtctccaggaagtcacaaagatgggggtccgtgcgggcagaacccagggcatgaagatccaaaagggcctggttcaactttttctccagggc

SEQ ID NO: 43741 - DNA, 424 bp, Homo sapiens; identical to SEQ ID NO: 34890

SEQ ID NO: 43742 - DNA, 419 bp, Homo sapiens; identical to SEQ ID NO: 33327

SEQ ID NO: 43743 - DNA, 448 bp, Homo sapiens
tacgactactatagggcgaattggagctccaccgcggtggcggccgaggtacttgaaaagaaagcatctgtggctgtgcccaaaaaaccggaagccccacgtgcaaaagtgcctgaagctgctcaagaagttgtcccagaaaagaaaattcccaaggcaccaatcaaaaaaccagaagcccccgcagttacagtgccagaagttcctcaagaagccacagaaaaagaaattcccgtggctccacccaaaaaaaccagaagctccaattgtcccagtgcctgaagctcaagaagttgtcccagaaaagaaagttcctaaggctcctcccacaaaaccagaagccccacctgccacagtgcctgaagtcccacaagaaattgtgccagaaaagaaaacactggtgcttcctaaaaagccagaagttccacctgttacagtgccagaggct

SEQ ID NO: 43744 - DNA, 346 bp, Homo sapiens
  misc_feature 187, 247, 281, 321, 322: n = A,T,C or G
tacgactcactatagggcgaattggagctccaccgcggtggcggccgcccgggcaggtactttttttttttttttttttttttttagctctttgtaaattctttattgccaggagtgaaccctaaagtggctcacaagagtgccctatttctttcaattaactacaaggacaaacacatctcaaagnttgagataagtgaccacgtatgaatttgccacaaattctataagcgcactcaccatgaanatggataagaggtgtacctttgggggatttgcanccgcatgtaattctgtgaaaaggctctgttggatattgtnngatagagatatgagaaatggaagt

SEQ ID NO: 43745 - DNA, 451 bp, Homo sapiens; identical to SEQ ID NO: 34894

SEQ ID NO: 43746 - DNA, 134 bp, Homo sapiens; identical to SEQ ID NO: 34895

SEQ ID NO: 43747 - DNA, 462 bp, Homo sapiens
actactatagggcgaattggagctccaccgcggtggcggccgccatcttgggtcatcgatgagcctcgccctgtgcctggtcccgcttgtgagggaaggacattagaaaatgaattgatgtgttccttaaaggatgggcaggaaaacagatcctgttgtggatatttatttgaacgggattacagatttgaaatgaagtcacaaagtgagcattaccaatgagaggaaaacagacgagaaaatcttgatggcttcacaagacatgcaacaaacaaaatggaatactgtgatgacatgaggcagccaagctggggaggagataaccacggggcagagggtcaggattctggccctgctgcctaaactgtgcgttcataaccaaatcatttcatatttctaaccctcaaaacaaagctgttgtaatatctgatctctacggttccttctgggcccaacattctc

SEQ ID NO: 43748 - DNA, 595 bp, Homo sapiens
acgactcactatagggcgaattggagctccaccgcggtggcggccgaggtactttttgctttagcagatagatagggcatccaatacaactgaaacaacctgataacaaattaattttatttttcaataaaaaggaatgctctggttttttaactggctccttgaggaagccagaagatggcatctgctctttaaacaggcttctcttatctgatttgagacacaaatccaccaagattctttcttacagtggaagtaggcaccacccctcagatcacgaggcccctaggaagaagcctgtggaaatcagcctgtgatgtgtggtggtgggccagcacctagaagacacatggtggttgtgcacataaatcccttcagcggactcagtggaaggatgagaattctgtaagttcatgcacattttattgagtagtaatataaaatgctttttctttttcattgttacaagtgcatgctttgattgccaacatgtcagaagtcaaattacaaaggcaaggctttaggctgtagtgaattacttgggcacttatacaattgttaaaaaatatgaatggacttttgttgttgttgtttt

SEQ ID NO: 43749 - DNA, 589 bp, Homo sapiens
  misc_feature 56: n = A,T,C or G
acgactcactatagggcgaattggagctccaccgcggtggcggccgaggtactttnttttttttttttttttttttttggagtagctctttgtaaattctttattgccaggagtgaaccctaaagtggctcacaagagtgccctatttctttcaattaactacaaggacaaacacatctcaaagttgagataagtgaccagtatgatttgccaaaattctaaagcgcactcaccatgaaatggataaaggttacctttggggatttgcactgcatgaattctgtgaaaagcttgttggatattgtgatagagatagagaaatgaagtatattatataagatactatgaggttccctgcctttgcttcacatcccaggcttacaaacgtgccccataaacattccctctgtggctcttgcatttcatatatttatctaaactcttataatcaaattacacttttagtatttgctgtctcatgtgatgatgaatctcatatgtgtcccttctttgcatgaagtaagatagtcaacttattcaaaactttacatcattctagatttaagagacaaggaaaagcttctcaggc

SEQ ID NO: 43750 - DNA, 346 bp, Homo sapiens; identical to SEQ ID NO: 43744
  misc_feature 187, 247, 281, 321, 322: n = A,T,C or G

SEQ ID NO: 43751 - DNA, 464 bp, Homo sapiens; identical to SEQ ID NO: 31041

SEQ ID NO: 43752 - DNA, 493 bp, Homo sapiens; identical to SEQ ID NO: 33403

SEQ ID NO: 43753 - DNA, 477 bp, Homo sapiens; identical to SEQ ID NO: 32142

SEQ ID NO: 43754 - DNA, 469 bp, Homo sapiens; identical to SEQ ID NO: 34904

SEQ ID NO: 43755 - DNA, 437 bp, Homo sapiens; identical to SEQ ID NO: 34905
  misc_feature 417: n = A,T,C or G

SEQ ID NO: 43756 - DNA, 443 bp, Homo sapiens; identical to SEQ ID NO: 34906

SEQ ID NO: 43757 - DNA, 449 bp, Homo sapiens; identical to SEQ ID NO: 34907

SEQ ID NO: 43758 - DNA, 454 bp, Homo sapiens; identical to SEQ ID NO: 34908

SEQ ID NO: 43759 - DNA, 427 bp, Homo sapiens
atacgactcactatagggcgaattggagctccaccgcggtggcggccgcccgggcaggtaccccagctgatgatgttccacaaaagagcaaaacatacacaatctggttccactctacagaaatcctggaactggactacaaagggaatagacagggtgtggcaggagggggttcctcacggttggagtgcgaggttagggacaggaatagaaggtaggtaataaacattcatgtggtattaacttagggcagatgtgtcaatgtatttccaagtttagcataatataggtataaaaattaaataaaaagtttatatgtgtgtgtatatatgggttaatacacaacacatacctcctagagtcattacctgagaggttctacaagaaaagacagcaaattaacaaaaaatacacccagaatcaagat

SEQ ID NO: 43760 - DNA, 384 bp, Homo sapiens; identical to SEQ ID NO: 34910

SEQ ID NO: 43761 - DNA, 403 bp, Homo sapiens; identical to SEQ ID NO: 34911

SEQ ID NO: 43762 - DNA, 421 bp, Homo sapiens; identical to SEQ ID NO: 40495

SEQ ID NO: 43763 - DNA, 513 bp, Homo sapiens
ggactccaccgcggtggcggccgcccgggcaggtactatagcatctgtggaaaatcttagaaaaaaacattttctcccccaccctctctcttccctgttaagaccatcccaaaatgcttcaagtaaaaaataacaagtttaaggggttaagcacttttaaagtctgattaagggggtggggggaaaaaagagtaactaccagccatttctccaatggacatctcttccacagacctcaacgtgagaactgctctagtttctataaactgtaaacctgtggtggtctgattatcctgatattggattttcttgttttctgttacaccttgagtcatttgcctttaggattctagacagacctaagggaaaaagaactgaaaacatattttgcccccacccccacaaaaaaaaatactgaaaactcccccccgcctcagttacacatccaaactctacatttacaaaacgaattcagggtgaggaagtaaaaacaggtcatctattcacaaaact

SEQ ID NO: 43764 - DNA, 438 bp, Homo sapiens; identical to SEQ ID NO: 34914

SEQ ID NO: 43765 - DNA, 440 bp, Homo sapiens; identical to SEQ ID NO: 34915

SEQ ID NO: 43766 - DNA, 600 bp, Homo sapiens
gcgaattgtgccctctagatgcatgctcgagcggccgccagtgtgatggatatctgcagaattcgccctttcgagcggccgcccgggcaggtactgctatcaattcaggtttccttagcaaataagtgcttcagatatactcgcaagggctcctgaattggagttttctgcatcatctccataaaaatattttttcacctctaaagtcatcaaagaattgaagcaggcccttgggaaatatccttaaggggagggagtggctccaaaaataaccttccttccagcaccacaccaccagctcagagaattcacttcacggtgggacggtcactcaaagtctactgtgaacctcatccccaaaaaggtaatggcaaaggctagaggaaaatcctaaacaatcacctatgccttgtatctttctctagaaacacaatctactagtagaaaaaccaatttgaaattttaaaaatgtggatgctactcatgagggctgtcatcaacgtaggaaaactattaactcaagtggatgacatgtttcttttcctgtattaaaaaagctcctcacatttaataattctgatttagatcagttttgattta

SEQ ID NO: 43767 - DNA, 591 bp, Homo sapiens
  misc_feature 570: n = A,T,C or G
tccaccgcggtggcggccgaggacgcgggaggcattgaggcagccagcgcaggggcttctgctgagggggcaggcggagcttgaggaaaccgcagataagtttttttctctttgaaagatagagattaatacaactacttaaaaaatatagtcaataggttactaagatattgcttagcgttaagtttttaacgtaattttaatagcttaagattttaagagaaaatatgaagacttagaagagtagcatgaggaaggaaaagataaaaggtttctaaaacatgacggaggttgagatgaagcttcttcatggagtaaaaaatgtatttaaaagaaaattgagagaaaggactacagagccccgaattaataccaatagaagggcaatgcttttagattaaaatgaaagtgacttaaacagcttaaagtttagtttaaaagttgtaggtgattaaaataatttgaaggcgatcttttaaaaagagattaaaccgaaggtgattaaaagaccttgaatccatgacgcagggagaattgcgtcatttaaagtctagttaacgcatttactanacgcagacgaaaatggaaaga

SEQ ID NO: 43768 - DNA, 443 bp, Homo sapiens; identical to SEQ ID NO: 34918

SEQ ID NO: 43769 - DNA, 521 bp, Homo sapiens; identical to SEQ ID NO: 32664

SEQ ID NO: 43770 - DNA, 478 bp, Homo sapiens; identical to SEQ ID NO: 34920
  misc_feature 325, 400, 446: n = A,T,C or G

SEQ ID NO: 43771 - DNA, 405 bp, Homo sapiens; identical to SEQ ID NO: 34921

SEQ ID NO: 43772 - DNA, 534 bp, Homo sapiens; identical to SEQ ID NO: 34922
  misc_feature 172: n = A,T,C or G

SEQ ID NO: 43773 - DNA, 539 bp, Homo sapiens; identical to SEQ ID NO: 34923

SEQ ID NO: 43774 - DNA, 615 bp, Homo sapiens; identical to SEQ ID NO: 34924

SEQ ID NO: 43775 - DNA, 449 bp, Homo sapiens; identical to SEQ ID NO: 34925

SEQ ID NO: 43776 - DNA, 450 bp, Homo sapiens; identical to SEQ ID NO: 34926

SEQ ID NO: 43777 - DNA, 448 bp, Homo sapiens; identical to SEQ ID NO: 34927

SEQ ID NO: 43778 - DNA, 425 bp, Homo sapiens; identical to SEQ ID NO: 34928

SEQ ID NO: 43779 - DNA, 486 bp, Homo sapiens; identical to SEQ ID NO: 34929

SEQ ID NO: 43780 - DNA, 451 bp, Homo sapiens; identical to SEQ ID NO: 33057

SEQ ID NO: 43781 - DNA, 404 bp, Homo sapiens; identical to SEQ ID NO: 34931

SEQ ID NO: 43782 - DNA, 438 bp, Homo sapiens; identical to SEQ ID NO: 34932

SEQ ID NO: 43783 - DNA, 443 bp, Homo sapiens; identical to SEQ ID NO: 34933

SEQ ID NO: 43784 - DNA, 590 bp, Homo sapiens
  misc_feature 223, 224, 254, 287, 552: n = A,T,C or G
gcgtaatacgactcactatagggcgaattggagctccaccgcggtggcggccgaggtacgcggggatcgcagctgaaggatctgttgagcgcttcaggaaaggcggcgacactaacaggtgaagatctcgggagaccatgactaagaaaagaattgctgtgattgggggaggagtgagcgggctctcttccatcaagtgcttgcgtagaagaagggcttggannacctgtctgctttgaaagggactgatgacnatcggaggggctctggagggttccaggaaaatncctgaagaaggaagggccagtatttacaaatcagtgatcatcaatacttctaaagagatgatgtgcttcagtgactatccaatcccagatcattatcccaacttcatgcataatgcccaggtcctggagtatttcaggatgtatgccaaagaatttgaccttctaaagtatattcgatttaagaccactgtgtgcagtgtgaagaagcagcctgattttgccacttcaggccaatgggaagtggtcactgaatctgaagggaaanaggagatgaatgcctttgatggagtcatggtttgcact

SEQ ID NO: 43785 - DNA, 528 bp, Homo sapiens
  misc_feature 513, 514: n = A,T,C or G
accctcactaaagggaacaaaagctgggtaccgggccccccctcgagagtacttctagaattaattaaggtggggaaggaagtgcgctggagaaatccttagctgtcagccaaggtggagagctctatgaagagtggctggaacttagaaacggttgcctctgctgttcagtgaagtgaggaatgtgtttactgtgtacatggtttactagaaatgtttattgattatatttccagctttaattttcttgagtaatttaactgaatttacacagtttgcttcattgtattttcaaacaaatagaaaataaacttattaggaagcattttcttaaagtgtttcttgctgtcttttctatctgctctaatgttttggtccttttattgagtttttattgcttttgatgtcagggcttatttaatctctagtgcatgaaagtctcatatgtaaaaaatgattattctgaatttaatctgtcattgggcatacttctaagtgttcaaccttataaannaaaaaaaaaaaaaa

SEQ ID NO: 43786 - DNA, 171 bp, Homo sapiens; identical to SEQ ID NO: 34936

SEQ ID NO: 43787 - DNA, 449 bp, Homo sapiens
actactatagggcgaattggagctccaccgcggtggcggccgcccgggcaggtactttttttttttttttttttggagtagagtttaatttaaagcttattgatcatttgagcaaatctctggagggcagaacaagaaggagcaggcttcagttaacagaagcagccttgagttgccaggatagtggatggaataccaaagaaagagttcacaccagggaggaagcaatgccttctccctggagtctcccaaggggcagctttagaataagggaagagggtttgctggtcaccgtttgctgacatgggtctctatggtgagttcaggcctgaggacagggttgtctgcaaaaccacatggcccttgagaaatgtccttgcagattgggcttcaaactgcttggagcaccaggagagggacttcctggatttcagggattgagagaggag

SEQ ID NO: 43788 - DNA, 436 bp, Homo sapiens; identical to SEQ ID NO: 34938

SEQ ID NO: 43789 - DNA, 362 bp, Homo sapiens; identical to SEQ ID NO: 34939

SEQ ID NO: 43790 - DNA, 451 bp, Homo sapiens; identical to SEQ ID NO: 34940

SEQ ID NO: 43791 - DNA, 453 bp, Homo sapiens; identical to SEQ ID NO: 34941

SEQ ID NO: 43792 - DNA, 462 bp, Homo sapiens; identical to SEQ ID NO: 34942

SEQ ID NO: 43793 - DNA, 422 bp, Homo sapiens
atacgactactatagggcgaattggagctccaccgcggtggcggccgcccgggcaggtacttttttttttttttttttttttttttaggagagacagggtttcaccgtgttaggcaggatggtctcgatctcctgacctcttgatccgcccacctgggcctcccaaagtgctgggactacaggcgtgagccacccatccggcctaacgagacttatttttactcaactagatggcgttcattcatttgcttactcagctgggccaggaattaagttgggcactgggaattccaaaaccaacaagacattctctgtcattagggaactcacagcctagtttgagagataaacaaatgaacatgaaatttttattcagtaacaaagaatgggtgttatggcaaagggaatgtgtaagaacttgg

SEQ ID NO: 43794 - DNA, 471 bp, Homo sapiens; identical to SEQ ID NO: 34944

SEQ ID NO: 43795 - DNA, 415 bp, Homo sapiens
gcgaattggagctccaccgcggtggcggccgcccgggcaggtacagacttatgcttatagggaggcctcaggaaacttacaatcatggcagaaggtgaaaaggaggcaagcacatattcacatggctgaaaagagtcaggggaggtgctacacactttttaaacaagcagatctcaggagaactttatcatcagacagcacgaggtggatgaggctaaaccattagaaaccacctctatgatccagtcaccttccagcaagcccctcctccaacactgacaattacaattccatatgagattgggggtggggggtgcacaaatccaaaccatgtcaagaagcattttaaaaattgagggaagttctaatcagatagcaatttatgacagggcatttcatcagcctaacactcctt

SEQ ID NO: 43796 - DNA, 200 bp, Homo sapiens; identical to SEQ ID NO: 34946

SEQ ID NO: 43797 - DNA, 458 bp, Homo sapiens; identical to SEQ ID NO: 34947

SEQ ID NO: 43798 - DNA, 479 bp, Homo sapiens; identical to SEQ ID NO: 34948

SEQ ID NO: 43799 - DNA, 451 bp, Homo sapiens; identical to SEQ ID NO: 34949
  misc_feature 22, 23: n = A,T,C or G

SEQ ID NO: 43800 - DNA, 203 bp, Homo sapiens; identical to SEQ ID NO: 34950

SEQ ID NO: 43801 - DNA, 367 bp, Homo sapiens; identical to SEQ ID NO: 34951
  misc_feature 188: n = A,T,C or G

SEQ ID NO: 43802 - DNA, 479 bp, Homo sapiens; identical to SEQ ID NO: 32555

SEQ ID NO: 43803 - DNA, 331 bp, Homo sapiens; identical to SEQ ID NO: 34969

SEQ ID NO: 43804 - DNA, 478 bp, Homo sapiens; identical to SEQ ID NO: 34954

SEQ ID NO: 43805 - DNA, 429 bp, Homo sapiens
actactatagggcgaattggagctccaccgcggtggcggccgggcatttctcccagggatctctgtgcttccttttgtgcttcctgtgtgtgtgtggatatttaaaggggctggaaatgtgcaaaaacatgtcactacttagacattatattgtcatcttgctgtttctagtgatgttaattatctccatttcagcagatgtgtggcctcagatggtaaagtcagcagcctttcttatttctcacctctgtatcatcaggtccttcccaccatgcagatcttcctggtctccctcggctgcagccacacaaatctcccctctgtttttctccccgcgtacctcggccgctctagaactagtggatcccccgggctgcaggaattcgatatcaagcttatcgataccgtcgacctcgagggggggcccgg

SEQ ID NO: 43806 - DNA, 435 bp, Homo sapiens; identical to SEQ ID NO: 36695

SEQ ID NO: 43807 - DNA, 437 bp, Homo sapiens; identical to SEQ ID NO: 34957

SEQ ID NO: 43808 - DNA, 417 bp, Homo sapiens
attgtagctccaccgcggtggcggccgcccggccaggtacttcagttcctattgccatgaaaattgtatccagcagctgataaaaaaaaaaaaaaaaaagactacagttagtcattatccaatttgatgatttatggtccaacactaatgctcatttttttgtttgttttacaaacatttggtggataccacaatgaaaactgcacttaaaaaacaaaaatgctgaaagaggaaggaaatatcaaaaaggtctgaatagacaacaggcaaatatgcttccacctaccgaaagagttttaggttggcagacagatgggtgccttattttctgtgaaactgaagttttaaacactggccagaaaatgtttgattgccatttcaacacatggaaatagttacattgatgcctaaataact

SEQ ID NO: 43809 - DNA, 112 bp, Homo sapiens; identical to SEQ ID NO: 34959

SEQ ID NO: 43810 - DNA, 537 bp, Homo sapiens; identical to SEQ ID NO: 34960

SEQ ID NO: 43811 - DNA, 460 bp, Homo sapiens; identical to SEQ ID NO: 30421

SEQ ID NO: 43812 - DNA, 455 bp, Homo sapiens; identical to SEQ ID NO: 32554

SEQ ID NO: 43813 - DNA, 406 bp, Homo sapiens
gtaatacgactcactatagggcgaattggagctccaccgcggtggcggccgcccgggcaggtactttttctttttttctttctttctttttttttttttagacggagttttcttcttgttgcccaagctacagtgcagtggcatgatctcagctcactgcaactgattcaagcgattctcctgtctcggcctcctgagtggctgggattacaggcacccgccaccatgcccagctaattttttgtatttttagtgaaaacggggtttcaccatgttggtcagtctgagctcgaactccggacctcgggtgatccacccatctcagcctcccaaagtgctgggattacagatgtgagccaccgaacctggcccagaactcttagaagtagaatctcaaggttgaaag

SEQ ID NO: 43814 - DNA, 426 bp, Homo sapiens; identical to SEQ ID NO: 34964

SEQ ID NO: 43815 - DNA, 425 bp, Homo sapiens
tatagggcgaattggagctccaccgcggtggcggccgaggtacattttcttttttctttttctttttttttttttgtttgagatggggccttgccctatcacccaggctggagtgcagtggcacagtcaccactcactgcagcctcagcctcctgggctcgatcgatcctcccacttcagcctctctagtggctgggactacaggcacacgccaccacgcccagctaatttttgtattttttgtagagagggggtttcaccatgttgcccaggctggtctcgaactcctgggctcaggccatcctcctgcctcaccttcccaaagtgctgggactgcaggcatgagccactgcacctagccctggaaccccattttctttccctctcatcatgctgccttcatggcacttttcctcccacacccc

SEQ ID NO: 43816 - DNA, 471 bp, Homo sapiens
gtttttgacattccttgaatctgttttttattccccttccacagaacaggcctgggactttccaacaccctgctaaggaagttctgtgtccaagtcccacccaggctgggttgtccccacctcctccagcccacacagcccaggcagcatccgggccagtgccctgcatgacagagggtctttgttgtgtaatgtttgttcccaagttgcattttctaaccgaatcagtgtgttttcatgaaactgagcgtttctgtggaccagtagttcctccgttgtcttcagtggtcttcctgtgtggctcaagggttctctgtgagagtctggattttcatttctggaatggctggccccatcccacttttctgtatcatggggacacatataaagcagtgtttaatagagcagtttaagaagttgcttgcatctgttggttcaccatggctcatctggggaccattttggattcat

SEQ ID NO: 43817 - DNA, 614 bp, Homo sapiens; identical to SEQ ID NO: 38684

SEQ ID NO: 43818 - DNA, 401 bp, Homo sapiens; identical to SEQ ID NO: 34968

SEQ ID NO: 43819 - DNA, 627 bp, Homo sapiens; identical to SEQ ID NO: 40305

SEQ ID NO: 43820 - DNA, 440 bp, Homo sapiens; identical to SEQ ID NO: 34970

SEQ ID NO: 43821 - DNA, 465 bp, Homo sapiens; identical to SEQ ID NO: 34971

SEQ ID NO: 43822 - DNA, 438 bp, Homo sapiens
acgactactatagggcgaattggagctccaccgcggtggcggccgcccgggcaggtccgggcaggtacagtggtgcgatctcagctcactgcaagctccgcctcctgggttcacgccattctcctgcctcagcctcccgagtagctgggactacaggcatctgccaccacgcctggctaattttttttgtatttttagtagagacgggatttcactgtattagccaggatggtctcaatctcctgacctcatgatccacctgccttggcctcccaaagtgctgggattacaggcatgagccactgcgcccagccgagtcattttttaatactactgcatgtgagttaacacaatcattcccaaattgaagttttagatgggcccttaaaattttgaggatatggtttttcctacaggtttatattgaaagtatggggt

SEQ ID NO: 43823 - DNA, 454 bp, Homo sapiens
gtaatacgactactatagggcgaattggagctccaccgcggtggcggccgaggtactttttttttttttttttttttttttttttaaaccctcacaatttagttctgggctctgtgcttgggctcttgaaattcggtggcagtggcccgaatccccatgcccactgtgacagagcaggagcaccatcctctcggacaaacaccgccactttaagtgccagctccctttccagcctcatgcatttcaagaaaatcacttcttttctaacaacaagcagacagaaagagcagacagtaaaacatagatgagacagctcaggcacagagggaggtggggggaaagtctcttgggtaattgccaaacttcaccctcatacattgggccccagtataacagtgggccttaataagcacattctttcccttcaggtgcactaagatagggaagctaaaaa

SEQ ID NO: 43824 - DNA, 584 bp, Homo sapiens; identical to SEQ ID NO: 39151

SEQ ID NO: 43825 - DNA, 359 bp, Homo sapiens; identical to SEQ ID NO: 34975

SEQ ID NO: 43826 - DNA, 481 bp, Homo sapiens; identical to SEQ ID NO: 34976

SEQ ID NO: 43827 - DNA, 456 bp, Homo sapiens
ctatcgggcgaattgtagctccaccgcggtggcggccgaggtaccttttagctctgcctggtttatcgccttgtcctctcagcccctggcagcctctcatctaccctctgcttctgtgggtttgccgattccgggcattttatgtaaatggaatcgtatgatatgtggtcttttgtgatcatctttttacacttagcatgatgtttttcatgtatattacggtcgggtgtggtggctcacacctgtagtcccagcgctttgggaggctgaggtgggcagattacttgagctcaggagttcgagaacagcctgggcaacgtggcaagaccctgtctcaattctttttaattgtaaaaaaaaaaaaatttataaaattttcatccttattgtattatttgtcaatacttaaatttctttatattgcccaacacactaactactggtgcacgtaataca

SEQ ID NO: 43828 - DNA, 455 bp, Homo sapiens
actactatagggcgaattggagctccaccgcggtggcggccgcccgggcaggtaccatgagaaattgtagactttactcctatattctctttccaagccctaggattagccatttttccaagaaatgttgcataccattctgctatgaaaggaaccaaaactcaaatcttgattctgggtgtattttttgttaatttgctgtcttttcttgtagaacctctcaggtaatgactctaggaggtatgtgttgtgtattaacccatatatacacacacatataaactttttatttaatttttatacctatattatgctaaacttggaaatatattgacacatctgccctaagttaataccacatgaatgtttattacctaccttctattcctgtccctaacctcgcactccaaccgtgaggaaccccctcctgccacaccctgtctattccctttgta

SEQ ID NO: 43829 - DNA, 443 bp, Homo sapiens; identical to SEQ ID NO: 37294

SEQ ID NO: 43830 - DNA, 379 bp, Homo sapiens; identical to SEQ ID NO: 34980

SEQ ID NO: 43831 - DNA, 471 bp, Homo sapiens; identical to SEQ ID NO: 40207

SEQ ID NO: 43832 - DNA, 452 bp, Homo sapiens
tatagggcgaattggagctccaccgcggtggcggccgaggtacttttcttcagatgctttgttctgtttagaacaaaaatgcactatagtttttaaagaatcatgcatctttgggttggcccaggatcaaatttgatattgaataatttattccagggcagctttcataaacatacttcatagatgttgttttgaaatgtttctaaatatctaaaatcatttcaacagcagaaatgatttttattttaacaaaagattatgatagcccttgtagtgtttaaaagtggtcatatttattactgactttgagtcaggtgttaaaatagcagtgccacagctcgtctcttgccttagtgtgctgctgtgagagtcacagtggaaactgcagggaggaggtgtgttcctaagaaccaaaatccagcacagcattctgtgaagccacgtgtaatgat

SEQ ID NO: 43833 - DNA, 422 bp, Homo sapiens; identical to SEQ ID NO: 34983

SEQ ID NO: 43834 - DNA, 421 bp, Homo sapiens; identical to SEQ ID NO: 34984

SEQ ID NO: 43835 - DNA, 285 bp, Homo sapiens; identical to SEQ ID NO: 34986

SEQ ID NO: 43836 - DNA, 182 bp, Homo sapiens; identical to SEQ ID NO: 34987

SEQ ID NO: 43837 - DNA, 453 bp, Homo sapiens; identical to SEQ ID NO: 34988

SEQ ID NO: 43838 - DNA, 196 bp, Homo sapiens; identical to SEQ ID NO: 34989

SEQ ID NO: 43839 - DNA, 435 bp, Homo sapiens; identical to SEQ ID NO: 34990

SEQ ID NO: 43840 - DNA, 452 bp, Homo sapiens
cgtaatacactactatagggcgaataggagctccaccgcggtggcggccgcccgggcaggtacttttttttttttttttttttttttctgtttttaaaaatatttcaaataggttagttaggaacaactttactcagaagacgtatttgagcaaagacatgaaagaggtgaataaagcatgtggatatctagagacagagcattccagacagaaggaacagcaactgtaaatagcaggggcagagtgtgcctgccactggtcagggcagagagtgtgaggaaacaaaggtaaagaagtaaaattttttccagctatcctgtttctaagttccaaaagctattttttcttttgaatatttcattttataggacttattctcatcttttgatgaaataccttccctcatgtctcccagggactggtatctttttaagttttcttcagttccctg

SEQ ID NO: 43841 - DNA, 432 bp, Homo sapiens; identical to SEQ ID NO: 34992

SEQ ID NO: 43842 - DNA, 425 bp, Homo sapiens; identical to SEQ ID NO: 34993

SEQ ID NO: 43843 - DNA, 426 bp, Homo sapiens; identical to SEQ ID NO: 34994

SEQ ID NO: 43844 - DNA, 428 bp, Homo sapiens; identical to SEQ ID NO: 34995

SEQ ID NO: 43845 - DNA, 601 bp, Homo sapiens; identical to SEQ ID NO: 34996
  misc_feature 162, 453, 454, 460, 461, 462, 463: n = A,T,C or G

SEQ ID NO: 43846 - DNA, 491 bp, Homo sapiens; identical to SEQ ID NO: 34997
  misc_feature 129: n = A,T,C or G

SEQ ID NO: 43847 - DNA, 579 bp, Homo sapiens; identical to SEQ ID NO: 34998

SEQ ID NO: 43848 - DNA, 359 bp, Homo sapiens; identical to SEQ ID NO: 34999
  misc_feature 88: n = A,T,C or G

SEQ ID NO: 43849 - DNA, 553 bp, Homo sapiens; identical to SEQ ID NO: 35000

SEQ ID NO: 43850 - DNA, 662 bp, Homo sapiens; identical to SEQ ID NO: 35001
  misc_feature 60: n = A,T,C or G

SEQ ID NO: 43851 - DNA, 597 bp, Homo sapiens; identical to SEQ ID NO: 31147

SEQ ID NO: 43852 - DNA, 544 bp, Homo sapiens; identical to SEQ ID NO: 35003

SEQ ID NO: 43853 - DNA, 540 bp, Homo sapiens; identical to SEQ ID NO: 35004
  misc_feature 61: n = A,T,C or G

SEQ ID NO: 43854 - DNA, 655 bp, Homo sapiens; identical to SEQ ID NO: 35005

SEQ ID NO: 43855 - DNA, 434 bp, Homo sapiens; identical to SEQ ID NO: 35006

SEQ ID NO: 43856 - DNA, 397 bp, Homo sapiens; identical to SEQ ID NO: 35007

SEQ ID NO: 43857 - DNA, 313 bp, Homo sapiens; identical to SEQ ID NO: 35008

SEQ ID NO: 43858 - DNA, 459 bp, Homo sapiens; identical to SEQ ID NO: 35009

SEQ ID NO: 43859 - DNA, 578 bp, Homo sapiens
gcgtaatacgactcctatagggcgaattggagctccaccgcggtggcggccgaggtacttcttgtagaaggctttcccacacaagctacacacgtggggtttctttcctgtatgaattctcttatgctcagtgagctgagacttcttgaggaaagctttcccacagtcagtgcattcatgggctttctctatgttgtgtgtttgctgatgtttaaggaattgtgacttggtgctgatgggttttctactttcagggaattcaatttccgtaggcatttgttcatgattatcatggagaaaagctccatctccattaaactcagcaggctcctttctgttgtatcttctgctctggttggttaaacctaaatatgatttcaaagttcttccgtgttcatagcgttgtcccgtcctcttcagtattttttggttttgcaagggctgctgcagatgatcatcagctttctcaatttctgggtgggctggactgtggatttcatcttctagtgtccatagtggttctccttgttccaacttggtgagggcatcaggtttggcggcttgataccccactgaca

SEQ ID NO: 43860 - DNA, 466 bp, Homo sapiens; identical to SEQ ID NO: 35011

SEQ ID NO: 43861 - DNA, 198 bp, Homo sapiens; identical to SEQ ID NO: 35012

SEQ ID NO: 43862 - DNA, 490 bp, Homo sapiens; identical to SEQ ID NO: 35013

SEQ ID NO: 43863 - DNA, 570 bp, Homo sapiens; identical to SEQ ID NO: 40617

SEQ ID NO: 43864 - DNA, 536 bp, Homo sapiens; identical to SEQ ID NO: 37203

SEQ ID NO: 43865 - DNA, 413 bp, Homo sapiens; identical to SEQ ID NO: 35016

SEQ ID NO: 43866 - DNA, 570 bp, Homo sapiens; identical to SEQ ID NO: 40617

SEQ ID NO: 43867 - DNA, 436 bp, Homo sapiens; identical to SEQ ID NO: 35018

SEQ ID NO: 43868 - DNA, 459 bp, Homo sapiens; identical to SEQ ID NO: 35019

SEQ ID NO: 43869 - DNA, 485 bp, Homo sapiens; identical to SEQ ID NO: 35020

SEQ ID NO: 43870 - DNA, 472 bp, Homo sapiens; identical to SEQ ID NO: 35021

SEQ ID NO: 43871 - DNA, 343 bp, Homo sapiens; identical to SEQ ID NO: 35022

SEQ ID NO: 43872 - DNA, 438 bp, Homo sapiens; identical to SEQ ID NO: 31818

SEQ ID NO: 43873 - DNA, 475 bp, Homo sapiens; identical to SEQ ID NO: 35024

SEQ ID NO: 43874 - DNA, 415 bp, Homo sapiens; identical to SEQ ID NO: 33188

SEQ ID NO: 43875 - DNA, 457 bp, Homo sapiens; identical to SEQ ID NO: 35026

SEQ ID NO: 43876 - DNA, 601 bp, Homo sapiens
tccaccgcggtggcggccgcccgggcaggtacggtgtggcagtgcccacctaaagccccagctactgaggagactgagacagaaggattgcttgaactcagaaggctgaacctgcagtgagctgtgatcatggcactgcactccagcctgggcggtaaaagtgagatcctgtctcaaaaaaaataaattacaaaggactcatatatattaattttgtataattcctctaaaggaattattcaaagatctcaaaatatttcactgatatttaagtcctgtaagtttccatttcatacggtgatataagaccatgggtagaaaatatcagtgaataaaggaagacatgccaaatgtctcatctgaatattttgaccactccatgatcttttgtcctcgcactgctgcatagttaggtttcagaggctggtcttcgaattaggtcaccaaaatatgcagtgattgtcttcaatttgttgttaaggaagttctgttctatttccacttgccctccagacccagctaaggatgccacctggtcaatatcagcatttcttggaagaaataaacaatattattagtgatcttcttagaaagtctgaaa

SEQ ID NO: 43877 - DNA, 457 bp, Homo sapiens; identical to SEQ ID NO: 35028

SEQ ID NO: 43878 - DNA, 473 bp, Homo sapiens; identical to SEQ ID NO: 35029

SEQ ID NO: 43879 - DNA, 561 bp, Homo sapiens
tctactcactatagggcgaattgggccctctagatgcatgctcgagcggccgccagtgtgatggatatctgcagaattcgccctttcgagcggccgcccgggcaggtaccaccatgcctggtttattgttttatttttttggcagagatgggtctcactgtgttgcccaggccgatctcaaactcctggcctcaagcgatcctcccatcccagcctcccaaagtgctgggattacagacctgagccaccacacctgggcaacagagtgaaacctgtccctgttttcctgctcttactctcacctccgaggcctcctctgcctggaagagattacagggaaattccaggcagcccttgtcaattgtttttatgaattctttacctgttccttttaaagacaaggaaactgaggcccaaagttctaagttgtttggcaaatggagtctcctgccctcagctcctgcaaggacctgggggacccccaggtccagcagccacatgattctgcagcagacagggacccagagcacatctggatctcagccccacccctggcaacct

SEQ ID NO: 43880 - DNA, 383 bp, Homo sapiens; identical to SEQ ID NO: 35031

SEQ ID NO: 43881 - DNA, 587 bp, Homo sapiens; identical to SEQ ID NO: 41583

SEQ ID NO: 43882 - DNA, 470 bp, Homo sapiens; identical to SEQ ID NO: 35033

SEQ ID NO: 43883 - DNA, 631 bp, Homo sapiens; identical to SEQ ID NO: 35034

SEQ ID NO: 43884 - DNA, 653 bp, Homo sapiens; identical to SEQ ID NO: 35035

SEQ ID NO: 43885 - DNA, 505 bp, Homo sapiens; identical to SEQ ID NO: 35036

SEQ ID NO: 43886 - DNA, 522 bp, Homo sapiens; identical to SEQ ID NO: 35037

SEQ ID NO: 43887 - DNA, 603 bp, Homo sapiens; identical to SEQ ID NO: 35038

SEQ ID NO: 43888 - DNA, 394 bp, Homo sapiens; identical to SEQ ID NO: 35039

SEQ ID NO: 43889 - DNA, 404 bp, Homo sapiens; identical to SEQ ID NO: 35040

SEQ ID NO: 43890 - DNA, 436 bp, Homo sapiens
agggcgaattggagctccaccgcggtggcggccgaggtacttttttttttttttttttttttttttatatataatattcaactttatttcaaatataccaattttaaaatttatcaatatacccattacgattctttctgagtgacataccacacaaattcaatacggattctctaaaaaaatcctcttaggctacttcactcaaagtctctgcagctgcctgcactgtgaaggctgcaacataaatctgtctcttcacttctccccaggccttggaagggtccactttgctttcaatatcaaacagagcatcataaattcctgggaatgactcccctgcatacttgttgtggctgcttggagcataaatgacatgcctataaaaaggcctgtctggtaaccctaatggatcaataaatgctctttccagaaacat

SEQ ID NO: 43891 - DNA, 474 bp, Homo sapiens; identical to SEQ ID NO: 35042

SEQ ID NO: 43892 - DNA, 402 bp, Homo sapiens; identical to SEQ ID NO: 31447
  misc_feature 327, 328, 341: n = A,T,C or G

SEQ ID NO: 43893 - DNA, 461 bp, Homo sapiens; identical to SEQ ID NO: 35044

SEQ ID NO: 43894 - DNA, 385 bp, Homo sapiens; identical to SEQ ID NO: 35045

SEQ ID NO: 43895 - DNA, 521 bp, Homo sapiens; identical to SEQ ID NO: 35703
  misc_feature 352: n = A,T,C or G

SEQ ID NO: 43896 - DNA, 404 bp, Homo sapiens; identical to SEQ ID NO: 35047

SEQ ID NO: 43897 - DNA, 540 bp, Homo sapiens; identical to SEQ ID NO: 35048
  misc_feature 209: n = A,T,C or G

SEQ ID NO: 43898 - DNA, 607 bp, Homo sapiens
gactcactatagggcgaattggagctccaccgcggtggcggccgcccgggcaggtacgcgggaaggcagtggtaacaacccagactacgcggggatattatcagaaactaattgacctcagaaaaggaaatacccaattccagcctactctagttgtcctgtctccctaaagggataggggagaaactgagaagcacttgtgtagttcacagtccaggaacacaggctcacttaaagattgagacctaagcaagcatgggtctatagaatgttttcccctgcccctaaaccttagcaacacattactaaaagcccatacaaagcagttccttttacctggtccatcatatctggttatcaagaaaatattacaaaacatactaaaggcaaaaaaaaaaaatccacaagtagaagaggcaaaagaagcattaaaaccagaatcagatatggcaaggatgctggaattattagaaagaaaatttaaaacaactatagttaatatgctaaagtccctaatgaataaagtagacagaatgcaagaataggtgggcaatgtaaacacagagataaacattctaaaaaaaatgctagaaataaaaaagtacct

SEQ ID NO: 43899 - DNA, 607 bp, Homo sapiens; identical to SEQ ID NO: 43898

SEQ ID NO: 43900 - DNA, 463 bp, Homo sapiens; identical to SEQ ID NO: 35051

SEQ ID NO: 43901 - DNA, 389 bp, Homo sapiens; identical to SEQ ID NO: 33557

SEQ ID NO: 43902 - DNA, 599 bp, Homo sapiens; identical to SEQ ID NO: 35054

SEQ ID NO: 43903 - DNA, 517 bp, Homo sapiens; identical to SEQ ID NO: 35055

SEQ ID NO: 43904 - DNA, 456 bp, Homo sapiens; identical to SEQ ID NO: 35056

SEQ ID NO: 43905 - DNA, 211 bp, Homo sapiens; identical to SEQ ID NO: 35057

SEQ ID NO: 43906 - DNA, 293 bp, Homo sapiens; identical to SEQ ID NO: 35058

SEQ ID NO: 43907 - DNA, 516 bp, Homo sapiens; identical to SEQ ID NO: 35059

SEQ ID NO: 43908 - DNA, 481 bp, Homo sapiens; identical to SEQ ID NO: 35060

SEQ ID NO: 43909 - DNA, 513 bp, Homo sapiens; identical to SEQ ID NO: 35061

SEQ ID NO: 43910 - DNA, 523 bp, Homo sapiens; identical to SEQ ID NO: 35062

SEQ ID NO: 43911 - DNA, 460 bp, Homo sapiens; identical to SEQ ID NO: 35063

SEQ ID NO: 43912 - DNA, 445 bp, Homo sapiens; identical to SEQ ID NO: 35064

SEQ ID NO: 43913 - DNA, 458 bp, Homo sapiens; identical to SEQ ID NO: 35065

SEQ ID NO: 43914 - DNA, 467 bp, Homo sapiens; identical to SEQ ID NO: 35066

SEQ ID NO: 43915 - DNA, 529 bp, Homo sapiens
cgaattggagctccaccgcggtggcggccgaggtacacaatggtttattaaaggaatgtatggcccacatcaacctagcaaggattctactggtaaaccttcctatggccaaaggaaaaacaagcaggagttgagtggctggggtggggtgcaggcaatggagagagggcagaagggtgtataagctgaaggggtctagaagcttactcctgagtttcttccttctgtcttcaaatctttacttcttatggccaaagacccagctgtttcataggctggagatgcactcttctagactgctcgagacagccatagacaggggaggagggaagaaggatactgtggaaagggatggcggggcaaacatttatagctagaagccactactgggccaatgctaaagtttctgtctctaagcctaaaaaagccagtgtagtagggcccttatcactcttagtttgctaggtttcccctctgaaataatgagcagatttaaccaggctagcagaaaggaagaggacggggctgt

SEQ ID NO: 43916 - DNA, 460 bp, Homo sapiens; identical to SEQ ID NO: 35068

SEQ ID NO: 43917 - DNA, 386 bp, Homo sapiens; identical to SEQ ID NO: 35069

SEQ ID NO: 43918 - DNA, 371 bp, Homo sapiens; identical to SEQ ID NO: 35070

SEQ ID NO: 43919 - DNA, 373 bp, Homo sapiens; identical to SEQ ID NO: 35071

SEQ ID NO: 43920 - DNA, 402 bp, Homo sapiens
cctgcctcgctgtcaccttcagcagatgtggatcagcaagcaggagtatgacgagtccggcccctccatcgtccaccgcaaatgcttctaggcggactatgacttagttgcgttacaccctttcttgacaaaacctaacttgcgcagaaaacaagatgagattggcatggctttatttggtttttttgttttgttttggttttttttttttttttttggcttgactcaggatttaaaaactggaacggtgaaggtgacagcagtcggttggagcgagcatcccccaaagttcacaatgtggccgaggactttgattgcacattgttgtttttttaatagtcattccaaatatgagatgcattgttacaggaagtcccttgccatcctaaaagccaccccact

SEQ ID NO: 43921 - DNA, 424 bp, Homo sapiens; identical to SEQ ID NO: 35073

SEQ ID NO: 43922 - DNA, 569 bp, Homo sapiens
gcatgctcgcgcggccgccagtgtgatggatatctgcagaattcgccctttcgagtggccgcccgggctggtacgcggggaaaatctgaatgatgatgagaaactcaacaatgcaaaatatgccatctctatggcccgaaaaattggagcaagagtgtatgccctgccagaagaccaggttgaagtgaaccccaaaatggtcatgaccgtgtttgcctgcctcatggggaaaggaatgaagagggtgtgaggcccaatggggctgggtgggaggcggtgcactcactcctgactgcccggcacagatgccccagggatgattcaagccattccaaagttcaacttggtgacactctataagattccaaaaagcacatattagtgcagccaagtagcctctcctgtatttaacaaaaagtgcttcattctttgcaggaggcccaacctcctatatataggtttctattcttgatttatttgcttcttcgaaaatctagaggaaaagaaagaagttattttccaggtacctcggccgcgaccacgctaagggcgaattccagcacactggc

SEQ ID NO: 43923 - DNA, 387 bp, Homo sapiens
gggcgaattggagctccaccgcggtggcggccgtggctgcccagacgtatttggcgtcgcagtagccgacaatggcggcctcctggcagcagccatcgcacatcaggttatccacgtagctctgccaaccggccatcttcgagcccttcgcactgcagcgcggacggcgaggagcccccgcgtacctcggccgctctagaactagtggatcccccgggctgcaggaattcgatatcaagcttatcgataccgtcgacctcgagggggggcccggtacccagcttttgttccctttagtgagggttaattgcgcgcttggcgtaatcatggtcatagctgtttcctgtgtgaaattgttatccgctcacaattccacacaacatacga

SEQ ID NO: 43924 - DNA, 356 bp, Homo sapiens; identical to SEQ ID NO: 35076

SEQ ID NO: 43925 - DNA, 481 bp, Homo sapiens
  misc_feature 443: n = A,T,C or G
tccaccgcggtggcggccgaggtacagcagcaacagcaaaggaatctctcactacatgaatacatgagtatggaattattgcaagaagctggtgtctccgttcccaaaggatatgtggcaaagtcaccagatgaagcttatgcaattgccaaaaaattaggttcaaaagatgtcgtgataaaggcacaggttttagctggtggtagaggaaaaggaacatttgaaagtggcctcaaaggaggagtgaagatagttttctctccagaagaagcaaaagctgtttcttcacaaatgattgggaaaaaattgtttaccaagcaaacgggagaaaagggcagaatatgcaatcaagtattggtctgtgagcgaaaatatcccaggagagaatactactttgcaataacaatggaaaggtcatttcaaggtcctgtattaataggaangtcacatggtggtgtcaacattgaagatgttgctgctg

SEQ ID NO: 43926 - DNA, 434 bp, Homo sapiens; identical to SEQ ID NO: 35078

SEQ ID NO: 43927 - DNA, 477 bp, Homo sapiens; identical to SEQ ID NO: 35079

SEQ ID NO: 43928 - DNA, 305 bp, Homo sapiens; identical to SEQ ID NO: 35080
  misc_feature 32, 57: n = A,T,C or G

SEQ ID NO: 43929 - DNA, 371 bp, Homo sapiens; identical to SEQ ID NO: 35081

SEQ ID NO: 43930 - DNA, 574 bp, Homo sapiens; identical to SEQ ID NO: 35082

SEQ ID NO: 43931 - DNA, 260 bp, Homo sapiens; identical to SEQ ID NO: 35083

SEQ ID NO: 43932 - DNA, 533 bp, Homo sapiens; identical to SEQ ID NO: 35084

SEQ ID NO: 43933 - DNA, 232 bp, Homo sapiens; identical to SEQ ID NO: 35086

SEQ ID NO: 43934 - DNA, 577 bp, Homo sapiens; identical to SEQ ID NO: 35087

SEQ ID NO: 43935 - DNA, 606 bp, Homo sapiens; identical to SEQ ID NO: 35088
  misc_feature 167, 168: n = A,T,C or G

SEQ ID NO: 43936 - DNA, 565 bp, Homo sapiens; identical to SEQ ID NO: 35089

SEQ ID NO: 43937 - DNA, 628 bp, Homo sapiens; identical to SEQ ID NO: 35090
  misc_feature 526: n = A,T,C or G

SEQ ID NO: 43938 - DNA, 644 bp, Homo sapiens; identical to SEQ ID NO: 35091

SEQ ID NO: 43939 - DNA, 438 bp, Homo sapiens
gggcggccgccatcgccgtcgctgggcttcttctggactcatctgcgccacttgtccgcttcacactccgccgccatcatggtgaagctcgcgaaggcaggtaaaaatcaaggtgaccccaagaaaatggctcctcctccaaaggaggtagaagaagatagtgaagatgaggaaatgtcagaagatgaagaagatgatagcagtggagaagaggtcgtcatacctcagaagaaaggcaagaaggctgctgcaacctcagcaaagaaggtggtcgtttccccaacaaaaaaggttgcagttgccacaccagccaaggaagcagctgtcactccaggcaaaaaggcagcagcaacacctgccaagaagacagttacaccagccaaagcagttaccacacctggcaagaagggagccataccaggcaaagcattggtagca

SEQ ID NO: 43940 - DNA, 608 bp, Homo sapiens
gagctccaccgcggtggcggccgaggtaccatatcctaaggctgcacagagcaggaggcccagcctaggaaacgatttttccctcctagacctctgggcctgtgatgggaggggttgccatgaaggtctctgacatgccctgtagacattttccccattttcttggtgattacttactcaaatttctccagtgggtttgaatttctccccagaaaatggatttttcttttctatcgcattgtcaggttgcaaatcttccaaactttaatgttctgctttctcttgaatgctctgccacttagaaatttcttccactagatatcctaatcatttctctcaagttcaaagttccacagatctctaggacaaggcaaatgctgccagtctctttgctaaagcatagaaagagtcacctatgctccagttcccaacagttcctcatctccattttagaccaccttagcctggatttcattgtccatatcattatcagcattttggttgaaaccattcaacaagtctccaggaagtttcaaactttcccacatcttcctgtcttctgagttcttcaattttctaagaagttccaaactttcccacatttttat

SEQ ID NO: 43941 - DNA, 396 bp, Homo sapiens; identical to SEQ ID NO: 35094
  misc_feature 301, 302, 355: n = A,T,C or G

SEQ ID NO: 43942 - DNA, 511 bp, Homo sapiens; identical to SEQ ID NO: 35095

SEQ ID NO: 43943 - DNA, 539 bp, Homo sapiens
ggggccctctagatgcatgctcgagcggccgccagtgtgatggatatctgcagaatttcgagcggccgcccgggcaggtacaccaaggtggtgcattaccggaagtggatcaaggacaccatcgcagccaacccctgagtgcccctgtcccacccctacctctagtaaatttaagtccacctcacgttctggcatcacttggcctttctggatgctggacacctgaagcttggaactcacctggccgaagctcgagcctcctgagtcctactgacctgtgctttctggtgtggagtccagggctgctaggaaaaggaatgggcagacacaggtgtatgccaatgtttctgaaatgggtataatttcgtcctctccttcggaacactggctgtctctgaagacttctcgctcagtttcagtgaggacacacacaaagacgtgggtgaccatgttgtttgtggggtgcagagatgggaggggtggggcccaccctggaagagtggacagtgacacaaggtggacactctctacagatcact

SEQ ID NO: 43944 - DNA, 393 bp, Homo sapiens
gactcactatagggcgaattggagctccaccgcggtggcggccgaggtactttttttttttttttttttttttgctgggatatcttacagaggaaggaaaaattaaccttttttactttctttctcactttttaaatcagccaaagtcaagcccgtttgccaacctgcatgtccatgcctgtaagcccttctcttggccaaggaagaaaggaagaaagaaaaaagaaacccaggggcctgtatcccctgattaaacacagcacagcactccaggcagacatgcccggtggcggctcctttgcaccattgacctcaggccagacacctcagcgccaacaatgggacctcggccttccggctaggtttgccccaggctgggcaggaaaccagctc

SEQ ID NO: 43945 - DNA, 536 bp, Homo sapiens
ctaagctggaagagacgcccctgctaacgggaatgctaatgaggaaaatggggagcaggaggctgacaatgaggtagacgaagaagaggaagaaggtggggaggaagaggaggaggaagaagaaggtgatggtgaggaagaggatggagatgaagatgaggaagctgagtcagctacgggcaagcgggcagctgaagatgatgaggatgacgatgtcgataccaagaagcagaagaccgacgaggatgactagacagcaaaaaaggaaaagttaaactaaaaaaaaaaaggccgccgtgacctattcacccttcacttaccgtctcagaatctaaacgtggtcaccttctagtagagaggcccgcccgcccaccgtgggcagtgccacccgcagatgacacgcgctcttcaccacccaacccaaaccatgagaatttgcaacaggggaggaaaaaagaaccaaaactttcaaggccctgctttttttcttaaaagtactttaaaaaggaaaatcgtttgtatttttttatttacat

SEQ ID NO: 43946 - DNA, 475 bp, Homo sapiens; identical to SEQ ID NO: 33560

SEQ ID NO: 43947 - DNA, 448 bp, Homo sapiens; identical to SEQ ID NO: 35100

SEQ ID NO: 43948 - DNA, 524 bp, Homo sapiens; identical to SEQ ID NO: 35678

SEQ ID NO: 43949 - DNA, 448 bp, Homo sapiens; identical to SEQ ID NO: 35102

SEQ ID NO: 43950 - DNA, 449 bp, Homo sapiens; identical to SEQ ID NO: 35103

SEQ ID NO: 43951 - DNA, 212 bp, Homo sapiens; identical to SEQ ID NO: 35104

SEQ ID NO: 43952 - DNA, 529 bp, Homo sapiens; identical to SEQ ID NO: 43915

SEQ ID NO: 43953 - DNA, 448 bp, Homo sapiens; identical to SEQ ID NO: 35106

SEQ ID NO: 43954 - DNA, 633 bp, Homo sapiens; identical to SEQ ID NO: 33609

SEQ ID NO: 43955 - DNA, 457 bp, Homo sapiens; identical to SEQ ID NO: 35108

SEQ ID NO: 43956 - DNA, 289 bp, Homo sapiens; identical to SEQ ID NO: 35109

SEQ ID NO: 43957 - DNA, 403 bp, Homo sapiens; identical to SEQ ID NO: 33651

SEQ ID NO: 43958 - DNA, 630 bp, Homo sapiens
  misc_feature 594: n = A,T,C or G
ttggagctccaccgcggtggcggccgcccgggcaggtaccaaggattttctattgcagcagaccatgctacgagtgaaggatcctaagaagtcactggatttttatactagagttcttggaatgacgctaatccaaaaatgtgattttcccattatgaagttttcactctacttcttggcttatgaggataaaaatgacatccctaaagaaaaagatgaaaaaatagcctgggcgctctccagaaaagctacacttgagctgacacacaattggggcactgaagatgatgagacccagagttaccacaatggcaattcagaccctcgaggattcggtcatattggaattgctgttcctgatgtatacagtgcttgtaaaaggtttgaagaactgggagtcaaatttgtgaagaaacctgatgatggtaaaatgaaaggtctggcatttattcaagatcctgatggctactggattgaaattttgaatcctaacaaaatggcaaccttaatgtagtgctgtgagaattctcctttgagatttcagaagaaaggaaacaatgtgattcaagatatttacataccagaagcatctangactgatggatcactgtcccgattcaaattattctt

SEQ ID NO: 43959 - DNA, 287 bp, Homo sapiens; identical to SEQ ID NO: 35112

SEQ ID NO: 43960 - DNA, 200 bp, Homo sapiens; identical to SEQ ID NO: 35113

SEQ ID NO: 43961 - DNA, 209 bp, Homo sapiens; identical to SEQ ID NO: 35114

SEQ ID NO: 43962 - DNA, 530 bp, Homo sapiens
  misc_feature 396: n = A,T,C or G
agcgcgcgttaataccgactcactatagggcgaattggagctccaccgcggtggcggccgccgggcaggtactcaaagacgaatcatgaaaaagaaaaaaaactttatttcaaacaggttcagtgatatatgtgtgtgctacagcaaaggctggttgtggcaaagtttcatttcaaactgtatgatgtgggctgggcaaggtggctcacgcctgtaatcccagcactttgtgaggccgaggtgggctgatcaccctgaggtcaggagagaccggcctagccaacatgctgaaaccccgtctctactaataatacaaaaattagccaagtgtggtggcgcgcacctgtaatctcagctactcgggaggctgaggcaggagaatcgcttgaacccggngggcagaggttgcagatcacgccactgcactccagcctgggtgacagagccagactcaaaaacaaaacaaaataaaacaaacaaaaaaacagaactgcatgatgtataattttgacattatgtgggaatgttta

SEQ ID NO: 43963 - DNA, 469 bp, Homo sapiens; identical to SEQ ID NO: 35116

SEQ ID NO: 43964 - DNA, 201 bp, Homo sapiens; identical to SEQ ID NO: 35118

SEQ ID NO: 43965 - DNA, 201 bp, Homo sapiens; identical to SEQ ID NO: 35119

SEQ ID NO: 43966 - DNA, 615 bp, Homo sapiens; identical to SEQ ID NO: 33688
  misc_feature 171, 468: n = A,T,C or G

SEQ ID NO: 43967 - DNA, 455 bp, Homo sapiens; identical to SEQ ID NO: 35121

SEQ ID NO: 43968 - DNA, 203 bp, Homo sapiens; identical to SEQ ID NO: 35122

SEQ ID NO: 43969 - DNA, 426 bp, Homo sapiens
gcgaattggagctccaccgcggtggcggccgaggtacaggcgtgagccactgcgcccggccccaaaggacaatttcttgagacccccacacaccttcagaaccacacattctgttcatgctaaaaacaagaaattaacaacctctaaagctaaggacaatgattctgtaaagtgcaagaatggttcattgtttccgcttttgtggatttcatgttaagaatactttaaaagaaagggtgggcgggagtaaaccaggaccccagtcatatatttgatcaagaaatgacccgtatggcaaaggtgagacgtggaccagccctcaggtgtctccaactctgtgcacaccactgaggtaggagctctagaagaaacgcagaccctctcaggggggttaaggttttcctcttggcaaatgagctgggggcc

SEQ ID NO: 43970 - DNA, 612 bp, Homo sapiens; identical to SEQ ID NO: 35124

SEQ ID NO: 43971 - DNA, 475 bp, Homo sapiens; identical to SEQ ID NO: 35125

SEQ ID NO: 43972 - DNA, 405 bp, Homo sapiens; identical to SEQ ID NO: 35126

SEQ ID NO: 43973 - DNA, 476 bp, Homo sapiens; identical to SEQ ID NO: 35127

SEQ ID NO: 43974 - DNA, 572 bp, Homo sapiens
  misc_feature 16: n = A,T,C or G
gaattgggccctctanatgctgctcgagcggccgccagtgtgatggatatctgcagaattcggcttagcgtggtcgcggccgaggtacagcaaaatcaaccttacatctcaaccaaattttgggagatcagggactctctgcaggggagaagctccacaacctcagcaaattatcctattggtttgggcaattaaaacagcccaggttggtatcaagcaatgagatttatcaaaggtcaggaccacctttgtaatgtccttctcttttttatctttattcgcatagtctgttttgtcagaaagtaggagtgcaacacctgcttttttctgttttccatttgcttgaaatatttttctccattcctttattttgagcctatgtatgccaccgcatgtgagatgggtttcttgaagacagcatactccagtgggtcttggttctttatccagcttgccccgtgtctttcaatgggagcatttagcccattttcatttaaggttagtaatggtatgtgtggattttatcctgtcgtcatgctgtcagctggttattttgcagacttaacgtatgt

SEQ ID NO: 43975 - DNA, 549 bp, Homo sapiens; identical to SEQ ID NO: 35129
  misc_feature 39: n = A,T,C or G

SEQ ID NO: 43976 - DNA, 319 bp, Homo sapiens
  misc_feature 43, 44: n = A,T,C or G
tccaccgcggtggcggccgtccctcttaatcatgggcctcagnnttccgaaaaccaacaaaatagaaccgcggtcctattccattattcctagctgcggtatccaggcggctcgggcctgctttgaacactctaattttttcaaagtaaacgcttcgggccccgcgggacactcaccccgcgtacctcggccgctctagaactagtggatcccccgggctgcaggaattcgatatcaagcttatcgataccgtcgacctcgagggggggcccggtacccagcttttgttccctttagtgagggttaattgcgcgcttgg

SEQ ID NO: 43977 - DNA, 461 bp, Homo sapiens; identical to SEQ ID NO: 35130

SEQ ID NO: 43978 - DNA, 445 bp, Homo sapiens; identical to SEQ ID NO: 35131

SEQ ID NO: 43979 - DNA, 569 bp, Homo sapiens
  misc_feature 16, 29, 130: n = A,T,C or G
cgggcccccccctcgngggtacttctagnattaattaacgcggggtgggggagtatgtttaagatgagttccgttctatgtcctccaacttagactgtcttttggttcacagagtgcaacaatattttanccaatggaaaaacaagtattttaatttaccttccagcagagttcctgggaagaattttgttgttattatttaaactataatactataacccttaaaccatccacattatctgttttattttggcaaaatgaaagcatcttaaaaaaaaaaaaaaaggcaatcacaaaatacagggctttcttagaaagcaacatgcatcatatcttgaacaagttacccaagcggtttctccgtcctacaaacagacacggatcaatctctccttctgggagcttctctgtctttgcccaggtcgctccctgagaggtgaggtctgaacccactgggaagcaggacgatgttcaaggcttgtactgtggatgcttatttgatgtcttttgctctgcccaaaacaaaagagtacctgttggctttctgcagagatgcttacttttcctct

SEQ ID NO: 43980 - DNA, 458 bp, Homo sapiens; identical to SEQ ID NO: 35134

SEQ ID NO: 43981 - DNA, 452 bp, Homo sapiens; identical to SEQ ID NO: 35135

SEQ ID NO: 43982 - DNA, 593 bp, Homo sapiens
gacccacgcgtccggtttgtgaaactgtgttgccgggcaactggacatccttttgttcaatatcagtggttcaaaatgaataaagagattccaaatggaaatacatcagagcttatttttaatgcagtgcatgtaaaagatgcaggcttttatgtctgtcgagttaataacaatttcacctttgaattcagccagtggtcacagctggatgtttgcgacatcccagagagcttccagagaagtgttgatggcgtctctgaatccaagttgcaaatctgtgttgaaccaacttcccaaaagctgatgccaggcagcacattggttttacagtgtgttgctgttggaagccctattcctcactaccagtggttcaaaaatgaattaccattaacacatgagaccaaaaagctatacatggtgccttatgtggatttggaacaccaaggaacctactggtgtcatgtatataatgatcgagacagtcaagatagcaagaaggtagaaatcatcataggaagaacagatgaggcagtggagtgcactgaagatgaattaaataatcttggtcatcctgataataaagagcaaacaac

SEQ ID NO: 43983 - DNA, 407 bp, Homo sapiens; identical to SEQ ID NO: 35138

SEQ ID NO: 43984 - DNA, 456 bp, Homo sapiens; identical to SEQ ID NO: 35139

SEQ ID NO: 43985 - DNA, 415 bp, Homo sapiens; identical to SEQ ID NO: 35140

SEQ ID NO: 43986 - DNA, 397 bp, Homo sapiens
tacgactcactatagggcgaattggagctccaccgcggtggcggccgcccgggcaggtacttttttttttttttttttttttttttggaatgaacaaatatttatttatcttttataacaagtaaggcaatgttgcttaaaggaagacaaacaaacataaaagattccgttgacaatgcattttttcatctgttcggcacaatgcttttgtcataatggagatgtgacagcaaactttccaggacattcagtcttcggcggcagcacttagggcagatgactggccgctcagattctctatcttgtttcaggacagtggaaaagcttatagatgaggccaaagcaccaggtaggtggaaggttcttgtatcggttcgaaccccgacagcgcgccaac

SEQ ID NO: 43987 - DNA, 430 bp, Homo sapiens; identical to SEQ ID NO: 35142

SEQ ID NO: 43988 - DNA, 638 bp, Homo sapiens
tacgactcactatagggcgaattgggccctctagatgcatgctcgagcggccgccagtgtgatggatatctgcagaattcggctttcgagcggccgcccgggcaggtacatagtgtcgcgaactcaaatcggcatttagatagatccagtggtttaaacggcacgtttttgcttataaaaaaagtgcaaaaaagatgtggtttacaagttaaagctacagaatccctttttgctgtaattgcaccagttttaaagcctctggacagagcagtatttcgtttaaaactttgtttttcttaaaagcttacagtgtttggctaattctcctcccctttttacaagacgggggccggagggtggacactggtggcaggttaagggatactgtcactttaagaagcctgcagattgaagtgtaaacatggagaaattaggggctgattttttaaactgtgtgagatattaaccagccgccctgttataaaatcaggaaatccaaacagcgatttacaccgattaacaccccctttatatattttttacaaaaatacactgagaaaataatcaaacgttttcatctctcttggctttttttggtttttaaaagtgtcaaaagtctacatttaaatataaaaaat

SEQ ID NO: 43989 - DNA, 447 bp, Homo sapiens; identical to SEQ ID NO: 35144

SEQ ID NO: 43990 - DNA, 452 bp, Homo sapiens; identical to SEQ ID NO: 35145

SEQ ID NO: 43991 - DNA, 431 bp, Homo sapiens; identical to SEQ ID NO: 35146

SEQ ID NO: 43992 - DNA, 432 bp, Homo sapiens; identical to SEQ ID NO: 35147

SEQ ID NO: 43993 - DNA, 449 bp, Homo sapiens
ctactatagggcgaattgggccctctagatgcatgctcgagcggccgccagtgtgatggatatctgcagaattcggcttagcgtggtcgcggccgaggtactttcataattcagaagggaaaagtgaagtctcacattatgcctgcagaattttcttcctgccccttgaactctgatgaagaagtgaataaatggttgcatttttatgaaatgaaagctcctttggtttgtctaccagtttttgtctccagagacccagggtttgatttgcgactggagcacactcatttttttagtcgtcatggagaaggtggacactaccattatgacactactccagatatagtggaatatcttggatacttcttacctgcagagtttctctatcgcattgatcaaccaaaagagacgcattcaattgggcgagattaaatcagctgatacttatt

SEQ ID NO: 43994 - DNA, 425 bp, Homo sapiens; identical to SEQ ID NO: 35149

SEQ ID NO: 43995 - DNA, 452 bp, Homo sapiens; identical to SEQ ID NO: 35150

SEQ ID NO: 43996 - DNA, 569 bp, Homo sapiens; identical to SEQ ID NO: 39396

SEQ ID NO: 43997 - DNA, 439 bp, Homo sapiens; identical to SEQ ID NO: 35153

SEQ ID NO: 43998 - DNA, 435 bp, Homo sapiens; identical to SEQ ID NO: 35155

SEQ ID NO: 43999 - DNA, 438 bp, Homo sapiens; identical to SEQ ID NO: 35156

SEQ ID NO: 44000 - DNA, 366 bp, Homo sapiens; identical to SEQ ID NO: 35157

SEQ ID NO: 44001 - DNA, 440 bp, Homo sapiens; identical to SEQ ID NO: 35158

SEQ ID NO: 44002 - DNA, 416 bp, Homo sapiens; identical to SEQ ID NO: 35159

SEQ ID NO: 44003 - DNA, 446 bp, Homo sapiens; identical to SEQ ID NO: 35160

SEQ ID NO: 44004 - DNA, 467 bp, Homo sapiens; identical to SEQ ID NO: 35161

SEQ ID NO: 44005 - DNA, 439 bp, Homo sapiens; identical to SEQ ID NO: 35162

SEQ ID NO: 44006 - DNA, 459 bp, Homo sapiens; identical to SEQ ID NO: 35163

SEQ ID NO: 44007 - DNA, 476 bp, Homo sapiens; identical to SEQ ID NO: 35164

SEQ ID NO: 44008 - DNA, 390 bp, Homo sapiens
ggcgaattggagctccaccgcggtggcggccgaggtacgggttgcccctggcttggcactgcaggacgtgtctcgttttatctttccatttcaagtgctgggggcatgtggctcggtcaattttgggaccatctgtggaaccaccatgtgtgatcagacacccaacacacccgaggcacagtggtgcagaggagcgtctaatctttccagggcaggggtggagggattaaaggtcagggtgaccgactcacacaggactcgcagctggacgctactgttcctgtgcaagaactcgccgtccacctcgagagtggcactgcagaagaagctgcgtccgtcgtcactctcggtagcatttagctgaagttgagctggctgccccggggccgc

SEQ ID NO: 44009 - DNA, 378 bp, Homo sapiens; identical to SEQ ID NO: 35166

SEQ ID NO: 44010 - DNA, 600 bp, Homo sapiens
  misc_feature 37: n = A,T,C or G
ctggggtaccggggccccccctcggggatcttctagnattaattaacgcggggggccagggccgcactccggagactcgcggttgctacgcgcaccatggctggagcgcccacggtctcgcttcctgaactccgttcactcctagcctccggacgggcccggctcttcgacgtgcgctctcgcgaggaggcggcagctgggaccatcccagggcgctcaacatcccggtgtccgagttggagagtgctctgcagatggagccagctgccttccaggctttatattctgctgagaagccaaagctggaagatgagcatctcgttttcttctgtcagatgggcaagcggggcctccaggccacgcagctggcccggagtcttggatacactggggctcgcaactacgctggagcctatagagaatggttggagaaagagagttaggcaggaggcagcttactgattgccaccccctggccccttatggccaccttaactaagggtgtgaacgggctgacttggtgaattgggcaactccttatagtgttgtgcacacaaaagcatcaaataaagaacatttaatcaaagtattgggaagcaa

SEQ ID NO: 44011 - DNA, 439 bp, Homo sapiens
ggagtcgacccacgcgtccgagcgggcaggtcgttctgaagctgtggtggaatacgtcttcagtggttctcgtctcaaactctatttgccaaaggaaacttgccttatcaccttcttgcttgcaggcattgaatgccccagaggagcccgaaacctcccaggcttggtgcaggaaggagagcccttcagcgaggaagctacacttttcaccaaggaactggtgctgcagcgagaggtggaggtggaggtggagagcatggacaaggccggcaactttatcggctggctgcacatcgacggtgccaacctgtccgtcctgctggtggagcacgcgctctccaaggtccacttcaccgccgaacgcagctcctactacaagtccctgctgtctgccgaggaggccgcaaagcagaagaaagagaaggtctgggcccactat

SEQ ID NO: 44012 - DNA, 448 bp, Homo sapiens; identical to SEQ ID NO: 35169

SEQ ID NO: 44013 - DNA, 489 bp, Homo sapiens
aggggtcgacccacgcgtccgtgcatggctaattaaaaagagaatatatgtgatattttaacagagacgtgattggcagcagatggctgattaaggaggaactagaagaaatgttagtggaaaaactgtcagatctagattatatgcagttcattcggctgctagaaaagttattgacatcgcagtgtggtgctgctgaggaagaatttgtgcagaggtttcgaagaagtgtaactcttgaatcaaaaaaacagctgattgaacctgtacagtatgatgagcaaggaatggcctttagcaaaagcgaaggtaaaagaaagactgcaaaagcagaagcaattgtttataaacatggaagtggaagaataaaagtaaatggaattgattaccagctttacttcccgatcacacaggacagagaacagctgatgttccctttccactttgttgaccggctgggaaagcacgacgtgacctgcacagtctcag

SEQ ID NO: 44014 - DNA, 392 bp, Homo sapiens; identical to SEQ ID NO: 35171

SEQ ID NO: 44015 - DNA, 440 bp, Homo sapiens; identical to SEQ ID NO: 35172

SEQ ID NO: 44016 - DNA, 279 bp, Homo sapiens
tccaccgcggtggctggccgaggtaccgtgcctcacagtgcagggcggtatgccgccaaacgcttccgcaaagctcagtgtcccattgtggagcgcctcactaactccatgatgatgcacggccgctctagaactagtggatcccccgggctgcaggaattcgatatcaagcttatcgataccgtcgacctcgagggggggcccggtacccagcttttgttccctttagtgagggttaattgcgcgcttggcgtaatcatggtcatagctgttttcctg

SEQ ID NO: 44017 - DNA, 443 bp, Homo sapiens; identical to SEQ ID NO: 35174

SEQ ID NO: 44018 - DNA, 441 bp, Homo sapiens; identical to SEQ ID NO: 35175

SEQ ID NO: 44019 - DNA, 613 bp, Homo sapiens
gcgcgtatacgactcactatagggcgaattggagctccaccgcggtggcggccgcccgggcaggtacaccgactacggcggactaatcttcaactcctacatacttcccccattattcctagaaccaggcgacctgcgactccttgacgttgacaatcgagtagtacaggtaagccctggctgcctccacccactcccagggagaccaaaagccttcatacatctcaagttgggggacaaaaaagggggaagggggggcacgaaggctcatcattcaaaataaaacaaaataaaaaagtattaaggcgaagattaaaaaaattttgcattacataatttacacgaaagcaatgctatcacctcccctgtgtggacttgggagaggactgggccattctccttagagagaagtggggtggcttttaggatggcaagggacttcctgtaacaacgcatctcatatttggaatgactattaaaaaaacaacaatgtgcaatcaaagtcctcggccacattgtgaactttgggggatgctcgctccaaccgactgctgtcaccttcaccgttccagtttttaaatcctgagtcaagccaaaaaaaaaaaaaaaaaaa

SEQ ID NO: 44020 - DNA, 443 bp, Homo sapiens; identical to SEQ ID NO: 35177

SEQ ID NO: 44021 - DNA, 385 bp, Homo sapiens
gagctccaccgcggtggcggccgaggtactgcctcatggttagccacaagcctttttatcttgtaatatcagagtcttggaattctttatcttccctactctatatctagaagacagtagcactgacttatctgctgcagagctcttaattctatccttggccccgattcagaaaagggggttcctcatgctggatctgaacaacccagcacaggcaagtctggggagcaaggcaggagcctgcatgtggactcaaaggaccggcacccgaaacaaagcagaggctggcacaggtggacaaaccaggcaagaaaagcaactgtccttcggagcaaagtccacgtgatgggaagaaacaggtcatgatacttttgagtggttacat

SEQ ID NO: 44022 - DNA, 485 bp, Homo sapiens; identical to SEQ ID NO: 42538

SEQ ID NO: 44023 - DNA, 391 bp, Homo sapiens; identical to SEQ ID NO: 35180

SEQ ID NO: 44024 - DNA, 443 bp, Homo sapiens; identical to SEQ ID NO: 35181

SEQ ID NO: 44025 - DNA, 652 bp, Homo sapiens
ttggagctccaccgcggtggcggccgcccgggcaggtacagtagtgcactcttggctcactgtagcctcgacctccggggctcaagtgatcctcctgccttagccccacaagtagtgggactataggcacacaccaccatgcccatctaagtttttgtattttatgtagagacaaggtttcaccatgttgcccaggctgatcttgacctcctgagctcaagtgatctgcccacctcggactcccaaaatgctgggattataggcgtaaaccaccatgcctggccttaaatcaactttagagtcaacatctcttatcactggagcttctggagaaactccatcacgtggtgctctctttcctgatgtgttgtgcccaaatagcttgttctcatcagatgacttatttgctatgatatatatacttcaagagctgctatatgtattacatacatcaaatctttctgtaaagtttgatttttgtttctttaaaaggaacataaatgttccaggaccaagggacacaaagaggttttaatttttagttctgtagcctcatatattttaacagaaatataaaaacagatagtagcagttttccagtggagaaaactttccagatgtctccactgtatctcctttctttgcctctcct

SEQ ID NO: 44026 - DNA, 448 bp, Homo sapiens; identical to SEQ ID NO: 35183

SEQ ID NO: 44027 - DNA, 634 bp, Homo sapiens
agggcgaattggagctccaccgcggtggcggccgaggtactacctacctagaggttatgtgttttctctttctccccgctttcacctctttctttcccaattcaaaacagccaagtgagccctgttctggtattttgaatcattagagaaaagaaagggagtggctgttttgagttgtcctttctttgcagaaaggagaaaatgtgattatgtttttttttaccagcctacttctaagtgtcactgcctggttttcctctttttcaaggattagaactaagaggacacaccagcatcggagtgtattaagcccctgaaacacatggtagctaggggctgaacacaggaaccgtatgacagcagcacaaacccccaaaggatgttcctgccttgtgggcccctgagccccttgggagactgagaatcatgaccagattcatccagaactgctgcagtgttaagtgaaaatcctctgtagttgttctgcagaggaaccttccttccattagaaaatttctgctcaatacagaatggtccacatcacccaaagtgcactgttggagatgctgtgaaattaaaacctctttgtacctgcccgggcggccgctctagaactagtggatcccccgggctg

SEQ ID NO: 44028 - DNA, 383 bp, Homo sapiens
gactactatagggcgaattggagctccaccgcggtggcggccgtcgctcccctgctcctccttggtggctctgtttggagacagggcaggtgaatgctccctggatctgttgctctttttccttcagccttcgggctgacactgactccccgcgtacctcggccgctctagaactagtggatcccccgggctgcaggaattcgatatcaagcttatcgataccgtcgacctcgagggggggcccggtacccagcttttgttccctttagtgagggttaattgcgcgcttggcgtaatcatggtcatagctgtttcctgtgtgaaattgttatccgctcacaattccacacaacatacgagccgggagcataaagtgtaaagcc

SEQ ID NO: 44029 - DNA, 452 bp, Homo sapiens
actactatagggcgaattggagctccaccgcggtggcggccgaggtacttctgtctcagctctttggaaagaggggaagacataatcttccttcgaatgtgggaaggtgcattgaaatgccttttgcgattcttgcttcggtcggaagtcacaaagggattaaacttcattttggctggaaaagcctgcacacgtctcgggtcctaaaagcctcccagtgggcaagtgtggtctggaaattccgtgaagactttaccgagaagttacttcgagaccattctctaggaaacgacactacccagactccagtctatttccacaggctcccttctctcagctcgttttcgagttcccaaatccccggtccctccatccatctccggcccggcggcccttgatttaagaaagcaacagataaaaaaaccatcccagtctctccttcctggctgcta

SEQ ID NO: 44030 - DNA, 464 bp, Homo sapiens
ggcgaattggagctccaccgcggtggcggccgcccgggcaggtacattgagaatgagaagctcatcttaggaaagcgccaggagctggtcaccaagatcgaccacatcctggatgccctgtagcccctgcccgcatcctccagggggcccagggtgcctgcactttgctgtggcaggcagattgggtggtagtgggaggttgtgcatggaggccagtgaaagctgacatctgtaaaaggccttcaaggaagagaaaccaggccctgcgtcaggcagtgtgagtttgccgtttgtccttaactttcttttttttttttaaaaaaagaaaactttaaaaaaactcccattaaaaacaagacatctttgtgttttgaacaaaggaattttcaatatttgattggtattctgttctgaagtctaggatatttttcagcctataaagccccctgttttatgcccttcta

SEQ ID NO: 44031 - DNA, 398 bp, Homo sapiens; identical to SEQ ID NO: 35188

SEQ ID NO: 44032 - DNA, 67 bp, Homo sapiens; identical to SEQ ID NO: 35189

SEQ ID NO: 44033 - DNA, 447 bp, Homo sapiens; identical to SEQ ID NO: 35190

SEQ ID NO: 44034 - DNA, 466 bp, Homo sapiens; identical to SEQ ID NO: 35191

SEQ ID NO: 44035 - DNA, 453 bp, Homo sapiens; identical to SEQ ID NO: 35192

SEQ ID NO: 44036 - DNA, 643 bp, Homo sapiens
tggagctccaccgcggtggcggccgaggtacaagccagagcaacccctggtgcgactgagaggcggtgcctacatcggggagggccgcgtggaggtgctcaaaaatggagagtgggggaccgtctgcgacgacaagtgggacctggtgtcggccagtgtggtctgcaagagctgggctttgggagtgccaaagaggcagtcactggctcccgactggggcaagggatcggacccatccacctcaacgagatccagtgcacaggcaatgagaagtccattatagactgcaagttcaatgccgagtctcagggctgcgaccacgaggaggatgctggtgtgagatgcaacacccctgccatgggcttgcagaagaagctgcgcctgaacggcggccgctctagaactagtggatcccccgggctgcaggaattcgatatcaagcttatcgataccgtcgacctcgagggggggcccggtacccagcttttgttccctttagtgagggttaattgcgcgcttggcgtaatcatggtcatagctgtttcctgtgtgaaattgttatccgctcacaattccacacaacatacgagccgggagcataaagtgtaaagcctggggtgcctaatgagtgagctaactcaca

SEQ ID NO: 44037 - DNA, 197 bp, Homo sapiens; identical to SEQ ID NO: 35195

SEQ ID NO: 44038 - DNA, 514 bp, Homo sapiens
  misc_feature 460: n = A,T,C or G
ccgggccccccctcgaaagtcttctagaattaattaacgcggggggtaagcggaggaaagacgagatcagtgtggacagtctggacttcaacaagaagatcctgcacacagcctggcaccccgtggacaatgtcattgccgtggctgccaccaataacttgtacatattccaggacaaaatcaactagagacgcgaacgtgacgaccaagtcttgtcttgcatagttaagccggacatttttctgtcagagaaaaggcatcattgtccgctccattaagaacagtgacgcacctgctacttcccttcacagacacaggagaaagccgcctccgctggaggcccggtgtggttccgcctcggcgaggcgcgagacaggcgctgctgctcacgtggagacgctctcgaagcagagttgacggacactgctcccaaaaggtcattactcagaataaatgtatntatttcagtccgagccttcctttccatttatagaccaaaaaaaaaaaaaaagcg

SEQ ID NO: 44039 - DNA, 388 bp, Homo sapiens; identical to SEQ ID NO: 33577
  misc_feature 137: n = A,T,C or G

SEQ ID NO: 44040 - DNA, 486 bp, Homo sapiens
ctactatagggcgaattgggccctctagatgcatgctcgagcggccgccagtgtgatggatatctgcagaattcggcttagcgtggtcgcggccgaggtttccgcgccggtgagtagcactctctgagagctccaatttcatccgtctgccatcggcgccatcctgcaatctaagccacaatggtgcgcatgaatgtcctggcagatgctctcaagagtatcaacaatgccgaaaagagaggcaaacgccaggtgcttattaggccgtgctccaaagtcatcgtccggtttctcactgtgatgatgaagcatggttacattggcgaatttgaaatcattgatgaccacagagctgggaaaattgttgtgaacctcacaggcaggctaaacaagtgtgggggtgatcagccccagatttgacgtgcaactcaaagacctggaaaaatggcagaataatctgcttccatcccgccagtttggtttcat

SEQ ID NO: 44041 - DNA, 466 bp, Homo sapiens
actactatagggcgaattggagctccaccgcggtggcggccgtgcgtttgtggccgtccggcctccctgacatgcagatttccacccagaagacagagaaggagccagtggtcatggaatgggctggggtcaaagactgggtgcctgggagctgaggcagccaccgtttcagcctggccagccctctggaccccgaggttggaccctactgtgacacacctaccatgcggacactcttcaacctcctctggcttgccctggcctgcagccctgttcacactaccctgtcaaagtcagatgccaaaaaagccgcctcaaagacgctgctggagaagagtgagttttcagataagccggtgcaagaccggggtttggtggtgacggacctcaaagctgagagtgtggttcttgagcatcgcagctactgttcggcaaaggcccgggacagacactttgctggggatgt

SEQ ID NO: 44042 - DNA, 550 bp, Homo sapiens
  misc_feature 523: n = A,T,C or G
ggcgaatcgggccctctagatgcatgctcgagcggccgccagtgtgatggatatctgcagaattcggcttagcgtggtcgcggccgaggtacctattctttgcagtctcaggaattgttgacatgctcacctatctggtcagccacgttcccttgggggtggacagactggttatggctgtggcagtattcatggaaggtttcctcttctactaccacgtccacaaccggcctccgctggaccagcacatccactcactcctgctgtatgctctgttcggagggtgtgttagtatctccctagaggtgatcttccgggaccacattgtgctggaacttttccgaaccagtctcatcattcttcagggaacctggttctggcagattggatttgtgctgttcccaccttttggaacacccgaatgggaccaaaaggatgatgccaacctcatgttcatcaccatgtgcttctgctggcactacctggctgccctcagcattgtggccgtcaactattctcttgnttactgccttttgactcggatgaagag

SEQ ID NO: 44043 - DNA, 216 bp, Homo sapiens; identical to SEQ ID NO: 35200

SEQ ID NO: 44044 - DNA, 427 bp, Homo sapiens
ctcactatagggcgaattggagctccaccgcggtggcggccgctttttttttttttttttttttttttttttaacaattttattattattatactttaagttttagggtacatgtgtacaacgtgcaggtttgttacatatgtatacatgtgccatgttggtgtgctgctcccattaactcgtcatttagcattaggcatatctcctaatgctatcccttccctttcccccccccgcgttaattaattctaaaagtactctctagggggggcccggtacccaacttttgttccctttagtgagggttaattgcgcgcttggcgtaatcatggtcataactgtttcctgtgtgaaattgttattcgctcacaatttcacacaacatactagccggaagcataaagtgtaaagcctggggttgcctaat

SEQ ID NO: 44045 - DNA, 438 bp, Homo sapiens; identical to SEQ ID NO: 35202

SEQ ID NO: 44046 - DNA, 360 bp, Homo sapiens; identical to SEQ ID NO: 35203

SEQ ID NO: 44047 - DNA, 442 bp, Homo sapiens; identical to SEQ ID NO: 35204

SEQ ID NO: 44048 - DNA, 74 bp, Homo sapiens; identical to SEQ ID NO: 35205

SEQ ID NO: 44049 - DNA, 446 bp, Homo sapiens; identical to SEQ ID NO: 35207

SEQ ID NO: 44050 - DNA, 583 bp, Homo sapiens; identical to SEQ ID NO: 40956

SEQ ID NO: 44051 - DNA, 562 bp, Homo sapiens
tatacgactcactatagggcgaattggagctccaccgcggtggcggccgcccgggcaggtactttttttttttttttttttttttgtaatgaacaaatatttatttatcttttataacaagtaaggcaatgttgcttaaaggaagacaaacaaacataaaagattccgttgacaatgcattttttcatctgttcggcacaatgcttttgtcataatggagatgtgacagcaaactttccaggacattcagtcttcggcggcagcacttagggcagatgactggccgcttatagatgaggccaaagcaccaggtaggtggaaggttcttgtatcggttcgaaccccgacagcgcgccaacagacaacacgaggcagtggggagcaacatgctgttttaatgagcgcctgggtgcaagcgtgctgaggctgaaaatggcatcagccccgcgtacctcggccgctctagaactagtggatcccccgggctgcaagaattcgatatcaagcttatcgataccgtcgacctcgagggggggcccgggacccagcttttgttcccttt

SEQ ID NO: 44052 - DNA, 517 bp, Homo sapiens; identical to SEQ ID NO: 35210
  misc_feature 338, 339, 384, 387, 411: n = A,T,C or G

SEQ ID NO: 44053 - DNA, 185 bp, Homo sapiens; identical to SEQ ID NO: 35212

SEQ ID NO: 44054 - DNA, 472 bp, Homo sapiens; identical to SEQ ID NO: 35213

SEQ ID NO: 44055 - DNA, 190 bp, Homo sapiens; identical to SEQ ID NO: 33650

SEQ ID NO: 44056 - DNA, 479 bp, Homo sapiens; identical to SEQ ID NO: 35215

SEQ ID NO: 44057 - DNA, 480 bp, Homo sapiens; identical to SEQ ID NO: 35216
  misc_feature 393: n = A,T,C or G

SEQ ID NO: 44058 - DNA, 396 bp, Homo sapiens
ctactatagggcgaattggagctccaccgcggtggcggccgaggtacttttttttttttttttttttttttttctgatgttgagagtcagttttattgccatctctgggaggggctcaaatccgcccaatctccttcagcttggccaccaggtcctcagtggtctccaccttgacgccggccgctctagaactagtggatcccccgggctgcaggaattcgatatcaagcttatcgataccgtcgacctcgagggggggcccggtacccagcttttgttccctttagtgagggttaattgcgcgcttggcgtaatcatggtcatagctgtttcctgtgtgaaattgttatccgctcacaattccacacaacatacgagccgggagcataaagtgta

SEQ ID NO: 44059 - DNA, 181 bp, Homo sapiens; identical to SEQ ID NO: 35218

SEQ ID NO: 44060 - DNA, 608 bp, Homo sapiens; identical to SEQ ID NO: 43940

SEQ ID NO: 44061 - DNA, 400 bp, Homo sapiens; identical to SEQ ID NO: 35220

SEQ ID NO: 44062 - DNA, 403 bp, Homo sapiens; identical to SEQ ID NO: 35221

SEQ ID NO: 44063 - DNA, 392 bp, Homo sapiens; identical to SEQ ID NO: 35222

SEQ ID NO: 44064 - DNA, 455 bp, Homo sapiens
actactatagggcgaattggagctccaccgcggtggcggccgcccgggcaggtaccactttattcagtgttgtaggaaatttcaggttacttcttaaaagcaaaacctaggcagcctggccaacatggtgaaaccccatcttcacaaaaaattatgacaatttgccaggtgtggtggtgcatgcctgtaatcccagctacttgggaggctgaggcaggaggatcccttgaactcggtggcagaggtacctcggccgctctagaactagtggatcccccgggctgcaggaattcgatatcaagcttatcgataccgtcgacctcgagggggggcccggtacccagcttttgttccctttagtgagggttaattgcgcgcttggcgtaatcatggtcatagctgtttcctgtgtgaaattgttatccgctcacaattccacacaacatacgagccgg

SEQ ID NO: 44065 - DNA, 279 bp, Homo sapiens; identical to SEQ ID NO: 35224
  misc_feature 16, 31, 60, 70, 82, 84, 89, 100, 162, 163, 172, 174, 175,206, 225: n = A,T,C or G

SEQ ID NO: 44066 - DNA, 397 bp, Homo sapiens; identical to SEQ ID NO: 35225

SEQ ID NO: 44067 - DNA, 424 bp, Homo sapiens; identical to SEQ ID NO: 31315

SEQ ID NO: 44068 - DNA, 391 bp, Homo sapiens; identical to SEQ ID NO: 35227

SEQ ID NO: 44069 - DNA, 206 bp, Homo sapiens; identical to SEQ ID NO: 35228

SEQ ID NO: 44070 - DNA, 660 bp, Homo sapiens
  misc_feature 186, 192, 220, 225, 226, 262, 263, 295, 311, 335, 346: n = A,T,C or G
gactcactatagggcgaattggagctccaccgcggtggcggccgcccgggcaggtacgcggggaatcccgcaaacacaagaagtcaaagaaatcccacaaaaaaaagcagaaaaaaaggtcacacaaaaaacagaagaaaagcaaaaaagaagccacagatataacagcagattcctcgagtgagnttctcnagaagaaaactgggggcttctggtacancgacnnatctgacttgggaatgggcgcaagcagtcgagagcnnttcgtagaactctcccagttggctccttggtncgtctctggcttgtcnagcatagacagaacagcccccagnttcttctcatncgttcacgtcaaaagcaagcatgtaggtcttggtgtccctgaggatcagcaagtgagcgaaatgctcttggcctcccacgtatctggagatggtcccattttcccgctggacattcaagtaggtggtgttatagatgcactggtcctgtcgggtctggtacctcggccgctctagaactagtggatcccccgggctgcaggaattcgatatcaagcttatcgataccgtcgacctcgagggggggcccggtacccagctgttgttccctttagtgagggttaattgcgcgcttggggtaatcatggtcatagct

SEQ ID NO: 44071 - DNA, 676 bp, Homo sapiens
gactcactatagggcgaattggagctccaccgcggtggcggccgaggtacatgtgggagaaaaacttaagtgtgatgagtgtggtaaggaattcagtcagggcgctcatctacagacccatcagaaagtccacgtgatagagaaaccatacaaatgtaagcaatgtgggaaaggtttcagtcgtagattagcacttaatgttcattgcaaggtccacacggcagagaaaccttataattgtgaggagtgtgggagggccttcagtcaggcctctcatcttcaggaccatcagagactccacactggggagaagccattcaaatgtgatgcatgtggtaagagcttcagtcggaattcacatcttcaatcccatcaaagagttcatacaggagagaaaccatacaaatgtgaggagtgtggtaagggcttcatttgtagctcaaatctttacattcatcagagagtccacacaggagaaaaaccctataaatgtgaggaatgtggtaaaggctttagtcggccttcaagtcttcgggcccatcagggagttcacactggagagaagtcatacatatgtacctgcccgggcggccgctctagaactagtggatcccccgggctgcaggaattcgatatcaagcttatcgataccgtcgacctcgagggggggcccggt

SEQ ID NO: 44072 - DNA, 397 bp, Homo sapiens; identical to SEQ ID NO: 35231

SEQ ID NO: 44073 - DNA, 361 bp, Homo sapiens; identical to SEQ ID NO: 35232

SEQ ID NO: 44074 - DNA, 358 bp, Homo sapiens; identical to SEQ ID NO: 35233
  misc_feature 119: n = A,T,C or G

SEQ ID NO: 44075 - DNA, 372 bp, Homo sapiens; identical to SEQ ID NO: 35234

SEQ ID NO: 44076 - DNA, 390 bp, Homo sapiens; identical to SEQ ID NO: 35235

SEQ ID NO: 44077 - DNA, 397 bp, Homo sapiens; identical to SEQ ID NO: 35236

SEQ ID NO: 44078 - DNA, 113 bp, Homo sapiens; identical to SEQ ID NO: 35238
  misc_feature 86, 92: n = A,T,C or G

SEQ ID NO: 44079 - DNA, 394 bp, Homo sapiens; identical to SEQ ID NO: 35239

SEQ ID NO: 44080 - DNA, 557 bp, Homo sapiens; identical to SEQ ID NO: 32449

SEQ ID NO: 44081 - DNA, 514 bp, Homo sapiens; identical to SEQ ID NO: 35241

SEQ ID NO: 44082 - DNA, 427 bp, Homo sapiens; identical to SEQ ID NO: 38644

SEQ ID NO: 44083 - DNA, 593 bp, Homo sapiens; identical to SEQ ID NO: 35243

SEQ ID NO: 44084 - DNA, 392 bp, Homo sapiens; identical to SEQ ID NO: 40676

SEQ ID NO: 44085 - DNA, 509 bp, Homo sapiens; identical to SEQ ID NO: 35245

SEQ ID NO: 44086 - DNA, 576 bp, Homo sapiens; identical to SEQ ID NO: 35246

SEQ ID NO: 44087 - DNA, 453 bp, Homo sapiens; identical to SEQ ID NO: 33476

SEQ ID NO: 44088 - DNA, 398 bp, Homo sapiens; identical to SEQ ID NO: 35248

SEQ ID NO: 44089 - DNA, 438 bp, Homo sapiens; identical to SEQ ID NO: 38789

SEQ ID NO: 44090 - DNA, 444 bp, Homo sapiens; identical to SEQ ID NO: 35250

SEQ ID NO: 44091 - DNA, 500 bp, Homo sapiens
gatccactagtaacggccgccagtgtgctggaattcggcttcgagcggccgcccgggcaggttttttttttttttttttttttttttttttcctccaaacagatttattgaatacagcaaaattctatatacaaagtgacctggacctgctgcttcaaaacatgatcctttcttactaatatcttgatagtcggtccatagagcattagaaagcaattgactcttaaataaacagaaaagtgcctaatgcacattaaatgaatggcctaactactggaactttagtagttctataagggaattaacataggtaggatccagttcctatgacaggctgctgaagaacagatatgagcatcaagaggccattttgtgcactgccaccgtgatgccatcgggtttctggatcataatgttcccattatctgattctagacacaccacaggaatatcagtggggtcagaggttagcttagctgcttgctgggctagaacagatt

SEQ ID NO: 44092 - DNA, 445 bp, Homo sapiens
cgactactatagggcgaattggagctccaccgcggtggcggccgcccgggcaggtacgcggggagaccaggaagcggatagcgtggagtgacggtgccaccgcggcgcagaggagtctgcaatgccgagtggaggaaggaggaaccggagtgtgagcagtagctgggtgggcagcatggctgggatcaccaccatcgaggcagtgaagcgcaagatccaggttctgcagcaccaggcagatgatgcagaggagtgagctgagcacctccagtgagaagctgagggaaaaaggtgggcctgggaacaggcggaggctgaagtggcctccgtgaacggtaggatccagctggttgaagaggagctggactgtgctcaggagcgcctggccactgccctgcaaaagctggaagaagcgggaaaagctgctgatgagagtgagagagat

SEQ ID NO: 44093 - DNA, 408 bp, Homo sapiens; identical to SEQ ID NO: 35253

SEQ ID NO: 44094 - DNA, 551 bp, Homo sapiens
  misc_feature 18: n = A,T,C or G
gcgaattgggccctctanatgcatgctcgagcggccgccagtgtgatggatatctgcagaattcggcttagcgtggtcgcggccgaggtacttcctgcttgcctcatgaaaagtggtcctctggaaggcccaggtgaagctcgtggtagtgttctcctcaatgatgtaggtataggactgtttgcctttggaacctttccacgtctccacaggagtgttggtcctagaattcacacccaccatgaagtagagctcacagttcacagaacagagggtctcaaagacaaatgtgattctggccacctctttattctctgtgtctgccatcaccgactgcggaggtctaaatcctggcacaaccagagtgagaatcatgaagtcattgtctgaggctccagcagctgtgtaaatgtgatcaccagccacctcccagcctgtcatgcccttgtacctgcccgggcggccgctcgaaagccgaattccagcacactggcggccgttactagtggatccgagctcggtaccaagcttggcgtaatcatggtcatagc

SEQ ID NO: 44095 - DNA, 437 bp, Homo sapiens; identical to SEQ ID NO: 35255

SEQ ID NO: 44096 - DNA, 434 bp, Homo sapiens; identical to SEQ ID NO: 35256

SEQ ID NO: 44097 - DNA, 450 bp, Homo sapiens; identical to SEQ ID NO: 35322

SEQ ID NO: 44098 - DNA, 432 bp, Homo sapiens; identical to SEQ ID NO: 35258

SEQ ID NO: 44099 - DNA, 467 bp, Homo sapiens; identical to SEQ ID NO: 35259

SEQ ID NO: 44100 - DNA, 466 bp, Homo sapiens; identical to SEQ ID NO: 35260

SEQ ID NO: 44101 - DNA, 467 bp, Homo sapiens; identical to SEQ ID NO: 35261

SEQ ID NO: 44102 - DNA, 350 bp, Homo sapiens; identical to SEQ ID NO: 36045
  misc_feature 332: n = A,T,C or G

SEQ ID NO: 44103 - DNA, 469 bp, Homo sapiens; identical to SEQ ID NO: 35263

SEQ ID NO: 44104 - DNA, 591 bp, Homo sapiens; identical to SEQ ID NO: 35264

SEQ ID NO: 44105 - DNA, 536 bp, Homo sapiens; identical to SEQ ID NO: 35265

SEQ ID NO: 44106 - DNA, 390 bp, Homo sapiens; identical to SEQ ID NO: 44008

SEQ ID NO: 44107 - DNA, 609 bp, Homo sapiens; identical to SEQ ID NO: 35267
  misc_feature 172, 202, 203, 204: n = A,T,C or G

SEQ ID NO: 44108 - DNA, 591 bp, Homo sapiens; identical to SEQ ID NO: 35268

SEQ ID NO: 44109 - DNA, 462 bp, Homo sapiens; identical to SEQ ID NO: 35270

SEQ ID NO: 44110 - DNA, 473 bp, Homo sapiens; identical to SEQ ID NO: 31841

SEQ ID NO: 44111 - DNA, 395 bp, Homo sapiens; identical to SEQ ID NO: 35272

SEQ ID NO: 44112 - DNA, 392 bp, Homo sapiens; identical to SEQ ID NO: 35274

SEQ ID NO: 44113 - DNA, 447 bp, Homo sapiens; identical to SEQ ID NO: 35275

SEQ ID NO: 44114 - DNA, 205 bp, Homo sapiens; identical to SEQ ID NO: 35276

SEQ ID NO: 44115 - DNA, 449 bp, Homo sapiens
cgactcactatagggcgaattggagctccaccgcggtggcggccgaggtccggatcggtgactgtggagggcgagctgagccctggccgccgccacaatgggccgcgagtttgggaatctgacgcggatgcggcatgtgatcagctacagcttgtcaccgttcgagcagcgcgcctatccgcacgtcttcactaaaggaatccccaatgttctgcgccgcattcgggagtctttctttcgcgtggtgccgcagtttgtagtgttttatcttatctacacatgggggactgaagagttcgagagatccaagaggaagaatccagctgcctatgaaaatgacaaatgagcaacgcatccggatgacggttccctgtctctgaaagacctttctctggaagaggagtctgcattgtagtgtctcaaagacacaataaacttcctatggtctg

SEQ ID NO: 44116 - DNA, 405 bp, Homo sapiens
atacgactcactatagggcgaattggagctccaccgcggtggcggccgaggtacgcagggggttccggcctggcgaaagtttgtgcggcgacatgaaactgcttacccacaatctgctgagctcgcatgtgcggggggtggggtcccgtggcttccccctgcgcctccaggccaccgaggtccgtatctgccctgtggaattcaaccccaacttcgtggcgcgtatgatacctaaagtggagtggtcggcgttcctggaggcggccgctctagaactagtggatcccccgggctgcaggaattcgatatcaagcttatcgataccgtcgacctcgagggggggcccggtacccagcttttgttccctttagtgagggttaattgcgcgcttggcgtaatcatggt

SEQ ID NO: 44117 - DNA, 483 bp, Homo sapiens; identical to SEQ ID NO: 35279

SEQ ID NO: 44118 - DNA, 191 bp, Homo sapiens; identical to SEQ ID NO: 35280

SEQ ID NO: 44119 - DNA, 465 bp, Homo sapiens; identical to SEQ ID NO: 35281

SEQ ID NO: 44120 - DNA, 490 bp, Homo sapiens; identical to SEQ ID NO: 35282

SEQ ID NO: 44121 - DNA, 204 bp, Homo sapiens; identical to SEQ ID NO: 35283

SEQ ID NO: 44122 - DNA, 469 bp, Homo sapiens; identical to SEQ ID NO: 35284

SEQ ID NO: 44123 - DNA, 491 bp, Homo sapiens; identical to SEQ ID NO: 35285

SEQ ID NO: 44124 - DNA, 445 bp, Homo sapiens; identical to SEQ ID NO: 35286

SEQ ID NO: 44125 - DNA, 441 bp, Homo sapiens
gcgaattggagctccaccgcggtggcggccgaggtacttctgatagctcatcactttctgtgtcagaactttgaaaagcaaagacaggacatcgacttccttcgagactgcctactgattcttctagaagacagagatctactggggtagtccgggactgactgcaaagagcctcaggtaaagcagaggccattggcggcctaaggttggcagtcaaagaggctgcggaaggttgaaaatgaaaaggagagtaagcagagggatgataagacccaaaacctctgatgggatcagggtctgtaggaagagagaaatgaagctggggagaatccagctcagggaaggtgccagcagaaggcctggtagtaaagcctccaggatgttgcagtggagcagactgtgcagagcttaatgagctccctgaaaaaacaatgccacaat

SEQ ID NO: 44126 - DNA, 192 bp, Homo sapiens; identical to SEQ ID NO: 35288

SEQ ID NO: 44127 - DNA, 480 bp, Homo sapiens
actactatagggcgaattggagctccaccgcggtggcggccgaggtacctggctttttagactctacataggaattccaccataattaagatgtataaacttgacctacagcctaaagcccaatatgcttccctcaagaacatcaacagtgttcaagcttagctttgttacagaaaatgaggtagggtgcggtggctcacatctgtaatctcagcagtttgggaggccaaggcaggcgcatcagctgaggtcaagagtttgagaccagcctggtcaaaatgatgaaaccccatctatactaaaaatacaaaaattagctgggcatggtggcacacgcccgttatcccagctactcaggaggctgaggcactagaatcacctgaacccaggaggcggaggctgcagtgagctgagatcacgccactgcattccagggggaaaaaaaagaacaaaaattaaaaaaagtacctgcccgggcgg

SEQ ID NO: 44128 - DNA, 411 bp, Homo sapiens
ctatagggagtcgaccacgcgtccggaggaagataaagatgatgaagaaaaacccaagatcgaagatgtgggttcagatgaggaggatgacagcggtaaggataagaagaagaaaactaagaagatcaaagagaaatacattgatcaggaagaactaaacaagaccaagcctatttggaccagaaaccctgatgacatcacccaagaggagtatggagaattctacaagagcctcactaatgactgggaagaccacttggcagtcaagcacttttctgtagaaggtcagttggaattcagggcattgctatttattcctcgtcgggctccctttgacctttttgagaacaagaagaaaaagaacaacatcaaactctatgtccgccgtgtgttcatcatggacagctgtga

SEQ ID NO: 44129 - DNA, 443 bp, Homo sapiens; identical to SEQ ID NO: 35291

SEQ ID NO: 44130 - DNA, 410 bp, Homo sapiens; identical to SEQ ID NO: 35292
  misc_feature 274, 279, 280, 306, 307, 338, 345, 346, 368, 379, 380, 381,393, 394: n = A,T,C or G

SEQ ID NO: 44131 - DNA, 468 bp, Homo sapiens; identical to SEQ ID NO: 35502

SEQ ID NO: 44132 - DNA, 444 bp, Homo sapiens; identical to SEQ ID NO: 35294

SEQ ID NO: 44133 - DNA, 191 bp, Homo sapiens; identical to SEQ ID NO: 35295

SEQ ID NO: 44134 - DNA, 204 bp, Homo sapiens; identical to SEQ ID NO: 35296

SEQ ID NO: 44135 - DNA, 438 bp, Homo sapiens; identical to SEQ ID NO: 35297

SEQ ID NO: 44136 - DNA, 448 bp, Homo sapiens; identical to SEQ ID NO: 35298

SEQ ID NO: 44137 - DNA, 313 bp, Homo sapiens; identical to SEQ ID NO: 35299
  misc_feature 303: n = A,T,C or G

SEQ ID NO: 44138 - DNA, 279 bp, Homo sapiens; identical to SEQ ID NO: 35300
  misc_feature 262: n = A,T,C or G

SEQ ID NO: 44139 - DNA, 446 bp, Homo sapiens; identical to SEQ ID NO: 35301
  misc_feature 204: n = A,T,C or G

SEQ ID NO: 44140 - DNA, 567 bp, Homo sapiens; identical to SEQ ID NO: 35302

SEQ ID NO: 44141 - DNA, 654 bp, Homo sapiens
  misc_feature 604: n = A,T,C or G
cactatagggcgaattggagctccaccgcggtggcggccgcccgggcaggtacagaaagcaaatggccatgatggagcccatgataggctttgcccatggacagattaacttttttaagaagggagcagagatgttttccaaacgtatggacagctttttatcctccgttgcagacatggttcaaagcattcaggtagaactggaagccgaggcggaaaagatgcgggtgtcccagcgagaattactttctgttgatgaatctgtttacactccagactctgatgtggccgcaccacagatcaacaggaacctcatccagaaggctggttaccttaatcttagaaacaaaacagggctggtcaccaccacctgggagaggctttatttcttcacccaaggcgggaatctcatgtgtcagcccaggggagccgtggctggaggtttgatccaggacctggacaactgctcagtgatggccgtggattgcgaagaccggcgctactgcttccagatcaccacgcccaatggaaaatcgggaataatcctccaggctgagagcagaaaggaaaatgaagagtggatatgtgcaataaacaacatctncagacagatctacctgaccgacaaaccctgagcagtcgcgatcaagttga

SEQ ID NO: 44142 - DNA, 593 bp, Homo sapiens; identical to SEQ ID NO: 35304

SEQ ID NO: 44143 - DNA, 528 bp, Homo sapiens; identical to SEQ ID NO: 35305

SEQ ID NO: 44144 - DNA, 446 bp, Homo sapiens; identical to SEQ ID NO: 35306

SEQ ID NO: 44145 - DNA, 527 bp, Homo sapiens
atagggcgaattgggccctctaaagcatgctcgagcggccgccagtgtgatggatatctgcagaattcggcttagcgtggtcgcggccgaggtacctgcactcgcacagcaggcagtaggcctccacgtcatggccaggcactggcatgggctccaccacgtgcaggcagttgcagtccttctgggatacattctggttgtaaatgtgcccactgatgtttctataaggtggacagatgcatttgcaccggatatcttcagaactcttgttggcttcagctgggggcaccagcaaacacccgaccacagccaccaaagataagagcttcatgcttatcaggcttgctgggccagcaaagccggacacctacaagcccgtacctgcccgggcggccgctcgaagccgaattccagcacactggcggccgttactagtggatccgagctcggtaccaagcttggcgtaatcatggtcatagctgaagcctgtgtgaaatagaaatgcactcacaaaagcacacaacata

SEQ ID NO: 44146 - DNA, 433 bp, Homo sapiens; identical to SEQ ID NO: 35308

SEQ ID NO: 44147 - DNA, 658 bp, Homo sapiens; identical to SEQ ID NO: 42573
  misc_feature 575: n = A,T,C or G

SEQ ID NO: 44148 - DNA, 398 bp, Homo sapiens
gactactatagggcgaattggagctccaccgcggtggcggccgcccgggcaggtactttttttttttttttttttttttttgctgggcgtggtggcgggtgcctgtaatcccagctactcaggaggctgaggcaggagaatggcgtgaacccaggaagcagagcttgcagtgagctgagatcatgccactgcactccagcctgggcaatacagcgagactgcccatccacagatgaagggataaagtaactgtggtggacatacacaaagagaatagtcttcagccagaaaatcagaatgaaatttcatcctttggagccatactgttgaacctggaggacagcatggtaaatgacctgttcaaacacagctgcagggatgaggaaactgctgtacct

SEQ ID NO: 44149 - DNA, 624 bp, Homo sapiens
ctatagggcgaattggagctccaccgcggtggcggccgcccgggcaggtacccgcattcaaggggcaatttcatccatgtctatgccaaggactacttcccttttccctcccaaataatccctcccaacacaaagaaacaaacaaaaaagagctaggcaatggaatgaaatgacacccagtagtgctgtaggaattatgagaatgaatccagtcagtctaatcctcgaacacttccaagaacaaaggggggaagagttctgtggggcattccaccttcatgtgcaggaagcggctggcatggcaggctcctatcatccgcagatctgtcaccttcatcagggagtttggccaaaagtgtgtcacgtggtgttttcggtaattgatatagtgttcaaaggccagcaggaaactatcttggtacctcggccgctctagaactagtggatcccccgggctgcaggaattcgatatcaagcttatcgataccgtcgacctcgagggggggcccggtacccagcttttgttccctttagtgagggttaattgcgcgcttggcgtaatcatggtcatagctgtttcctgtgtgaaattgttatccgctcacaattccacacaacatacga

SEQ ID NO: 44150 - DNA, 685 bp, Homo sapiens; identical to SEQ ID NO: 35314

SEQ ID NO: 44151 - DNA, 448 bp, Homo sapiens; identical to SEQ ID NO: 35316

SEQ ID NO: 44152 - DNA, 444 bp, Homo sapiens; identical to SEQ ID NO: 35317

SEQ ID NO: 44153 - DNA, 387 bp, Homo sapiens
atacgactcactatagggcgaattggagctccaccgcggtggcggccgcccgggcaggtacgcggggaagacggcctggggatacaactctggagtcctctgagagagccaccaaggaggagcaggggagcgacggccgctctagaactagtggatcccccgggctgcaggaattcgatatcaagcttatcgataccgtcgacctcgagggggggcccggtacccagcttttgttccctttagtgagggttaattgcgcgcttggcgtaatcatggtcatagctgtttcctgtgtgaaattgttatccgctcacaattccacacaacatacgagccgggagcataaagtgtaaagcctggggtgcctaatgagtgagctaactcaca

SEQ ID NO: 44154 - DNA, 441 bp, Homo sapiens; identical to SEQ ID NO: 35319

SEQ ID NO: 44155 - DNA, 420 bp, Homo sapiens; identical to SEQ ID NO: 35320

SEQ ID NO: 44156 - DNA, 638 bp, Homo sapiens
gtatcgactactatagggcgaattggagctccaccgcggtggcggccgtcatggtgtgcgcctgtaatcccaactaccaaagaagaatcactggaacccgggaagcagaggtttcagtgagccgagagagcgccaccgcaccacagcctgggtgacagagcgagagagactcagtccaaaaaaaaaaaaaaaaaaaaagtacctcggccgctctagaactagtggatcccccgggctgcaggaattcgatatcaagcttatcgataccgtcgacctcgagggggggcccggtacccagcttttgttccctttagtgagggttaattgcgcgcttggcgtaatcatggtcatagctgtttcctgtgtgaaattgttatccgctcacaattccacacaacatacgagccgggagcataaagtgtaaagcctggggtgcctaatgagtgagctaactcacattaattgcgttgcgctcactgcccgctttccagtcgggaaacctgtcgtgccagctgcattaatgaatcggccaacgcgccgggagagggcggttgcgtattgggcgcttttccgcttcctcgctcactgactcgctgcgctcgggccgttcggctgcggcgagcggtatcagctcactc

SEQ ID NO: 44157 - DNA, 450 bp, Homo sapiens; identical to SEQ ID NO: 35322

SEQ ID NO: 44158 - DNA, 465 bp, Homo sapiens; identical to SEQ ID NO: 35324

SEQ ID NO: 44159 - DNA, 549 bp, Homo sapiens
gactcactatagggcgaattgggccctctagatgcatgctcgagcggccgccagtgtgatggatatctgcagaattcgcccttagcgtggtcgcggccgaggtacatggtggatgattttaaatcaccctagtgtgctgagaccttgagaataaagtgtgtgattggtttcatacttgaagacggatataaaggaagaatatttcctttatgtgtttctccagaatggtgcctgtttctctctgtgtctcaatgcctgggactggaggttgatagtttaagtgtgttcttaccgcctcctttttcctttaatcttatttttgatgaacacatatataggagaacatctatcctatgaataagaacctggtcatgctttactcctgtattgttattttgttcatttccaattgattctctacttttcccttttttgtattatgtgactaattagttggcatattgttaaaagtctctcaaattaggccagattctaaaacatgctgcagcaagaagaccccgctctcttcaggaaaagtgttttcatttc

SEQ ID NO: 44160 - DNA, 504 bp, Homo sapiens
ggccctctagatgctgctcgagcggccgccagtgtgatggatatctgcagaattcggctttcgagcggccgcccgggcaggtacaagttatcaaacttctgtttggtaacagaatcattgacgttcatggccggaacacagagcttcccagctttggagagctgatacagcctgtgaacaccagtcacgctctcttccacaatgcctcggatcttcttaaacacgtttggatacttcttataaacccagtgggttaagtctcccccatcatccaggatcatgttggcctgccacccatccatgttcacacagcggtcaatacaccaccagaagtcatcttctgactcgcccttccaagcgaacactgcaactccagcctcagccagtgctgcagctacttcattctgagttgagtagatgttacaagcagaccagcggcactgagcccccagggcacagagtgtctcaatcaacaccgctgtctgggctgtgatgtgtgtacct

SEQ ID NO: 44161 - DNA, 479 bp, Homo sapiens; identical to SEQ ID NO: 35328

SEQ ID NO: 44162 - DNA, 478 bp, Homo sapiens; identical to SEQ ID NO: 35329
  misc_feature 302: n = A,T,C or G

SEQ ID NO: 44163 - DNA, 440 bp, Homo sapiens; identical to SEQ ID NO: 35330

SEQ ID NO: 44164 - DNA, 591 bp, Homo sapiens; identical to SEQ ID NO: 35331

SEQ ID NO: 44165 - DNA, 570 bp, Homo sapiens; identical to SEQ ID NO: 35332

SEQ ID NO: 44166 - DNA, 686 bp, Homo sapiens; identical to SEQ ID NO: 35333

SEQ ID NO: 44167 - DNA, 549 bp, Homo sapiens; identical to SEQ ID NO: 35334

SEQ ID NO: 44168 - DNA, 577 bp, Homo sapiens; identical to SEQ ID NO: 35335

SEQ ID NO: 44169 - DNA, 629 bp, Homo sapiens; identical to SEQ ID NO: 35336

SEQ ID NO: 44170 - DNA, 620 bp, Homo sapiens; identical to SEQ ID NO: 35337

SEQ ID NO: 44171 - DNA, 473 bp, Homo sapiens
tatagggcgaattggagctccaccgcggtggcggccggtttcccctcacggtggacttaccaagaatttttcagccgctaccgtgtcctaatgaagcagaaagatgtgctgagtgacagaaagcaaacatgcaagaatgtgttagagaaactgatactggacaaggacaaataccagtttggtaagacaaagatctttttccgggccgggtcaattggcctatctagaaaaattgagagctgacaaactgagagctgcctgcatccggatccagaagaccatccgagggtggctgctgagaaagaagtacctcggccgctctagaactagtggatcccccgggctgcaggaattcgatatcaagcttatcgataccgtcgacctcgagggggggcccggtacccagcttttgttccctttagtgagggttaattgcgcgcttggcgtaatcatggtcatagctgtttcctgtg

SEQ ID NO: 44172 - DNA, 468 bp, Homo sapiens; identical to SEQ ID NO: 31969

SEQ ID NO: 44173 - DNA, 196 bp, Homo sapiens; identical to SEQ ID NO: 35341

SEQ ID NO: 44174 - DNA, 437 bp, Homo sapiens; identical to SEQ ID NO: 35342

SEQ ID NO: 44175 - DNA, 443 bp, Homo sapiens; identical to SEQ ID NO: 35343

SEQ ID NO: 44176 - DNA, 478 bp, Homo sapiens; identical to SEQ ID NO: 35344
  misc_feature 342: n = A,T,C or G

SEQ ID NO: 44177 - DNA, 408 bp, Homo sapiens; identical to SEQ ID NO: 32044

SEQ ID NO: 44178 - DNA, 484 bp, Homo sapiens; identical to SEQ ID NO: 35346

SEQ ID NO: 44179 - DNA, 397 bp, Homo sapiens; identical to SEQ ID NO: 43986

SEQ ID NO: 44180 - DNA, 591 bp, Homo sapiens
gccctctaaagcatgctcgagcggccgccagtgtgatggatatctgcagaattcggcttagcgtggtcgcggccgaggtacctcattagtaattgttttgttgtttcatttttttctaatgtctcccctctaccagctcacctgagataacagaatgaaaatggaaggacagccagatttctcctttgctctctgctcattctctctgaagtctaggttacccattttggggacccattataggcaataaacacagttcccaaagcatttggacagtttcttgttgtgttttagaatggttttcctttttcttagccttttcctgcaaaaggctcactcagtcccttgcttgctcagtggactgggctccccagggcctaggctgccttcttttccatgtcccacccatgagccctccactggacagctcagtaagcctggcccttcattctgcgctgtgttcttcctctgtgaaaatccaatacctcttacctcctctgcatgcaaagattctcaaggattgtcagacttcaaacgtaacagcagaaccaccagaaggtcctataaatgcagtagtgaccttctcaagct

SEQ ID NO: 44181 - DNA, 473 bp, Homo sapiens; identical to SEQ ID NO: 35349

SEQ ID NO: 44182 - DNA, 443 bp, Homo sapiens
atagggcgaattggagctccaccgcggtggcggccgaggtacttttttttttttttttttttcagaaaaataagacaatttattttgttgatgacatgattgtaaacctagttatgtctctgctccctcatttaaaaattaaaaatcaggccaggtgcggtggctcacgcctgtaatcccagcactttgggaggccaaggtgggcagatcacctgagatcaggagttcgagaccagcctgaccaacatagtgaaatcctgtctctactaaaaacacaaaattagccgggcgtggtggtgcatgcctgtaatcccagctactcgggggtctgaggcacgagaatcgcttgaacccatgggtggaggttgcagcgagccgaaatcacaccactgcactccagcctaggccagaagagtgaaactccatctcaaaaaatattaaaa

SEQ ID NO: 44183 - DNA, 481 bp, Homo sapiens; identical to SEQ ID NO: 35351

SEQ ID NO: 44184 - DNA, 575 bp, Homo sapiens
cgcgcgtaatacgactcactatagggcgaattggagctccaccgcggtggcggccgcccgggcaggtactgcagcatgcactggcatactatagcttggtccagctcttccagagccccaaccactttccaaattgaatcctaaagtttttggtgcaggacccaatttaaatccatgtttcttccccgcgtacaaattgctaatcaaaaggaaggtggagatggtagtttaataacaaatagtaaaacgggtgttgctgaatacagcacccggtagcctctatttgcaaacccggggagggaagggggtgccccaacaacagtggctccgcctcattgtccaggcacaggcaaaccgcagtagtgagctttggtacctcggccgctctagaactagtggatcccccgggctgcaggaattcgatatcaagcttatcgataccgtcgacctcgagggggggcccggtacccagcttttgttccctttagtgagggttaattgcgcgcttggcgtaatcatgggcatagctgtatcctgtgtgaaaatgttatccgctcacaattccacacaacata

SEQ ID NO: 44185 - DNA, 445 bp, Homo sapiens; identical to SEQ ID NO: 35353

SEQ ID NO: 44186 - DNA, 373 bp, Homo sapiens; identical to SEQ ID NO: 31967

SEQ ID NO: 44187 - DNA, 478 bp, Homo sapiens; identical to SEQ ID NO: 35355

SEQ ID NO: 44188 - DNA, 392 bp, Homo sapiens
gactcactatagggcgaattggagctccaccgcggtggcggccgcccgggcaggtacttttttttttttttttttttttgagacagcgtcttagtctgtcgccaaggctggagtgcagtggcgcaatcaaagcttgctgcagccttgaactcctgggctcaagcaatcctcttacctcagcaactaggactacaggcacatgccaccacgcttggccttctaatttatttctgtgtcaacaaaataaaactcaggcctaggaatagcttggttcagaaatcacagagggacttagtattccattaatcccgcgtacctcggccgctctagaactagtggatcccccgggctgcaggaattcgatatcaagcttatcgataccgtcgacctcg

SEQ ID NO: 44189 - DNA, 550 bp, Homo sapiens
cacgcgtccgcccacgcgtccgcgcagaacaaagttacgaaggctacgaaggctattacagccagagtcaaggggactcagaatattatgactatggacatggggaggttcaagattcttatgaagcttatggccaggacgactggaatgggaccaggccgtcgctgaaggcccctcctgctaggccagtgaagggagcatacagagagcacccatatggacgttattaaaaacaaacatgaggggaaaatatcagttatgagcaaagttgttactgatttcttgtatctcccaggattcctgttgctttacccacaacagacaagtaattgtctaagtgtttttcttcgtggtccccttcttctccccaccttattccattcttaactctgcattctggcttctgtatgtagtattttaaaatgagttaaaatagatttaggaatattgaattaatttttaaggtgtgtagatgcttttttctttggtgtttaaatataaaagaagtgtaccttttataataaaaaaaagagttgagtaaaaaaaaaaa

SEQ ID NO: 44190 - DNA, 583 bp, Homo sapiens; identical to SEQ ID NO: 40956

SEQ ID NO: 44191 - DNA, 471 bp, Homo sapiens; identical to SEQ ID NO: 35359

SEQ ID NO: 44192 - DNA, 473 bp, Homo sapiens; identical to SEQ ID NO: 35360

SEQ ID NO: 44193 - DNA, 384 bp, Homo sapiens; identical to SEQ ID NO: 35361

SEQ ID NO: 44194 - DNA, 193 bp, Homo sapiens; identical to SEQ ID NO: 35362

SEQ ID NO: 44195 - DNA, 448 bp, Homo sapiens; identical to SEQ ID NO: 35363

SEQ ID NO: 44196 - DNA, 219 bp, Homo sapiens
acgactcactatagggcgaattggagctccaccgcggtggcggccgaggtacttttttttttttttttttttttttttttttataagaaaagagatccaaggatttcttctcaaatttcacctcggagaggagccacccgaatccggccgctctaaaactagtggatcccccgggcttgcaggaattcgatatcaaggcttatcgaataccgttcgacc

SEQ ID NO: 44197 - DNA, 475 bp, Homo sapiens; identical to SEQ ID NO: 31856

SEQ ID NO: 44198 - DNA, 289 bp, Homo sapiens
  misc_feature 261: n = A,T,C or G
agggcgaattggagctccaccgcggtggcggccgaggtactgattttaaaaactaataacttaaaactgccacacgcaaaaaagaaaaccaaagtggtccacaaaacattctcctttccttctgaaggttttacgatgcattgttatcattaaccagtcttttactactaaacttaaatggccaattgaaacaaacagttctgaagaaccgttcttcccccacttgattaagagttggggtgggcaggtatttagggatanatattcatttatgccttctgatgctttc

SEQ ID NO: 44199 - DNA, 500 bp, Homo sapiens
gactcactatagggcgaattggagctccaccgcggtggcggccgaggtacgacaatagcaatcttttccttcgtagaggacaggggaggagtccctactcggctgcaaactctggatgagggctggggattgagagcttcccagagagcatcacaagaaggcgtcgcaccactctcgaaggcatccgaagcagtcccgggactgcttggcgttggcgccacaagtgtctttcagccattcccggaagaggtcttcatctttctttagcaccagaaactggccaaggacaacataggccttgtcaaaacccctttcctccagcttcttgcccaggacttcaccaatcccagccaggctccccactggcttctcccccatgggctctgccacgaagtctcggtgcttttgggaggttgtcatcttgatcaggcttaatccgcaacttcagttcccgtaacggttcctcccgccacccggccgcccgggcaggtacaaaggca

SEQ ID NO: 44200 - DNA, 468 bp, Homo sapiens
gtaatacgactcactatagggcgaattggagctccaccgcggtggcggccgaggtactttttttttttttttttttttttttttctgtgtttgtttgttggttggttggttggtttttgtttgtttgtttcgagacggggctccggctctgccgccgggggctgcagtgcaatggcgcgatctcacctcactgcgaccttctgggctcaagcgatcctcccactgtgcccggcctgaggacagcctttagagaaagaagcagggggagttcttccgaggacagacaagatttctggagtttggaaagggtgagagactgggtcagcgaaaggaacattccggtctttatgttgggatgcaacgtatagatacagggatgagacccaaaagagccggcagaggtttgtcatcgtgctcgcaaggcaactgccggtggctgatcccgtaaaggatacacatacctagagc

SEQ ID NO: 44201 - DNA, 469 bp, Homo sapiens; identical to SEQ ID NO: 35369

SEQ ID NO: 44202 - DNA, 185 bp, Homo sapiens; identical to SEQ ID NO: 35370

SEQ ID NO: 44203 - DNA, 397 bp, Homo sapiens; identical to SEQ ID NO: 35371

SEQ ID NO: 44204 - DNA, 651 bp, Homo sapiens; identical to SEQ ID NO: 35372
  misc_feature 139: n = A,T,C or G

SEQ ID NO: 44205 - DNA, 624 bp, Homo sapiens; identical to SEQ ID NO: 35373

SEQ ID NO: 44206 - DNA, 382 bp, Homo sapiens
actatagggcgaattggagctccacgcggtggcggccgaggtacttttttttttttttttttttttttgactgtgtttgtttgttggttggttggttggtttttgtttgtttgtttcgagacggggctccggctctgccgccgggggctgcagtgcaatggcgcgatctcacctcactgcggccttctgggctcaagcgatcctcccactgtgcccggcctgaagacagcctttagagaaagaagcagggggagttcttccgaggacagacaagatttctggagtttggaaagggtgagagactgggtcagcgaaaggaacattccggtctttatgttgggatgtaacgtatagatcccgcgtacctgcccgggcggccgct

SEQ ID NO: 44207 - DNA, 659 bp, Homo sapiens; identical to SEQ ID NO: 35375

SEQ ID NO: 44208 - DNA, 466 bp, Homo sapiens; identical to SEQ ID NO: 35376

SEQ ID NO: 44209 - DNA, 586 bp, Homo sapiens; identical to SEQ ID NO: 35377

SEQ ID NO: 44210 - DNA, 575 bp, Homo sapiens
cgaattggagctccaccgcgttggcggccgaggtacttctgcaggatgaaggacttcagctcatccttttgggggcctctgaggcgtctgggcaggtcctgcagagaggggaggcctggtctaggcccaagggcaccagcaggggaaacagatggggataggtaggggttggggcttaacaccaaggtggaatgtagctgaggctacatggtagagggtgctgggaaaagatacctggttggggccctcccaggctgcaggcccctcttcctttccctctaccagcatctgcacagcttcttccaagtccccccgagctttggccagcacccactgggcctgctccaccgaacaggtagggaacacctccaggagtacctcagtccacatctccttcacgttctccagcaccatgttgcagtgcctatcgaaggccttcacgcggcccaggagtttcttattgttgcggcagttgatgagcacttgggtattgttcttgactgactgtgtgagcacagagagtggaccggtgttaaattcctcctcctctcgcttctgcagctcctctggggtca

SEQ ID NO: 44211 - DNA, 583 bp, Homo sapiens; identical to SEQ ID NO: 35379

SEQ ID NO: 44212 - DNA, 591 bp, Homo sapiens; identical to SEQ ID NO: 35380

SEQ ID NO: 44213 - DNA, 637 bp, Homo sapiens; identical to SEQ ID NO: 35381

SEQ ID NO: 44214 - DNA, 472 bp, Homo sapiens; identical to SEQ ID NO: 35382

SEQ ID NO: 44215 - DNA, 455 bp, Homo sapiens; identical to SEQ ID NO: 35383

SEQ ID NO: 44216 - DNA, 668 bp, Homo sapiens; identical to SEQ ID NO: 35384

SEQ ID NO: 44217 - DNA, 580 bp, Homo sapiens
gcgtaatacgactcactatagggcgaattggagctccaccgcggtggcggccgcccgggcaggtactttttttttttttttttttgatactgagtcgcgctgctgagccaatgtgaaagcttcattgttgcatttggacatgacaagaaactggatggcaaacccatagtcaccaagctgtataaaaaacctggctaccattttggctccatccagagactgggtctctttaacaatattgacagctttttcaggattattgaggtgatccacatagatgcggattacactttgccactgttttgcattttcataagctacaacagcttctttgaatcttgcatctgcttccttggcttaggcatactgcaaatggatcttaggagaagaaacgtggggcagaagatcaccaactgttgcccaattcttagagcggatgtaaacagatgctgctttatcgtagtagagacctttttcatacagatgggccgcttctgaaaattgcttcatattctgcaatatggctccacagtctcttttaaggaccctgctgggatgcttgagggcttgggtaacccct

SEQ ID NO: 44218 - DNA, 689 bp, Homo sapiens; identical to SEQ ID NO: 35386
  misc_feature 174: n = A,T,C or G

SEQ ID NO: 44219 - DNA, 402 bp, Homo sapiens; identical to SEQ ID NO: 35387

SEQ ID NO: 44220 - DNA, 394 bp, Homo sapiens; identical to SEQ ID NO: 35388

SEQ ID NO: 44221 - DNA, 402 bp, Homo sapiens; identical to SEQ ID NO: 35389

SEQ ID NO: 44222 - DNA, 622 bp, Homo sapiens; identical to SEQ ID NO: 35390

SEQ ID NO: 44223 - DNA, 354 bp, Homo sapiens; identical to SEQ ID NO: 35391

SEQ ID NO: 44224 - DNA, 430 bp, Homo sapiens; identical to SEQ ID NO: 35392

SEQ ID NO: 44225 - DNA, 585 bp, Homo sapiens
ctccaccgcggtggcggccgcccgggcaggtactcttgtgagagaagttacatgttcattgttaaggaaattatatgtaaatcacaaagatcatggtctgtgaataatgtgccatatctcacaaaatatggtcattggaatcttattaaaattatctacaggtgacttcagtttccattctccaccctctgccttaagatacgaagccttgacatgaccacatcccagtcagcataagctccttctagatggcgggatatctcagttcctgcttcatagctacgtcggccatgaagtaagcgccagttatcaaaagtaatcacatcacctggattcatcttgaaggtaaacttggattctttgctgttcatgaggtcaacaaactccttcagagcagcataaaaaggctgaactctttcaacaggcacatcaaatattgtgtccctagttgcgttattgaagttgatgcgaaccacttggcctttatcatctaactctataattttatgttttgattgtacctcggccgctctagaactagtggatcccccgggctgcaggaattcgatatcaagcttatcgata

SEQ ID NO: 44226 - DNA, 471 bp, Homo sapiens
actactatagggcgaattggagctccaccgcggtggcggccgaggtactgtgctgagaaatgggccccttgccagatgctcccctctccttcctctctgcgaggcagaagtcagaaggtagagattgctggcaaaactgtgaagtcccaccctggggtctcaaccccaactccactgagggcagcctccctgaccggtgtgactaggcagtaagggtggcggttgatggcggccgctctagaactagtggatcccccgggctgcaggaattcgatatcaagcttatcgataccgtcgacctcgagggggggcccggtacccagcttttgttccctttagtgagggttaattgcgcgcttggcgtaatcatggtcatagctgtttcctgtgtgaaattgttatccgctcacaattccacacaacatacgagccgggagcataaagtgtaaagcctggggtgcctaatgagtg

SEQ ID NO: 44227 - DNA, 450 bp, Homo sapiens
ctactatagggcgaattggagctccaccgcggtggcggccgaggtacatttcagtgatataaatcagatccagaaaggtggatctctgtttagttcttgaaatatataattcacaaaataagacccttgttgttctacagaggtcccctaaactgtcttttattctggtgtagtctctaaaacctcattaagagggaggggagaaaatttagtcttaccagaaatgctctgctttttagtagccatcagttttaggtcttctttatgtaactcagaagttcatctttttccatttggtaaccactttttttccactgttctcgcaactgttgtaatagagccccaatttcttttcctgaagaaatgcccacttttctgatgtcatggccacttacaggaaatggaggaatggaccactgctgcatttcctttaggagacagtgctctcct

SEQ ID NO: 44228 - DNA, 380 bp, Homo sapiens; identical to SEQ ID NO: 35395

SEQ ID NO: 44229 - DNA, 282 bp, Homo sapiens; identical to SEQ ID NO: 35396
  misc_feature 51, 259: n = A,T,C or G

SEQ ID NO: 44230 - DNA, 231 bp, Homo sapiens; identical to SEQ ID NO: 35397

SEQ ID NO: 44231 - DNA, 273 bp, Homo sapiens; identical to SEQ ID NO: 35398

SEQ ID NO: 44232 - DNA, 393 bp, Homo sapiens; identical to SEQ ID NO: 35399

SEQ ID NO: 44233 - DNA, 179 bp, Homo sapiens; identical to SEQ ID NO: 35400

SEQ ID NO: 44234 - DNA, 441 bp, Homo sapiens
tacgactactatagggcgaattggagctccaccgcggtggcggccgcccgggcaggtacatatccgtaactttcatcttccctgcgagctgttttatccctccaggcaaacagcagctgaaaggctgtcaactgctgtgtgttaaggtgcttcttctgcttcctatagagttcaaggtaggactcatccgtgaagataggtttgatgaatttcttgaggcagatgtccctgctccgttgccacaccacctgcagctgcacgggctgcccgttgccgcgctcccacatctccagcctcattttgtcatagatatatagcaggtaatgggtgtcgtcccgggcgtagctgagcatctcctcgggcagagggcgtattctccaatcagccagctgatattgcttgtttgagtccacgttgcagtagagtttcaggagatgatcc

SEQ ID NO: 44235 - DNA, 534 bp, Homo sapiens
gctcggatccctagtaacggccgccagtgtgctggaattcggcttagcgtggtcgcggccgaggtacacaaagagggggtgggtgtcggatgcagagtgtgtggcctgatgctccacggcgtgcaggacggggggctaatagtaggtttccttctccacccagccgccagggcgtcgcctgatgatgagttttctgacttcgtcatatacgaagatgagaagagagtaggggaaggcacagaaccaccaggtaggtttgaggggatacatcctaagagcaacacccattccagggcagtaggaaaggaaagcagccagggctgtctcttcaaagaggccaaatatcaagatcttgttcttcatcccctgctggaagaccgaattcctcctggtcttacagatgaccaagtcggcccactgcaccaccacgatactgacgaagaaggctgtgtggcaggtgaactccacgattttcctctgctcataggttcactgctgcccgtagctgtcttcacatcgttgatccagcggtca

SEQ ID NO: 44236 - DNA, 306 bp, Homo sapiens; identical to SEQ ID NO: 35403

SEQ ID NO: 44237 - DNA, 253 bp, Homo sapiens; identical to SEQ ID NO: 35404

SEQ ID NO: 44238 - DNA, 565 bp, Homo sapiens
  misc_feature 60, 522, 541, 542: n = A,T,C or G
aacaaaagctgggtaccgggccccccctcgagagtacttctagaattaattaaggcgggnccgaaactattatacttttataagatgagctgaatcctcttactttaaaaactggtctttttatttaccctctgtggtagaagagtcaccagcaggttccaaattgatgtgtatgataggaaaaaaaccttaattttaaatataatatagagccttaaactataccactgggtggcagaggctgtataaaacgcacttgttttcatgcaggagcggggcaagtaaggttgagcctgactgtaaacctagaactgcggaaggactgggacttttgtacaaatttcacatttattttacagcaatcatgctgcatttgtgttagtgttctttataataaaaaaacaaagcagcctcctggctggctgtgttacaagtgactcttccttagacagctagaaagatgctgactttgtcaaacttgcatttatatgaaaaccttctgtctctaatatcacagaatanactttctttagatgctcannaaaaaaaaaaaaaaaaaaaaaaa

SEQ ID NO: 44239 - DNA, 539 bp, Homo sapiens
  misc_feature 35: n = A,T,C or G
gggtaccgcggccccccctcgaaagtacttctagnaattaattaacgcggggacggcggggagctcctgtgctgtgacgcgtgcatctcctcctaccacattcattgtctaaaccctcccctgcctgacattcccaatggtgaatggctgtgtccccgatgcacatgccccgtgctgaagggtcgagtgcagaagatcctacattggcggtggggggagccacctgtagcagtgccagcccctcaacaggcagatggaaatccagatgtcccacccccccgtcctcttcaaggcagatcagagcgagagttctttgtcaagtgggtaggactatcctactggcactgctcctgggccaaggagcttcagctggaaatcttacatttggttatgtatcgaaactaccagcggaagaatgacatggatgagcccccacccctggactatggctccggcgaggatgatgggaagagcgacaagcgtatagtgaaagacccgcactatgctgagatggaggagaagtactatcgttttggcat

SEQ ID NO: 44240 - DNA, 397 bp, Homo sapiens; identical to SEQ ID NO: 35407

SEQ ID NO: 44241 - DNA, 391 bp, Homo sapiens; identical to SEQ ID NO: 35408

SEQ ID NO: 44242 - DNA, 428 bp, Homo sapiens; identical to SEQ ID NO: 35410
  misc_feature 348, 349: n = A,T,C or G

SEQ ID NO: 44243 - DNA, 459 bp, Homo sapiens; identical to SEQ ID NO: 35411

SEQ ID NO: 44244 - DNA, 456 bp, Homo sapiens; identical to SEQ ID NO: 35412

SEQ ID NO: 44245 - DNA, 416 bp, Homo sapiens; identical to SEQ ID NO: 35413

SEQ ID NO: 44246 - DNA, 473 bp, Homo sapiens; identical to SEQ ID NO: 31841

SEQ ID NO: 44247 - DNA, 443 bp, Homo sapiens; identical to SEQ ID NO: 35415

SEQ ID NO: 44248 - DNA, 433 bp, Homo sapiens
atacactactatagggcgaattggagctccaccgcggtggcggccggcctatacaaagtttcttattgagaaaagtggttccaatcatgttttttgccccctttagctgctatctcttgaacagaaaagtttgttaggaaggtaaaagttgctgactaggaccttacccacagggtggcactctgtccttgggaaatataaatgcaagtaaaacaggtttgaacttcttaacttccagaagataggaggatgggacctgtgatactgtgctgctggtgggaggacccttccacatcaacatttgtgtgtatccttgcaataaacttccattgtgaattaaaaaaaaaaaaaaaaaaaaaaaagtacctcggccgctctagaactagtggatcccccgggctgcaggaattcgatatcaagcttatcgataccg

SEQ ID NO: 44249 - DNA, 407 bp, Homo sapiens; identical to SEQ ID NO: 35417

SEQ ID NO: 44250 - DNA, 475 bp, Homo sapiens; identical to SEQ ID NO: 35418

SEQ ID NO: 44251 - DNA, 462 bp, Homo sapiens; identical to SEQ ID NO: 35419

SEQ ID NO: 44252 - DNA, 428 bp, Homo sapiens; identical to SEQ ID NO: 35420

SEQ ID NO: 44253 - DNA, 589 bp, Homo sapiens
ggccctctacagcatgctcgagcggccgccagtgtgatggatatctgcagaattcggcttcgagcggccgcccgggcaggtcttaatgtgcagcaaaagcaggcgacaaaatctcctggctttacagacaaaatatttcagcaaacgttgggcatcatggtttttgaaggctttagttctgctttctgcctctcctccacagccccaacctcccacccctgatacatgagccagtgattattcttgttcagggagaagatcatttagatttgttttgcattccttagaatggagggcaacattccacagctgccctggctgtgatgagtgtccttgcaggggccggagtaggagcactggggtgggggcggaattggggttactcgatgtaagggattccttgttgttgtgttgagatccagtgcagttgtgatttctgtggatcccagcttggttccaggaattttgtgtgattggcttaaatccagttttcaatcttcgacagctgggctggaacgtgaactcagtagctgaacctgtctgacccggtcacgttcttggatcctcagaactctttgctcttgtcggg

SEQ ID NO: 44254 - DNA, 461 bp, Homo sapiens; identical to SEQ ID NO: 35422

SEQ ID NO: 44255 - DNA, 442 bp, Homo sapiens
cgactactatagggcgaattgggccctctagatgcatgctcgagcggccgccagtgtgatggatatctgcagaattcgcccttagcgtggtcgcggccgaggtacaccaaggtggtgcattaccggaagtggatcaaggacaccatcgtggccaacccctgagcacccctatcaactccctattgtagtaaacttggaaccttggaaatgaccaggccaagactcaagcctccccagttctactgacctttgtccttaggtgtgaggtccagggttgctaggaaaagaaatcagcagacacaggtgtagaccagagcgtttcttaaatggtgtaattttgtcctctctgtgtcctggggaatactggccatgcctggagacatatcactcaatttctctgaggacacagataggatgggggggctgtgttatttgtgggata

SEQ ID NO: 44256 - DNA, 472 bp, Homo sapiens; identical to SEQ ID NO: 35424

SEQ ID NO: 44257 - DNA, 456 bp, Homo sapiens; identical to SEQ ID NO: 35425

SEQ ID NO: 44258 - DNA, 402 bp, Homo sapiens
atacgactactatagggcgaattggagctccaccgcggtggcggccgtggtggtgaagctgtagccgcgctcggtgaggatcttcatgaggtagtcagtcaggtcccggccagccaggtccagacgcaggatggcatgggggagggcatacccctcgtagatgggcacagtgtgggtgaccccgtcaccggagtccatcacgatgccagtggtacctgcccgggcggccgctctagaactagtggatcccccgggctgcaggaattcgatatcaagcttatcgataccgtcgacctcgagggggggcccggtacccagcttttgttccctttagtgagggttaattgcgcgcttggcgtaatcatggtcatagctgtttcctgtgtgaaattgttatccgct

SEQ ID NO: 44259 - DNA, 455 bp, Homo sapiens; identical to SEQ ID NO: 35427

SEQ ID NO: 44260 - DNA, 325 bp, Homo sapiens
  misc_feature 299: n = A,T,C or G
ctccaccgcggtggcggccgcccgggcaggtacaccattcttcagccctgcatccttccagttgcgattaggatagccatacatggagggtaggcagggcagagcctgataggttgtgcggcctcggacgtatgtctgtaggaacagttgcttgtaggggccaaactggattacccctacttggtcatgaaggagccgcatggctgtttcgaaagagtctgccaggatgtgatcaactggaagctgagagttattacaccagatctgagttggacttgttcccttggttgggggcacanagaaaccatcttcagccccaccagct

SEQ ID NO: 44261 - DNA, 438 bp, Homo sapiens
gtaatacactactatagggcgaattggagctccaccgcggtggcggccgcccgggcaggtactatatataatcatatagacaactcccgtaatatctccgcagtgcaaaattatccctgtttcttgtcattcaccagtgagaaaaatccaactgcagacttgactgccttcggtgaaggcacacggcaagttcttctgacaaataacaccctttgggattgactcttcacgttttacacagcaattgtctcagcttgggaccaaagtatttacaaagcaagcgaacaagagacgaagcaagagggacacttctgaggccggtggtgcggaaactcaccgccaaacagggtggggggccagtcacctcttcaggagtgtcccatgtgtcagctgacataacatcttaaatacagaattccaattgaaagaaaaacaaac

SEQ ID NO: 44262 - DNA, 595 bp, Homo sapiens
gactcactatagggcgaattggagctccaccgcggtggcggccgaggtacttttttttttttttttttttgattaattagaaagtaggctgggcacggtggcccatgcctataatcccagcacttggggaggccgaggatctcctctctggtggatcacttgagggcaggagttaagagaccacctggccaacatgatgaaaccctgtctctactaaaaatacaaaaagtagctgggcgtggtggcatactcttacaatcccagctacttgggaggctgaggcaggagaatcacttgaacctaggaagcagaggttgcagtgggccaagatcacaccactataccctagcctgggcgacagaggtggggaaaaaagtaggacccctgtcctatattcaggtttttctcacatatatgaacccatctaaattctacgttgttaaaggtagcttaggttaattagtctatacttatttaagaccaatatggggtgagatggatttttttttaaaaatcctacagtaaggctttctactttccttctaatgaggaaaaaggtgacaaaaattcaagtgtcaatgtcctcttcctggga

SEQ ID NO: 44263 - DNA, 460 bp, Homo sapiens
gcgaattggagctccaccgcggtggcggccgaggtactgcagccacgttggccttcttggtattctttgaatacaagggagcttctacttcaaggcatttacattggctgttgccttagcttagaacgctctttctccagatagccgcagagcccgctctctcacctgactcatgtctctgctcaaatgttaatgatcaagaggcagtccccggcctcccccttaaaattacaacctgtcactctccaatcctttcctcacgattttctcaaaagcacttaccgctaaccaacattatatctaaattttttttgtctctttttattggaatgtaagtttcatgtaagcaggaactgtatatcactgctataccctcagcatttaaaacaatggctgtacctccggggtggcgctggggttggctccatgaccaagatctatgggggacgtcagagaaacg

SEQ ID NO: 44264 - DNA, 385 bp, Homo sapiens
agctccaccgcggtggcggccgaggtactaatactcctgttaaaatgcaacagctttatcgtgaaagaatccagagatctcacactgaaaaaatactaacacagctcatatataaattacttatctataagaacaattatagaaggaatctaaatggggcatattttaactaaaccaggcagaagtatcactatatacgctgaatatagaggtaacttccaagaccatgaatattaagattaagggcagttacctttatatttgaaccaaggatagtggcatatagcaacctcatgtgtggtgcacccttaagggtgggagcttcttccgccctaccacatgcccacccgcaaggcatcattctggagaaaaaagtgtctatcta

SEQ ID NO: 44265 - DNA, 189 bp, Homo sapiens; identical to SEQ ID NO: 35435

SEQ ID NO: 44266 - DNA, 511 bp, Homo sapiens; identical to SEQ ID NO: 33499

SEQ ID NO: 44267 - DNA, 616 bp, Homo sapiens
ctatagggcgaattggagctccaccgcggtggcggccgaggtacgcgggtatgagcctcctgaagaatcgattcctcaggccaggtgatgactccagccacgacctcatgctgctccgcctgtcagagcctgccgagctcacggatgctgtgaaggtcatggacctgcccacccaggagccagcactggggaccacctgctacgcctcaggctggggcagcattgaaccagaggagttcttgaccccaaagaaacttcagtgtgtggacctccatgttatttccaatgacgtgtgtgcgcaagttcaccctcagaaggtgaccaagttcatgctgtgtgctggacgctggacagggggcaaaagcacctgctcgggtgattctgggggcccacttgtctgtaatggtgtgcttcaaggtatcacgtcatggggcagtgaaccatgtgccctgcccgaaaggccttccctgtacctgcccgggcggccgctctagaactagtggatcccccgggctgcaggaattcgatatcaagcttatcgataccgtcgacctcgagggggggcccggtacccagcttttgatccctttaatgagggttaattgcgcgcttggcg

SEQ ID NO: 44268 - DNA, 615 bp, Homo sapiens
  misc_feature 522: n = A,T,C or G
ctccaccgcggtggcggccgcccgggcaggtactgttcctgttggccgagtggagactggtgttctcaaacccggtatggtggtcacctttgctccagtcaacgttacaacggaagtaaaatctgtcgaaatgcaccatgaagctttgagtgaagctcttcctggggacaatgtgggcttcaatgtcaagaatgtgtctgtcaaggatgttcgtcgtggcaacgttgctggtgacagcaaaaatgacccaccaatggaagcagctggcttcactgctcaggtgattatcctgaaccatccaggccaaataagcgccggctatgcccctgtattggattgccacacggctcacattgcatgcaagtttgctgagctgaaggaaaagattgatcgccgttctggtaaaaagctggaagatggccctaaattcttgaagtctggtgatgctgccattgttgatatggttcctggcaagcccatgtgtgttgagagcttctcagactatccacctttgggtcgctntgctgttcgtgatatgagacagacagttgcggtgggtgtcatcaaagcagtggacaagaaggctgctggagctggcaggtcaccaagtctgcc

SEQ ID NO: 44269 - DNA, 274 bp, Homo sapiens; identical to SEQ ID NO: 35439

SEQ ID NO: 44270 - DNA, 489 bp, Homo sapiens; identical to SEQ ID NO: 35440

SEQ ID NO: 44271 - DNA, 703 bp, Homo sapiens
gcgcgtaatacgactcactatagggcgaattggagctccaccgcggtggcggccgaggtactttttttctcttctctacttttatttttatttaattttaaatgctggttgagagccacttcttaacctggggtctgtggacaaaaatcagaaatcaaaattcagagaatccatgaactgggatggggggcggaaattacctctttttttttttattgcccttgactgaaaatttcatgtttccttcgggtatgaatgtgacctcacatgcaacacccatgaaatgaccacatcaaatactgttgtcacagacaccttgaaatttacagccgtcaccacttcaaaattatggtgatcagacttgccattcaacgtgttgataatccaagcccaggcacagaacacatttaagaaaacattttgggctgggcacagtggctcacgcctgtaatcccagtacgcggatctccacttttctatataactcctttctcctcttctgtttcatgtcctgcaaattctgtatttttattacactttggaaaaaaaaagaaatgataaacttaatgatgattcttataattaagaaataattttcgtagataaagaagggtatgttgctagctatcaccctaagagatgaagaagagaagaatgtttctaatgaacttcccatttagaaacatcattatttggggaaaga

SEQ ID NO: 44272 - DNA, 242 bp, Homo sapiens; identical to SEQ ID NO: 35442

SEQ ID NO: 44273 - DNA, 337 bp, Homo sapiens; identical to SEQ ID NO: 35443

SEQ ID NO: 44274 - DNA, 532 bp, Homo sapiens; identical to SEQ ID NO: 35444

SEQ ID NO: 44275 - DNA, 453 bp, Homo sapiens; identical to SEQ ID NO: 35445

SEQ ID NO: 44276 - DNA, 670 bp, Homo sapiens
taggagctccaccgcggtggcggccgcccgggcaggtacgcggggaacttgtctggctttggcactctctgccattctgtgcaggctgcagtggctcccctgcccagcctgctctccctaaccccttgtccgcaaggggtgatggccggctggttgtgggcactggcggtcaagtgtggaggagaggggtggaggctgccccattgagatcttcctgctgagtcctttccaggggccaattttggatgagcatggagctgtcacctctcagctgctggatgacttgagatgaaaaaggagagacatggaaagggagacagccaggtggcacctgcagcggctgccctctggggccacttggtagtgtccccagcctacctctccacaaggggattttgctgatgggttcttagagccttagcagccctggatggtggccagaaataaagggaccagcccttcatgggtggtgacgtggtagtcacttgtaaggggaacagaaacatttttgttcttatggggtgagaatatagacagtgcccttggtgcgagggaagcaattgaaaaggaacttgccctgagcactcctggtgcaggtctccacctgcacattgggtggggctcctgggaaggagactcagccttcctcctcatcctccctgaccctgct

SEQ ID NO: 44277 - DNA, 449 bp, Homo sapiens; identical to SEQ ID NO: 35447

SEQ ID NO: 44278 - DNA, 274 bp, Homo sapiens; identical to SEQ ID NO: 43271

SEQ ID NO: 44279 - DNA, 442 bp, Homo sapiens; identical to SEQ ID NO: 35449

SEQ ID NO: 44280 - DNA, 643 bp, Homo sapiens
  misc_feature 211: n = A,T,C or G
cgtaatacgacttactatagggcgaattggagctccaccgcggtggcggccgaggtacagacaaggtaactgagacagtgatgaatggcggcatgaaggaaacgctcagcctcactgtagatgccaagacagagactgcggtcttcaaaagtgaggaagggaaactgtctacctctcaagatgctgcttgtaaagacgccagaggagtgtncccgagactgcagaggcgaagtgcgcggcgcccaggcctcccagcagcagtcccgagcagaggactggccaaccaagcgcaccaggtgacacttcagtgaatggccctgtatgacgggtgacgtctgctgctgctgactgaggactgcagaccgccaccactcaggggctctggaggggtcagctggagcccaccaagctgtcactgctgcactcactctgcaagggatcaggaccagcaacctttatattctagattctaagacattgtacctgcccgggcggccgctctagaactagtggatcccccgggctgcaggaattcgatatcaagcttatcgataccgtcgacctcgagggggggcccggtacccagcttttgttccctttagtgagggttaattgcgcgcttggcgtaatcatggtcatagct

SEQ ID NO: 44281 - DNA, 450 bp, Homo sapiens
actactatagggcgaattggagctccaccgcggtggcggccgaggtacgcggggaggggcgggcgtcggggacattaccggacaggccttgtccggcaataccaagtttcatgcaggctcttgggaaagctggtgctgctgctgcctgattcccgccgacagaccttgggaccggggccaacactggcagctggagatggcggacacgagatccgtgcacgagactaggtttgaggcggccgctctagaactagtggatcccccgggctgcaggaattcgatatcaagcttatcgataccgtcgacctcgagggggggcccggtacccagcttttgttccctttagtgagggttaattgcgcgcttggcgtaatcatggtcatagctgtttcctgtgtgaaattgttatccgctcacaattccacacaacatacgagccgggagcataaa

SEQ ID NO: 44282 - DNA, 483 bp, Homo sapiens
gatttcagaaaagcttcctagcttatctccctgcttcatatctctcccttctttaccttcatttcatcctgttggctgctgccaccaaatctgtctagaatcctgctttacaggatcatgtaaatgctcaaagatgtaatgtagttctttgttcctgctttctctttcagtattaaactctcctttgatattatgtggcttttatttcagtgccatacatgttattgttttcaacctagaaacctttatccctgcttatctgaaacttcccaacttccctgttctttaagacttttttttttttttttttgagacagagtctcgctctgtcgcccaggctggagggcagtggcacgatctcagctcactgcaagctccaactcccgggttcacgccattctcctgcctcagccttccaagtagctgggactacaggtgcccgccaccgtgcccggctaattttttttgtatttttagtagaga

SEQ ID NO: 44283 - DNA, 425 bp, Homo sapiens; identical to SEQ ID NO: 35453

SEQ ID NO: 44284 - DNA, 669 bp, Homo sapiens
ctcactatagggcgaattggagctccaccgcggtggcggccgtgtgggtgagttggctgccggtgagttgggtgccggtggagtcgtgttggtcctcagaatccccgcgtagccgctgcctcctcctaccctcgccatgtttcttacccggtctgagtactcgggattgaaaaactttttgagcgttatggtgaaaatggaagattatccttttttggtttggagaaacttttaacaaacttgggccttggagagagaaaagtagttgagattaatcatgaggatcttggccacgatcatgtttctcatttagatattttggcagttcaagagggaaagcattttcactcacataaccaccagcattcccataatcatttaaattcagaaaatcaaactgtgaccagtgtatccacaaaaagaaaccataaatgtgatccagagaaagagacagttgaagtgtctgtaaaatctgatgataaacatatgcatgaccataatcaccgcctacgtcatcaccatcgtttgcatcatcatcttgatcataacaacactcaccattttcataatgattccattactcccagtgaggcgggggagcctagcaatgaaccttcaacagagaccagataaacccaggaacaatctgatgttaaactaccgaaagga

SEQ ID NO: 44285 - DNA, 491 bp, Homo sapiens
ctccaccgcggtggcggccgaggtacgcgggtgagtctctttggaaacttctgcagggggaaaagagctaggaaagagctgcaaagcagtgtgggctttttcccttttttgctccttttcattacccctcctccgttttcacccttctccggacttcgcgtagaacctgcgaatttcgaagaggaggtggcaaagtgggagaaaagaggtgttagggtttggggtttttttgtttttgtttttgttttttaatttcttgatttcaacattttctcccaccctctcggctgcagccaacgcctcttacctgttctgcggcgccgcgcaccgctggcagctgagggttagaaagcggggtgtattttagattttaagcaaaaattttaaagataaatccatttttctctcccacccccaacgccatctccactgcatccgatctcattatttcggtggttgcttgggggtgaacattttgtggcttttttccc

SEQ ID NO: 44286 - DNA, 405 bp, Homo sapiens; identical to SEQ ID NO: 35457
  misc_feature 270: n = A,T,C or G

SEQ ID NO: 44287 - DNA, 509 bp, Homo sapiens; identical to SEQ ID NO: 35458

SEQ ID NO: 44288 - DNA, 505 bp, Homo sapiens; identical to SEQ ID NO: 35459

SEQ ID NO: 44289 - DNA, 501 bp, Homo sapiens; identical to SEQ ID NO: 35460

SEQ ID NO: 44290 - DNA, 356 bp, Homo sapiens; identical to SEQ ID NO: 35461

SEQ ID NO: 44291 - DNA, 356 bp, Homo sapiens; identical to SEQ ID NO: 35461

SEQ ID NO: 44292 - DNA, 377 bp, Homo sapiens; identical to SEQ ID NO: 35463

SEQ ID NO: 44293 - DNA, 595 bp, Homo sapiens
ttggagctccaccgcggtggcggccgaggtaccctcaaaggagaacctgatgcagggattcttgtgcaggtgagtgaggacgtggtgtcagaagggatgaggaaagcaggatagagctgaaggagaaacagaaggatgtgcccgagttccccgaggttggtagagtgttctgggggataagggaagcccagaaaaagcacaacgtgtgagtgttccaccccaattaaccaccattacacaaaaacccaaacactctatccttttattccttcccaggctattgcaggaaaggtcttgtttcccaaacgctgtgcctttctcctcttgccttcaaccctggaggggcccaactacacaagtggcttatttggagaagggaatgaggttgaataaagaaagctcagcttccagaacaccacactctcttggttttctctgaccttaaggtaactccttctcagtcctttggctgatttcccatttcccagagagcccaagggctccatccatggctcttttctgttgcttctcagtaatactcaaagacaatctcagtggcccctccagctgcatgggtttaatgccactgacatgc

SEQ ID NO: 44294 - DNA, 376 bp, Homo sapiens; identical to SEQ ID NO: 35465

SEQ ID NO: 44295 - DNA, 369 bp, Homo sapiens; identical to SEQ ID NO: 35466

SEQ ID NO: 44296 - DNA, 372 bp, Homo sapiens; identical to SEQ ID NO: 35467

SEQ ID NO: 44297 - DNA, 347 bp, Homo sapiens; identical to SEQ ID NO: 35468

SEQ ID NO: 44298 - DNA, 378 bp, Homo sapiens; identical to SEQ ID NO: 35469

SEQ ID NO: 44299 - DNA, 404 bp, Homo sapiens; identical to SEQ ID NO: 35470

SEQ ID NO: 44300 - DNA, 455 bp, Homo sapiens
ttttttgttatatatattagtgttttatcttcatagatcataaaactctaacttctgcaataccagctatggcatgggcaggggaacaagggaaaacatggaacccaaagggaactgcagcgagagcacaaagattctaggatactgcgagcaaatggggtggaggggtgctctcctgagctacagaaggaatgatctggtggttaagataaaacacaagtcaaacttattcgagttgtccacagtcagcaatggggatcttcttgctggtcttgccattcctggacccaaagcgctccatggcctccacaatattcatgccttctttcactttgccaaacaccacatgcttgccatccaaccactcagtcttggcagtgcagatgaaaaactgggaaccatttgtgttgggtccagcatttgccatggacaaaatgccaggacccgtatgcttt

SEQ ID NO: 44301 - DNA, 500 bp, Homo sapiens
cgactactatagggcgaattggagctccaccgcggtggcggccgaggtacttttttttttttttttttttttttccgtctccccaaagctttatctgtcttgactttttaaaaaagtttgggggcagattctgaattggctaaaagacatgcatttttaaaactagcaactcttatttctttcctttaaaaatacatagcattaaatcccaaatcctatttaaagacctgacagcttgagaaggtcactactgcatttataggaccttctggtggttctgctgttacgtttgaagtctgacaatccttgagaatctttgcatgcagaggaggtaagaggtattggattttcacagaggaagaacacagcgcagaatgaagggccaggcttactgagctgtccagtggagggctcatgggtgggacatggaaaagaaggcagcctaggccctggggagcccagtccactgagcaagcaagggactgagtgagccttttgca

SEQ ID NO: 44302 - DNA, 237 bp, Homo sapiens; identical to SEQ ID NO: 35473

SEQ ID NO: 44303 - DNA, 355 bp, Homo sapiens; identical to SEQ ID NO: 35474

SEQ ID NO: 44304 - DNA, 362 bp, Homo sapiens; identical to SEQ ID NO: 35475
  misc_feature 271, 288: n = A,T,C or G

SEQ ID NO: 44305 - DNA, 399 bp, Homo sapiens; identical to SEQ ID NO: 35476

SEQ ID NO: 44306 - DNA, 387 bp, Homo sapiens; identical to SEQ ID NO: 35477

SEQ ID NO: 44307 - DNA, 405 bp, Homo sapiens; identical to SEQ ID NO: 35478

SEQ ID NO: 44308 - DNA, 399 bp, Homo sapiens; identical to SEQ ID NO: 35479

SEQ ID NO: 44309 - DNA, 382 bp, Homo sapiens; identical to SEQ ID NO: 35480

SEQ ID NO: 44310 - DNA, 396 bp, Homo sapiens; identical to SEQ ID NO: 35481

SEQ ID NO: 44311 - DNA, 382 bp, Homo sapiens; identical to SEQ ID NO: 35482

SEQ ID NO: 44312 - DNA, 384 bp, Homo sapiens; identical to SEQ ID NO: 35483

SEQ ID NO: 44313 - DNA, 396 bp, Homo sapiens; identical to SEQ ID NO: 35484

SEQ ID NO: 44314 - DNA, 407 bp, Homo sapiens; identical to SEQ ID NO: 35485

SEQ ID NO: 44315 - DNA, 372 bp, Homo sapiens; identical to SEQ ID NO: 35486

SEQ ID NO: 44316 - DNA, 376 bp, Homo sapiens; identical to SEQ ID NO: 35487

SEQ ID NO: 44317 - DNA, 311 bp, Homo sapiens; identical to SEQ ID NO: 35488

SEQ ID NO: 44318 - DNA, 389 bp, Homo sapiens; identical to SEQ ID NO: 35490

SEQ ID NO: 44319 - DNA, 400 bp, Homo sapiens; identical to SEQ ID NO: 35491

SEQ ID NO: 44320 - DNA, 375 bp, Homo sapiens
ctatagggcgatttggagctccaccgcggtggcggccgccatcaaccgccacccttactgcctagtcacacacgttagggaggctgccctcagtggagttggggttgagaccccagggtgggacttcacagttttgccagcaatctctaccttctgacttctgcctcgcagagaggaaggagagggggagcatcttggcaaggggcccatttctcagcacagtacctcggccgctctagaactagtggatcccccgggctgcaggaattcgatatcaagcttatcgataccgtcgacctcgaggggggggcccggtacccaagcttttgtttcccttttagtgagggttaaattgcgcgctttggcgtaatcatg

SEQ ID NO: 44321 - DNA, 438 bp, Homo sapiens
gcgaatcgggccctctatatgcatgctcgagcggccgccagtgtgatggatatctgcagaattctccctttcgagcggtcgcccgggcaggtacgcgggggcctctttccctcggagcgggcggcggcgttggcggcttgtgcagcaatggccaagatcaaggctcgagatcttcgcgggaagaagaaggaggagctgctgaaacagctggacgacctgaaggtggagctgtcccagctgcgcgtcgccaaagtgacaggcggtgcggcctccaagctctctaagatccgagtcgtccggaaatccattgcccgtgttctcacagttattaaccagactcagaaagaaaacctcaggaaattctacaagggcaagaagtacctcggccgcgaccacgctaagggcgaattccagcacactggcggccgttactagtgg

SEQ ID NO: 44322 - DNA, 382 bp, Homo sapiens; identical to SEQ ID NO: 35498

SEQ ID NO: 44323 - DNA, 455 bp, Homo sapiens; identical to SEQ ID NO: 31916

SEQ ID NO: 44324 - DNA, 491 bp, Homo sapiens; identical to SEQ ID NO: 33744

SEQ ID NO: 44325 - DNA, 401 bp, Homo sapiens; identical to SEQ ID NO: 35501

SEQ ID NO: 44326 - DNA, 468 bp, Homo sapiens; identical to SEQ ID NO: 35502

SEQ ID NO: 44327 - DNA, 490 bp, Homo sapiens
cgtaatacgactcactatagggcgaattggagctccaccgcggtggcggccgcccgggcaggtactgtgtagaattaagcaaacaagtgatgtttcagaagtaacccattactgcttaaaataaagcctacatcaacacttaactcaaacgaggacaattgttatttagtttttatttcataatcataaacttaactctgcaatccagctaggcatgggagggaacaaggaaaacatggaacccaaagggaactgcagcgagagcacaaagattctaggatactgcgagcaaatggggtggaggggtgctctcctgagctacagaaggaatgatctggtggttaagataaaacacaagtcaaacttattcgagttgtccacagtcagcaatggtgatcttcttgctggtcttgccattcctggacccaaagcgctccatggcctccacaatattcatgccttctttcactttgccaaacaccacatgctt

SEQ ID NO: 44328 - DNA, 413 bp, Homo sapiens
gactcactatagggcgaattggagctccaccgcggtggcggccgaggtacctgcaggcctcctacacctacctctctctgggcttctatttcgaccgcgatgatgtggctctggaaggcgtgagccacttcttccgcgaactggccgaggagaagcgcgagggctacgagcgtctcctgaagatgcaaaaccagcgtggcggccgctctagaactagtggatcccccgggctgcaggaattcgatatcaagcttatcgataccgtcgacctcgagggggggcccggtacccagcttttgttccctttagtgagggttaattgcgcgcttggcgtaatcatggtcatagctgtttcctgtgtgaaattgttatccgctcacaattccacacaacatacgagccgggagcataaa

SEQ ID NO: 44329 - DNA, 324 bp, Homo sapiens
tacgactcactatagggcgaattggagctccaccgcggtggcggccgtggtggtgaagctgtagcctcgctcagtgaggatcttcatgaggtagtcggtcaggtcccggccagccaggtccagacgcaggatggcgtgggggagggcgtaaccctcgtagatgggcaccgtgtgggtgaccccgtctacagagtccatgacattgccagaggtgcgcccagaggcgtatagggacagcacggcctgtatggccacgtacctcggccgctctagaactagtggatcccccgggctggaggaattctatatcaagcttatcgatac

SEQ ID NO: 44330 - DNA, 450 bp, Homo sapiens; identical to SEQ ID NO: 33480

SEQ ID NO: 44331 - DNA, 513 bp, Homo sapiens
gaggagcccaccacctggaccgggtacttcgggaaagtgctcatggcctacaccagctacctgccttcccaagtgacagaaatgttcaaccagggcagagccttcgccacggtccgcctgccattctgcggccacaaaaacatctgctcgctagccacaattcataagatcccgcggttgttggtgggtgccgccgacgggtacctgtacatgtacaacctggacccccaggagggcggcgagtgtgccctgatgaagcagcaccggctggacggcagtctggaaacgaccaatgagatcttggactctgcctctcacgactgccccttagtcactcagacatacggcgcagctgcaggaaaaggtacttacgtgccttcatccccaacgagacttgcctacacagacgacctgtgtgctgggggtggcgcctgcctggaggacgaggccagcgccctgcgcctggatgaggacagcgagcacccgcccatgattcttccgactgactgaact

SEQ ID NO: 44332 - DNA, 446 bp, Homo sapiens
tactatagggcgaattggagctccaccgcggtggcggccgcccgggcaggtacccctccaagccggacaacccgggcgaggacgcaccagcggaggacatggccagatactactcggcgctgcgacactacatcaacctcatcaccaggcagagatatggaaaacgatccagcccagagacactgatttcagacctcttgatgagagaaagcacagaaaatgttcccagaactcggcttgaagaccctgcaatgtggtgatgggaaatgagacttgctctctggccttttcctattttcagcccatatttcatcgtgtaaaacgagaatccacccatcctaccaatgcatgcagccactgtgctgaattctgcaatgttttcctttgtcatcattgtatatatgtgtgtttaaataaagtatcatgcattcaaaaaaaaaaaaaaa

SEQ ID NO: 44333 - DNA, 395 bp, Homo sapiens
actatagggcgaattggagctccacgcggtggcggccgaggtacgcgggtcaattcattttcagagcactttaaagtctgatatttctcgatgtgcactgtgatgcctggaaccttcctctggaagtgctgattttatggactgaggactggtgactggtctgtgatagaagcaaattccaattccaaatgtaattagacaaaaatcatttttttagaatgtgtttttattgtaaaagtatctttttcagcttcctgttctattgtcttttttcagatacaacatttttgtctatggtgaactgctgtaaatgacgcagagaaatgcctaaaaaggacaggtggtttgactcatggatgatgatgatgtcactgtgccacttggacagggcgttt

SEQ ID NO: 44334 - DNA, 321 bp, Homo sapiens
ggagctccaccgcggtggcggccgaggtactttttttttttttttattttggaagaactgttctcgggtggagcatgggacctttattcgttaaaacataaggctccaaatatgaactttcagaaaaagcccttgccgggtagcaaagggacagaaaagcttgtgattaaacatttcctggtttataaattcaaaacccgggcaaggtttgtttaagcttcaaatcccccggccgctttaaaactagtggatcccccgggctgaaggaattcgatatcaagcttattgataccgtctacttttagggggggcccggttccc

SEQ ID NO: 44335 - DNA, 699 bp, Homo sapiens
cgtccgcagggccgaggcgtagtgtgggtgactcctccgttccttgggtcccgtcgtctgtgatactgcagtgcagccatggcagaaccgcagcccccgtccggcggcctcacggacgaggccgccctcagttgctgctccgacgcggaccccagtaccaaggattttctattgcagcagaccatgctacgagtgaaggatcctaagaagtcactggatttttatactagagttcttggaatgacgctaatccaaaaatgtgattttcccattatgaagttttcactctacttcttggcttatgaggataaaaatgacatccctaaagaaaaagatgaaaaaatagcctgggcgctctccagaaaagctacacttgagctgacacacaattggggcactgaagatgatgcgacccagagttaccacaatggcaattcagaccctcgaggattcggtcatattggaattgctgttcctgatgtatacagtgcttgtaaaaggtttgaagaactgggagtcaaatttgtgaagaaacctgatgatggtaaaatgaaaggcctggcatttattcaagatcctgatggctactggattgaaattttgaatcctaacaaaatggcaaccttaatgtagtgctgtgagaattctcctttgagatttcagaagaaaggaaacaatgtgattcaagatatttacata

SEQ ID NO: 44336 - DNA, 160 bp, Homo sapiens
cgactcactatagggcgaattggagctccaccgcggaggcggccgaggtaccgcaagggaaagatgaaaaattataaccaagcataatatagcaaggactaacccctataccttctgcataacgaattaactagaaataactttgcaaggagagccaaag

SEQ ID NO: 44337 - DNA, 670 bp, Homo sapiens; identical to SEQ ID NO: 44276

SEQ ID NO: 44338 - DNA, 508 bp, Homo sapiens
actacttagggcgaattggagctccccgcggtggcggccgcccgggcaggtacgcggggctcccttcttccgagcctctcctctggccgccgcgcgggagagaggccgagatggcagatgagattgccaaggctcaggtcgctcggcctggtggcgacacgatctttgggaagatcatccgcaaggaaataccagccaaaatcatttttgaggatgaaccggggccttgctttccatgacatttcccctcaagcaccaacacattttctggtgatacccaagaaacatatatcccagatttctgtggcagaagatgatgatgaaagtcttcttggacacttaatgattgttggcaagaaatgtgctgctgatctgggcctgaataagggttatcgaatggtggtgaatgaaggttcagatggtggacagtctgtctatcacgttcatctccatgttcttggaggtcggcaaatgcattggcctcctggttaagcacgttttggggata

SEQ ID NO: 44339 - DNA, 379 bp, Homo sapiens
actatagggcgaattggagctccaccgcggtggcggccgcccgggcaggtacgcggggcccaaactcaccacctggccgtggacacctgtgtcagcatgtgggacctggttctctccatcgccttgtctgtggggtgcactggaatagccaggtctggctgggtcggcacaacctgtttgagcctgaagacacaggccagagggtccctgtcagccacagcttcccacacccgccctacaatatgagccttctgaagcatcaaagccttagaccagatgaagactccagccatgacctcatgctgcttcgcctgtcagagcctgccaagatcacagatgttgtgaaggtcctgggcctgcccacccaggagccagcact

SEQ ID NO: 44340 - DNA, 426 bp, Homo sapiens
actactatagggcgaattggagctccaccgcggtggcccgggcaggtaccttgctgactcagctacatacataaggcctcaagccttgctgccagttcttaaaggaactgtgttctcttttcacttttcctggcttatggggcagtagagggtttccgacctcaaatgccaataccaggtaggtagaaggaccttaggctcaactgctggctcctcgtaataacacacactgtattctgtggtgggtgccactctgctctgcctgtgtcatgtcacctttcctaatccagcacatcctcgcccaagaaaaccctattttggggtcattcattctattcttatttctctcttatttgttctgatgtttcagttggacttgattctaccgcaggctctggctccagaggaagagatgggggctttgtg

SEQ ID NO: 44341 - DNA, 330 bp, Homo sapiens
tccaccgcggtggcggccgtggtggtgaagctgtagccgcgctcggtgaggatcttcatgaggtagtcagtcaggtcccggccagccaggtccagacgcaggatggcatgggggagggcatacccctcgtagatgggcacagtgtgggtgaccccgtcaccggagtccatcacgatgccagtggtacctcggccgctctagaactagtggatcccccgggctgcaggaattcgatatcaagcttatcgataccgtcgacctcgagggggggcccggtacccagcttttgttccctttagtgagggttaattgcgcgcttggcgtaatcat

SEQ ID NO: 44342 - DNA, 464 bp, Homo sapiens; identical to SEQ ID NO: 35432

SEQ ID NO: 44343 - DNA, 394 bp, Homo sapiens
gagctccaccgcggtggcggccgaccttgatccggggagtcaggatggcccagtaactccatcacattcatcccaagaagatggcagagcttctgcgcaactgtattttctggcatggaagcttgatcagtatttctctcctttttgaaagaaatatttccaaactgtagcactgaagatactactttaagcattgacagaatctcttcatgggagaagcccattatgtgcattgcttccatggtctcctggaaattatctttgtcttgctgtcccggaataggaatatagccattggagagaaacctgtagttattaaatccttcaagaagcaaatcagactttaggggttttcctgctccagataacaactgggtaaagatttgaaaagttc

SEQ ID NO: 44344 - DNA, 405 bp, Homo sapiens
gggccctctagatgcatgctcgagcggccgccagtgtgatggatatctgcagaattcggcttagcgtggtcgcggccgaggtacagattattcagttccattgtaatttcccaaataattttagattataattttcagaaaggatttttaacatctgctaggctaattccatcatattagtatatgaaattatcttttctccagttatttataatctttctaaatattttaaaatacagtatattttcacagcaaattttattttccccacaacaaagaattatcccacttctctagtaatttccatcgtgcaagaatgtagaatatagactaataagccctaaataggattctaaaaggcaagttacctaaaacccttcttgtctaaccatattaaggcccaag

SEQ ID NO: 44345 - DNA, 401 bp, Homo sapiens
  misc_feature 23: n = A,T,C or G
gccagcttggtaccgagctcggntccactagtaacggccgccagtgtgctggaatttcgagcggccgcccgggcaggtgcggcttgtgcagcaatggccaagatcaaggctcgagatcctcgcgggaagaaggaggagctgctgaaacagctggacgacctgaaggtggagctgtcccagctgcgcgtcgccaaagtgacaggcggtgcggcctccaagctctctaagatccgagtcgtccggaaatccattgcccgtgttctcacagttattaaccagactcagaaagaaaacctcaggaaattctacaagggcaagaagtacctcggccgcgaccacgctaagccgaattctgcagatatccatcacactggcggccgctcgagcatgcatctagaggg

SEQ ID NO: 44346 - DNA, 478 bp, Homo sapiens; identical to SEQ ID NO: 35534

SEQ ID NO: 44347 - DNA, 464 bp, Homo sapiens; identical to SEQ ID NO: 35535

SEQ ID NO: 44348 - DNA, 395 bp, Homo sapiens
gactcactatagggcgaattggagctccaccgcggtggcggccgaggtacgcgggggccgccgccgccagattctggaggcgaagaacgcaaagctgagaacatggacgttaatatcgccccactccgcgcctgggacgatttcttcccgggttccgatcgctttgcccggccgctctagaactagtggatcccccgggctgcaggaattcgatatcaagcttatcgataccgtcgacctcgagggggggcccggtacccagcttttgttccctttagtgagggttaattgcgcgcttggcgtaatcatggtcatagctgtttcctgtgtgaaattgttatccgctcacaattccacacaacatacgagccgggagcataaagtgtaaagcctgg

SEQ ID NO: 44349 - DNA, 468 bp, Homo sapiens; identical to SEQ ID NO: 35537
  misc_feature 429, 432: n = A,T,C or G

SEQ ID NO: 44350 - DNA, 364 bp, Homo sapiens; identical to SEQ ID NO: 35538

SEQ ID NO: 44351 - DNA, 395 bp, Homo sapiens; identical to SEQ ID NO: 35539

SEQ ID NO: 44352 - DNA, 652 bp, Homo sapiens; identical to SEQ ID NO: 44025

SEQ ID NO: 44353 - DNA, 494 bp, Homo sapiens
atacactactatagggcgaattggagctccaccgcggtggcggccgcccgggcaggtacaccagcgaattcatacaggtgagaaaccttatatatgcaatgaatgtggaaaaggcttcattcagaagacgtgtctcatagcacatcagagatttcacacaggaaagacgccctttgtgtgcagtgaatgtggaaaatcctgttctcagaaatcaggtctcattaaacatcaaagaattcacacaggagagaaaccatttgaatgtagtgaatgtgggaaagcctttagcacaaagcaaaagctcattgtccatcaaaggactcatacaggagagagaccctatggctgtaacgagtgtgggaaagcgtttgcgtatatgtcgtgtctggttaagcataagagaatacacacaagggagaaacaagaggcagccaaggtggaaaatcctcctgcagagaggcacagctcattacacaccagtgatgtcatgcagg

SEQ ID NO: 44354 - DNA, 112 bp, Homo sapiens; identical to SEQ ID NO: 35542

SEQ ID NO: 44355 - DNA, 386 bp, Homo sapiens; identical to SEQ ID NO: 35543

SEQ ID NO: 44356 - DNA, 473 bp, Homo sapiens
gcgtccgagctgcttcatctgctgcccaggagccttccaggggaattagtcctcctctcttctctccccctcagcctttctctcgcctgccttctgagctgcactttccgtgggtgccttatgtggtggtggttgtgcccagcacagacctggcagggttcttgccgtggctcttcctcctccctcagcgaccagctctccctggaacgggagggacagggaattttttccccctctatgtacaaaaaaaaacaaagctctctttccttctctggtgatggtttggtaggattcttttgtctctggaagcagtgggactgaagttctcttcgtcctgtgcacacacagacacccccacacagttgggatcacaggctgacctgggcccatcccagctggagctttctgccagggtcctgggccttgactcccccaccctgcaggcctggcctgaatctggctttttagacaca

SEQ ID NO: 44357 - DNA, 343 bp, Homo sapiens; identical to SEQ ID NO: 35546

SEQ ID NO: 44358 - DNA, 415 bp, Homo sapiens; identical to SEQ ID NO: 35547

SEQ ID NO: 44359 - DNA, 457 bp, Homo sapiens; identical to SEQ ID NO: 35548

SEQ ID NO: 44360 - DNA, 336 bp, Homo sapiens; identical to SEQ ID NO: 35549

SEQ ID NO: 44361 - DNA, 268 bp, Homo sapiens; identical to SEQ ID NO: 35550

SEQ ID NO: 44362 - DNA, 377 bp, Homo sapiens
gtatacgactcactatagggcgaattgggccctctagatgcatgctcgagcggccgccagtgtgatggatatctgcagaattcgcccttagcgtggtcgcggccgaggtaccaacagccccttccctcccaagttaggtgagcccttgggccagtgtatgggcagaaaagcagatttgtgtccttcagaagggaaatgtaaaaaggtgaaagctctagttgaagggcagtgagaggggctggagtgggagagaaggtctctcctggccggtggtctgggtgcagcaagggcactctgagaaggcagaatggaaacgcagggctggaggggcatgggcacaggtttggaggctctttccagcctctactatgttgccc

SEQ ID NO: 44363 - DNA, 409 bp, Homo sapiens; identical to SEQ ID NO: 35552

SEQ ID NO: 44364 - DNA, 611 bp, Homo sapiens
cgtcctcggatccactagtaacggccgccagtgtgctggaattcggctttcgagcggccgcccgggcaggtttcagacaaaggtggctttgctttgttgaagttactgatataaagatcagcgcctgaaacagattctccgggatattaccggagacggagtgttttattattagcctttcttaggtggacatttccatttgaattaaaagtcctttaggctgggcgtggtgcatggctgtaatctcagcaccttgggaggctgaggcaggaagatcacttgaggccaggcgttggagagcagcctgggcaaggtggcaagaaccttgtctctacaaaaaaaaagcgtctgccatcatggatgttctcgcagaagcaaatggcacctttgccttaaaccttttgaaaacgctgggtaaagacaactcgaagaatgtgtttttctcacccatgagcatgtcctgtgccctggccatggtctacatgggggcaaagggaaacaccgctgcacagatggcccagatactttctttcaataaagtggcggtggtggagacatccaccagggctttcagtctcttttaccgaaatgaacaagactggcacgcagta

SEQ ID NO: 44365 - DNA, 408 bp, Homo sapiens; identical to SEQ ID NO: 35554

SEQ ID NO: 44366 - DNA, 426 bp, Homo sapiens; identical to SEQ ID NO: 35555

SEQ ID NO: 44367 - DNA, 427 bp, Homo sapiens; identical to SEQ ID NO: 35556

SEQ ID NO: 44368 - DNA, 231 bp, Homo sapiens; identical to SEQ ID NO: 35557

SEQ ID NO: 44369 - DNA, 425 bp, Homo sapiens; identical to SEQ ID NO: 35558

SEQ ID NO: 44370 - DNA, 179 bp, Homo sapiens; identical to SEQ ID NO: 38166

SEQ ID NO: 44371 - DNA, 426 bp, Homo sapiens; identical to SEQ ID NO: 35560

SEQ ID NO: 44372 - DNA, 564 bp, Homo sapiens
gactactatagggcgaatgggagctccaccgcggtggcggccgcccggcaggtacttactacaaagcttccaaaggaaaattgcctattaaatggatggctccagagtcaatcaattttcgacgttttacctcagctagtgacgtatggatgtttggtgtgtgtatgtgggagatactgatgcatggggaagccttttcaaggagtgaataacaatgatgtaatcggtcgaattgaaaatggggaaagattaccaatgcctccaaattgtcctcctaccctctacagccttatgacgaaatgctgggcctatgaccccagcaggcggcccaggtttactgaacttaaagctcagctcagcacaatcctggaggaagagaaggctcagcaagaagagcgcatgaggatggagtccagaagacaggccacagtgtcctgggactccggagggtctgatgaagcaccgcccaagcccagcagaccgggttatcccagtccgaggtccagcgaaggattttatcccagcccacaacacatggtacttttttttttttttttttttttt

SEQ ID NO: 44373 - DNA, 277 bp, Homo sapiens; identical to SEQ ID NO: 35562

SEQ ID NO: 44374 - DNA, 172 bp, Homo sapiens; identical to SEQ ID NO: 35563

SEQ ID NO: 44375 - DNA, 417 bp, Homo sapiens; identical to SEQ ID NO: 35564

SEQ ID NO: 44376 - DNA, 401 bp, Homo sapiens; identical to SEQ ID NO: 35565

SEQ ID NO: 44377 - DNA, 431 bp, Homo sapiens; identical to SEQ ID NO: 35566

SEQ ID NO: 44378 - DNA, 193 bp, Homo sapiens
ggagctccaccgcggtggcggctcgaggtacagatttttagtttgagaagatgaaaaagttctggagctggatgatggtgttggtagcacaacattatgaaggcacttaataccactgaactatatagacagttaaaatgacacatttggtgttatattttaccacaataaaatgtttttgattaaaaaacaa

SEQ ID NO: 44379 - DNA, 150 bp, Homo sapiens; identical to SEQ ID NO: 35570

SEQ ID NO: 44380 - DNA, 248 bp, Homo sapiens; identical to SEQ ID NO: 35571

SEQ ID NO: 44381 - DNA, 483 bp, Homo sapiens; identical to SEQ ID NO: 43492

SEQ ID NO: 44382 - DNA, 413 bp, Homo sapiens; identical to SEQ ID NO: 35573

SEQ ID NO: 44383 - DNA, 418 bp, Homo sapiens; identical to SEQ ID NO: 35574

SEQ ID NO: 44384 - DNA, 233 bp, Homo sapiens; identical to SEQ ID NO: 35575

SEQ ID NO: 44385 - DNA, 337 bp, Homo sapiens; identical to SEQ ID NO: 35576

SEQ ID NO: 44386 - DNA, 397 bp, Homo sapiens
gactcactatagggcgaattggagctccaccgcggtggcggccgcccgggcaggtacgcgggggagaacatcatgaaatccaacattgacaagaagttctctgcgcactacgacgcggtggaggcagagctcaagtccagcaccgtgggtctcgtgaccctgaatgacatgaaggccaagcaggaggctctggtgaaggagcgggagaagcagctggccaagaaggagcagtccaaggagctgcagatgaagctggagaagcttcgagagaaggagcgtaagaaggaagccaagcggaagatctccagcctgtccttcaccctggaggaggaagaagagggaggcgaggaggaagaggaggcggccatgtatgaggaggagatggaaagggaagaga

SEQ ID NO: 44387 - DNA, 518 bp, Homo sapiens
gactactatagggcgaattggagctccaccgcggtggcggccgaggtacgcggggaagcactgagcagaagctggaggcacaacgcaccagacactcacagcaaggatggagctgaaaacataacccactctgtcctggaggcactgggaagcctagagaaggctgtgagccaaggagggagggtcttcctttggcatgggatggggatgaagtaaggagagggactggaccccctggaagctgattcactatggggggaggtgtattgaagtcctccagacaaccctcagatttgatgatttcctagtagaactcacagaaataaagagctgttatactgtgaataaaaaaaacaaagagacaaaaaaaaataaggtccgatacggccaagggcatgctccccgaccccaagaacacgcacatcgtggtgagctggatgatcgcgcagaccgtgacggccgctctagaactagtggatcccccgggctgcaggaattcgatatcaagcttatcgata

SEQ ID NO: 44388 - DNA, 221 bp, Homo sapiens; identical to SEQ ID NO: 35579

SEQ ID NO: 44389 - DNA, 284 bp, Homo sapiens; identical to SEQ ID NO: 35580

SEQ ID NO: 44390 - DNA, 404 bp, Homo sapiens; identical to SEQ ID NO: 35581

SEQ ID NO: 44391 - DNA, 400 bp, Homo sapiens; identical to SEQ ID NO: 35582

SEQ ID NO: 44392 - DNA, 407 bp, Homo sapiens; identical to SEQ ID NO: 35583

SEQ ID NO: 44393 - DNA, 611 bp, Homo sapiens
ggtaccgggcccccccctcggggtacttctagaattaattaacgcgggtcgcatgccaccaagcacaagatccccgtgaagtacctggagttcatctcggaatgcatcatccaggttctgcagagcaagcatcccggggactttggtgctgatgcccagggggccatgaacaaggccctggagctgttccggaaggacatggcctccaactacaaggagctgggcttccagggctaggcccctgccgctcccacccccacccatctgggccccgggttcaagagagagcggggtctgatctcgtgtagccatatagagtttgcttctgagtgtctgctttgtttagtagaggtgggcaggaggagctgaggggctggggctggggtgttgaagttggctttgcatgcccagcgatgcgcctccctgtgggatgtcatcaccctgggaaccgggagtggcccttggctcactgtgttctgcatggtttggatctgaattaattgtcctttcttctaaatcccaaccgaacttcttccaacctccaaactggctgtaaccccaaatccaagccattaactacacctgacagtagcaattgtctgattaatcac

SEQ ID NO: 44394 - DNA, 307 bp, Homo sapiens; identical to SEQ ID NO: 35586

SEQ ID NO: 44395 - DNA, 412 bp, Homo sapiens; identical to SEQ ID NO: 35587

SEQ ID NO: 44396 - DNA, 420 bp, Homo sapiens; identical to SEQ ID NO: 35588

SEQ ID NO: 44397 - DNA, 402 bp, Homo sapiens; identical to SEQ ID NO: 35589

SEQ ID NO: 44398 - DNA, 415 bp, Homo sapiens; identical to SEQ ID NO: 35590

SEQ ID NO: 44399 - DNA, 408 bp, Homo sapiens; identical to SEQ ID NO: 35591

SEQ ID NO: 44400 - DNA, 312 bp, Homo sapiens
tccaccgcggtggcggccggcaccttggccgcgttcagagtgccgatgagctcccccagactctgcttccgcccgttcatcttccagtttcccccaacgaagaacttcctggagggcgccatggcgctggagccgaggcgctgaaggtcagtgtctgcccccgcgtacctcggccgctctagaactagtggatcccccgggctgcaggaattcgatatcaagcttatcgataccgtcgacctcgagggggggcccggtacccagcttttgttccctttagtgagggttaattgcgcgcttggcgtaatcatg

SEQ ID NO: 44401 - DNA, 174 bp, Homo sapiens; identical to SEQ ID NO: 35593

SEQ ID NO: 44402 - DNA, 453 bp, Homo sapiens
tacgactactatagggcgaattggagctccaccgcggtggcggccgcccgggcaggtacaccaaggcgaccacagcagctgcaacctcagcaatgaagatgaggaggaggatgaagaagaacgtcacgagggcacacttgctctcagtcttagcaccatagcagcccaggaaaccaagagcaaagaccacaacgccggctgcgatgaggaagtagcccacgttgacaaactgcatggcactggacgacagtggcccgaagatcttcagaaaggatgccccatcgattgacacccagatgcccactgccaacagggctgcaccacacagaaagatgagcaaattgaagaggatcatcatggtcttaatgaagctgaagcactgcatggtggctcctgttcagggctcttggcagtgagttctgaaagagggaactgctgaggctccacaaagga

SEQ ID NO: 44403 - DNA, 453 bp, Homo sapiens
tacgactcactatagggcgaattggagctccaccgcggtggcggccgcccgggcaggtacacgatagtggattggagtgcagggtcccagtaataagtgtaatgccagcttggggtcagtgaaggccagagacagcagattgggcctgacccccaccaaatcagcaagctcttccatggtatctatgtagtctccctgaatggtatggcgttggctctccacataccttttgtcaatttcctcttgagctttagatatttctgccatcatttcactctgtgagggcaatgtctttagacctttaaatacctgagtggcccagcgtccttggagctctgaaatgggcataatggctcctaagggctgaatcaagcctatgattgcaagagttggcctttccaggttaggagggaagacctttttatacagggatatcttgttttttgaccactt

SEQ ID NO: 44404 - DNA, 611 bp, Homo sapiens
tacgactactatagggcgaattggagctccaccgcggtggcggccgaggtacaaacgaaaggcaccggtgcttctggctcctttaaactcaacaagaaggcagcctccggggaagccaagcccaaggttaaaaaggcgggcggaaccaaacctaagaagccagttggggcagccaagaagcccaagaaggcggctggcggcgcaactccgaagaagagcgctaagaaaacaccgaagaaagcgaagaagccggccgctctagaactagtggatcccccgggctgcaggaattcgatatcaagcttatcgataccgtcgacctcgagggggggcccggtacccagcttttgttccctttagtgagggttaattgcgcgcttggcgtaatcatggtcatagctgtttcctgtgtgaaattgttatccgctcacaattccacacaacatacgagccgggagcataaagtgtaaagcctggggtgcctaatgagtgagctaactcacattaattgcgttgcgctcactgcccgctttccagtcgggaaacctgtcgtgccagctgcattaatgaatcggccaacgcgcggggagaggcggtttgcgtattgggcg

SEQ ID NO: 44405 - DNA, 396 bp, Homo sapiens; identical to SEQ ID NO: 36450

SEQ ID NO: 44406 - DNA, 620 bp, Homo sapiens; identical to SEQ ID NO: 35598

SEQ ID NO: 44407 - DNA, 402 bp, Homo sapiens; identical to SEQ ID NO: 35599

SEQ ID NO: 44408 - DNA, 655 bp, Homo sapiens; identical to SEQ ID NO: 35005

SEQ ID NO: 44409 - DNA, 438 bp, Homo sapiens; identical to SEQ ID NO: 35602

SEQ ID NO: 44410 - DNA, 419 bp, Homo sapiens
gcgaattggagctccaccgcggtggcggccggggaactcatcttctaacttcttcttgagctgaagatacttggacttgtagcctcaagcgccacaataaacgactcggacggcgagagccatggctcggggctgccacatccgctgaggagcccccgcgtacctcggccgctctagaactagtggatcccccgggctgcaggaattcgatatcaagcttatcgataccgtcgacctcgagggggggcccggtacccagcttttgttccctttagtgagggttaattgcgcgcttggcgtaatcatggtcatagctgtttcctgtgtgaaattgttatccgctcacaattccacacaacatacgagccgggagcataaagtgtaaagcctggggtgcctaatgagtgagctaactcaca

SEQ ID NO: 44411 - DNA, 480 bp, Homo sapiens; identical to SEQ ID NO: 35604

SEQ ID NO: 44412 - DNA, 517 bp, Homo sapiens; identical to SEQ ID NO: 35605

SEQ ID NO: 44413 - DNA, 438 bp, Homo sapiens; identical to SEQ ID NO: 35606

SEQ ID NO: 44414 - DNA, 388 bp, Homo sapiens
tgagctccaccgcggtggcggccgcccgggcaggacctgccctgccctctgctatgaaggtctctgccttgtggatcatgggactccccttggaggatctgtgcaaaggggggctgggcacaaaggagaatgtcctatttgggagggcaggaagcaaaggaactggacagggattggagggcttggggaacggaagtttatcttggatacccttgaagaggctgggtctcttcacatgaagatcgaaaagggaccctgcttccaatttccctcttccattccttgagctactccagggcttacaagaatgctcttggtctgagggtccagtggagtctgtcatccatctaagtgtggccactttcaagtgacaatcctctccttggcc

SEQ ID NO: 44415 - DNA, 258 bp, Homo sapiens; identical to SEQ ID NO: 35608

SEQ ID NO: 44416 - DNA, 652 bp, Homo sapiens; identical to SEQ ID NO: 40006
  misc_feature 13, 472: n = A,T,C or G

SEQ ID NO: 44417 - DNA, 346 bp, Homo sapiens; identical to SEQ ID NO: 35610

SEQ ID NO: 44418 - DNA, 448 bp, Homo sapiens; identical to SEQ ID NO: 35611

SEQ ID NO: 44419 - DNA, 428 bp, Homo sapiens; identical to SEQ ID NO: 35612

SEQ ID NO: 44420 - DNA, 444 bp, Homo sapiens; identical to SEQ ID NO: 35613

SEQ ID NO: 44421 - DNA, 455 bp, Homo sapiens; identical to SEQ ID NO: 35614

SEQ ID NO: 44422 - DNA, 349 bp, Homo sapiens; identical to SEQ ID NO: 35615

SEQ ID NO: 44423 - DNA, 457 bp, Homo sapiens; identical to SEQ ID NO: 35616

SEQ ID NO: 44424 - DNA, 437 bp, Homo sapiens; identical to SEQ ID NO: 35617

SEQ ID NO: 44425 - DNA, 455 bp, Homo sapiens; identical to SEQ ID NO: 35618

SEQ ID NO: 44426 - DNA, 449 bp, Homo sapiens; identical to SEQ ID NO: 35619

SEQ ID NO: 44427 - DNA, 429 bp, Homo sapiens; identical to SEQ ID NO: 35620

SEQ ID NO: 44428 - DNA, 475 bp, Homo sapiens
tacgactcactatagggcgaattggagctccaccgcggtggcggccgaggtacgcggggagtggcgggtgtgagagtccgtaaggagcagcttccaggatcctgagatccggagcagccggggtcggagcggctcctcaagagttactgatctatgaaatggcagagaatggaaaaaattgtgaccagagacgtgtagcaatgaacaaggaacatcataatggaaatttcacagacccctcttcagtgaatgaaaagaagaggagggagcgggaagaaaggcagaatattgtcctgtggagacagccgctcattaccttgcagtatttttctctggaaatccttgtaatcttgaaggaatggacctcaaaattatggcatcgtcaaagcattgtggtgtcttttttactgctgcttgctgtgcttatagctacgtattatgttgaaggagtgcatcaacagtatgtgcaacgtat

SEQ ID NO: 44429 - DNA, 444 bp, Homo sapiens; identical to SEQ ID NO: 35622

SEQ ID NO: 44430 - DNA, 455 bp, Homo sapiens; identical to SEQ ID NO: 35623

SEQ ID NO: 44431 - DNA, 499 bp, Homo sapiens
cctcactaatagggaacaaaagctggagctccaccgcggtggcggccgcccgggcaggtactgctcgcctccgttcttttgatgtaagcgccctgggagctttatttgaatgttcctgttcctcttccctttgtgccttccgcttctttccctttttggaaggtgctctgtcatctacatcttcttccagtgtttttctttgttcttcaggttttgcaaatatcttttcactcagtcccttggatattctgactgctgaaaactttttggctttggctttgtctagaaacttctgatatttggcaatcttctcatccagtgctttaataacggctttggtgtcgtttcccacattttcctcctcaggctccgaggaagactcttccgtatcatctctttgttgctcctgttcctcctcctcttcatcagaaaagctctcaagctcttcctcaagatctgacacctccacatgaaccaagtcatccccagaaaactgagg

SEQ ID NO: 44432 - DNA, 514 bp, Homo sapiens
acgactcactatagggcgaattggagctccaccgcggtggcggccgaggtactttttttttttttttttttttttgctgctccagtcaatgaaagggacactttattgaggctccagggccacggggcctgggcaggaggctgcccttcaaggaaagaaccaccttatttgaccttcttcttgggacgcaggttgttggtgtgaccacacttcttcttgcggcagttgacagcacgagggtgaaggcgagcatagcacttgcggcagatcatcttgtcgcagttgtatttctgggcaagctggcggagagaaggctcaataatgccacctcgcaggcgcaacaccaggtgcagggtggactctttctggatgttgtagtctgagagagtgcggccatcctccagctgtttgccggcaaatatcagacgctgctggtcaggtgggataccctccttgtcttgaattttggctttgacattctcaatggtgtcactgggctcgacctcaagggtga

SEQ ID NO: 44433 - DNA, 461 bp, Homo sapiens; identical to SEQ ID NO: 35626

SEQ ID NO: 44434 - DNA, 595 bp, Homo sapiens
  misc_feature 555: n = A,T,C or G
tacgactcactatagggcgaattggagctccaccgcggtggcggccgcccgggcaggtaccagctctggctggggtccgtgaagcccaggccaggcagccaaatcttgcctgtgctgggcatacaaccctctgcttccacatctctgagctatatcctcattagtgaaggtggcttttgctttatagtttgctgggagcacttaattcttcccatttcaaaaggtaatgttgcctggggcttaacccacctgccctttgggcaaggttgggacaaagccatctgggcagtcaggggcaaggactgttggaggagagttagcccaagtataggctctgcccagatgccatcacatccctgatactgtgtatgctttgaagcaccttccctgagaagggaagaggggatctttggactaggttcttggctccagacctggaatccacaaaagccaaaccagctcatttcaacaaaggagctccgatgtgaggggcaaggctgccccctgccccagggctcttcagaaagcatctgcatgtgaacaccatcatgcctntataaaggatccttattacaggaaaagcatgagtggtggc

SEQ ID NO: 44435 - DNA, 461 bp, Homo sapiens; identical to SEQ ID NO: 35628

SEQ ID NO: 44436 - DNA, 592 bp, Homo sapiens
  misc_feature 16: n = A,T,C or G
ccgggccccccctcgngaatacttctagaattaattaacgcggggaagacatgtctgctaaagagaaaggaaaatttgaagatatggcaaaagcggacaaggcccgttatgaaagagaaatgaaaacctatatccctcccaaaggggagacaaaaaagaagttcaaggatcccaatgcacccaagaggcctccttcggccttcttcctcttctgctctgagtatcgcccaaaaatcaaaggagaacatcctggcctgtccattggtgatgttgcgaagaaactgggagagatgtggaataacactgctgcagatgacaagcagccttatgaaaagaaggctgcgaagctgaaggaaaaatacgaaaaggatattgctgcatatcgagctaaaggaaagcctgatgcagcaaaaaagggagttgtcaaggctgaaaaaagcaagaaaaagaaggaagaggaggaagatgaggaagatgaagaggatgaggaggaggaggaagatgaagaagatgaagatgaagaagaagatgatgatgatgaataagttggttctagcgcagttttttttttcttgtctataaagcatttaac

SEQ ID NO: 44437 - DNA, 590 bp, Homo sapiens
ggccctctatatgctgctcgagcggccgccagtgtgatggatatctgcagaattcggcttagcgtggtcgcggccgaggtaccctctcatatatgcaaacaaatgcagactaggcctcaggcagagactaaaggacatctcttggggtgtcctgaagtgatttggacccctgagggcagacacctaagtaggaatcccagtgggaagcaaagccataaggaagcccaggattccttgtgatcaggaagtgggccaggaaggtctgttccagctcacatctcatctgcatgcagcacggaccggatgcgcccactgggtcttggcttccctcccatcttctcaagcagtgtccttgttgagccatttgcatccttggctccaggtggctccctcagtctggactctaccacttgggtctccagattttctgttacgtccttgtgggtcaggatatttctggaagtcactccgtgaggctggtaatcctcagacccagcttctggtcgactctggaatggactgaagctgggcaggatgatgagagccagggaaaaaagaagaatcaaaacacaagtgctggtctgggcagc

SEQ ID NO: 44438 - DNA, 473 bp, Homo sapiens
ctactatagggcgaattggagctccaccgcggtggcggccggctcgtcgttctatttttagtagagacggggtttctccacgttggccacgctggtctcgaactcctgaccacaaatgatccaccttcctgggcctcccaaagtgctggaaacgacaggcctgagccgccgggatttcagcctttaaagcgcgggccctgccacctttcgctgcggcccttacgctcagaatgacgtgtcctctctgccataggttgactccttgagtcccctaggccattgcactgtagcctgggcagcaagagccaaactccgtccccccacctccccgcgcacataataactaactaactaactaactaactaaaatctctacacgtcactcataagtgtgtgttcccgtgaggagtgatttctaagaaatggcactgtacctcggccgctctagaactagtggatcccccgggctgcag

SEQ ID NO: 44439 - DNA, 448 bp, Homo sapiens; identical to SEQ ID NO: 35632

SEQ ID NO: 44440 - DNA, 513 bp, Homo sapiens
cactacttagggcgaattggagctccaccgcggtggcggccgcccgggcaggtacctttttttttttttttttttttcctaattgctttattcagaagttgagaccacccagcagaggagctaggccagtccatctgcatttgtcacccaagaactcttaccatgaagaccctcctactgttggcagtgatcatgatctttggcctactgcaggcccatgggaattttggtgaatttccaagaatgatcaagttgacgacaggaaaggaagccgcactcagttatggcttctacggctgccactgtggcgtgggtggcagaggatcccccaaggatgcaacggatcgctgctgtgtcactcatgactgttgctacaaacgtctggagaaacgtggatgtggcaccaaatttctgagctacaagtttagcaactcggggagcagaatcacctgtgcaaaacaggactcctgcagaagtcaactgtgtgagtgtgataaggctgctgccacctgt

SEQ ID NO: 44441 - DNA, 461 bp, Homo sapiens; identical to SEQ ID NO: 35634

SEQ ID NO: 44442 - DNA, 465 bp, Homo sapiens; identical to SEQ ID NO: 35635

SEQ ID NO: 44443 - DNA, 452 bp, Homo sapiens; identical to SEQ ID NO: 35636
  misc_feature 322: n = A,T,C or G

SEQ ID NO: 44444 - DNA, 453 bp, Homo sapiens; identical to SEQ ID NO: 35637

SEQ ID NO: 44445 - DNA, 453 bp, Homo sapiens; identical to SEQ ID NO: 35638

SEQ ID NO: 44446 - DNA, 319 bp, Homo sapiens; identical to SEQ ID NO: 35639

SEQ ID NO: 44447 - DNA, 455 bp, Homo sapiens; identical to SEQ ID NO: 35640

SEQ ID NO: 44448 - DNA, 446 bp, Homo sapiens; identical to SEQ ID NO: 35641

SEQ ID NO: 44449 - DNA, 603 bp, Homo sapiens
  misc_feature 540: n = A,T,C or G
gggccccccctcgaaagtcttctagaattaattaacgcggggggaatccagaagggaaacaagcactggataattaaaaacagctggggagaaaactggggaaacaaaggatatatcctcatggctcgaaataagaacaacgcctgtggcattgccaacctggccagcttccccaagatgtgactccagccagccaaatccatcctgctcttccatttcttccacgatggtgcagtgtaacgatgcactttggaagggagttggtgtgctatttttgaagcagatgtggtgatactgagattgtctgttcagtttccccatttgtttgtgcttcaaatgatccttcctactttgcttctctccacccatgacctttttcactgtggccatcaggactttccctgacagctgtgtactcttaggctaagagatgtgactacagcctgcccctgactgtgttgtcccagggctgatgctgtacaggtacaggctggagattttcacataggttagattctcattcacgggactagttagctntaagcaccctagaggactagggtaatctgacttctcacttcctaaagtcccttctatatcctc

SEQ ID NO: 44450 - DNA, 151 bp, Homo sapiens; identical to SEQ ID NO: 35643
  misc_feature 92, 109: n = A,T,C or G

SEQ ID NO: 44451 - DNA, 216 bp, Homo sapiens; identical to SEQ ID NO: 35644

SEQ ID NO: 44452 - DNA, 228 bp, Homo sapiens; identical to SEQ ID NO: 35645

SEQ ID NO: 44453 - DNA, 471 bp, Homo sapiens; identical to SEQ ID NO: 35646

SEQ ID NO: 44454 - DNA, 569 bp, Homo sapiens; identical to SEQ ID NO: 35647

SEQ ID NO: 44455 - DNA, 315 bp, Homo sapiens
ggagctccaccgcggtggcggccgcccgggcaggtacatttcccctctgcgttgaatgatagcgtgtgcgtgttccaccactgtgccctactcaaagttagctgggtggctgtgccctgctcaaagtcacttgggtgaggggcgcccgtgggagccaaaaatcccatcttacacccaccccctgcacactctggagttgggctgtgacatgctggagaaaggtgtctttgtctaattattctgcctaagggcatgccttttgttaattagtaaaaggaagccttatttgtgctctgcagagtgggggtgctgttt

SEQ ID NO: 44456 - DNA, 464 bp, Homo sapiens; identical to SEQ ID NO: 35649

SEQ ID NO: 44457 - DNA, 522 bp, Homo sapiens
gactcactatagggcgaattggagctccaccgcggtggcggccgcccgggcaggtactccttgacagttgatagattatatattctttcatccctcaaacttgcattccactatatttattttttggcaaaagatgagctgtatttgtttgaaatctgagacactatgttcaattggatgtatctgttcaaatttattcccacgtgacgtggaagtccttcgttggatgtcacaacactacatttaaggttggtaaggatgacttggaggtccatggttttcattaccaacattttaagattctgaatgtcgatggagtctcactgaagagtcaccaaaggtgcctgccctcctcccctgctgggaagtgtcagttggaggctgtcccaagggtgctgaagaatccagtggcaggggttctggctgctttccatctgagtgtgggatgggaggggtgttcatgatcatttggatatagcattctactctgagaaatggaacacaaggagttacctatcactt

SEQ ID NO: 44458 - DNA, 476 bp, Homo sapiens; identical to SEQ ID NO: 35651
  misc_feature 210: n = A,T,C or G

SEQ ID NO: 44459 - DNA, 595 bp, Homo sapiens
  misc_feature 11: n = A,T,C or G
cccccctcggnagtcttctagaattaattaacgcgggggaacacgccgcggtcctcgtcgtggtgagcgcacccactcaggctggtcctgggggtggggctgtaggggaaagtgctaaagccgctgagtgaagtaagaactctgctagagaggaaatggctgcttcatcatcatcctcctcagctggtggggtcagtggaagttctgtcactggatctggtttcagtgtctcagaccttgccccaccacggaaagcccttttcacctaccccaaaggagctggagagatgttagaagatggctctgagagattcctctgcgaatctgtttttagctatcaagtggcatccacgcttaaacaggtgaaacatgatcagcaagttgctcggatggaaaaactagctggtttggtagaagagctggaggctgacgagtggcggtttaagcccatcgagcagctgctgggattcaccccctcttcaggttgatactgcctggatggtcacctctggtgcgcagcaagtgcaaagccagtgggggactttctcacagcttacatagccatccagagatccacagctacgtcactgaattg

SEQ ID NO: 44460 - DNA, 458 bp, Homo sapiens; identical to SEQ ID NO: 35653

SEQ ID NO: 44461 - DNA, 585 bp, Homo sapiens
tacgactcactatagggcgaattgggccctctagatgcatgctcgagcggccgccagtgtgatggatatctgcagaattcgcccttagcgtggtcgcggccgaggtactttattttttttttgttttattgggagatggaatctcactctgtcgcccaggctggagcgcactggcgcgacttggctcactgcaacctccacctcctgggttcaagcgattctcttgcctcagcttcccgagtagctgggattacaggcgcccgccaccacgcccagttaattctttgtatttttagtagagacggggtttcaccatcttggccaggctggtctcgaactcctgacctcgtgatccacccgcctcggcctcccaaagtgctgggattacaggcgtgagctaccgcgcccggccctaacacagaacttttctaacttaacttttggagaagaaaatagaaaaccaaacccagaggacagctgtgtaaggtatttactcctcagcattaggcaaaggagtcctacagcactcttacatgtcattctatttcaacagatgattcaactggtcctgtagatccgatgact

SEQ ID NO: 44462 - DNA, 474 bp, Homo sapiens; identical to SEQ ID NO: 35655

SEQ ID NO: 44463 - DNA, 337 bp, Homo sapiens; identical to SEQ ID NO: 35656
  misc_feature 232, 247, 303: n = A,T,C or G

SEQ ID NO: 44464 - DNA, 569 bp, Homo sapiens
actatagggcgaattggagctccaccgcggtggcggccgcccgggcaggtacgcgggagatccgtgcactgccttcagctctgggttgaacttacagctggactagaggatgggaaggcatcaaaaggaacccagcccaccaggaactaccagctaggctctgaccaggaaagacaagtgttccaaaaggctttggggaaacttaaacccaacacgccatttgccgcgacgtcttcaatgggtttggaaacagaggaacaggagcccagcatcatcgggaagctgaaggtcgctggcatgctggcagtaggcaaagaagtcaacctggtcctactgctcaaaaacctgagcagggatacgaagacagtgacagtgaacatgacagcctggaccatcatctacaacggcacgcttgtacctcggccgctctagaactagtggatcccccgggctgcaggaattcgatatcaagcttatcgataccgtcgacctcgagggggggcccggtacccagcttttggtccctttagtgagggttaattgcgcgcttggcgtaatcatggtcatag

SEQ ID NO: 44465 - DNA, 509 bp, Homo sapiens; identical to SEQ ID NO: 35658
  misc_feature 24, 25, 26, 27, 28, 29, 342, 343, 344, 345: n = A,T,C or G

SEQ ID NO: 44466 - DNA, 390 bp, Homo sapiens; identical to SEQ ID NO: 35659

SEQ ID NO: 44467 - DNA, 612 bp, Homo sapiens
  misc_feature 487, 488, 491, 492, 493, 520: n = A,T,C or G
cgggccccccctcgaaagtcttctagaattaattaacgcgggggtcctgttctacagctatggtcgggccagctgcagctttccgccgcttgggcgccttgtccggagctgcggccttaggcttcgcttcctacggggcgcacggcgcccaattcccagatgcttacgggaaggagctgtttgacaaggccaacaaacaccacttcttacacagcctggccctgttaggggtgccccattgcagaaagccactctgggctgggttattgctagcttccggaacgaccttattctgcaccagcttttactaccaggctctgagtggagaccccagcatccagactttggcccctgcgggagggaccctgctactcttgggctggcttgccttggctctttgagctcccttttgcttaattactgggttttctgggcagtttttttttaaagagttggagtaagaagaggattaaaaaggaaaggcaannttnnnataaaaaatataaaaaaaaaaaaaaanaaaaggttaaaaaaaaaaaaaaagcggccgccaccgcggtggagctccaattcgccctatagtgagtcgtattacgcgcgctcactggccgt

SEQ ID NO: 44468 - DNA, 361 bp, Homo sapiens; identical to SEQ ID NO: 35661
  misc_feature 128: n = A,T,C or G

SEQ ID NO: 44469 - DNA, 520 bp, Homo sapiens; identical to SEQ ID NO: 35662
  misc_feature 207, 216: n = A,T,C or G

SEQ ID NO: 44470 - DNA, 431 bp, Homo sapiens; identical to SEQ ID NO: 35663
  misc_feature 101: n = A,T,C or G

SEQ ID NO: 44471 - DNA, 463 bp, Homo sapiens; identical to SEQ ID NO: 35664

SEQ ID NO: 44472 - DNA, 371 bp, Homo sapiens
tatagggcgaattggagctccaccgcggtggcggccgagagctaattccctcttggcttcaaaatccatcctatgcttggagatgctggggctgggattctacaaaccacattctggctttgtgccctgataggctcagcccccagggggagctagaaggaatctgctaggctaaaggaggaagtaggaagtggccccttgctcacttcctgtttgcttcctgttcactttctatcagcttcctgtcccttgccagacaggttgctaaccctagcagtgctttttcttcacccaggcagtggcaactcctcccagaaacatttcaatgcagtttttggtttttccaacactcacaaaagcagccttatggg

SEQ ID NO: 44473 - DNA, 531 bp, Homo sapiens
gaattgggccctctagagcatgctcgagcggccgccagtgtgatggatatctgcagaatttcgagcggccgcccgggcaggtacacctgcaaggctgtcaacagtcttggagaagccacctgcacagcagagctcattgtggaaacgatggaggaaggtgaaggggaaggggaagaggaagaagagtgaaacaaagccagagaaaagcagtttctaagtcatattaaaaggactatttctctaaaactcaaaaaaaaaaaaactcaagatagtaaaagcacctagtgtgatagattatcggttaggtcatttgtgggttgattcttcagaaacagcagttgatacctagcagcgttattgatgggcattaatctatgttagttggcaccttaagatactagtgcagctagatttcatttagggaaatcaccagtaacttgactgaccaattgattttagagagaaagtaaccaaaccaaatatttatctgggcaaagtcataaattctccacttgaatgcgctcatgaaaa

SEQ ID NO: 44474 - DNA, 445 bp, Homo sapiens; identical to SEQ ID NO: 35667

SEQ ID NO: 44475 - DNA, 471 bp, Homo sapiens; identical to SEQ ID NO: 35668

SEQ ID NO: 44476 - DNA, 221 bp, Homo sapiens; identical to SEQ ID NO: 35669

SEQ ID NO: 44477 - DNA, 565 bp, Homo sapiens
ctcactatagggtcgaattgggccctctatatgcatgctcgagcggccgccagtgtgatggatatctgcagaattcggctttcgagcggccgcccgggcaggtacctgatctacctgaaatttaaggcaacctacgatggaaatcatgataccttccgagtggagtttctggtggtccctgtgggaggcctctcatttttagttaatcacgatttctctcctcttgagatcctctggaccttctccatctacctggagtccgtggctatccttccgcagctgtttatgatcagcaagactggggaggccgagaccatcaccacccactacctgttcttcctgggcctctatcgtgctttgtatcttgtcaactggatctggcgcttctactttgagggcttctttgacctcattgctgtggtggccggcgtagtccagaccatcctatactgtgacttcttctacttgtacctcggccgcgaccacgctaagccgaattccagcacactggcggccgttactagtggatccgagctcggtaccaagcttggcgtaatcatggtca

SEQ ID NO: 44478 - DNA, 414 bp, Homo sapiens
  misc_feature 341, 360: n = A,T,C or G
tatagggcgaattgggccctctagatgcatgctcgagcggccgccagtgtgatggatatctgcagaattcggcttagcgtggtcgcggccgaggtacagattagtgtgcacagagatctctgtagaaagagtagctgccctttctcagggcagatgatgctttgagaacatactttggccattacccccagctttgaggaaaatgggctttggatgattattttatgttttagggacccccaacctcaggcaattcctacctcttcacctgaccctgcccccacttgccataaaacttagctaagttttgttttgtttttcagcgttaatgtaaaggggcnagcagtgccaaaatataantcagagataaagcttaggtccaaaggttcataaggagtttcccatggaactata

SEQ ID NO: 44479 - DNA, 463 bp, Homo sapiens; identical to SEQ ID NO: 35672

SEQ ID NO: 44480 - DNA, 523 bp, Homo sapiens; identical to SEQ ID NO: 35674

SEQ ID NO: 44481 - DNA, 348 bp, Homo sapiens; identical to SEQ ID NO: 35675

SEQ ID NO: 44482 - DNA, 622 bp, Homo sapiens; identical to SEQ ID NO: 35676

SEQ ID NO: 44483 - DNA, 602 bp, Homo sapiens; identical to SEQ ID NO: 35677

SEQ ID NO: 44484 - DNA, 524 bp, Homo sapiens; identical to SEQ ID NO: 35678

SEQ ID NO: 44485 - DNA, 606 bp, Homo sapiens; identical to SEQ ID NO: 35679

SEQ ID NO: 44486 - DNA, 425 bp, Homo sapiens; identical to SEQ ID NO: 35680

SEQ ID NO: 44487 - DNA, 451 bp, Homo sapiens; identical to SEQ ID NO: 35681

SEQ ID NO: 44488 - DNA, 574 bp, Homo sapiens
ggcgaattgggccctctagatgcatgctcgagcggccgccagtgtgatggatatctgcagaattcggcttagcgtggtcgcggccgaggtacatgaggacgtggatgaagctattaagtgtggcaccaaaataagagtggccgcaggggacccagttcatcacaaaccaccagatgttcagcatcgaggcatggtggtagacgtgcaggaccgtgatctggtggttgttcttgcgcaggatgaagaagaaagtgtccataaattctatgagtttggagaagtagtacctgcccgggcggccgctcgaagccgaattccagcacactggcggccgttactagtggatccgagctcggtaccaagcttggcgtaatcatggtcatagctgtttcctgtgtgaaattgttatccgctcacaattccacacaacatacgagccggaagcataaagtgtaaagcctggggtgcctaatgagtgagctaactcacattaattgcgttgcgctcactgcccgctttccagtcgggaaacctgtcgtgccagctgcattaatgaatcggccaacgcgcgggg

SEQ ID NO: 44489 - DNA, 718 bp, Homo sapiens; identical to SEQ ID NO: 35683
  misc_feature 554, 625: n = A,T,C or G

SEQ ID NO: 44490 - DNA, 446 bp, Homo sapiens; identical to SEQ ID NO: 35684

SEQ ID NO: 44491 - DNA, 429 bp, Homo sapiens; identical to SEQ ID NO: 35685

SEQ ID NO: 44492 - DNA, 452 bp, Homo sapiens; identical to SEQ ID NO: 35686

SEQ ID NO: 44493 - DNA, 499 bp, Homo sapiens
cgacccacgcgtccggtttcagacgagcttgcccatgtggagaaagccagccgagtttctgctgaaaacttgcaaaagaacctagatcagatgaagaaacaaatttctgatgtggaacgtgatgttcagaatttcccagctgccacagatgaaaaagacaagtttgttgaaaaaatgaccagctttgtgaaggatgcacaggaacagtataacaagctgcggatgatgcattctaacatggagaccctctataaggagctgggcgagtacttcctctttgaccccaagaagttgtctgttgaagaatttttcatggatcttcacaattttcggaatatgtttttgcaagcagtcaaggagaaccagaagcggcgggagacagaagaaaagatgaggcgagcaaaactagccaaggagaaggcagagaaggagcggctagagaagcagcagaagagagagcaactcatagacatgaatgcagagggcgatgagacaggtg

SEQ ID NO: 44494 - DNA, 446 bp, Homo sapiens; identical to SEQ ID NO: 35688

SEQ ID NO: 44495 - DNA, 409 bp, Homo sapiens
agggcgaattggagctccaccgcggtggcggccgcccgggcaggtaccaggccgcccattgtgtccttgcccaggaccccgagaaccaggcgctggcgaggttttactgctacactgagaggaccattgcgaagcggctcgtcttgcggcgagatccctcggtgaagaggactctctgtcgaggctgctcttccctcctcgtcccgggcctcacctgcacccagcgccagagacgctgcaggggacagcgctggaccgtacctcggccgctctagaactagtggatcccccgggctgcaggaattcgatatcaagcttatcgataccgtcgacctcgagggggggcccggtacccagcttttgttccctttagtgagggttaattgcgcgcttggcgtaatcatggtca

SEQ ID NO: 44496 - DNA, 447 bp, Homo sapiens; identical to SEQ ID NO: 35690

SEQ ID NO: 44497 - DNA, 478 bp, Homo sapiens; identical to SEQ ID NO: 35691

SEQ ID NO: 44498 - DNA, 455 bp, Homo sapiens; identical to SEQ ID NO: 35692

SEQ ID NO: 44499 - DNA, 289 bp, Homo sapiens; identical to SEQ ID NO: 35693

SEQ ID NO: 44500 - DNA, 445 bp, Homo sapiens; identical to SEQ ID NO: 35694

SEQ ID NO: 44501 - DNA, 303 bp, Homo sapiens; identical to SEQ ID NO: 35695

SEQ ID NO: 44502 - DNA, 436 bp, Homo sapiens; identical to SEQ ID NO: 35696
  misc_feature 32: n = A,T,C or G

SEQ ID NO: 44503 - DNA, 638 bp, Homo sapiens; identical to SEQ ID NO: 35697

SEQ ID NO: 44504 - DNA, 509 bp, Homo sapiens; identical to SEQ ID NO: 35698
  misc_feature 481: n = A,T,C or G

SEQ ID NO: 44505 - DNA, 506 bp, Homo sapiens
atacgactactatagggcgaattggagctccaccgcggtggcggccgaggtacttttttctttttgctaggaatgggaagaatttccagcacagacagggtttcaccatgttggccaggctggtctcgaactcctgacctcaactgatccacccaccttggcctcccaaagtgctggtattacaggtgtaagccacgcacccagccaatataggacatattttagttatataagttcattctgctttgtccagtaaagcaatgtaatctatcctaccagtaagtacgagactacctacacagtagtgaaagatctagccatttcaagaggtcaagggacaattctgtaaataaattgcatctaagtggttccttactactcacaacatgctctaatagtgtgaagaaattaattcttatcccaaagaatatacttttcctagtaatgataggcttcatataattggaatttaagaatgctttaacaattctaccatcccgcgtacc

SEQ ID NO: 44506 - DNA, 516 bp, Homo sapiens; identical to SEQ ID NO: 35700

SEQ ID NO: 44507 - DNA, 569 bp, Homo sapiens; identical to SEQ ID NO: 35701
  misc_feature 398: n = A,T,C or G

SEQ ID NO: 44508 - DNA, 471 bp, Homo sapiens; identical to SEQ ID NO: 35702
  misc_feature 42: n = A,T,C or G

SEQ ID NO: 44509 - DNA, 521 bp, Homo sapiens; identical to SEQ ID NO: 35703
  misc_feature 352: n = A,T,C or G

SEQ ID NO: 44510 - DNA, 635 bp, Homo sapiens; identical to SEQ ID NO: 35704

SEQ ID NO: 44511 - DNA, 686 bp, Homo sapiens; identical to SEQ ID NO: 35705

SEQ ID NO: 44512 - DNA, 461 bp, Homo sapiens; identical to SEQ ID NO: 35706

SEQ ID NO: 44513 - DNA, 447 bp, Homo sapiens; identical to SEQ ID NO: 35707

SEQ ID NO: 44514 - DNA, 446 bp, Homo sapiens; identical to SEQ ID NO: 35708

SEQ ID NO: 44515 - DNA, 443 bp, Homo sapiens; identical to SEQ ID NO: 35709

SEQ ID NO: 44516 - DNA, 442 bp, Homo sapiens; identical to SEQ ID NO: 35710

SEQ ID NO: 44517 - DNA, 414 bp, Homo sapiens
gcgccccgcgtccggttgctttttgttttgttttgtttgagatggagtttcactgttgcccaggctggggtgcaatggtgcgatcttggctcactgcagcctgcacctcccgagttcaaacgattctcctgcctcagcttcctgagtcgctgggattacaggtgcatgccaccatgcccggctattttttatatttttattagagacgggatttcgccatgttaaccaggctggacttgaactcctgacctcaggtgatctgcccgccttggcctcccaaagtgctgggattacaggcatgagccaccatgccgggccttattggcttagtttttaaactatcctccaaaaatttggggcctttttctgcggggaaacaagtgaagctgctctttagcatagacactaccttta

SEQ ID NO: 44518 - DNA, 452 bp, Homo sapiens; identical to SEQ ID NO: 43642

SEQ ID NO: 44519 - DNA, 446 bp, Homo sapiens
actactatagggcgaattggagctccaccgcggtggcggccgcataatttaataacatcgtccttccatttggccgcgactgctctggaaaattggttcagtagtaaacagaattctagcaggtggaacaagaacaggcgaggcatcctgggcctggtctctcctggaggtctgggtgttgcagcctttcaggactgcggctgctgtggcctacacacctgggcctgtgtccccgcgtacctcggccgctctagaactagtggatcccccgggctgcaggaattcgatatcaagcttatcgataccgtcgacctcgagggggggcccggtacccagcttttgttccctttagtgagggttaattgcgcgcttggcgtaatcatggtcatagctgtttcctgtgtgaaattgttatccgctcacaattccacacaacatacgagccg

SEQ ID NO: 44520 - DNA, 191 bp, Homo sapiens; identical to SEQ ID NO: 35714

SEQ ID NO: 44521 - DNA, 511 bp, Homo sapiens
ggcgaattgggccctctagatgcatgctcgagcggccgccagtgtgatggatatctgcagaattcggcttagcgtggtcgcggccgaggtacacaaaacccattaataatgtagtatagagaccaaaatgtaaagagagatagaatacattactgatgtgtggattaattcaagttcaggcatctacttgtgttacagcacagctgtcaaaaggcgataatgagtaaatcataaaacgggtttgtttcttcccacattattctataaatggacaccgatgggtagtgaagcaatggttttgctgtccaacttcagaggctgctgtggcgggggtctagttctgcatctgctcaaagaacttgtaggttggattttcgtagccgttctgctgcatcttggacaggtggcgctcctctggggtgacagcggcgtcaacctccaccacaccatgatgaatggatgtgtacctgcccgggcggccgctcgaaagccgaattccagcacactggcg

SEQ ID NO: 44522 - DNA, 443 bp, Homo sapiens; identical to SEQ ID NO: 35716

SEQ ID NO: 44523 - DNA, 557 bp, Homo sapiens; identical to SEQ ID NO: 35717
  misc_feature 63: n = A,T,C or G

SEQ ID NO: 44524 - DNA, 435 bp, Homo sapiens; identical to SEQ ID NO: 35718

SEQ ID NO: 44525 - DNA, 558 bp, Homo sapiens; identical to SEQ ID NO: 35719

SEQ ID NO: 44526 - DNA, 438 bp, Homo sapiens; identical to SEQ ID NO: 35720

SEQ ID NO: 44527 - DNA, 461 bp, Homo sapiens; identical to SEQ ID NO: 32172

SEQ ID NO: 44528 - DNA, 522 bp, Homo sapiens; identical to SEQ ID NO: 35722

SEQ ID NO: 44529 - DNA, 391 bp, Homo sapiens; identical to SEQ ID NO: 35723

SEQ ID NO: 44530 - DNA, 340 bp, Homo sapiens; identical to SEQ ID NO: 35724

SEQ ID NO: 44531 - DNA, 536 bp, Homo sapiens; identical to SEQ ID NO: 35725

SEQ ID NO: 44532 - DNA, 485 bp, Homo sapiens; identical to SEQ ID NO: 33422

SEQ ID NO: 44533 - DNA, 473 bp, Homo sapiens; identical to SEQ ID NO: 35728
  misc_feature 335: n = A,T,C or G

SEQ ID NO: 44534 - DNA, 447 bp, Homo sapiens
actatagggcgaattggagctccaccgcggtggcggccgaggtactgtttgtcctgcatccggcagtggcggtgtgccaaacagtttgaaaacccaatcattaagtcttgtccagaatgccgtgtgatatcagagtttgtaattccaagtgtgtattgggtggaagatcagaataaaaagaacgagttgattgaagctttcaaacaggggatggggaaaaaagcctgtaaatactttgagcaaggcaaggggacctgcccatttggaagcaaatgtctttatcgccatgcttaccccgatgggcggctagcagagcctgagaaacctcggaaacagctcagttctcaaggcactgtgaggttctttaattcagtgcggctctgggatttcatcgagaaccgagaaagccggcatgtccccaacaatgaagatgtcgacatgacagag

SEQ ID NO: 44535 - DNA, 389 bp, Homo sapiens; identical to SEQ ID NO: 35730

SEQ ID NO: 44536 - DNA, 413 bp, Homo sapiens; identical to SEQ ID NO: 35731

SEQ ID NO: 44537 - DNA, 541 bp, Homo sapiens
tccgcgctcgttcgctccccctcggaaagctgcgaaagtgctttggcggtttgtccatccgcagcttcggcttttccagtctggtggcccttccggccacccctttaaccccagctttccctcccccttctttcgatcagagatcggcggagaccctcgaagtgcgcaaacttgacactcaccctgaccggactggggttttaaggggtgtggcaggaggttttggactcgatgagtttccaccgaaatgtcggagaagtcaggccagagcacaaaagcaaaggatgggaaaaagtatgcaacactcagtttatttaatacttacaaggggaaatcattagaaacacagaaaaccacagttgcagctcgacatggattacagagtcttggaaaagtcggtatttcacggcgtatgcctccacctgctaacctcccaagtcttaaagcagaaaacaaaggcaatgatcctaatgtaaacattgtacctaaagatggcacagggtgggcatcaaaacaagagcaacatgaagaaaaaaaaaca

SEQ ID NO: 44538 - DNA, 400 bp, Homo sapiens
cgtatacgactcactatagggcgaattggagctccaccgcggtggcggccgtgagcagtgagagagctgacgggcagagcagactgcatgacagcaaagggcaggccaaactcctgcagctgctgaccaccaaatctgatcagatggagccctcgcccttagccagctctttgtcggatacaaacaaagactccgcaggtagcttgcctggttctgggtctacacatggaacctcgctcaaggagaagcataaaattttgcacagactcttgcaggacagcagttcccctgtggacttggccaagttaacagcagaagccacaggcaaagacctgagccaggagtccagcagcacagctcctggatcagaagtgactattaaacaagagccggtgagccc

SEQ ID NO: 44539 - DNA, 439 bp, Homo sapiens; identical to SEQ ID NO: 35734

SEQ ID NO: 44540 - DNA, 632 bp, Homo sapiens
tgctcgagcggccgccagtgtgatggatatctgcagaattcgccctttcgagcggccgcccgggcaggtacctcattagtaattgttttgttgtttcatttttttctaatgtctcccctctaccagctcacctgagataacagaatgaaaatggaaggacagccagatttctcctttgctctctgctcattctctctgaagtctaggttacccattttggggacccattataggcaataaacacagttcccaaagcatttggacagtttcttgttgtgttttagaatggttttcctttttcttagccttttcctgcaaaaggctcactcagtcccttgcttgctcagtgggctgggctccccagggcctaggctgccttcttttccatgtcccacccatgagccctccactggacagctcagtaagcctggcccttcattctgcgctgtgttcttcctctgtgaaaatccaatacctcttacctcctctgcatgcaaagattctcaaggattgtcagacttcaaacgtaacagcagaaccaccagaaggtcctataaatgcagtagtgaccttctcaagctgtcaggtctttaaataggaattgggatttaatgctatgtatttttaaagga

SEQ ID NO: 44541 - DNA, 279 bp, Homo sapiens; identical to SEQ ID NO: 35736

SEQ ID NO: 44542 - DNA, 477 bp, Homo sapiens; identical to SEQ ID NO: 35737

SEQ ID NO: 44543 - DNA, 477 bp, Homo sapiens; identical to SEQ ID NO: 35738

SEQ ID NO: 44544 - DNA, 480 bp, Homo sapiens; identical to SEQ ID NO: 35216
  misc_feature 393: n = A,T,C or G

SEQ ID NO: 44545 - DNA, 315 bp, Homo sapiens; identical to SEQ ID NO: 35740

SEQ ID NO: 44546 - DNA, 407 bp, Homo sapiens; identical to SEQ ID NO: 35741

SEQ ID NO: 44547 - DNA, 426 bp, Homo sapiens; identical to SEQ ID NO: 35742

SEQ ID NO: 44548 - DNA, 473 bp, Homo sapiens; identical to SEQ ID NO: 35743

SEQ ID NO: 44549 - DNA, 460 bp, Homo sapiens; identical to SEQ ID NO: 35744

SEQ ID NO: 44550 - DNA, 468 bp, Homo sapiens; identical to SEQ ID NO: 35745

SEQ ID NO: 44551 - DNA, 471 bp, Homo sapiens; identical to SEQ ID NO: 35746

SEQ ID NO: 44552 - DNA, 446 bp, Homo sapiens; identical to SEQ ID NO: 35747

SEQ ID NO: 44553 - DNA, 455 bp, Homo sapiens; identical to SEQ ID NO: 35748

SEQ ID NO: 44554 - DNA, 554 bp, Homo sapiens
ctatagggcgaattggagctccaccgcggtggcggccgcttttttttttttttttttttttttttaacttttgacagagactagatcttgctatgttgctgaggttgctcttgaactcctgggctcaaagaatcctctcatttcagcctcttcaactgctggtattacaagcatgagccaccatatgggctggaagctgatttttaaaatactgagaccatatagatgacagcacccagagaaacagaaatattaactgaagttgttgctggcagaccattctttctttccacctttctttcttcctccctccccctcctccatctttttacttttcgtcctcttcctttctcttctttctctccttcattatccctttcactgtttctctttctccctttcttttttcttttctttcccccgcgttaattaatttctagaagtactctcgagggggggcccggtacccaacttttgttccctttaatgagggttaattgcgcgcttggggtaatcatggtcatagctggttcctgtgggaaattgttatccgc

SEQ ID NO: 44555 - DNA, 446 bp, Homo sapiens; identical to SEQ ID NO: 35751

SEQ ID NO: 44556 - DNA, 395 bp, Homo sapiens
tccaccgcggtggcggccgcccgggcaggtacgcggggctctctttcactgcaaggcggcggcaggagaggttgtggtgctagtttctctaagccatccagtgccatcctcgtcgctgcagcgacacacgctctcgccgccgccatgactgagtagatgacccttcgtggcaccctcaagggccacaacggctgggtaacccagatcgctactaccccgcagttcccggacatgatcctctccgcctctcgagataagaccatcatcatgtggaaactgaccagggatgagaccaactatggaattccacagcgtgctctgcggggtcactcccactttgttagtgatgtggttatctcctcagatggccagtttgccctctcaggctcctggga

SEQ ID NO: 44557 - DNA, 171 bp, Homo sapiens; identical to SEQ ID NO: 35753

SEQ ID NO: 44558 - DNA, 215 bp, Homo sapiens; identical to SEQ ID NO: 35754

SEQ ID NO: 44559 - DNA, 440 bp, Homo sapiens; identical to SEQ ID NO: 35755

SEQ ID NO: 44560 - DNA, 220 bp, Homo sapiens; identical to SEQ ID NO: 35756

SEQ ID NO: 44561 - DNA, 430 bp, Homo sapiens; identical to SEQ ID NO: 35757

SEQ ID NO: 44562 - DNA, 431 bp, Homo sapiens; identical to SEQ ID NO: 35758

SEQ ID NO: 44563 - DNA, 343 bp, Homo sapiens; identical to SEQ ID NO: 35759

SEQ ID NO: 44564 - DNA, 466 bp, Homo sapiens
ctactatagggcgaattggagctccaccgcggtggcggccgcccgggcaggtacgcggggtttcatcctgaagacacaggccaggtatttcaggtcagccacagcttcccacacccgctctacgatatgagcctcctgaagaatcgattcctcaggccaggtgatgactccagccacgacctcatgctgctccgcctgtcagagcctgccgagctcacggatgctgtgaaggtcatggacctgcccacccaggagccagcactggggaccacctgctacgcctcaggctggggcagcattgaaccagaggagttcttgaccccaaagaaacttcagtgtgtggacctccatgttatttccaatgacgtgtgtgcgcaagttcaccctcagaaggtgaccaagttcatgctgtgtgctggacgctggacagggggcaaaagcacctgctcgggtgattctgggggcc

SEQ ID NO: 44565 - DNA, 445 bp, Homo sapiens; identical to SEQ ID NO: 35761

SEQ ID NO: 44566 - DNA, 331 bp, Homo sapiens; identical to SEQ ID NO: 35762

SEQ ID NO: 44567 - DNA, 454 bp, Homo sapiens; identical to SEQ ID NO: 35763

SEQ ID NO: 44568 - DNA, 442 bp, Homo sapiens; identical to SEQ ID NO: 33835

SEQ ID NO: 44569 - DNA, 510 bp, Homo sapiens
cctctagatgcatgctcgagcggccgccagtgtgatggatatctgcagaattcggcttagcgtggtcgcggccgaggtacaagaatgtagaggaaccttggcggtcaacattccaccacccccgactgaccgagtatggtatggtttccgaaagccaccacatgtggagctgaaagctcggccaaaacttggagagagagaagtgactttagttcatgtgacagactggatagagaagaaactggagcaagagtttcagaaagtttttgtcatgccaaacatggatgatgtttatatcactataatgcactcagccatggaccctcgctctacttcctgcctcctgaaagacccacctgtggaggctgctgatcagccatgatgggtgatgtcagatgttccccatattgtgacatcgagctggatgtgtggggttcttggccgccatctgtacctgcccgggcggccgctcgacccgctatccagtcgggaaacctgtcgtgccagctg

SEQ ID NO: 44570 - DNA, 460 bp, Homo sapiens
actactatagggcgaattggagctccaccgcggtggcggccgaggtacgcggggataatagcgaggcagcagtgcagctttcagagggtccgggctcagaggggctatgattcggagggttctgccgcacggcatgggccggggcctcttgacccggaggccaggcacgctcagaggaggcttttctctggacctgggatgggaaaggtgtctgagattaagaagaagatcaagccgatcctgcctggaaggtcctgtgatctactgcaagacaccagccacctgcctaccgagcactcggatgtggtgatcgtgggaggtggggtgcttggcttgtctgtggcctattggctgaagaagctggagagcatacgaggtgctattcgagtgctagtggtggaacgggaccacacgtattcacaggccttcactgggctctcagtatgtgggatttgtcagc

SEQ ID NO: 44571 - DNA, 500 bp, Homo sapiens; identical to SEQ ID NO: 44301

SEQ ID NO: 44572 - DNA, 463 bp, Homo sapiens; identical to SEQ ID NO: 35768

SEQ ID NO: 44573 - DNA, 587 bp, Homo sapiens
  misc_feature 16, 555: n = A,T,C or G
gaattgggccctctanagcatgctcgagcggccgccagtgtgatggatatctgcagaattcggcttagcggccgcccgggcaggtactccagccagggcaagagagcgagaccctgtctcaataaataaataaataaataaataaataaataaataaataaataaaaaaaaacaaagttgattaagaaaggaagtataggccaggcacagtggctcacacctgtaatccttgcattttggaaggctgaggcaggaggatcactttaggcctggtgtgttcaagaccagcctggtcaacatagagagacactgtctctaccaaaaaaaggaaggaagggacacatatcaaactgaaacaaaattagaaatgtaattatgttctaagtgcctccaagttcaaaacttattggaatgttgagagtgtggttacgaaatacgttaggaggacaaaaggaatgtgtaagtctttaatgccgatatcttcagaaaacctaagcaaacttacaggtcctgctgaaactgcccactctgcaagaagaaatcatgatatagctntgccatgtggcagatctacatgtctaacctcg

SEQ ID NO: 44574 - DNA, 427 bp, Homo sapiens; identical to SEQ ID NO: 35770

SEQ ID NO: 44575 - DNA, 428 bp, Homo sapiens
tatagggagtcgaccacgcgtccgaatctctctgtgagaagctgccatctccccgccacccgctcgtccccttctctttctgccaccctcctttccttcctccctcgctccactccactccctccctcttttctcagtaccctcctctttactctccgagttaactgagagccgacctgacatctccaacattttcaccctcttcccccacccccatcaccgagaatggagtcagggtttccggagagaccgaactctgctctcagcacctttcccagccgctgttgctaaactgacctcggaggacgagaggggaaggaggtgcgacgccccttacatcagtacataactaccacaccaaccacctccacttcaaagccggattttgcatcctgggggcgggacagacctcgtcccgggctgaattc

SEQ ID NO: 44576 - DNA, 398 bp, Homo sapiens
  misc_feature 6: n = A,T,C or G
gcgcgnatacgactcactatagggcgaattggagctccaccgcggtggcggccgcccgggcaggtaccgaaaatctttagtcttagcaaatttcccagatataataccccgcgtaccacatccaggacaaaggccgctttgaactctaccgtgccacgttttatgccgctgagataatgtgtggactgcagtttctacacagcaagggcatcatttacagggacctcaaactggacaatgtgctgttggaccgggatggccacatcaagattgccgactttgggatgtgcaaagagaacatattcggggagagccgggccagcaccttctgcggcacccctgactatatcgcccctgagatcctacagggcctgaagtacctcggccgctctagaact

SEQ ID NO: 44577 - DNA, 445 bp, Homo sapiens
atagggcgaattgggccctctagatgcatgctcgagcggccgccagtgtgatggatatctgcagaattcgcccttagcgtggtctcggccgaggtacctctgggccatattgcagaaccctgcccttctttgttgactgaggaaagcccgctccctgcccaggtttttcattgttgatcgaaattaacaccaggtggtgaatagagcccctcctaaggttgctcaggataaatcatttattaaatgggtctgcttatcaggaggggcgtgaaggctcccaaaaggaaatgctggcacctgggcccagaagccagggcctctaactcctggggttgatttcttcagtgaagttgcaccctacaaagggaatatggccaaagcggcactcaactgaaggctgatatcaggcgattagacagccatgcattctgcgtttgtctggaat

SEQ ID NO: 44578 - DNA, 439 bp, Homo sapiens; identical to SEQ ID NO: 35775

SEQ ID NO: 44579 - DNA, 356 bp, Homo sapiens; identical to SEQ ID NO: 35776
  misc_feature 184, 194, 208, 221, 222: n = A,T,C or G

SEQ ID NO: 44580 - DNA, 445 bp, Homo sapiens; identical to SEQ ID NO: 35777

SEQ ID NO: 44581 - DNA, 459 bp, Homo sapiens; identical to SEQ ID NO: 35778

SEQ ID NO: 44582 - DNA, 478 bp, Homo sapiens
ggcgaattggagctccaccgcggtggcggccgcccggcaggtactgattttaaaaactaataacttaaaactgccacacgcaaaaaagaaaaccaaagtggtccacaaaacattctcctttccttctgaaggttttacgatgcattgttatcattaaccagtcttttactactaaacttaaatggccaattgaaacaaacagttctgagaccgttcttccaccactgattaagagtggggtggcaggtattagggataatattcatttagccttctgagctttctgggcagacttggtgaccttgccagctccagcagccttcttgtccactgctttgatgacacccaccgcaactgtctgtctcatatcacgaacagcaaagcgacccaaaggtggatagtctgaaaagctctcaacacacatgggcttgccaggaaccatatcaacaatggcagcatcaccagactttaagaattt

SEQ ID NO: 44583 - DNA, 463 bp, Homo sapiens; identical to SEQ ID NO: 35780

SEQ ID NO: 44584 - DNA, 461 bp, Homo sapiens; identical to SEQ ID NO: 35781

SEQ ID NO: 44585 - DNA, 277 bp, Homo sapiens; identical to SEQ ID NO: 35782

SEQ ID NO: 44586 - DNA, 543 bp, Homo sapiens
agctccaccgcggtggcggccgaagcgtccgtcccccgcgtacagcctgagaaatgccagtggcctgacagcagcagacattgcacaaacccagggtttccaagagtgtgcccagtttctcttgaacctccagaattgtcatctgaaccatttctataacaatggcatctaaatgggggtcatcagaatgtatttcctaatcatattagtgtgggaacaaatcgaaagagatgcttggaagactcagaagactttggagtaaagaaagctagaactgaaggtgagaccgctttgcgggtgggaagagcacacttatttttcctttctgtaatatgttttctttatatggctgagcgcaccttcgagatgagaccttcacttcaggtggtaatgcgcctggtggattgtgcggtgacggtggagatttctcctgtacctgcccgggcggccgctctagaactagtggatcccccgggctgcaagaattcgatatcaagcttatcgataccgtcgacctctagggggggcccggtacccagcttt

SEQ ID NO: 44587 - DNA, 417 bp, Homo sapiens; identical to SEQ ID NO: 35784

SEQ ID NO: 44588 - DNA, 364 bp, Homo sapiens; identical to SEQ ID NO: 35785

SEQ ID NO: 44589 - DNA, 653 bp, Homo sapiens
  misc_feature 615, 624: n = A,T,C or G
gcgtccgagggactataacctgaacgacatacttctccagctgggcattgaggaagccttcaccagcaaggctgacctgtcagggatcacaggggccaggaacctagcagtctcccaggtggtccataaggctgtgcttgatgtatttgaggagggcacagaagcatctgctgccacagcagtcaaaatcaccctcctttctgcattagtggagacaaggaccattgtgcgtttcaacaggcccttcctgatgatcattgtccctacagacacccagaacatcttcttcatgagcaaagtcaccaatcccaagcaagcctagagcttgccatcaagcagtggggctctcagtaaggaacttggaatgcaagctggatgcctgggtctctgggcacagcctggcccctgtgcaccgagtggccatggcatgtgtggccctgtctgcttatccttggaaggtgacagcgattccctgtgtagctctcacatgcacaggggcccatggactcttcagtctggagggtcctgggcctcctgacagcaataaataatttcgttggacaaaaaaaaaaaaaaaaaagtgcggccgctagactagtctagagaaaaaacctnccacacctncccctgaacctgaaacataaaatgaatgc

SEQ ID NO: 44590 - DNA, 458 bp, Homo sapiens; identical to SEQ ID NO: 35787
  misc_feature 208: n = A,T,C or G

SEQ ID NO: 44591 - DNA, 458 bp, Homo sapiens; identical to SEQ ID NO: 35788

SEQ ID NO: 44592 - DNA, 628 bp, Homo sapiens
actatagggcgaattggagctccaccgcggtggcggccgaggtaccaggtgaacaaggtttaccagaaagcagttgagacaagaaaataagagctcaggatgagggaaaagaaaaagattgagagaatttgtgcccccaaccatttcctcagactctaagaaagaacacgctctctccaggcaggtctgaagctcaactctcttattgcctcacttcaggtatacctcactttacacaatagaattataactggaaagaagttggggacacatgtatttggtgattacattttaaacacattaggaaaagttgctatttgaactttttattgatttttggggggagtaaagaattattttgtgatgcaaataaatatcctttaattgatcgacttgccaaatttagatttgtgtgcatcaggctttctttttttctttttttagagaagttcaatataagcttttcttttctttgtttctttctttctttattttgagatggagtcttgctctgtcgcccatgctggagtgcagtggcgcgatctcggctcactgcaacctccacctcctgggttcaagcgattctcttgtctcaacctcccaagcagttgggactacaggcgtgagc

SEQ ID NO: 44593 - DNA, 402 bp, Homo sapiens; identical to SEQ ID NO: 35790

SEQ ID NO: 44594 - DNA, 411 bp, Homo sapiens; identical to SEQ ID NO: 35791
  misc_feature 44, 45: n = A,T,C or G

SEQ ID NO: 44595 - DNA, 472 bp, Homo sapiens
tacgactactatagggcgaattggagctccaccgcggtggcggccgcatcctgactaccaggatccatgagcttaaacaggccaaagtgagcacagtcatggataccgttggccggaggcttcgggactccctgggccgaactgtggacctggggctgacaggcaaccatggagttgtgcaccccagtcttgcggacagtgccaacaagtttgaggagaacacctactgcttcggtcggaccgtggagacactgctgctccgctttggcaagaccatcatggaggagcagctggtacctcggccgctctagaactagtggatcccccgggctgcaggaattcgatatcaagcttatcgataccgtcgacctcgagggggggcccggtacccagcttttgttccctttagtgagggttaattgcgcgcttggcgtaatcatggtcatagctgtttcctgtgtgaaattgttat

SEQ ID NO: 44596 - DNA, 475 bp, Homo sapiens; identical to SEQ ID NO: 32169

SEQ ID NO: 44597 - DNA, 470 bp, Homo sapiens; identical to SEQ ID NO: 35796

SEQ ID NO: 44598 - DNA, 473 bp, Homo sapiens; identical to SEQ ID NO: 35797

SEQ ID NO: 44599 - DNA, 480 bp, Homo sapiens; identical to SEQ ID NO: 35798
  misc_feature 312, 313, 314: n = A,T,C or G

SEQ ID NO: 44600 - DNA, 571 bp, Homo sapiens
  misc_feature 536, 551: n = A,T,C or G
ggccctctagaagcatgctcgagcggccgccagtgtgatggatatctgcagaattcggcttagcgtggtcgcggccgaggtacaccaaggtggtgcattaccggaagtggatcaaggacaccatcgtggccaacccctgagcacccctatcaactccctattgtagtaaacttggaaccttggaaatgaccaggccaagactcaagcctccccagttctactgacctttgtccttaggtgtgaggtccagggttgctaggaaaagaaatcagcagacacaggtgtagaccagagtgtttcttaaatggtgtaattttgtcctctctgtgtcctggggaatactggccatgcctggagacatatcactcaatttctctgaggacacagataggatggggtgtctgtgttatttgtgggatacagagatgaaagaggggtgggatccacactgagagagtggagagtgacatgtgctggacactgtccatgaagcactgagcagaagctggaggcacaacgcaccagacactcacagncaggatggagctganaacataacccactctgtcct

SEQ ID NO: 44601 - DNA, 479 bp, Homo sapiens
actactatagggcgaattggagctccaccgcggtggcggccgaggtactttttttttttttttttttttttttggctgggatatcttacagaggaaggaaaaattaaccttttttactttctttctcactttttaaatcagccaaagtcaagcccgtttgccaacctgcatgtccatgcctgtaagcccttctcttggccaaggaagaaaggaagaaagaaaaaagaaacccaggggcctgtatcccctgattaaacacagcacagcactccaggcagacatgcccggtggcggctcctttgcaccattgacctcaggccagacacctcagcgccaacaatgggacctcggccttccagctaggtttgccccaggctgggcaggaaaccagctcggccgctctagaactagtggatcccccgggctgcaggaattcgatatcaagcttatcgataccgtcgacctcgagggggggcccg

SEQ ID NO: 44602 - DNA, 498 bp, Homo sapiens
gcgcgcgtaatacgactcactatagggcgaattggagctccaccgcggtggcggccgcctgagcgatactaaaatgtctgatgatgctggtgacaccttagccactggagacaaagcagaagttactgagatgcctaatagtgattctttacctgaggatgcagaagtgcattgtgattcagctgcagtttcacatgagccaacaccagctgaccccagaggggaggggcatgaaaatgcagctgtgcagggtgcaggggctgccgccattgggccccctgtgcagcctcaggatgccaacgccctggagccccctctcaatggagacgtgactgaggatacacttgctgaatgtattgattccgtcagccttgaggcagaacccagatccgaaatacccctgcaagaacagaattatctggctgtggattcccctccaagtggaggaggatgggcaggctggggatcctggggcaaatctctgctgtcgtcagcatc

SEQ ID NO: 44603 - DNA, 581 bp, Homo sapiens
  misc_feature 22: n = A,T,C or G
cccccctcggaagtcttctagnattaattaacgcgggggtttggggcagaagtgagaggggcaggctatctcaccaatctcctcttggactcaggaactcttgcaaaggtttcaaagatgaggaagaatctaaaagaaaagatcattaagctgtgcccagtgttcctcttgcaacaattctggaacaaaactttaccctgtttccaaatttaagctaaattcgttgtattatgcaaatgtagggacgtaacttgtaaaactccaagtatagggccaaaggcaaactttgcagtaaaactggctttgaattaaaaaaaggaagaaggaaggaaggaagaaaaaaaaaaaaaaagcggccgccaccgcggtggagctccaattcgccctatagtgagtcgtattacgcgcgctcactggccgtcgttttacaacgtcgtgactgggaaaaccctggcgttacccaacttaatcgccttgcagcacatccccctttcgccagctggcgtaatagcgaagaggcccgcaccgatcgcccttcccaacagttgcgcagcctgaatggcgaatggaaattgtaagcg

SEQ ID NO: 44604 - DNA, 480 bp, Homo sapiens; identical to SEQ ID NO: 35803

SEQ ID NO: 44605 - DNA, 478 bp, Homo sapiens; identical to SEQ ID NO: 35804

SEQ ID NO: 44606 - DNA, 459 bp, Homo sapiens; identical to SEQ ID NO: 35805

SEQ ID NO: 44607 - DNA, 461 bp, Homo sapiens; identical to SEQ ID NO: 35806

SEQ ID NO: 44608 - DNA, 472 bp, Homo sapiens; identical to SEQ ID NO: 35807
  misc_feature 424: n = A,T,C or G

SEQ ID NO: 44609 - DNA, 605 bp, Homo sapiens
  misc_feature 10: n = A,T,C or G
cccccctcgngaagtcttctagaattaattaacgcgggggcgctatggcgacacccagcctgcggggtcgtctggcgcggtttgggaacccgcggaagcctgtgctgaagcccaataaacctctcattctagctaaccgcgtcggggagcggcgccgggagaagggcgaggcgactctgcatcacgtgagatgtcggtgatgatggcttgctggaagcagaatgaattccgcgacgatgcgtgcagaaaagagatccagggcttcctcgattgtgccgcgagggctcaggaagcccgaaagatgagatcaatacaggaaaccctgggagagtctgggagtttacttccaaataaattgaataagttgttacagaggtttcctaacaaaccttacctcagctgaaaatggacaagtattttcaatgactgaaatatagcttctgacaactatgcagaggcattttagagacattggcattgccatgccctctttggagggtagaagaggcaaaacacttttttcaccctttggaatcatagtatgggtagaagttatgatttatcttgaaataaaatcctctgaacagaacacgaaaaaaaaaaaa

SEQ ID NO: 44610 - DNA, 464 bp, Homo sapiens; identical to SEQ ID NO: 35809

SEQ ID NO: 44611 - DNA, 445 bp, Homo sapiens; identical to SEQ ID NO: 35810

SEQ ID NO: 44612 - DNA, 585 bp, Homo sapiens; identical to SEQ ID NO: 41582

SEQ ID NO: 44613 - DNA, 463 bp, Homo sapiens; identical to SEQ ID NO: 35812

SEQ ID NO: 44614 - DNA, 452 bp, Homo sapiens
gcgaattggagctccaccgcggtggcggccgtgtggcgcagggaggaccccttacagcaaccacagcgtcgggaatccgaaagggaaaagaggtgcgcaggcgccacacacggcctttacccccgcgtaccttggccgctctagaactagtggatcccccgggctgcaggaattcgatatcaagcttatcgataccgtcgacctcgagggggggcccggtacccagcttttgttccctttagtgagggttaattgcgcgcttggcgtaatcatggtcatagctgtttcctgtgtgaaattgttatccgctcacaattccacacaacatacgagccgggagcataaagtgtaaagcctggggtgcctaatgagtgagctaactcacattaattgcgttgcgctcactgcccgctttccagtcgggaaacctgtcgtgccagctgcattaatga

SEQ ID NO: 44615 - DNA, 463 bp, Homo sapiens; identical to SEQ ID NO: 35814

SEQ ID NO: 44616 - DNA, 407 bp, Homo sapiens; identical to SEQ ID NO: 35815

SEQ ID NO: 44617 - DNA, 461 bp, Homo sapiens; identical to SEQ ID NO: 35816
  misc_feature 373: n = A,T,C or G

SEQ ID NO: 44618 - DNA, 358 bp, Homo sapiens; identical to SEQ ID NO: 35817

SEQ ID NO: 44619 - DNA, 600 bp, Homo sapiens
  misc_feature 28: n = A,T,C or G
ccgggccccccctcggaagtcttctagnattaattaacgcgggtgttaagaaaacaatttaattttcaacaatggtcaagcttggtggcttgtgcctgtggtcccaacactttgggagtctgaggcagaaagactgctagaggccaggagaccagcctgggaaacagtgagatcccatctctacaaaaacaaacaaacaaaaaacaacaaaaaaaaaaaaaagcggccgccaccgcggtggagctccaattcgccctatagtgagtcgtattacgcgcgctcactggccgtcgttttacaacgtcgtgactgggaaaaccctggcgttacccaacttaatcgccttgcagcacatccccctttcgccagctggcgtaatagcgaagaggcccgcaccgatcgcccttcccaacagttgcgcagcctgaatggcgaatggaaattgtaagcgttaatattttgttaaaattcgcgttaaatttttgttaaatcagctcattttttaaccaataggccgaaatcggcaaaatcccttataaatcaaaagaatagaccgagatagggttgagtgttgttccagtttggaacaagagtccacta

SEQ ID NO: 44620 - DNA, 451 bp, Homo sapiens; identical to SEQ ID NO: 35819

SEQ ID NO: 44621 - DNA, 640 bp, Homo sapiens; identical to SEQ ID NO: 35820
  misc_feature 214, 215: n = A,T,C or G

SEQ ID NO: 44622 - DNA, 686 bp, Homo sapiens
  misc_feature 594: n = A,T,C or G
atacgactactatagggcgaattggagctccaccgcggtggcggccgttgctgagctggtgtggaacgtctgtgatcagattcattgggcttttgccagctctttttagattgtcctcttgagacctgtttacagaggaatggccagaggccacaggcactgcctcctgagaccatccacctgatgcgaagaaagctagaaaagcccaaccctgagaaaaatgcttgggaacacaacagcctcacaattccgagtccagcatgtgcttcggaggccagcctggaagtgactgatttattgctcactgctttggaaaatccagtaaaatatgctgaggacaatatggaacaaaaggacacagacagaattatttgttcaactaacattcttcataaaactgatcagacactccgaaggattgtatctcagacaatgaaggaagcaaaagatgaacaagtgcttcctcacaacttgaagcttctagcagaagaacttaacaagctcaaagcagagtttttggaagacctaaaacaaggaaacaaaaaatatctgtgctttcagcaaaccattgacataccagatgtcatttctttntttcattatgagaaagataatattgtacctcggccgctctagaactagtggatcccccgggctgcaggaattcgatatcaagcttatcgata

SEQ ID NO: 44623 - DNA, 693 bp, Homo sapiens; identical to SEQ ID NO: 35822

SEQ ID NO: 44624 - DNA, 503 bp, Homo sapiens; identical to SEQ ID NO: 35823

SEQ ID NO: 44625 - DNA, 412 bp, Homo sapiens
gcgaattggagctccaccgcggtggcggccgaggtacagagcgccgtcaatctcagctcactgcaagctttgcctcctagattcaagcagttctcctgcctcagcctcctgagtagctgggattacaggcgcctgccaccattcccagctaatttttgtatttttagtagagacggtttcaccatgttggctaggctggtctcgaactcctaacctcaggtcatccgcatgcctcgtcctcccaaagtgctaggattacaggcataagccaccgcgcccggccgctctagaactagtggatcccccgggctgcaggaattcgatatcaagcttatcgataccgtcgacctcgagggggggcccggtacccagcttttgttccctttagtgagggttaattgcgcgcttggcg

SEQ ID NO: 44626 - DNA, 349 bp, Homo sapiens; identical to SEQ ID NO: 35825

SEQ ID NO: 44627 - DNA, 401 bp, Homo sapiens; identical to SEQ ID NO: 35826

SEQ ID NO: 44628 - DNA, 361 bp, Homo sapiens
  misc_feature 317: n = A,T,C or G
ggtggcggccgaggtacgcggggaaggattcggcgggcaagcgggtgtaatcagcagccatccgttcttgggcatggtggcttccgaccgcggggaccccgagagtctcttgtcggccgctctagaactagtggatcccccgggctgcaggaattcgatatcaagcttatcgataccgtcgacctcgagggggggcccggtacccagcttttgttccctttagtgagggttaattgcgcgcttggcgtaatcatggtcatagctgtttcctgtgtgaaattgttatccgctcacaattccacacaacatacgagccngggagcataaagtgtaaagcctgaggtgcctaatgagtgagcta

SEQ ID NO: 44629 - DNA, 568 bp, Homo sapiens
  misc_feature 556, 557, 558: n = A,T,C or G
tgctgtttgctgagctgacctacactctggccacagaggaagcggaacgcattggtgtagaccacgtagcccgaatgacagcaacaggcagtggagagaactccactgtggctgaacacctgatagcacagcacagcgccatcaagatgctgcacagccgcgtcaagctcatcttggagtacgtcaaggcctctgaagcgggagaggtcccctttaatcatgagatcctgcgggaggcctatgctctgtgtcactgtctcccggtgctcagcacagacaagttcaagacagatttttatgatcaatgcaacgacgtggggctcatggcctacctcggcaccatcaccaaaacgtgcaacaccatgaaccagtttgtgaacaagttcaatgtcctctacgaccgacaaggcatcggcaggagaatgcgcgggctctttttctgatgagggtacttgaagggctgatggacaggggtcaggcaactatcccaaaggggagggcactacacttccttgagagaaaccgctgtcattaataaaaggggagcagcccctgnnnaaaaaaaaaa

SEQ ID NO: 44630 - DNA, 387 bp, Homo sapiens
actatagggcgaattggagctccaccgcggtggcggccgaggtacttgagcaaaataacttaaaaaaatcttaagaggaggaggacaatgatattttctaaaaacatatttgaggctgggcatggtggctcacgccagtaattccagcactttgggaggccgaggggggtgaatcacgaggtcaggagatcgagatcatcctggctaacacggtgaaaccccgtctctactaaaaatacaaaaaaattagccgggagaggtggcacacgcctgtagtcctagctactcgggaggctgaggcaggagaattgcttgaactgccttgaggtggcggaggctgaagtgagccgagatcacaccactgcacgccagcctgggcaacagagc

SEQ ID NO: 44631 - DNA, 382 bp, Homo sapiens
atacgactcactatagggcgaattggagctccaccgcggtggcggccgaggtacctatgactctggcatcagattcctggcaccccagtcccactagctgtggtcccaagaatgaacctgcattttaacaagattcaaaaccattgcagaggccaggcgaggtggctcacacctgtaatcccagcagtttgggaggccgaggtgggtggatcacctgaggtcaggagttcaagaccaacctggccaacatggcgaagtcctgtctctactaaaaatacaaaaattagccgagtgtagtggcaggcgcctgtaatcctagctactcgggaggctgaggcaggagaattgcttgaatccgggaggcagaagttgcagtgagctg

SEQ ID NO: 44632 - DNA, 471 bp, Homo sapiens; identical to SEQ ID NO: 40207

SEQ ID NO: 44633 - DNA, 239 bp, Homo sapiens; identical to SEQ ID NO: 35832

SEQ ID NO: 44634 - DNA, 406 bp, Homo sapiens; identical to SEQ ID NO: 42680

SEQ ID NO: 44635 - DNA, 400 bp, Homo sapiens; identical to SEQ ID NO: 35834

SEQ ID NO: 44636 - DNA, 396 bp, Homo sapiens
cgactcactatagggcgaattggagctccaccgcggtggcggccgaggtacgcggggactcagaagcttggaccgcatcctagccgccgactcacacaaggcaggtgggtgaggaaatccagagttgccatggagaaaattccagtgtcagcattcttgctccttgtggccctctcctacactctggccagagataccacagtcaaacctggagccaaaaaggacacaaaggactctcgacccaaactgccccagaccctctccagaggttggggtgaccaactcatctggactcagacatatgaagaagctctatataaatccaagacaagcaacaaacccttgatgattattcatcacttggatgagtgcccacacagtcaagctttaaagaaa

SEQ ID NO: 44637 - DNA, 313 bp, Homo sapiens
tccaccgcggtggcggccgcccgggcaggtacacatggtaggctaaaaattaaaactgcttttccacaaaactgataaattactagattcttggttctttcatgatatcataacattaaatcattaaaaatataaggcaatttaatgtaaactactagcatttacaaaacagtaaagttataaaaaactgtattacaagcaaatgcaccaaataccagtgaacatgaaacaggagtgaagtttgctggagaacattaaaaatcacttttcagtgggttcacttcacattcatgctgcactgggcctgacacgt

SEQ ID NO: 44638 - DNA, 311 bp, Homo sapiens; identical to SEQ ID NO: 35837

SEQ ID NO: 44639 - DNA, 393 bp, Homo sapiens; identical to SEQ ID NO: 35838

SEQ ID NO: 44640 - DNA, 355 bp, Homo sapiens; identical to SEQ ID NO: 23517

SEQ ID NO: 44641 - DNA, 517 bp, Homo sapiens; identical to SEQ ID NO: 35840

SEQ ID NO: 44642 - DNA, 584 bp, Homo sapiens; identical to SEQ ID NO: 35841

SEQ ID NO: 44643 - DNA, 448 bp, Homo sapiens; identical to SEQ ID NO: 35842

SEQ ID NO: 44644 - DNA, 168 bp, Homo sapiens; identical to SEQ ID NO: 35843

SEQ ID NO: 44645 - DNA, 693 bp, Homo sapiens; identical to SEQ ID NO: 35844
  misc_feature 632: n = A,T,C or G

SEQ ID NO: 44646 - DNA, 485 bp, Homo sapiens
aggagctccaccgcggtggcggccgcccggtcaggtactgtgaggaaggaaggaccactccacaagatctgtgttttgaacaatgatgcctgttagggaatgtgcaatagcaaaaatcaaaatttggggtggggccaagtgatctattctatttacttgtgctgaccgaattttttcttcaattaatttaatttctttagttgcctctggagttaacgttctttcactatttaattcctagtccactcttaagaaagagaacaaatctgacatggcataaatcggaatgcctagagttggccaaatccaattaatatctacaaatccaattaatatctgctaacaacttttgaaactcatttaatgcttttaatgtgtcttttcttatttctattttttgtggtttaatgttcctttcctatacctgcattcccaagtaacggaaaggagtagaggtttgaatcttatcagatgttattgtcagt

SEQ ID NO: 44647 - DNA, 649 bp, Homo sapiens
ctgggtaccgggccccccctcgagagtacttctagaattaattaacgcgggtctatcaacaaagaacccttaacacaccatactatattgcaatccctatggtaccagactgtcgcaaagaacatcttttgggaatgaagtcagaagaacagtttgctgtgaccacctcagagtctcaaaacccttcctcctccagcaagacccaaccacaaaaactgtctaaaggcgccctgagtttgagaattttagtgtcctgctctgggtttttccaggctgcctttttcttgataccaggcttgccctgcctgtaccattttttactgcataggcaggctgacagctcagactgactgatggcggagcctgcctcacaaatgtgcatgcgctagtctcacagcaccaggcctgactgtgacctttcagtagagtgacaattaatgtcattgttgcctaatgccaagtccctgtgaattggagaagaagggcacctctatacagttttgttgcccatggactcccacttgtcttctctgtaagacagacaggacagtcccatgatcccaagagagggcagatgtgagagtctgtagaaacatcaagcacaattccagaaataaattctgaaatcccaaagggatgcaagaaatct

SEQ ID NO: 44648 - DNA, 649 bp, Homo sapiens; identical to SEQ ID NO: 44647

SEQ ID NO: 44649 - DNA, 649 bp, Homo sapiens; identical to SEQ ID NO: 44647

SEQ ID NO: 44650 - DNA, 649 bp, Homo sapiens; identical to SEQ ID NO: 44647

SEQ ID NO: 44651 - DNA, 658 bp, Homo sapiens; identical to SEQ ID NO: 38862
  misc_feature 186, 193, 220, 257, 270: n = A,T,C or G

SEQ ID NO: 44652 - DNA, 649 bp, Homo sapiens; identical to SEQ ID NO: 44647

SEQ ID NO: 44653 - DNA, 488 bp, Homo sapiens; identical to SEQ ID NO: 38864

SEQ ID NO: 44654 - DNA, 649 bp, Homo sapiens; identical to SEQ ID NO: 44647

SEQ ID NO: 44655 - DNA, 634 bp, Homo sapiens; identical to SEQ ID NO: 32242

SEQ ID NO: 44656 - DNA, 596 bp, Homo sapiens
gaattggagctccaccgcggtggcggccgctttttttttttttttttttttttttttttgaccagagaggccccaaactagcagcctgtcctcctcagtagccccagcatcccttcatcattttgttgcccttctatgggcctagtttaggtctgagaggcatagttttaaaatttttattgttatttatttattctagagataaggtcttgctatgtttcccaggctggtcttgaactcctggcctcaagcaatcctcctgcagcagcctcccaaagtgctgggattacaggcatgagccaccacgtctggtcagacaggcatagttttacaaatatgtgggtggataaatgctgtccagtcttacttcatcacttctatcaattgaatgcttttggttggaaataacagaaaatccaactaaaagtgacttaaacaaaggaaatgttattatctcatgtaccaggaattctggaggtagactggttcaagggtggattaattaattctagaagtactctcgagggggggcccggtacccagcttttgttccctttagtgagggttaattgcgcgcttggcgtaatcatggtcat

SEQ ID NO: 44657 - DNA, 606 bp, Homo sapiens; identical to SEQ ID NO: 38868

SEQ ID NO: 44658 - DNA, 619 bp, Homo sapiens; identical to SEQ ID NO: 38869

SEQ ID NO: 44659 - DNA, 606 bp, Homo sapiens; identical to SEQ ID NO: 32302

SEQ ID NO: 44660 - DNA, 507 bp, Homo sapiens; identical to SEQ ID NO: 38871
  misc_feature 17, 18, 19, 161, 177, 224: n = A,T,C or G

SEQ ID NO: 44661 - DNA, 466 bp, Homo sapiens
gcgaattggagctccaccgcggtggcggccgctttttttttttttttttttttttttttttttaaggacaaaaatctgggttttatttattcatttgtaaactcaagccagttctctattccactttttccaattatttgcttttgagagtctcaggattatccttccttcctctccttccacattttctcccctgtcccttctcctggccatgcttctctagtcccgacggtcttgtttagatcacaatgcggtttgtagattttccttcactctctctttcagaaaaaaatgccaaaatggtgttttaagaagcttttattgagccaactgaacttcaacaaagcaaacgaaaacataaagtagggaaaggaaccctcttcaacaaatggtgttgggataattggcaagccacatgtaggagaattaaactggatcctcatctctcaccttatacacaaatcaa

SEQ ID NO: 44662 - DNA, 667 bp, Homo sapiens; identical to SEQ ID NO: 39108

SEQ ID NO: 44663 - DNA, 548 bp, Homo sapiens
ggagctccaccgcggtggcggccgctttttttttttttttttttattcctaattagatggggaggaaagtctttgaagaggaacctctacgttttacagccttaatatcaggtgtagtgagtctcaccactttattcttctttgtcaaggttgatttagctattctgagatctttgccttttcatatagattttagagtaagtttgtctatgtctacataaaagcttgctgggatttcgaggccgggtacggtggctcacgcctttaatcacaacactttgggaggctgaggcaggtggattacttagggtcaggagtttgagaccagcctggctaacagtggaaccctgtctctaccaaaaaaatacaaagctgggcgtggtggctcacgcctgtaatcccagtactttgggaggccgaggtgggtggatcacgaggtcaggagatcgagaccatcctggcaaaacatggtgaaaccccgtctccactaaaaaatacaaaaaaaattagctgggcttggttgccggcgcttgtaatcccagctactc

SEQ ID NO: 44664 - DNA, 482 bp, Homo sapiens; identical to SEQ ID NO: 38875

SEQ ID NO: 44665 - DNA, 512 bp, Homo sapiens; identical to SEQ ID NO: 38876
  misc_feature 35: n = A,T,C or G

SEQ ID NO: 44666 - DNA, 461 bp, Homo sapiens
gcgaattggagctccaccgcggtggcggccgcttttttttttttttttttttttttttttaaacatttttagccacttcatttctatttattgaacaggtcaaatttgtcttgttatttgtgagtacagtacatttaaaaaacatccttatcggttatttttttttttcagtcggagtttgacgtataaattgtttatgcttttggtgtaatctcttaataaactggttcttcaaaaatcatcctataaagtgagttttcatgaagttaacgggattttggtgtgatgtgttttgcaaatacttattaccgagaccaggtagatcgtcacctcggctcccgggcagagttcgcgtgcgtccgcaccggattccccgcgttaattaattctagaagtactctcgagggggggcccggtacccagcttttgttccctttagtgagggttaattgcgcgcttgg

SEQ ID NO: 44667 - DNA, 630 bp, Homo sapiens; identical to SEQ ID NO: 32364

SEQ ID NO: 44668 - DNA, 634 bp, Homo sapiens; identical to SEQ ID NO: 32242

SEQ ID NO: 44669 - DNA, 634 bp, Homo sapiens; identical to SEQ ID NO: 32242

SEQ ID NO: 44670 - DNA, 606 bp, Homo sapiens; identical to SEQ ID NO: 39033
  misc_feature 17, 25: n = A,T,C or G

SEQ ID NO: 44671 - DNA, 641 bp, Homo sapiens; identical to SEQ ID NO: 32258

SEQ ID NO: 44672 - DNA, 606 bp, Homo sapiens; identical to SEQ ID NO: 38868

SEQ ID NO: 44673 - DNA, 427 bp, Homo sapiens; identical to SEQ ID NO: 41213

SEQ ID NO: 44674 - DNA, 441 bp, Homo sapiens; identical to SEQ ID NO: 38885

SEQ ID NO: 44675 - DNA, 667 bp, Homo sapiens; identical to SEQ ID NO: 32312

SEQ ID NO: 44676 - DNA, 441 bp, Homo sapiens; identical to SEQ ID NO: 38885

SEQ ID NO: 44677 - DNA, 424 bp, Homo sapiens; identical to SEQ ID NO: 38880

SEQ ID NO: 44678 - DNA, 420 bp, Homo sapiens; identical to SEQ ID NO: 38892

SEQ ID NO: 44679 - DNA, 403 bp, Homo sapiens; identical to SEQ ID NO: 38891

SEQ ID NO: 44680 - DNA, 441 bp, Homo sapiens; identical to SEQ ID NO: 38885

SEQ ID NO: 44681 - DNA, 596 bp, Homo sapiens; identical to SEQ ID NO: 44656

SEQ ID NO: 44682 - DNA, 581 bp, Homo sapiens; identical to SEQ ID NO: 38894
  misc_feature 82: n = A,T,C or G

SEQ ID NO: 44683 - DNA, 628 bp, Homo sapiens; identical to SEQ ID NO: 38895

SEQ ID NO: 44684 - DNA, 667 bp, Homo sapiens; identical to SEQ ID NO: 32312

SEQ ID NO: 44685 - DNA, 439 bp, Homo sapiens; identical to SEQ ID NO: 38886

SEQ ID NO: 44686 - DNA, 445 bp, Homo sapiens; identical to SEQ ID NO: 38957

SEQ ID NO: 44687 - DNA, 403 bp, Homo sapiens; identical to SEQ ID NO: 38899

SEQ ID NO: 44688 - DNA, 641 bp, Homo sapiens; identical to SEQ ID NO: 38900

SEQ ID NO: 44689 - DNA, 677 bp, Homo sapiens; identical to SEQ ID NO: 38933

SEQ ID NO: 44690 - DNA, 441 bp, Homo sapiens; identical to SEQ ID NO: 38885

SEQ ID NO: 44691 - DNA, 574 bp, Homo sapiens
tacgactcactatagggcgaattggagctccaccgcggtggcggccgcttttttttttttttttcagtttttttttttgttccagaaaagattttttgttttgttaacttaaaaatgggcagaaagtattcaagaaaaacaatgtgaactgctttagctttctggggatttttaggatagcttttctgctgaagccaatttcaaggggaaaagttaagcactcccactttcaaaaaaaaaaaaataataacccacacacacaaagagtgttgaggacttgtagcttaaaaaaaataagttttaaaaactgactttctgtatttatgatagatatgaccatttttggtgttgagtagattgttgcattggaaatgaactgaagcagtatggtagatttaaaaggaaaaaaaaaaaaccttttgtgtacatttagctttttgtatggtccagctgacagctcctcatttgatgttgtcttgttcattcctagcagatgatagattgcaatccgttgattcgcctaagcttttctccccttgtcccttaattccacttcctctttcttgtcccttaa

SEQ ID NO: 44692 - DNA, 487 bp, Homo sapiens; identical to SEQ ID NO: 32314
  misc_feature 310, 311: n = A,T,C or G

SEQ ID NO: 44693 - DNA, 464 bp, Homo sapiens; identical to SEQ ID NO: 41269

SEQ ID NO: 44694 - DNA, 427 bp, Homo sapiens; identical to SEQ ID NO: 41213

SEQ ID NO: 44695 - DNA, 493 bp, Homo sapiens
tacgactactatagggcgaattggagctcaccgcggtggcggccgcttttttttttttttttttttttttttttttgaggagtagagaaatgactaattttttcattggtgagtaatatgctacaaagactcgtagaatcatatacttttggacctggaaagtagcttaaggaccatctgattaaaattttaagttttattgatgaagaaattaagctcaagaaaggctgttacttgtccaagatcacagaagttttaactattgaagcttgagaaaacagccagttctttgctcaaatttcagctgaaactacattgtataataaaataactcaacataacattacaacagaatagtttaaactctttctagtcagtggcaacttagggtagggaagatccaaagggatttttaaacaagtttgttgaaattatgtaagaaaattaacttcatcagtgaattgagatttagttagcgttcttgagcttctaa

SEQ ID NO: 44696 - DNA, 634 bp, Homo sapiens; identical to SEQ ID NO: 32242

SEQ ID NO: 44697 - DNA, 634 bp, Homo sapiens; identical to SEQ ID NO: 32242

SEQ ID NO: 44698 - DNA, 427 bp, Homo sapiens; identical to SEQ ID NO: 41213

SEQ ID NO: 44699 - DNA, 667 bp, Homo sapiens; identical to SEQ ID NO: 32312

SEQ ID NO: 44700 - DNA, 408 bp, Homo sapiens; identical to SEQ ID NO: 38912

SEQ ID NO: 44701 - DNA, 284 bp, Homo sapiens
gctccaccgcggtggcgcccgcttttttttttttttttttttttgaggtttctatttttattcaactacaagcaaacagcacaattaatgcaacattcagcaactcaagaccagcttttcttacccccatgaagaacgatcaatttaaaaaacacagatctcaggtttcctcccaagctgtcagcgagcgctgctaccggtctagattgccatgtcccaacaacagcaaagccaccctccctcccgccttaattaattctagaagtactctcgagggggggccc

SEQ ID NO: 44702 - DNA, 356 bp, Homo sapiens; identical to SEQ ID NO: 38914

SEQ ID NO: 44703 - DNA, 428 bp, Homo sapiens; identical to SEQ ID NO: 32336
  misc_feature 311: n = A,T,C or G

SEQ ID NO: 44704 - DNA, 366 bp, Homo sapiens; identical to SEQ ID NO: 38916

SEQ ID NO: 44705 - DNA, 628 bp, Homo sapiens; identical to SEQ ID NO: 38917
  misc_feature 564, 593: n = A,T,C or G

SEQ ID NO: 44706 - DNA, 341 bp, Homo sapiens
ctccaccgcggtggcggccgctttttttttttttttttttttttttttttgggggagaagagaaatgactaattttttcattggtgagtaatatgctacaaagactcgtagaatcatatacttttggacctggaaagtagcttaaggaccatctgattaaaattttaagttttattgatgaaaaaattaagctcaaaaaaggctgttacttgtccaagatcacagaagttttaactattgaagcttgagaaaacagccagttctttgctcaaatttcagctgaaactacattgtataataaaataacttaacataactttacaacagaatagtttaaactc

SEQ ID NO: 44707 - DNA, 634 bp, Homo sapiens; identical to SEQ ID NO: 32242

SEQ ID NO: 44708 - DNA, 634 bp, Homo sapiens; identical to SEQ ID NO: 32242

SEQ ID NO: 44709 - DNA, 628 bp, Homo sapiens; identical to SEQ ID NO: 38917
  misc_feature 564, 593: n = A,T,C or G

SEQ ID NO: 44710 - DNA, 634 bp, Homo sapiens; identical to SEQ ID NO: 32242

SEQ ID NO: 44711 - DNA, 441 bp, Homo sapiens; identical to SEQ ID NO: 38923

SEQ ID NO: 44712 - DNA, 634 bp, Homo sapiens; identical to SEQ ID NO: 32242

SEQ ID NO: 44713 - DNA, 565 bp, Homo sapiens; identical to SEQ ID NO: 38938

SEQ ID NO: 44714 - DNA, 646 bp, Homo sapiens; identical to SEQ ID NO: 39096

SEQ ID NO: 44715 - DNA, 634 bp, Homo sapiens; identical to SEQ ID NO: 32242

SEQ ID NO: 44716 - DNA, 493 bp, Homo sapiens; identical to SEQ ID NO: 44695

SEQ ID NO: 44717 - DNA, 551 bp, Homo sapiens; identical to SEQ ID NO: 38866

SEQ ID NO: 44718 - DNA, 442 bp, Homo sapiens
cgtaatacgactactatagggcgaattggagctccaccgcggtggcggccgcttttttttttttttttttttttttgggatgctcaacctataatacccaaaggctctatttcagtagaatttattggtttgctgattatagcagtgacatagttgcattctagagaccttagaaaatgcagaaaatttcaagaaaaacatttaaattgtgctcatagtgaaactgagaggtgaccactcttaatattttgtggcataagcattccagtcttttatctttctcaaagtttcacataaactttctcaaaggccattaaatacttttccatagcctgattttttgtgaccacatagtatcctattatattgataataccataatttacctaacccatttttatatatttggattttttccaattcatcattattatgaataatg

SEQ ID NO: 44719 - DNA, 634 bp, Homo sapiens; identical to SEQ ID NO: 32242

SEQ ID NO: 44720 - DNA, 667 bp, Homo sapiens; identical to SEQ ID NO: 32312

SEQ ID NO: 44721 - DNA, 677 bp, Homo sapiens; identical to SEQ ID NO: 38933

SEQ ID NO: 44722 - DNA, 196 bp, Homo sapiens; identical to SEQ ID NO: 38934

SEQ ID NO: 44723 - DNA, 493 bp, Homo sapiens; identical to SEQ ID NO: 44695

SEQ ID NO: 44724 - DNA, 427 bp, Homo sapiens; identical to SEQ ID NO: 41213

SEQ ID NO: 44725 - DNA, 424 bp, Homo sapiens; identical to SEQ ID NO: 38880

SEQ ID NO: 44726 - DNA, 596 bp, Homo sapiens; identical to SEQ ID NO: 44656

SEQ ID NO: 44727 - DNA, 641 bp, Homo sapiens; identical to SEQ ID NO: 32258

SEQ ID NO: 44728 - DNA, 428 bp, Homo sapiens; identical to SEQ ID NO: 32336
  misc_feature 311: n = A,T,C or G

SEQ ID NO: 44729 - DNA, 661 bp, Homo sapiens; identical to SEQ ID NO: 39087

SEQ ID NO: 44730 - DNA, 619 bp, Homo sapiens; identical to SEQ ID NO: 32276

SEQ ID NO: 44731 - DNA, 443 bp, Homo sapiens; identical to SEQ ID NO: 38943

SEQ ID NO: 44732 - DNA, 427 bp, Homo sapiens; identical to SEQ ID NO: 41213

SEQ ID NO: 44733 - DNA, 436 bp, Homo sapiens; identical to SEQ ID NO: 38945

SEQ ID NO: 44734 - DNA, 410 bp, Homo sapiens; identical to SEQ ID NO: 38946

SEQ ID NO: 44735 - DNA, 561 bp, Homo sapiens
attggagctccaccgcggtggcggccgctttttttttttttttttttttttttggagacggggttttgctgtgttggccgggctggtctccagctcctaaccgcgagtgatccgccagcctcggcctcccgaggtgccgggattgcagacggagtctcgttcactcagtgctcaatggtgcccaggctggagtgcagtggcgtgatcttggctcgctacaacctccacctcccagccgcctgccttggccccccaaagtgccgagattgcagcctttgcccagccgccaccccgtctgggaagtgaggagcgtctctgcctggccccccatcgtctgggatatgaggagcctctctgcctggctgcccagtctggaaagtgaggagcgtctttgcccggccgccatcccatctaggaagcgaggagcgcctcttccccgccttaattaattctagaagtactctcgagggggggcccggtacccagcttttgttccctttagtgagggtttaattgcgcgcttggcgtaatcatgggcatagctgtttcctgtgtgaaatt

SEQ ID NO: 44736 - DNA, 467 bp, Homo sapiens; identical to SEQ ID NO: 38948

SEQ ID NO: 44737 - DNA, 533 bp, Homo sapiens; identical to SEQ ID NO: 38881

SEQ ID NO: 44738 - DNA, 566 bp, Homo sapiens
gggcgaattggagctccaccgcggtggcggccgctttttttttttttttttttttttttttttgggattctgttccccttctgataatacagtttaagaatataacaaatagatatttaattccccttaaatatgtgtggatattttctgaatggtctaagcatctcttactgtgagtcatttctgcaaatgaacaaactcattcattatgaagtaattcttactagtgtctctctgaaaatgacttttttttttttaactttaatctcttacctccaaattccaaaggtacatattacagctcttatgaatgtcctgaagcatgctaggggagttattttgctgccttagcccttgggattagaattttgtatagtagatatttaatgaatgtttatagggcttatgattaaacttggtaaataagctataaaaatgaaagaaattctttggggaaataaagagtcttttcttctgctatttttttctccctttattcccctttgaattaaaatggaaatatttcttttctttttctttatgacactaatgaagttactttattt

SEQ ID NO: 44739 - DNA, 445 bp, Homo sapiens; identical to SEQ ID NO: 38952

SEQ ID NO: 44740 - DNA, 449 bp, Homo sapiens
ctactatagggcgaattggagctccaccgcggtggcggccgcttttttttttttttttttttttttgggatgctcaacctataatacccaaaggctctatttcagtagaatttattggtttgctgattatagcagtgacatagttgcattctagagaccttagaaaatgcagaaaatttcaagaaaaacatttaaattgtgctcatagtgaaactgagaggtgaccactcttaatattttgtggcataagcattccagtcttttatctttctcaaagtttcacataaactttctcaaaggccattaaatacttttccatagcctgattttttgtgaccacatagaatcctattatattgataataccataatttacctaacccatttttatatatttggattttttccaattcatcattattatgaataatggtgtatctcagtggtta

SEQ ID NO: 44741 - DNA, 500 bp, Homo sapiens
  misc_feature 244, 245, 299, 300, 318, 319: n = A,T,C or G
gactactatatggcgaataggagctccaccgcggtggcggccgcttttttttttttttttttttttttttttgagatggagtttcactcttgttgcccaggctagagtgcaatggcaggatctcagctcactgcaacctctgcctcccgggttcaagtgactctcctgctttagcctcccgagtgagctgggattacagagcgcccgcctctaattaattctagaagtacctctcgaggggggnnggcccggtacccagcttttggttccctttagtggagggttatattgcgccgctnntggcgtaatcatggtcanntagctgtttcctggtgtagaaattgttatccgctcacatattccacacatacatacgagccggaagcataaagtgtaaagcctggggtgcctaatgagtgagctaactcacattaattgcgttgcgctcactgcccgctttccagtcgggaaacctgtcgggccagctgcattaatgaatc

SEQ ID NO: 44742 - DNA, 445 bp, Homo sapiens
ccctactaagggaacaaaagctgggtcccggcccccccctcgagagtacttctagaattaattaacgcggggcacttgatgaagaagacgcggccatcccggcacaccccgtaggaccaatgctcaggccaaaggtgtccaaactatacagacccacagaatctaacaacagatgtctcaatattcctcgtcctagaactctcagaggatccagaactacagccggtcctcgctgggctgttcctgtccatgtgcctggtcatggtgctggggaacctgctcatcatcctggccgtcagccctgactcccacctccacacccccatgtacttcttcctctccaacctgtccttgcctgacatggtttcacctccaccatggtccccaagatgattgtggacatccaatctcacagcagtcatctcctatgcgggctgcctgactc

SEQ ID NO: 44743 - DNA, 533 bp, Homo sapiens; identical to SEQ ID NO: 38881

SEQ ID NO: 44744 - DNA, 636 bp, Homo sapiens; identical to SEQ ID NO: 38870
  misc_feature 345, 629: n = A,T,C or G

SEQ ID NO: 44745 - DNA, 577 bp, Homo sapiens
gcgtaatacgactcactatagggcgaattggagctccaccgcggtggcggccgcttttttttttttttttttttttttttttttaccgggtgtgtggctgggggtgcagagaggctgtgatgttgctgggcagtgtgggtctgggctaggggtctcttgccagctctgacacatccacccctaggcggaggcccacagccggaaccatggggtcaggctccagcggggaggctgatggatgccctggctcttcctgggcccaactcgaccctgctgctcccaaggggcttctcacctctgtgctagggtccacaacactggctttcctgctcccgatactgcctggctgcttggatggtgttttctggaggaagtcagagatcctctgcaccaagaaatcacggtctttcaggttggcaaacaggaatgtcattttgcttttggtgctgatggacagggggctgggcagcacgctggagctgtcagctttttcgacaatggtcacctgagaaggtgaaagaactcttttgggtgtctgcatctcaggccctgcagctgggcatgctttgtgaatggc

SEQ ID NO: 44746 - DNA, 452 bp, Homo sapiens
tatagggcgaattggagctccaccgcggtggcggccgcttttttttttttttttttttttttttttttgagatggagtctcgctctgttgcccaggctggaatgcagtggagcgatctcggcttactgcaacctctgcctcccaggttcaagcaattctcctgcctcagcctcccaagtagctgggattacaggcgtgtaccaccacagctggttaattttttgtatttttagtaaagactgggtttcaccatgttggccaggctggtctcgaactcctgacctcaagtgatttccccgccttggcctcccaaagtgctgggattacacgcatgagccaccacgccctgccagaggctctgagaattcttatagcaaagttaattttatgacataagcttataactaatgaggtcaaaactacaaaattaaaaatataaggtaatcctaact

SEQ ID NO: 44747 - DNA, 612 bp, Homo sapiens
actatagggcgaattggagctccaccgcggtggcggccgctttttttttttttttgtgtttcaataaaactttatttacaaaaacaggtagtgggctggattggccaacttctgatgaatagcatttctttataaattctgaacatgagtactttaaaaaaatgtagcaaatatcttctactattatgtggttcatcttttccacctagtgtatcatatttttgatgaacagaatttcctgttttgatttttttaaaatagtaaacaagatttgctgatccttaatacctgcctgggtttatttcccatcttgtcttcagtatgatctaggccttctggaagttgaatgggggagcgtctaacaaatagctacctaatacctagacagatgacatcatctccgtgtgcaggtaggacattagatggtttctctagggaaacacagagaaaagtattgagagcaaggagtgctgttctgtgaggccgctgcttaccctatgtctgagcagtgctgcctaccaacaccaaagaccctcaaggtccccagggaaggagtatttctcccacatagacactgggagtacttaccaggtttgatgggctgcctgttcg

SEQ ID NO: 44748 - DNA, 628 bp, Homo sapiens; identical to SEQ ID NO: 38895

SEQ ID NO: 44749 - DNA, 420 bp, Homo sapiens; identical to SEQ ID NO: 38962

SEQ ID NO: 44750 - DNA, 567 bp, Homo sapiens
ttggagctcaccgcggtggcggccgctttttttttttttttttttttttttttttggctgagtcaggaaacatttattcttccccataaatttaaatggaggtgaaactgtgaatatgaagcaaagaacatttatctcacaaggtaactctgaattcttttaattctgaaaccagagacatgtacaacacttacagcattcacacaacactattttcaaaataggtttttgacccctaaaaatgaaaattcttagcgacaagctttagatatgaaacttagcccagtgggtattcactttgtcacaaaaagcaactacagacaaatagtttttccctctccccgacacaaaaactgaaattacagacttttaaagcagaaaaaattttcttcaaaatgcaaatgattaaggtccaaggaacaaatgaacagaagatctcaattattcaatttgagcgagtgatttagattgcatattaactcctttgcttactacttcctgaaatcggattttggcaatatttatcttgtatctactgggcaagaacactgggaacacaaagaaatt

SEQ ID NO: 44751 - DNA, 586 bp, Homo sapiens
  misc_feature 31: n = A,T,C or G
accgggcccccccctcggaggtacttctagnattaattaacgcggggaaggggcccttggccacaggtggaattaagaaatctggcaaaagtaagctgttccttgtgcctgaggagatggtgaccctttatttcatctgtatttaaacctctctattccctgccataacatcttttgccacgtatagctggaattaagtgttgtcttggagctgttgtacatttaagaataaacttttgtaaaaaaagaaaaaaaaaaaaaaaaaaaaaaaaaaaaaaaaaaaaaaaaaaaaaaaaaaaaaaaaaaaaggaaaaaaaaaaaaaaaggcggccgccaccgggggggacctccaattccccctatagggagtcgtattaccccccctcactggccgtcgttttacaacgtcgggactggaaaaaccctggcgttacccaacttaatcgccttgcagcacatccccttttcgccagctggcgtaataccaaaaaggcccgcaccgatcgcccttcccaacagttgcccaccctgaatggcaaatggaaattgtaaccgttaatatttggttaaaattcgcgttaaattt

SEQ ID NO: 44752 - DNA, 455 bp, Homo sapiens
gcgcgcaatctaaccctcacataagggaacaaaagctgggtaccgggccccccctcgagagtacttctagaattaattaacgcgggggagggaggtcacggcgtaaaggtgcagctgccgccaccgccgcttctgcaaggtctcagggacgggctgcagccatgtcctattgccggcaggaagggaaggatcgaatcatatttgtaaccaaagaagatcatgaaactccaagcagtgcagaattggtggctgatgaccccaacgatccatacgaggagcatggattgatactgccaaatggaaacattaactggaactgcccatgccttgggggaatggcagcggtccctgtggagaacagttaagtcagccttttcctgcttccactatagcacggagggagatcaaggggtcagactgtgtagaccagttccgggccatgcaggaatgcatgc

SEQ ID NO: 44753 - DNA, 431 bp, Homo sapiens; identical to SEQ ID NO: 38966

SEQ ID NO: 44754 - DNA, 419 bp, Homo sapiens
ccagcgcgcaataaccctactaaagggaacaaaagctgggtaccgggccccccctcgagagtacttctagaattaattaacgcgggggtcagaaggctgggcagccatggcgtcctatttcgatgaacacgactgcgagccgtcggaccctgagcaggagacgcgaaccaacatgctgctggagctcgcaaggtcacttttcaataggatggactttgaagacttggggttggtagtagattgggaccaccacctgcctccaccagctgccaagactgtggttgagaacctccccaggacagtcatcagaggctctcaggctgagctcaagtgccccgtgtgtcttttggaatttgaggaggaggagactgccattgagatgccttgccatcaccttttccattccagctgcattctgc

SEQ ID NO: 44755 - DNA, 554 bp, Homo sapiens
ttagggcgaattggagctccaccgcggtggcggccgctttttttttttttttttttttttttttttttaggatggcaataaacagcttttattcttttatcagagacacgatctagctttttagcccaggccggagtgcgggggcatcctcacagctcgctgcagcttcactgggctcaggcgatcctctcgagtagctggggtacaggcgcaggccaccgtgacaggctttttttttttttttttttttttggaaaagagggtctcactatgttacccaggctagtctcgcagtctggcactcctggcctaaagcgatcctcctgcctcggcctttgggcctcccaaagggctggcctgtgcccagtcaatggctggtccaaattagggtctacccatctttatgcagggcttaaagtccgggggcggccccgcaccggtaccaaaagtacagtcctgtgcccccgccttaattaattctagaaatcccctcgagggggggcccggtccccagctttgggtccctttaatggggggtaattgcccccttggcg

SEQ ID NO: 44756 - DNA, 606 bp, Homo sapiens; identical to SEQ ID NO: 32302

SEQ ID NO: 44757 - DNA, 634 bp, Homo sapiens; identical to SEQ ID NO: 32242

SEQ ID NO: 44758 - DNA, 606 bp, Homo sapiens
tatagggcgaattggagctccaccgcggtggcggccgctttttttttttttttttttttttttttttttaggattgcaataaacagcttttattcttttatcaaagacacgatctagctttttagcccaggccggagtgcgggggcatcctcacagctcgctgcagcttcactgggctcaggcgatcctctcgagtagctggggtacaggcgcaggccaccgggacaggcttttttttttttttttttttttggaaaagagggtctcactatgttacccaggctagtctcgcagtctggcactcctggcctaaagcgatcctcctgcctcggcctttcggcctcccaaagggctggcctgtgcccagtcaatggctgttccaaattagggtctacccatctttatgcagggctaaagtccgggggcggccccgcaccgttaccaaaagtacagtcctgtgcccccgccttaattaattctaaaagtactctcgagggggggcccgggacccagcttttgttccctttagggagggttaattgcgcccttggcgtaatcatgggcatagctgtttcctgtgtgaaattgttatccgctcacaattcc

SEQ ID NO: 44759 - DNA, 576 bp, Homo sapiens; identical to SEQ ID NO: 38972

SEQ ID NO: 44760 - DNA, 428 bp, Homo sapiens; identical to SEQ ID NO: 32336
  misc_feature 311: n = A,T,C or G

SEQ ID NO: 44761 - DNA, 607 bp, Homo sapiens
  misc_feature 598: n = A,T,C or G
tcgacccacgcgtccgaaataccctaatctccaagtcattggaggcaatgtggtcactgctgcccaggccaagaacctcattgatgcaggtgtggatgccctgcgggtgggcatgggaagtggctccatctgcattacgcaggaagtgctggcctgtgggcggccccaagcaacagcagtgtacaaggtgtcagagtatgcacggcgctttggtgttccggtcattgctgatggaggaatccaaaatgtgggtcatattgcgaaagccttggcccttggggcctccacagtcatgatgggctctctcctggctgccaccactgaggcccctggtgaatacttcttttccgatgggatccggctaaagaaatatcgcggtatgggttctctcgatgccatggacaagcacctcagcagccagaacagatatttcagtgaagctgacaaaatcaaagtggcccagggagtgtctggtgctgtgcaggacaaagggtcaatccacaaatttgtcccttacctgattgctggcatccaacactcatgccaggacattggtgccaagagcttgacccaagtccgagccatgatgtactctggngagcttaag

SEQ ID NO: 44762 - DNA, 638 bp, Homo sapiens
tacgactcactatagggcgaattggagctccaccgcggtggcggccgctttttttttttttttttgagacagagtctcactctgtcgcccaggctggagagcagtggcgtgatctcagctcactgcatgctccgcctcctgggttcacgccattctcccacttcagtctcctgagtagctgggattacaggcgtccaccgccacacctggctaattttgtttttgtatttttagtagagacagggtttcaccgtgttagccaggatggtctcgatctcctgacttcgtgatccgcctgcatcagcctcccaaagtgctgcgattacaggcatgagccaccgtgctcggccagctctctcttaaatgtagcagctggaaacattctttttgtttgattttttgctggtcccgcgttaattaattctagaagtactctcgagggggggcccggtacccagcttttgttccctttagtgagggttaattgcgcgcttggcgtaatcatggtcatagctgtttcctgtgtgaaattgttatccgctcacaattccacacaacatacgagccggaagcataaagtgtaaagcctggggtgcctaatgagtgagctaactcacattaattgcgttgcgctcact

SEQ ID NO: 44763 - DNA, 512 bp, Homo sapiens
cgcgcaattaaccctcactaaagggaacaaaagctgggtaccgggccccccctcgagagtacttctagaattaattaaggcgggttaactgcttgagtccaggaattcgagaccagtctagtctaggcaacacagcaaaaccccatctctataaaaataagccaggtatggtggcacgtgcctgtaattcccactacttgggaggctgagctgagagggtcgcctgagcctgggaggtcaagaatgcgtaagccgtgattgtaccactgcacgccagcctgggtgagaccctgtctcaaaaaaaaaaaaaaaaaaaaaaaaaaaaaggcggccgccaccgcggtggagctccaattcgccctatagtgagtcgtattacgcgcgctcactggccgtcgttttacaacgtcgtgactgggaaaaccctggcgttacccaacttaatcgccttgcagcacatccccctttcgccagctggcgtaatagcgaagaggcccgcaccgatcgccctt

SEQ ID NO: 44764 - DNA, 481 bp, Homo sapiens
tacactactatagggcgaattggagctccaccgaggtggcggccgagggacgccgcccgggcaggtacttttttttttttttttttttttagctttttttttttttttttttttttggaattacaaagctacttttaatactttggggtgagccccacaggaataaaaaacactgggaaggggtaaccccctcacccccgggagtggcccagggggagagaggctacctgaggggaaggaagcacaaaagggacccgctgcaaactcagggcaaagggaatgccatcggtgctgggacctgtgagccctacaggaggaaacccgagcgtggtgggactggctccaggcacacaggcaaagggcaagagggttggacacaaagccacaaagctacttgggttcctccttcttctcgtttgcctttttctgcttctgctgcatgatctccgagtccctttgcttgcgggcggcaacaaaaagc

SEQ ID NO: 44765 - DNA, 477 bp, Homo sapiens
tggagctccaccgcggtggcggccgcttttttttttttttttttttttttttgagagacaaacatgggccacatttttaagacaaacatggaccacaaccatgctgagagaacttagagtgaagtttacatggctatctttcttagtattagaaattttacctgataaacatcaaacatacgaccaacatagcatataaagcagctctacagatattttcctactgcccaaaatatcatataatgcacatgtaggtcacatgtgagtaggcaagagattctggaacacagaagcaagacaacaggatcacagcaatttcagtatgctctgcttgttataggaaatccccagaacattctccaattactgaacaaaaaaagcaataaaactcagatttgtctgcctggggagaaataaacagaaatagaaagtgaatagcaaaacaaagctatctggtgaaaagacattcttacttgg

SEQ ID NO: 44766 - DNA, 491 bp, Homo sapiens; identical to SEQ ID NO: 32301

SEQ ID NO: 44767 - DNA, 442 bp, Homo sapiens
gactcactatagggcgaattggagctccaccgcggtggcggccgcttttttttttttttttttttttttttggaaggagagagactttttccgctctctcgctccctgttaaagccgggtctagcacagctgcagacgccaccagcgagaaagagggagaggaagacagatagggggcgggggaagaagaaaaaaaaagggtaaaaagtcttctaggagaacctttcacatttgcaacaaaagacctaggggctggagagagattcctgggacgcagggctggagtgtctatttcgagctcagcggcagggctcgggcgcgagtcgagaccctgctcgctcctctcgcttatgaaaccgacgttcaggagcggctttttaaaaacgcaaggcacaaggacggtcacccgcgcgactatgtttgctgatttttcgccttgccc

SEQ ID NO: 44768 - DNA, 510 bp, Homo sapiens
attaattaacgcgggggaagatgcggtaatgaaaccggttagtcaattttgtcttaatattgttgacaattctgtaaagttcctttttatgaatatttctgtttaagctatttcacctttcttttgaaatccttcccttttaaggagaaaatgtgacacttgtgaaaaagcttgtaagaaagcccctcccttttttctttaaacctttaaatgacaaatctaggtaattaaggttgtgaatttttatttttgctttgtttttaatgaacatttgtctttcagaataggattgtgtgataatgtttaaatggcaaaaacaaaacatgattttgtgcaattaacaaagctactgcaagaaaaataaaacacttcttggtaacacaaaaaaaaaaaaaaagcggccgccaccgcggtggagctccaattcgccctatagtgagtcgtattacgcgcgctcactggccgtcgttttacaacgtcgtgactgggaaaaccctggcgttacccaac

SEQ ID NO: 44769 - DNA, 410 bp, Homo sapiens
cgcgcaattaatccctcactaaagggaacaaaagctgggtaccgggccccccctcgagagtacttctagaattaattaacgcgggtcgggcgtagtggcgggcgcctgcagtccccgccactcaggaggctgaggcaggagaattgcttgagcctgggagacagagattgcagtgagccgagatggcgccattgcaccccagcctggcgacaagagcgaaactctgtcgcacgaaaaaaaaaaaaaaaaaaaaaaaaaaaaaaaaagcggccgccaccgcggtggagctccaattcgccctatagtgagtcgtattacgcgcgctcactggccgtcgttttacaacgtcgtgactgggaaaaccctggcgttacccaacttaatcgccttgcagcacatccccctttcgc

SEQ ID NO: 44770 - DNA, 524 bp, Homo sapiens; identical to SEQ ID NO: 38983

SEQ ID NO: 44771 - DNA, 594 bp, Homo sapiens
gagcgcgcgtaatacgactcactatagggcgaattggagctccaccgcggtggcggccgctttttttttttttttttttttttttttttgatggaatctcactctgtcgcccacgctgcagtgcagcagcatgatgtcggctcactgcaacctccacctctcgggttcaagtgattctcctgcctcagcctcctgagtagctggtattataggcgtgcgccaccacaccctgctaatttttgtatttttagtaaagatggggtttcaccatgttggtcagtctggtctcgaactcccgaccttgtgatctacctgccccatcctcccaaagtgctgggattataggcctgagccaccgcaccggtctctccttctcttttaagctctggtcccaaactgctacccgcttccccagccaggcctccccctgagcagacacactgaccaagagaagcctccacctactgcctggacatgcaaaccctgccgcagcccaaggccttggagagctagagttatgcttccggccaacgctgaacccttcttagcttagaccggggtaacttggggatcttttgaaaggaaaggattctt

SEQ ID NO: 44772 - DNA, 481 bp, Homo sapiens
ccctactaaagggaacaaaagctgggtaccgggccccccctcgagagtacttctagaattaattaacgcgggggcagaaaagggggcggcggactcggcttgttgtgttgctgcctgagtgccggagacggtcctgctgctgccgcagtcctgccagctgtccgacgatgtcgtcccacctagtcgagccgccgccgcccctgcacaacaaccaacaacaactgcgagggaaaatgagcagtctctgcccccgccggccggcctcaacagttcctgggtggagctacccatgaacagcagcaatggcaatgataatggcaatgggaaaaatggggggctggaacacgtaccatcctcatcctccatccacaatggagacatggagaagattcttttggatgcacaacatgaatcaggacagagtagttccagaggcagttctcactgtgacagcccttcgccacaagaagatgggcagatc

SEQ ID NO: 44773 - DNA, 661 bp, Homo sapiens; identical to SEQ ID NO: 32346

SEQ ID NO: 44774 - DNA, 639 bp, Homo sapiens; identical to SEQ ID NO: 39094

SEQ ID NO: 44775 - DNA, 642 bp, Homo sapiens; identical to SEQ ID NO: 41185

SEQ ID NO: 44776 - DNA, 404 bp, Homo sapiens; identical to SEQ ID NO: 38989

SEQ ID NO: 44777 - DNA, 581 bp, Homo sapiens; identical to SEQ ID NO: 38894
  misc_feature 82: n = A,T,C or G

SEQ ID NO: 44778 - DNA, 628 bp, Homo sapiens; identical to SEQ ID NO: 38917
  misc_feature 564, 593: n = A,T,C or G

SEQ ID NO: 44779 - DNA, 488 bp, Homo sapiens; identical to SEQ ID NO: 38992

SEQ ID NO: 44780 - DNA, 486 bp, Homo sapiens; identical to SEQ ID NO: 38993
  misc_feature 60, 203: n = A,T,C or G

SEQ ID NO: 44781 - DNA, 532 bp, Homo sapiens; identical to SEQ ID NO: 38994

SEQ ID NO: 44782 - DNA, 606 bp, Homo sapiens; identical to SEQ ID NO: 32302

SEQ ID NO: 44783 - DNA, 421 bp, Homo sapiens
cccagcgccataaccctactaagggaacaaaagctgggtaccgggccccccctcgagagtacttctagaattaattaacccgggaggcagatgttgcagtgagtcaagatcatgccactccactccagcctgggtgatagaatgagactcagtctcaaaaaaaaaaaaaaagaaaaaaacaaagactacacattgggtacagacttgatggataaaaaagactacccttgggtgatgggtgcaccaaaatctcagaaatcaccactgaagaacttttccatgcaaccaaacactacttgttccccaaacactactgaaataaaagtttaaaaaaaaatacgtaagaacagacataaaaaaaaaaaaaaaaaaaaaaaaaaaaaagcggccgccaccgcgggggagctccaattcgccctat

SEQ ID NO: 44784 - DNA, 542 bp, Homo sapiens; identical to SEQ ID NO: 38997

SEQ ID NO: 44785 - DNA, 493 bp, Homo sapiens; identical to SEQ ID NO: 38998

SEQ ID NO: 44786 - DNA, 428 bp, Homo sapiens; identical to SEQ ID NO: 32336
  misc_feature 311: n = A,T,C or G

SEQ ID NO: 44787 - DNA, 490 bp, Homo sapiens; identical to SEQ ID NO: 39000

SEQ ID NO: 44788 - DNA, 606 bp, Homo sapiens; identical to SEQ ID NO: 39001

SEQ ID NO: 44789 - DNA, 657 bp, Homo sapiens; identical to SEQ ID NO: 38956

SEQ ID NO: 44790 - DNA, 566 bp, Homo sapiens
tatagggcgaattggagctccaccgcggtggcggccgctttttttttttttttttttttttttgtttttgaggcagagttttgctctgtcgcccaggctggagtgcagcggtatgattatggctcactgcagcctcgacctcctggccccaggcgatcctcccacctcagtcccctaagtagctgggaccataggtatgtgccaccacacccggctaatttcattttttgtagagatgaggtcttactatgttgactaggctggtctcgaactcctgggctcaagcaggccttgtgcctcggcctccccaactgttgggattatgggcgtgagccactgtgcccggtctgctcgctgaatttctaatgagcttgaattacaggaagtaaaaataaattttccacttacagaccactaaccagtttagagcaaatctgtaaggagtgtatagattatgccacacgagcgcatgaagctaccacatgtttaaagacaagtatacctcttgtgaacagcagtgttcagctaggaggcataaacatgaactgaagaaaccaagacatcag

SEQ ID NO: 44791 - DNA, 582 bp, Homo sapiens; identical to SEQ ID NO: 32291

SEQ ID NO: 44792 - DNA, 628 bp, Homo sapiens; identical to SEQ ID NO: 38917
  misc_feature 564, 593: n = A,T,C or G

SEQ ID NO: 44793 - DNA, 620 bp, Homo sapiens
  misc_feature 38: n = A,T,C or G
actgggtaccgggcccccccctcggaaatacttctagnattaattaacgcgggctcttttttggttccatatgaactttaaagtagttttttccaattctgtgaagaaagtcattggtagcttgatggggatggcattgaatctgtaaattaccttgggcagtatggccattttcacaatattgattcttcctacccatgagcatggaatgttcttccatttgtttgtatcctcttttatttccttgagcagtggtttgtagttctccttgaagaggtccttcacatcccttgtaagttggattcctaggtattttattctctttgaagcaattgtgaatgggagttcactcatgatttggctctctgtttgtctgttgttggtgtgtaagaatgcttgtgatttttgtacatttattttgtatcctgagactttgctgaagttgcttatcagcttaaggagattttgggctgagacaatggggttttctagatatacaatcatgtcatctgcaaacaggaacaatttgacttgctcttttcctaattgaataccctttatttccttctcctgcctaattgccctggccagaacttccaacactatgttgaataggagtg

SEQ ID NO: 44794 - DNA, 514 bp, Homo sapiens
cgcgcaattaaccctcactaaagggaacaaaagctgggtaccgggccccccctcgagagtacttctagaattaattaacgcgggggcagaaaagggggcggcggactcggcttgttgtgttgctgcctgagtgccggagacggtcctgctgctgccgcagtcctgccagctgtccgacgatgtcgtcccacctagtcgagccgccgccgcccctgcacaacaacaacaacaactgcgaggaaaatgagcagtctctgcccccgccggccggcctcaacagttcctgggtggagctacccatgaacagcagcaatggcaatgataatggcaatgggaaaaatggggggctggaacacgtaccatcctcatcctccatccacaatggagacatggagaagattcttttggatgcacaacatgaatcaggacagagtagttccagaggcagttctcactgtgacagcccttcgccacaagaagatgggcagatcatgtttgatgtggaaatgcacac

SEQ ID NO: 44795 - DNA, 602 bp, Homo sapiens
  misc_feature 26, 509: n = A,T,C or G
gggccccccctcggggatcttctagnattaattaacgcggggagccggggcagacgtccgtagcgccccctcccgaggaggtcgagccgggcagtggggtccgcatcgtggtggagtactgtgaaccctgcggcttcgaggcgacctacctggagctggccagtgctgtgaaggagcagtatccgggcatcgagatcgagtcgcgcctcgggggcacaggtgcctttgagatagagataaatggacagctggtgttctccaagctggagaatgggggctttccctatgagaaagatctcattgaggccatccgaagagccagtaatggagaaaccctagaaaagatcaccaacagccgtcctccctgcgtcatcctgtgactgcacaggactctgggttcctgctctgttctggggtccaaaccttggtctccctttggtcctgctgggagctccccctgcctctttcccctacttagctccttagcaaagagaccctggcctccactntgccctttgggtacaaagaaggaatagaagattccgtggccttgggggcaggagagagacactctccatgaacacttctccagccacctcata

SEQ ID NO: 44796 - DNA, 523 bp, Homo sapiens; identical to SEQ ID NO: 39009
  misc_feature 228, 229, 248, 249, 282, 283: n = A,T,C or G

SEQ ID NO: 44797 - DNA, 461 bp, Homo sapiens; identical to SEQ ID NO: 39058

SEQ ID NO: 44798 - DNA, 497 bp, Homo sapiens; identical to SEQ ID NO: 39011

SEQ ID NO: 44799 - DNA, 400 bp, Homo sapiens
gcgtaatacgactcactatagggcgaattggagctccaccgcggtggcggccgcttttttttttttttttttttttttttgacagagtcttgctctgtcacccaggctgaggtgcagtggcacgatctcggctcactgcaagctccgtctcccgggttcacgccattcttctgcctcagcctcccgagttgctgggactacaggtgcccgccaccacgcccgccttaattaattctagaagtactctcgagggggggcccggtacccagcttttgttccctttagtgagggttaattgcgcgcttggcgtaatcatggtcatagctgtttcctgtgtgaaattgttatccgctcacaattccacacaacatacgagccggaagcataaagtgtaaagcct

SEQ ID NO: 44800 - DNA, 435 bp, Homo sapiens; identical to SEQ ID NO: 39013

SEQ ID NO: 44801 - DNA, 606 bp, Homo sapiens; identical to SEQ ID NO: 39033
  misc_feature 17, 25: n = A,T,C or G

SEQ ID NO: 44802 - DNA, 621 bp, Homo sapiens; identical to SEQ ID NO: 32299

SEQ ID NO: 44803 - DNA, 443 bp, Homo sapiens; identical to SEQ ID NO: 32304

SEQ ID NO: 44804 - DNA, 452 bp, Homo sapiens; identical to SEQ ID NO: 38950

SEQ ID NO: 44805 - DNA, 457 bp, Homo sapiens
gtaatacgactactatagggcgaattggagctccccgcggtggcggccgcttttttttttttttttttttttttttttttatttggcatagtccttccttcatctcactccaactcttctttcctggctccccgctcggctccaccgccgcgggcctcccttcacacatagcacaggtagaggtacgtcttctctatcctccagtcgggcgggatcttctcggggcttggggcccttcatgtgcttctgcatggaggaaaggctggggcagtactctgtgcagatggtgcactggtagggcgaggcgccgttgtgcgttctcaggtgcttgatcatggccgagtagtcccgggagcgctggtggcagagcttacactcaaagggcttctcacctgtgtgcaccctatagtgcgtctccagctgatgcttgaggctgaactttttgccacagccattg

SEQ ID NO: 44806 - DNA, 419 bp, Homo sapiens; identical to SEQ ID NO: 39019

SEQ ID NO: 44807 - DNA, 445 bp, Homo sapiens; identical to SEQ ID NO: 39020

SEQ ID NO: 44808 - DNA, 647 bp, Homo sapiens
accctcactaaagggaacaaaagctgggtaccgggccccccctcgagagtacttctagaattaattaaaaaaataaaaaccaacattaaccagagtttggaagaagttgattccaaccttcataggtgactctgaggggttcaagtcttcagtggaaaaagtaactgtggatgtgatggaaaaaagagaactagaattagaagtggagcctgaagatgtgacagaattgtttcaatctcgtgaaaaaacttgaacagatgagaggctgctttgtatagataagcaaagaaagtggtttcctgaaatgaaatctactcctgaagatgctgtgaacattgttgaaaagacaacagacttagaatattacatcaacttagttgatcaagcagtggcgaagtttgagaggattaagtccaattctaaaagaagttccactatgcgtaaaatgttatcaaacagcgtcgaatgctaaagagaagtttttcatgtaatgaagagtcaatcaatgcagcaatcttcactgctgtcttattttaagaaactgccacagccaccctgatcaacagccatcaacactgaggcaagacctaccacaagcaaaaagattacaaactcaccaaagtctcacatgatcattagcacttttt

SEQ ID NO: 44809 - DNA, 533 bp, Homo sapiens; identical to SEQ ID NO: 38881

SEQ ID NO: 44810 - DNA, 445 bp, Homo sapiens; identical to SEQ ID NO: 39023

SEQ ID NO: 44811 - DNA, 596 bp, Homo sapiens; identical to SEQ ID NO: 44656

SEQ ID NO: 44812 - DNA, 420 bp, Homo sapiens; identical to SEQ ID NO: 39030

SEQ ID NO: 44813 - DNA, 340 bp, Homo sapiens; identical to SEQ ID NO: 39026

SEQ ID NO: 44814 - DNA, 435 bp, Homo sapiens; identical to SEQ ID NO: 39027

SEQ ID NO: 44815 - DNA, 663 bp, Homo sapiens
gcgtaatacgactcactatagggcgaattggagctccaccgcggtggcggccgctttttttttttttttttttttttttttccgggttcggagccgttccggatgctttaggctgccggatgtctgatctccggataactgaggcgtttctgtacatggattatctgtgttttagagcactttgctgcaagggaccaccacctgcacgaccagaatatgacctggtttgcataggcctcacaggttctggcaaaaccagtctgttgtccaaactctgcagtgaaagccccgataacgtcgtgtcgaccacaggttttagtattaaagcagtgccattccagaatgccatcttgaatgtaaaagaacttggaggggctgataacatccggaaatactggagccgctactaccaaggatctcaaggggtaatatttgtattagacagtgcctcttcagaggatgatttagaagctgctagaaatgagctgcactcagctcttcagcatccacagttatgcactttaccctttttaatattggccaatcatcaagacaagccagcagctcgctcagtacaagagatcaaaaaatattttgaacttgaaccacttgcacgtggaaaacgctggattctacagccctgctcactggatgacatggatg

SEQ ID NO: 44816 - DNA, 420 bp, Homo sapiens; identical to SEQ ID NO: 39030

SEQ ID NO: 44817 - DNA, 631 bp, Homo sapiens; identical to SEQ ID NO: 41272

SEQ ID NO: 44818 - DNA, 428 bp, Homo sapiens; identical to SEQ ID NO: 32336
  misc_feature 311: n = A,T,C or G

SEQ ID NO: 44819 - DNA, 606 bp, Homo sapiens; identical to SEQ ID NO: 32302

SEQ ID NO: 44820 - DNA, 667 bp, Homo sapiens; identical to SEQ ID NO: 32312

SEQ ID NO: 44821 - DNA, 306 bp, Homo sapiens
aaaaaaaaaaaaaaaaaaaaaaaaaaaaaaaaaaaaaaaaaaaaaaaaaaaaaaaaaaaaaaaaaaaaaaaggggggggggggcgcgtttttttttttttaaaaaaaaaaaccccccccccccccccccgggggggaaaaaaaaaaaaaaggggccggggggggggtgatttttttttttgtggggtttttggggggggcaaaaaaaaagaagttcccccttatttttaaaaaagaaattttttttcctccttttcttggggggggggggggccccccctcaattggttttttttttggggggggc

SEQ ID NO: 44822 - DNA, 651 bp, Homo sapiens; identical to SEQ ID NO: 39035

SEQ ID NO: 44823 - DNA, 578 bp, Homo sapiens; identical to SEQ ID NO: 39036

SEQ ID NO: 44824 - DNA, 600 bp, Homo sapiens
atagggcgaattggagctccaccgcggtggcggccgctttttttttttttttttttttttttttttgggaggctcgctcttttgcccaggctggagagtgcaatggtgccatctcagctcactacatccctgattcaagtgattctcctgcctaagcctcctgagtagctgggattacaggcacttgccatcatgcctggctaatttttgtatttttgtagagacggggtttcaccatgttggccagtctggtcttgaactcttgacctcaggcgatccatccacctcggcttcccaaagtgctggaattataggcgtgagccaccgcacccagccttctgtgtgtattttcttatgatgtagaatgagtgataaagcaccataggagtcacctagtgttgccttttccatttttgagttgataaatggaggtctcagtctctgttaattagtggtacatctgggaaaagtcaaatgtgttgagctcgaaggtgttggtttgtttgtttttcccaccaggtctcttaactgtgcttgctgctggtgacctaccaattgttgtgtgacctaatttgcagcatgcacatggtaccttacaca

SEQ ID NO: 44825 - DNA, 661 bp, Homo sapiens; identical to SEQ ID NO: 32346

SEQ ID NO: 44826 - DNA, 391 bp, Homo sapiens; identical to SEQ ID NO: 39039

SEQ ID NO: 44827 - DNA, 634 bp, Homo sapiens; identical to SEQ ID NO: 32242

SEQ ID NO: 44828 - DNA, 644 bp, Homo sapiens; identical to SEQ ID NO: 39041
  misc_feature 558, 563: n = A,T,C or G

SEQ ID NO: 44829 - DNA, 657 bp, Homo sapiens; identical to SEQ ID NO: 38956

SEQ ID NO: 44830 - DNA, 621 bp, Homo sapiens; identical to SEQ ID NO: 32299

SEQ ID NO: 44831 - DNA, 624 bp, Homo sapiens; identical to SEQ ID NO: 39044

SEQ ID NO: 44832 - DNA, 677 bp, Homo sapiens; identical to SEQ ID NO: 38933

SEQ ID NO: 44833 - DNA, 555 bp, Homo sapiens
gcgaattggagctccaccgcggtggcggccgaggtacaaactatttaatgcatatctgccccattaaacaagatatttgatgtagcagagaagccagaagctgagtcacttcatttctttctgttgcctccagttgccagcactgaggccaaattacagccttttcaatagctccaatctcattagacagtcccaagccatagtagcacaatgctccaagaccaacagcagcccctccagcaacaaaccatcttcccatctgatcaattttaaatattttttccatcgatggttccaatgctgcctctttgagttcttggccagttctcccacgccggatcccaattcttgttttggtggcatattccctgctaggtgttaacagccattgattcttcgtgatggaattcttcacaacaggggaggccttggtgaaagctgggtggaaaaccctagaaggtagtgtccggagacacaccaaccttgcagccaacatggtggtggtgcaccaggtctaccgagcagatctgaaatgctcggtccccggtcaccttc

SEQ ID NO: 44834 - DNA, 450 bp, Homo sapiens
tacactactatagggcgaattggagctccaccgcggtggcggccgctttttttttttttttgtgtttcaataaaactttatttacaaaaacaggtagtgggctggattggccaacttctgatgaatagcatttctttataaattctgaacatgagtactttaaaaaaatgtagcaaatatcttctactattatgtggttcatcttttccacctagtgtatcatatttttgatgaacagaatttcctgttttgatttttttaaaatagtaaacaagatttgctgatccttaatacctgcctgggtttatttcccatcttgtcttcagtatgatctaggccttctggaagttgaatgggggagcgtctaacaaatagctacctaatacctagacagatgacatcatctccgtgtgcaggtaggacattagatggtttctctagggaaacact

SEQ ID NO: 44835 - DNA, 545 bp, Homo sapiens
ctcacttagggcgaattggagctccaccgcggtggcggccgcttttttttttttttttttttttttttttttttttttttttttttaattatcctctcacaggaccaacttttattttatttattcattaaaggacaaatttttaaaagtaaagggaatgaaaccttttgtatttaaaatccatagacagaacttaattgtaaaaaaaaaaaaaccttgctgggaaacagatgatgaaaaacactgtaaaacttttcacaaacccacaaaaagctcactttgaaaacaggattaacctgcttttgattaaccccgaaacataaaggtttaattttgctcaccctgaaatctcgctaaatttaaaactgcctgtgatccactcggtcgaggaaggctttccgttcaatgaacccctttttccctcgattatggagggccagtttttaaccaatccccttttcctccttgaagctctcccagcccagttgggacttctaaagggggctcattttctgcttttgggcaccaattttccccaaaaggct

SEQ ID NO: 44836 - DNA, 445 bp, Homo sapiens
ccctactaaagggaacaaagagctcgggtaccgggcccgccctcgagagtacttctagaattaattaaggcgggttaactgcttgagtccaggaattcgagaccagtctagtgcgaggcaacacagcaaaaccccatctctataaaaataagccaggtatggtggcacgtgcctgtaattcccactactttgggaggctgagctgagagggtcgcctgagcctgggaggtcaagaatgcgtaagccgtgattgtaccactgcacgccagcctgggtgagaccctgtctcaaaaaaaaaaaaaaaaaaaaaaaaaaaaaaagcggccgccaccgcggtggagctccaattcgccctatagtgagtcgtattacgcgcgctcactggccgtcgttttacaacggtcgtgactgggaaaaccctggcgttacccaacttaatcgcctt

SEQ ID NO: 44837 - DNA, 318 bp, Homo sapiens
tccaccgcggtggcggccgggcgcggtggctcacgcctgtaatcccagcactttgggaggccgaggcgggcggatcacgaggtcaggagatcgagaccatcccggctaaaacggtgaaaccccgtctctactaaaaatacaaaaaattagccgggcgtagtggcgggcgcctgtagtcccagctacttgggaggctgaggcaggagaatggcatgaacccgggaggcggagcttgcagtgagccgagatcccgccactgcactccagcctgggcgacagagcgagactccgtcccaaaaaaaaaaaaaaaaaaaaaaa

SEQ ID NO: 44838 - DNA, 571 bp, Homo sapiens
ctatagggcgaatcggagctccaccgcggtggcggccgcttttttttttttttttttttttttttttgggaagggagtggtttagggaagactcgaaagtgacaatggagctatcaagttcaagaaggagttagtaggggaggaggctgcaggaagaagtgcacgcctggaggcaggaacagcatgtgtcccggtagttcagggtggcgggcccaggcgggtgagaaagggcaatggagaaggaaggagaggagaccgtgcagacactgcaagtgccagaaacccgatccacactggcttcagagggtggaggggaggttcttcttggcttccataatagaaatgtccagggacctaccgacttcagattcagcgcaaactcatctgggcccggtctgtatccctccctctcttttctctcagcactttcctcaggcggttcccctcctggcattccagcagctgcccccgcgttaattaattctagaagtactctcgagggggggcccggtacccagcttttgttccctttagtgagggttaattgcgcgcttggcgtaatcatgggcat

SEQ ID NO: 44839 - DNA, 399 bp, Homo sapiens; identical to SEQ ID NO: 39053

SEQ ID NO: 44840 - DNA, 423 bp, Homo sapiens; identical to SEQ ID NO: 32307

SEQ ID NO: 44841 - DNA, 410 bp, Homo sapiens; identical to SEQ ID NO: 39055

SEQ ID NO: 44842 - DNA, 426 bp, Homo sapiens; identical to SEQ ID NO: 39056
  misc_feature 7: n = A,T,C or G

SEQ ID NO: 44843 - DNA, 619 bp, Homo sapiens
ctcactataggggcgaattgggagctccaccgcggtggcggccgccggagatgcctgacgcatctgtctgaggagcggtcagtgacgcgatggagcgggcaagggatcgcttacacctgagacgaactacagaacagcacgtaccagaggtggaagtccaagtcaaacgcagaaggactgcctcactgagcaaccaagagtgtcagttgtacccgaggcgttctcagcagcagcaagtacctgtggtggatttccaggctgaactgaggcaggcattcttagctgagacaccaagaggtggttaaagccatattggagtagcgaggaatctgattccaagcaaaaaccaggctccatctactctttgaagcttctgcccagcttgcattgtttctaggagaacccgcgttaattaattctagaagtactctcgagggggggcccggtacccagcttttgttccctttagtgagggttaattgcgcgcttggcgtaatcatggtcatagctgtttcctgtgtgaaattgttatccgctcacaattccacacaacatacgagccggaagcataaagtgtaaagcctggggtgcctaatgagtgagctaactcacattaatt

SEQ ID NO: 44844 - DNA, 461 bp, Homo sapiens; identical to SEQ ID NO: 39058

SEQ ID NO: 44845 - DNA, 410 bp, Homo sapiens; identical to SEQ ID NO: 39059

SEQ ID NO: 44846 - DNA, 366 bp, Homo sapiens
  misc_feature 230: n = A,T,C or G
cgcgcgtaatacgactcactatagggcgaattggagctccaccgcggtggcggccgcttttttttttttttttttttttttttgaaatatgcccacccatttcaggttgagccacggataaggagggcttagctcatgtctcctgtgggaattgaggcatctcaggaaacagtatagaagttggtacacgttagaatgaagaagaagctctggggtaaagaaaccaagangtgaagaaatgcgtggcttattttgactatagctggagcaaaccctctcataacaggtctgggaaggtggacaccgcgttatattaacgcggggtgaatattgatgaacaacacaataggtcatatgttaaaagac

SEQ ID NO: 44847 - DNA, 628 bp, Homo sapiens; identical to SEQ ID NO: 38917
  misc_feature 564, 593: n = A,T,C or G

SEQ ID NO: 44848 - DNA, 406 bp, Homo sapiens
atacgactcactatagggcgaattggagctccaccgcggtggcggccgctttttttttttttttttttttttttttttggaattattatttaatgagaaaaaaatccacgtgtatacaacatttcaaaacagaagttaaatcattaaatagtactttttatttaaatgtttataaggcagatctatgagaatgatagaaaacatggtgtgtaatttgatagcaatattttggagattacagagttttagtaattaccaattacacagttaaaaagaagataatatattccaagcagatacaaaatatctaatgaaagatcaaggcaggaaaatgagtataactaattgacaatggaaaatcaattttaatgtgaattgcacattatcctttaaaagctttcaaaag

SEQ ID NO: 44849 - DNA, 483 bp, Homo sapiens; identical to SEQ ID NO: 39112

SEQ ID NO: 44850 - DNA, 350 bp, Homo sapiens
tggcggccgcttttttttttttttttttttttttttttttttacatttaactctgatttattggggggtaaagcatgttatagtgttccagcttcactttttttctgaatggctatccagttgtcccaaaatcatttgttgaataattcattttcccccatttgaaatgacaccttttcgtatactaaagtcccaagtctcttagttataaaacagtaataaacccttgaaacaggcattttcctaaaatacattttgtttaagtaagacagttttcccccgcgttaattaattctagaagtactctcgagggggggcccggaccccaacttttgttccctttagtgagg

SEQ ID NO: 44851 - DNA, 433 bp, Homo sapiens
cgaattggatctccccgaggtggcggccgctttttttttttttttttttttttttttttttttttttttttttttttttttttttttttttttttggggggaggccatttatatgaaatggccagaacagggaaaaccttttttaaacaacaaagacccaaagtcgatcaacaattgccaggggggggaggaaaacggggggggaaataattgcttcacagggggatgacaaaaagttcccgaacctgacaaagggggggcccacacaactttttggatgtactaaaggcccctgattggccactttcaagggatggatttttagggtatttgaatttcatctcaattaaaaaacccaaacccccaaactggtcccgccttaattaattctaaaagtcccctccggggggggcccgggccccagcttttgttc

SEQ ID NO: 44852 - DNA, 439 bp, Homo sapiens; identical to SEQ ID NO: 38886

SEQ ID NO: 44853 - DNA, 570 bp, Homo sapiens
gcgtaatacgactactatagggcgaattggagctccccgcggtggcggccgctttttttttttttttttttttttttttttttttttttggaataacaaagctacttttaatactttgggggtgagccccacaggaataaaaaacactggggaaggggtaaccccctcacccccgggagtggcccagggggagagaggctacctgaggggaaggaagcacaaaagggacccgctgcagactcagggcaaagggaatgccatcggtgctgggacctgtgagcactacaggaggaaacgcgagcgtggtgggactggctccaggcacacaggcgaagggcaagagggttggacacgaagccacaaagctacttgggttcctccttcttctcgtttgcctttttctgcttctgctgcatgatctccgagtccctctgcttgcgggcggcagcagaaagcccgtcatctcggcgctttcccttaaccgagtcgctctgctttttcatattcttctggcgggcgagctcacgctggttaccgcgggtcatggcgacggcagcggctccaacctgc

SEQ ID NO: 44854 - DNA, 571 bp, Homo sapiens; identical to SEQ ID NO: 39068

SEQ ID NO: 44855 - DNA, 360 bp, Homo sapiens
ccgcggtggcggccgcttttttttttttttttttttttttgaggcgaatgaatttaatataatctctataaaaaccctaagggggcagttttttacagaaatataaattattttttttttttatcttttggagatggagtctcactctattgccaggctggagtgcagcggctgtagtggcctgatctcggctcactgcaacctctgcctcccggattcaagtgattctcctgcctcagcctcccgagcagctgggaatacaggcacccgccttaattaattctagaagtactttcgagggggggcccggtacccagcttttgttccctttagtgggggttaattgcgccgctcggccta

SEQ ID NO: 44856 - DNA, 647 bp, Homo sapiens
gactcactatagggcgaattggagctccaccgcggtggcggccgctttttttttttttttttttttttttttttttttttttttttttttttttttttatgggggcatcctatttttagggggctttcattattttattttttatacagatccatacccattgctagaatcaaagcaaaaattttaatgggcaggtcctacagaactaaagggaaacaaaacaaaacaacgaacaactgaaaaacaatagctttaaactttcaaggccaaaagataagatttaagggcaatacctgttgaaaaaggaaaaggagtttaaagttcctagagaggtatttataatgcaaatctaatgccagctttttagtaataaaaaagagaagggctttactatacactgactagcacataatacttaatttggaaagaaaaattaatgacgttccttgggccagcagcaaatatggggtgtccattgccggcaacagacacaacaccggaacagaaaaacccaaatccccccgccttaattaacgcgggggcaacccctaggaaacaagactaagagaaacaggaagaaaaagactaagcttgtccactctgtgtgtggggagggcagtggggagtaaaattcccataattagttc

SEQ ID NO: 44857 - DNA, 172 bp, Homo sapiens; identical to SEQ ID NO: 39071

SEQ ID NO: 44858 - DNA, 576 bp, Homo sapiens
tatagggcgaattggagctccaccgcggtggcggccgctttttttttttttttttttttttttttttggggagagaagcattcatgcaggctgcagagaaagcacttgctagagaaattttcataactataagggagcaaaaaactaatagccaagaccatgggataaagacctggaaagcatttatcctatttattcatttgttgctcatttattttttgtttattttattggaatataagctctataaaataaaatggacctgctgctcttgcgtatcactgtatgtcaagaagttatcatacagtatgaggcagagtgggcactaaacaaatgtttattttgatgaggaaaagatggataaattgatgacaaaggtgtgacatatttcttgtacaaaaaaaaaagaacaccttggggcactaaaagtatagaaaaattgctaagaagccagaagggggaattaaattaaaattaattaattctagaagtactctcgagggggggcccggtacccagcttttgttccctttagtgagggttaattgcgcgcttggcgtaatcatggtcatagct

SEQ ID NO: 44859 - DNA, 475 bp, Homo sapiens; identical to SEQ ID NO: 38927

SEQ ID NO: 44860 - DNA, 404 bp, Homo sapiens
tatacgactcactatagggcgaattggagctccaccgcggtggcggccgcttttttttttttttttttttttttttttttttttttttttttttcattatcctctcacaggaccaacttttattttatttattcatttaaggacaaatttttaaaagtaaagggaatgaaaccatttgtaattaagatccatagacagaacttcaatgtaaaaaaaaaaagaccttgctgggaaacagttgatgagaaacactgtaaaacatttcacagacccacaaaaagctcacattgtaaacaggattaagctgcttttgatttagcccgtaacatcaaggtttcattttgctcagcctgagatctcgctcaatttcaaactgcctgtgatccactcggccgaggaaggct

SEQ ID NO: 44861 - DNA, 471 bp, Homo sapiens; identical to SEQ ID NO: 39075

SEQ ID NO: 44862 - DNA, 466 bp, Homo sapiens; identical to SEQ ID NO: 44661

SEQ ID NO: 44863 - DNA, 421 bp, Homo sapiens; identical to SEQ ID NO: 44783

SEQ ID NO: 44864 - DNA, 638 bp, Homo sapiens
gtatacgactcactatagggcgaattggagctccaccgcggtggcggccgctttttttttttttttttgcagacggagttttgctctgtcacccaggctggagtgcaatggcatgatcttggctcactgcaacctccacgtcccgggtacaagcgattctcctgcctcagcctcccaagtagctgggactacaggtgtgtgcaaccacatccaggtaattttgtatttttagtagagatgggatttcaccatgttggccaggctggtcttgaactcctgaccttgtgatctgcctgccttggcctccaaagtgctgggattataggcatgagccaccgcgcccagctagaaaatacatttttgaagcaataataaagatgtgaaccaaatttagtgttctcaacatgtcaagccttaccgacaatgcaaagcaatagaaactcaaagcaatagaaactgctggtgagatataacctggttcaacccggtggaaatactttggcattaaacatgccaaactaaagttaaatacgcacataatctacattctggcaattccaccactaggcatttaccttagaaaaattctcaaacatatgcgccaaaagatatgtaaaagaatgcttatggcagcacta

SEQ ID NO: 44865 - DNA, 584 bp, Homo sapiens
  misc_feature 561, 562, 563, 564: n = A,T,C or G
cccccctcgagagtcttctagaattaattaacgcgggggtggctctttattcgtgagttttccatttacctccgctgaacctagagcttcagacgccctatggcgtccgcctcgacccaaccggcggccttgagcgctgagcaagcaaaggtggtcctcgcggaggtgatccaggcgttctccgccccggagaatgcagtgcgcatggacgaggctcgggataacgcctgcaacgacatgggtaagatgctgcaattcgtgctgcccgtggccacgcagatccagcaggaggttatcaaagcctatggcttcagctgcgacggggaaggtgtccttaagtttgctcgcttggtcaagtcctacgaagcccaggatcctgagatcgccagcctgtcaggcaagctgaaggcgctgtttctgccgcccatgaccctgccaccccatgggcctgctgctggtggcagcgtggccgcctcctgagagttggccctcccttgtgccactgccaggggaggaaaggccttgatgttccagacaataataaatgcgcctgtgacttannnnaaaaaaaaaaaaaaaaaaaa

SEQ ID NO: 44866 - DNA, 486 bp, Homo sapiens; identical to SEQ ID NO: 39002
  misc_feature 51, 52: n = A,T,C or G

SEQ ID NO: 44867 - DNA, 599 bp, Homo sapiens; identical to SEQ ID NO: 41177

SEQ ID NO: 44868 - DNA, 561 bp, Homo sapiens; identical to SEQ ID NO: 39082

SEQ ID NO: 44869 - DNA, 510 bp, Homo sapiens; identical to SEQ ID NO: 32310

SEQ ID NO: 44870 - DNA, 489 bp, Homo sapiens
tacgactcactatagggcgaattggagctccaccgcggtggcggccgctttttttttttttttttttttttgagacagtctcactttgtcgccaggctggagtgtggagtgcagtggcacaatcttggctcactgcaacctctgcctcctgggttcaagcgattctcctgcttcagcctcctaagtagctgggattacaggcacaccccaccacacccggctaatttttatatttttagtagaaatggggtttcaccatgttggccaggctggtcttgaactcctgacctcgtgatccacctgcctcggcttcccaaagtgtgagtcactgcacccagccttgctgaattttcttaaaactttttttttctgacatcttgagttaaaagtcttttgttattctttgagacgggatctggctctctcacccaacctggagtgcaatggtgcaatcacagctccctgtaccctctgcctcctgggctcctg

SEQ ID NO: 44871 - DNA, 585 bp, Homo sapiens
acgactcactatagggcgaattggagctccaccgcggtggcggccgcttttttttttttttttttttttttttttggggctgtatttcttattaaaatgattggtctaagaccaaagatcttgtccctgttgttctctattgtattccttgttcctaaaaggttcctgggacatacagttcaaaaatatatatctgatgtacgaatgactgaataagtgaatgtgaccataacgcagaaattccctaagaaatgctttgtcctgataggtctccagtctctgcagaggacaaagagaaatattctaaggtcccaaaaagtctttcctggtgtgccacataagacctcctattcagttcagtgtaatatttcccacataccagacaatctttctttaggattccacagaaatttgagcaggcaactagtcctatcctccgctttccccaccctcatcaccaaatttacaactcccacaatcatagttaccatttaccaattgcttcctgtaacccaggcactgtactatgccctgcatatatgttatctaactctgtgtaacaacccttgataggtaaccattatg

SEQ ID NO: 44872 - DNA, 651 bp, Homo sapiens
acgactactatagggcgaattggagctccaccgcggtggcggccgctttttttttttttttttttttttttttttgagtactatgataggtgaaatggtatgactataaaaaggatttgtttctttttgtctcctggaatgacatgatgcctttctagagaaagaaaaattgcaggctacaggaatgataaaaactactggattcatttagactattcgatttaggaaggtacaaccacttctttaacatcaagctaaaagtgggggaaagtctcagtctcccaggtaggtctcctctcacactgtcctgggtggcaggcgctgtttatacatgcccgctatcgctctggctgcactgtagatcatctgccgacgggacatcccagtaaatgccatgtgccaatcagtccggctgacattcagtaaactcttttccaggacttcacccactgtcaccaaaaggcctgaccacctcagattatagtcctggggagttagactttgagcctgctgtacaaattccaaaggcactggtgtggcttgtgtaaatgtttctagatgaatgccatggacaggatcttcaaccaccaaacaaccaatgtcaaaccatttgtcaggcagcaattctgcaatgaagttttctactgacac

SEQ ID NO: 44873 - DNA, 613 bp, Homo sapiens
gactcactatagggcgaattggagctccaccgcggtggcggccgctttttttttttttttttttttttttgggggaagatgaagaaatttcactcaagtattttgttactttaagattcaatgctggacactagaccagctataacattttcagatagagtgacttcatgcgtgaaatgatcacatacaatgaagaggttttaaaaaatacagatgacataacttgttcagttgaagaaaattaaaatactgatataaactaaatcattctcctcttcattttagggggatttttctctgcaattgtactgatttatgactagaaagctgaagactgatttgagcctctttagcaatactctatttcaccatttatcttccaaagaattatggctattttatttcttccaatgaagctggaaaattataatatgccagcagatcagtagaaatgtaaaaatattagtagttacccttttagatccaacttacctgtagtgaaatagcagcaatgcattctctatttgaggacaaaacataaaaaccctggcttcataaacatagagtattaaaaaatctcagaagtttaatgtgtagacatttgctaatattt

SEQ ID NO: 44874 - DNA, 498 bp, Homo sapiens; identical to SEQ ID NO: 39088

SEQ ID NO: 44875 - DNA, 551 bp, Homo sapiens
caccgcggtggcggccgctttttttttttttttttttttttttacttgaattgttgttatagtgcttccgttatttatttttattttttttattatactttaagttttagggtacatgtgcacaacgtgcaggtttgctacatatgtatacatgtgccatgttggtgtgctgcactcattaactcgtcatttatattaggtatatatacgtgttcattgtacccttatcgactttgcagcatgcttatccatctaactattcatctttatttgccttcgttttttgagttcccttattcatcctaaaacaaaatataatgcctgactcatagtcagacttcacagtatttttaaatgaattacattgcattggggaaatataaatagtaatgtccttttattagaggaagtctaaaagaaattcttgggtgaattgataatcaaacatttttaagaaggtatatttgctagcaaagaaagaaaaaatttgacagcttattttatattagaaaacctatggattctgggatttttctttgtttcaagtctgt

SEQ ID NO: 44876 - DNA, 628 bp, Homo sapiens; identical to SEQ ID NO: 38917
  misc_feature 564, 593: n = A,T,C or G

SEQ ID NO: 44877 - DNA, 544 bp, Homo sapiens
ctatacggcgaattggagctccaccgcggtggcggccgctttttttttttttttttttttttttttggagaaggagtctcgctctgtggtccaggctggagtgcagtggtgcaatctcagctcaatgcaagctccgcctcctgggttcacaccattctcttgtctcagcctcccgagtagctgagattacaggcacctgccaccacgcccggctaattttttgtatttttagtagagatggggtttcaccgtgttagtcaagatgatctcgatcttctgacctcgtgatccacccgcctcagcctcccaaagtgctgggattacaggcgtgagccaccgcacccggcctttcctgtcatttttaatggatatatggggaggttatcaggtagcctgcctctcagattcttccttccctgttctgttttagaacctttcagtactgttataaaacatatattctagtatctgagctccaatgaatccccatttttcatccctcagatacatctacttctttagcaaaagtccttttaaaaattat

SEQ ID NO: 44878 - DNA, 549 bp, Homo sapiens
gcgaattggagctccaccgcggtggcggccgctttttttttttttttttttttttttttttttgagacggagtctcgctctgtcacccggggctggagtgcagtggcgtgatctcagctcactgccagctccgccttccgggttcatgccattctcttgcctcagcctcccgagtagctggggctacaggcgcctgccaccacgcccggctaattttttgtatttttagtaaagacgagatttcaccgtgttagcaggatggtctcaatctcctgacctcgtgatccacccgcctcggcctcccaaagtgctgggattacaggcgtgagccaccgcgtccggcctggaccctcttagttaataattttaaagcaaaactgtgggcgattttgctgtgcattaagagaattgctataaagatgatatctgggacttagctggagaaacttgattgttagggcccttggtgcttagaaaaatttatttatatgtgattcaaattagagtattaattataaacatgaaagtgattcagtgaaatctcttcac

SEQ ID NO: 44879 - DNA, 631 bp, Homo sapiens; identical to SEQ ID NO: 41272

SEQ ID NO: 44880 - DNA, 639 bp, Homo sapiens; identical to SEQ ID NO: 39094

SEQ ID NO: 44881 - DNA, 661 bp, Homo sapiens; identical to SEQ ID NO: 39095

SEQ ID NO: 44882 - DNA, 644 bp, Homo sapiens; identical to SEQ ID NO: 39041
  misc_feature 558, 563: n = A,T,C or G

SEQ ID NO: 44883 - DNA, 644 bp, Homo sapiens; identical to SEQ ID NO: 39041
  misc_feature 558, 563: n = A,T,C or G

SEQ ID NO: 44884 - DNA, 547 bp, Homo sapiens
taaccctcactaaagggaacaaaagctgggtaccgggccccccctcgagagtacttctagaattaattaacgcgggttcctgctgagggagtgcatcccataatatggcaataattttcagtttctccaacgaaaagatagtgaaggaattaaatcttttgtcctcccatggttaaaaaaaaaaaaaagctgtgttcatttttaaaaaaaaaaaaaaaaaaaaaaaaaataaaaaaaaaaaaaaataaaaaaaaaaaaaaggcggccgccaccgcggtggagctccaattcgccctatagtgagtcgtattacgcgcgctcactggccgtcgttttacaacgtcgtgactgggaaaaccctggcgttacccaacttaatcgccttgcagcacatccccctttcgccagctggcgtaatagcgaagaggcccgcaccgatcgcccttcccaacagttgcgcaacctgaatggcgaatggaaattgtaagcgttaatattttgttaaaattcgcgttaaatttttgttaaatcagctcattttttaacc

SEQ ID NO: 44885 - DNA, 571 bp, Homo sapiens; identical to SEQ ID NO: 39099

SEQ ID NO: 44886 - DNA, 583 bp, Homo sapiens
  misc_feature 20: n = A,T,C or G
cactataggggcgaattggnagctccaccgcggtggcggccgcttttttttttttttttttttttttttttgtagctgaatttattataatcctttttttttttttttttaaagatggaatctcactctattgcccaggttggagtacaggggcgcaatctcggctcaccgcaacctccgctttccacctcctgggttcaagtgattctcctgcctcagcctccctagtagctgggattacaggcacatgccaccatgcccagctaattttgtatttttactaaagataaggtttcaccatgttggccaggctggtcttgaactcctgacctcaagtgatccacccacctcagcctcccaaagtgctgggattagaggcgtgagtcactgcacccagcataatcctctttcttaaacataattatttttattttatttggatttttctattttacttactttactctttatgatctttaatattggagttacattcaacatgactttatgcattaaaattatttttcattgtcaatcaaatattaaataaccatgtaagcagagtttcgtcttaggtttttga

SEQ ID NO: 44887 - DNA, 634 bp, Homo sapiens; identical to SEQ ID NO: 32242

SEQ ID NO: 44888 - DNA, 641 bp, Homo sapiens; identical to SEQ ID NO: 38900

SEQ ID NO: 44889 - DNA, 505 bp, Homo sapiens
cgtaatacgactcactatagggcgaattggagctccaccgcggtggcggccgcttttttttttttttttttttttttttggcgttttattttatttttttttttttttttttttttttttttttttttttgggggttttaccagttttatttctagactttcatgtttgtctttttgtcttctgctggaaacatgccggttacatgttggtgctgggaaaccccccggtgcaaccagaaatgcacagacccagccgcccgccgcccaaacccttaaacttgcgcgttacaggacaaactccgctgtgccccgtgcacttgccaccaacctttggccttttgatacacacaacatccaggacttgtgcccttgccccatcacgacagacaaagcgtccctcaaggcccccgcgttaattaattctaaaagtactctcgagggggggcccggtacccaacttttgttccctttagtgagggttaattgcgcgcttggcgtaatcatg

SEQ ID NO: 44890 - DNA, 495 bp, Homo sapiens; identical to SEQ ID NO: 39062

SEQ ID NO: 44891 - DNA, 634 bp, Homo sapiens; identical to SEQ ID NO: 32242

SEQ ID NO: 44892 - DNA, 535 bp, Homo sapiens
tctttttttttttttttttggttttttgcggctgaaatgtgcaatgatgtgttttatttcccttgatgcttaacattactaacaattgcaaaaataatactgaggagcactactttgcattgtttgtagttggagttttggatactgatcataaatcatgaatctggcgtattaatgcttaacttcagcgcctttgggttgagtgtatgtgtattttttctccccccaccccgcccctttttttttaagaataaggacaagtgcttacaatctgctcaagcaattgtttttcagatattggaattcagcaaagagtgacctctctggccattctaaaactttaatgttgtgtcctaaatctggtggaggaaaagcatgcgctgttgaaccaagctgctcactggacacatatttgtgtccccaggagattatttggcaggcactgcttgttatgaggttggttggtcatttattggtggtttactgctattggcgataacatgaaatgtgatacaactattggccataatttaat

SEQ ID NO: 44893 - DNA, 533 bp, Homo sapiens; identical to SEQ ID NO: 38881

SEQ ID NO: 44894 - DNA, 667 bp, Homo sapiens; identical to SEQ ID NO: 39108

SEQ ID NO: 44895 - DNA, 646 bp, Homo sapiens; identical to SEQ ID NO: 39096

SEQ ID NO: 44896 - DNA, 494 bp, Homo sapiens
gactcactatagggcgaattggagctccaccgcggtggcggccgcttttttttttttttttttttttttttttttttgaggtagaattttgctgttttgcccaggctggagtgaagtggtatcatcttggctcactgcaacctccgcccacccaggttcaagctattctcctgcctcagccttctgagtagctgggattataggcacccactgccacacctggctaatttttgtatttttagtagagacggggtttcaccacgttggccaggctggtctcgaactcctgacctcaggtgattcacccgccttaattaattctagaagtactctcgagggggggcccggtacccagcttttgttccctttagtgagggttaattgcgcgcttggcgtaatcatggtcatagctgtttcctgtgtgaaattgttatccgctcacaattccacacaacatacgagccggaagcataaagtgtaaagcctggggtgcc

SEQ ID NO: 44897 - DNA, 502 bp, Homo sapiens; identical to SEQ ID NO: 39111

SEQ ID NO: 44898 - DNA, 601 bp, Homo sapiens
gactatagggcgaattggagctccaccgcggtggcggccgcttttttttttttttttttttattttttttggaggaaggcacctacaaaacgaaagtgcctagggcttacaaaagtcatatgtagcctttacaaatattagctcagtcattttcagaaaggtttttccaattatcattttagagatgaggaaactgaagctcagggaggctaggaaacttatccaaagcctcttaagaggctatgttagtcagactgggctaacagctgtaacaaccccagaatttaaatggcttaacacattaggagtttatttgttattgccataacaattcagggtgtatgtttggcaggtagtctacacagtgattcagggacccaggctccttccctctggtggctttttctccctctagtgctgggagctctccatgcaaatggtggatggagaaagagaacaaaaagtgggggatttttataggccaggcctggaattggcccacatcacttccacacacattccactggccagaatgcagtcacgtgatcgtagctaactgcaaggaaggttggaaaatgtaatgtaactgcatgcctgggct

SEQ ID NO: 44899 - DNA, 439 bp, Homo sapiens; identical to SEQ ID NO: 38886

SEQ ID NO: 44900 - DNA, 576 bp, Homo sapiens
aatacgactcactatagggcgaattggagctccaccgcggtggcggccgcttttttttttttttttttttttttttttggagacagagttttgctcttgtcacccaggctggagtacaatggcacaatcgcggctcactgcaacctccacctcccgggttcaagtgattctcctgcctcggcctcctgagtagctgggattacaggcacctgccaccatgcctggctgtttttcatatttttagtagagacggggtttcaccatgttggccaggctggtcttgagctcgcgacctcaggtgattcgcccacctcagcctcccaaagtattgggattacagatgtgagccactgtgcccggcacttttctgcttttaaatacaatgattttagaaagtctgtatatgaactttgggcttgtacctagatatcccagtgtgtgtagggagccctgtatatctgcaaggggatccattagaccaaggatattagatccagcacttctcctttttaatgcatgtcataagcacatgattttatatcatgtcagaaaaaggctgttgatataaaggaagag

SEQ ID NO: 44901 - DNA, 405 bp, Homo sapiens
tagggcgaattggagctccaccgcggtggcggccgcttttttttttttttttttttttttttttggagacagggttttgacatgttggtcaggctggtcatgaactcctggcctcaagtgatccacctacctcggcctcccaaagtgctgggattacaggtgtgagccaccgcgcccaaccctgtgtttattcttaggtctgtactacgctttatgcctcagtttccacagttaaaacacgttattttattcctcacgttataggagcaatttgtattcataaacttggccttcaccttcaacttctgaagattttaatacagcgcaaatgatttggggtctgtgaattcagttttatttatttggctccttcctttaaggagtcaggctaatgcaagaaaatcc

SEQ ID NO: 44902 - DNA, 465 bp, Homo sapiens
  misc_feature 383: n = A,T,C or G
ctatagggcgaattggagctccaccgcggtggcggccgctttttttttttttttttttttttttttttttttggattcatataaagacttttatctattgtgcaaagagagggtcatctggctccccagaaggttctcaaccccatcaagactgtccattttacatctctagctccagttcttctcagagagtaaaagtgctccaaaggcctgtgatcatgggtactgattaagggctgcagactcttcagatccagttaaatccctggtgtttgagctgtgtgggagctgtggttgcttgcttcctggctttgcctgaggtcctgccgcaaaccctgcagcagctggtttaggagtgtaaggtggctgtctctgcgaggcanaggcaggggtgggaggcaattccctttatactcgatcactgccatcttggcccgatccaaactccgatttgggatctgcagc

SEQ ID NO: 44903 - DNA, 599 bp, Homo sapiens
atagggcgaattggagctccaccgcggtggcggccgctttttttttttttttttttttttttttttggaggaaggcacctacaaaacgaaagtgcctagggcttacaaaagtcatatgtagcctttacaaatattagctcagtcattttcagaaaggtttttccaattatcattttagagatgaggaaactgaagctcagggaggctaggaaacttatccaaagcctcttaagaggctatgttagtcagactgggctaacagctgtaacaaccccagaatttaaatggcttaacacattaggagtttatttgttattgccataacaattcagggtgtatgtttggcaggtagtctacacagtgattcagggacccaggctccttccctctgggggctttttctccctctagtgctgggagctctccatgcagatggtggatggagaaagagaacaaaaagtgggggatttttataggccaggcctggaattggcccacatcacttccacacacattccactggccagaatgcagtcacgtgatcgtagctaactgcaaggaaggttggaaaatgtaatgtaactgcatgcctgggctaa

SEQ ID NO: 44904 - DNA, 624 bp, Homo sapiens; identical to SEQ ID NO: 39044

SEQ ID NO: 44905 - DNA, 429 bp, Homo sapiens; identical to SEQ ID NO: 39069

SEQ ID NO: 44906 - DNA, 418 bp, Homo sapiens
agggcgaattggagctccaccgcggtggcggccgctttttttttttttttttttttttttaagacggagtcttgcactgtcgcctaggctggagtgcaatagtgcgatcttggctcactgtaagctccacctccggcgttcacgccattctcctgtctcagcctcccgagtagctggaattacaggctcccgccaccacgcccggcctttttttgtatttttttagtagagacagggtttcactatgttggccagactggtctcgaacttctgacctcgtgatccgcctgcttcggcctcccaaagtgctgggattacaggtgtaagccacagtgccccgccttaattaattctagaagtactctcgagggggggcccggtacccagcttttgttccctttagtgagggttaattgcg

SEQ ID NO: 44907 - DNA, 462 bp, Homo sapiens; identical to SEQ ID NO: 39121

SEQ ID NO: 44908 - DNA, 606 bp, Homo sapiens; identical to SEQ ID NO: 38868

SEQ ID NO: 44909 - DNA, 533 bp, Homo sapiens; identical to SEQ ID NO: 38881

SEQ ID NO: 44910 - DNA, 498 bp, Homo sapiens; identical to SEQ ID NO: 39124

SEQ ID NO: 44911 - DNA, 568 bp, Homo sapiens
tgggccctctacatgcatgctcgagcggccgccagtgtgatggatatctgcagaattcggctttcgagcggccgcccgggcaggtacccagttaagttttgatggtttaaattccactaaagaacatattcttctaataactagcatttattacatgaaatttaagagtttaagttccatcaaactagcccttgtgtaagattattatttcttctctataacttcaaaatagatatttcattcaaactgttcaggtgagaaaacataatggattttttttttttcctctggagctgcctgttcagtgagatggaggaggtgggcacatttaaggtcagttcactaacctatggttcagagttctgatcatatggaagtttggaaaagagagcttatcacaggtttgtatgctggtgaatggatagttttaattctcactgtctcaaaagagaatcagctcttcagcagttctagaaaagctttgacaatccccaaggggcagtgttaccttactccttcactgcttcttagaaggtagaattaagtttctggaattgcacctacatgt

SEQ ID NO: 44912 - DNA, 478 bp, Homo sapiens; identical to SEQ ID NO: 30781

SEQ ID NO: 44913 - DNA, 389 bp, Homo sapiens; identical to SEQ ID NO: 36277

SEQ ID NO: 44914 - DNA, 425 bp, Homo sapiens; identical to SEQ ID NO: 35850

SEQ ID NO: 44915 - DNA, 329 bp, Homo sapiens; identical to SEQ ID NO: 35851

SEQ ID NO: 44916 - DNA, 522 bp, Homo sapiens; identical to SEQ ID NO: 35852

SEQ ID NO: 44917 - DNA, 519 bp, Homo sapiens; identical to SEQ ID NO: 39143

SEQ ID NO: 44918 - DNA, 353 bp, Homo sapiens; identical to SEQ ID NO: 35854

SEQ ID NO: 44919 - DNA, 447 bp, Homo sapiens; identical to SEQ ID NO: 32509

SEQ ID NO: 44920 - DNA, 494 bp, Homo sapiens; identical to SEQ ID NO: 35856

SEQ ID NO: 44921 - DNA, 451 bp, Homo sapiens; identical to SEQ ID NO: 40435

SEQ ID NO: 44922 - DNA, 203 bp, Homo sapiens
actcactatagggcgaattggagctccacacgcggtggcggccgcccgggcaggtacccatgtcaagtgattttgaagactcagcacatctcatgcaaccagtccacaataagcctgtatgaaacaaggacctaggtataataatacatcatatccatggtcactcagctcctcgacatttccacacccagacccaaagtttt

SEQ ID NO: 44923 - DNA, 601 bp, Homo sapiens
ctactatacggcgaattggagctccaccgcggtggcggtggcttcctgccagccatgaaacagattggcaatgtggcagccctgcctggaattgttcatcgatctattgggcttcctgatgtccattcaggatatgggtttgctattgggaacatggcagcctttgatatgaatgaccctgaagcagtagtatccccaggtggtgtcgggtttgacatcaactgtggtgtccgcttgctaagaaccaatttagatgaaagtgatgtccagcctgtgaaggagcaacttgcccaagctatgtttgaccacattcctgttggggtggggtcaaaaggtgtcatcccaatgaatgccaaagacttggaggaggccttggagatgggggtggactggtccttaagagaagggtatgcctgggctgaagacaaggagcactgcgaggagtacctcggccgctctaaaactagtggatcccccgggctgcaggaattcgatatcaagcttatcgataccgtcgacctcgaaggggggcccggtacccagcttttgttccctttagtgagggttaattgcgcgcttggcgtaatcatggtcatagctg

SEQ ID NO: 44924 - DNA, 421 bp, Homo sapiens; identical to SEQ ID NO: 35860

SEQ ID NO: 44925 - DNA, 478 bp, Homo sapiens; identical to SEQ ID NO: 30781

SEQ ID NO: 44926 - DNA, 441 bp, Homo sapiens; identical to SEQ ID NO: 31648

SEQ ID NO: 44927 - DNA, 612 bp, Homo sapiens; identical to SEQ ID NO: 35956

SEQ ID NO: 44928 - DNA, 396 bp, Homo sapiens; identical to SEQ ID NO: 35864

SEQ ID NO: 44929 - DNA, 502 bp, Homo sapiens; identical to SEQ ID NO: 35865

SEQ ID NO: 44930 - DNA, 375 bp, Homo sapiens
  misc_feature 19: n = A,T,C or G
ggcgaattgggccctctanagcatgctcgagcggccgccagtgtgatggatatctgcagaattcggcttagcgtggtcgcggccgaggtacaagcttttttttttttttttttttttttttttttttttttttttttttttttttttttttttttttttttttttttttttttttttttttttttttttttttttttttttttttttttttttttttttttttttttttttttaaaaaaaaaaaaattttttttatttaaaaaaaaaaaaaaaaaaaaaaaattttttaaaaaaaaattttttttttttttttaaaaaggcccggccccaaaaacaccagggaaaataaaaaaaaaccccccccacaaaaaaaaa

SEQ ID NO: 44931 - DNA, 542 bp, Homo sapiens; identical to SEQ ID NO: 35867

SEQ ID NO: 44932 - DNA, 551 bp, Homo sapiens
  misc_feature 23: n = A,T,C or G
atagggcgaattgggccctctanagcatgctcgagcggccgccagtgtgatggatatctgcagaattcgccctttcgagcggccgcccgggcaggtactaaatgttaggtttcttgaacccagcatgtttttttctctcttcttatcagcagaacacacgttgttctctttacttggaacgccgcctctgacagatggtcacctcaccatcactcattcatccttcaagtcttcgatacaatttcttccaagaaaacttacctgattatttgagcttgagatagcactctctggaaagccctagaatttttatagcttgcggtaattgcttactgaaatctccagtgggctggaaaattagggaagggattttcatgtatctattgttaatttttcattaccacagctagcagagaggttatatgttttgaaaaaacttttattgagtaaatgagaggatgaatttaaaacaacctaaacacaggtaatgcagccaaataacaaattaaaaatcatcaagaagtgaaccacagaataaatcaataaggtaa

SEQ ID NO: 44933 - DNA, 335 bp, Homo sapiens; identical to SEQ ID NO: 35869

SEQ ID NO: 44934 - DNA, 144 bp, Homo sapiens; identical to SEQ ID NO: 35870

SEQ ID NO: 44935 - DNA, 431 bp, Homo sapiens; identical to SEQ ID NO: 35871

SEQ ID NO: 44936 - DNA, 380 bp, Homo sapiens; identical to SEQ ID NO: 35872

SEQ ID NO: 44937 - DNA, 439 bp, Homo sapiens; identical to SEQ ID NO: 35873

SEQ ID NO: 44938 - DNA, 389 bp, Homo sapiens; identical to SEQ ID NO: 36277

SEQ ID NO: 44939 - DNA, 478 bp, Homo sapiens; identical to SEQ ID NO: 30781

SEQ ID NO: 44940 - DNA, 423 bp, Homo sapiens; identical to SEQ ID NO: 35876

SEQ ID NO: 44941 - DNA, 385 bp, Homo sapiens; identical to SEQ ID NO: 35877

SEQ ID NO: 44942 - DNA, 560 bp, Homo sapiens
gggcgaattgggccctctatagcatgctcgagcggccgccagtgtgatggatatctgcagaattcgcccttagcgtggtcgcggccgaggtactccagcctgggcgacagaccttgccttttcaaaaaaaaaagaaagaaagaaagaaaagaaaagtatttggacacatttctcccaatatgtccaaatatccaaagcaattatatcaagggtattggctccttggttaagaactgggctttattttcacacactccctgaaatgacacagccagagatcaggtaggacccagagagaacaaagttacaaaccctgtgtccaaacagcatcctaaaatgaaatactcctggatggaacccttggaaaactcagtgttgaccatattcccagttacccataaaaacttatcaagttgtggtttagaaacagattcaaagaaagcagtctgcagaaaatacgcagatttactcttttaattagcaaaacacagactttacagatctcattactatatttagagaataaatcttagagtaaaatgactttgtttcttggcttg

SEQ ID NO: 44943 - DNA, 374 bp, Homo sapiens; identical to SEQ ID NO: 35879

SEQ ID NO: 44944 - DNA, 548 bp, Homo sapiens; identical to SEQ ID NO: 39995

SEQ ID NO: 44945 - DNA, 406 bp, Homo sapiens; identical to SEQ ID NO: 36743

SEQ ID NO: 44946 - DNA, 425 bp, Homo sapiens; identical to SEQ ID NO: 35883

SEQ ID NO: 44947 - DNA, 391 bp, Homo sapiens; identical to SEQ ID NO: 35884

SEQ ID NO: 44948 - DNA, 441 bp, Homo sapiens
tacactactatagggcgaattggagctccaccgcggtggcggccgaggtacttattgactcccggacaagccgaaaccccgaatttgtcatttctatcagtttttatataaattgttcttacctacttattgatgcttacaatttggcaattataaggggcaaaattggagcaagtgttttgggtaaataactccttacaatatattaaaaatacttacaaacaattcttagaatcaaacacttacgtaaatacttttttaaaaaaaataggtccaaaagactcagcccagatcggctttgaagttatatcaagatttaagtctacttcatgccaatgagctactcctcaacaggggctggttttgccatttgaggaatgacagccactatgttgtgtacctgcccgggcggccgctctagaactagtggatcccccgggc

SEQ ID NO: 44949 - DNA, 565 bp, Homo sapiens; identical to SEQ ID NO: 35889

SEQ ID NO: 44950 - DNA, 453 bp, Homo sapiens; identical to SEQ ID NO: 35887
  misc_feature 440: n = A,T,C or G

SEQ ID NO: 44951 - DNA, 571 bp, Homo sapiens
tcggatccctagtaacggccgccagtgtgctggaattcggcttcgagcggccgcccgggcaggtactttcatcagacccctgttttgtgatatatattacctgctttcatatttgtattttagaactcactcttcattccctattccactacccaacttcataccaaaaatcctgccaagtatttcagaaaacttggttattaacttggattaattacagtagacatacataggagatgtgtctatagaatgccaaaatatttaattgtgtcagaaatttagtcattcatccaaatattttgtccatatgatgccaaacatacttaatgaattatgttagctgacaaaattcttaacagaattgtcttagcattatttagacaaaataattgttattagttcaaaataataccaatagcaataaacaccatcaaagaaacaacgtatttaggttggcacaaattccaaccttgaggaaaatgacttcagttggctcatgtggaccaaacccttactgatatggttgtaatttggattctaagaatgctgagaacccacaatattttattat

SEQ ID NO: 44952 - DNA, 602 bp, Homo sapiens; identical to SEQ ID NO: 36334

SEQ ID NO: 44953 - DNA, 424 bp, Homo sapiens; identical to SEQ ID NO: 35890

SEQ ID NO: 44954 - DNA, 342 bp, Homo sapiens; identical to SEQ ID NO: 35891

SEQ ID NO: 44955 - DNA, 670 bp, Homo sapiens; identical to SEQ ID NO: 30471

SEQ ID NO: 44956 - DNA, 423 bp, Homo sapiens; identical to SEQ ID NO: 35893

SEQ ID NO: 44957 - DNA, 372 bp, Homo sapiens; identical to SEQ ID NO: 35894

SEQ ID NO: 44958 - DNA, 590 bp, Homo sapiens; identical to SEQ ID NO: 35895

SEQ ID NO: 44959 - DNA, 429 bp, Homo sapiens; identical to SEQ ID NO: 35896

SEQ ID NO: 44960 - DNA, 717 bp, Homo sapiens; identical to SEQ ID NO: 31986

SEQ ID NO: 44961 - DNA, 363 bp, Homo sapiens; identical to SEQ ID NO: 35898

SEQ ID NO: 44962 - DNA, 439 bp, Homo sapiens; identical to SEQ ID NO: 35899

SEQ ID NO: 44963 - DNA, 553 bp, Homo sapiens
  misc_feature 16: n = A,T,C or G
gaattgggccctctanagcatgctcgagcggccgccagtgtgatggatatctgcagaattcgcccttagcgtggtcgcggccgaggtactaaaattccttggttcactgattcgaagaagaacatcagcaagaacatcagctcggatgggcccttagagagcaacaatagatttgaaataagggacaagccaggaggttgccggggggcgggtagggggatagttgcaaaaatgttctgaactttaaaataacggtcccttgcaaacagaagttttttctccaaagtgtctctcctccagatctcccatctaccatttccaccctgcatgtgaatctcacttctagaggcagctgcctcgcgttcagcttacgacaccttcagaagctttgctaataaatgcatatcgaaaaagcgttctgcccatggggaccaatttctttttccatcacccgtgacttctcaacatgaaattaaaggcagaagcaagtaattgcagctggtggcagctcccaaggtttagctactgccaagggatctggtccatgcctcgt

SEQ ID NO: 44964 - DNA, 394 bp, Homo sapiens; identical to SEQ ID NO: 35901

SEQ ID NO: 44965 - DNA, 368 bp, Homo sapiens; identical to SEQ ID NO: 35902

SEQ ID NO: 44966 - DNA, 644 bp, Homo sapiens; identical to SEQ ID NO: 35903

SEQ ID NO: 44967 - DNA, 365 bp, Homo sapiens; identical to SEQ ID NO: 35904

SEQ ID NO: 44968 - DNA, 561 bp, Homo sapiens; identical to SEQ ID NO: 35905

SEQ ID NO: 44969 - DNA, 421 bp, Homo sapiens; identical to SEQ ID NO: 35906

SEQ ID NO: 44970 - DNA, 401 bp, Homo sapiens
  misc_feature 212: n = A,T,C or G
ctactatagggcgaattgggccctctagatgcatgctcgagcggccgccagtgtgatggatatctgcagaattcgccctttcgagcggccgcccgggcaggtactttttttttttttttttttttttttttattattttttttttttttttttttttttttttttttttttttttttttttttttttttttttttttttttttttttttttnaggcaaaaaaaagttttttttttttttggccccagggtttttggggtttttaaaaaaatcttttttttgttgggggggagggttttgggcaaaccctttttttttttggggggggcctttaaaaattttggggtttaaaagggtttttatcctccttggaaagggcccttttaaaaaaaaatttttcca

SEQ ID NO: 44971 - DNA, 443 bp, Homo sapiens; identical to SEQ ID NO: 35907
  misc_feature 264: n = A,T,C or G

SEQ ID NO: 44972 - DNA, 421 bp, Homo sapiens; identical to SEQ ID NO: 35908

SEQ ID NO: 44973 - DNA, 411 bp, Homo sapiens; identical to SEQ ID NO: 35909
  misc_feature 357: n = A,T,C or G

SEQ ID NO: 44974 - DNA, 349 bp, Homo sapiens; identical to SEQ ID NO: 35910

SEQ ID NO: 44975 - DNA, 575 bp, Homo sapiens; identical to SEQ ID NO: 35911

SEQ ID NO: 44976 - DNA, 440 bp, Homo sapiens; identical to SEQ ID NO: 35912

SEQ ID NO: 44977 - DNA, 438 bp, Homo sapiens; identical to SEQ ID NO: 35913

SEQ ID NO: 44978 - DNA, 583 bp, Homo sapiens; identical to SEQ ID NO: 35914

SEQ ID NO: 44979 - DNA, 586 bp, Homo sapiens; identical to SEQ ID NO: 35915

SEQ ID NO: 44980 - DNA, 642 bp, Homo sapiens; identical to SEQ ID NO: 36349
  misc_feature 383: n = A,T,C or G

SEQ ID NO: 44981 - DNA, 414 bp, Homo sapiens; identical to SEQ ID NO: 35917

SEQ ID NO: 44982 - DNA, 478 bp, Homo sapiens; identical to SEQ ID NO: 30781

SEQ ID NO: 44983 - DNA, 445 bp, Homo sapiens; identical to SEQ ID NO: 36105

SEQ ID NO: 44984 - DNA, 457 bp, Homo sapiens; identical to SEQ ID NO: 36242

SEQ ID NO: 44985 - DNA, 502 bp, Homo sapiens; identical to SEQ ID NO: 35921

SEQ ID NO: 44986 - DNA, 460 bp, Homo sapiens; identical to SEQ ID NO: 35922

SEQ ID NO: 44987 - DNA, 429 bp, Homo sapiens; identical to SEQ ID NO: 36180

SEQ ID NO: 44988 - DNA, 459 bp, Homo sapiens; identical to SEQ ID NO: 35924

SEQ ID NO: 44989 - DNA, 429 bp, Homo sapiens; identical to SEQ ID NO: 35925

SEQ ID NO: 44990 - DNA, 421 bp, Homo sapiens; identical to SEQ ID NO: 35926

SEQ ID NO: 44991 - DNA, 334 bp, Homo sapiens; identical to SEQ ID NO: 35927

SEQ ID NO: 44992 - DNA, 408 bp, Homo sapiens; identical to SEQ ID NO: 35928

SEQ ID NO: 44993 - DNA, 586 bp, Homo sapiens; identical to SEQ ID NO: 35929

SEQ ID NO: 44994 - DNA, 588 bp, Homo sapiens
gaattgggccctctagatgcatgctcgagcggccgccagtgtgatggatatctgcagaattcggcttagcgtggtcgcggccgaggtactagatatccaaatgaaccgggagaattacatgttagatagcatttgagttaaaccagaccaatttatatgggacaatttactgttgacaacaaaatatttctgactgtgggtattcaattcaatgaggttattgcttaaggatcataattggtctggaatctttgaaaatgtgtaggctactttataaagttacataaaattgtgaaaaagttgcatgctttagaaacagtatttccatcaagcttgtggtctaaaaagaatatgaagacaatagcaaatggacgtttttaacacagtttcttagtatttacagtattttttcttctctagctgccatcccttcaaagctggtcaatggtttttctggggcttttttcacctcacattcagagcaaggaggcatttgcaatttctgtgggataggctcggtttctgcagtggcattacttgggggactttctttgtgcttcatggaacacggtctgccctcatcttgag

SEQ ID NO: 44995 - DNA, 397 bp, Homo sapiens; identical to SEQ ID NO: 35931

SEQ ID NO: 44996 - DNA, 304 bp, Homo sapiens; identical to SEQ ID NO: 35932

SEQ ID NO: 44997 - DNA, 252 bp, Homo sapiens; identical to SEQ ID NO: 35933

SEQ ID NO: 44998 - DNA, 565 bp, Homo sapiens; identical to SEQ ID NO: 35889

SEQ ID NO: 44999 - DNA, 636 bp, Homo sapiens; identical to SEQ ID NO: 39126
  misc_feature 581: n = A,T,C or G

SEQ ID NO: 45000 - DNA, 425 bp, Homo sapiens; identical to SEQ ID NO: 35936

SEQ ID NO: 45001 - DNA, 432 bp, Homo sapiens; identical to SEQ ID NO: 35937

SEQ ID NO: 45002 - DNA, 617 bp, Homo sapiens; identical to SEQ ID NO: 35938

SEQ ID NO: 45003 - DNA, 483 bp, Homo sapiens; identical to SEQ ID NO: 35939
  misc_feature 432: n = A,T,C or G

SEQ ID NO: 45004 - DNA, 452 bp, Homo sapiens; identical to SEQ ID NO: 35940

SEQ ID NO: 45005 - DNA, 436 bp, Homo sapiens; identical to SEQ ID NO: 35941

SEQ ID NO: 45006 - DNA, 319 bp, Homo sapiens; identical to SEQ ID NO: 35942

SEQ ID NO: 45007 - DNA, 506 bp, Homo sapiens; identical to SEQ ID NO: 35943
  misc_feature 335: n = A,T,C or G

SEQ ID NO: 45008 - DNA, 464 bp, Homo sapiens; identical to SEQ ID NO: 35944

SEQ ID NO: 45009 - DNA, 437 bp, Homo sapiens; identical to SEQ ID NO: 35945
  misc_feature 362: n = A,T,C or G

SEQ ID NO: 45010 - DNA, 518 bp, Homo sapiens; identical to SEQ ID NO: 35946

SEQ ID NO: 45011 - DNA, 504 bp, Homo sapiens; identical to SEQ ID NO: 35947

SEQ ID NO: 45012 - DNA, 473 bp, Homo sapiens; identical to SEQ ID NO: 35948

SEQ ID NO: 45013 - DNA, 309 bp, Homo sapiens
gcggtggcggccgaggtacttttttttttttttttatatatttttttttttttttttttttttttttttttttttttttttttttttttttttttttttttttttaatatattataaaaaaaaattaaataaaaaaaaaaaaaaaaattttgaaaaaaaaaaaaaaaaaaaaaaaaaaaaaaaaaaaaaaaaaaaaaaaaaaaaaaaaaaaaaaaaaaaaaaaaaaaaaaaaaaaaaaaaaaaaaaaaaaaaaaaaaaaaaaaaaaaaaaaaaaaaaaaaaaaaaaaaaaaaaccccccccaaaaaaaa

SEQ ID NO: 45014 - DNA, 457 bp, Homo sapiens; identical to SEQ ID NO: 36242

SEQ ID NO: 45015 - DNA, 565 bp, Homo sapiens; identical to SEQ ID NO: 35889

SEQ ID NO: 45016 - DNA, 391 bp, Homo sapiens; identical to SEQ ID NO: 31270

SEQ ID NO: 45017 - DNA, 440 bp, Homo sapiens; identical to SEQ ID NO: 35953

SEQ ID NO: 45018 - DNA, 455 bp, Homo sapiens; identical to SEQ ID NO: 32062

SEQ ID NO: 45019 - DNA, 321 bp, Homo sapiens
actactatagggcgaattgggccctctagatgcatgctcgagcggccgccagtgtgatggatatctgcagaattcgccctttcgagcggccgcccgggcaggacactcacacacacacacacacacacagagctcttaacaactggtcctgagtagctctttgtaaattctttattgccaggagtgaaccctaaagtggctcacaagagtgccctatttctttcaattaactacaaggacaaacacatctcaaagttgagataagtgaccagtaatgatttgccaaaattctaaaagcgcacttaccatgaaatggataaa

SEQ ID NO: 45020 - DNA, 612 bp, Homo sapiens; identical to SEQ ID NO: 35956

SEQ ID NO: 45021 - DNA, 543 bp, Homo sapiens; identical to SEQ ID NO: 36218
  misc_feature 16: n = A,T,C or G

SEQ ID NO: 45022 - DNA, 637 bp, Homo sapiens; identical to SEQ ID NO: 36357
  misc_feature 25, 471: n = A,T,C or G

SEQ ID NO: 45023 - DNA, 657 bp, Homo sapiens; identical to SEQ ID NO: 35959

SEQ ID NO: 45024 - DNA, 415 bp, Homo sapiens
actactatagggcgaattggagctccaccgcggtggcggccgaggtacttttttttttttttttttttttgagctgcggggcatgatggggattgctgcatatcagcagttggatgttcttgcctctgacagtagcttatttgctctgggggccaggaattggattcagtttacactatcattaaaaaagagggagagagataataaactatattttggtggggatggtgattaaacacctcttttgggtatgccttttaaaaatgcttatagagaaaaaaaattttaaaaagaaagctaatgctagtatatactgcaatgttaggggaatgaacatgttttcctactgcattggggacttctagataggctaatgaaaggccttttattctgttactggacatgaaaactttgt

SEQ ID NO: 45025 - DNA, 235 bp, Homo sapiens; identical to SEQ ID NO: 35961

SEQ ID NO: 45026 - DNA, 642 bp, Homo sapiens; identical to SEQ ID NO: 36349
  misc_feature 383: n = A,T,C or G

SEQ ID NO: 45027 - DNA, 336 bp, Homo sapiens
ttggagctccaccgcggtggcggccgcccgggcaggtacccattgcccgaatagtgaacactctacccagtcgtttttcatccctcactttcctaccaccctccaacattttggagcctccagtgtctcttattccactctgtatacccatcgtttagctcccatttccaaatgagaacatgcagtttctgactttctgtctctgagtcatttcacttacgataagggcttctagttccatccatattgctgcaaaagatgtgatttcattatttttgatggttgcgtatgtattccatggtatatatgcacattttaaaatctaatcatctgttg

SEQ ID NO: 45028 - DNA, 390 bp, Homo sapiens; identical to SEQ ID NO: 35967

SEQ ID NO: 45029 - DNA, 393 bp, Homo sapiens; identical to SEQ ID NO: 35965
  misc_feature 359: n = A,T,C or G

SEQ ID NO: 45030 - DNA, 206 bp, Homo sapiens; identical to SEQ ID NO: 35966
  misc_feature 66, 96, 97, 100, 107: n = A,T,C or G

SEQ ID NO: 45031 - DNA, 445 bp, Homo sapiens; identical to SEQ ID NO: 36105

SEQ ID NO: 45032 - DNA, 364 bp, Homo sapiens; identical to SEQ ID NO: 35472
  misc_feature 73: n = A,T,C or G

SEQ ID NO: 45033 - DNA, 394 bp, Homo sapiens
gtgcgagttggagctccaccgcggtggcggccgcccgggcaggtactcttttcaaggctttacttccaatcttccccttaagtgctagtgtccagaggaaaaattatttcttctctgtagaagtcattttgaagacagtatttttctgagatccaatgtggttgggagttctgaagaggaagttatagttttaagctagattatctcattttattatattctgtgtttattttcctttgctgtgcttaggcctttggcaaatgttctctagatgtacctcggccgctctagaactagtggatcccccgggctgcaggaattcgatatcaagcttatcgataccgtcgacctcgagggggggcccggtacccagcttttgttccctttagtgagg

SEQ ID NO: 45034 - DNA, 433 bp, Homo sapiens; identical to SEQ ID NO: 35970

SEQ ID NO: 45035 - DNA, 602 bp, Homo sapiens
  misc_feature 23: n = A,T,C or G
ccccccctcggaagtcttctagnattaattaacgcgggggagagagagagagagagaaactttaaaagtttgatctaatgtacttactaccaaataaagattttacctatagattgaaactaaattgtaaatgtcccaaatacttttcccgatgaaattcaaacaaaattagacttttatacacacaaagcaaaacaaaacacaacctatatataatttcaagattaagaaaaacaaaacaaataaaagcattctctcaagaccttgcttcagttgtgtaaaataattaaatgtgctattccaagttgattttagtttttaaatacagaatttgataaaagataagtaaaagaaggccttgggttcagggtggcagatatttagtgcaccctttatctagttcaggaaacacttgaaagatttatcaagtttccttatgtaatgaaagacttaactagttcaaataagcaatacccacagaacataattagagcagcatattggagcacaatttttttttcataaagactaaaactgaacagcagcagattgaaacacaattttttttcctaaagaactaaactgaacagcagtcaagactc

SEQ ID NO: 45036 - DNA, 589 bp, Homo sapiens; identical to SEQ ID NO: 35972

SEQ ID NO: 45037 - DNA, 340 bp, Homo sapiens; identical to SEQ ID NO: 35973

SEQ ID NO: 45038 - DNA, 423 bp, Homo sapiens
  misc_feature 398: n = A,T,C or G
agggcgaattgggccctctatatgcatgctcgagcggccgccagtgtgatggatatctgcagaattcgccctttcgagcggtcgcccgggcaggtacccatcaattactcttttagtggacataacagatacacaatctgtagtgtctcagtgacctagggtcctagaatcatactaatgcaaacaaaccatgattcccaatgttctagactgcagacaataaacagggatcttgcttggggctgctaggcgctagcaaacaacatctaaccagcagcatgccttcaaggtttcgagaccacagtcactcccacttatagatgtggaccatcttctctgttaaggtagccaagtagctgttacggttcacctcaaatgggcaagatgtccaacacagnctgatcggtctggtaggtcctggag

SEQ ID NO: 45039 - DNA, 637 bp, Homo sapiens; identical to SEQ ID NO: 36357
  misc_feature 25, 471: n = A,T,C or G

SEQ ID NO: 45040 - DNA, 417 bp, Homo sapiens; identical to SEQ ID NO: 35976

SEQ ID NO: 45041 - DNA, 463 bp, Homo sapiens; identical to SEQ ID NO: 36128

SEQ ID NO: 45042 - DNA, 441 bp, Homo sapiens; identical to SEQ ID NO: 35978

SEQ ID NO: 45043 - DNA, 378 bp, Homo sapiens; identical to SEQ ID NO: 35979

SEQ ID NO: 45044 - DNA, 421 bp, Homo sapiens; identical to SEQ ID NO: 35980

SEQ ID NO: 45045 - DNA, 489 bp, Homo sapiens
gcgaattgtgccctctagatgcatgctcgagcggccgccagtgtgatggatatctgcagaattcttccttagcgtgtttgcggccgaggtacaagaggctacttctactagtgacattctgaaagttcccaaacctgaacctataccagagcctaaagaaccttctccggaaaaaaattccaaaaaagaaaaggagaaggagaagacccgaccacgatctcggtcacgctccaaatcaagatcccggacgcggtcccgctctccttctcacactcgacctagacggcgccatagatcccgatcaagatcgtattcacctagaaggcggccaagcccaagaaggcggtcatctcctcgaagaagaactccgccaagaagaatgcctcctccaccaaggcatagaaggagtagatctccagtaagacgaaggagacgttcgtcagcatccttgtctgggagtagctcatcatcctcttcatctcgttcacg

SEQ ID NO: 45046 - DNA, 712 bp, Homo sapiens; identical to SEQ ID NO: 36822
  misc_feature 630: n = A,T,C or G

SEQ ID NO: 45047 - DNA, 606 bp, Homo sapiens
  misc_feature 19: n = A,T,C or G
ggcgaattgggccctctanagcatgctcgagcggccgccagtgtgatggatatctgcagaattcgccctttcgagcggccgcccgggcaggtacttttcgctcagctgttttcatcactgtgttcagaggtttgtctttttttttcccctaaaggtgctgagatgttatgagtgctttatgtgtggttactggataagttttgaaatgtcactgtgttataaactgcatgattatcgattttggaaattttgttttttttaaatgattaatttaaataaaatggagaattttgatccataagaaaagcaggactgaaatctccagggatgggagcctttgggttcactttgttcagtgttgtttctttgtagacttcctactttcttgtaaaatgttttggactaaatatttcacaagaatagaatttttcaaggtctggccggttatgggttgtagatttggggcagaatgctgagatgtacctcggccgcgaccacgctaagggcgaattccagcacactggcggccgttactagtggatccgagctcggtaccaagcttggcgtaatcatgggtcatagctgttcctgtgtgaaattgttatc

SEQ ID NO: 45048 - DNA, 431 bp, Homo sapiens; identical to SEQ ID NO: 35918

SEQ ID NO: 45049 - DNA, 478 bp, Homo sapiens; identical to SEQ ID NO: 31067

SEQ ID NO: 45050 - DNA, 457 bp, Homo sapiens; identical to SEQ ID NO: 36242

SEQ ID NO: 45051 - DNA, 621 bp, Homo sapiens
caagcgcgcaattaaccctcactaaagggaacaaaagctgggtaccgggccccccctcgagagtacttctagaattaattaaggcgggtgctccagagtcgggtctgctttccaaagtataggacatttgaagaactggtatgctactcactggtgaaggacagtcaggtgaaggactgtaagcccacacaagctcttcttatctctactagaattaaaatgttaagtcaaaaacggctccttttttgcgcctcctagtgaaacttaaccagctagaccatttgagtaccagcatttagttacaaacgtcaaaggcttccggtgctgcttaccttccttttttgttaatgtgcttttatttattaaaaaaaattacaatgaagatgcctgttttgtctctactgtgtactctgatcgtatctttccaaagtgcagactcttgtgaagttttcttaaattgttcactttaaagaaaatgacgtaccaacaatgatttggcttttatattactgtaagatgttataatgttaatgtggatgtagtgcttttactttacagattgattggaataagattattgcatatgaatttacccacaggactctgaatcatgttacccac

SEQ ID NO: 45052 - DNA, 341 bp, Homo sapiens; identical to SEQ ID NO: 33370

SEQ ID NO: 45053 - DNA, 420 bp, Homo sapiens; identical to SEQ ID NO: 35989

SEQ ID NO: 45054 - DNA, 520 bp, Homo sapiens; identical to SEQ ID NO: 36626
  misc_feature 502: n = A,T,C or G

SEQ ID NO: 45055 - DNA, 365 bp, Homo sapiens; identical to SEQ ID NO: 35991

SEQ ID NO: 45056 - DNA, 612 bp, Homo sapiens; identical to SEQ ID NO: 36408

SEQ ID NO: 45057 - DNA, 525 bp, Homo sapiens; identical to SEQ ID NO: 35993
  misc_feature 331: n = A,T,C or G

SEQ ID NO: 45058 - DNA, 480 bp, Homo sapiens
cgggccccccctcggaagtcttctagaattaattaacgcgggtacaaacgagtcctggccttgtctgtggagacggattacaccttcccacttgctgaaaagtcaaggccttcttggctgatccatctgcctttgtggctgctgcccctgtggctgctgccaccacagctgctcctgctgctgctgcagccccagctaaggttgaagccaaggaagagtcggaggagtcggacgaggatatgggatttggtctctttgactaatcaccaaaaagcaaccaacttagccagttttatttgcaaaacaaggaaataaaggcttacttctttaaaaaaaaaaaaaaaaaaaaaaaaaaaaaaaaaaaaaaaaaaaaaaaaaaaaaaaaaaaaattaaaaaaaaaaaaaaaaggcggccgccaccgggggggacctccaatcccccctatagggagtcgtataacccccgctcactggccgtcg

SEQ ID NO: 45059 - DNA, 421 bp, Homo sapiens; identical to SEQ ID NO: 35908

SEQ ID NO: 45060 - DNA, 450 bp, Homo sapiens
gtaatacgactcactatagggcgaattggagctccaccgcggtggcggccgaggtacgatcttggctcactgcaacctctccctcccgggttcaagtgattctcgtgcctcagcctcttgagtagctgggattacaggcgcgtgccactgcgtccggctaatttttgtatttttagtagagatggggtttcaccatgttggccaggctgatctcaaactcctgacctcatgtggtccacccaccttggcctcccaaagtgctgggattacaggcgtgagccaccgcgctcagcctacaagcaattttttaaaaactgacacctattactgataaaattctctgtttaaaatcctatttactattttaaagataagtattagtttttttttaaatacaataattctgttattgataaaatttaaggcattttcattgccttttgcaaattt

SEQ ID NO: 45061 - DNA, 346 bp, Homo sapiens; identical to SEQ ID NO: 35997

SEQ ID NO: 45062 - DNA, 378 bp, Homo sapiens; identical to SEQ ID NO: 35998

SEQ ID NO: 45063 - DNA, 464 bp, Homo sapiens; identical to SEQ ID NO: 33467

SEQ ID NO: 45064 - DNA, 478 bp, Homo sapiens; identical to SEQ ID NO: 30781

SEQ ID NO: 45065 - DNA, 327 bp, Homo sapiens; identical to SEQ ID NO: 36002

SEQ ID NO: 45066 - DNA, 437 bp, Homo sapiens; identical to SEQ ID NO: 36003

SEQ ID NO: 45067 - DNA, 564 bp, Homo sapiens
tgggctctctagatgcatgctcgagcggccgccagtgtgatggatatctgcagaattcggcttcgagcggccgcccgggcaggtactctacggtgtcaataattatttcagtctctgctgcaattagtgctaattacaatacctgagctataaaaataaaagatttcattatagcaaagttcacaaatatcgttttagttcagttatccacattgttcatctaaaataatacattttctttacatataactgtcttagacttgtaattgaggatatttgatgaaacagatctgtatctgaaacagcactatgatgctaaacatttgcataaggaatgaaaaaagttagcaacctagttttttcaatattcagatatttgagattacacagaaaactacatccagatgaatgactgaattattcacttttcttctgagcattttggcattggatagacacagcattcaagtttaatgcattttaggaacaggttcagtttacatatttaacgcacattaaaaaaacacaaagccaaaagaaatttctaatttagaaacatataca

SEQ ID NO: 45068 - DNA, 665 bp, Homo sapiens; identical to SEQ ID NO: 36005

SEQ ID NO: 45069 - DNA, 602 bp, Homo sapiens; identical to SEQ ID NO: 36334

SEQ ID NO: 45070 - DNA, 347 bp, Homo sapiens; identical to SEQ ID NO: 36007

SEQ ID NO: 45071 - DNA, 375 bp, Homo sapiens; identical to SEQ ID NO: 36389

SEQ ID NO: 45072 - DNA, 464 bp, Homo sapiens; identical to SEQ ID NO: 33306

SEQ ID NO: 45073 - DNA, 269 bp, Homo sapiens; identical to SEQ ID NO: 36010
  misc_feature 153, 228, 230, 232, 245: n = A,T,C or G

SEQ ID NO: 45074 - DNA, 602 bp, Homo sapiens
  misc_feature 509, 510: n = A,T,C or G
cgggccccccctcgaaagtcttctagaattaattaacgcgggggagcacccatcctaactgatgatgttagcctgcaggtgttcatggaccatttgaagaagctggctgtctccagtgcctgttaagctgaggatacaaccaggaaatgcaacggtgtcagattgtgttcaaaatgtctagaaaggcttgataacattcctgttacttttctagcagattttaacaaataatcaaggacattttatatgtaactctttagattataatttatttgtattcctgtctttgtcctttttcttgcactataaaattataaggtcataaatgttttggtacttgtagatgtttatgtgctttttgtatcctaacttttagaatctaaataaaatcagaggtaatgtattttggcagcttgtttaggtgagaatcttaatgatcataaaggaaataaatctagatgcagaaagtactggctaaaatattgctaatacaaatgtgatttcctgannaaaaaaaaaaaaaaaaaaaaaaaaaaaaaaaaaaaaaaaaaaaaaaaggaaaaaaaaaaaaaggcggccgccaccgcggtggagctccaatt

SEQ ID NO: 45075 - DNA, 422 bp, Homo sapiens; identical to SEQ ID NO: 36012

SEQ ID NO: 45076 - DNA, 359 bp, Homo sapiens; identical to SEQ ID NO: 36013

SEQ ID NO: 45077 - DNA, 255 bp, Homo sapiens; identical to SEQ ID NO: 36014

SEQ ID NO: 45078 - DNA, 305 bp, Homo sapiens; identical to SEQ ID NO: 36015
  misc_feature 260: n = A,T,C or G

SEQ ID NO: 45079 - DNA, 627 bp, Homo sapiens; identical to SEQ ID NO: 36016
  misc_feature 584: n = A,T,C or G

SEQ ID NO: 45080 - DNA, 379 bp, Homo sapiens; identical to SEQ ID NO: 36017

SEQ ID NO: 45081 - DNA, 354 bp, Homo sapiens; identical to SEQ ID NO: 36019

SEQ ID NO: 45082 - DNA, 356 bp, Homo sapiens; identical to SEQ ID NO: 36020

SEQ ID NO: 45083 - DNA, 340 bp, Homo sapiens; identical to SEQ ID NO: 36021

SEQ ID NO: 45084 - DNA, 384 bp, Homo sapiens; identical to SEQ ID NO: 36022

SEQ ID NO: 45085 - DNA, 416 bp, Homo sapiens; identical to SEQ ID NO: 36023

SEQ ID NO: 45086 - DNA, 383 bp, Homo sapiens; identical to SEQ ID NO: 36024

SEQ ID NO: 45087 - DNA, 504 bp, Homo sapiens
tccaccgcggctggcggcgcgaggtacaatcacttttccatggtcaccctcttttctgctttatactaattgccctgttgaggtgtttccatgtcaaatgcagctcttgtcggaactgaaaatggcagtgccaagggagctgtgcaagtataatcaaagctggaagatttcctccatccacccgcaaccccaaggcttaagcattcccttaggaaccaaagctgactctttgggaaagttttcacagccttattaggttacaaccctgaagatgttttgttgttttgaccttaaaattttgtgaactgttttgtgaactgtgtgtgtgtgcacacacatgtgcaaaggagttgcttgcaccttgagagagtcaatttttctgcctaagtgaaaggtcaggaactgcagttaacccagagtaaaatattggttgggtgaagggctcacttctagtatagtcagaatgggctcaagatcttaggaggatgataggtgatgaactgc

SEQ ID NO: 45088 - DNA, 421 bp, Homo sapiens; identical to SEQ ID NO: 36026

SEQ ID NO: 45089 - DNA, 579 bp, Homo sapiens; identical to SEQ ID NO: 36027

SEQ ID NO: 45090 - DNA, 410 bp, Homo sapiens; identical to SEQ ID NO: 36029

SEQ ID NO: 45091 - DNA, 499 bp, Homo sapiens
gcgtccggtactgaaataatctgcatgctaggcattggcttagacaccgtacctatctcacttagatttgtggactaggaaagcaagattcagagatcatgtgacttgcatgtggcctagagataaaattcaaatctggttctgtagactccagggacatattcaccatgccatgggtggtggctattaaaccttgataaatttgtgtttatggttaacaaatgtgaaagctattaaacattgctggtttgaattttttacagtgcagaaatgtaaaatgaaaaaggatatttcctttcacagtgttaccgagaagtcatgataatttcgtttgttcttccagatttaggcatatacttatttaatcaataatgtgttaacagctgacacctgtggttgctgtgacaggcactatttgaagtgctttatcatggattaactcttaatcctcagctaccgtatacagtaggacataaccccatttcacatgcactacact

SEQ ID NO: 45092 - DNA, 298 bp, Homo sapiens; identical to SEQ ID NO: 36031

SEQ ID NO: 45093 - DNA, 419 bp, Homo sapiens; identical to SEQ ID NO: 31611

SEQ ID NO: 45094 - DNA, 369 bp, Homo sapiens; identical to SEQ ID NO: 36033

SEQ ID NO: 45095 - DNA, 520 bp, Homo sapiens; identical to SEQ ID NO: 36626
  misc_feature 502: n = A,T,C or G

SEQ ID NO: 45096 - DNA, 403 bp, Homo sapiens; identical to SEQ ID NO: 36264

SEQ ID NO: 45097 - DNA, 469 bp, Homo sapiens; identical to SEQ ID NO: 33461

SEQ ID NO: 45098 - DNA, 564 bp, Homo sapiens; identical to SEQ ID NO: 45067

SEQ ID NO: 45099 - DNA, 391 bp, Homo sapiens; identical to SEQ ID NO: 36038

SEQ ID NO: 45100 - DNA, 572 bp, Homo sapiens
cgactactatagggcgaattgggccctctagatgcatgctcgagcggccgccagtgtgatggatatctgcagaattcgccctttcgagcggccgcccgggcaggtaccctcattgtagccatgggaaaattgatgttcagtggggatcagtgaattaaatggggtcatacaagtataaaaattaaaaaaaaaagacttcatgcccaatctcatatgatgtggaagaactgttagagagaccaacagggtagtgggttagagatttccagagtcttacattttctagaggaggtatttaatttcttctcactcatccagtgttgtatttaggaatttcctggcaacagaactcatggctttaatcccactagctattgcttattgtcctggtccaattgccaattacctgtgtcttggaagaagtgatttctaggttcaccattatggaagattcttattcagaaagtctgcatagggcttatagcaagttatttatttttaaaagttccataggtgattctgataggcagtgaggttagggagccaccaattatgatgggaagtatggaatg

SEQ ID NO: 45101 - DNA, 452 bp, Homo sapiens; identical to SEQ ID NO: 36040

SEQ ID NO: 45102 - DNA, 457 bp, Homo sapiens; identical to SEQ ID NO: 36041

SEQ ID NO: 45103 - DNA, 439 bp, Homo sapiens; identical to SEQ ID NO: 36042

SEQ ID NO: 45104 - DNA, 523 bp, Homo sapiens; identical to SEQ ID NO: 36043

SEQ ID NO: 45105 - DNA, 593 bp, Homo sapiens; identical to SEQ ID NO: 36044

SEQ ID NO: 45106 - DNA, 429 bp, Homo sapiens; identical to SEQ ID NO: 36543
  misc_feature 362: n = A,T,C or G

SEQ ID NO: 45107 - DNA, 437 bp, Homo sapiens
  misc_feature 103, 182: n = A,T,C or G
tatagggcgaattgggccctctagatgcatgctcgagcggacgcagtgtgatggatatctgcagaattcgccctttcgagcggccgcccgggcaggtactttnttttttttattttttttttttttattttctttttttttatttttatatttattttttttttattttttatattaaaatntttttttttttattttaataaaaaaaaaaaagggggggggtatttaccctttaaaaaaaaaaggggggggttaaaggggaagaaaaaggtgggggggcttaaaggcaaaagaaaaaaaagggggggaaaaggggggggtttttttttcggggggaaagggagggggggtttacatgggggaaaaggggggaaaaaaagggggaaattcacgggaaaaaacccctaaaaaggggttaaaaaaaaaaatttattttt

SEQ ID NO: 45108 - DNA, 491 bp, Homo sapiens
  misc_feature 31: n = A,T,C or G
gactcactatagggcgaattgggccctctanagcatgctcgagcggccgccagtgtgatggatatctgcagaattcgcccttagcgtggtcgcggccgaggtactatgatctgttgctaagaaatcttataaataaaagttatttaatgtttgatcattatctctggtgtgactaaaacaagtatgataaatcaggaacaagaatccccaaaggtcaagctaaataaacattaaaatattctatagttatttgcaaatgatggcattatattatatttgatttttgatatggaagtatcctctgaccaggtgtggcagttcacgccgcctgtaatcccagcactttgggaggccgaagcgggaggattgctcaagcccagggggtcaaggctgcagtgaaccatcattgcaccactgcactccagcctgggagacagaatcagaccctgtctcaaaaaagaaaaaaaagatcctctaatataatctctgat

SEQ ID NO: 45109 - DNA, 388 bp, Homo sapiens; identical to SEQ ID NO: 36048

SEQ ID NO: 45110 - DNA, 610 bp, Homo sapiens; identical to SEQ ID NO: 36049

SEQ ID NO: 45111 - DNA, 642 bp, Homo sapiens; identical to SEQ ID NO: 36349
  misc_feature 383: n = A,T,C or G

SEQ ID NO: 45112 - DNA, 437 bp, Homo sapiens; identical to SEQ ID NO: 36051

SEQ ID NO: 45113 - DNA, 468 bp, Homo sapiens; identical to SEQ ID NO: 36052

SEQ ID NO: 45114 - DNA, 405 bp, Homo sapiens; identical to SEQ ID NO: 36053

SEQ ID NO: 45115 - DNA, 451 bp, Homo sapiens; identical to SEQ ID NO: 33030

SEQ ID NO: 45116 - DNA, 596 bp, Homo sapiens; identical to SEQ ID NO: 32052

SEQ ID NO: 45117 - DNA, 233 bp, Homo sapiens
actactatagggcgaattgggccctctagatgcctgcctcagccggccgccagtgtgatggatatctgcagaattcgccctttcgagcggccgcccgggcaggtacagtcatggatgggcacactgtgggggtgtcctggtgcacccccagtgggtgctcacagctgcccattgcctaaagaagaatagccaggtctggctgggtcggcacaacctgtttgagcctgaagaca

SEQ ID NO: 45118 - DNA, 382 bp, Homo sapiens; identical to SEQ ID NO: 36057

SEQ ID NO: 45119 - DNA, 266 bp, Homo sapiens; identical to SEQ ID NO: 36058

SEQ ID NO: 45120 - DNA, 446 bp, Homo sapiens; identical to SEQ ID NO: 36059

SEQ ID NO: 45121 - DNA, 411 bp, Homo sapiens; identical to SEQ ID NO: 36061

SEQ ID NO: 45122 - DNA, 456 bp, Homo sapiens; identical to SEQ ID NO: 36101

SEQ ID NO: 45123 - DNA, 445 bp, Homo sapiens; identical to SEQ ID NO: 36063

SEQ ID NO: 45124 - DNA, 402 bp, Homo sapiens; identical to SEQ ID NO: 36064

SEQ ID NO: 45125 - DNA, 384 bp, Homo sapiens; identical to SEQ ID NO: 37594

SEQ ID NO: 45126 - DNA, 597 bp, Homo sapiens; identical to SEQ ID NO: 37289

SEQ ID NO: 45127 - DNA, 563 bp, Homo sapiens
gactcgctatacgactcactatagggcgaattgggccctctagatgcatgctcgagcggccgccagtgtgatggatatctgcagaattcgccctttcggcggccgcccgggcaggtacctggggtctcagggttgctctgggcctgatcatccactcagatctgtaaggaggatttgcaggatccatttagaaagatcctcccttacttccacaagcatggcctttggctcttaaatacctgtgctggggttttgtaattatagaaacaacaggaaccaaaactcattaatgttgagctacaaaccagagggaagcttctttctcaaaacagggctcaggcctagaaaaatctagttttctgaaatcgctagccagcaacagcactgagatggccatcccagaaacaaggccaacacagaagcacccataaaggccgctggaggttgggacaaagagatccttgctgtccttacagaccccctgacttccaaggagctcccctctcacccagcctggcctgccttctccacagggtagctgatcgtcagcatcatcttcaatg

SEQ ID NO: 45128 - DNA, 383 bp, Homo sapiens; identical to SEQ ID NO: 36068

SEQ ID NO: 45129 - DNA, 445 bp, Homo sapiens; identical to SEQ ID NO: 36069

SEQ ID NO: 45130 - DNA, 457 bp, Homo sapiens; identical to SEQ ID NO: 36242

SEQ ID NO: 45131 - DNA, 476 bp, Homo sapiens; identical to SEQ ID NO: 36071

SEQ ID NO: 45132 - DNA, 81 bp, Homo sapiens; identical to SEQ ID NO: 36072

SEQ ID NO: 45133 - DNA, 467 bp, Homo sapiens; identical to SEQ ID NO: 36073

SEQ ID NO: 45134 - DNA, 424 bp, Homo sapiens; identical to SEQ ID NO: 30688

SEQ ID NO: 45135 - DNA, 411 bp, Homo sapiens; identical to SEQ ID NO: 36061

SEQ ID NO: 45136 - DNA, 445 bp, Homo sapiens; identical to SEQ ID NO: 36105

SEQ ID NO: 45137 - DNA, 484 bp, Homo sapiens; identical to SEQ ID NO: 36077

SEQ ID NO: 45138 - DNA, 492 bp, Homo sapiens; identical to SEQ ID NO: 36078

SEQ ID NO: 45139 - DNA, 482 bp, Homo sapiens; identical to SEQ ID NO: 36079

SEQ ID NO: 45140 - DNA, 454 bp, Homo sapiens; identical to SEQ ID NO: 36394

SEQ ID NO: 45141 - DNA, 446 bp, Homo sapiens; identical to SEQ ID NO: 36081

SEQ ID NO: 45142 - DNA, 478 bp, Homo sapiens; identical to SEQ ID NO: 30781

SEQ ID NO: 45143 - DNA, 594 bp, Homo sapiens; identical to SEQ ID NO: 32649

SEQ ID NO: 45144 - DNA, 497 bp, Homo sapiens; identical to SEQ ID NO: 36447
  misc_feature 348, 354, 355, 363, 443: n = A,T,C or G

SEQ ID NO: 45145 - DNA, 670 bp, Homo sapiens; identical to SEQ ID NO: 30471

SEQ ID NO: 45146 - DNA, 333 bp, Homo sapiens; identical to SEQ ID NO: 36086

SEQ ID NO: 45147 - DNA, 564 bp, Homo sapiens; identical to SEQ ID NO: 45067

SEQ ID NO: 45148 - DNA, 346 bp, Homo sapiens
attgggccctctagatgcatgctcgagcggccgccagtgtgatggatatctgcagaattcgcccttacgtgggccgcggccaggtactggaatttcctttggggggtttttggttaagggaaccttgttaatttttttgttaactaaatttttttcttaaaataaagactttttaacaatgactggcacagattactcataaaaagatagcaaaacgggtggttgaagataatttattttaatcgtaatgtattttaagtgtgaatttaaaaatttcatacattaaatctataaatttcccttatatttcttatgatgaggcttaattaaaagtctaattaaaaaa

SEQ ID NO: 45149 - DNA, 612 bp, Homo sapiens; identical to SEQ ID NO: 36408

SEQ ID NO: 45150 - DNA, 430 bp, Homo sapiens; identical to SEQ ID NO: 36090

SEQ ID NO: 45151 - DNA, 311 bp, Homo sapiens; identical to SEQ ID NO: 36091

SEQ ID NO: 45152 - DNA, 670 bp, Homo sapiens; identical to SEQ ID NO: 30471

SEQ ID NO: 45153 - DNA, 475 bp, Homo sapiens; identical to SEQ ID NO: 36093

SEQ ID NO: 45154 - DNA, 551 bp, Homo sapiens
  misc_feature 17: n = A,T,C or G
gcgaatgggccctctanagcatgctcgagcggccgccagtgtgatggatatctgcagaattcgccctttcgagcggccgcccgggcaggtacactgagtctgcagaccatccagaaggatcctgctgcccccatgtgcctttgttcttggtatgtcagtgccattatactccaaattctccatttgatggagagaatctgtccctctggaattacgagatttatatgcacagtttgcaaataaagcatcatagcctttattttctgtatcaaaatcaccctgatccataatatgagtctttgctttgggatacatgttgtcattttgatgaacattcctgtccccttcatggtatttgataaattccttatcttcattgacaccattcgaatctgaaaagctcacaggctgaccatcaggataactcccaggaacatgatataaattgctgtgttctctacaataaaaattagttgcccaacaatcctcaagattatggttaacattctcatggtctatataccacaactgaggttgacctaaattcgctg

SEQ ID NO: 45155 - DNA, 181 bp, Homo sapiens; identical to SEQ ID NO: 36095

SEQ ID NO: 45156 - DNA, 445 bp, Homo sapiens; identical to SEQ ID NO: 36096

SEQ ID NO: 45157 - DNA, 469 bp, Homo sapiens; identical to SEQ ID NO: 36098

SEQ ID NO: 45158 - DNA, 602 bp, Homo sapiens; identical to SEQ ID NO: 36334

SEQ ID NO: 45159 - DNA, 454 bp, Homo sapiens; identical to SEQ ID NO: 36100

SEQ ID NO: 45160 - DNA, 456 bp, Homo sapiens; identical to SEQ ID NO: 36101

SEQ ID NO: 45161 - DNA, 247 bp, Homo sapiens
ctcactatagggcgaattggagctccaccgcggtggcggccgctttttttttttttttttttttttttttttttttttttttttttttttttttttttttttttttttttttttttttttttttttttttttttcccccccactcttttttgttttttttttaaaaccaccccatgctttttggggggggggtttaccaacctctcccccccatttacttccttgttccccagggggggaaaaaaat

SEQ ID NO: 45162 - DNA, 460 bp, Homo sapiens; identical to SEQ ID NO: 36103

SEQ ID NO: 45163 - DNA, 454 bp, Homo sapiens; identical to SEQ ID NO: 36394

SEQ ID NO: 45164 - DNA, 642 bp, Homo sapiens; identical to SEQ ID NO: 36349
  misc_feature 383: n = A,T,C or G

SEQ ID NO: 45165 - DNA, 230 bp, Homo sapiens; identical to SEQ ID NO: 35671

SEQ ID NO: 45166 - DNA, 454 bp, Homo sapiens; identical to SEQ ID NO: 36108

SEQ ID NO: 45167 - DNA, 558 bp, Homo sapiens; identical to SEQ ID NO: 36109

SEQ ID NO: 45168 - DNA, 374 bp, Homo sapiens; identical to SEQ ID NO: 36110

SEQ ID NO: 45169 - DNA, 637 bp, Homo sapiens; identical to SEQ ID NO: 36357
  misc_feature 25, 471: n = A,T,C or G

SEQ ID NO: 45170 - DNA, 470 bp, Homo sapiens; identical to SEQ ID NO: 36112

SEQ ID NO: 45171 - DNA, 447 bp, Homo sapiens; identical to SEQ ID NO: 36113

SEQ ID NO: 45172 - DNA, 478 bp, Homo sapiens; identical to SEQ ID NO: 36114

SEQ ID NO: 45173 - DNA, 430 bp, Homo sapiens; identical to SEQ ID NO: 36648

SEQ ID NO: 45174 - DNA, 508 bp, Homo sapiens; identical to SEQ ID NO: 36116
  misc_feature 169, 369: n = A,T,C or G

SEQ ID NO: 45175 - DNA, 447 bp, Homo sapiens; identical to SEQ ID NO: 32509

SEQ ID NO: 45176 - DNA, 588 bp, Homo sapiens
ttggtccggctcggtccctatacggccgccgtgtgctggaattcgcccttagcgtggtcgcggccgaggtacatctcagcattctgccccaaatctacaacccataaccggccagaccttgaaaaattctattcttgtgaaatatttagtccaaaacattttacaagaaagtaggaagtctacaaagaaacaacactgaacaaagtgaacccaaaggctcccatccctggagatttcagtcctgcttttcttatggatcaaaattctccattttatttaaattaatcatttaaaaaaaacaaaatttccaaaatcgataatcatgcagtttataacacagtgacatttcaaaacttatccagtaaccacacataaagcactcataacatctcagcaccttttaggggaaaaaaaaagacaaacctctgaacacagtgatgaaaacagctgagcgaaaagtacctgcccgggcggccgctcgaaagggcgaattctgcagatatccatcacactggcggccgctcgagcatgcatctagagggcccaattcgccctatagtgagtcgtattacaattcactggccgtcg

SEQ ID NO: 45177 - DNA, 476 bp, Homo sapiens; identical to SEQ ID NO: 36119

SEQ ID NO: 45178 - DNA, 476 bp, Homo sapiens
ggcgaattgggccctctagatgcatgctcgagcggccgccagtgtgatggatatctgcagaattcgccctttcgagcggccgcccgggcaggtacacagttttctgtgaaatatgatgctgtatgtggttgtgattttttttcacctctattgtgaattctttttcactgcaagagtaacaggatttgtagccttgtgcttcttgctaagagaaagaaaaacaaaatcagagggcattaaatgttttgtatgttacatgatttagaaaaaggtgatgcatcctcctcacataagcatccatatggcttcgtcaagggaggtgaacattgttgctgagttaaattccagggtctcagatggttaggacaaagtggatggatgccgggaagtttaacctgagccttaggatccaatgagtggagaatggggacttccaaaacccaaggttggctataatctctgcataaccacatgac

SEQ ID NO: 45179 - DNA, 589 bp, Homo sapiens; identical to SEQ ID NO: 36121

SEQ ID NO: 45180 - DNA, 447 bp, Homo sapiens; identical to SEQ ID NO: 36122

SEQ ID NO: 45181 - DNA, 372 bp, Homo sapiens; identical to SEQ ID NO: 36123

SEQ ID NO: 45182 - DNA, 187 bp, Homo sapiens
ctactatagggcgaattggagctccaccgcggtggcggccgcccgggcaggtacgagacccgggctgttgagctgttcactgagtgttacagcagcgatgaagacttggcagaacagctgctggtctattcctgtgaagcttggggtggaagcaactgtctggagctggcggtggaggccacagacc

SEQ ID NO: 45183 - DNA, 113 bp, Homo sapiens; identical to SEQ ID NO: 36125

SEQ ID NO: 45184 - DNA, 309 bp, Homo sapiens
ctagatgcatgctcgagcggccgccagtgtgatggatatctgcagaattcgcccttagcgtggtcgcggccgaggtactcgggaatctctcgttgacttgtcctcaatgaccacactcgagagtcccttcaccctagagaaaagcatccacgttgggcaccagatggagtggcctgcgcctccacagctgtgggcatttctcctcaggtggaacgagagacttgagaaaagaaagacaacagagacaaagtatagagaaagaaaagtgggcccaggggaccggcgctcagcatatggaggacccgcgcc

SEQ ID NO: 45185 - DNA, 403 bp, Homo sapiens; identical to SEQ ID NO: 36264

SEQ ID NO: 45186 - DNA, 543 bp, Homo sapiens; identical to SEQ ID NO: 36218
  misc_feature 16: n = A,T,C or G

SEQ ID NO: 45187 - DNA, 565 bp, Homo sapiens; identical to SEQ ID NO: 36129

SEQ ID NO: 45188 - DNA, 497 bp, Homo sapiens; identical to SEQ ID NO: 36130

SEQ ID NO: 45189 - DNA, 644 bp, Homo sapiens; identical to SEQ ID NO: 35903

SEQ ID NO: 45190 - DNA, 193 bp, Homo sapiens
acgactcactatagggcgaattggagctccaccgcggtggcggccgcccgggcaggtacgaaaaaatcaggctactaagcccactgttaatatagacgcagaccaattgttaggaacaggtccaaattggagcaccattaaccaacaatcagtgatgcagaatgaggcctattgaacaaggtaagggcttttt

SEQ ID NO: 45191 - DNA, 452 bp, Homo sapiens; identical to SEQ ID NO: 36133

SEQ ID NO: 45192 - DNA, 480 bp, Homo sapiens
agggaacaaaagctgggtaccgggccccccctcgagagtacttctagaattaattaaacctaaatctctaggctcaagtccaggatgtccccagtctagttcagaaactaagtgctctctcctccccttaaaaaggtgttggcaaatgcaggtctccaaggaagtacgtggcctcaatgggagatgcccagagactgcaacaggtgaaaggtggcccccaaggcccagcccgtctctatgttgttcactttctttgtgggctgttgagaagaaaaaaagtcttcaccttttcatccagtttccaactctagcaagcacagctcttgggcagaaaatattggcaaagaatatccacatgggcaaaccaaggcaaaacggacagaagccagtctttgcaggctccccactactctgtaacaatttccttccggccatggcccattggccattgcccctacacccaccattctcatatctgaa

SEQ ID NO: 45193 - DNA, 322 bp, Homo sapiens; identical to SEQ ID NO: 36135

SEQ ID NO: 45194 - DNA, 444 bp, Homo sapiens; identical to SEQ ID NO: 36139

SEQ ID NO: 45195 - DNA, 446 bp, Homo sapiens; identical to SEQ ID NO: 43371

SEQ ID NO: 45196 - DNA, 642 bp, Homo sapiens; identical to SEQ ID NO: 36349
  misc_feature 383: n = A,T,C or G

SEQ ID NO: 45197 - DNA, 505 bp, Homo sapiens
cgtaatacgactcactatagcggcgaattgggtacgggccccccctcgaggtcgacggtatcgataagcttgatatcgaattcctgcagcccagggggatccactagttctagagcggccgaggtaccccactgcagccaggaccagaatgctatcactctcaggaatgagatcattcagagcatagctgcatcgggggcatgaccagcactatcctctccctgaccgcattccctgacctggctgcacaacccacttgatcgaggttaatgcaagccatctttctcctgaagacagtcactccctttgggcacatttaaattaaagcacctatcagaatgcaagtccagaggccctggcccatccgtcacagtgtatagaacggtctctttctacagagtaagagtgaccctatcctggtgcctttgaatctaaaaactattcagttcctttggtgggcaatcttcctggaagcactgacaacttcctctcatgggtgaaccat

SEQ ID NO: 45198 - DNA, 455 bp, Homo sapiens; identical to SEQ ID NO: 36140

SEQ ID NO: 45199 - DNA, 457 bp, Homo sapiens; identical to SEQ ID NO: 36242

SEQ ID NO: 45200 - DNA, 466 bp, Homo sapiens; identical to SEQ ID NO: 36142

SEQ ID NO: 45201 - DNA, 439 bp, Homo sapiens; identical to SEQ ID NO: 36143

SEQ ID NO: 45202 - DNA, 432 bp, Homo sapiens; identical to SEQ ID NO: 36144

SEQ ID NO: 45203 - DNA, 644 bp, Homo sapiens; identical to SEQ ID NO: 35903

SEQ ID NO: 45204 - DNA, 419 bp, Homo sapiens
tacgactactatagggcgaattgggccctctagatgcatgctcgagcggccgccagtgtgatggatatctgcagaattcgcccttagcgtggtcgcggccgaggtactttaattagttaatagaaaccactgtaaatgagttatctatctccagaacattctcagagaatttacacgaactaaaacaggaatgaagtgctctcagagactttttctcaggtaaatgtatttagtagtttgagtagttgatctgcaaaaactttaactttaattaactacatagatgaatattttttattttgaaatttgagaatgtcctaagaggatgtctacaggatatgaaactactgggtgcaggaaaattttttaaatgttagcaaattgtggcaagaggaaaacaaacagtggagaaaactgtg

SEQ ID NO: 45205 - DNA, 477 bp, Homo sapiens; identical to SEQ ID NO: 36147

SEQ ID NO: 45206 - DNA, 554 bp, Homo sapiens; identical to SEQ ID NO: 33286

SEQ ID NO: 45207 - DNA, 446 bp, Homo sapiens; identical to SEQ ID NO: 36149

SEQ ID NO: 45208 - DNA, 422 bp, Homo sapiens; identical to SEQ ID NO: 40411

SEQ ID NO: 45209 - DNA, 267 bp, Homo sapiens; identical to SEQ ID NO: 36151

SEQ ID NO: 45210 - DNA, 602 bp, Homo sapiens; identical to SEQ ID NO: 36334

SEQ ID NO: 45211 - DNA, 502 bp, Homo sapiens; identical to SEQ ID NO: 35865

SEQ ID NO: 45212 - DNA, 186 bp, Homo sapiens; identical to SEQ ID NO: 36154

SEQ ID NO: 45213 - DNA, 426 bp, Homo sapiens; identical to SEQ ID NO: 36155

SEQ ID NO: 45214 - DNA, 458 bp, Homo sapiens; identical to SEQ ID NO: 36156

SEQ ID NO: 45215 - DNA, 488 bp, Homo sapiens
gctgattggagctccaccgcggtggcggccgcccgggcttgtactttgaacgatagcaacccttctttgtgtaactctgaagctgaaaatattgagccttcagttatgaagatttcttcaaatagctttatgaatgtgcatttggaatcaaaaccagttatatgtgatagtagaaatttgacagatcactcaaaatttgcatgtgaagaatataagcagagcatcggtagcactagttcagcttctgttaatcattttgatgatttatatcaacctattgggagttcgggtattgcttcatctcttcagagtcttccaccaggaataaaggtggacagtctaactctcttgaaatgcggagagaacacatctccagttctggatgcagtgctaaagagtaaaaaaagttcagagtttttaaagcatgcagggaaagaaacaatagtagaagtaggtagtgaccttcctgattcaggaaagggatttgc

SEQ ID NO: 45216 - DNA, 477 bp, Homo sapiens; identical to SEQ ID NO: 36158

SEQ ID NO: 45217 - DNA, 523 bp, Homo sapiens; identical to SEQ ID NO: 36159

SEQ ID NO: 45218 - DNA, 448 bp, Homo sapiens; identical to SEQ ID NO: 36160

SEQ ID NO: 45219 - DNA, 523 bp, Homo sapiens; identical to SEQ ID NO: 39667

SEQ ID NO: 45220 - DNA, 486 bp, Homo sapiens; identical to SEQ ID NO: 36162

SEQ ID NO: 45221 - DNA, 456 bp, Homo sapiens; identical to SEQ ID NO: 36163

SEQ ID NO: 45222 - DNA, 458 bp, Homo sapiens; identical to SEQ ID NO: 36164

SEQ ID NO: 45223 - DNA, 561 bp, Homo sapiens; identical to SEQ ID NO: 37205

SEQ ID NO: 45224 - DNA, 421 bp, Homo sapiens; identical to SEQ ID NO: 34953
  misc_feature 326: n = A,T,C or G

SEQ ID NO: 45225 - DNA, 515 bp, Homo sapiens
aagggaacaaaagctgggtaccgggccccccctcgttagtacttctagaattaattaaggcgggggggtgagagcgtgcggccgggtaagggcgtgtggccggattcaccacaacatggcaaatctttttataaggaaaatggtgaaccctctgctctatctcagtcgtcacacggtgaagcctcgagccctctccacatttctatttggatccattcgaggtgcagcccccgtggctgtggaacccggggcagcagtgcgctcacttctctcacccggcctcctgccccatctgctgcctgcgctggggttcaaaaacaagactgtccttaagaagcgctgcaaggactgttacctggtgaagaagcggggtcggtgggacgtctactgtaaaacccatccgaggcacaagcagagacagatgtagaccctttccctccagagtcacgcacatacttcgcatcgcatcacttgggagaatggttgtatcttatggaaggaattatcacatcaag

SEQ ID NO: 45226 - DNA, 340 bp, Homo sapiens
ggccgccagtgtgatggatatctgcagaattcgcccttagcgtggtcgcggccgaggtactttttgtttttttttttttttttttttttttggctctttgtaaattctttattgccaggagtgaaccctaaagtggctcacaagagtgccctatttctttcaattaactacaaggacaaacacatctcaaagttgagataagtgaccagtatgatttgccaaaattctaaagcgcactcaccatgaaatggataaaggttacctttggggatttgcactgtatgaattctgtgaaaagacttgttggatatttgtgattaggagataggagaaatgaaag

SEQ ID NO: 45227 - DNA, 466 bp, Homo sapiens; identical to SEQ ID NO: 36169
  misc_feature 158: n = A,T,C or G

SEQ ID NO: 45228 - DNA, 474 bp, Homo sapiens; identical to SEQ ID NO: 36170

SEQ ID NO: 45229 - DNA, 678 bp, Homo sapiens; identical to SEQ ID NO: 36171

SEQ ID NO: 45230 - DNA, 586 bp, Homo sapiens; identical to SEQ ID NO: 35929

SEQ ID NO: 45231 - DNA, 402 bp, Homo sapiens; identical to SEQ ID NO: 36785

SEQ ID NO: 45232 - DNA, 612 bp, Homo sapiens; identical to SEQ ID NO: 36408

SEQ ID NO: 45233 - DNA, 469 bp, Homo sapiens; identical to SEQ ID NO: 31275

SEQ ID NO: 45234 - DNA, 381 bp, Homo sapiens; identical to SEQ ID NO: 36177

SEQ ID NO: 45235 - DNA, 630 bp, Homo sapiens; identical to SEQ ID NO: 36178
  misc_feature 621, 622: n = A,T,C or G

SEQ ID NO: 45236 - DNA, 466 bp, Homo sapiens; identical to SEQ ID NO: 36179

SEQ ID NO: 45237 - DNA, 429 bp, Homo sapiens; identical to SEQ ID NO: 36180

SEQ ID NO: 45238 - DNA, 486 bp, Homo sapiens
tacactacttagggcgaattgggccctctagatgcatgctcgaggcggccgccagtgtgatggatatctgcagaattcgccctttcgagcggccgcccgggcaggtactgaggctgtatacagccacagcctctccccatccctccagccttatctgtcatcaccatcaacccctcccatgcacctaaacaaaatctaacttgtaattccttgaacatgtcaggcatacattattccttctgcctgagaagctcttccttgtctcttaaatctagaatgatgtaaagttttgaatgagttgactatcttacttcatgcaaagaagggacacatatgagattcatcatcacatgagacagcaaatactaaaagtgtaatttgattataagagtttagataaatatatgaaatgcaagatccacagagggaatgtttatggggcacgtttgtaagcctgggatgtgaagcaaaggcagggaacctcat

SEQ ID NO: 45239 - DNA, 383 bp, Homo sapiens; identical to SEQ ID NO: 36182

SEQ ID NO: 45240 - DNA, 415 bp, Homo sapiens; identical to SEQ ID NO: 36183

SEQ ID NO: 45241 - DNA, 428 bp, Homo sapiens; identical to SEQ ID NO: 36184

SEQ ID NO: 45242 - DNA, 410 bp, Homo sapiens; identical to SEQ ID NO: 36185

SEQ ID NO: 45243 - DNA, 422 bp, Homo sapiens; identical to SEQ ID NO: 36241

SEQ ID NO: 45244 - DNA, 428 bp, Homo sapiens; identical to SEQ ID NO: 36187

SEQ ID NO: 45245 - DNA, 418 bp, Homo sapiens; identical to SEQ ID NO: 36188

SEQ ID NO: 45246 - DNA, 460 bp, Homo sapiens; identical to SEQ ID NO: 36189

SEQ ID NO: 45247 - DNA, 416 bp, Homo sapiens; identical to SEQ ID NO: 30867
  misc_feature 322: n = A,T,C or G

SEQ ID NO: 45248 - DNA, 461 bp, Homo sapiens; identical to SEQ ID NO: 36191

SEQ ID NO: 45249 - DNA, 393 bp, Homo sapiens; identical to SEQ ID NO: 36192

SEQ ID NO: 45250 - DNA, 154 bp, Homo sapiens; identical to SEQ ID NO: 36193

SEQ ID NO: 45251 - DNA, 394 bp, Homo sapiens; identical to SEQ ID NO: 36261

SEQ ID NO: 45252 - DNA, 439 bp, Homo sapiens; identical to SEQ ID NO: 36195

SEQ ID NO: 45253 - DNA, 410 bp, Homo sapiens; identical to SEQ ID NO: 36185

SEQ ID NO: 45254 - DNA, 444 bp, Homo sapiens; identical to SEQ ID NO: 36197

SEQ ID NO: 45255 - DNA, 404 bp, Homo sapiens; identical to SEQ ID NO: 36198
  misc_feature 47: n = A,T,C or G

SEQ ID NO: 45256 - DNA, 449 bp, Homo sapiens; identical to SEQ ID NO: 36200

SEQ ID NO: 45257 - DNA, 228 bp, Homo sapiens; identical to SEQ ID NO: 36201

SEQ ID NO: 45258 - DNA, 391 bp, Homo sapiens; identical to SEQ ID NO: 36202

SEQ ID NO: 45259 - DNA, 683 bp, Homo sapiens; identical to SEQ ID NO: 36203

SEQ ID NO: 45260 - DNA, 496 bp, Homo sapiens
gcgtccggtgcagaggggattcaacttcaatttttctgcagtggctctgggtccagccccttacttaaagatctggaaagcatgaagactgggctttttttcctatgtctcttgggaactgcagctgcaatcccgacaaatgcaagattattatctgatcattccaaaccaactgctgaaacggtagcacccgacaacactgcaatccccagtttaagggctgaagatgaagaaaatgaaaaagaaacagcagtatccacagaagacgattcccaccataaggctgaaaaatcatcagtactaaagtcaaaagaggaaagccatgaacagtcagcagaacagggcaagagttctagccaagagctgggattgaaggatcaagaggacagtgatggtgacttaagtgtgaatttggagtatgcaccaactgaaggtacattggacataaaagaagatatgagtgagcctcaggagaaaaaactctcagagaacactg

SEQ ID NO: 45261 - DNA, 390 bp, Homo sapiens; identical to SEQ ID NO: 36208

SEQ ID NO: 45262 - DNA, 228 bp, Homo sapiens; identical to SEQ ID NO: 36201

SEQ ID NO: 45263 - DNA, 439 bp, Homo sapiens; identical to SEQ ID NO: 36210

SEQ ID NO: 45264 - DNA, 486 bp, Homo sapiens; identical to SEQ ID NO: 36401

SEQ ID NO: 45265 - DNA, 362 bp, Homo sapiens; identical to SEQ ID NO: 36212

SEQ ID NO: 45266 - DNA, 179 bp, Homo sapiens
gtatacgactcactatagggcgaattggagctccaccgcggtggcctaatgagtgagctaactcacattaattgcgttgcgctcactgcccgctttccagtcgggaaacctgtcgtgccagctgcattaatgaatcggccaacgcgcggggagaggcggtttgcgtattgggcgctctt

SEQ ID NO: 45267 - DNA, 438 bp, Homo sapiens; identical to SEQ ID NO: 36214

SEQ ID NO: 45268 - DNA, 434 bp, Homo sapiens; identical to SEQ ID NO: 36215

SEQ ID NO: 45269 - DNA, 543 bp, Homo sapiens; identical to SEQ ID NO: 36218
  misc_feature 16: n = A,T,C or G

SEQ ID NO: 45270 - DNA, 410 bp, Homo sapiens; identical to SEQ ID NO: 36219

SEQ ID NO: 45271 - DNA, 393 bp, Homo sapiens; identical to SEQ ID NO: 36221

SEQ ID NO: 45272 - DNA, 456 bp, Homo sapiens; identical to SEQ ID NO: 36101

SEQ ID NO: 45273 - DNA, 432 bp, Homo sapiens; identical to SEQ ID NO: 36358

SEQ ID NO: 45274 - DNA, 313 bp, Homo sapiens
tagggcgaattggagctccaccgcggtggcggccgcccgggcaggtacatgggactacaggcacgccccaccatgcccagctcatttttgtatttttagtagagacagggtttcaccatgttggccaggatgatcttgatctcttgacctcatgatccgccccttttggcctccccaagtgctgggatcacaggcgtgagccaccacacctggccctctatttattctctttaaagaagagagaaaactatgagaggccaaaattatttaattaaatcttttaccttagcacaagggaaaaaatggaatttgc

SEQ ID NO: 45275 - DNA, 390 bp, Homo sapiens; identical to SEQ ID NO: 36226

SEQ ID NO: 45276 - DNA, 457 bp, Homo sapiens; identical to SEQ ID NO: 36227

SEQ ID NO: 45277 - DNA, 452 bp, Homo sapiens; identical to SEQ ID NO: 36228

SEQ ID NO: 45278 - DNA, 453 bp, Homo sapiens; identical to SEQ ID NO: 36229

SEQ ID NO: 45279 - DNA, 617 bp, Homo sapiens; identical to SEQ ID NO: 37208
  misc_feature 478, 553: n = A,T,C or G

SEQ ID NO: 45280 - DNA, 353 bp, Homo sapiens; identical to SEQ ID NO: 36232

SEQ ID NO: 45281 - DNA, 183 bp, Homo sapiens; identical to SEQ ID NO: 36233

SEQ ID NO: 45282 - DNA, 438 bp, Homo sapiens; identical to SEQ ID NO: 36234

SEQ ID NO: 45283 - DNA, 205 bp, Homo sapiens
ggagctccaccgcggtggcggccgctctagaactagtggatcccccgggctgcaggaattcgatatcaagcttatcgataccgtcgacctcgagggggggcccggtacccagcttttgttccctttagtgagggttaattgcgcgcttggcgtaatcatggtcatagctgtttcctgtgtgaaattgttatccgctcacaatttc

SEQ ID NO: 45284 - DNA, 380 bp, Homo sapiens; identical to SEQ ID NO: 36237

SEQ ID NO: 45285 - DNA, 410 bp, Homo sapiens
ggcgaattgtagctccaccgcggtggcggccgggcatctctcccagggatctctgtgcttccttttgtgcttcctgtgtgtgtggatatttaaaggggctggaaatgtgcaaaaacatgtcactacttagacattatattgtcatcttgctgtttctagtgatgttaattatctccatttcagcagatgtgtggcctcagatggtaaagtcagcagcctttcttatttctcacccctgccattgagatgtctgtagtctttctttgctgcactgagtacctcggccgctctagaactagtggatcccccgggctgcaggaattcgatatcaagcttatcgataccgtccacctcgagggggggcccggtacccagcttttgttccctttagtgagggttaattgcgcgct

SEQ ID NO: 45286 - DNA, 436 bp, Homo sapiens; identical to SEQ ID NO: 36239

SEQ ID NO: 45287 - DNA, 444 bp, Homo sapiens; identical to SEQ ID NO: 36240

SEQ ID NO: 45288 - DNA, 422 bp, Homo sapiens; identical to SEQ ID NO: 36241

SEQ ID NO: 45289 - DNA, 457 bp, Homo sapiens; identical to SEQ ID NO: 36242

SEQ ID NO: 45290 - DNA, 443 bp, Homo sapiens; identical to SEQ ID NO: 36243

SEQ ID NO: 45291 - DNA, 478 bp, Homo sapiens; identical to SEQ ID NO: 30781

SEQ ID NO: 45292 - DNA, 442 bp, Homo sapiens; identical to SEQ ID NO: 36247

SEQ ID NO: 45293 - DNA, 438 bp, Homo sapiens; identical to SEQ ID NO: 34932

SEQ ID NO: 45294 - DNA, 409 bp, Homo sapiens
gcgaattggagctccaccgcggtggcggccgaggtacagatctgggaactaaatattaaaaatgagtgtggctggatatatggagaatgttgggcccagaaggaaccgtatagatcagatattacaacagctttgttttgagggttagaaatatgaaatgatttggttatgaacgcacagtttaggcagcagggccagaatcctgaccctctgccccgtggttatctcctccccagcttggctgcctcatgtcatcacagtattccattttgtttgttgcatgtcttgtgaagccatcaagattttctcgtctgttttcctctcattggtaatgctcactttgtgacttcatttcaaatctgtaatcccgttcaaataaatatccacaacaggatctgttttcctgccc

SEQ ID NO: 45295 - DNA, 269 bp, Homo sapiens; identical to SEQ ID NO: 36250

SEQ ID NO: 45296 - DNA, 337 bp, Homo sapiens
ttggagctccaccgcggtggcggccgaggtacgaatattctcagcgatggaagtctttggatgaaatggaaaaacagcaaagggaacaagctgaaaaaaacatgaaagatgcaaaagacaaattggaaagtgaaatggaagatgcctatcatgaacatcaggcaaatcttttgcgccaagatctgatgagacgacaggaagaattaagacgcatggaagaacttcacaatcaagaaatgcagaaacgtaaagaaatgcaattgaggcaagaggaggaacgacgtagaagagaggaagagatgatgattcgtcaacgtgagatggaagaacaaatgag

SEQ ID NO: 45297 - DNA, 473 bp, Homo sapiens; identical to SEQ ID NO: 36252

SEQ ID NO: 45298 - DNA, 400 bp, Homo sapiens; identical to SEQ ID NO: 36254

SEQ ID NO: 45299 - DNA, 432 bp, Homo sapiens; identical to SEQ ID NO: 36256

SEQ ID NO: 45300 - DNA, 453 bp, Homo sapiens; identical to SEQ ID NO: 36257

SEQ ID NO: 45301 - DNA, 405 bp, Homo sapiens; identical to SEQ ID NO: 36258

SEQ ID NO: 45302 - DNA, 435 bp, Homo sapiens; identical to SEQ ID NO: 36259

SEQ ID NO: 45303 - DNA, 413 bp, Homo sapiens; identical to SEQ ID NO: 36260

SEQ ID NO: 45304 - DNA, 442 bp, Homo sapiens; identical to SEQ ID NO: 36262

SEQ ID NO: 45305 - DNA, 456 bp, Homo sapiens; identical to SEQ ID NO: 36263

SEQ ID NO: 45306 - DNA, 403 bp, Homo sapiens; identical to SEQ ID NO: 36264

SEQ ID NO: 45307 - DNA, 442 bp, Homo sapiens; identical to SEQ ID NO: 36265

SEQ ID NO: 45308 - DNA, 267 bp, Homo sapiens; identical to SEQ ID NO: 36267

SEQ ID NO: 45309 - DNA, 478 bp, Homo sapiens; identical to SEQ ID NO: 36288

SEQ ID NO: 45310 - DNA, 492 bp, Homo sapiens; identical to SEQ ID NO: 36269

SEQ ID NO: 45311 - DNA, 442 bp, Homo sapiens; identical to SEQ ID NO: 36270

SEQ ID NO: 45312 - DNA, 409 bp, Homo sapiens
gctccaccgcggtgtcggccgcttaattaattctagtattactctcgagggggggcccggtacccagcttttgttccctttagtgagggttaattgcgcgcttggcgtaatcatggtcatagctgtttcctgtgtgaaattgttatccgctcacaattccacacaacatacgagccggaagcataaagtgtaaagcctggggtgcctaatgagtgagctaactcacattaattgcgttgcgctcactgcccgctttccagtcgggaaacctgtcgtgccagctgcattaatgaatcggccaacgcgcggggagaggcggtttgcgtattgggcgctcttccgcttcctcgctcactgactcgctgcgctcggtcgttcggctgcggcgagcggtatcagctcactcaaa

SEQ ID NO: 45313 - DNA, 404 bp, Homo sapiens; identical to SEQ ID NO: 36272

SEQ ID NO: 45314 - DNA, 425 bp, Homo sapiens; identical to SEQ ID NO: 36273

SEQ ID NO: 45315 - DNA, 479 bp, Homo sapiens; identical to SEQ ID NO: 36274

SEQ ID NO: 45316 - DNA, 393 bp, Homo sapiens; identical to SEQ ID NO: 36275

SEQ ID NO: 45317 - DNA, 446 bp, Homo sapiens; identical to SEQ ID NO: 36276

SEQ ID NO: 45318 - DNA, 389 bp, Homo sapiens; identical to SEQ ID NO: 36277

SEQ ID NO: 45319 - DNA, 443 bp, Homo sapiens
actttagtgtattgttcccttgctccacccttctatccccttatctaaatggagttactgttgcttcgtgtttttttaacccttccaattccagtccttgctttcctgagtttaaaatttatcctgggaaagaaatatattaaaataattgtggcaaacaattatactttgcttttaagaatgaattttttttgtaatatattaattctgatatcctttaagttaagtaaatgcacagccagtttatacatcttcattgctcattttgttgttttaagatacattgtaaagaatattttatttcctaaaaattttatttcctgcatatcttctctaagattctctggctagcaaacattgttatatatgcatagtttacaccttattagaagtaaaaaagaattaaaagtaagaaaaatttccactaggaacaataatgaggt

SEQ ID NO: 45320 - DNA, 410 bp, Homo sapiens; identical to SEQ ID NO: 36185

SEQ ID NO: 45321 - DNA, 239 bp, Homo sapiens; identical to SEQ ID NO: 36280

SEQ ID NO: 45322 - DNA, 451 bp, Homo sapiens; identical to SEQ ID NO: 36281

SEQ ID NO: 45323 - DNA, 478 bp, Homo sapiens; identical to SEQ ID NO: 30781

SEQ ID NO: 45324 - DNA, 450 bp, Homo sapiens; identical to SEQ ID NO: 36283

SEQ ID NO: 45325 - DNA, 410 bp, Homo sapiens; identical to SEQ ID NO: 36185

SEQ ID NO: 45326 - DNA, 496 bp, Homo sapiens; identical to SEQ ID NO: 45260

SEQ ID NO: 45327 - DNA, 561 bp, Homo sapiens
cactatagggtgaattggagctgcaactcgtggcggccgctgacgtaattctagaagtactctcgagggggggcccggtacccagcttttgttccctttagtgagggttaattgcgcgcttggcgtaatcatggtcatagctgtttcctgtgtgaaattgttatccgctcacaattccacacaacatacgagccggaagcataaagtgtaaagcctggggtgcctaatgagtgagctaactcacattaattgcgttgcgctcactgcccgctttccagtcgggaaacctgtcgtgccagctgcattaatgaatcggccaacgcgcggggagaggcggtttgcgtattgggcgctcttccgcttcctcgctcactgactcgctgcgctcggtcgttcggctgcggcgagcggtatcagctcactcaaaggcggtaatacggttatccacagaatcaggggataacgcaggaaagaacatgtgagcaaaaggccagcaaaagggccaggaaccgtaaaaaaggccccgttgctggcgtttttccataggctccgcccccctga

SEQ ID NO: 45328 - DNA, 478 bp, Homo sapiens; identical to SEQ ID NO: 36288

SEQ ID NO: 45329 - DNA, 426 bp, Homo sapiens; identical to SEQ ID NO: 36289

SEQ ID NO: 45330 - DNA, 360 bp, Homo sapiens; identical to SEQ ID NO: 36291

SEQ ID NO: 45331 - DNA, 237 bp, Homo sapiens; identical to SEQ ID NO: 36292

SEQ ID NO: 45332 - DNA, 533 bp, Homo sapiens; identical to SEQ ID NO: 36293

SEQ ID NO: 45333 - DNA, 204 bp, Homo sapiens
cactatagggcgaattggagctccaccgcggtggcggccggcctgggcagacttagatgctgtccatagctttgaactcgctgagggcctgcaccgggttcacgtgcttcttctgagatgcccgtttaatcttggtctgtgtctcatcctgtttctctctcttcaccaatggctttttctctggtgcctttatcttccatgaca

SEQ ID NO: 45334 - DNA, 440 bp, Homo sapiens; identical to SEQ ID NO: 36340

SEQ ID NO: 45335 - DNA, 450 bp, Homo sapiens; identical to SEQ ID NO: 36298

SEQ ID NO: 45336 - DNA, 430 bp, Homo sapiens; identical to SEQ ID NO: 36299

SEQ ID NO: 45337 - DNA, 438 bp, Homo sapiens; identical to SEQ ID NO: 36300

SEQ ID NO: 45338 - DNA, 439 bp, Homo sapiens; identical to SEQ ID NO: 36301

SEQ ID NO: 45339 - DNA, 436 bp, Homo sapiens; identical to SEQ ID NO: 36410

SEQ ID NO: 45340 - DNA, 418 bp, Homo sapiens; identical to SEQ ID NO: 36304

SEQ ID NO: 45341 - DNA, 360 bp, Homo sapiens; identical to SEQ ID NO: 36306

SEQ ID NO: 45342 - DNA, 472 bp, Homo sapiens; identical to SEQ ID NO: 36307

SEQ ID NO: 45343 - DNA, 434 bp, Homo sapiens; identical to SEQ ID NO: 36308

SEQ ID NO: 45344 - DNA, 443 bp, Homo sapiens; identical to SEQ ID NO: 36309

SEQ ID NO: 45345 - DNA, 457 bp, Homo sapiens; identical to SEQ ID NO: 36310

SEQ ID NO: 45346 - DNA, 411 bp, Homo sapiens; identical to SEQ ID NO: 36311

SEQ ID NO: 45347 - DNA, 422 bp, Homo sapiens; identical to SEQ ID NO: 36312

SEQ ID NO: 45348 - DNA, 411 bp, Homo sapiens; identical to SEQ ID NO: 36313

SEQ ID NO: 45349 - DNA, 531 bp, Homo sapiens; identical to SEQ ID NO: 30497

SEQ ID NO: 45350 - DNA, 406 bp, Homo sapiens; identical to SEQ ID NO: 36315

SEQ ID NO: 45351 - DNA, 588 bp, Homo sapiens; identical to SEQ ID NO: 36317
  misc_feature 528: n = A,T,C or G

SEQ ID NO: 45352 - DNA, 368 bp, Homo sapiens; identical to SEQ ID NO: 36318

SEQ ID NO: 45353 - DNA, 413 bp, Homo sapiens; identical to SEQ ID NO: 36319

SEQ ID NO: 45354 - DNA, 486 bp, Homo sapiens; identical to SEQ ID NO: 36401

SEQ ID NO: 45355 - DNA, 389 bp, Homo sapiens; identical to SEQ ID NO: 36321

SEQ ID NO: 45356 - DNA, 593 bp, Homo sapiens; identical to SEQ ID NO: 36322

SEQ ID NO: 45357 - DNA, 533 bp, Homo sapiens; identical to SEQ ID NO: 36323

SEQ ID NO: 45358 - DNA, 486 bp, Homo sapiens; identical to SEQ ID NO: 36401

SEQ ID NO: 45359 - DNA, 706 bp, Homo sapiens; identical to SEQ ID NO: 36325
  misc_feature 574: n = A,T,C or G

SEQ ID NO: 45360 - DNA, 557 bp, Homo sapiens; identical to SEQ ID NO: 36327

SEQ ID NO: 45361 - DNA, 587 bp, Homo sapiens; identical to SEQ ID NO: 37513

SEQ ID NO: 45362 - DNA, 385 bp, Homo sapiens; identical to SEQ ID NO: 36330

SEQ ID NO: 45363 - DNA, 443 bp, Homo sapiens; identical to SEQ ID NO: 36331

SEQ ID NO: 45364 - DNA, 590 bp, Homo sapiens; identical to SEQ ID NO: 36332
  misc_feature 36: n = A,T,C or G

SEQ ID NO: 45365 - DNA, 478 bp, Homo sapiens; identical to SEQ ID NO: 30781

SEQ ID NO: 45366 - DNA, 602 bp, Homo sapiens; identical to SEQ ID NO: 36334

SEQ ID NO: 45367 - DNA, 405 bp, Homo sapiens; identical to SEQ ID NO: 36335

SEQ ID NO: 45368 - DNA, 394 bp, Homo sapiens; identical to SEQ ID NO: 36336

SEQ ID NO: 45369 - DNA, 613 bp, Homo sapiens; identical to SEQ ID NO: 36337

SEQ ID NO: 45370 - DNA, 642 bp, Homo sapiens; identical to SEQ ID NO: 36349
  misc_feature 383: n = A,T,C or G

SEQ ID NO: 45371 - DNA, 404 bp, Homo sapiens; identical to SEQ ID NO: 36339

SEQ ID NO: 45372 - DNA, 440 bp, Homo sapiens; identical to SEQ ID NO: 36340

SEQ ID NO: 45373 - DNA, 424 bp, Homo sapiens; identical to SEQ ID NO: 36341

SEQ ID NO: 45374 - DNA, 424 bp, Homo sapiens; identical to SEQ ID NO: 36342

SEQ ID NO: 45375 - DNA, 428 bp, Homo sapiens; identical to SEQ ID NO: 32009

SEQ ID NO: 45376 - DNA, 490 bp, Homo sapiens; identical to SEQ ID NO: 36344
  misc_feature 15, 192, 196, 224, 260, 369: n = A,T,C or G

SEQ ID NO: 45377 - DNA, 651 bp, Homo sapiens; identical to SEQ ID NO: 36345

SEQ ID NO: 45378 - DNA, 627 bp, Homo sapiens; identical to SEQ ID NO: 36346

SEQ ID NO: 45379 - DNA, 363 bp, Homo sapiens; identical to SEQ ID NO: 36347

SEQ ID NO: 45380 - DNA, 434 bp, Homo sapiens; identical to SEQ ID NO: 36348

SEQ ID NO: 45381 - DNA, 642 bp, Homo sapiens; identical to SEQ ID NO: 36349
  misc_feature 383: n = A,T,C or G

SEQ ID NO: 45382 - DNA, 270 bp, Homo sapiens; identical to SEQ ID NO: 36350

SEQ ID NO: 45383 - DNA, 532 bp, Homo sapiens; identical to SEQ ID NO: 36351
  misc_feature 349: n = A,T,C or G

SEQ ID NO: 45384 - DNA, 403 bp, Homo sapiens; identical to SEQ ID NO: 36352

SEQ ID NO: 45385 - DNA, 595 bp, Homo sapiens; identical to SEQ ID NO: 39337

SEQ ID NO: 45386 - DNA, 410 bp, Homo sapiens; identical to SEQ ID NO: 36185

SEQ ID NO: 45387 - DNA, 642 bp, Homo sapiens; identical to SEQ ID NO: 36349
  misc_feature 383: n = A,T,C or G

SEQ ID NO: 45388 - DNA, 655 bp, Homo sapiens; identical to SEQ ID NO: 36356

SEQ ID NO: 45389 - DNA, 637 bp, Homo sapiens; identical to SEQ ID NO: 36357
  misc_feature 25, 471: n = A,T,C or G

SEQ ID NO: 45390 - DNA, 432 bp, Homo sapiens; identical to SEQ ID NO: 36358

SEQ ID NO: 45391 - DNA, 411 bp, Homo sapiens; identical to SEQ ID NO: 36359

SEQ ID NO: 45392 - DNA, 314 bp, Homo sapiens; identical to SEQ ID NO: 36360

SEQ ID NO: 45393 - DNA, 556 bp, Homo sapiens; identical to SEQ ID NO: 36361

SEQ ID NO: 45394 - DNA, 684 bp, Homo sapiens; identical to SEQ ID NO: 36362

SEQ ID NO: 45395 - DNA, 426 bp, Homo sapiens; identical to SEQ ID NO: 36363

SEQ ID NO: 45396 - DNA, 442 bp, Homo sapiens; identical to SEQ ID NO: 36364

SEQ ID NO: 45397 - DNA, 149 bp, Homo sapiens; identical to SEQ ID NO: 36365

SEQ ID NO: 45398 - DNA, 429 bp, Homo sapiens; identical to SEQ ID NO: 36366

SEQ ID NO: 45399 - DNA, 565 bp, Homo sapiens; identical to SEQ ID NO: 36367
  misc_feature 380: n = A,T,C or G

SEQ ID NO: 45400 - DNA, 410 bp, Homo sapiens; identical to SEQ ID NO: 36185

SEQ ID NO: 45401 - DNA, 286 bp, Homo sapiens; identical to SEQ ID NO: 36370

SEQ ID NO: 45402 - DNA, 197 bp, Homo sapiens; identical to SEQ ID NO: 36371

SEQ ID NO: 45403 - DNA, 444 bp, Homo sapiens; identical to SEQ ID NO: 36372

SEQ ID NO: 45404 - DNA, 549 bp, Homo sapiens; identical to SEQ ID NO: 36373

SEQ ID NO: 45405 - DNA, 176 bp, Homo sapiens; identical to SEQ ID NO: 36375

SEQ ID NO: 45406 - DNA, 238 bp, Homo sapiens; identical to SEQ ID NO: 36376
  misc_feature 196, 197, 214, 215: n = A,T,C or G

SEQ ID NO: 45407 - DNA, 163 bp, Homo sapiens; identical to SEQ ID NO: 36377

SEQ ID NO: 45408 - DNA, 461 bp, Homo sapiens; identical to SEQ ID NO: 36378

SEQ ID NO: 45409 - DNA, 400 bp, Homo sapiens; identical to SEQ ID NO: 36379

SEQ ID NO: 45410 - DNA, 546 bp, Homo sapiens; identical to SEQ ID NO: 36380

SEQ ID NO: 45411 - DNA, 483 bp, Homo sapiens; identical to SEQ ID NO: 36381

SEQ ID NO: 45412 - DNA, 445 bp, Homo sapiens; identical to SEQ ID NO: 36382

SEQ ID NO: 45413 - DNA, 288 bp, Homo sapiens; identical to SEQ ID NO: 36383

SEQ ID NO: 45414 - DNA, 443 bp, Homo sapiens
  misc_feature 199: n = A,T,C or G
tacgactactatagggcgaattgggccctctagatgcatgctcgagcggccgccagtgtgatggatatctgcagaattcgccctttcgagcggccgcccgggcaggtacccagaaaataagaaagggttccaaaatgaagaatcgctccttttgcaaaccttatggtaacaaatataatatttataaaaagtgaattangtaatatgttaatggagaaataaacatcattatgaaatgctatcttaaacaaaaaataagagaaaatattagtttaaaaatagaacttatagtcgatttaaaaaagcaagaccaaactcttagctatgcacaagaaagttactttacacattcacaaatataaaaggatgagaaaacatggattatgaaaatatgaaccgaaatgaagctatagtagctgtgcaaatttcagacaaaatagaca

SEQ ID NO: 45415 - DNA, 451 bp, Homo sapiens; identical to SEQ ID NO: 36385

SEQ ID NO: 45416 - DNA, 564 bp, Homo sapiens; identical to SEQ ID NO: 36679
  misc_feature 23: n = A,T,C or G

SEQ ID NO: 45417 - DNA, 311 bp, Homo sapiens
  misc_feature 172: n = A,T,C or G
tccaccgcggtggcggccgcccgggcaggtactttcaagtcacctggttcccatacagctgacttttcccagcactggaaacacgacgcatgcctagacctttagagaatcctaattttgcccacccccaactgtcctgtaacaaagcttggttcacccaaaaatgccaggngagtctcaaacccaaggctagttaaaactattgggaaaggtaggccccctttccacagggattgctaacctggtagtgtgtaagctccgaattgctgggagttgcctggccacattgacaggaaagtctactggagggt

SEQ ID NO: 45418 - DNA, 544 bp, Homo sapiens; identical to SEQ ID NO: 36326

SEQ ID NO: 45419 - DNA, 543 bp, Homo sapiens; identical to SEQ ID NO: 36218
  misc_feature 16: n = A,T,C or G

SEQ ID NO: 45420 - DNA, 544 bp, Homo sapiens; identical to SEQ ID NO: 36326

SEQ ID NO: 45421 - DNA, 411 bp, Homo sapiens; identical to SEQ ID NO: 36392

SEQ ID NO: 45422 - DNA, 410 bp, Homo sapiens; identical to SEQ ID NO: 36185

SEQ ID NO: 45423 - DNA, 454 bp, Homo sapiens; identical to SEQ ID NO: 36394

SEQ ID NO: 45424 - DNA, 710 bp, Homo sapiens; identical to SEQ ID NO: 36424

SEQ ID NO: 45425 - DNA, 604 bp, Homo sapiens; identical to SEQ ID NO: 36396
  misc_feature 61, 157: n = A,T,C or G

SEQ ID NO: 45426 - DNA, 589 bp, Homo sapiens; identical to SEQ ID NO: 39132

SEQ ID NO: 45427 - DNA, 449 bp, Homo sapiens; identical to SEQ ID NO: 36399

SEQ ID NO: 45428 - DNA, 486 bp, Homo sapiens; identical to SEQ ID NO: 36401

SEQ ID NO: 45429 - DNA, 632 bp, Homo sapiens; identical to SEQ ID NO: 36402

SEQ ID NO: 45430 - DNA, 464 bp, Homo sapiens; identical to SEQ ID NO: 36403

SEQ ID NO: 45431 - DNA, 536 bp, Homo sapiens; identical to SEQ ID NO: 30716
  misc_feature 49: n = A,T,C or G

SEQ ID NO: 45432 - DNA, 457 bp, Homo sapiens; identical to SEQ ID NO: 36405

SEQ ID NO: 45433 - DNA, 587 bp, Homo sapiens; identical to SEQ ID NO: 36406

SEQ ID NO: 45434 - DNA, 479 bp, Homo sapiens; identical to SEQ ID NO: 36407

SEQ ID NO: 45435 - DNA, 612 bp, Homo sapiens; identical to SEQ ID NO: 36408

SEQ ID NO: 45436 - DNA, 528 bp, Homo sapiens; identical to SEQ ID NO: 36409

SEQ ID NO: 45437 - DNA, 436 bp, Homo sapiens; identical to SEQ ID NO: 36410

SEQ ID NO: 45438 - DNA, 541 bp, Homo sapiens; identical to SEQ ID NO: 36411

SEQ ID NO: 45439 - DNA, 410 bp, Homo sapiens; identical to SEQ ID NO: 36185

SEQ ID NO: 45440 - DNA, 553 bp, Homo sapiens; identical to SEQ ID NO: 36415

SEQ ID NO: 45441 - DNA, 557 bp, Homo sapiens; identical to SEQ ID NO: 36416
  misc_feature 373: n = A,T,C or G

SEQ ID NO: 45442 - DNA, 557 bp, Homo sapiens; identical to SEQ ID NO: 36418

SEQ ID NO: 45443 - DNA, 567 bp, Homo sapiens
tcactatagggcgaattggagctccaccgcggtggcggccgcccgggcaggtacgcggggactgatataaagatcagcgcctgaaacagattctccgggatattaccggagacggagtgttttattattagcctttcttaggtggacatttccatttgaattacaagtcctttaggctgggcgtggtgcatggctgtaatctcagcaccttgggaggctgaggcaggaagatcacttgaggccaggcgttggagagcagcctgggcaaggtggcaagaaccttgtctctacaaaaaaagcgtctgccatcatggatgttctcgcagaagcaaatggcacctttgccttaaaccttttgaaaacgctgggtaaagacaactcgaagaatgtgtttttctcacccatgagcatgtcctgtgccctggccatggtctacatgggggcaaagggaaacaccgctgcacagatggcccagatactttctttcaataaaagtggcggtggtggagacatccaccagggcttccagtctcttttcaccgaagtgaacaagactggcacgcagta

SEQ ID NO: 45444 - DNA, 413 bp, Homo sapiens; identical to SEQ ID NO: 36319

SEQ ID NO: 45445 - DNA, 458 bp, Homo sapiens; identical to SEQ ID NO: 36421

SEQ ID NO: 45446 - DNA, 598 bp, Homo sapiens; identical to SEQ ID NO: 36422

SEQ ID NO: 45447 - DNA, 434 bp, Homo sapiens; identical to SEQ ID NO: 36423

SEQ ID NO: 45448 - DNA, 710 bp, Homo sapiens; identical to SEQ ID NO: 36424

SEQ ID NO: 45449 - DNA, 528 bp, Homo sapiens; identical to SEQ ID NO: 36426
  misc_feature 195, 205, 212, 377: n = A,T,C or G

SEQ ID NO: 45450 - DNA, 385 bp, Homo sapiens; identical to SEQ ID NO: 36427

SEQ ID NO: 45451 - DNA, 568 bp, Homo sapiens; identical to SEQ ID NO: 36428

SEQ ID NO: 45452 - DNA, 443 bp, Homo sapiens; identical to SEQ ID NO: 36430

SEQ ID NO: 45453 - DNA, 454 bp, Homo sapiens; identical to SEQ ID NO: 36108

SEQ ID NO: 45454 - DNA, 455 bp, Homo sapiens; identical to SEQ ID NO: 36432

SEQ ID NO: 45455 - DNA, 432 bp, Homo sapiens; identical to SEQ ID NO: 36435

SEQ ID NO: 45456 - DNA, 461 bp, Homo sapiens; identical to SEQ ID NO: 36436

SEQ ID NO: 45457 - DNA, 420 bp, Homo sapiens; identical to SEQ ID NO: 36437

SEQ ID NO: 45458 - DNA, 419 bp, Homo sapiens; identical to SEQ ID NO: 36438

SEQ ID NO: 45459 - DNA, 601 bp, Homo sapiens; identical to SEQ ID NO: 36439

SEQ ID NO: 45460 - DNA, 422 bp, Homo sapiens; identical to SEQ ID NO: 36441

SEQ ID NO: 45461 - DNA, 558 bp, Homo sapiens; identical to SEQ ID NO: 30997

SEQ ID NO: 45462 - DNA, 451 bp, Homo sapiens; identical to SEQ ID NO: 36443

SEQ ID NO: 45463 - DNA, 90 bp, Homo sapiens; identical to SEQ ID NO: 36444

SEQ ID NO: 45464 - DNA, 636 bp, Homo sapiens; identical to SEQ ID NO: 39126
  misc_feature 581: n = A,T,C or G

SEQ ID NO: 45465 - DNA, 602 bp, Homo sapiens; identical to SEQ ID NO: 36334

SEQ ID NO: 45466 - DNA, 516 bp, Homo sapiens; identical to SEQ ID NO: 39185

SEQ ID NO: 45467 - DNA, 588 bp, Homo sapiens; identical to SEQ ID NO: 39129

SEQ ID NO: 45468 - DNA, 512 bp, Homo sapiens; identical to SEQ ID NO: 39130

SEQ ID NO: 45469 - DNA, 492 bp, Homo sapiens; identical to SEQ ID NO: 39131
  misc_feature 187, 188: n = A,T,C or G

SEQ ID NO: 45470 - DNA, 589 bp, Homo sapiens; identical to SEQ ID NO: 39132

SEQ ID NO: 45471 - DNA, 689 bp, Homo sapiens; identical to SEQ ID NO: 37859

SEQ ID NO: 45472 - DNA, 463 bp, Homo sapiens; identical to SEQ ID NO: 35958

SEQ ID NO: 45473 - DNA, 392 bp, Homo sapiens; identical to SEQ ID NO: 39135

SEQ ID NO: 45474 - DNA, 564 bp, Homo sapiens; identical to SEQ ID NO: 39136

SEQ ID NO: 45475 - DNA, 262 bp, Homo sapiens; identical to SEQ ID NO: 39137

SEQ ID NO: 45476 - DNA, 589 bp, Homo sapiens; identical to SEQ ID NO: 39132

SEQ ID NO: 45477 - DNA, 466 bp, Homo sapiens; identical to SEQ ID NO: 39139

SEQ ID NO: 45478 - DNA, 607 bp, Homo sapiens; identical to SEQ ID NO: 39140

SEQ ID NO: 45479 - DNA, 582 bp, Homo sapiens; identical to SEQ ID NO: 39141

SEQ ID NO: 45480 - DNA, 620 bp, Homo sapiens; identical to SEQ ID NO: 39327
  misc_feature 58, 95, 96, 106, 108, 109, 134, 135, 136, 146, 147, 167,168, 204: n = A,T,C or G

SEQ ID NO: 45481 - DNA, 589 bp, Homo sapiens; identical to SEQ ID NO: 39132

SEQ ID NO: 45482 - DNA, 621 bp, Homo sapiens; identical to SEQ ID NO: 39144

SEQ ID NO: 45483 - DNA, 494 bp, Homo sapiens; identical to SEQ ID NO: 35856

SEQ ID NO: 45484 - DNA, 539 bp, Homo sapiens; identical to SEQ ID NO: 39146

SEQ ID NO: 45485 - DNA, 612 bp, Homo sapiens; identical to SEQ ID NO: 35956

SEQ ID NO: 45486 - DNA, 602 bp, Homo sapiens; identical to SEQ ID NO: 36334

SEQ ID NO: 45487 - DNA, 644 bp, Homo sapiens; identical to SEQ ID NO: 35903

SEQ ID NO: 45488 - DNA, 550 bp, Homo sapiens
tagggcgaattggagctccaccgcggtggcggccggcattctcccagggatctctgtgcttccttttgtgcttcctgtgtgtgtggatatttaaaggggctggaaatgtgcaaaaacatgtcactacttagacattatattgtcatcttgctgtttctagtgatgttaattatctcatcagcagatgtgtggcctcagatggtaaagtcagcagcctttcttatttctcacctctgtatcatcaggtccttcccaccatgcagatcttcctggtctccctcggctgcagccacacaaatctcccctctgtttttctccccgcgtacctcggccgctctagaactagtggatcccccgggctgcaggaattcgatatcaagcttatcgataccgtcgacctcgagggggggcccggtacccagcttttgttccctttagtgagggttaattgcgcgcttggcgtaatcatggtcatagctgtttcctgtgtgaaattgttatccgctcacaattccacacaacatacgagccgggagcataaagtgtaaag

SEQ ID NO: 45489 - DNA, 584 bp, Homo sapiens; identical to SEQ ID NO: 39151

SEQ ID NO: 45490 - DNA, 460 bp, Homo sapiens; identical to SEQ ID NO: 37157

SEQ ID NO: 45491 - DNA, 463 bp, Homo sapiens; identical to SEQ ID NO: 35958

SEQ ID NO: 45492 - DNA, 527 bp, Homo sapiens; identical to SEQ ID NO: 39154

SEQ ID NO: 45493 - DNA, 540 bp, Homo sapiens; identical to SEQ ID NO: 39155

SEQ ID NO: 45494 - DNA, 644 bp, Homo sapiens; identical to SEQ ID NO: 35903

SEQ ID NO: 45495 - DNA, 417 bp, Homo sapiens; identical to SEQ ID NO: 39157

SEQ ID NO: 45496 - DNA, 471 bp, Homo sapiens; identical to SEQ ID NO: 39158

SEQ ID NO: 45497 - DNA, 537 bp, Homo sapiens; identical to SEQ ID NO: 39159

SEQ ID NO: 45498 - DNA, 357 bp, Homo sapiens; identical to SEQ ID NO: 33777

SEQ ID NO: 45499 - DNA, 609 bp, Homo sapiens; identical to SEQ ID NO: 39161

SEQ ID NO: 45500 - DNA, 498 bp, Homo sapiens; identical to SEQ ID NO: 39162

SEQ ID NO: 45501 - DNA, 659 bp, Homo sapiens; identical to SEQ ID NO: 39163

SEQ ID NO: 45502 - DNA, 522 bp, Homo sapiens; identical to SEQ ID NO: 39164

SEQ ID NO: 45503 - DNA, 416 bp, Homo sapiens; identical to SEQ ID NO: 39165

SEQ ID NO: 45504 - DNA, 506 bp, Homo sapiens; identical to SEQ ID NO: 39166

SEQ ID NO: 45505 - DNA, 659 bp, Homo sapiens; identical to SEQ ID NO: 39163

SEQ ID NO: 45506 - DNA, 512 bp, Homo sapiens; identical to SEQ ID NO: 39168

SEQ ID NO: 45507 - DNA, 491 bp, Homo sapiens
gtaatacgactactatagggcgaattggagctccaccgcggtggcggccgaggtactgataggcgcccgtctttggttgccacggaaatgtcaagatgctgggatacagggtgatcgggatgtgaatttccacctcctgctggttccacacaggcacctgtagtatgtggacccctccatcctggtccaccacagaggtgagggccgcgtcaatggccgtctgtcccctctttagtgccctgatgcgatggtatgacccattctgggaggacgagagcacctcgaagaactcagcaggaagcacagtttcaattcggatgttgtcagatacatagaccttgttgctgaacttgtcaaaaacttcgatggtgatttcatacaggcggccgctctagaactagtggatcccccgggctgcaggaattcgatatcaagcttatcgataccgtcgacctcgagggggggcccggtacccagcttttgttcccttt

SEQ ID NO: 45508 - DNA, 449 bp, Homo sapiens
gtaatacgactcactatagggcgaattggagctccaccgcggtggcggccgatctccaggccaggagccaggcgcgatgtcaggcgctggccgaccgcgaccagcagcaggtcgccgaaatggtggccgagggcgtcgttggtttcggcaaaatggtcgaggtcgaccagggccagcaccgcgcccgcgcggcccgggccggccaggatggcctcgagcagctcgaccatgcgggtgcggttcggcaggccggtgagcggatcgtggaaggccgacttgttcaggctggtgaccagctcgcagttgtcgaggcacaccgccaccatgccgcagaacaaccttcagcaggcgccgctcgaactcgttcatcggccgctctagaactagtggatcccccgggctgcaggaattcgatatcaagcttatcgataccgtcgacctcgaggggg

SEQ ID NO: 45509 - DNA, 558 bp, Homo sapiens
gctccaccgcggtggcggccgaggtacctttaaagaagacccttggagtcttctataccttcttctccttccccatctcactccaccccactttgtccctgatgtcttggggaaggtgtagaacaccctagcagttcctattgtatatacttgggagccactgagaacagaggacggccagtgagtccaagcctcgttcctccttctgcctccccggagccacaggatggatttaggagccactgctcagtgcacttctcccttccaactgcatcaactaactctcgggggtgttctgctcaccacaccgtccttcgattcttactgagtcacagactcgcctgcccactacgtgtcctgggttctctctactcagatcccttccagaaactttatatgggtagaggaagccagggcggcaaatgcgagaccaaatatcattttgccaatgagtctgaggctgtggtctctggatccagtcattatgtttttatagaataattaaaccggatgctaacggtgttttaaaaataataataaaacaacttgtttcctttt

SEQ ID NO: 45510 - DNA, 627 bp, Homo sapiens
  misc_feature 22, 599: n = A,T,C or G
ctcactataggggcgaattggnagctccaccgcggtggcggccgcccgggcaggtacaacagatgcaaccgtaagacacacagagcccgcccactgcggggcagcaggaccgagcccagagccctcgggggtttcgtgcgtgacgaagggtctttcactcaagtaaaatggcagcgtcctccttcctcttgaaaacatggggacaaaaagggaccaggatcttcccagcaatcggcatcctcatcgccctctggactgcttggagcccgcccacctgtgcttttaactcatacctgagaaacacggctggtgttttacttagatttttaaatttaaaatgtctaatggaagataaagacttaccttccccaggctaacgcttaaagaatctcaattaactcaaaactaatgtcagagggaatggatgtgataagagaatcttacattacatctaacaaaaaaagtaacaaacatgcaataaaatggacatttggatcagtaagcaatcttcatactgtgttcgctcagcagcccggggcccttcctctctagacgtgtcaggagccacagtcttctcaggaggagggtgcggggccggngacaatggatggagcaggcctgacctac

SEQ ID NO: 45511 - DNA, 622 bp, Homo sapiens
  misc_feature 457, 458, 459, 460: n = A,T,C or G
gaattggagctccaccgcggtggcggccgaggtactgcagaataacacctataagataagctttcaaagtgactgtgttaagcagccttcattctccaagaaaaccactttgtgccttcttttctcaaaacctcacacaacttcctccccctcaccattagcttactagtatttcactgcaaaaataagtcctcagaaacctgcatcataatcccgccaaatctcccaatcacccccattagtctcatctagtctgccttccctagttagtattgataaactctgtgtgttcccatctaaagctaacttttctgcctgtgatttggatattgtctcttttcagtagtttaaagatacttaaactgcttctgcatttatcccctatctctcctgcagcattaacctgtctctactagatcattctcacattccaaaattgctgtaatatctcccattnnnnaaaaaaaaaaaaaaaaaaaaaaaaagcttactgattgcagcccatggcaacagcctccggggcattgtcaagcatctggagggtctctctgaagaggctatcatggagctgaacctgccgactggtattcccattgtctatgaatgggacaagaacttgaag

SEQ ID NO: 45512 - DNA, 478 bp, Homo sapiens
agctgtttcctgtgtggaaaagaacagccacaccgcgggggcggccgtcctgcctggtactataatatttgagacaatttaagtgatctcatgagggaaatatatttgaagttcatccagtataaaaaatttcccataaaaacacacttacactttatagccattttatagggtgttagaagaattagaatggcagaataaaaatttccaagagctttctttaagtctccaagcaataaaagcaatacagagagaaataaaaagaaaatgttaaagtagtaattgctgcatatttattcataatttcaaattgtatggcttaatcccaaacatctcaaatgcgaaatattttaacacatgactgcacaagagacatcatccaagctcagatacaagaacacagaagagtttgtaaacttcttaccagcacttgatattctgcgctctccctcccattccagctgttccctttctaact

SEQ ID NO: 45513 - DNA, 472 bp, Homo sapiens
tggagctccaccgcggtggcggccgctctagaactagtggatcccccgggctgcaggaattcgatatcaagcttatcgataccgtcgacctcgagggggggcccggtacccagcttttgttccctttagtgagggttaattgcgcgcttggcgtaatcatggtcatagctgtttctgaagattcctgcaggaaaggaggctgcctctgacaccacaaccccacccagctttctctatgttggaagacagggtggccacagataagcagtagaaggctaagggggaatcagaacagcatcagcaccaggctgagtccctcatatgtgcttcttcccacctccccaccaggcatatccttacatcctggtccatgcctgggaagggcccaggaagcctcaggccagactagcagagcctcctccacttacaggccaagactcccagcactgctgctgttctgctggtctcactg

SEQ ID NO: 45514 - DNA, 599 bp, Homo sapiens
aatacgactcactatagggcgaattggagctccaccgcggtggcggccgaggtggcgggcgcccctcccgcagcctcgctgccgccttgcaggttgatctcagactgctgtgctagcaatcagtgagactccgtgggcgtaggactctccaagccagtgagatgaactcggtatctcagatggaaatgcagaaatcaccgtcttctccatcgctcacgctgggagctgtagaccggagctgttcctattcggccatctttgctcctccctgcaactaactccattcttaattgaagctgcacacatacatgtaagagaagcaaaaatgtcagatgatatcaggaaaaggtttgaatttccaaattctcttatccaatcacaggctgtgggtcatcttattgctgcagtcctaaaggaaaatggtttttcagaaaagattcaccaatctacaaatcagactcctgctttgaacttgctgtgggagaagtgttgcagtgacaatgtagtggttcgaacagcctgctgtgaaggtctggtggcactcgttgcttaggatcatgcagagttcagctatgttctcaatgggatactcaacttga

SEQ ID NO: 45515 - DNA, 519 bp, Homo sapiens
tatagggcgaattggagctccaccgcggtggcggccgaggtacagccctgagctgcatcatttaaagaccaattgttaaggaccaatctgagggcctgtgcattagttaaaactccttatctggtcatagagggtggtgtggtttggacgcgttccccttgtctgtgcaattcccaacagaggcaagtgcgcatttgagacaggttgagggttcaagctgtccaatccctgctcatctgcagcacaccaaggaatgtggactaatgaaaaataaactgcatgcatgcaatgcccatcacactgcctgcattttctaatcttcacaataactctgtgttgagaaatattcctgtctgtaatcccggcactttgggaggctgaagcgggcagatcacctgaggtcaggagtttgagaccagcctggccaacatggtgaactccccccaaccaacgacccttcccatatctactaaaaatacaaaaattagctgggcatggtggtggggacctataatccca

SEQ ID NO: 45516 - DNA, 386 bp, Homo sapiens
atagctgtttcctgtgagtgaaagaacagctacaccgcgggggcgtccgaggtactattatcttctcgaatcaattatttagcttaagaaaaaaagggataactacaaactcattaatttgacttatatgttcttaaaaggtatggagctatattttacttatttaaaaaatctgtttatattctgccttaacaagatggagctacattttagtctttatttcatagtaattaacatcttgtctttcactgcaaaaatcaacttttaccaattcataatcgtttactattcaaaacaacctattttaacacacatactcactaagtaaaatataacccagtcttcattcacatgtgcctaataccctgtttcataaactgaacttt

SEQ ID NO: 45517 - DNA, 638 bp, Homo sapiens
aattaaccctcactaaagggaacaaaagctgggtaccgggccccccctcgaggtcgacggtatcgataagcttgatatcgaattcctgcagcccgggggatccactagttctagagcggcctgggtttgaatagtgctcctcatggttagaacaacagcaaaaccttgaggcacatcactagtctcacttccctccatgtctccatcctgaagacttggaaatatcctccatctaaagtcataggaagagtaaatgagctttaactgtaaatcagtgagaaaagccccaaaatttgttttgtttgttgtttttcttaactactgattcaagcttcgacccagagcaattgtcagaactgctgaaatacaacctggatctcagtagttttttaatcatctgggtgattctgaaataatccttgatttggatattccaaccaacgtgaaaaagacgtccttgtagatgctccctaagtatgagcttccaactccttctttctcacagttcccatttttccaaattacagaaaaattccttccttgccctctgtacctcggccgccaccgcggtggagctccaattcgccctatagtgagtcgtattacgcgcgctcactggccgtcgttttacaacgtcg

SEQ ID NO: 45518 - DNA, 469 bp, Homo sapiens
cgcgcgtaatacgactcactatagggcgaattggagctccaccgcggtggcggccgaggtactaagcccagccaaggaactacaccttctcgctgaaggaggcgcctccggcttcccattggcagagctgaacggcggcgtgagtgctccggtgctttggggccatgattaggcaaataagagtggcttgaacatggcactgtgatatggtgatgggggatgtgggaaccacaccggctgctaagtgatcaacaggtggtggcatgaatagcctggacacgctggacaaaggttatgtcttatgaagtcaaatggtcaatttcctgatgctcatgtgcctttgggcttccccaaacaccaccactccctgagcagagacgcgcctaacagagagtcaaccgttattttatgccaaagcgaaaggcgtatcacagagggcttgggccttagtatccaatatccccaaagc

SEQ ID NO: 45519 - DNA, 499 bp, Homo sapiens
  misc_feature 405, 406, 407, 408, 409, 411, 430, 431: n = A,T,C or G
aaagggaacaaaagctgggtaccgggccccccctcgagagtacttctagaattaattaaggcgggcactctagaatactaatggaaaggacataaattggcacaaactgtttagaaaaaaatattggtaatattcagagctttagaaatatttttcctttatgtcaatagttttgtttctagaaaaccatccaaagaaaataatcataaatatacacaaagattattcataaggatattcctgtttttataataataaaacattggtgtcttagaaatgtaacagactggatgcagtgactcacgcctataatcccagcactttcggaaggctgaggcaggcagattgctggagctcaggagttcaagagcagcctgggtaacgtggtaaaacgccatctctacnnnnnanaaaaaaaaaaaaaaaaaannggggccccccccccgggggggacccccattccccctttaggggggtttttttcccccccctttggggg

SEQ ID NO: 45520 - DNA, 432 bp, Homo sapiens
taggagctccaccgcggtggcggccgcccgggcaggtaccttcatttctatctgcccaggaggccagccgcttcctgcatagcatttccttcctgcagtatgggaaggaccaggctttctcagaccacagaatcttgagagccatttccacgtggagcaagtggtggctaccagccttgggtctacataactagggcctcatccctggcccaagaatcctgctccacagccttcttgtgtccctgtaggaggagaaacacctggcaacttaaattttttaaaataacttttttttttttgaaacggagtctcgctctgtctcccaggctggagtgcaggggtgcaatctcggctcactgcaagctccgcctcccaggttcatgccattctcctgcctaagcctcccaagtagctgggactacaggcacctgc

SEQ ID NO: 45521 - DNA, 212 bp, Homo sapiens
  misc_feature 112, 150, 157, 172, 174, 175, 181: n = A,T,C or G
ttttttttatagggcgaattggagctccaccgcggttggcggtcgatcggttcaggttcaggctgtctgccgtgcgggctgcggtgttggagtgaaaagctcttgttcgganccagtttgttttatgccccagttttgagatctaagggnggaggtnctttttttctctcgncnnacttangaactggttttcaccttccacccatactttt

SEQ ID NO: 45522 - DNA, 618 bp, Homo sapiens
agctgtttcctgtgtggcaaatagcagctccaccgcgggggcggccgttcatcctcagaattagccttttcctcctcagatagctgttgtctctcatcatcggaaagctgaggcctctcctcatcatctgtgttctgcattttctcatcatcgtcagaattctgcagcttatcttcatcagatccttgtgccctctcctcatcatcagaattttgtatcttttcatcatctgactggtcacttttatcttctctgccccatttttcatcatctgaatgtgctttttcagaaccttctgcttctgaatgatggctccctccatccgatctatgaccttcgtcttcatcatcattaggggcttctgatccactgtgctgatctacatctgaggggtcattgtcctcatggtcagaacgctcagaagcttctgatctattgtctgatctttcagagtgattatcactaccactatgatgtgaagctccctcgtcctcactgtcatctccaaacagttccttattacttggttgtcctgaatcacctctttcatcctgatcactttcacttccagaggcattactgccagaggcagcattctcttgatcagaatctgagtca

SEQ ID NO: 45523 - DNA, 473 bp, Homo sapiens
tggagctccaccgcggtggcggccgaggtacaggcgtagtccaagaacagcagagggagttcttgctgcccgaactgtttccatctcagtccagattatcagagcctgtggtctgcaagcagcagccaaggctttggctgaacgggaacccgctctacagtttagtgccacagtcggggtcaatgcctctgtcaccactcatctctccttcctgccccagggagaacagcgccgaacccaccctgtggcctgttctttctgccctgagttctcccatcacgttgagttcacatgtaacttggtgactcagcactgtagtggagagtcctgtttcctagcagagttgttggagtttgcagaagttatttttgctgtctatcatgaaaataccaagtcagcaagtgatataatcagtattgagtcatgcaaagagtatctgcttggagtagtaaaagttccaacaaaagagctac

SEQ ID NO: 45524 - DNA, 456 bp, Homo sapiens
gtaatacgactcactatagggcgaattggagctccaccgcggtggcggccgaggtacaaggaggcagctaaccactgtgccctgctgcaggagcatgcacagcggtgctatgtccgtgggctattccgcagcttgcagcaagcacagagtgtgacctcccaggatttgctgacagcggtagatgcctgtgaggagctactacaagaaatagacatcacctcatttctccttgcattgtgtggccacacttggggtttgcctcatgcacccccaagtcctggtcctctcagccctgggcccttcagcagcagcatggaggagggtgctgaacctcgggaacgagctatcctagcttctgaatccagcatagagaccgaggacctaagcgagcctgagtttcagagcacccgtgtccctggcattccagaccctgggccagagatctctctgacagat

SEQ ID NO: 45525 - DNA, 463 bp, Homo sapiens
ttggagctccaccgcggtggcggccgtccccagttgagtcccccttctgaggacaagtttgaaactgggaaggagacaccccctggttccgccagcacctatcccactgatagtgatcccctggcctccccgagcctccttaggcaatggccactggtttgtagacagagagtttcttgcagccttgaaaattttattccctaagtggggacagctctggtattactgcttctttaatttgttccacaaaaattatgctgaaatggacctgaatcagccctgggtgtgcttctgttggcgcctgctgctgaggcccggcctgcccatcggcctgtagtacctcggccgctctagaactagtggatcccccgggctgcaggaattcgatatcaagcttatcgataccgtcgacctcgagggggggcccggtacccagcttttgttccctttagtgagggttaat

SEQ ID NO: 45526 - DNA, 501 bp, Homo sapiens
agcgcgcgtaatacgactcactatagggcgaattggagctccaccgcggtggcggccgcccgggcaggtacccgggatgcccgttaactaaaagctttgcagaaataagaagtggctgctcctgttagagcggcttgactagctggtccactccgggcctcagtctggggggctggcgggcaggttgcagcctctccgcgatcagtgcgccttggattccattggatctcttagtctggccctcatttttcaagctaacagaaactttctgttgtgacttttggcgtatgctacctgggaggaaacgcagtatttgtgtttggaatttgcccccattagacgataaagcacaaagccttctaaataaaatgcggtcccacggccagctgttcagaggatcttgacgctcttccttgggtgacggacccaggagagttcatcctgcaggaacccgtggcctcaggctttccaggagggaggttagagaaagggaaggagccc

SEQ ID NO: 45527 - DNA, 488 bp, Homo sapiens
gactcactatagggcgaattggagctccaccgcggtggcggccgaggtgggaaaaagaaaaaggagaaggggagacaggaaggagaagaaaaacaaaagcgagaaaaagagctgaaaatgggacaacaagaaagattcctttttaaggaaaatgaataaactacctgtcaaaataagtataacatccttttcattctggaattttaggaatggttgccttcccttccaaaaattccccatccagttatcataaagcgaattatctgacacctatacacattacatactaaagtatttattgaatgagcaaggaccaccagtcaacaagctctacctatatacaacatttccaatcagtctatctattctctcacattaaaatacgtctagacaggccaggtgtggtggctcatgcctgtctgtaatcccagcactttgggaggccgaggccagtggatcacttgaggtaaggagttcgagaccagcct

SEQ ID NO: 45528 - DNA, 504 bp, Homo sapiens
actcactcgtagtacgactcactatagggcgaattggagctccaccgcggtggcggccgaggtacactaagtcagcaggttgatgaaaagtgttctttcttagaaaccaagcttcagggcattgggcatttccagaataccattcgagaaatgttttctcagttcgcagagtttgatgatgaactggatagcatggctccagtggggagagatgcagaaacattgcaaaagcaaaaggaaactataaaagcctttctaaagaaactagaagccctcatagcaagcaatgacaatgccaataaaacctgcaagatgatgttagccacagaagaaacctctcctgaccttgttggaatcaaaagggacttggaggccttaagcaaacaatgcaacaagttactggaccgagcccaagccagagaagagcaggttgaagggacaattaagcgccttgaagaattttacagcaaattgaaagaattttctattctgctccagaaagcc

SEQ ID NO: 45529 - DNA, 438 bp, Homo sapiens
accgcggtggcggccgcccgggcaggtactgaagccacctaattccctgctgggtcaagccaggctgggcagtgccagccttcagtggcatcttgacctgccctcctcagcccaggtgccctggttccacaggccaacccatagaaccactctggaaataaaggagaaaatggaaggagaggtatgggagcttggatgaggggtaggaatgggatccattctctgaggcttataaaagcctctgaggagggaatggctctgaaggggaaaatgaatctgtggggtttgaaaaggaagttttcctgcctgtcttgtatttggtccagtgagtatgagacaggcacacaaggagtggacagtggtgtaggggccctgggagtctgagacttaccttgccccctgaccatctgatcctccctgcaaaggccacctgacgtg

SEQ ID NO: 45530 - DNA, 433 bp, Homo sapiens
ggcgaattggagctccaccgcggtggcggccgaggtaccaaaacacatatatagaccaatgaaacagaacagaggcctcagaaataacaccacacatctataaccatctaatctttgacaaatctaacaaaaacaagcaatggggaaaggattccctatttaataaacagtgttgggaaaactggctagccatatgcagaaaactaaaactggaccccttcctcacaccttattaaaaaattaactcaagatagattaaagacttaaacgtaagacctaaaatcataaaaactctagaagaaaacctaggcaataccattcaggacataggcatgggcaaacacttcatgactaaaacaccaaaagcaatggcaacaaaagccaaaattgacaaatgggatctaattaaactaaggagcttttgcacagcaaa

SEQ ID NO: 45531 - DNA, 462 bp, Homo sapiens
ttggagctccaccgcggtggcggccgcccgggcaggtacataaattatatatccagttccctattaccacctgtggtggaagcagagcctttgctagaaatggtcatgtggtatagcagagacccatacctgccaccacacccggctaatttttgtatttttagtagaggcaggattgcactatgatagccaggctggtctcgaactcctgacctcaggtgatccacctgcctcagcctcccaaagtgctgggattaaaggcgtgagccaccgtgcccggccccagagacccatggcactgggctccttggtcggaaggttcttgtgtcccaagtgtgatgaacagacagctgccaatgtcaagggaccatgaagacctggccagtagcatcttaacagaaactagacaggttaaaaaacaaaacaaaacaacaacaacaaaaaaacaaaccctgcactctc

SEQ ID NO: 45532 - DNA, 496 bp, Homo sapiens
tacgactcactatagggcgaattggagctccaccgcggtggcggccgaggtacagcgttcggagcagatacagagggttctcagtggataattggctaccccttacaaaaagtcatcagtaacctctcagtctggagtagtgagcaggaccttgcaaatgacactgtgcagctccttgtcactttggtggaaagaagagaaagggcaaacttagtaattcaatgtgagaactggtggaatttagctaagcagtttgcaagccgaagcccacctcttaatttcttgtcaagtcctgtgcagaggacattgatgaaggctctagtcttaggaggttttgcacatatggacacagaaaccaaacagcagtattggacagaggttcttcatccacttcagcagcgattcttaagagtgatagaccaagaaaacttccagcagatgtgtcatcaagaggaagtcaagcatgaaatcactgccacactagaggccctgtgtg

SEQ ID NO: 45533 - DNA, 527 bp, Homo sapiens
gtaatacgactcactatagggcgaattggagctccaccgcggtggcggccggcgccggtgcggctgccggcgcaacgtcggtcgtcaccggcggcgtttcctgcgccagcgcgccgcccgccacccctgccgccatccaggcgcccgccagcagcgcgccgcgcacggcgcgcgccgccgccttcaacttcatattcatcaattgtccctatgaaaccacgtaaatatcgaggagtgtaatcgcgcggcgagcagtaatgacaactattggcgcgggaaacgagggatgttgcgaatctgatacgcggacgatggcaatccggcccggcattccttttggagaaataatgaattgcggattgcgccgattccctgcctttgcataattcatgagaatggtgccacgatgaacgcggtcagcgcgccgccagcccgggaggaacgcagcatgacgacttcggtttaccacgacggcgaacgcgccgtgcagcaccgcgccggcgaggccgccatcggcgaccgcaacg

SEQ ID NO: 45534 - DNA, 645 bp, Homo sapiens
  misc_feature 21, 529: n = A,T,C or G
aattaaccctcacttaagggnaacaaaagctgggtaccgggccccccctcgaggtcgacggtatcgataagcttgatatcgaattcctgcagcccgggggatccactagttctagagcggccgtgaaaatctcgcgcttgccgcagatcaggatggcgcgcacggcgtcgtcggtctcggccgccaccagcgcgtcggccagggtctggtacatggcgcccgtgatcgcattcttgcgttccaggcggttgaattccagggtcaggatgccctcgctcttgctgcacaaaatatccatgtcgtctccaaaaagataaagggcgccggggtaatcccgcagcgccctgttttattgctttagcccgccaaacttatacgcgctcgaaaatgcctgccgcgcccatgccggcgcccacgcacatcgtgaccatgccgtacttctgcttggtgcgctgcagcgcgtggatcacggtggcggcgcggatggcgccggtggcgcccagcgggtggcccagggcgatcgcgccgnccatcgggttgaccttcgacgggtccaggtccaggtcgccgatgacggccagggcttgcgcggcaaacgcttcgttcagctcgatccagtccagctggtcttgcgtgatgccggcg

SEQ ID NO: 45535 - DNA, 560 bp, Homo sapiens
aaaatagcagctccaccgcgggggcggccgaggtactggagctgggcgaggccaaccatgccagcccctcgctccacaccccaccggcttccatcctgaaaggtaatacacacatgcacacacacaccaaattcctgtgtgggtttctttgttagaaagatcatcccactctgaaagatgggggccaatgggaaacagtctgctggctcatggctggacccgctgagagagatggtctgcctcccatccccatttccatctggacagtgctgcctgctaactcggatcatgtcagaatggtggaagagtctctatccccacagggctcagggacccttcctcacctcacaggcccaagggacatgaccgcctgccatgtgcattcgctcactcatcaaacagaaccaggaaatgaggtctcactgtgcagagccgagtttcgtgggaagagcccgaaacacactatcacacatgcctttctgaggtccacaacagcccactgtcgttttctagaaaatctgatcaaaaagactcccctgcttaacacacttccaggactt

SEQ ID NO: 45536 - DNA, 465 bp, Homo sapiens
agctgtttcctgtgtggaaaagaacggcacacaacccgggggcttgcttgtttcttgcttggaaaaaaaccataaagtgtttcagaattgccctcctccccacccaccaagccagtccatcgtgctcccccaggctatgtgggttgagcaaacagcagcagttgccttggggcttggtttattggggtaatagctttccttttgcccctgagacctggggcagtatgcccagaacccctccctcctgcacaccccacagtaggcacattctcccactggcagcagatgtgttttctggcaagtagagaaaatggctttccttgccctgtgagaggtctcataagatccagccatagccaaggccatgtttgtcacctctggaggcctggtcagtccttctgtgggcacagaacatttctctcccacctaagttaggacctgcatccctgtttgggagcatgtgga

SEQ ID NO: 45537 - DNA, 377 bp, Homo sapiens
gactactatagggcgaattggagctccccgcggtggcggccgcccgggcaggtacagtggaatgaccgtgacagcaacacagtcctcacaggacacgcccagctgagcgatcggccaccactcagctccggtccccatctggcaatgtggaatttagctgtggtgcaagtcttaaggttggtttaaatccagctattcgctgtttgttcaagcagacacacacatgcacacacgtgcacacacaaacttaattcgctcactgactttgcttattcacaggaaacaaagtttgaaatcttaaatttttaaatgtcaggagcttcattaatcctggcttgtgctgggtttggctgctgctttaatggactaattttcct

SEQ ID NO: 45538 - DNA, 333 bp, Homo sapiens
gtgttgagagagatcctctggatctgttggatgcagggcaggacaaagacacgccctccagccaccatgactggggggcttccgcagaacccggagaccaccatggcctcatttgggccacaagtgaaaaacatggttcaggctggagctttcccctctctccctgcttctcggcggccacctcggccgctctagaactagtggatcccccgggctgcaggaattcgatatcaagcttatcgataccgtcgacctcgagggggggcccggtacccaacttttgttccctttaatgagggttaattgcgcgcttggcgtaatcatggtcatagc

SEQ ID NO: 45539 - DNA, 487 bp, Homo sapiens
acgactcactatagggcgaattggagctccaccgcggtggcggccgagtgtacctgagaggcaagcttcaggaaagaatgagccatgtccaggaaggagtggcagaaagcacacaatgttccctgtccctgtgtttgctgtcatctagagaagcaagctgtctttaagaaatccaactatttctgtctgatatgcagagaatccaagggcctctaaaggagaatcaccagtgtatccctccaaagagtcacgtggcctggctaacgacagtcgttccctcctcctttctaaaacgggaatacacagcagagcaggcaggtgggctgtgcaccacgtggggtggcagcagcgagccccactcccgcaggccctgcctcacctgagcggcagcagaaagcagtacctgcccgggcggccgctctagaactagtggatcccccgggctgcaggaattcgatatcaagcttatcgataccgtcgacctcga

SEQ ID NO: 45540 - DNA, 405 bp, Homo sapiens
  misc_feature 300: n = A,T,C or G
tcactaaagggaacaaaagctgggtaccgggccccccctcgagagtacttctagaattaattaaggcgggcacatcacgaggtcaagacatgcaaaccatcctggctaacaaggtgcaaccctgtctctactaagaatacaaaaaattagctgggtgtggtggtgcacgcctgtaatcccagctactcgagaggctgaggcagaatctgggaggtagaggttgcagtgagccgagatcacgccactgcactccagcctgggctacagagcaagactccgtctcaaataataataataatnaaaaaaaaaaaaaaaaaaaaaaaaaaaggcgggccccccccggggggaacccccatttccccttttagaaggttttttcccccccccccttgggcggttttttaa

SEQ ID NO: 45541 - DNA, 618 bp, Homo sapiens
ggagctccaccgcggtggcggccgcccgggcaggtacaagcaaaatatctccatgaacattctgagcagttctaaaggtgatgggagatgctttgactcagggacccaattcaaagattcccaggcacagacagagcctctgttttctgccctcagtcatgacagcagggcccagtctggacataggtgggcaccagagcttgtcaacatgacggaaggaagagatgaaccatagcatctttccggatctctatgtattagcctgaaacccctttggatcacatctccctactaaagaggacatttgagcaaagacccagtgcacaaagcttagtgcctgtttgacatccagcggaggtagcttgtggcagttgtcacagatagaaatgccatggaaggcggccagtagcttatggaggcagcattccctggtgggtcaaactgagcctgtgaggtctgtgggattgcagggctggtgatttgattttgtcagaacacacatattgttcaggcacagagagaccacctcctgttaaccaactctccattgtgggtaaagctcaatgtcaaggcattcatttacaaatgggagctggtgtttcttgtgaccaggatctg

SEQ ID NO: 45542 - DNA, 330 bp, Homo sapiens
gattggagctccaccgcggtggcggccgtgctcccttagatgtggcaaccactgagggagacaaaccctgactaggagcaccccacaggcccctcccactccacagagaggaacgcaggggagagccaggcaggggccccaggcctcccagacacccccttggagcagagccctcctcaggggtaactgggtcacagggacgcgtcttcctcggaggccaccccggtggtgagggctcccaagcagcgccagggctctggaaggagcccagtgagagagggtgggaaggggcgagagaaaacagccgaggcctgaaggttcacggacaga

SEQ ID NO: 45543 - DNA, 506 bp, Homo sapiens
gactactatagggcgaattggagctccaccgcggtggcggccgaggtaccacttccggggggaagaaggccgacgcatattgttgttgagatttcgcggctcaaggaattcatattcctgctccggcatcttgactcttgcattctttgccttttccaacttagcaccttcttctgtggagcccttttctccccaacgaacctccattcttttaatgcctccaacgcctctcccaccataataagaggcgtctaccgttggccactttttcttaggcagaccatcatcatcttcttcctcactctcctcggcagggggtggagggacctccttgataatcacagtgcagcagaggggccagaaccaccataggagaaccagggctaggagcaggaacaggatcagcagggcgatggccaggatggaaccgtcagaacagtgtgtggtggtgatgatgacagaactggagataaaagagaggccatcgttcatgctgacctggagtg

SEQ ID NO: 45544 - DNA, 232 bp, Homo sapiens
gcgaattggagctccaccgcggtggcggccgaggtacacacactccccaccccatcactgttgctccagtgttagcattttcacttcatgctcccactttgctctctcactttaattcttttcagggttctgtaatgacagaaacttgaagctcctcactatcagatctttcctcaagaaataagaaatgattctctgttctagaggaacccgaggaggatggggaaaagaa

SEQ ID NO: 45545 - DNA, 244 bp, Homo sapiens
tggctatccgatcacaattccacacaacatactagccgggagcataaagtgtaaagcctggggtgcctaatgagtgagctaactcacattaattgcgttgcgctcactgcccgctttccagtcgggaaacctgtcgtgccagctgcattaatgaatcggccaacgcgcggggagaggcggtttgcgtattgggcgctcttccgcttcctcgctcactgactcgttgccctccgtccgtccggct

SEQ ID NO: 45546 - DNA, 278 bp, Homo sapiens
ccacttcttgccctccaagggtgggctcaccttggttgctgttcattttcctgtaagggaggggttcatttccaacgttgtatagatagcaaagagaggcccacaaggcatgggaccatctttcaccccaaacaatcactctgagtttgtgaatattttccggtcatagaaagagatttccaaaaattagctactcttcattgtttattcattgttagattcagtaacctcaggggagcttaaatatctaccatggcagcgtgattgtcacagcttca

SEQ ID NO: 45547 - DNA, 485 bp, Homo sapiens
tactatagggcgaattggagctccaccgcggtggcggccgcccgggcaggtaccattcaagttctacatttggccaacggaaaactatttgttgagaacccactctgtggggccccagggataaaatgagcaaaaatggggtccctgccctcaaaagtcctgtggtctcctggagacagacattaatcaataactactcaggtgcgtgtgtattacaaactgtgccaagtgctttgaagcagaggggcacagttaagtcttgacatttcaagacttagccactttgcaactaccaggttttggctgcaaagttccagatggcttctgtcttttgcatttcatactttaaacccttgcaggcccttccctaactatcaagggcctgtcccagaagcaactcaagttttgttatttttaatttttttttatttttgagatggagtctagctctgtcacccagattggagtgcagtggtgcgatctca

SEQ ID NO: 45548 - DNA, 488 bp, Homo sapiens
tagggcgaattggagctccaccgcggtggcggccgaggtacaaacacacacagaggaaggagcacctcaatatggtttaggcgcctgagagagatgcagccgaggaatgagtgggaaccgagagatacttgggaaatgcaaatgaagtggagaggaagggaagggctgggaccagggaacaaaagagaagagtaatgcaaggatgctgggtagaaacagcccagcatacagcaggctctggggcacatgttgtggctgagagaatgacgggaaggaggatagcaagggaggcaggagtcagatgaattaagacagggtttcactcttgtcgcccaagctggagtgccttggtgcgatctctgctcagggcaacctcttcctgctgggttcaagcaattctcctgcctcagcctctggagtagctgggatttcaggcatgcgccaccacgcctggctcgattttgtagttttactagagatggggtttc

SEQ ID NO: 45549 - DNA, 585 bp, Homo sapiens
ggagctccaccgcggtggcggccgaggtacacatcatgagttaggatgctgggtggtgcaaagaacccattaatgggagctatcaaaaatcactgaaaacaatgaggctcaaatcagaagtatcaagaatcagctttcatgacccctacaccatgatgtttttctttatgacggcagaactattttgaaacattaaatatatcggcaggcactgtgattcaaaaagtatttgagaacctactaggtgctagacaccaaccgaggcaatgagtatgggtgacaacatgtgccctgccctcacagcaccaatagtccactggacaaataccatctggaacatcaggtaaacacctaagcctgtctggaggaaatctaatttgggcggaatcccacaagcacagactaggtaaggagaaggcagttaaggtgggaagtagccagatttaagagtttgggcaatggccaaaggtgcagaagtttgaactacaagaagttcagtgtagttggttcgtgtgtttccggggagagaggacaaggtctggtggcactgacaagaattagacccgaaaaggtaaaaaagcaagc

SEQ ID NO: 45550 - DNA, 435 bp, Homo sapiens
tccaccgcggtggcggccgcccgggcaggtaccagcatttatcaaacggtcaccctgtgcccagctccacactggacactttcccatagtctctcatttcatttacttttcactgtatctttaaatacccaaattaccagacatacaaaggagagctaccatttcattttcagataagccttgtccatccagttggcaatttgattgcagctataaaaattttttaatgatgccaggtaagaagccaataaaaactgaaggaattaaaagaaaaaataattgtcaaacatgccagaagtctggagaaaagtggggaaagcaacttccttgtatatcaggcaaggaaaagcctagggaaggctaagaatttctgttgctgagtcccgtgtgctgtggtgacttaggaggcctcccaaagccctcccatttaaagga

SEQ ID NO: 45551 - DNA, 466 bp, Homo sapiens
  misc_feature 339, 360: n = A,T,C or G
gctagattggagctccaccgcggtggcggccgcccgggcaggtacttttgtaacttttcaaaattagtttggggaaattttcaaaagaaaaagttgaagggaaaacttagaatgaattaaaaataagaaataggcaaaagcaaatattttaatttaagtaaattttaaagactttttaaacatatttttggggaaaaatagaattgtattaaagaagggccttttaaaatttttctaggccaggcgcggtggctcatgcctgtaatgctagcactttgggaggccaagtttcaggagttcgagactagcctgggcgacatggtgaaaccccttatctancaaaaaatacaaaaaaattanctgggccgggcgcggtggctcacgcctgtaatcccagcactttgggaggccaaggcaggtgaatcacacggtcaggcggatcacacggtcaggtggctaacatggt

SEQ ID NO: 45552 - DNA, 469 bp, Homo sapiens
gctccaccgcggtggcggccgaggtaccctgccccaaggagctggggatcttggctgggagagttctaggaggaggcagggaagggtgtgccaggcacagggcacggcatatgcaaaggcgcagaggtgagacagagaattattactcagcgtgcctggaccatgcagtgggaggaagggtcagggctgccagcgcaccaaagtctgcccagtaaatatttgtgggggcctcttgagtgtgctggtaacacagcagaggccacagttcaaagatcccggcccttgtgagcagacattgcatgggtgggagcagatggtaagtgaggcagccacgtgaactgcacagcatgcgaaggagagatttactaacaagaaaataaatttgaggggccgggcgtggtagctcatgcctgtaatcccagcactttgggaggctgaggcgggcgggtcacttgaggtcaggagttcc

SEQ ID NO: 45553 - DNA, 478 bp, Homo sapiens
caccgcggtggcggccgaggtacttgtaggtgcagcctggattaccaatgaggatgcgagataccggagtgagcagatctttgccttggatcctaaccaggtcccgaaataagcagccatgcttgtgcagtgtgagaaaggcttcttgaacctctttatggagctcctcagatacactgctggcttctcggagaattagtttaggatatttcagctgccactgctgatagaattcatcatctttgggggtcagataagggagccaagtgtcttcaagctcttcaagaagcctcagtttcttagcttcgcgctctcgttcctcggcagtcggggtgcgcttcatgctgccactaaagccgccacctgcccgggcggccgctctagaactagtggatcccccgggctgcaggaattcgatatcaagcttatcgataccgtcgacctcgagggggggcccggtacccagcttttgttccct

SEQ ID NO: 45554 - DNA, 326 bp, Homo sapiens
gctagattggagctccaccgcggtggcggccagccgcatcgcacacgtccgttgccacatggtcacctgtcccaccccggcacatcacagccgagccagccagctgtgctacacatgtccattgccacgcggtcacccgtccttctgtgagaggcatttgagtcatgtcccacacttggccgctctagaactagtggatcccccgggctgcaggaattcgatatcaagcttatcgataccgtcgacctcgagggggggcccggtacccagcttttgttccctttaatgagggttaattgcgcgcttggcgtaatcatgggcatagc

SEQ ID NO: 45555 - DNA, 470 bp, Homo sapiens
ctatagggcgaattggagctccaccgcggtggcggccgcccgggcaggtactggaattaaacgtcgagtcatattcttccctcttagagcaacaaaatttgaatgtttctctcactttctggaatttttaaaaagcaaactttttaagttattttttcagattttatttctcattagccttttttccctgaactccattttggagtgcaccctgtagttgtaagagcattgtgctgagagcgttccccaaatgagggtctgcagcttgcactgacccctgagttcctcacccaccagccccgtgccgacccgtctaacccgtgtgggggtgctccactcaaataggcccttggcagaaaagattgtccgttctgtccacacactgcctggatacagtctccagctctaggagatggaattggtttgctccatttagaaatagatcaaaactgggcattcagtagatggta

SEQ ID NO: 45556 - DNA, 501 bp, Homo sapiens
ctatagggcgaatcgctattgggcgaattggagctccaccgcggtggcggccgtagtacagttcttttaaagcacaaagcttgggagaattaatatatgcaggataactgaacgcaagagacttgtggaatgcagttctaacctgataattgtgtgttaatcgggagtaacaggacaggccattacggttggttacacctacttatgctagatgcataatgtttggagccttccccactgatgagaagcaatttatgatcttgtgctagaaagttaataatgcttcacagcatctttttgagaggttgattagaaaacacacacatacacgttggtagtcacttgtgggtgaagcctgaaggggctatacaatttattttttttcagattgactgatggctttatggacagccaggcttgctaggagcttggttgtgttcagggctattgctgtccctttttcctttgaaggaatttaattctctgagatgtagtcttaat

SEQ ID NO: 45557 - DNA, 473 bp, Homo sapiens
tcctgtgtggctaagaggagctccaccgcgggggcggccgaggtaccatatgcacttaagaagatgtctagtctgctattgttgttaaaatgttctataggcgttagttgggccagttatttgataatacagttcaagtgttctacattcttaattttttgtctgggttttatctattatagagagtggaatggcctacacagtggctcacgcctataatcctagcaccttgggaggccggggcaagtggatcacccgaggtcaggagttcaagatcagcctagccaacacggtgaagcaccatctctattcaaaatacaaaaattatccgagcatggtggtgcccacctgtaatcccagctactctggaggctgaggcagtagactcccctgaacccgggaggcagaagctgcagggagccgagatcatgccaccgaactccagcccgggtgacagagtgagactctgactc

SEQ ID NO: 45558 - DNA, 674 bp, Homo sapiens
  misc_feature 656: n = A,T,C or G
tacgactcactatagggcgaattggagctccaccgcggtggcggccgaggtactgataggcgcccgtctttggttgccacggaaatgtcaagatgctgggatacagggtgatcggggtgtgaatttccacctcctgctggttccacacaggcacctgtagtatgtggacccctccatcctggtccaccacagaggtgagggccgcgtcaatggccgtctgtcccctctttagtgccctgatgcgatggtatgacccattctgggaggacgagagcacctcgaagaactcagcaggaagcacagtttcaattcggatgttgtcagatacatagaccttgttgctgaacttgtcaaaaacttcgatggtgatttcatacaggcggccgctctagaactagtggatcccccgggctgcaggaattcgatatcaagcttatcgataccgtcgacctcgagggggggcccggtacccagcttttgttccctttagtgagggttaattgcgcgcttggcgtaatcatggtcatagctgtttcctgtgtgaaattgttatccgctcacaattccacacaacatacgagccgggagcataaagtgtaaagcctggggtgcctaatgagtgagctaactcacattaattgcgttgcgctcactgnccgctttccagtcgggaa

SEQ ID NO: 45559 - DNA, 561 bp, Homo sapiens
  misc_feature 541: n = A,T,C or G
cactatagggcgaattggagctccaccgcggtggcggccgcccgggcaggtactggcggtccccattttcatgtatggagacttcaggtgaaagaagttaagtgaattctttgttgggtcacaaatcttgagccagtcagaatttgaacctaagatttttgactgctggttgtcacacttcccgccccacactcaactgttgtgtgaatgagccagacacattgcttaacctgagtccgagatggacaatggtataggaaagatattcagtatggagaatcagatgttaacttgtgttgctatttttgttttgttttgttttgttttgtttttgagacaaggtcttgctctgtcacccaggctagagtgcagtggcatgatcagggcttactgcagcctcaccctcgatttcctgggctcaagcaatcctcccacctcagcccccaagtagctgggcctacaggtgcgtgctaccacgcctggccaattttttaaattttagcacagatgaggtctcactatgttgcccgggctggtctcngactcctgagctcaagggat

SEQ ID NO: 45560 - DNA, 466 bp, Homo sapiens
ctcactatagggcgaattggagctccaccgcggtggcggccgcccgggcaggtacaatggacagtggggaggcagacaggttctgaataacccagaacaaagagatcatgaaaccacaaaagaagaacagattaaagagaaatgggggatggggatgacagagcacccagggcagcgggtgcaggaccagcagaggtcccccgactgtccttggctgtgtgcacacagaggcgctgcagtcctggggccatgttcataggatgcagagaaagcacactctgtcttttctcaggaaagctgcagggaaatgaaaagctccaggcaggacagactgggcgatgactgcatggctaaaagcgcacaccttaaaactagacacactcccctgccctgagccccagatgtcaatggacatattcccacaattttcacattccctcccaataaagtagggccatgaaagatg

SEQ ID NO: 45561 - DNA, 359 bp, Homo sapiens
agctgtttcctgtgaggaaaagaacagccacaccgcgggggcggccgtcctgcctggtacctaaataactatctgcccaggaggccagccgcttcctgcatagcatttccttcctgcagtatgggaaggaccaggctttctcagaccacagaatcttgagagccatttccacgtggagcaagtggtggctaccagccttgggtctacataactagggcctcatccctggcccaagaatcctgctccacagccttcttgtgtccctgtaggaggagaaacacctggcaacttaaattttttaaaataacttttttttttttgagacggagtctcgctctgtctcccaggctggagtgcag

SEQ ID NO: 45562 - DNA, 459 bp, Homo sapiens
tacgactcactatagggcgaattggagctccaccgcggtggcggccgcccgggcaggtactaaaatatcaagtgttttcctttcttccgcagcttcccctcaacctgccatggtgttatttgctacttgacatccttcaggcacagggatatctgcacaataaatgcagaccttccagggttctacccccacatgcgcacccacagctcacacaaactgcccactggctagcggctgagttctctctccttccagctgccagagcaatgctctgtgcaccacctaggagaggtgagctggacatctcccttcccacacacaactctactgctcgagcccacaggcagaaggatgacccccagaagcactacagtccctacataaggatgcattaagcatctagttcaggagtgagaagtttgccccactgaggcaccacagtggcactcctagaagggg

SEQ ID NO: 45563 - DNA, 495 bp, Homo sapiens
cgcgtaatacgactcactatagggcgaattggagctccaccgcggtggcggccgcccgggcaggtaccctgcacaccctcaaatgagcaaagccaccccactggcccctgggtgaggccatgtggacccccacacccttggggccggctgggcaagccttgaacccccaatttctgcgtggcctttggctgccctccttctccaaggcgtaactcttactccagagactcaggcgagcacgtgtcccttaccttattttctctcaatcaaactgaaacccattgtgatcccccatagtccagtgcggtctctgttattattacaggtgtctcccttcctccccgtgcccaggacaggccatgagccagagatacaaggggccccaggcaagatgcagggctctctgctcctggctctttatcgtcgtcgggacaccctttgtccaaactcaaggaatcccgggaggtctggctttgccgctttggctgggactca

SEQ ID NO: 45564 - DNA, 399 bp, Homo sapiens
ttggagctccaccgcggtggcggccgcccgggcaggtaccagcatttatcaaacggtcaccctgtgcccagctccacactggacactttcccatagtctctcatttcatttacttttcactgtatctttaaatacccaaattaccagacatacaaaggagagctaccatttcattttcagataagccttgtccatccagttggcaatttgattgcagctataaaaattttttaatgatgccaggtaagaagccaataaaaactgaaggaattaaaagaaaaaataattgtcaaacatgccagaagtctggagaaaagtggggaaagcaacttccttgtatatcaggcaaggaaaagcctagggaaggctaagaatttctgttgctgagtcccgtgtgct

SEQ ID NO: 45565 - DNA, 210 bp, Homo sapiens
agatatttttcactggagctaagacttaaaattagggcattttgaaaggtgtatttgtttctgtttcttgtttgatatattttggttatctactcttttaaaaaactaaacgtataaaaggtatcttcaaattactgagtgtttcatccatcccagtaggtgaagtattctccagtgaataaatctatatatatatatatagattgtaaa

SEQ ID NO: 45566 - DNA, 497 bp, Homo sapiens
cgtaatacgactcactatagggcgaattggagctccaccgcggtggcggccgaggtactacacagaaatgagactgctttcacctacacacaggacaaagaggtcagacctaagaagccctgctttgactccgtttatattcagtgagcaacaggcagactcgtcaggccagacagcagcaccacagggcgcctgtgctggggcctttgggggctgcaggctggtggtttctggacctgaacagtgactacgtgggtgtttgtgaaaatgcaccaagctgtaactgatgatctggacttcaggaaacaggttacgaataaatcactgcaacccagaatcgccccacgacatgccatgacaggagtcacacagtcacatcacctaccccaatccgatggccagcaaatgagagagcagcagagatggaaggaaaactttcagaaattctgcagagaatatgccccctttcttcatgacgctcgtgttcctcatgctga

SEQ ID NO: 45567 - DNA, 575 bp, Homo sapiens
cgactcactatagggcgaattggagctccaccgcggtggcggccgctgccagggccgccgggtccatgcccagctgggccgggtccttgcgggcccattcgccagccggtggaaaataggctgccttgtcggcggcgaacacgccggcggccggcagcgtcaggcccagtgcggtggtgagggagagtgcgagcaggctgcggcgtagcatggtgggcgaagcggtcgtcattattcggtatcggtccaggtggaatacggagaacggatcaggttggagttgtaatagcgcttgtcgctggtgacttcctggccgatccagtccggcttgtcgaagacggcgtcttcggccgctctagaactagtggatcccccgggctgcaggaattcgatatcaagcttatcgataccgtcgacctcgagggggggcccggtacccagcttttgttccctttagtgagggttaattgcgcgcttggcgtaatcatggtcatagctgtttcctgtgtgaaattgttatccgctcacaattccacacaacatacgagccgggagcataaagtggtaagcctggg

SEQ ID NO: 45568 - DNA, 496 bp, Homo sapiens
acgactcactatagggcgaattggagctccaccgcggtggcggccgaggtacaagagcacttcttttctgcgatggggcagtggggcttcactcttaaaaggtgtttgtttgatttagtaacacagtccaccccttctccttggttttgttttgagaattttatgtcatcctttaagctaattggaaaaatcctagagggagggggctgtcacccaacttggatgacaaatctctggatttcagcaaggaagaaactgtgataagattgacaagactcttcctgaaagaaatatcattaaccccccaaggcctcattaattatttattatacatttaaataaattaatccctaacaaggcccttcccccccaccacactctagggtaaaaatattctggtgattatgcagtagaatgcagaacaaagccaagccaggttaggaaaattcccaggaaccacttggtctaggacaggttcccattcttgcaacttctc

SEQ ID NO: 45569 - DNA, 606 bp, Homo sapiens
gtaatacgactcactatagggcgaattggagctccaccgcggtggcggccgcccgggcaggtgaagtcctggttccagactcccctttttgccgggatatgatggatctgtcagctggtgaggcccctctaagaggggtggtatcttcgggccaggtcaggcccatctgggaggctcaggcatttcctgcaagggtgaaggccgctctccatgcacttttagggtcccctgctcccacagcgtagccaccctggctcttctcctggtgagagtctgccttgagggctgaacggtgccactgaggagctggagaagctatagcttcccatggcagcttttgtggccgggagtcctggttcagtcctgtgcctagggattcttgctattgcatgcatgcttgtcttagacagaaagctgggggaggcacaggactttctgtctgaaatgttttgtgcagtgctcagcatggttcacctctcctcgctgccccagtatgatgatttctgcaagagtttatcctgatgattctatttccccactttataaaggtgcctagagtcctagagagctagagatggagggaaattcagatcatctaaacccttc

SEQ ID NO: 45570 - DNA, 601 bp, Homo sapiens
tatagggcgaattggagctccaccgcggtggcggccgaggtacgtcctctacctccgtcccaccggccccttagcacagaagctttccgacttttggcagcagtcgaagcagatctgcgggaagaacaaggcacacaacatcttcccccacatcacactctgccagttctttatgtgcgaggacagcaaggtggatgccctgggggaagccctgcagaccacggtcagtcgctggaaatgtaagttctcggccccgctgcccctggagctctatacgtcgtccaacttcatcggcctctttgtaaaggaagacagtgcggaggtcctcaagaagtttgctgctgactttgctgcagaggctgcatccaaaaccgaagtgcatgtggaacctcataagaagcagctacatgtgaccctggcttaccacttccaagccagccacctacccaccctagagaaactggcccagaacattgacgtcaagctagggtgtgactgggtggctaccatattttctcgggatatccgatttgctaaccatgagacattacaggtcatctacccctataccccacaaaatgacgatgagctggagctggtc

SEQ ID NO: 45571 - DNA, 480 bp, Homo sapiens
cgtaatacgactcactatagggcgaattggagctccaccgcggtggcggccgcccgggcaggtcgagaatcacctgagcccgggaggtcgggggctgcatggaaccgtgatcgcaccaccgcactccagcctgggcaacagagcgagaccctgtctccaaaaataagaataaagaaaaaaaaagaaagaactgcggccccattggcctgactctcctgaacagccaaactgtctccgaccagttacggaagaggcggccttgagagggtagtgtgccattggctcgatgtcctgcccctccgaaacctaagtcttcagcttccaatcaggactcagctttgggaagagcgccacgcggtgggcgaggggatgccctagtaaattcgcaggtctcttgactctttccgcctttgtttacaaccctgccatgatctccctcttgcaaaagcgagggctacagaacaggcattcaggagtcct

SEQ ID NO: 45572 - DNA, 371 bp, Homo sapiens
aggcgattggagctccccgcggtggcggccgaggtacttagaagaaaactccactccctattctaggttttgtccagagacctgaactaatgatagagtcaaagaatgtatgcaaagagcattgaggcacctagtttaaggaattgttgagggcagaggctgaaatgcagcacaaagcgggtgagtcagaaagtcccttaggtcagttgttcgcaccctccttctcccctactcagagacacaattcacttgcaactggaagccctgggaagaatttcccacctagttctgtgtctgaggagagaaaaaaacttgctaaggaccaagttagagagaaaaacccaaatgagaacagcgaatctagccatctt

SEQ ID NO: 45573 - DNA, 503 bp, Homo sapiens
gtcatagctgtttcctgtgaggaaaacaacagctccaccgcggtggcggccgcccgggcaggtactataaagctaaccatcccccaagccctacagatatcactagccttaacaccccatatgtaaaaggctattcacagttgaggcattcacacaaagcactcacatttaattgagagaatcctattaagggaatgccaactgatctaacaaaacaagctttgataaacaactcccctgccccccaacatcctccccatttcctcctgtggaaactagtatgtcacttttcacagcgaccgagggtcatctcttctcaaaagattagcattccaggccaggcacggtgcagtggctcatgcctgtaaccccagcaccctgagaggcaggagatcacttgagcccaggagcccgagaccagcccggacaacgtcgtgaaaccccgtctctaccaaagcccgggcaacataatgagaccccgtctccacaaattaaaaaaaaaa

SEQ ID NO: 45574 - DNA, 459 bp, Homo sapiens
ggagctccaccgcggtggcggccgaggtacagttattaactgaactatagagcataggttttaggagggttttttgtcccctggcttttttttgagatggagtctcgctctgtcacccagactgaagtgtagtggcagtatctcggctcactgcaacctccgcctcctgggttcaagcgattcttctgcctcagcctcccgagtagctgggactacaggcatgggcgtgcaccaccacgcccggctaatttttgtatttttagtagagacggagtttcaccacattggccaggctggcctcgaactcctgaccttcgtgatctgcctgcctcagcctcctaaagtgctgggattataggcatagtccgcatttatttaactgactggttctaaggataagttctgatttcaaaggatacaaataaatagagcttgaagttctatttttgcccttgcaat

SEQ ID NO: 45575 - DNA, 465 bp, Homo sapiens
gggcgaattggagctccaccgcggtggcggccggccagcgccaccgagtggcgcacctgctgttcctggttcggctggccggcgcgctggatctcgatatagaagtggcccgggaagatgcgcgcccagcgctgggcgttcgcctcggccttcggcaaatcgccgttctcgatcgcctggccgatgtcgccgaaatgggcgcccgacagcacgatcagggcgttggcctggggctcgtcgggatgcagggtcgagacggacgtcgccagcgcctccagccactcggtgcgaatctcggcgcggcccttgtgctggttggtgagccaggcgcgcgccaacaggtcgcacagctgcaggtagccggtatggttcttggccaggatcagcaggcggtgcggcttgtcgcggttgtcgtcgttggtgatccaggcgtcgaccccgacgatcggcttgatgcccttgccg

SEQ ID NO: 45576 - DNA, 448 bp, Homo sapiens
ggagctccaccgcggtggcggccgcgcccagcaccagcatcgtttcgcccggctgcaaggcagcgcggtcggcgaccgcgtggtacgaggtgccgtaggtgagcgtgatcgcggcggcgacgtcgaagtccatgtcgtccggcatcgggaggaaggcgctgcccggggctacggcctgctcggcgaaggcgccggtgcgggtgaaaccgatcacgcgctggccggggacgaagccgcggacgtcggcgccgacggcgcgcactacgcccgcgaactcgttgcccggcgtgaagggaaggggaggacgcacctggtatttgccctggaccgtcagcacgtcggggaagttgacgccggccgctctagaactagtggatcccccgggctgcaggaattcgatatcaagcttatcgataccgtcgacctctagggggggcccggttcccaa

SEQ ID NO: 45577 - DNA, 569 bp, Homo sapiens
cgcgtaatacgactcactatagggcgaattggagctccaccgcggtggcggccgaggtacttagaagaaaactccactccctattctaggttttgtccagagacctgaactaatgatagagtcaaagaatgtatgcaaagagcattgaggcacctagtttaaggaattgttgagggcagaggctgaaatgcagcacaaagcgggtgagtcagaaagtcccttaggtcagttgttcgcaccctccttctcccctactcagagacacaattcacttgcaactggaagccctgggaagaatttcccacctagttctgtgtctgaggagagaaaaaaacttgctaaggaccaagttagagagaaaacccaaatgagaacagcgaatctagccatctttctttgaatcagaattagttggagaaaaagtgtcaggtagaggtagaaccacctacgcccccactttccccaaaatagagtaagatacgacaatggttggtttcctagagtctggggacccaggctacataaatagcctctaacagaaaagcatctcctggactaaggggacagat

SEQ ID NO: 45578 - DNA, 442 bp, Homo sapiens
tggagctccaccgcggtggcggccgccgcgatatggttttccttgatcaggatgccgtcatacagcgccatgcgctggttcttgccgccgccgacgcgcaccgcgtatttctgcgccaggcgcaggcccggcaaggtcttgcgggtgtcgaggatcgcggcgttcgtgccggcaatgacgtcgacgtagcggcgggtggcggtcgccacgccagagagcagctgcatgaagttcagcgcgccgcgctcggcggtgagcaacgagcgcggattggcgcggatcgtgcacaccgtcgagtcaagcgccatgaggtcgccctcggcataatgccagtcgatctcggtatcctggtcgaccgccagcatcaagccctctaaccatggcgcgccgcacagcacggccgctctagaactagtggatcccccgggctgcaggaattcga

SEQ ID NO: 45579 - DNA, 355 bp, Homo sapiens
gagctccaccgcggtggcggccgaggtacaatggtgactgacatggctcctgaactcgcagagttcacaaataaaaacaaataatcacatcaatggtcaattcatcatatttgtgctaaacgctgcggagaaatacaggtgaggtgggaagattagaagtaaggtatgtaaagtgcctggcacaaataaatgaatcagcaggtcaagtagtggagtaagtaagaacatggtaggaacctagatgttaaagaaattgatgaagcttagagctcttggcaaaggttgtgtccttaataaaaactgaatgggtgagccatcatccaagctttttggcatctttatggggcagaaaccc

SEQ ID NO: 45580 - DNA, 628 bp, Homo sapiens
gactcactatagggcgaattggagctccaccgcggtggcggccgcccgggcaggtaccaatgttcaaagacaaatagcctcaaaatactggtcttgcttgactcctttcctcttcttctctatccaactcaggaagtcttactagattttccttttgccaggcttccatgaaaccatagttaaaatgacagatcacttaggtaagctaaccacaggttagctctgtgatcttagctaagttgttagtcttctcatctgtgaaaggagatataatactctactcataaagtcattgtgaggattaaatgagttacaacatgtgagttattacaaggattaaaaacgttacacgcacctgcacatgttcaacactcagtaatatcaatattactacatcccagatgtcattagtttagttttcattaagctctctttcacctttgtgccccactacagtatcattagcacttaaaaatttgcctagtagtgtttatttgtgcctgttccttccattacagtgtagacttctagaaggtagagatttaacatctttattttactttaccgttcacagaacttcacgtaaatcaaaaatgtttatcaaatggattgtccttaatgaccactt

SEQ ID NO: 45581 - DNA, 579 bp, Homo sapiens
tataggggcgaattgggagctccaccgcggtggcggccgaggtacctgtgaatacccactgctctccagacggggcaatataacaagaccctgcctctaaaaataaaaagcaaataaaaattgactgtttatgtcttattttgtgggacatgtaattatagagtattttataagtcttttggtttttaaagattaatccttagagtttattaagttcaataatcaaattatcaatatagaaaagtcaaaatcccaggtttgttttttgtttgtatcattattgtaaataaatagttcaactttcttttggcttcactagaatttatatattggcttatgagtcatcaaatgaaaatttaggaagaattataggtagcattatttatacgttttctcatcatataaaacttgctgtaacttttgaattacttaaatcactttgaaatattttttcctttttgaaacaaaaaagtgacttttccaggtatgtaaattcttaattatttaaccacttatccttttatgctttattgtttttagtcctacctcttctgggaagatacatttttccttagcagt

SEQ ID NO: 45582 - DNA, 465 bp, Homo sapiens
gcgcgcgtaatacgactcactatagggcgaattggagctccaccgcggtggcggccgaggtaccattctcttcactggcaaatctagcttcactggcaaatcatctctggacatagcattaagcctactcccagactgagagctcttgatgggaccagagattgaatagcctaccctatagcacaagatttctaccttgggattgggttagagctggctggcaggtgagtcacagaagtgacagccacccttgacaaccctttccactccagagagctctaatgctcactcctcttcccccatgctccctctctagggtgttgtggagggaaggagagaggtaagaaagtccttcccagtaacctcaaaatagtgagtgcgcctatttaagtccagcactttgggaggctgaggcgggtgaatcttgaggtcaggagttcgagaccagcctggccaacatggcaa

SEQ ID NO: 45583 - DNA, 474 bp, Homo sapiens
ggagctccaccgcggtggcggccgaggtctcgcccctcatggtggcccagtggtaggaccctggcagaggtcatggcagggccccctcagccggtgatttagggatcactgcacccaaccagttccctgcactgaggcgctgtctgctttgattggtaaaatttcctcctcgcacctagctttagtgcacattcctctcccataatgccctccccctccgcaaaccctaaccctcctcatctcccaggacccaactaagatgctcctgcctccaggaagccgtcttattccccagccagaagtgacctttccttctcagcaccctctttgcaggaccctcatccttctggatctgtggacaaccaagtctcctcttccatgagctgtaagcactaggaggggctaatgagtgctgctgattaagttgcaatttattggaaaactactatgtgccagccaagtacctgcccgggc

SEQ ID NO: 45584 - DNA, 483 bp, Homo sapiens
tacgactcactatagggcgaattggagctccaccgcggtggcggccgccggcgccgccgtcgaaggcggcagcctggaacacatcaacgccaccttcctggccctgttcggtgtcgccgcggtgctcgcggtggccaccgcggcgcgcttctacatggtgtcctggctgggcgagcgcgtgacggcagacattcgcagcgcggtctacggccacgtggtgcgccagagccccgaattcttcgagaccacccgcaccggcgaagtgctgtcgcgcctgaccaccgacaccaccctgatccagaccgtggtcggcaccagcatctcgctggcgctgcgcaacacgctgctgttcttcggcggcctggtgatgctgttcgtgaccagcccgcgcctgacctccatcatcctgggcctgctggtgctggtggtgctgccgatcgtgctgttcgggcgccgcgtgcgcaagctgtcgcgcgattcgca

SEQ ID NO: 45585 - DNA, 325 bp, Homo sapiens
gctgattggagctccaccgcggtggcggccgaggtacaagactttgcaccttgaattcaattgcatcaagtgtggatagcaaaataagtatcttaccattgaaatatgtgttcagcctaagattttacccaccagcagaacaaaagtgagggtgagagggatgggccagtgaggggatgggggagaaaaaaaaatcacaggattaccaccaaagccttgttttaaaagggctcccttcactattcaggaagggaagtggaaggagaaattaaccaattcctgccacagcagccctttttggctgcttgcacaatagatactttat

SEQ ID NO: 45586 - DNA, 595 bp, Homo sapiens
  misc_feature 532: n = A,T,C or G
atagggcgaattggagctccaccgcggtggcggccgaggtactcaccaccccccaagcagacagtgcaaagtctgccttcctgttccttccacccagagctggaatgtggtccacctagacccttgggccttgtttatatcatcctcacccctgccagggccactgactgcttataccttctcacaggatgtgacatttatcctcggcccagcatcctagaccgactcctgactatttctcaatttcaagctcctcagctgctgacagaggcaggatacctaggcctgcagctggccccagatccattaataagcagctcatggccatctcaggattcagagaatagtttgtctggtcagggaccaagtcccagaatggggcaggaaggggctcaaggtcctaaatcaagtcagaaacagtgcctagacccccatcccatccacctcagctcaactcccactcagggcaaacctgatgatcagatcgacatcattgttggcgatggtgatgaccacatctgggacattgtanggagtgtctaggtgactctccattgtggctctcatggcattcttgagcagctccggcaggatg

SEQ ID NO: 45587 - DNA, 474 bp, Homo sapiens
agctgtttcctgtgtggaaaacgacagctacaccgcgggggcggccgtcctgcctggtacagttgctcactgcaacctccgcctcccaggctcaagccatcctcccatctcagcctcccaagtagctggcactacaggtgcgccaccacacccagctaatttttgtattttttgtagagacggggtttcgccatgttgcccgggctgatggtctcaaaactcctgagctcaagcgattctcccgcctcggcctcccaaagtgctgggattacaggcgtgagccaccgcgcccggcctgtgtattcttcaagaggtttcaaatcattttgacggacttagtggatataagcaactatattataaaaatctgtcaagcctaggactgccaaattcacaggcactgggctacagagggcttccctgactggtcagatgctttgagtctgttcccttagaattgttccctcccaagca

SEQ ID NO: 45588 - DNA, 593 bp, Homo sapiens
aacgactcactatagggcgaattggagctccaccgcggtggcggccgcccgggcaggtggagaatcacctgagcccgggaggtcgggggctgcatggaaccgtgatcgcaccaccgcactccagcctgggcaacagagcgagaccctgtctccaaaaataagaataaagaaaaaaaaagaaagaactgcggccccattggcctgactctcctgaacagccaaactgtctccgaccagttacggaagaggcggccttgagagggtagtgtgccattggctcgatgtcctgcccctccgaaacctaagtcttcagcttccaatcaggactcagctttgggaagagcgccacgcggtgggcgaggggatgccctagtaaattcgcaggtctcttgactctttccgcctttgtttacaaccctgccatgatctccctcttgcaaaagcgagggctacagaacaggcattcaggagtcctgtgctccaatcacagccttttctgttcttcagctaggagacaccaaaccctcaggaagatttactatagctaagagaaaactgcagcagaaagggcgcggctacctacttcttaaatt

SEQ ID NO: 45589 - DNA, 381 bp, Homo sapiens
tagggcgaattggagctccccgcggtggcggccgcccgggcaggtcgggcaggtacaggcgtgagccaccgcgcccagccgggagatgctgttaatattgaagtcaaggcatcaggcatacagcaggactgtagttggtgggtcaggccatcatatttacagatgtggcctttggcttttgctttgaggagaaaggcatgtcattggagaattatgaaaggtggcacccatcgggaatggatgtttacctaaacagcacccctctagctgctcagctgagaatagattttgggacaagtgcagaagtgggaaaaccagttaggaggctattgtgaaagcggaagaggtgatggtggcttggacttgggtggtaaaatgtgg

SEQ ID NO: 45590 - DNA, 608 bp, Homo sapiens
cgcgcgtaatacgactcactatagggcgaattggagctccaccgcggtggcggccgggattacggtttttttcgccaatacgatgttaaccacatgatttaattgacttatttcgacccgcacttcatttggcaccgccttcgatcgcagtgcctctcgcgtccaaataagtgcgcagatcggcgacaacaccttgctgtgccgccagtttcgcatcagccgctgccaatgccagctcaagctcgcgcatctggtccgcaagtccttgagacttgttgcacgatgcttcaagttgttccttttgcgcctgaagctggatatccctgtcgagggtcggccgctctagaactagtggatcccccgggctgcaggaattcgatatcaagcttatcgataccgtcgacctcgagggggggcccggtacccagcttttgttccctttagtgagggttaattgcgcgcttggcgtaatcatggtcatagctgtttcctgtgtgaaattgttatccgctcacaattccacacaacatacgagccgggagcataaagtgtaaagcctggggtgcctaatgagtgagctaactcacattaattgcgttgcgctcact

SEQ ID NO: 45591 - DNA, 586 bp, Homo sapiens
  misc_feature 545: n = A,T,C or G
cgactcactatagggacgaattgggagctccaccgcggtggcggccgcccgggcaggtacatttccaggatacctttcttttcttttcttactctttttttttttttcgagatagagtttcgctcttgtttcccagactggagtgcagtggcgcaatctcggttcactgcaaccgtgaacctctgcctcccaggttcaagcaattctccctgcctcagcctcccaagtagctgggattacaggtgtccaccaccacgcctggctaatttttgtatttttagtagagacagggttttgccatgttgaccaggctggtctcaaactcctgacctcaggtgatccacctgcctcggccttccaatccaggatacctttctaagcttcccaggctttcctcattcaggtatcctgaaagcagtcgtgctggagcatgtggctcccagaacccagagcacagccgctctggggacaggcaacagaatatatacttgggacaaagctgcggcagcactccagctgggggaggatttgtcaactggcaaccncccagcaaatggcagcaggagctggagcgaggagcagtgag

SEQ ID NO: 45592 - DNA, 515 bp, Homo sapiens
gcgtaatacgacgactatagggcgaattggagctccaccgcggtggcggccgagtgaacctaaacgtgttgcgcgaggcggtgcgtcgcgagctgcgcgagttcctggacaagtgcgcaggaagcaaggcaatagtttggtatgaatacctaactggaccctttggcctgattgcacagtattcactattgaaggaacatgaagtggaaaaaatgttcacacttaaaggaaatcgtttgccggcagctgatgtgaagaatataattttttttgtcagacccaggctagagttgatggatataatcgctgaaaacgtgctcagtgaagatagacgaggcccaacgagagattttcatattctgtttgtgccacgccgtagcctgttgtgcgaacagcggttgaaggatctgggtgtcttgggatcctttattcacagggaggagtacctcggccgctctagaactagtggatcccccgggctgcaggaattcgatatcaagcttatcgataccgtc

SEQ ID NO: 45593 - DNA, 433 bp, Homo sapiens
gggctgccttggtactgtgtagcctgtccttgcagtttctaattctaaagatgacatatatttaaaatttctaaattattagttactttcacatcttatctgggtgtttttgatagacattgcttatttatttttgtgattccattctttattcaaatatttcatatgatagtcttcagttttaagaacatgcttttttgaaaagcgctagatatttgtgacatggagctccttgactgtgtttgaagtccttgggagggtggtctacagccagatatttttcctgctcaagcccacacagagtgaccaacttccttgatgcttctgtaatttttgtttgttttgtgggttcatgtgtagccttaatgtgagggtctgcttcattactttgcgtccagggtctccccagctgtataggcagctgggtttttgt

SEQ ID NO: 45594 - DNA, 594 bp, Homo sapiens
  misc_feature 455, 477: n = A,T,C or G
ttggagctccaccgcggtggcggccgaggtaccatacacgccagcattgcactggcttctcctgggttgaccagaagtttctgttgtgcctggtgtgggcagttgtaaattacaggctttgagtcagaagaaaccttaagcccacctgatgctctcggctccgactgtgctcaggctctggctcagcagcctgtgctccccggcgtgtccccgcctcacttcgtctagggggttgctctcctggagggcaaggaggctgcagtgtcgcggctgcacctccccgcacgattcggcaggacgtgcccagacggcaggactgaattttcctgttgtgacaaaattaaattctgagcaagtgttataggaggagttttgtctgtaaacgtttattcaagaggcaaaggtagcctttctggctgaaaactagaaactcattctatttaactaatgtgtantttgcggggaggtgggatttanatgtatttaaaccccacccctgaactattgtgagctttctagtgtgtgaagccaagaatccgaacaagtcggcaagagacaaaaacggggagatgccaggacgagcatccgttctgc

SEQ ID NO: 45595 - DNA, 505 bp, Homo sapiens
gtaataccactcactatacgactcactatagggcgaattggagctccaccgcggtggcggccgcccgggcaggtacccgggatgcccgttaactaaaagctttgcagaaataagaagtggctgctcctgttagagcggcttgactagctggtccactccgggcctcagtctggggggctggcgggcaggttgcagcctctccgtgatcagtgtgccttggattccattggatctcttagtctggccctcatttttcaagctaacagaaactttctgtcgtgacttttggcgtatgctacctgggaggaaacgcagtatttgtgtttggaatttgcccccattagacgataaagcacaaagccttctaaataaaatgcggtcccacggccagctgttcagaggatcttgacgctcttccttgggtgacggacccaggagagttcatcctgcaggaacccgtggcctcaggctttccaggagggaggttagagaaagggaaggagcc

SEQ ID NO: 45596 - DNA, 459 bp, Homo sapiens
tggagctccaccgcggtggcggccgcccgggcaggtacagagatgccctgggttgtaaagcaaaaaatcacacctctgacttagcttgtgtttttgtcacacgtttctgatccaaaacataaaatgataaaattcagaggttggaagaacaacttcatttctattttagaaaacacaatcatttgaacatgtttactgaaagcactgatatgttttataaattcagtttttcctttcttttcttgtaaaactttctcattgcttttacacctttactaagaaaaaattgccttgatattgaagagggagacttcccttactgttatcctgtaaaagccgtatttcccacactgcattatatactctcttttattattattattattttttggagatggagtcgactcgctcagtcacccaggctggagtgcaatggcacgatctcggctcactgaaacc

SEQ ID NO: 45597 - DNA, 364 bp, Homo sapiens
gggcttacttgttccttgtgtgtaaaaggactgcagctggaatttcaccaaggggaaattgcctgttgtgtcccagggtggggaggctcgggcatctgtgagagacagggagggtggctaaggtccagttgcttttgagtgccccgtggaacttgatgggaatggggttggaaaaccttgattgcctcctctgtcacatgccactcttggagctggagcttagtgatatgtcaatgagagatactcttgcctttgttttttctttccttttttttttttggggggaaagttgggaaaaatctcactcaaaaaataaacctcgggtaaaagcccccttggggaaaacaggttttgggcttttttt

SEQ ID NO: 45598 - DNA, 488 bp, Homo sapiens
tacgactcactatagggcgaattggagctccaccgcggtggcggccgcccgggcaggtacaggaggctgccagaggggaagcagcaagcaagactcaggcacacatgctctacaggtggctctttgtttgcctgaccaaagttctttgcaaatcttagcgcagtttcaaactagtgacctgggaggagatggaaggggtgttgaccaggctgacctagctgctgaggtcaaaggctgatgaccccagaggaaggggacaggtcagggatacatctcaccactgagaataagtttgtccagatttttttctaaagttacttcccttggaaagatacacttgagaggacattgtagttaaataatgtgaactgtaacagtcgtctactggtttatttttcatattttttaattgaaaattgagcttgcagaaatagccacattctacacatagttctaattttaaatccaaatctagaatctgtatttaa

SEQ ID NO: 45599 - DNA, 499 bp, Homo sapiens
gtaatacgactcactataaggcgaattggagctccaccgcggtggcggccgcccgcgcaggtacacctgactgggcgccctgcctgtcctgcactgctgtatggagctggccccgccacacacggatgcctggacacagcctgatgacacctgggccgctctggagggactctccttctcaccgttccgggaacaaatgctagatacgagttccctacttcagtttatgagagagaagcagcatttgctgagcatagacgagcctctcttccggtcctggtttagtctgctacctctgagtcacctggttatgtatatggaaaacttcattgagcacctgtgtcgttttcctgctcatatcctggactgtctttcagggatttactaccggcttccgggacttgagcaagtcttgaatacgcaggatgttcaagatgttcagaacgttcagaacattttagaaatgctgttgcgactcctggacacttaccgggacaag

SEQ ID NO: 45600 - DNA, 607 bp, Homo sapiens
  misc_feature 530: n = A,T,C or G
gactcactatagggcgaattggagctccaccgcggtggcggccgcccggccaggtacacactgatgaatacttataaggcatcttgatactatttgataggatgaatgcaaacattgaatttaaaaaacgaattcaattcctatagtcccacctactgggaggctaaggtgggaggatcgcttgagtctagaagttcaaggctgaagtgagctatgatcacaccactgcactccagcctggatgacaaagagagaccttgtctctaaaaacaaaacaaaaatttcattttcattcagtttttacattcatcttaacaaatcttatcaagaaagtgctcagcagtgtggtaagatgcaaagatgaatctccgtagtccttaggtcaggttgctctcagctggcaagaaaaaataagataaatgcacattagtaagtgtaatcaacaaaggaattgctggccaggtggaatgtctcactcatgtaatcccagcactttgagagactgaggcaggaggatcgcttgagccctnagagtttgagatcagcctgggcaacatggtgaaaccccgtgtctactaaaataccaaaattagcaacgtgtggtggc

SEQ ID NO: 45601 - DNA, 199 bp, Homo sapiens
cttcagaaagccttagtgaagcctggatcagttgcccagtcttatagaaaagttagaaggctactttgctgaaattttttgtaaagaaggggctcctgctaaatcaggtaaaaaataagatgaaccaagtcataaatatccaaaaaacagaacttagcagaaaggctggtggtaagtatacaaggttcttatacccaac

SEQ ID NO: 45602 - DNA, 515 bp, Homo sapiens
agcgcgcgtaaaacgactcactatagggcgaattggagctccaccgcggtggcggccgaggtaatctccagatgttccagagcagttttcagatattaatttaagcaaatctcttcctcaagaacagaagccacttgaaattaaaccagcaccttttgtgaggagccgattcaaaagaccaaaaccaaacttagcaagagcagctttgaagagagagactacagaatcagaaaaatatatatatgagaagaaatcagaaaccgagaaaatggagactattgtgatgcaagaaaataatgaacaaactgatactctcccttctcaacatgtgagtgtatttgagatggaagttctgtgtgggtgttttttttttttttaagttattaggactactaaaagcacctggcattaaaattctacaaatatttctgtgtaatttttgctgcatgtgatattgctcccatgcttaatgtgcctcattgttccacataatttgtgtaagaatctcagatatc

SEQ ID NO: 45603 - DNA, 465 bp, Homo sapiens
agcgcgcgtaatacgactcactatagggcgaattggagctccaccgcggtggcggccgaggtacctccaacagctggaccctccagctggtcaccttatgtaggaggcttctctcccccatgggcggagtgcagggcagggtggcctggggtggaggctgcaggcaggccagttccccatccagcctcagcctccttcctgctggggaaccaatcataggggaggaaactgagctttttccttacagccacctcaggctcattggctgggccccctgttaaaaaaaaatacaaaaaaggggggggcagattaaccatagaaaagtctgagcatgtatttagcatgtgttacgtcacactgaagctccatgaataagtgaacacctgaaggcaccacagaacccgagtgtttcttacggcaagcacctcgatggggaaacgtgattgtgtgagtgtttcttactgc

SEQ ID NO: 45604 - DNA, 471 bp, Homo sapiens
cgcgcgtaatacgactcactatagggcgaattggagctccaccgcggtggcggccgaggtacccctagcagaaacagagtttcgccatgttggtcaggctggtctcgaacttctgtcctcaactgttccacctgcctcagcctccgaaagtgctaggattacacgtgtgagccactgtgcccagcgtgtccctaaccgaggcagcagcggacgtgagcgataatggcggatatggaggatctcttcgggagcgacgccgacagcgaagctgagcgtaaagattctgattctggatctgactcagattctgatcaagagaatgctgcctctggcagtaatgcctctggaagtgaaagtgaccaggatgaaagaggtgattcaggacaaccaagtaataaggaactgtttggagatgacagtgaggacgagggagcttcacatcatagtggtagtgataatcactctgaaaga

SEQ ID NO: 45605 - DNA, 563 bp, Homo sapiens
  misc_feature 547: n = A,T,C or G
acgactcactatagggcgaattggagctccaccgcggtggcggccgcccgggcaggtaccctgggcaggggctagggagagttgtcctctggatcctgcctgctctgtgacttagaacaactctgtcccctctctgggcctctttcctcagtccctccttgagtcagggcttgggaatggggtgaagtggggaggatgcttccttccacaggaatctgggagggtcaggtgcactgctctgataggctgaggcttggggcccttatgggatcctccctcatcagcccttctccctggataccaaactttttggctggtttctcggctaacagcaaggctttcctgaaccctttcttagctggggaagggaggttcaggagggagtctcagagcctctgacaaagttagggaaccccagggaagtaatgaagggggcaatgccatcctctggtctttccaaacagggaacaccttccaaagccacttgggtcatttggggtctagaggcttagagaggacaggacatcttggaaagagctgagctcangccttggtgctgggct

SEQ ID NO: 45606 - DNA, 488 bp, Homo sapiens
  misc_feature 377: n = A,T,C or G
gctgtttcctgtgtggaaaacaacggctacaacgcgggggcggccgaggtaccttccttagttagcatcccaactacttctactgcaaaaccccaaagcactacatctttaagcaatggccttccatctggagttcatttcccacctcaggatcaaagaccacagggacaatatccttcaatgatgatggcaaccaaaaatcatggaacgccaatgccttatgaacagtatccaaaatgtgactcacctgtcgacatcggatattattccatgttgaatgcatactcaaatctgagtctctcaggcccacgaagccctgaaaggcgtttctccttatacacagattatagaataagttccgtagcttctgactgcancagtgaagggagcatgagctgtgggagcagtgactcctacgtgggttacaatgaccggtcctatgtcagctcccccgacccacagctagaggagaatttgaagtgtcaaca

SEQ ID NO: 45607 - DNA, 555 bp, Homo sapiens
  misc_feature 480: n = A,T,C or G
gtaatacgactcactatagggcgaattggagctccaccgcggtggcggccgcccgggcaggtgtggttaagttggtgacatggctcagaagtttatttctttaaatttttaagttttttttctttttagtcttcagaaaggcaacagtagtcttttaacgtcactgttaaaagtgtaagactcttttactccctgagagtcccctttccctttcttgcgtcctttcctctttattctttttttttttttttttctttactgagacggagtctcactctgtcgcccaggctggagtgcagtggcgcgatctcggctcactgcaaactccgcctcccgggttcaccctttctctttattcttatcccggtcagactcgccccctcctccaagatatctctctgttttattttatttgattttagttctctttgggtgatcgctccttccctcttcaacggatccctccccgcctccatcctngttctgtgggagagaccagccttctggtgctgcaatcaggaatggagcttgacagcgctctggaagccccatcgc

SEQ ID NO: 45608 - DNA, 608 bp, Homo sapiens
  misc_feature 519, 535: n = A,T,C or G
ttggagctccaccgcggtggcggccgcccgggcaggtacagatcttaaaaacaactaccttcgatgatggtagaattactatttcttagttgccaaaaacagtaataacagtttggtcttcactttttatttttatttttgtattcagtatatttggggccaggcgcagtggctcatgcctgtaatctcagcactttggaaggccgaggcgggcggatcacgaggtcaggagatcaagaccatcctgaacacagtgaaaccctgtctctactaaaaatacaaaaaattagccaggcgtggtggcaggcacctgtaaggtgcggtggctcacgtctgtaatcccagcattttgggaggccaagacgggcagatcacctgaggtcgggagttcgagaccagcctgaccaacatggagaaaccccatctctattaaaaatacaaaattagccgggcgtcgtggcacatgcctgtaatctcagttacttgggaggctgaggcaagagaatcgcttgaactcangaggtggaggttgcantgagacaagatcgcgccattgcactccagcctgggcgacaagagcaaaactccatctcaggaaaaaaaaaaaa

SEQ ID NO: 45609 - DNA, 478 bp, Homo sapiens
atagctgtttcctgtgagggacgagcggccacaactacgggggcttccttgttccttggtctaaaaaaacatactgagacccctgtttttaatgaaaaatgaaagcctcctgggtttggctgattccctggtgaatggtggagcggtcctgaaagctgggaagacctctttctggcacagcaaccggggcagaggtgagaggagaagggcctcagcagtgttctggccttttgggttcatccaaaacttgccggtcctgggcctgctgggagaggtcagcccctttcaggtgagcagctctggggccgggtgacccacgccaccgtgtcgggcacacagtggtgcttcgttttcctcactcctggggccacagccttcctgctgcggttctgcctggtgggtgggtccatgctgctttgaggaggcaagtgacctaaggcttccgggacactcttttggcaacttgggccttggaagg

SEQ ID NO: 45610 - DNA, 490 bp, Homo sapiens
ttggagctccaccgcggtggcggccgaggtaccttatctttaccactcagggtggctttaaaagacggacagctttaggtttgttctcactggaactggttacactttctgtgcaaacttaaccaagtgatgatcgtctggaagctgcattccctcatttccactgtttggtgtgaatctagtctccccactttatctaaaaggaggctagcagggccccagcctgagcagagcagctagagagtgcttccagattcctttgccaaaggaggcccattttccagctgtgagtgacatctgtagtcattggcttcattgcctggcactagccctgtctagaagtggagaaagctggatcacagctggaccacaaccagccccaatccaggatttcccataccatgctggctgtgggctctgtgagcctcagccaggtggccaggctatacttgtcacagctggccacaagcctgctgaaagaacatggggt

SEQ ID NO: 45611 - DNA, 388 bp, Homo sapiens
ggcgaattggagctccaccgcggtggcggccgcccgggcaggtacgaaagttaaattattccagtccattctgatcaagaatgctcaagagactagctttcccacaacagagatgtggagcaaaaagcatagtccttaccgacttacaccaatgagcatgccacagactccagccagctctagcacatacaaaatttgagtaaggaatactataacccctattttactcctatacctttgctaatgacacctctaaaatctgcagccatatatcaacaccttatttcaccatattgaatacactcacaagtcaaccatctaaaggtcaggctcctaatcaatagtgctactgtggattagacaaattaacaatgttaagtgattaaaa

SEQ ID NO: 45612 - DNA, 450 bp, Homo sapiens
ctcactatagggcgaattggagctccaccgcggtggcggccgaggtactcagcagttaaaagattcatctggagtcgcaaaatgaaaagccgtgttctaacctgaggaatcagttaggggacaggagttccgtgggccaggaatgggctcagggagtggggctgcgtgtcacacacagtagctgtgttgcagtggcctagggccttgggggttgtctttaggaaacaccctgaggggaagcaggtaaagagcctgggcagtattgtgactagtttcattgttttcctcctgctgaggtctagcagagcccttgctttgtcctctcggctgggtctggctgccagctggtgtgatttgagaaactgaccttacgcgcagtcaaggtccagctgacaaggccttgtattccttggctggccgtgattggccctttcctctgcagaaagcagc

SEQ ID NO: 45613 - DNA, 385 bp, Homo sapiens
ttggagctccaccgcggtggcggccgcggtactcctggaggctgcgcagccccaggcctgtatcgatcaccacgtcctgctcggagccgcgcaccagccagatgttggcacggttgcccgactcgtagaaacgttcttgaatccagaagataccatcgcctagagacttgtgggcgtacctcggccgctctagaactagtggatcccccgggctgcaggaattcgatatcaagcttatcgataccgtcgacctcgagggggggcccggtacccagcttttgttccctttagtgagggttaattgcgcgcttggcgtaatcatggtcatagctgtttcctggaggtaattgcgcgcttggcgtaatcatggtcatagctgtttcct

SEQ ID NO: 45614 - DNA, 491 bp, Homo sapiens
gactcactatagggcgaattggagctccaccgcggtggcggccgcccgggcaggtacccgggatgcccgttaactaaaagctttgcagaaataagaagtggctgctcctgttagagcggcttgactagctggtccactccgggcctcagtctggggggctggcgggcaggttgcagcctctccgtgatcagtgtgccttggattccattggatctcttagtctggccctcatttttcaagctaacagaaactttctgtcgtgacttttggcgtatgctacctgggaggaaacgcagtatttgtgtttggaatttgcccccattagacgataaagcacaaagccttctaaataaaatgcggtcccacggccagctgttcagaggatcttgacgctcttccttgggtgacggacccaggagagttcatcctgcaggaacccgtggcctcaggctttccaggagggaggttagagaaagggaaggagcccagct

SEQ ID NO: 45615 - DNA, 430 bp, Homo sapiens
gcgtaatacgactcactatagggcgaattggagctccaccgcggtggcggatattgacccggagggcaagaagtttgaccgaggtaagtaaggtatgtaggggcggtttggaggaagaggctaacctcgcggacatgcccctgggccccgtgtccacccagctcttgtggcctgcccctaccagcaggtcctggtgtagggacctccctcagtaaacattttatggatgagaaaacggagactcccgagctctctctggcttcacgcatgccgtgcccggtgcctgggtggccttttgtcatggtgctggcagactcctaggcatatttataatcgctacctgctctgtgctagacactggtctcaaactcctgatctcaaatgatccacctgcctcggcctcccaaaatgtcgggattacaggcatgag

SEQ ID NO: 45616 - DNA, 482 bp, Homo sapiens
acgactcactatagggcgaattggagctccaccgcggtggcggccgaggtacaacagatgcaaccgtaagacacacagagcccgcccactgcggggcagcaggaccgagcccagagccctcgggggtttcgtgcgtgacgaagggtctttcactcaagtaaaatggcagcgtcctccttcctcttgaaaacatggggacaaaaagggaccaggatcttcccagcaatcggcattctcatcgccctctggactgcttggagcccgcccacctgtgcttttaactcatacctgagaaacacggctggtgttttacttagatttttaaatttaaaatgtctaatggaagataaagacttaccttccccaggctaacgcttaaagaatctcaattaactcaaaactaatgtcagagggaatggatgtgataagagaatcttacattacatctaacaaaaaaagtaacaaacatgcaataaaatgga

SEQ ID NO: 45617 - DNA, 518 bp, Homo sapiens
  misc_feature 437, 438, 439: n = A,T,C or G
gaacagaagctgggtaccgggcccccgctcgagagtacttctagaattaattaaagcgggctagtgtctccttcttgggaatgtggccctcggggccatggtctcctcacaccattcagaatgagcctatgaccccccaccccatcctgctctggaaatgcaggcagcccatataagaagcctggtcacatgctgttcctcttgcttccccctaagtcagcatctctaggcaggggtctcccctaactccagcttcccaaaaacccccattacctttccttctgaagccatgatgtggcggtgcatcgacttgtacttctagctgaactgcctgttttttaggtttttttttcccaaccatcttaactgattaaagtatcctatcagtccccaaatatcaagaagcccatttccaaatgtgtggcattggccaaaannnaaaaaaaaaaaaaaaaaaaagggggcccccccccggggggacccccaatccccccttttgggggtttttttcccccccc

SEQ ID NO: 45618 - DNA, 461 bp, Homo sapiens
agctgtttcctgtgtggcaaagaggagctccaccgcgggggcggccgcccgggctggtactaagcccagccaaggaactacaccttctcgctgaaggaggcgcctccggcttcccattggcagagctgaacggcggcgtgagtgctccggtgctttggggccatgattaggtaaataagagtggcttgaacatggcactgtgatatggtgatgggggatgtgggaaccacaccggctgctaagtgatcaacaggtggtggcatgaatagcctggacacgctggacaaaggttatgtcttatgaagtcaaatggtcaatttcctgatgctcatgtgcctttgggcttccccaaacaccaccactccctgagcaaagacgcccctaacaaagagtcaaccgttattttatgccaaagcgaaaggcgtattacagagggcttgggccttattatccaatatccc

SEQ ID NO: 45619 - DNA, 464 bp, Homo sapiens
gtaatacgactcactatagggcgaattggagctccaccgcggtggcggccgaggtactaagcccagccaaggaactacaccttctcgctgaaggaggcgcctccggcttcccattggcagagctgaacggcggcgtgagtgctccggtgctttggggccatgattaggcaaataagagtggcttgaacatggcactgtgatatggtgatgggggatgtgggaaccacaccggctgctaagtgatcaacacgcggtggcatgaatagcctggacacgctggacaaaggttatgtcttatgaagtcaaatggtcaatttcctgatgctcatgtgcctttgggcttccccaaacaccaccactccctgagcagagacgcgcctaacagagagtcaaccgttattttatgccaaagcgaaaggcgtatcacagagggcttgagccttagtatccaatatccccaaagc

SEQ ID NO: 45620 - DNA, 630 bp, Homo sapiens
atagctgtttcctgtgtggaaaacaacagccccaccgcgggggcggccgaggtaccctctgataacactgaggcagactattttctaataggggaggagttctctgcattaatattccaacagattctcttaaaagaggaataacacttacaactataagaatggctataagaattgaacagataggatctgctatcatcaaaccaaaattttgcatcatgatggcagaagcaattacaccaatacttccaagtgtatctgctaggatatgtaaaaatacaccttgtaaaatctgtctgctgggtcctgttgtttcttttaaggacgggccatcatgagaatgaaagtgtccatgtccatgagcatgatcatggctatgtgcagcaccatgtttcacttcatggctatggcaatgatcgacatggccatgtgcctgatctagagcaccattaaagagggaatgactgtgtccgtggccagagccatgagaatgtccatgacctccatgtttgaaaacaaatattcctattaggtttgccacaaacccaagaatggaaacaagaagcagtctctcatggtggacatctggaggggctaatgctctctcaactccttctgagaaaataaaaa

SEQ ID NO: 45621 - DNA, 455 bp, Homo sapiens
cgactcactatagggcgaattggagctccaccgcggtggcggccgaggtactgcgatatccacatatttttgagaaaaattcccaagccaggcgaatgtggattggaataaagacataggcagtgtataccaccatagcaataatggttagtaagatggtgttaaacatagatcgctcccagggctctaaaacagcacagcagctaatgatttggtattgatagtagagccaggagaaatattccttcacacgcctcaaatccatggttggctccttcaagctgcagtaagtttgtcccaagaaagtccaggtctggttcttcagccttgctccttcgcgaaatgatcctgtgtgggttagttctcctctctgggttgctgtttcctcatctcccagttgggtgtatctccctgcggcttaagtgagcgccgaggctttggctcctccccagctg

SEQ ID NO: 45622 - DNA, 448 bp, Homo sapiens
catagctgtttcctgtgagtgcaaagaacagctacaccgcgggggcggccgccctgcctggtaccgaatcaatgtggacaacgaagacagctacatgcttgtgatgcgcaatatgttgagccaccgtcttcctgtgcacaggaagtatgacctcacgggttccctagtgtcccgggaagccagcgataaggaaaaggttaaagaattgcccacccttaaggatatggactttctcaacaagaaccagaaagtttatattggtgaacaggacaagaaaatatttctggaaaaactgaacagagatgtggagtttctagtgcagctgaagatcatggactacagccttctgctaggcattcacgacatcattcggggctctgaaccagaggaggaagcgcccgtgcgggaggatgagtcagaggtggatggggactgcagcctgactgga

SEQ ID NO: 45623 - DNA, 486 bp, Homo sapiens
gacttactatagggctagattggagctccaccgcggtggcggccgaggtactctgaggccctgatggctctcgccaccatggcgtcactccgcgaccacagcacaccagaaacactcagcattatggatgacctcatcagctccccaggcaaaaacaaaagtgggaggggacacatgctcattatcagggtgccctcggtgcagctggcgatgttagccaaggagcggctacaggaggtgcgcgacaaactgggtctgcagtatcggtttgagatcatccttgggaacccggccaccgaactcagtgttgcaactcactttgtggcgcgattaaagagttggagaggaaatgaaccagaagagtggatccctcggacataccaagatttagacggtctaccttgtattgtgatattaactggcaaagatcctcttggagaaacctttcccaggtctttgaagtacctgcccgggcggccgctctag

SEQ ID NO: 45624 - DNA, 219 bp, Homo sapiens
acgactcactatagggcgaattggagctccaccgcggtggcggccgcccgggcaggtacgacgggagaaaaatgcatgaatgtcatcagtgccaaaaagccttcaccacgagcgcgtccctcacacggcacaggagaatccacaccggggagaagccttacgagtgcagcgactgcgggaaagccttcaacgacccttcagcccttaggagccacgcaa

SEQ ID NO: 45625 - DNA, 537 bp, Homo sapiens
gcgtaatacgaactcactttatagggcggaattggagccttccaccgccgcgtgatacgactcactatagggcgaattggagctccaccgcggtggcggccgaggtaccgagtcagtgtggacaacgaagacagctacatgcttgtgatgcgcaatatgtttagccaccgtcttcctgtgcacaggaagtatgacctcaagggttccctagtgtcccgggaagccagcgataaggaaaaggttaaagaattgcccacccttaaggatatggactttctcaacaagaaccagaaagtatatattggtgaagaggagaagaaaatatttctggagaagctgaagagagatgtggagtttctagtgcagctgaagatcatggactacagccttctgctaggcatccacgacatcattcggggctctgaaccagaggaggaagcgcccgtgcgggaggatgagtcaaaggtggatggggactgcagcctgactggacctcctgctctggtgggctcctatggcacctccccagagggtatc

SEQ ID NO: 45626 - DNA, 476 bp, Homo sapiens
acgactcactatagggcgaattggagctccaccgcggtggcggccgcccgggcaggtacttgaaccgctttaggtgcagggccaagatcatgggcagcttttttaccctcatccttttctgggcttcttgtttgctgcagcatgtttcacaataatatttttgttcactacacagtgtttctgtgttgctgaagtctcttagacagtgggtaatggatgtattctgctccacatcaacagaacggtctagataattttcatctttgctactaacagtttcacagttcaagcatcgagtttcattggtaagcgttccctgaaaaatctcatggacccacgtgagttctggtttattattttacgcaggttcgttcatgttgccattttttaattctccattttgtttttactgtttcttctcctgctgaaggatgtccgcaatagtgtttatcaaataatttaaaaattcatgagca

SEQ ID NO: 45627 - DNA, 369 bp, Homo sapiens
tacgactcactatagggcgaattggagctccaccgcggtggcggccgaggtaccccatcgactgcgtcaagacccggatgcagagtctacagcctgacccagctgcccgctatcgcaatgtgttggaggccctctggaggattataagaacggagggcctatggaggcccatgagggggctgaacgtcacagcaacaggcgcagggcctgcccacgccctttattttgcctgctgcgaaaagttaaaaaagacattgagtgatgtaatccaccctgggggcaatagccatattgccaatggtattgagccttactgtgctggttccctcactttcccaactcttagggctttgctgctgtcagtgcttt

SEQ ID NO: 45628 - DNA, 675 bp, Homo sapiens
gactactatagggcgaattggagctccaccgcggtggcggccgaggtaccctgggccggcaggcagtgggacacccacgggggcccaagcctattgaggtcggtccgtacagaacagcgtggcggcagaattacaaaacattctcagagagactgcaaaggacacttagctcttccggaatgaaagcacgcaacgcagcataaaaagcatcgaaaccccaaacagcagagtgttaaaggcaattgcttccaggtagtgacgtagtagaaccgccggggccaaactcaatgtctgatgagcagccaacatgagaacggggccacctgcaaacacccagacacctccaactgtcagatcatcgcctgtcaactcagagtaaactcatggagaaattggggcgagcgctaacctcaagatcgggcaacatatggaacccaaagaaagaagcgaaggaggccccgggcccacagcacagtgtatgggaaaatgacatttctgacagcaaagtggttaatcacagggaggggtgttcagagcctcccaggaccgacttcctgcaagtcagcatcagacggtccactgcgccactagtgggaacttgtacttcaaaacaccagctgtgggccctgtgttcttttcaaacaaagggccctggatttgaacagaatgctttgc

SEQ ID NO: 45629 - DNA, 550 bp, Homo sapiens
aattggagctccaccgcggtggcggccgaggtacatgaagggcaggtccacgttgtagttggctgggccatcgatgatggtaaggaacagctcgaaggtgctgaacagggccatggggtagtcgtagaagtggcctagctcctcggggtcctctgtctggaagatgatatagaaggctgctccacccaagggggtgagggttaccatggcaaccatgcagacgaccagcccaccccgggctctgcgtgcatgtccatcctggtcccttcatctcaatatcaccagctctgcagtgctccaaactttgggtttttacggtccctagttttgtatgagcctcatcttgatcctaagagccacctctccctaacactcccgatttttctcacctctggaggacgtcccatcctctgataccataggtctcctctgatctctgcattactcctcctccccaagtttagccagagccagtgccccctagacttcctcatctcttccctgccatggcccctggtcctggacagatgattacctgaagcaaaaccca

SEQ ID NO: 45630 - DNA, 531 bp, Homo sapiens
ttggagctccaccgcggtggccgacgctcggactggttcgaagaaaccaagggtgaaaagtggatcctttttgataatggctccgggatacccaaggtctacaacggagagaagggcaagcgtggcatcgacggggtggacggcgtgaagggggagatggggtacatattggtgatctgcttttgcaaacccaacacattctgggtcctatagtcacattgattttcattatctctagtagaaagagctgggatttgaagctctttggaaacttctatgttttcagagataggttctttatcctcttgggttttgaaaaaaaaattacctttttttaggccatgcaccacatctttatcattatcctcatacatgtggttcattccagaaattatttctgtcttccggtttactttctttctaagcttattaatgtttgattcattttgctctgagggttgaatatcagtgacatactttttcaaatccaatatattgtgggtcccataatcacataaatttccattatct

SEQ ID NO: 45631 - DNA, 502 bp, Homo sapiens
cgcgcgtaatacgactcactatagggcgaattggagctccaccgcggtggcggccgaggtactgattccctacgatgcagatttgaatcacagagtaattaaaatatggatcaaataaggctggggctcaccaaggctgaaagctgtagccattcaaggcatcatttctgtcatgaaaatataggaccttttcaaaacatgccttcaggaaggtgttctcttttcaaacaaaagtctaatgactgcataactcttcttgaccacatcttacactttctctagacttgcttatttacagctactggaacaaaaagatgaaatgaataaagcacactgattgtcctaagagtcttctgtgactaaaagcacatgagcttctccccaggctgagctttgaccctcccaagcatttccccaaaggccatgacactgcatcagattgctcctggacactttcctcagagttttcaacaaatataaactgaggagtggagcacagcac

SEQ ID NO: 45632 - DNA, 483 bp, Homo sapiens
ggagctccaccgcggtggcggccgaggtaccagtggcaccagcagcccaccagccccctgccgccctgtaccttcgggagcagatcaccaggacagggaatctgcaggccagggaggagcagagcttagccgagtggcaggtgggtgcccagggctgtccagtccctttcctgctgctgctccatcttcctgcatttccacgtctgtgtctgcccgtggggatatgctgccgcagtggcaggaaaagaagaaagttgcctctacccttctaggttctgtggtggcctcagaatgaactgacttaagacagatgaacagcagagaaaaagataaaaaggcaattttaaattacagatgcacacatagggtggagagaaggggcctcaaaaatcagactcaaagaggcagccagagggtaggggctcagtacctgcccggacctgcccggcggccgctctagaactagtggatcccccgggctgc

SEQ ID NO: 45633 - DNA, 535 bp, Homo sapiens
ttggagctccaccgcggtggcggccgcccgggcaggtacagctttgcaaacaggctaccccagggcttgcccttttttgtgagggtagtcctttgggatcttgaccccttccctggatttttgtctgtgttaatgtcttcatgttgtgtatttttgcacttaatatttgccctgtgtatgttttcccagcttatttacacacaaagcataacagatctgagcataatgagactgcccatctttttagctacagatacctgtaaagttgcatatttgtgggaacctgtattctgagcttaattactgtagcctgggtctttcatttcaagatgatgtgcgaggtgatgccgaccatcagcgaagcagaaggcccccctggaggaggtggaggccatggttccggctccccttcacagccagatgcagattcacattttgaacagttgatggtctccatgctagaagaaagggaccgccttcttgatacactgagagagactcaagaaacgctggccttaacccaggggaagttaca

SEQ ID NO: 45634 - DNA, 472 bp, Homo sapiens
ggagctccaccgcggtggcggccgaggtccaaggccaagctgaagccaggggctcccttgcggcccaaactgaacccgaagaaagcccgtgcctacgggccaggcatcgagcccacaggcaacatggtgaagaagcgggcagagttcactgtggagaccagaagtgctggccagggagaggtgctggtgtactgagttcagatatcttgccccggtgggccatcattggttggctcctgacaacgtgcacgtcaaatgtcgctgcctccaatgccaagctggctttgttttatgactggctgttctttagtccagacaaggatagcattatgaacatagaaccagccatcctggtcatgcaccactccatgaagccccacccagccatcactgccacactgctggacttcatgtgccgcatcattcccaacttctatccaccattggagggccacgtgcggcagggtgtctt

SEQ ID NO: 45635 - DNA, 492 bp, Homo sapiens
acgactcactatagggcgaattggagctccaccgcggtggcggccgaggtacagataaaggaagagatcccagttctgatacatatgaggaagattctgagttgttgctccagatacgaaatgatgtgcttgactcactgggtattagtcctgacctgcttcctgaggactttgtcaggtacctcctgcttctggttttaattagagccttccccgattacattttcctgtgaattttttcctatccacattagatctgacatgttaaaaccccctacttctaagggaacttctctaatctattatcctcatccccaaatagtgttttcttcctatgggttcttataatgttggtatcaatctcacagcatctagtgcctcctgcctggtgtgacagttacctgtgtgcatgtgcaatttctaatttcccacgctagactgtgagcttcctaaggcaagaatcatgccttgttggtttctgtattcctcatg

SEQ ID NO: 45636 - DNA, 506 bp, Homo sapiens
gacttacttgttggctgattggagctccaccgcggtggcggccgaggtacccaaagccaggctgtggctgtccatacggtggcgcggtataaccataaccaaaaggtgcctggggagggacggcaacactgggtcctgctgtcagcatcaactggggctgaccataaacaatgggttgtgtctccgtagcttgttcttcttcttttctcagtgattctgaagcatctaatttatccacctttgtcaagtactcttttccccttactgacagctttccctggaagtgactttctcccctctgccaactgactccccactgcctctggggaaggagaccagtatttatggttgtcttgttcctggtgattttttttttttaaagtaggtcccttccactctcgtaaaaccccctggcaggtgtattctctttcgccacttcagtgtgcaccaaatgtttgttgaacaattactttgggccaggcactgtgctgggtgctgtggctaac

SEQ ID NO: 45637 - DNA, 351 bp, Homo sapiens
ttggagctccaccgcggtggcggccgcccgggcaggtacttcggtgcatctaacttaggctgtcttgttcaacttatttgtaaaaatgaacattcttgaagtatatagaaacaatagcaaaacatctttgtaaaagttttgatgcaaattaaaagctacatattggttagggtaaccgaggcttcaaaattcgtcagcgggctacattatcagataggatttctttgtcaatgtagttagtatgtatactgtttagtctcaggaacagaggcaagcagtctttaacattttaaaacttgaccttccttcgtggcatcacgggttttggagagtccagattatgggagcagt

SEQ ID NO: 45638 - DNA, 496 bp, Homo sapiens
gcgtaatacgactcactatagggcgaattggagctccaccgcggtggcggccgatcattgttcacgcctctccttcgcgtatgtgttttctactgttcttgcactgtaaaggcagaggttgcatcgggcccttatgcaaagccccaaataattactggctgactcttctcagggaacatttgctaaccctgtcacaagccataaggttccaccacaaatggccctgtggctctctcgttacgtttctgtgtggacgtttccacatggtctgaggcattcatccaagaagagcaggatgtattagtgactgcacagattctgccttggcccacaaagaggacatccagggcagtcctggtcatctgtaataacattgcccagtgagttgaggctgacctgagtacctgcccgggcggccgctctagaactagtggatcccccgggctgcaggaattcgatatcaagcttatcgataccgtcgacctcgagggggggc

SEQ ID NO: 45639 - DNA, 355 bp, Homo sapiens
tagctgtttcctgtgtggaaaagagcagctccaccgcgggggcggccgcccggcctggtaccatgaaggaagattgaccctgttggtatgcctgtgggggtgggatgtgagtgggactgataaactgatacttttggttcgtatgtaccgggcagctggggagcaggagaagctggaggccaccaatcgctaccacatgcccaaggaaacccgaggacagccagcccgagctgtggatctagtggaggaggaatcaggagccgcctcgtctcaagttgtataaagttgtctccgtgtcccctcctccctctgcccccagtgtttcttctgattttttttcccctttccctccctc

SEQ ID NO: 45640 - DNA, 598 bp, Homo sapiens
atagggcgaattggagctccaccgcggtggcggccgaggtacccccttttttttttttttttttagagacgaagtctcgctctgtcacccagactggagtgcagtgacacgatctcggtgccaccacacctgcctaatttttgtatttttagtaagagacagtgtttcaccatgttagtcagcctgatcttgaacacctgacctcgtgatccacccgcctcaccctcccaaagtgttgggattacaggcgtgagccaccgcctgcacccggcctgaatactctttgagccaatcaaatgttataaattaaaatcacattaactcataatcttattccttaaaatgagtgacttacaggtgtcgtaacaggtgacttctcactgcttggagaatccacttgagaattgagatttggcaaatgtagttggttggcttcaggcattttgtccagaaatggaaatgtcagcgttgcttcgggttctggagattttggctttaccaccttttgtgacagcaccaactccacctttccactcatttcattttctggtttcttctggtctttttcttccgacacatcattcttcagctgggggct

SEQ ID NO: 45641 - DNA, 474 bp, Homo sapiens
ttggagctccaccgcggtggcggccgcccgggcaggtaaagactccacggcctcctgccacctgggagatagttggattatctgtgccttagcatggcctcccaggccctccttacccaccttttcagcacatcccaccctccagtgctgtcacgccagatcctgtttgtgcctcgtgccctgcctcagtctctgctgcctccctgagtgccttctgctcccttctcaccagcggggccctcttgtccttcagtgccacacaaggacccctccctgagtatcccatccccacggaaacccttgggctcacaggcccacccaccacttgctggttgcgcagccttgggcaggtggctgaccttgctctgcccacccctggagggcgatgtctgtgagggactccagtcgttgtgaagtgtgagccctcaggacctcctgcgtgaagaccgcacaagctgaaggtggaaagttcca

SEQ ID NO: 45642 - DNA, 586 bp, Homo sapiens
tatacgactcactatagggcgaattggagctccaccgcggtggcggccgaggtactccaggccacctcttctcccagcctttcctgggaggcgccacttggtatctgggacctcctctgctctaacacaaataagaattcctcaaaagttttctagcacacaacttgttctttcacctctttcacctctccaagaaagtcaaacacggtccttgcttttcccagtggccatggttacccaagcacaggaggccaaggcctggggctcaggccagcagagcaggatctctgcagacgtgtggtcccaggcttggccagtacctgcccgggcggccgctctagaactagtggatcccccgggctgcaggaattcgatatcaagcttatcgataccgtcgacctcgagggggggcccggtacccagcttttgttccctttagtgagggttaattgcgcgcttggcgtaatcatggtcatagctgtttcctgtgtgaaattgttatccgctcacaattccacacaacatacgagccgggagcataaagtgtaaagcctggggtgcctaatgagtgagctaactcacatta

SEQ ID NO: 45643 - DNA, 485 bp, Homo sapiens
tagggcgaattggagctccaccgcggtggcggccgaggtacgaaaaccccacaaacggcagttcttcacccgagaagcctgaggggctcagctggcacggagaggatgaaacccacgaattcttctctggttcatcaaaattggaggtgtcatcgtcagacttgagggtgggaacgaaggggggaggagagttacgaatgttgttccagtcaattttagagaagaaaggatggcagcaaagaccttcaaacttcagtctctctttctggccgcacaacaagctttgaatcagatcaagaaagtcactgctcactttggggtcatctggaaatttcaaaaacccgctggaaattcataatgttattgaaggttctggcagaggttccctctgcgaagggggatctcccataaatcatctcataggcaatcacgcccactgaccaccagtcacagtccaggccgtaggtgccttttccatccccgtt

SEQ ID NO: 45644 - DNA, 589 bp, Homo sapiens
ggagctccccgcggtggcggccgggtacaaaacaaacagaacatgagctgtctttctcagctctctactttgtaaataaaaagggggaaaggtgtgtgtcccttcagcatgcctcgtgcggcacacgataaagaaatcaaggggaatggagaaggtgattttcttcacctgcccatcgggtcaacctcagcacccagaccacagagactccccgcccacctcccaacctgccccatcacaaccctgaaggtcagaccaagtcctctatctgctaggacatggagggtagctgagaacaaatttaatagcttcaccttgaaagacaaaagacaggcaaacttatagcatgagacttaaaatgttgaaacttttctcaccaattctcccttctggccaggaactattttcagatgaggcaaaaaggtgaaaagagctccacaactcacctaaagccatcgccaggtagagaatgacccagctgaaggcctgcccagtgccaggcccaaaaggtacctgcccgggcggccgctctagaactagtggatcccccgggctgcaggaattcgatatcaagcttatcgataccgtc

SEQ ID NO: 45645 - DNA, 349 bp, Homo sapiens
  misc_feature 299, 309: n = A,T,C or G
atagctgtttcctgttcatagctgtttcctgtgtaggaaaagaacggccacaactcaggggcatacttgttgcctggtgcaaaaacaacggcgcagcggaggcggaccgcattctactctgcaaaaagaaaggactgtaaccagcaaattacttcatcatctagattatccattcaggtgatcctaattagcaaggataacaagaatcgtccgcactaaagtcccctgcagcgtgaccatgtcgagaccccggaagaggctggctgggacttctggttcagacaagggactatcagganaacgcaccanaactgagaactcaggtgaggcattagctaaagtggaggac

SEQ ID NO: 45646 - DNA, 550 bp, Homo sapiens; identical to SEQ ID NO: 45629

SEQ ID NO: 45647 - DNA, 497 bp, Homo sapiens
acgactcactatagggcgaattggagctccaccgcggtggcggccgcccgggcaggtggcggcggagggccgaattcccttttctcaacggcttgatttcagagctgggctggtctctgacaggctcagctggagagggacgggttgggacgcactgtccttttgcccttccccctccgcgagcagaagctgactccgcaggagcgagggtcgcagagctgggggatttcagtctccacatagttttggagccggacttttgaagaatgattcgtgaatccggaatgggtgacagcgtcatcacggcattttattgacagaccatggattcttacagtgcaccagagtcaactcctagtgcatcctcaagacctgaagattactttataggtgccactcctctgcagaaacgattagaatcggtcaggaagcagagttcatttatcctgactccacctcgaaagaaaattccccagtgttcgcagttgcaggaagat

SEQ ID NO: 45648 - DNA, 493 bp, Homo sapiens
ggccgcccgggcaggtacttgtcctgcctccacctctagagcaacatggtcaccgtcccttgaaggaccgaatttgcagccttcaaacggctcagtgtctccaaccaactgaaaaagtctgaagaaggaggtttagaaaatactaattgaatataataaagaaaactagaacatgtcagaaagacatttgaaaggaagttagtatgccaatgaagaggtggaatgatcaaagattttagaggcctaaatcctttgatgccacactgaggaaagtccttcccaacgtgcttagagcatctggaagcaggtctgtttattccggcagtttccagacctggtcttgccatgggcaggggtggcgctgctgctccctcttgtttatagaagatgcgggacaaactgagttgcttttgaccagctgccaatgaagagcacttatgaaaatgggagtgctcagtaaatagatcttgagttgaagagatggaattcactg

SEQ ID NO: 45649 - DNA, 460 bp, Homo sapiens
atagctgtttcctgtgtggaaaagaagggctacaccgcgggggctgccggccttatgggccctcgggagcctacacttgccaaccaaccccacatccctcccggctgtagccaagaactattcggttctctacttccaacagaaggttgatcattttggatttaataccgtgaaaacttttaatcaggggtacacctgccctccttcttgagggtcccagcctgcgatgatgattcccgccatcaggtcttcccggtatcggtaacacatgtccttaaagaggctggctgctgtgtggaccagtggaggctcattcagttcaatgctgtggaaaccgagctggtaggtgacagcatcagctactgcctgggtatcagcagctgaacctgagcgacagcagaaaatgcggtcgtgaataggtgtcagcttgtcagtcactcgattggcgatgtaggaccca

SEQ ID NO: 45650 - DNA, 646 bp, Homo sapiens
gactcactatagggcgaattggagctccaccgcggtggcggccgcccgggcaggtactggctgctcccaccctcgcacgcaccctcaatacccacgggtcaccctggaagccgctacattctggctggtagagtcgtggaccctcttctccttggatcagatgcttgtttttgatgtcggcttgttgtggaccaatgtgagaagatgagcttcctgggaattcattcgtttgcttgtggcactaactctagtcacttagggaaaatatcgttgcacctgacttcatctcatgtggctgtgggtagacctgtgcagttagtcagctcccggcctggaaattaacacaaaggaaaaacctgaccacacaggccttcagggaagctgtggtctgagggtggctggtagaactgccagagagtagggcattttccatggctccagatcaccttctgaaaatgcgactatagcccctgcctattcccggggtccacctggtctgcagaccccataataccaggaagagctgggtgttctggcaccagtgaaacaatacctggttttttattttaaaccagcccatcttccccgctgcagttggaaccgttctacgtggatttgggatcaaccagcaggcctttcctgagct

SEQ ID NO: 45651 - DNA, 520 bp, Homo sapiens
gcgcgtaattacgactactatagggcgaattggagctccaccgcggtggcggccgaggtacaatgccattggaggcaagtataaccggggtttgacggtggtagtagcattccgggagctggtggagccaaggaaacaggatgctgatagtctccagcgggcctggactgtgggctggtgtgtggaactggtgagaggggtagggcaagggagaagaagtttcctgcaatggtggtgacttgggtgggaaggggagggatgggcctgaaacttatttctgggttgtgtttgtgtttctttgtctctagtgtgctacggccaaatttagagtgaatcactccaagggttaactaatgtggggagcctcttttggcattaggtatgaagatggctgtagatagttgtagacagtgtggactggggcctcgagactgggcagagaggtgtcagctctttcctctgagcagaggatggctataaaagtgacagaggaggccgggcatggtggctgacacctgca

SEQ ID NO: 45652 - DNA, 471 bp, Homo sapiens
cgcgtaatacgactcactatagggcgaattggagctccaccgcggtggcggccgcccgggcaggtacagctccacgggcatggccagcagcagggtgagcaggtcggacagcgccaggctgcccaggtggtaatgcaccgtgctctgcaggctctgcagcgacttcttccgcgccagcgtgaacgccgtcaccgtgttgcccaccgtgcccaccacgaagagcgccaggtacattcccactttcaccccctgaggttagaagaggccctaagcaacatgttatccacacatggttgctccaggtcaagtcaccaaagctacctctctgtcacccttgtcatggcagatttgggctgctctgtttagaatcaggcacatgagggagggaagtcgtgtattgacccatgtcccacgcaccctctcatctatgttatatggtggatgcttcacagaagccctgggaagtagatg

SEQ ID NO: 45653 - DNA, 679 bp, Homo sapiens
acgactcactatatggcgaattggagctccaccgcggtggcggccgaggtacaatgatgtgactgcaaagaaaatgactaaaacaaaactttacaaacatcttcatgtttgtaatgtattaatgcacaaaatatcaaaaatagaaagtctgagtttcttccccgcaggtttatgataaactatcaaccttctatttaatgcatttccttttttttttatttatagagatggagtctcgctatgttgcccagactggtcttgaactcatgagctcaagcaatcctcccacctcggcctcccaaagtgctgggattaccggtgtgagccactgcacttggccttaatgcatttacttttataagccttctctgtttagaagtactattagccatggtcaaccccaccgtgttcttcgacattgccgtcgacggcgagcccttgggccgcgtctcctttgagctgtttgcagacaaggtcccaaagacagcagaaaattttcgtgctctgagcactggagagaaaggatttggttataagggttcctgctttcacagaattattccagggtttatgtgtcagggtggtgacttcacacgccataatggcactggtggcaagtccatctatggggagaaatttgaagatgagaacttcatcctaaagcatacgggtcctggca

SEQ ID NO: 45654 - DNA, 580 bp, Homo sapiens
taatacgactcactatagggcgaattggagctccaccgcggtggcggccgaggtactggtgtaagcccctgtgtttccaaaagttaagttgctcaccaaatgcaacagagcctgttccaaagaaactgcccctgcattttttccaatcaggtagatactatgttgaactcctttgattttgagacagggtctcctgtcacccaggctggagtgcagtgatacaatcacggctcaccacagcctccacttcctggcctccagccattgccccgcctcagcctcctgcatagctgggaccacaggcatgcagcactatgcctggccaatttttgtattttgggtagagacagggtttcgccatgttgcccaggctggtctcgaacgcctgcctaagcctcccaaagtgctgggattacaggcgtgaaccaccccgcccagccccatgttgaactcttaactgccaagcagagaaaaaaaaatccttaccatactaagacaactttaatgatactttcacctttgggcaaagggaaagcattcttgaatatatcttaagaaccaagtcctcaaatactgatga

SEQ ID NO: 45655 - DNA, 713 bp, Homo sapiens
cctaatacgactcactatagggcgaattggagctccaccgcggtggcggccgaggtacagatggaactctgcaaacctccacagacttctccaaattctggaaaactctctcccagtagcaatggctgtatgaatacacttcatatcagcagcacaaacactgtcggggaagtgatcgaggccctgctcaaaaagtttctcgtgactgagagccctgccaagtttgcactttataagcgttgtcacagggaagaccaagtctacgcctgcaagctctcagaccgggaacatccactctacctgcgtttggtagcagggcccagaacagacacacttagttttgttcttcgtgaacatgaaattggagagtgggaagccttcagccttccagaactacagaatttcttgcgcatcttggacaaggaagaagatgaacagctgcagaacctgaagaggcgctacacagcctacaggcagaagctggaagaagccctccgtgaggtgtggaagcctgattaaagcggggctccctgcccgtgaggcccggtgcaggaccgatgtacctgcccgggcggccgctctagaactagtggatcccccgggctgcaggaattcgatatcaagcttatcgataccgtcgacctcgagggggggcccggtacccagcttttgttccctttagtgagggttaattgcgcgcttggcgtaatcat

SEQ ID NO: 45656 - DNA, 521 bp, Homo sapiens
tacgactcactatagggcgaattggagctccaccgcggtggcggccgcccgggcaggtaccaacttgccagactcttgtgctaccattttaacggattcttcaggatcaacatgaaaaattaagtttaaaggaaaactagtgtttttcaaaaattgcaaaattacttcgtatttttaaagctaaacaaggcatttttaaaaaaaatttaacataaacattcacaatgtgtccctcgaatggcatttgagaaaagggagcacaggggaagtctcttgcttttcctattcatggtgggcaggaagtgagacaaccaagctggactaaaggcaactcactgtgcccaaatggcagcctccatggagttaagttagagccattgactgctatagaaagcattattacaacatatcagtatttgctattgggaatttatattttttgagaaaatatttacctatgcaatgtttgattgaaaatcactggagttttcctgtaaaacttggtcgtatccactcatgct

SEQ ID NO: 45657 - DNA, 610 bp, Homo sapiens
  misc_feature 24: n = A,T,C or G
gactcactataggggcgaattggnagctccaccgcggtggcggccgcccgggcaggtactccagcctgggcaacaagagtgaaactccgtctcaaaaaaaaaaaagaaagaaagaaagaaagaaaaagctcatcaacaaggccatcgagtccctgcacgggcagcccctgccactctcccctgcacccacacaccatctgcgtggctttcttcccttggagggaggtatcccaagcatgttcttactcctgcccagacactctccccagatcctggcacagctgcctcctccttaggattcaggtctcactgtggatgtccctgtgagagccactcccaggtgttgtccatcgcattaccctatcctgtcatgccccccagcacttagaagcatctgagattatcttctattgtttctccaatttagtgtcagctccatgagggcaaggatttgtgtctgttctgtttattggtaaatccccattaaaactattcctcagggctgggcgcggtggctcacgcccgtaatccctgcactttgggaggtcaaggcaggtggatcacgaggtcagcagatcgagaccatcctggctaacatggtgaaacccgc

SEQ ID NO: 45658 - DNA, 646 bp, Homo sapiens; identical to SEQ ID NO: 45650

SEQ ID NO: 45659 - DNA, 699 bp, Homo sapiens
ctatagggcgaattggagctccaccgcggtggcggccgcccgggcaggtacttgttataaaactacttacacccatgtagaatgtgcattttgcagcattaacaatttgtgcatggtggttctattgcataatatatactgaaaaaccatcatctgtaaatcattacaaaaataaataaaacactttagtaacctgtgaaaatctaacaggcaagttaatgaacaaccacaattacacaaaattgtcagtgaaattctaaagaattactgcttatgaactacagaaaaaacagaagggacacacaataggaaaaataatatgttgagaatcactaaattttgaaatatcagcttcaggtaaatgcacattactataaagatgaagaattaggaggggagtctgaaataatttcatgcctgcagttatatgacagcagtatatagagaaactccctgactaggaaatgtcatctagttttccagttctatggccaaaaaaatacatataatgaaagctgtgtgctttaacattttattatgtagagtcagagaaatgttgatatgaaaaaaaaaattacaaaaaagaaaatatgtaagatataatgcaggcaaaggtcaatctcataagaaacatgacacttgacatatcttattcataaaggtaacttttcaaagcatactaaatgctatgcagttact

SEQ ID NO: 45660 - DNA, 448 bp, Homo sapiens
ttggagctccaccgcggtggcggccgcccgggcaggtgaagaagataacccagtaatacgatcatacttcaaacgtgctgatccattctatgatgagcaggaaaatcacagtctcattggggtggccaatgtcttcctcgagtcacttttctatgatgtgaagttacaatacgctgttcccatcatcaaccagaaaggagaggtggcaggtcggctgcacgtggaggtgatgcgactcagtggtgatgttggggagaggatcgcaggaggcgatgaggtggcagaggtctcctttgagaaggagacccaggagaacaaactggtgtgcatggttaaaatcctgcaagctactgggttgccacagcatctgtcccactttgtgttctgcaaatacagcttctgggatcaacaggagccggtgattgtcgctcctgaagtggacacctcc

SEQ ID NO: 45661 - DNA, 495 bp, Homo sapiens
  misc_feature 455: n = A,T,C or G
tacgactcactatagggcgaattggagctccaccgcggtggcggccgcccgggcaggtacattcagatcataataattcttaaaatgaattatttcctcaataaacccatttgctacatctggaaatcttgcttccgtttctttcactagtagttcaacgagctcttgatctacctctgcagcttcttgcccccaaatgttttccaaattgggctcttgagattcttgcattggaaaggctggacctggctcttcatcatcacttgctaactgctggtcttcaaactctcctagaggatgggcaggctgaggagaagaggggcctgaaatcccaccttgctggggttccggccttggaaaagcgggccctgggaattcatgctgaaacaacaagcggcccagttctgcttcaggctgccgttcctgaggaacgacctggtttgttatttcacggngctgttggttcagagactggaagtaaggatgatctaacca

SEQ ID NO: 45662 - DNA, 483 bp, Homo sapiens
  misc_feature 33: n = A,T,C or G
agcgcgcgtaatacgactcactatagggcgaantggagctccaccgcggtggcggccgcccgggcaggtggcggcctacctgcagtggcggcgcttcgttttcttcgacaaggagctggtgaaggagccgctgagcaatgatggggccgctcccggggccacacctgcttctggatccgctgcttccaagttcctttgcctccctcctggcatcactgtctgcgactcaggccgagggagcctggtctttggagatatggaaggccagatctggttcttgccacgttccctacagcttacaggcttccaagcctacaaactacgggtgacacacctgtacctcggccgctctagaactagtggatcccccgggctgcaggaattcgatatcaagcttatcgataccgtcgaccttgagggggggcccggtacccagcttttgttccctttagtgagggttaattgcgcgcttggcgtaatcat

SEQ ID NO: 45663 - DNA, 643 bp, Homo sapiens
cgcgtaatacgactcactatagggcgaattggagctccaccgcggtggcggccgaggtacccaagtcggggacatgaagttggacggaggaagacaatcaactggtgtagtgagtttgaaagagatcattggtctggaaggtgtggagctgggtgctgatgggaagactgtttcctatacccaatttctgttacccacaaatgcctttggagcccggagaaataccatagactccacctcctctttctcccagttccgtaacctgagccaccgcagcctctccataggccgggcaagcggcacccaggggagcctcgacacaggtagtgacctgggagactttatggactatgacccaaatctcttggatgacccccagtggccttgtggcaaacacaaacgcgttctgatcttcccttcctacatgacaacagtgattgactacgtgaagccctcggatctcaagaaggacatgaacgagaccttcaaggagaagtttcctcacattaagctgacactcagcaaaattaggagtctgaaacgagagatgcggaagcttgcgcaggaggactgtggccttgaggagcccacggtggccatggccttcgtctactttgaaaagctcgccctcaaggggaaactc

SEQ ID NO: 45664 - DNA, 536 bp, Homo sapiens
  misc_feature 73: n = A,T,C or G
cgactcactatagggcgaattggagctccaccgcggtggcggccgcccgggcaggtacgctctgtctccaaantgaaaaagacttctctgccctcaagggaaccccacagtatcttagaggagacaatcatgtcggtgagatggtgtggtgatgaagcctgctgggtatacagctcagggaaagtcatcgatgatggctcaggctcagcctgggcacgccccagaggagagagatggagtggggcctcaaagggcaggtttaggcagaaaagaaaaagggcattccagctggggcatgtgcaaaggcagcacgtaatgtgtaagttctagatcgtcagggaggaagggtcagttgggtgcctgtttttctgtttttagtcctttaaaatgagtagaagcaacctgttaccctggaaagagcactggacatagacctagtgctgcgtgatgttgagcacgtttcttcttccctttgagtcccagtttcccttttggttacagggggatagtagcccccagggatcatgtgaaagtga

SEQ ID NO: 45665 - DNA, 441 bp, Homo sapiens
ttggagctccaccgcggtggcggccgatctggtagcccggagtcgtttcagaagagtcctgggatgcttggggtggcgtgggcttgcaaggcgctgctggtttttgccggggatttactatcacgtagtagtgaagttatgggggctctatggcacagagcatcactgggactccgggaccgatggtggcgcccagtgaggatgcccactagcattctgccccagttggttggtggggggacacctgaccactgagcctttggtaaccttattttttatagtaagtacctcggccgctctagaactagtggatcccccgggctgcaggaattcgaaatcaagcttatcgataccgtcgacctcgagggggggcccggtacccagcttttgttccctttagtgagggttaattgcgcgcttggcgtaatcatggtcatagct

SEQ ID NO: 45666 - DNA, 326 bp, Homo sapiens
ttggagctccaccgcggtggcggccgcccgggcaggtacttttgtctcctccaccccacccccatcattagactggcaatgtcttttgtcacgttgtcaaagtgtcctcagagaagcggtgtctagatatcgccgatttctggttaaagtggctgaagtgatcccagcattaattaaatgcaggagaatcgagattctcctgatagtttaaggaaaagaaaaattcacacaagcaaacgggcaaccctttgaatgttttccgacgacgtggtgctttaggatctgaaagatgcgacttggttgttgttgttgttgttgttgttgtt

SEQ ID NO: 45667 - DNA, 414 bp, Homo sapiens
  misc_feature 291, 293: n = A,T,C or G
gacttactgtttggctgattggagctccaccgcggtggcggccgcccgggcaggtacaaaaaagatgaaagttatgattggaataagaaatactatgcaaacattggctgaaatatggttaaaatacctgatatattttatcagaaaaagtagagttgaaggtaaaaatgaaaaatactggagttatgaagacattgtacttaccttagagttttccaatttatctcaattttatatggcttgtgattcattttcttaatccaaatatatataaacgtgtgtggtcttaananaaaaaaaaaaaaaaaaaaaaaaaaaaaaaggttttgcccccggcccttttaaaaaaggggggccccccgggggggggaaatttttttttcccctttttaaaccccccccccccgggggggg

SEQ ID NO: 45668 - DNA, 482 bp, Homo sapiens
ttggagctccaccgcggtggcggccgaggtactgagggaccagccccacagcaatggtgccccggactccactgtccacaatagacacctcaaaataattgctgtccttggtcaggggtcgagaagccacgtagcagccaacttcaccagagtttccatgataacttaaagtatctccatctacaaggatatgtttgaacctctcctgatatcggaaagctcggacctctcgaatctcccggatccgccggcgccaattcagaaaccggtagtgcaggttgggtcatccatcttgtcatgagaacaaaccggggccgccgcgtcctcctcatccataggcctctcagctccgcacacaagctcttcggccgctctagaactagtggatcccccgggctgcaggaattcgatatcaagcttatcgataccgtcgacctcgagggggggcccggtacccagcttttgttccctttagtgagggt

SEQ ID NO: 45669 - DNA, 666 bp, Homo sapiens
gtatacgactcactatagggcgaattggagctccaccgcggtggcggccgtgaccaccaccgccactccggccccgatcatcacgccaagcaccattccagtttgcagcggagcctccatcggttgattccagctggacggccgatctggtagcccggagtcgtttcagaagagtcctgggatgcttggggtggcgtgggcttgcaaggcgctgctggtttttgccggggatttactatcacgtagtagtgaagttatgggggctctatggcacagagcatcactgggactccgggaccgatggtggcgccattgccaggggccgcagccggggtccactccgcgccaacaccgatagcgttccacccggctccgcaggcacctcggccgctctagaactagtggatcccccgggctgcaggaattcgatatcaagcttatcgataccgtcgacctcgagggggggcccggtacccagcttttgttccctttagtgagggttaattgcgcgcttggcgtaatcatggtcatagctgtttcctgtgtgaaattgttatccgctcacaattccacacaacatacgagccgggagcataaagtgtaaagcctggggtgcctaatgagtgagctaacttacattaattgcgttgcgctcactgcccgctt

SEQ ID NO: 45670 - DNA, 314 bp, Homo sapiens
tagattggagctccaccgcggtggcggccgcccgggcaggtactcggcaaaagtcagcacatagcacttctcctcaatgcaggccacactgttctggtcctgatgtcgcgatgcaaacacttcattctgcaagggctcaaagggagacaggtggaggttgttaccaaggctggaaagcacctcattcccagagcaaggcagacattaccccctgtggtgggcctgctgacctgagatgactccagcaagctggcgtagaaatgaacactaagtatgcctcacctactgtcttcaggcattcctcctgagtccct

SEQ ID NO: 45671 - DNA, 439 bp, Homo sapiens
gctccaccgcgggggcggccgcccggctggtacgcgggctcccccgcgggccctgtgggggcggggtcaggacagcagaccgttttattgcttaactcagtgggttggaagctgtaaccccgacatgggcttgcgctacgtcctgcccctccgacccccgggaaaggtgtaaagagatgcattttagttttgagctgcagctgaagaggaactctcctccaagtgccaagactgctcccctcctccagtcagctctcttggaaccagaaacttcctcctgggtggtgttgagaatcatggtgatgctctgcagaaaacctctcctctacattcacggcatggtgtaactcccacctccggaaggcggggacacagatcgagaacatcgaagaggacttccgggatggcctgaagctcatgctgctgctggaggtcatct

SEQ ID NO: 45672 - DNA, 533 bp, Homo sapiens
  misc_feature 66: n = A,T,C or G
cactatacggcgaattggagctccaccgcggtggcggccgaggtactgattatcggtccagcctcnaaggccgcagcgatagggaggccccaagctgcagggccaactctgaggagttcatccccatctttgccaataacccgcgagagctgaaagccttcctagagcacatgagtgaagtgcagccagactcaccccaggggatctacgacacactccttgagctgcgactgcagaactgggcccacgagaaggatccacaggtgaggcctggccagggcttcaggagaaaagacagttcgtgccgtctccattcttccgtcttggtggctgcctttcactgcattccttagaccagtaacaccttacctcggggctcaatggtcctctgtgaagagggaatggactgagggaaagagttgactggctttgtcccaagagaccttgtgattttccccttttgtccagcagctctgccctccttcctctccaggtcaaagagaaactttacgcagaggccatttccctgctga

SEQ ID NO: 45673 - DNA, 409 bp, Homo sapiens
gagctccaccgcggtggcggccgatcattgttcacgcctctccttcgcgtatgtgttttctactgttcttgcactgtaaaggcagaggttgcatcgggcccttatgcaaagccccaaataattactggctgactcttctcagggaacatttgctaaccctgtcacaagccataaggttacaccacagattgccctgtggctctctcgttacgtttctgtgtggacgtttccacatggtctgaggcattcatccaagaagagcaggatgtattagtgactgcacagattctgccttggcccacaaagaggacatccagggcagtcctggtcatctgtaataacattgcccagtgagttgaggctgacctgagtacctcggccgctctagaactagtggatcccccgggct

SEQ ID NO: 45674 - DNA, 586 bp, Homo sapiens
ctcactatagggcgaattggagctccaccgcggtggcggccgaggtacagaatgaaatcaaatcaatgaagaaaagaatgagtgagctatgtattgattttaacaaaaacctcaatgaggatgataccttccttgtattttccaaggctgaacttggtgctcttcctgatgatttcattgacagtttagaaaagacagatgatgacaagtataaaattaccttaaaatatccacactatttccctgtcatgaagaaatgttgtatccctgaaaccagaagaaggatggaaatggcttttaatacaaggtgcaaagaggaaaacaccataattttgcagcagctactcccactgcgaaccaaggtggccaaactactcggttatagcacacatgctgacttcgtccttgaaatgaacactgcaaagagcacaagccgcgtaacagcctttctagatgatttaagccagaagttaaaacccttgggtgaagcagaacgagagtttattttgaatttgaagaaaaaggaatgcaaagacaggggttttgaatatgatgggaaaatcaatgcctgggatctatattacta

SEQ ID NO: 45675 - DNA, 299 bp, Homo sapiens
agctacaccgcggtggcggccgatctggtagcccggagtcgtttcagaagagtcctgggatgcttggggtggcgtgggcttgcgaggcgctgctggtttttgtcggggatttactatcacgtagtagtgaagttatgggggctctatggcacagagcatcactgggactccgggaccgatggtggcgccattgttggaaaattcctgggtggccggtcctcttccacctcagggcacagctggctaccggtgtggaaacacccaggggccgcagccggtgtccactccgcgccaacacc

SEQ ID NO: 45676 - DNA, 437 bp, Homo sapiens
tgctgtattgaacagagatagtattattccttctaggcatagtagggaggatatgaggtgtgagcgatatactagtattcctagaagtgagatggtaaatgctagtataatatttatgtaaatgaggggcaggggatgtccaaaccggacacacacagcacacaaaagaaaccgacaaatcgggcttccttaaaatgccaaacttctttcatctaaagccagcatgaggaagacaactgggtcagccacaaactgagagaagccatcaacggggagaaggtgaatactctggcttaatggcagggaagacatgagcaggtgttttatgaaaggtgacatgcagatgggcagtggaacggccagcctctttcttgccgctgtcctaaagaaatggcaatactgtcactgatgaggatgtataacgagagggggctctg

SEQ ID NO: 45677 - DNA, 505 bp, Homo sapiens
atacgactcactatagggcgaattggagctccaccgcggtggcggccgaggtacacccactctgccctcccagggtgggctcaccttggttgctgttcactttcctgtaagggaggggttcatttccaacgttgtatagatagcaaagagaggcccacaaggcatgggaccatctttcaccccaaacaatcactctgagtttgtgaatattttccggtcatggaaagagatttccaaaaattagctactcttcattgtttattcattgttagattcagtaacctcaggggagcttaaatatctaccatggcagcgtgattgtcacagcttcagctcttagggcaggacaactccacacttgtatattttaggatctttgcattgacaaatgttaatggctgttggtctattggttcagcaagattttgcaattcctgatgttcacagacctccttcccttctcctgggctctgtattcatacacagcacccatttggactgggac

SEQ ID NO: 45678 - DNA, 609 bp, Homo sapiens
gactcactatagggcgaattggagctccaccgcggtggcggccgaggtacaagcttttttttttttttttttttttttttgagacggagtttcgctcctgttgcccaggctggagtgcaatggcgcaatctcggctcaccgtaacctccacctcccgggttcacgcgattctcctgcctcagcctcccgagtagctgggattacaggcgtctgccaccacgcccagctaattttcgtatttttaatagagacaggctcttgccatgttggccaggctggtcttgaactcctgacctcgggtgatccacccaccttggcctcccaaagtgctgggattacacacgtgtgccactgtgcccggcctctgaaacatttttaaatgaaaaaccgttgtcacagagtttggtgtgagtgtccacttttagaggggtgaagctgttgcctgccttctctcactccttccctcaaaacaaacgcacaactcagaaataagttgtaaaaaaaattttgttatttataaatcaattacacaataaaataattatttttaaaagtcacaaatacaatcgttgtataaagtcattttggcatcaagtatctcttaaatat

SEQ ID NO: 45679 - DNA, 504 bp, Homo sapiens
gtaatacgactcactatagggcgaattggaactgcacctccaccgcggtggcggccgccgggcaggtacctgtgcacatttcaagatagcagcactcagtccatgccctattatccatcttaaaagttcacacattattgtttactgaataatatttctactgtctttacccccaaacattgcaaaacctgcaatggaacaatgctgtgagttataatgtagaaattttttttttttttttttttagaaaatcacttacttcattttcttaatattctgaattcaagttatcagatctctatacctaggtcatactcgtgaagcaaaaatgctgcacaccactgaaaataataacgttatagatgtctatcaagattcatgaaaaccatccaggcgcagtggctcgcacctgtaatcccagcactctgggaagctgaggcgggtggatcacaaggtcaagagatagacaccatcctaaccaacacggtgaaaccctgtctctac

SEQ ID NO: 45680 - DNA, 463 bp, Homo sapiens
tacgactcactatagggcgaattggagctccaccgcggtggcggccgcccgggcaggtcctccctgtgctgtctgcaccgaggagagcggcctgccggtgggccaccatatctggaaactacagtctatgctttgaagcgcaaaagggaataaacatttaaagactcccccggggacctggaggatggacttttccatggtggccggagcagcatcttacaatgaaaaatcagagactggtgctcttggagaaaactatagttggcaaattcccattaaccacaatgacttcaaaattttaaaaaataatgagcgtcagctgtgtgaagtcctccagaataagtttggctgtatctctaccctggtctctccagttcaggaaggcaacagcaaatctctgcaagtgttcagaaaaatgctgactcctaggatagagttatcagtctggaaagatgacctcacc

SEQ ID NO: 45681 - DNA, 482 bp, Homo sapiens
aatacgactcactatagggcgaattggagctccaccgcggtggcggccggcacgaatggcatgggagggttctctgcacgggacggcataacggcatgccatccttcaggctggcaggagcctgcgcaggtgtggcaaaatcttgaaacagcctgtgtcctgcctggcttttcactttcctatttaatataagaaagcacttttttttctgctttacctacaaatgggttgaaaatggcctcctctgtcctctcctctcttttatacactctgtaaaatcacaaaggtgcttcaacaccgactgtcatgcaaataatacatttaaaatagttgcatggtttcaaagacaatgcagacgtaattggcctttgactttgggacctcgggttactctcactccctactgcaaaacaaactaagggttgaaagcaaagcattctgttcaaatccagggccctttgtttgaaaagaacacagggccc

SEQ ID NO: 45682 - DNA, 568 bp, Homo sapiens
  misc_feature 561: n = A,T,C or G
ggagctccaccgcggtggcggccgcccgggcaggtccgcgagcccgtctctcctcgaatgaaaggaaataacctccggcgacagagccccgctctcaggcactgctggagaaccgagaccgacttctttctctttaccctcattggcgcttctctcctgcagtccgcctctgggccctgccgcatttcttgagacttaaagtggcattctaaaggcaatttaaaaatcatgtcaagctcagttgaacagaaaaaagggcctacaagacagcgcaaatgtggcttttgtaagtcaaatagagacaaggaatgtggacagttactaatatctgaaaaccagaaggtggcagcgcaccataagtgcatgctcttttcatctgctttggtatcatcacactctgataatgaaagtcttggtggattttctattgaagatgtccaaaaggaaattaaaagaggcacgaagctgatgtgttctttgtgccattgtcctggagcaacaattggttgtgatgtgaaaacatgtcacaggacataccactaccactgtgcattgcatgantaagctc

SEQ ID NO: 45683 - DNA, 478 bp, Homo sapiens
aattggagctccaccgcggtggcggccgcccgggcaggtaccttggccaggtcttcgccaggcaccacagtgggaggctggtaattaacgccaaccttgaagccagtggggcaccaatccacaaactggatggtacacccctggggctgtgcggtggccgtcggcggggccagcttcaaagtccaacccacaaggcacaggttttcaaatctttacctctgtgtactgcctatgttcaagaacatagacctggtatggtgagaacaaaaggttcctatgccaaatccagatggctatatcatttgttggctacaagtgagcctgactgcaaggtttgcttctgctgagaaatcccatggtgagagtagaactcatgaagtgctgagtcacatttgcacctctggtgtggtggcagttcactctcccctggatgctgtcagctggccttgctttcattctatcccttgaggcagggtag

SEQ ID NO: 45684 - DNA, 462 bp, Homo sapiens
agctccaccgcggtggcggccgcccgggcaggtcgcaactgtgtgatttgcttgttgagttttttgttgtctggtttttttgtttgtttgtttataccaataagaatgagccaccacacctgatcaaggacctatgttcctaaggagctccctggtaatgctaatactgctggtccacggaccacacttttgagtagtgagggcctgtgttcagcagcacagtagccaggagccacgtgtggctgtttcagtctccgtcttagttaaataaaactagaaaatccagtgcctcagtgactgtaattgcattgcatggaggaaagttctaattgggcagtgccacatcttaaaggaccgaatgatccactttttctttacttttaaattttctttctttatatttttagagacggggtcttgctctgtagctgaagctggagtgcagtggcactatcttagctc

SEQ ID NO: 45685 - DNA, 542 bp, Homo sapiens
  misc_feature 523: n = A,T,C or G
cgactcactatagggcgaattggagctccaccgcggtggcggccgcccgggcaggtacccaaacctccccaagccctctgcattgcagacactgcagcctgcttggctacccctccccaacacactagattactatgtcaaatagacctgcaaaagggaaaggtgcacactcaggtccctgaagagcaaagaagttggacactgcctgctcaagaagttcattgttataagactcaggtattcataaaaggcctagggctaagctagtagcacagaaaagccgttaaggggatcacagcagaatacacagggcagaagagaagagttggcagcaggggaacggagtctcaaggtgaccagtagagagcacaacattctcaaatagtccttgaggtgctgattcctgggagtagtcagcagagggccagaacatctcccaggggtccttttggggaaggatgacttcactaagttttaggggtgaagagccactgagctgggtgcacagaaagccatggctcanaaaggaaagactgatctga

SEQ ID NO: 45686 - DNA, 528 bp, Homo sapiens
gcgtaagacgtgttttgcgaccaggcaccaccgcggtggcggccgcccgggcaggtgtgcatgggagagagtgaagcacaagggcccaggcccctgggagtgcctgccctcaagttggaagagcccttgggcacagcataggcgcctggcagaattggactgggccatgacccagggcattgggacctcacctaggagttggggttctggtcagaagccctgtggagacagggtctcctctgtgggcaccaaactgacctcaaactgctggttctttggccctggggacggggcttgttgaagtacagcattgaccaatttgacatatggaattctgcctacgtttatatggacgctgttgatgccggcaatattgctacttcgcttttttgcaaatgcattcactttgacaccatataatggaacagaagctctggtatggcttttccaccaaaagcctgaatctctcaatcctctgatcaaatatctgagtgccaccactggctttggaagaaattacattatgac

SEQ ID NO: 45687 - DNA, 595 bp, Homo sapiens
cttacctgtgtggctgagaggagctccaccgcgggggcggccgaggtacagaatgaaatcaaatcaatgaagaaaagaatgagtgagctatgtattgattttaacaaaaacctcaatgaggatgataccttccttgtattttccaaggctgaacttggtgctcttcctgatgatttcattgacagtttagaaaagacagatgatgacaagtataaaattaccttaaaatatccacactatttccctgtcatgaagaaatgttgtatccctgaaaccagaagaaggatggaaatggcttttaatacaaggtgcaaagaggaaaacaccataattttgcagcagctactcccactgcgaaccaaggtggccaaactactcggttatagcacacatgctgacttcgtccttgaaatgaacactgcaaagagcacaagccgcgtaacagcctttctagatgatttaagccagaagttaaaacccttgggtgaagcagaacgagagtttattttgaatttgaagaaaaaggaatgcaaagacaggggttttgaatatgatgggaaaatcaatgcctgggatctatattactacatgactc

SEQ ID NO: 45688 - DNA, 484 bp, Homo sapiens
ggagctccaccgcggtggcggccgcccgggcaggtacttctagatgctgtattgaaattgctggcagagtttattctatacaaaatgaacaatctggccccttgttttatttgtaaaggttcaatgtatctatgcctgcctacctcaatctgcaagggagtgtcagaaaggccccgcattcgccaagcccaaaagggagacacttcatctggaacaaaatagtggaagaaatggcgtctggggttcagtggggattcgcagagatacaactcgtcaacgaatcaaattcagtgatgacagagtatgcaagagtcaccttctcaactgttgtcctcatgatgtcctttctggaactagaatggatcttggagaatgtctgaaagtccatgacctggctttaagagcggattatgaaattgcatccaaagaacaagatttttttctttgaacttgatgccatggatcatctgcagtcattcattgc

SEQ ID NO: 45689 - DNA, 611 bp, Homo sapiens
tcactaaagggaacaaaagctgggtcccgggccccccctcgagagtacttctagaattaattaaggcggggagagggaaaaactatcattctgtacttgctttatgtgacaaaaccattaccccctgggctgattttgatacctaaaactgggcactaagagctcacattttaaggggtcataagcctatgtagaaaatccatgcgggtgaatgctgattgtgtaagacatgtctctggtgtgaaaggtatacacaattgatgagatacagcttgaaaaatgccttaagatacatgaagtggccatatccactacatccgtatatatagccgctaattacttaaagcactcgccatcgtacattaaggaattgcgtaaaatgtttagctgtatctgtaggctccaggtaacttaattttttaattgtattactatgatgttcagtaaatgctgagtgaacttacattctttaaaatacatcaaaagaggctgggtgcagtggctcacacctataatcctagcactttgggaggccgaggcgggtggatcacgaggtcaggaactcgagaccatcctggctaacccggtgaaaccgcgtctctactaaaaat

SEQ ID NO: 45690 - DNA, 459 bp, Homo sapiens
ggcggacctccagccaggtggcggccgcccgggcaggtaccaggagcccatggatggcgtgacccagcaggcagcacagaatgtacttaacagaacttttgtttcgcacaatacgagaggcttgaagaagtggagccctagctgggattcgcttttttgaggccggcgttgccctgccctttaggggtgcccacgctctagctgcggccccggctcccttcgcattgtcgttagaggatggtgtgaagcaacagagatccttagctttcaacgaattcatatttgtgatttcctgtttgtcaaaacccttcctgcccacctaggaagtggtgctggccaagcaagtttactgtctgtccacgcgaggtctttctgaaccttggggtcggtgagctctcccgttaggtaatttcagttcgctagaggttgagtatgggacaattcgtggcaccatagttt

SEQ ID NO: 45691 - DNA, 452 bp, Homo sapiens
gggcgaattggagctccaccgcggtggcggccgaggtactcaggtcagcctcaactcactgggcaatgttattacagatgaccaggactgccctggatgtcctctttgtgggccaaggcagaatctgtgcagtcactaatacatcctgctcttcttggatgaatgcctcagaccatgtggaaacgtccacacagaaacgtaacgagagagccacagggcaatctgtggtggaaccttatggcttgtgacagggttagcaaatgttccctgagaagagtcagccagtaattatttggggctttgcataagggcccgatgcaacctctgcctttacagtgcaagaacagtagaaaacacatacgcgaaggagaggcgtgaacaatggtcggccgctctagaactagtggatcccccgggctgcaggaattcgatatcaagcttatcgataccgt

SEQ ID NO: 45692 - DNA, 565 bp, Homo sapiens
cttgcagctccaccgcggtggcggccgatgtactgatgcacacacaaattcctcggctggtcagtttaccactgaggcctgtaaaatgatatgcctgcagaatggctttcacattttccaatttctcttccaatgcttcttgctcattgatctccactgtttggttgggttctacattggcaatacatgctttcacgctggctcgccggtgccgcaccacagccctcagctcatctcgcagacgccttagtttatgaatcttggttccaagagcaccttcctgggcctgcacgctctgcagctcttcagactgtttacgggatctgctcacttgggtctctagcctttccaagtgagctaaaacacctcctttggactcgccatctggacgtaaagggttcgcctgctccatctcagattcccaagggccttcccatgaagttgtctaggcaaccggtgatagggactccaatgtccttgccaggccagaagcgagaattcccgccatccacgtcttcaaaacctgcccgggcggccgctctagaactagtggatcccccgggct

SEQ ID NO: 45693 - DNA, 510 bp, Homo sapiens
taccactcattatacgactcactatagggcgaattggagctccaccgcggtggcggccgaggtactttgctttgattgaaggctgtagagctgagttaccaaaatttctatttcaaaggaaaccaaaccttaaaaaaaaaaacaaaaactgggctgggtcttccaaacctaccatgaaaccctggtgtgcaggctgcactcaatgacctcaacccaacaccgccctgagtgtgcttcttggaagagcctataagattcctggatggagaccccattggttcagcctcaagtctggcccgtcttcgaaaaaacaaacacatttgtaagctttgtgggagcttccaggcctgctctaagatgccttgcttgtcctttgacccatcagcatggagcacagtggttgctgtttggttctgcaggctggtggggaggccgcccatcgtggtggggcatctgtccagccccattgccactcagggcatccaaacaggaggcacccgctgggaaggg

SEQ ID NO: 45694 - DNA, 585 bp, Homo sapiens
gcgaattggagctccaccgcggtggcggccgcccgggcaggtggcggcggagggccgaattcccttttctcaacggcttgatttcagagctgggctggtctctgacaggctcagctggagagggacgggttgggacgcactgtccttttgcccttccccctccgcgagcagaagctgactccgcaggagcgagggtcgcagagctgggggatttcagtctccacatagttttggagccggacttttgaagaatgattcgtgaatccggaatgggtgacagcgtcatcacggcattttattgacagaccatggattcttacagtgcaccagagtcaactcctagtgcatcctcaagacctgaagattactttataggtgccactcctctgcagaaacgattagaatcggtcaggaagcagagttcatttatcctgactccacctcgaaggaaaattccccagtgttcgcagttgcaggaagatgttgaccctcaaaaggttgcattccttttgcataaacagggggctttatattagttaactcccttatataaattctcctattgtaatcttcaaagagtattct

SEQ ID NO: 45695 - DNA, 500 bp, Homo sapiens
atacgactactatagggcgaattggagctccaccgcggtggcggccgcccgggcaggtcctgagtctgaccatgagcccagatggggccacagtggcatccgcagcagcagatgagaccctgaggctatggcgctgttttgagttggaccctgcgcggcggcgggagcggggtgtgtgacctttgagttcagccaccttggccatggttgggtacaacaaattcatctgaatctacagacggcactgtttcagctgcattgcataaggcttgacaggacattctcgattgtgttagcttctgagtacaagcctcaccaagggcaaccccagaaaagtgaatgagtttgtcttctccaatcatgacttcctcgataagtttgcaacttccaagcttcaccagttctgggtgatcaaaggtagaggcaatttcaccacctgtgacaagagctaggcgttccacacctgcaaaatctgcatgctcaatagccatgacaccagc

SEQ ID NO: 45696 - DNA, 576 bp, Homo sapiens
gcgtatacgactcactatagggcgaattggagctccaccgcggtggcggccgcccgggcaggtacactgggcgctccttgctggaccacagaaaacaaatgggtaaggccacgtcttcatttattctactttgaaaccgtctgatttttctaagctgtttcagtagctcatgcgttgaataagtagccctggaaacactgacaatgaactctaggcttcactggagagatctcggcacagacgaaccctcttggcagaagcttccaccccacacttgggcctgggcctgtccatcattcactgtggatggggcctggggcaggggtggtcttcagagctctccagagagttccgaggtgcaaccaaggcccagcagcacgctgttctgggaagttgagtggtttattctgtgtaacacagaatactaagatagaaaacagacagggtcaaggcttacttagacacttgttcttaaagatgtgaattttctttaagagacagcagaattctaggaccagggcccttggcccaattctgtagtcagagaactttatgaatgcaagcagttcccatacc

SEQ ID NO: 45697 - DNA, 504 bp, Homo sapiens
acgactcactatagggcgaattggagctccaccgcggtggcggccgcttagctccctgcttatgcactgtggatgtctctcccatgcctgaggacaggctgtgggtggatgttttgcacggcttggcagctgtactggcagcggtcgcccaggaagccgggtaggcatcggcactggggctggttgccctggttgacagtgcaggtgctgttgttggcacagtagcccgcacacacctgctgggtgcatttggggcccgtgaagcccgtggggcaccggcacgtgggcatgccagagggggaggcagcacaggtgcccccattgcgacagtgctcccagcactggtccagttcacacttgtcacccgtgtagcggggttggcagcggcacttgggctgcctccgtgcattgaggaaacagctgccaccgttgaagcactgcatgttacaggttccaggccggggagcatctggggggcgttggagagggcacaggcacgcatgt

SEQ ID NO: 45698 - DNA, 611 bp, Homo sapiens
  misc_feature 25: n = A,T,C or G
cgactcactataggggcgaattggnagctccaccgcggtggcggccgaggtactgggaaatgtaatttttgatgagggagagtttctccaaggaggcaacatctgtaaagacctgcaggagttgagggcaggcgccattcatcttccagcctttgggcaggcctgcccacttctctccaaggaccttctcctgccctcatgtgggtcctctggtccagaatagacttgtgaagtcattgacaacaatcctcaaacactgcactcccccaagactgcataataaactcattcatactaaggtattagcagttcttcatggagaactcttgggtggggagccaagctctgaaaagccccgtgagggaatgccttatctcaggaaggagccctgggatgggaaccacccctcctccctgcctctctcccccacagagattgagtctcacattataaagcaagaagatatacttaatggcaaagagaatgagattaaagagttgcagcaagttatcagccagcagaaacagatcttcaggtgaggggtctgggcccggctgggggttgttgatgacactggggagccagacctctggcccctacctacccttggc

SEQ ID NO: 45699 - DNA, 372 bp, Homo sapiens
ggagctgcaccgcggtggcggccgcccgggcaggtacttggagggcttcttgatatggaagttcacgttgtccagctccacgttcaggctgatagaagcggctgagtcactgtccactgtggactggaaactgctgactgatgtgcgcttgctaggactggcagaattagccaaattatcgtcaccttcttcagctatctgttctgtgtcactgtcatcaaactttatgtctttaaaccaggatggctcagagtgtccttccacggagttcactgagtcactgtcgggagaaggcgtctcagaaaattctgtacctgcggaccaggagcaagctgtgggaaatggacaatatgcttatccagatcaaaacgc

SEQ ID NO: 45700 - DNA, 499 bp, Homo sapiens
gactcactatagggcgaattggagctccaccgcggtggcggccgaggtgcggagccgggcggaacgctagcggtgttggcgcggagtggaccccggctgcggcccctgggtgtttccacaccggtagccagctgtgccctgaggtggaagaggaccggccacccaggaattttccaacaatggcgccaccatcggtcccggagtcccagtgatgctctgtgccatagagcccccataacttcactactacgtgatagtaaatccccgacaaaaaccagcagcgccttgcaagcccacgccaccccaagcatcccaggactcttctgaaacgactccgggctaccagatcggccgctctagaactagtggatcccccgggctgcaggaattcgatatcaagcttatcgataccgtcgacctcgagggggggcccggtacccagcttttgttccctttagtgagggttaattgcgcgcttggcgtaatcatggtcatagct

SEQ ID NO: 45701 - DNA, 549 bp, Homo sapiens
accgcgggggcggccgtcctgcctggtacttcccaaacacaacatccatcctctcaccatgccgacacacaaaaaggcatcgcttctgggggccgggctggctgttgaccctcagcggctgcatgggctggcagatgatagtaagaggagtcgtctccccgagcccctggtcctcataaggccgcctctccaatactccatccccaaacgtgagagagttggacgacgatgtatttaagattgaataagaaccatgaaatatccaggtgctgcattcatcagccttggtaatgtaattctcaggcaggagtccagagcagccggtggttaaggacgtgccatagatccaaccctcgctggtgctggtctgctccattggagacatgaagatgaagtccccggggaccagctccagctcatcgtcattttgtggggtataggggtagatgacctgtaatgtctcatggttagcaaatcggatatcccgagaaaatatggtagccacccagtcccaccctagcttgacgtcaatgttctgggccagtttct

SEQ ID NO: 45702 - DNA, 439 bp, Homo sapiens
gagctccaccgcggtggcggccgaggtacttttatctttctggcctttgcttcaaagttcaatatcatgggtcttgtgctttgcatctcacattgcatttcacactccaaggcctatgatattgaactttgaagcaaaggccaatatcataggccttggagtgtgaaatcttgtgcagattacaaatatccctattctctaaagtatgctggactaataattgttaaataattgacttgtaacatgtgcttgccagctgactttcttctctaaggcatcctaaaactagggaaatgagactactggattctattcccagctctgccacttgatgctatatgaccctgggctgcccacatttcttctgcatgcctattattttcctttcctcacaaaaacctcatgggcttggctgcatatgcattgggggtggaccatt

SEQ ID NO: 45703 - DNA, 576 bp, Homo sapiens; identical to SEQ ID NO: 45696

SEQ ID NO: 45704 - DNA, 438 bp, Homo sapiens
ctcacttagggcgaattggagctccaccgcggtggcggccgaggtaccctgggcacctggcagccatcaccctcagccgcatggaggagattctgcatgagcacagctacatcgctgaggattatgtggaagaattacacaaatggcggtgtcctgattattatgagaataacgtccacaagatgcagctcccattttccagcaagctcctgggcagcactctgacctctgaggagaaacaagaaaggcggcagcagcaattgcggcggctgcaggagctcaatgcccggcggcgggaggagaagctgcagctggatcaggagcgtctggaccgactgctatatgtgcaggaacttctagaggatggccagatggatcagtttcacaaagctctgatagagctgaatatggactccccagaagagctgcagtcctaca

SEQ ID NO: 45705 - DNA, 430 bp, Homo sapiens
ttggagctccaccgcggtggcggccgacgtacccacaccctcagtgcagtcagacagtgacatcactgtactgcgacacctggagaagctgggctgccggttggtcaatcgcccacagagcatcttaaattgcatcaccaatttctggactttccaaaaactggctggacatggggtccccatgccagacaccttctcctatggtgggcatgaagacttttcaaaaatgattgatgaagctgagcccctgggctacccagtcgtggtgaagagcacacgaggccaccggggaaaagctgtttttctggcaagagataaacatcacctctctgacatctgccatctgatccgccacgatgtgccctacctgttccaaaagtggcgtgggcgtcaagtgtccgctgacataacaaggcaagcacttggctat

SEQ ID NO: 45706 - DNA, 455 bp, Homo sapiens
actatagggcgaattggagctccaccgcggtggcggccgaggtactaactacgtcctaaaaggtatggagaacaattaaggtggaaccttttttttcttttgttttagactccattcagaagagagaagaggggagtgactttatgtctttggaaaagtaataaggatttgcttgattcaagtcatgatactgaggctgagtatattggctagaaatctaaagggatgcgtgaggctgaagcgagtttatcactgggaacaagcttctagagcacagcatgttagaatttttgaaggagccaccgcgcccggcccatagatttggtttttgtttgtttttttgacatggagtctggctctgtcgcccaagctggagtgaactggtgcgatctcggctcactgcaacctccgtcttatgggttgaagtagttctctgcctcagcactttgggaggc

SEQ ID NO: 45707 - DNA, 485 bp, Homo sapiens
gcgtaatacgactcactatagggcgaattggagctccaccgcggtggcggccgaggtacttcctgcaggacaacctgccgagggcaccacctgctgcctcgaggtcactgcccagcaggaggagaagcaggaggatgcagccatctgcccagtgacagtgctccctgaggtaagcggggagtatcaccctgttttggtcacagcatctcctgtgaggcaggcccacccctgaggcatccactctgccctgggctttcctaagacctcccacaggctgggacattctgagattctgagctcttaggtctgtgctgaagcaatctgagtatgaagagcagccctgccctccagccactgtggcatcactggagacaacgcatggtgacccgggagctgagaaagcaggaggcaagagggaagggactaagtgtttacagagacttgagaggtggaactaccacaggcaggcacatctgtatccaggt

SEQ ID NO: 45708 - DNA, 423 bp, Homo sapiens
gcggccgaggtgggaaagaacagacaagccatgggaagttggcagtggggagatttccactgtggaaaccgcctgggaattccggccagcagcttcctccttcagccacctggccataccccttaaataagcccctcaccttgctgcctcaggaccttcaagattccatctgtgggctggccggcaagatggcaccagtggggacccacaccctggctgggcagaggtgctgctagcaacctctcttcctctataagaggaaatggaaaatgcagggtgtggaattgccctttggggtccttccttaattgaaggccaccttctcacaggtttcattctgcagggatttactggaatctattggtgctgctgcatgagtctgctgacaacctgactgcacaaggactgggtagcagactcctc

SEQ ID NO: 45709 - DNA, 396 bp, Homo sapiens
cgtatacgactcactatagggcgaattggagctccaccgcggtggcggccgcccgggcaggtttttttttttttttttttttttttgtagagaaacaagcggagttaaccgaagagggggtcgaggagagccggagtcggggacccaggagtttcctgtgtccagcgctgccggagccgcctgaggtgccatgtttcagaacagagtaagacccctggtaaagaagaactgaagatattatacagataccagatatagcctaattacaaagaaagcattaacctgcctctgaggtgactaaaggggaataatggtgattttgcgccgggctcggccgctctagaactagtggatcccccgggctgcaggaattcgatatcaagcttatcgataccg

SEQ ID NO: 45710 - DNA, 437 bp, Homo sapiens
gctccaccgcggtggcggccgaggtaccgacatggctgatacggttatcaagctctggctggaccacccctgccaccttgatattgaaaactgattgcatggcagtctgggtagagagtgcatggccaccactgacctgatgtacccactgactgcatttactcctgcactataaatagacttgggtgtccatcacagggtatgaaggctcgccacccctcttcctgacggactggacagaaatggttcctctcgtggcatgaaggactcaggtcagatctcccaaaggatatgctcagggaccagagaaaaagccagtgaagctgtgctcccagggttgcccatgaagtcaagtaggctagttttggaggtggtgtgtgaggacagggtcctggacaagatgaccccccctcaccgggcggtaatccagatccgta

SEQ ID NO: 45711 - DNA, 623 bp, Homo sapiens
gaattggagctccaccgcggtggcggccgcccgggcaggtcgcccaggctgaggctggcctcccactcagggctccgaaggcctattttattttatttgagacagagtctcgctctgtcgcccaggttggagtgcagtggcacgatctcagctcactgcagcctccgcctcccaggttcaagcgattctcctgcctcagcctcctgaatagctaggattacaggcgtgagccaccacgcccggctaagtttttgtatttttagtagagacaaggtttcagtatgttggccaggatggtatcgatctcttgaccttgtgatccgcccacctcggcctcccaaagtgctgggattacaggcgcctgccaccacgcccagctaatttttgtatttttagtagaggcgggtttctccgtgttggccacggtgacaactggtgtttctgccctacagttttcccactgtgatgtaggaaccagccccgtaaaacccaaataagaccaagatggccagttcacagatgcccaagacttgacagcagcccgagttctggcaaggaacagatggtactccaggatggctgcgctgtactcggccgctctagactagtggatcccccgggct

SEQ ID NO: 45712 - DNA, 605 bp, Homo sapiens
ggcgaattggagctccaccgcggtggcggccgcccgggcaggtacatgaaagacagtgtgccctctggaccacactgaaagtggtaatatcagttattctgacatcaaagtatctgcacagtagaaaaacactttgctcattatcagggattaagcaattctttcaaaatgtccagataactgaatcatcccattctgtctagtggaaatcccccagagatatgttgcgcacacacaccccatcttaggggcacactcagatgcaccccatcgcagtaagcagcagctgttgtcctgggtgcttggccagtggggcccttgggatctgttgggtgactgtgggacccagtttccttccagactttttgaattcttagcattcccctccctctttcacaggccaaagtcacatttctggctccagcgcatgtgcccccaaccaaccgggtacaaggcagtgttcattttggaagagttgctgagccccattgtcacacccctcatcctcatcttctgcctgcgcccacgggccctggagattatagacttcttccgaaacttcaccgtggaggtcgttggtgtgggagataccctgctctttgctc

SEQ ID NO: 45713 - DNA, 427 bp, Homo sapiens
ggagctccaccgcggtggcggccgaagagcttgtgtgcggagctgagaggcctatggatgaggaggacgcggcggccccggtttgttctcatgagcaagatggatgacctcaacctgcactaccggtttctgaattggcgccggcggatccgggagattcgagaggtccgagctttccgatatcaggagaggttcaaacatatccttgtagatggagatactttaagttatcatggaaactctggtgaagttggctgctacgtggcttctcgacccctgaccaaggacagcaattattttgaggtgtctattgtggacagtggagtccggggcaccattgctgtggggctggtccctcagtacctcggccgctctagaactagtggatcccccgggctgcaggaattcgatatcaagcttatcgata

SEQ ID NO: 45714 - DNA, 620 bp, Homo sapiens
tacgactcactatagggcgaattggagctccaccgcggtggcggccgaggtactgtgtgacatgtgatagctaccttatttcattacttcatttattcccttgaggcttggagactgatgtgtgagggaggagtctgagggctcctgggccctcgcccatgggagctgggtgcgtggctgtcctgttgttaggacaagctgcagggagagactgtgtttccttggccatgtcccgtggggcccagcatgatgtcctgagtagcagaaagatgggtgagggatgggctgcctggatgatgactggctgatgcattttctgccctcagttttcaccatggccaggatctcttcagagtcatgattcaatggaatttataccaagtgtgccctgatttgggggtgtttctcagatgatgtgtagtgcccccactcagaggagccagaagccaaagaaactcagatacacttgattctctaattcattctctcacaggaattgtcttctaaactgcaaatattaaacagcgcagagaatggtctcacaagctcagaagggatctgggaggaaatgaactgctaagagggttattttcagctactttcacttactgctttaaact

SEQ ID NO: 45715 - DNA, 497 bp, Homo sapiens
  misc_feature 387: n = A,T,C or G
gtaatacgactcactatagggcgaattggagctccaccgcggtggcggccgcccgggcaggtacatgcctgcctggcaccccaatgcccaccccttgccatccttgtccactgcccgcccccccaggggtgtctacttgtaaacttggtttcaatccaaaccacaatcctggaagtgggagtgggggaggaggacgtgcttattgctgtaaacaggggaaggaagcagcaggcagtgctgccccttgcccatctagtcccctccccatgttctgcccctggaggagagcaatgggggtgcctcccacgcttcgatttgctctctctgggggcatatgtctctctggggggacaaagggagagggcaccaggagtcagggaaaggtancctcgccgctctagaactagtggatcccccgggctgcaggaattcgatatcaagcttatcgataccgtcgacctcgagggggggcccggtacccagcttttgttcccttt

SEQ ID NO: 45716 - DNA, 371 bp, Homo sapiens
cactatagggcgaattggagctccaccgcggtggcggccgcccgggcaggtacagatgtccagtagacctactggatatgcaggcctgcagctcaggggagagctgggttaagaaccgtcaaggcagtaatcatctgcatttagatggcgagtgaagccatgacaggggctgaaatggcccagcaagaataaatcaaaccatgagaaacacatacatttaagaataaggagatgtggtcaggcgcggtggctcacacctgtaatcccagcactttgggaggccgaggcgggtggatcacgaggtcaggagttcgagaccagcctggccagcatggtaaaagcccatctccacaaaaaaaaaaaaaaaaaaa

SEQ ID NO: 45717 - DNA, 513 bp, Homo sapiens
ttggagctccaccgcgggggcggcccccccggccaggtccaaccccgtgctgatcaaaatcctggtggaggtgatggatccttccttcgtgtgcttgaaaattggagcctgcccctcggcccataagcccttgttgggaactgagaagtgtatatggggcccaagctactggtgccagaacacagagacagcagcccagtgcaatgctgtcgagcattgcaaacgccatgtgtggaactaggaggaggaatattccatcttggcagaaaccacagcattggtttttttctacttgtgtgtctgggggaatgaacgcacagatctgtttgactttgttataaaaatagggctcccccacctcccccatttctgtgtcctttattgtaacattgctgtctgcaagggagcccctaacccctggcagacatagctgcttcaatgccccttttctttctgctagatggatgttgatgccctggaggtcttttagccttcccttgcatggcgcctgct

SEQ ID NO: 45718 - DNA, 587 bp, Homo sapiens
gcgtaatacgactcactatagggcgaattggagctccaccgcggtggcggccgaggtacaggtgaaaagcagcgcttggggtgtgctgctgcaagctggggaaggcgcgtgctcaacttggatgggacacacctagtctttcttcaagtccctggattcaaagagcttcaaccgttcttgcaccgtcaggccttccttcagactctgggtagagacagagcaggaggagaaaataaacacaccgttagaccccctgcactggaccggaccggaccagaccggaccgctggtggagccggcatcagtcagagagccgggtgcaggtgcggttagtgggcatgccaggaggagagtccccgggaaatgctgttattggaggatgttttccccttcacaaaattacttggatgaaaaaggaaaaaaaatcagagagacaagaccatgtgtttaagcagctaaattctgagcttagggctctttagagaagcagtgatcaaacgaatccagccagggaaaacagtgcaatgagcaaggagactgcccatccccgtgtcttgtcttgtgaatggatttgtccacatccagct

SEQ ID NO: 45719 - DNA, 618 bp, Homo sapiens
  misc_feature 24: n = A,T,C or G
gactcactataggggcgaattggnagctccaccgcggtggccgagcggccgcccgggcaggtacggcttcggaggctaggccgccgctccagctttgcacgtttcgatcccaaaggccctttttagggccgaccacttgctcatctgaggagttggacacttgactgcgtaaagtgcaacagtaacgatgttggaaggtaactttggcagtggggcgacaatcggatctgaagttaacggaaagctaccgcggcccatagcgctcacagccgtaaagacttaagtcgttgaccgaaagcggctttttcacttacctgggcttttttttttttttttttttttaaagcctctatcggtatgaaaggttgaatgctctaggtttgagcactgctttctcggcttgctcttctggtgcagtataggcacacctagagggccacgtcagtctttgcgatcaccaaatctggttctgagaaataggcactggcaatttacacatgccttgctgtgtaatctcactatatttgctcaggcaaagtgggagaagcagccttaggttttcattctagagatgccggctttcccacctgatcggcttagagttcacgattgactgtt

SEQ ID NO: 45720 - DNA, 452 bp, Homo sapiens
ttggagctccaccgcggtggcggccgcccgggcaggttgctgggctggagacggcgggagccgctgctctccggctgagggaatcagagacagctccgtccctagtggagcgcaggggaggcagaagtcatgacaggcgaggtgggttctgaggttcacctagaaatcaatgacccaaacgtcatttcacaagaggaagcagatagtccttcagatagtggacagggcagctatgaaacaattggacccttgagtgaaggagattcagatgaagagatatttgtaagtaagaagttgaaaaacaggaaggttctacaagacagtgattccgaaacagaggacacaaatgcctctccagagaaaactacctatgacagtgccgaggaggaaaataaagagaatttatatgctgggaaaaatacaaaaatcaaaaggatttacaaaactgtggc

SEQ ID NO: 45721 - DNA, 487 bp, Homo sapiens
gggcgaattggagctccaccgcggtggcggccgaggtacaatgccatgcgagcagacccagcactttgcttcctggagaaagttgggatgcccgatgagaagtccctttctgcagaacagggtgttacagatgggacctcagacattcctgaaagaggcaacacagataaagaagacaatgctggggacaaagtagatggcctccagaaacaaacggagagttccagtgatggaggtgatggcgtttttagcgaaaagaaggatgacagccgggcagcccaggatcgctccgacccagacaatcgccctggccagtttcctccgccctcacagctcgtctcagacgtctggtcactgtttaccagcgctgcaaccgcaaggaactgtgccggcctgaaattctgggaccaggtaaccaaggatattgggttcaggaagagatgttcaggagaacctcagaaatggacctcatcaacaaggaagccca

SEQ ID NO: 45722 - DNA, 374 bp, Homo sapiens
tgggatggggaagcctttaccatacctaggcctgggaggttgagtgggacaagaggagatgaagaaccttctggaaaccccctaaccacctgcaggaagggacgagataaataaatgcacgtctctcttcagctcactgaccatctgcctacctcccgttaatggaaccgcgactcacagcaagtaactggcagaagttttggtgataaagattttcggacaggtttagaaaatggaatcctcctctgcgagttgctgaatgctataaagccaggacttgttaaaaagatcaatagattgcctacccccattgcaggactggacaatattatcttattcttgagaggttgtaaagagctcggccttaaagaatc

SEQ ID NO: 45723 - DNA, 601 bp, Homo sapiens
  misc_feature 574: n = A,T,C or G
gaattggagctccccgcggtggcggccggtggggacctgatgctgcacatccacagcgacgtgttctctgagccccgtgccatcttttattccgcctgcgtggtgctgggcctacagtttcttcacgaacacaagatcgtctacagggacctgaagttggacaatttgctcctggacaccgagggctacgtcaagatcgcagactttggcctctgcaaggaggggatgggctatggggaccggaccagcacattctgtgggaccccggagttcctggcccctgaggtgctgacggacacgtcgtactgaggaaatattttgtaaagtgagctttgggtataacttagccccatcattatttagagaatagaggaggaagaaagaggaaggattttaaaggcagacaatgacagaccattcaggataggtagggttttaaagggagataaacacagtctcatcaactaaggagagatttgctgcagtaaataggatgagggaaatagtctgtgggatgcaagcaaaggaagcagggtgccttagacactgagtggagccagaaagatcatgcggngccttttccaagtacctcggccgctct

SEQ ID NO: 45724 - DNA, 444 bp, Homo sapiens
attggagctccaccgcggtggcggccgacgtactccggactcgccgctcagggtcaaaaggaaaggtggtatggtggctgctcatcttagccaagaacagtggccaaaggttaaggcaaaggtagtaaaaggttgccacgagaaccctctgttttgcattaaaaatacagattatttttctgtaacaatttgctatattacacttaaataatgtattatttttaaataataaagctgaaggtgaactgcctcaagcaatacattcctcagtaattaacatctccacttttacgctcaatgaaaatgaaaacattgaactatttcaggccacggtatagcacagagctagaaatcagatcaagagaagaaacataaatgtcttcagaacagcttggagaacggggaaccgttttcctaagatccaccacctgctcctacttctat

SEQ ID NO: 45725 - DNA, 262 bp, Homo sapiens
cgaattggagctccaccgcggtggcggccgcccgggcaggtactatcttttcccagtctcggttcgacgactccattttcctcggtgggggcttagcgcactggaggagcggcgggcttcagacaggcgatgggaagaaagagaacacagctatctttccaagctgtgtgcagcatggagcaccagctgcccttgagacagaagaagctggtgttttcatcaggagacattcaacttcttgaaaatgaacaatccggccagg

SEQ ID NO: 45726 - DNA, 471 bp, Homo sapiens
agctccaccgcggtggcggccgctgtacaactaatggatcccccgggctgtcaagaattctatataagctcatcgataccgtcgacactgcagggggggcccggttcccaactgttgttacctttagcgagggttaattgcgcgctaggcgtaatcatggtcatatctgtttcactgacggtgatgatgatgatgatgatgatgatgatgaagatgaagaagatggagaagaagagaatcagaagcgatattatcttagacagagaaaagctactgtttactatcaggctccattggaaaaacctcgtcaccagagaaagcccaacatattttatagtggcccagcttctcctgcaagaccaagataccgattatcttccgcaggaccaagaagtccttactgtaaacgaatgaacaggcgaaggcatgcaatccacagtagtgactcgacttcatcttcctcctctgaag

SEQ ID NO: 45727 - DNA, 486 bp, Homo sapiens
agctgcttcctgtgtgtcaaatgacagctccaccgcgggggcggccggaaaatacttccccccaaggagttcctctttaaacacccgaagcgcacggccaccctcagcatgaggaacacgagcgtcatgaagaaagggggcatattctctgcagaatttctgaaagttttccttccatctctgctgctctctcatttgctggccatcggattggggtaggtgatgtgactgtgtgactcctgtcatggcatgtcgtggggcgattctgggttgcagtgatttattcgtaacctgtttcctgaagtccagatcatcagttacagcttggtgcattttcacaaacacccacgtagtcactgttcaggtccagaaaccaccagcctgcagcccccaaaggccccagcacaggcgccctgtggtgctgctgtctggcctgacgagtctgcctgttgctcactgaatataaacggagtcaaagcagggctt

SEQ ID NO: 45728 - DNA, 485 bp, Homo sapiens
gactcactatagggcgaattggagctccaccgcggtggcggccgaggtaccctgggccggcaggcagtgggacacccacgggggcccaagcctcttgaggtcggtccgcacagaacagcgtggcggcagaattacaaaacattctcagagagactgcaaaggacacttagctcttccggaatgaaagcacgcaacgcagcataaaaagcatcgaaaccccaaacagcagagtgttaaaggcaattgcttccaggtagtgacgtagtagaaccgccggggccaaactcaatgtctgatgagcagccaacatgagaacggggccacctccaaacacccagacacctccaactgtcagatcatcgcctgtcaactcagagtaaactcatggagaaattggggcgagcgctaacctcaagatcgggcaacatatggaacccaaagaaagaagcgaaggaggccccgggcccacagcacagtgtatggga

SEQ ID NO: 45729 - DNA, 495 bp, Homo sapiens; identical to SEQ ID NO: 45661
  misc_feature 455: n = A,T,C or G

SEQ ID NO: 45730 - DNA, 450 bp, Homo sapiens
  misc_feature 427: n = A,T,C or G
atagctgtttcctgtgtgtaaaacgacagctacacctcgggggcagtacgaggtactatggccataattgacaacaagttagggggacatataacagctgaaatacctcaaatatttgatgctgtttttgaatgcacattgaatatgataaataaggtgtgtaatatttcagttatgtaagggggaaattctgcaggatagccttaattcttgaaagctaaagtatgtctgtggatataacataattttaatgccatggagtttaaatatttaaacttgtatattagggaaatactttcttggttttcaagaacttacttcccaggagtttgaaaccaacctgggcaatatagtgagacttcatctctacaaaaagttcaaaaagtaaccagtcatggtggcatgtgccggtagtcccaactactcnaaaggctgaagtggggggggggg

SEQ ID NO: 45731 - DNA, 472 bp, Homo sapiens
tccaccgcggttgttgccgcccgggtaggtacttaatgcacagcttattaaaaaaatcaaaattgttatcttaatagatatattttttcaaaaactataagggcagttttgtgctattgatattttttcttcttttgcttaaacagaagccctagccatccatgtattttgcaattgactagatcaagaactgtttatagctttagcaaatggagacagctttgtgaaacttcttcacaagccacttataccctttggcattcttttctttgagcacatggcttcttttgcagtttttccccctttgattcagaagcagagggttcatggtcttcaaacatgaaaatagagatctcctctgcagtgtagagaccagagctgggcagtgcagggcatggagacctgcaagacacatggccttgaggcctttgcacagacccacctaagataaggttggagtgatgttttaatg

SEQ ID NO: 45732 - DNA, 499 bp, Homo sapiens
cgcgcgtaatacgactcactatagggcgaattggagctccaccgcggtggcggccgaggtgcccacaaatgctccagcccacggacgcggaagcgactgcacagctaaagaaccgccccttgctaacgtttgccagactaactacagagcggcgcatgatccagttgagccagcaggccgccgctccgcgagtcacgtgactggaagtagtctgggaaaagcggaagtcgcctgtgggaggaggtggcggtgggcggaactcctagcggacacctcgtggagtccggccgctctagaactagtggatcccccgggctgcaggaattcgatatcaagcttatcgataccgtcgacctcgagggggggcccggtacccagcttttgttccctttagtgagggttaattgcgcgcttggcgtaatcatggtcatagctgtttcctgtgtgaaattgttatccgctcacaattccacacaacatacgagccgggagcataaag

SEQ ID NO: 45733 - DNA, 160 bp, Homo sapiens
  misc_feature 119: n = A,T,C or G
aaaaggcgcaggcgtcaggagggtgctgcccgctggagtctgcaaatgctgccttccaaaagggacctgctgggctctgttcttcctggcaacacatctggctgatccagccaccaacnagagccccaaagactgggaacctgtccccaggccaacaggg

SEQ ID NO: 45734 - DNA, 367 bp, Homo sapiens
ccgcggtggcggccgaggtacctctccaggtaagtggataatagtcgccatgcttcatctgtagcactagactccttagtagtgatgacagatgagagctgattggctgctagccaggcccaggcttctgcttgtgctgcctctcctccaaattgcagaataacttgtatcaccactgtgtaatcaacaagctcttgtctcatggagtgcctctgcctaattggcttataaacagttacaagaaggttgatgctgctgaattgcttcgtttatacttaaactatgaccttttagaagaagctgtggatttggtgtcagaatatgtggatgctgtattgggaaaaggacatcaatacttcggaattga

SEQ ID NO: 45735 - DNA, 574 bp, Homo sapiens
agcgcgcgtaatacgactcactatagggcgaattggagctccaccgcggtggcggccgcccgggcaggtacttcccaaacacaacatccatcctctcaccatgccgacacacaaaaaggcatcgcttctgggggccgggctggctgttgaccctcagcggctgcatgggctggcagatgatagtaagaggagtcgtctccccgagcccctggtcctcataaggccgcctctccaatactccatccccaaacgtgagagagttggacgacgatgtatttaagattgaataagaaccatgaaatatccaggtgctgcattcatcagccttggtaatgtaattctcaggcaggagtccagagcagccggtggttaaggacgtgccatagatccaaccctcgctggtgctggtctgctccattggagacatgaagatgaagtccccggggaccagctccagctcatcgtcattttgtggggtataggggtagatgacctgtaatgtctcatggttagcaaatcggatatcccgagaaaatatggtagccacccagtcacaccctagcttgacgtcaat

SEQ ID NO: 45736 - DNA, 403 bp, Homo sapiens
accgcggtggcggccgcccgggcaggtactgccagatgcttgtaacaatgacctgcccctatctctagtaagcttctgtaacttgaaagatagattattccaatattttaagatcgcctgtcacttgttactgtggccttgattctctatgcaatatattccttttatggattcagacaccattttaattctcttttgcacctgctatacagggtaaaataacagatgtgttcatcttagatgaaggggtcaaagaggaagtagtggggtggggcttttggagctgatgattggaacctaaatatttacttcaattgcacagattccaatgcaagtcgagagcgatgtggcgctccattctcctgctgcactaaagatcccgcagaagatgtcatcaacactc

SEQ ID NO: 45737 - DNA, 663 bp, Homo sapiens
  misc_feature 513: n = A,T,C or G
gacttactgtttggctgattggagctccaccgcggtggcggccgcccgggcaggtgatgcccctgttcctttgttgcgggtggttttggtaaggcagagccctctgctgagaatgtagtattgtttttcccctctccctcctgctttctttttggagcttctttgggtcaaagacatggaagttgcttcagatatctgatactgtgaatgtttgaacatatccgtggccttcacctctccagctacccttttacctcatcagaagcagtggctcagctaagtgctccccctagctcccatctcaggagaccaaatctcacagaaaaataggcactttgggccaaaagctctaatggaacatttttagtggtgatttggggaaggaaagttaatgaggtttttaaaataaggttttctagttttgagagtgtgcacttcacacaggggaatggggttacttctgtccgatcctgggcctttctttcatcccaaatgacaaggaatgtggctcanagaagggtttttcttttttgacctttcttctctcaacaggaacctgcctgaggacacccttctagagcaaggaattgactttaagagccgttctccccacaagacaccacatgacaaggggtataagccccagccctgctcattcccact

SEQ ID NO: 45738 - DNA, 501 bp, Homo sapiens
tatacgactactatagggcgaattggagctccaccgcggtggcggccgaggtactgattccctacgatgcagatttgaatcacagagtaattaaaatatggatcaaataaggctggggctcaccaaggctgaaagctgtagccattcaaggcatcatttctgtcatgaaaatataggaccttttcaaaacatgccttcaggaaggtgttctcttttcaaacaaaagtctaatgactgcataactcttcttgaccacatcttacactttctctagacttgcttatttacagctactggaacaaaaagatgaaatgaataaagcacactgattgtcctaagagtcttctgtgactaaaagcacatgagcttctccccaggctgagctttgaccctcccaagcatttccccaaaggccatgacactgcatcagattgctcctggacactttcctcagagttttcaacaaatataaactgaggagtggagcacagcaccagattt

SEQ ID NO: 45739 - DNA, 481 bp, Homo sapiens
  misc_feature 357: n = A,T,C or G
atagctgcttcctgtgtggcgaagaggagctccaccgcgggggcggccgaggtacacacatgggtatgctctttatgcagagtctcactgttgcccaggctggagtgcagtggcgtgatctcggctcactgcgagctccgcttcccaggttcacgccattctcctgcctcagcctcccgagtagctgggactacaggcgcccaccatcacgcccagctaattttttgtatttttagtagagacagggtttcaccgtgttagccaggatggtctcaatctcctgacctcatgacccgcctgcctgggcctcccaaagtgttgttgggattacaggcgtgagccactgcgcccggcctnttaatgtatattaaatagccttagattgaaagaaactggtcttccagaggttgcttctggggagggaaactggtaggtaggggactgaggaaggtgtcttcattgaatactcctttttgatcat

SEQ ID NO: 45740 - DNA, 594 bp, Homo sapiens
agcgcgcgtaatacgactcactatagggcgaattggagctccaccgcggtggcggccgcccgggcaggtacccagtatgtgcagggagacggaaccccatgtgacagcccactccaccagggttcccaaagaacctggcccagtcataatcattcatcctgacagtggcaataatcacgataaccagtacacttactgcaactgcatgttgtctaaaatagtttttctataggatgtatataaaaactaatccctcttgagctgatttataatgtgtgtatatagccacacataaaaagctagtaatagtagggctctcagaaaatactttccagttgtctaaccttgaatgttattaactcttctatattacaggagatacaactcgtcaacgaatcaaattcagtgatgacagagtatgcaagagtcaccttctcaactgttgtcctcatgatgtcctttctggaactagaatggatcttggagaatgtctgaaagtccatgacctggctttaagagcggattatgaaattgcatccaaagaacaagattttttctttgaacttgatgccatggatcatctgcagtcattca

SEQ ID NO: 45741 - DNA, 592 bp, Homo sapiens
ctcactatagggcgaattggagctccaccgcggtggcggccgaggtactgtaattgcctggtagttatcaaaccttagcgttgttcataacaatcccctggagactttgttaaaagacatagtcctggctctacctccagagattctgatcagtagattggggtggggcccgtagtttgcatttctggaaggtttccagttgatgctgctcttacaggtctgcagaccacactttgagtgacactgatctagacaatgtgaggagtcataaatgatcctttgttctgaggagtgacctctgtagcctggtcgtttctccacaggcacttcctgagggatttccttcctctgctatggaattgggatcgcaggtctggcaggtgggcgaatggcattgtgatcagtgaactatagaatttatcttcatcagccatcttgtaagcaggaaaaggatggagtctgtccagtggataaggtgtttctctcactttttatgtaacaactgagtaatgacaacaaagtttacctaccactccttaagatattaggcccaataaggcagaatttttgtttttcttttttcctactttat

SEQ ID NO: 45742 - DNA, 509 bp, Homo sapiens
atacgactcactatagggcgaattggagctccaccgcggtggcggccgagcaagaccagggcaagccccggaccttcaccacgaatccctctccaccttccgtgcccaacatcatcgtctcttacgcggtccggcgtcgaaacaaacgtggtcgctgaactgcaagcgaggacccaccgcgactcacctagacacgcgacacagcctttttttaaaataaatttatctatattggttgacaaacaagccaccaaccactgactgcaaaactgcctgatgcagttgggttcctcctggttttcttttgttacaaccacccttgcctgtttacattaattgcaaggagcataacgtacctcggccgctctagaactagtggatcccccgggctgcaggaattcgatatcaagcttatcgataccgtcgacctcgagggggggcccggtacccagcttttgttccctttagtgagggttaattgcgcgcttggcgtaatcatggtcatagct

SEQ ID NO: 45743 - DNA, 479 bp, Homo sapiens
  misc_feature 295, 301: n = A,T,C or G
ttggagctccaccgcggtggcggccgaggtacctggtcgtgtccctcagtaacgggaccatccacatctttcgggtccgttctccggacagttaaaggggctaggactagggtgagagggagtggggagggagagggcaggaaggaggcagagctgtccgtgggaggtggaggccgaggacattttcctgaagggcaggggttggcaacttttcaacatggagtgccaaactgctaacccgtcttctagtgtgtgagaatagggaccaaggtggtggcgtgaccttaactctcanaagcanaggaggcaggtgggtggagggggatgctgggaattcatctgcctcttgctttttgtgggtggctgctgccaccaccgccgctgctatatagtttaggtttctgaggtttgtgagcctgtcctgctttgcattcttcaaaaccattcctgatagagtagccgagggagagtcttggggc

SEQ ID NO: 45744 - DNA, 458 bp, Homo sapiens
ttggagctccaccgcggtggcggccgcccgggcaggtacaaccagactgctgaatttgaaatcatgttacaaaatcaaagacatttatttatatcaacattacctagaaaatgtaagaaaaaaaagtatcattcacagaagtagggaaaactacaaagggtattaggaaatttgccaagattactcaaagccaatgtgttgaaaaaaaagttaaatagaaggcatttcatgctcctaaatggatgacattacaaagctgtcaagtcccctcaaattgaatctataagctgggtgtggtggctcatgcctgtaatcccagcactttgggaggccaaggaggcatgatcgcttgaacccaggagttcacgacccacctgggcaacatagtgagactctgtaccctgctgctccggacgctctgagggctggagcaatgcccctccatgcgtgtaaacatt

SEQ ID NO: 45745 - DNA, 611 bp, Homo sapiens
tcactatagggcgaattggagctccaccgcggtggcggccgcccgggcaggtgtcctggagcttgacgcgctggagcttgagaggtcagagagggtccttgcccccggcctgggactccggagttgcgtttctacccgtgcttcaaggtctagcccagccgaatccgcgtcgggctgtaactcgagtgccaggtttctgtatacatagccttcaggactgcttttggtggaaagagatagcaggtggtgctaattcactgtgttggtgggaactctggctacactgaaagattcttactttgacccccaggctggagtgcagtggcacgatcttggttcaccacaatctcgtctcgaaggctcaggtgattctctcacctcagccgcctgagtagctggaaccacagtttcagctgtgagttcaacatggaggcaaatcagtgccccctggttgtggaaccatcttacccagacctggtcatcaatgtaggagaagtgactcttggagaagaaaacagaaaaaagctgcagaatattcagagagaccaagagaaggagagagttatgcgggctgcatgtgctttattatactcaggaggaggagtgattcg

SEQ ID NO: 45746 - DNA, 362 bp, Homo sapiens
tagctgtttcctgtggtggaaaagaacgagcgagcaccgcgggggctgtggcgggtatgcttggttctcacatgccaagcctgctgccacagctgtacagccatttgttgtagaaacgcagccattctgtgagcgcaccaaagacaaacaccactaatgcagaagagcacatgccaaaagacagaacccatcgcaaattcaaccgatccccaacgatgccactgatgaataggcccacagcataggagaagaggaaaatggtatccagtgtgccgaggaaaagagtcgccttctctgcactggggaacaaatggttgctgctccagatctccacaggcagctcaactgacgtgttaaaagca

SEQ ID NO: 45747 - DNA, 442 bp, Homo sapiens
ttggagctccaccgcggtggcggccgaggtcgttgagcatcccgcgagggcggaagtgggagctgcgaccgcgctccctgtgaggtgggcaagcggcgaaatggcgccctccgggagtcttgcagttcccctggcagtcctggtgctgttgctttggggtgctccctggacgcacgggtcgagcggccgcccgggcaggtacaaggtcaatctcacttcgagtgaccacaatccggaccagggtggagtcatctgtgccagcacctttcatagcatagtagagcctctcagcaaagaaggcagggcggttcagggcacactgcaagatggtcttcaaaccactttctacatatccggaaaactcacggctcacactgcttaacaagtctcgattagccatcctagaataagcctccatggtagctctcagctgaggaaagct

SEQ ID NO: 45748 - DNA, 442 bp, Homo sapiens
tggagctccaccgcggtggcggccgagctggactctggggcctgcggcggctccagcctcaactcagagggcaacagtggtagtggtgacagtagcagctatgacgcaccagctggcaactccttcctagaggactgcgaactctcccggcagatcggggcgcagcttaagctgctgcctatgaatgatcagatacgggagctacagaccatcatccgggacaagacagccagtagaggtgacttcatgttttctgcggatcgtttgatcagacttgttgtggaagagggattgaatcagctgccatataaagaatgcatggtgaccactccaacagggtacctcggccgctctagaactagtggatcccccgggctgcaggaattcgatatcaagcttatcgataccgtcgacctcgagggggggcccggtacccagcttt

SEQ ID NO: 45749 - DNA, 143 bp, Homo sapiens
gcgtatacgactcactatagggcgaattggagctccaccgcggtggcggccgaggtacatgggcaatgctggacgtaaagaaagaagcgatgcactcaattctgcaatagataaaatgaccaagaagaccagggacttgcgta

SEQ ID NO: 45750 - DNA, 514 bp, Homo sapiens
gcgcgcgtaatacgactcactatagggcgaattggagctccaccgcggtggcggccgaggtaccgatgaccattgatgaagttggtccccagagccaggcctggtgttctgtggatgtagatagacttgatcgaggcagccgagcacagtgaggcgcgtgggccgtgaagctggacgggctctgttgcagttcaggctctgcgtttcctccctgggaaactgtgggcaggcacagaacttcagttttctcctatttaaaatgagaaaagcctgaggatggacagcagcttaggagcggtgaggattaccttagttgctgtgtacacaggaaaatggtagtcaaaagaattttttggcagctgcttcttgctgagacctatacatgatataaccaatgaataatacagtttgcaccacaacaaatataatgaagtggaccgtagacaaacatgatggaaatggtggtagttctgggcatttcggcttttcatttgatggcatatttcgctgcact

SEQ ID NO: 45751 - DNA, 472 bp, Homo sapiens
  misc_feature 381: n = A,T,C or G
ctcactatagggcgaattggagctccaccgcggtggcggccgatgtactttcatccataaaggcctgcagctgtttcactgatccttgcagatcattcatcaccaactccatacagtcaaagactttgctctggttctgtaatattttctggtagtcaggttttgtattaagaacttcattctgagaagacccaagatatgtcataggttccaccttgacctcagtaattttggcctcagttgatcctctggacaatatctctttagcctcctgctggtcgtgaagcaagagctgatcccaagtgtgacgttctaaagaaaactttgttatgtattccttcatctcagccacagatgcttccaaagaaaaatctgatgctnttccatttgaatcttcaaaacatttttgtagagttccatcagtttccagtccgtctgcaaaatgtttcaattcttcagaaagagaagatgc

SEQ ID NO: 45752 - DNA, 463 bp, Homo sapiens
ttggagctccaccgcggtggcggccgcccgggcaggtacttcccaaacacaacatccatcctctcaccatgccgacacacaaaaaggcatcgcttctgggggccgggctggctgttgaccctcagcggctgcatgggctggcagatgatagtaagaggagtcgtctccccgagcccctggtcctcataaggccgcctctccaatactccatccccaaacgtgagagagttggatgacgatgtatttaagattgaataagaaccatgaaatatccaggtgctgcattcatcagccttggtaatgtaattctcaggcaggagtccagagcagccggtggttaaggacgtgccatagatccgaccctcgctggtgctggtctgctccattggagacatgaagatgaagtccccggggaccagctccagctcatcgtcattttgtggggtataggggtagatgacct

SEQ ID NO: 45753 - DNA, 446 bp, Homo sapiens
gagctccaccgcggtggcggccgaggtacagcagcggatccggtcatcgtccttctcatccaggaccgagctgacactgctcatgctgctgatgctgcctcggcgggagccatggacactgttgggtgactggctggggctggtgtgggtgctcaaggactccttgctggcactggtgagcttgtttgccaagggaaggctgatgagctccatacacttcttgcacataatagacccgcagaggcggcagtggtggcggcggttccggatgctgaacttattcccacagtctggacagaaagggacatcctggtcgttgacccaaggcaccacagacttttctattgctcgaatctttgcagactcagtatttgttctgccaaatgcagtgagctgattattagtttattgacttccacaacatagtggtcaattctagcagctcg

SEQ ID NO: 45754 - DNA, 499 bp, Homo sapiens; identical to SEQ ID NO: 45700

SEQ ID NO: 45755 - DNA, 565 bp, Homo sapiens
gctccaccgcggtggcggccgaggtaccgccaccgggcagaactccctcaggtgatgagcgtcaggtgccaactgcgagttacacaacacgacctctccagacagttgggaaacaaggaaggaagcacttacagcgtgaggcgggcagggctagagtccccagggggcagttagcaagacagtttggttctggacagaacagacagagaaagaaaagaaaagcaagaaggttggaaagtgttttttaaacaggagaacaataaaggtttaaagtcagcaagcccggaggtagaggaccatccctctcgctcaggggtagccaccaggagagacttgcgggctctcagatctagcacattcactccaaggcaggtgtggggaagtggccaggcactaggcacacaggcctgccctctgccatctgcccagagagaagaaggaaactccatggaggagtcacagacctccctctagtttctatgcttccgagtcaccctttagcatttaacatttcaaacagcactttggcaaacagagatatggaaattgcttgactggtatctaa

SEQ ID NO: 45756 - DNA, 635 bp, Homo sapiens
acgactcactatagggcgaattggagctccaccgcggtggcggccgaggtacaattctcccagtgatttctaggaaagaataaagaggagaggagaggtagacatcagaatgtagagaggcaatactgtgtaaaaatgaaaaacaaaaaaaaaactttatttctattttcccaggctgcacaaatctggctttgatgaagaaactcagaagatcctgatgtctgtggaagaaaaaattccccatctgaccatttcacatggaccttggattgacgaggaatacaagatcaggggtgtgctcctctgatggggaacaccctgaagtagtcgtctcacaaaggctttccttggccacagtgggaccttcacctggcacctctatcctgtaattgcacatcatggcagcagggctgtgatttcagaggtacatcagagagcaacgcgagaaggattctgtcatgtcggccaatgggaagccagatcctgacactgttccggactcgtagccagcctgtttagccagccctgcgcataaatacactctgcgttattggctgtgctctcctcaatgggacatgtggaagaacttggggtcggggagtgtgtttgtcacttggttttcactagtaatgata

SEQ ID NO: 45757 - DNA, 592 bp, Homo sapiens
tagctgtttcctgtgtggaaaagaagagctccaccgcggtggcggccgtggaacgacagcattataccagcagaatggaccctttgtcacctaaatggctatatttgcaactgcagtataaatgtaaggtcttgtagcagcttcagataattaacattcgtaagtggagaggtggaaaatgcaaatgataatggtcaaaatatgagcctgcacctgtagttcaggccagtattccagctcccccactgcaatgcacatctgcgcttcttcattcaccagcatccctttctctaacaactgggatcacgctggagctgccaatcatgaaaccccgcctccctgcccaaaggcgtgtgcacgtgacccaagctgggccaatcagggtcctcttaagagattgacggacactgaggaaagaggcctctctcttctgggatcctgacccagagggaccaccatagcatggaccgtttctttggctgtgcaaaggctgcctgacgccaaccccagagaaaaacagaactgagagatgagatgaaaatactgcatgagccctcgatctagccacacctaaagccgaaacccctgcact

SEQ ID NO: 45758 - DNA, 508 bp, Homo sapiens
ggcgaattggagctccaccgcggtggcggccgcccgggcaggtgtggttaagttggtgacatggctcagaagtttatttctttaaatttttaagttttttttctttttagtcttcagaaaggcaacagtagtcttttaacgtcactgttaaaagtgtaagactcttttaccccctgagagtcccctttccctttcttgcgtcctttcctctttattcttttttttttttttttctttactgagacggagtctcactctgtcgcccaggctggagtgcagtggcgcgatctcggctcactgcaaactccgcctcccgggttcaccctttctctttattcttatcccggtcagactcgccccctcctccaagatatctctctgttttattttatttgattttagttctctttgggtgatcgctccttccctcttcaacggatccctccccgcctccatcctggttctgtgggagagaccagccttctggtgctgcagtcaggaatggagc

SEQ ID NO: 45759 - DNA, 466 bp, Homo sapiens
tacgactcactatagggcgaattggagctccaccgcggtggcggccggggaggttcacaataaaggtgctaagaaagagaatgtaagacaggaaaataattaaatattcttaccgagtgtcttcaataggccgtgtttaagaggcgtcttacactccctgttgccagtggctggaacacaatggatcacacaggggcgatagacaccgaggatgaagtgggacctttagcccatcttgctccaagtcctcagagtgaagctgtggctcatgaattccaggaactctccttgcagtccagtcaaaacttaccccctctgaacgaaaggaaaaatgtgctccagctgaggctgcaacaaaggaggacgagagaacaactagtggaccagggcatcatgccacctttgaagagcccagcggcattccatgaacagataaaaagcttggaacgagccagaactgaaaact

SEQ ID NO: 45760 - DNA, 470 bp, Homo sapiens
gctgtttcctgtgtgtgaaagaacggccagcactcgggggcttacttgtttcctggtaccaaaaaacaacctctgtgagggactggatgccgtacattcactccgtcatcctgattgatgattttgagtctcctcagaagctggcagagtttattgactttctggacaagaatgatgaggagtatatgaaatacctggcatacaagcaacctgggggcatcaccaaccaatttcttctggatagtctgaagcatcgggagtggggagtgaatgatcctttgctgcctaactacctcaacggcttcgagtgtttcgtctgtgactacgaactggctcggctggatgccgagaaagcccacgcggcctctcccggggacagccccgtctttgagccccacattgcccagccctcacacatggactgcccaatgcccacacctgggctttggcaatgtggaagagattcctga

SEQ ID NO: 45761 - DNA, 442 bp, Homo sapiens
cgaattggagctccaccgcggtggcggccgaggtactgttgccatgcttctttcagagtaaggtgagggttttttcaatacagtcagcaaagtggtcaaacatatgcttgattatgttcaaatgcttcagttataccctgacccaagggctgaagaaagctagggccttcctgagggagaaacacagtatcaacattagaatgaacaaagaataatgaatctgggtgattgggacctctgtccacagttagcaacattctgatttccagattttttttgttaaatgacttcggatttgatggataaaaaaattgtaaaactaatccaaaaagtggcagtggtgattctgggtgtgattacaagaaaacaggaaggcgtttatctctaaaagacaagtggggtgttagagtctttgtaaagcagcagtggttttatcattttg

SEQ ID NO: 45762 - DNA, 486 bp, Homo sapiens
agctgtttcctgtgtggaaaagaacggctacaccgcgggggcggccgaggtacctgagcttattcaggccgtgtcccccaggctcagggtggcctctctgctgacaccctgtccctatcttgccggcagggggcatgtgtccgtttcgccacatcagtggtgagaagacagttgtgtgcaaacactggctgcgtggcctatgcaagaaaggggaccagtgtgagttcctgcatgagtatgacatgaccaagatgcccgagtgctacttctactccaagttcggtaaggcgcctggagccctggaggctctgctgagaaccagggtgcagaggggtccgctggctgctcagtgcccacactgtctctgcctgcttttcccatctttctattctcagaggagaactctggcagaacctgccagcctcagccagcttttaggggacagtgtggctattttctgctcatctctttttttttttttttttt

SEQ ID NO: 45763 - DNA, 470 bp, Homo sapiens
atagctgtttcctgtgtggcaaagaggagctccaccgcggtggcggccgcccgggcaggtacagcccacagcgggcgagccgaagaagggtgggtggggcaccacctcacccaggaagtgcaaggggttggggacctccgtcgcctatccaagggaagccctgaggaactgtgccttgaggaacggtgcactccagcccagatactacgattttccagtctttgcaacccacagaccaggagattctctcgggtgcctacaccaccagggccctgcgtttcaagcacaaaactgggtggccatttgagcagacacctagctagctgcagggtttttttttcataccccactggcacctggaacgccagtgaaacaaaatcattcactcccctggaaagggggctgaagtgagaaacccaagtagtgtaacttaccaaatctcacccccacggagcccaacaggctaaaat

SEQ ID NO: 45764 - DNA, 421 bp, Homo sapiens
tccaccgcggcggcggccgcccgggcaggtcggcactgcgtagacgcggggagttcggtatcagtttacacgttgccttcagtaaaatccgccagaggtccacccattttgccttttccccttccttgccctgggagaagtcctcccttcactgggagagaacttctctcccagggcggtgcgacccggagctccagcgcccgagtctccacttcgtttgctgaaacttgctttctaccagctaagaaccatgctgcgagtgattgtggaatctgccagcaatatccctaaaacgaaatttggcaagccggatcctattgtttctgtcatttttaagggtaagaaaaagttttcttctttttctgaagtcctgttttggaatgttagtttcttgagtcaccttcttgaaaagtctgcattt

SEQ ID NO: 45765 - DNA, 587 bp, Homo sapiens
gaattggagctccaccgcggtggcggccgcccgggcaggtacttgtttgatcggcgcgaaaggagtccgagctcggggaccggcctctgcaggtcggggagcgctcggactacgcgggatttcgcgcgtgtgtgtgtcagacacttggcatttcacctgaagaaaaatttgttattacaacaacaagtaggaaagaaattacctgtgataattttgatgaaactgttaaagatggagtcaccttatacctgctacagtcggtcaatcagttactactgacagctacgaaagaacgaattgacttcttacctcactatgacacactggttaaaagtggcatgtatgaatattatgccagtgaaggacaaaatcctttgccatttgctcttgcggaattaattgacaattcattgtctgctacttctcgtaacattggggttagaagaatacagatcaaattgctttttgatgaaacacaaggaaaacctgctgttgcagtgatagataatggaagaggaatgacctctaaacagcttaacaactgggccgtgtataggttgtcaaaattcacaaggcaaggtgacttt

SEQ ID NO: 45766 - DNA, 526 bp, Homo sapiens
gcgcgcgtaataccgactactatagggcgaattggagctccaccgcggtggcggccgaggtactaaacctttttttttttttgagacagagtctcgctctgttgtccaggctggagtgcagtggcagtctcagctcactgcaacctccatctccaggttcaagcaattctcctggctcagcctcccgagtagctgggattacaggcgcctgccaccacgcccagctaattttttgtatttttagtagagacggggtttcaccatgttggccaggctggtcttgaactcctgatctcatgatttgcccacctcagcctcccaaagtgctgggattacaggcgtgagccaccgcgcccggcccagttactaaaccttcttactttcaagttttgttttttagactacaccccatctttataaatcacttgaatacatgaaaagacttcatgtttaacatctttaattcaaatgtaaaagttcaatacaagccatttatagggcttgagatttgttggtcttttaaaaa

SEQ ID NO: 45767 - DNA, 441 bp, Homo sapiens
ttggagctccaccgcggtggcggccgaggtgcccagccaagatgaatgcttgtaacactgacctgcccttatctgtattaagcttctgtaacttgatagatagattattccaatattttaagatcgcctgtcacttgttactgtggccttgattctctatgcaatatattccttttatggatccagacaccattttaattctcttttgcacctgctatacagggtaaaataacagatgtgtccatcttagatgaaggggtcaaagaggaagtagtggggtggggcttttggagctgatgattgcaacctaaatatatacttcaattgcacagattcccattgcaattcaagagcgatgtggcgctccattctcctgctgtactaaagatcccgctgaagatgtcatcaacactcaatgtggctatgatgccttgcaaaaac

SEQ ID NO: 45768 - DNA, 487 bp, Homo sapiens
  misc_feature 293, 296: n = A,T,C or G
cagggaacaggatgctgggtaccgggccccccctccagagtacttctagaattaattaaggcgggtggatcaccttaggttaggagttcaaaacgagcctgggcaacatggtgaaacccagtctctactaaaaatgcaaaaattcgctgggtgtggtggcaggtgcctataatcccacctactcgggaggctgaggcgggagaatcgctcgaacccgggaggtgcaggttgcagtgagccgagatcgcaccactgcccttcagcctgagcgacagagtgagacttcaaccccncangtcggaataaaatggaacctgtcccctgcccccccacgggggggaacccaattgccgaataagtaatcattttatcccgcgccataatgaattgtttaaaaaacagctcataattgatgccgaattaaagcactgtgtacccattaagatatggcattattgaagaaataaagtacatttgaaaccttaaa

SEQ ID NO: 45769 - DNA, 452 bp, Homo sapiens
tccaccgcggtggcggccgaggtacatgaagggcaggtccacgttgtagttggctgggccatcgatgatggtaaggaacagctcgaaggtgctgaacagggccatggggtagtcgtagaagtggcctagctcctcggggtcctctgtctggaagatgatatagaaggctgctccacccaagggggtgagggttaccatggcaaccattcagacgaccagcccaccccgggctctgcgtgcatgtccatcctggacccttcatctcaatatcaccagctctgcagtgctccaaactttgggtttttacggtccctagttttgtatgagcctcatcttgatcctaagagccacctctccctaacactcccgatttatctcacctctggaggacgtcccatcctctgataccataggtctactctgatctctgcaattactcctcctccccaagt

SEQ ID NO: 45770 - DNA, 554 bp, Homo sapiens
atacgactcactatagggcgaattggagctccaccgcggtggcggccggcccggcagggtccaaaaccattcactttaattgggtggaacgtgggtggccagaacaagatccggcccctgtggcgccactacttccagaacacacaaggcctgatcttcgtggtggacagcaatgacagagagcgtgtgaacgaggcccgtgaggagctcatgaggatgctggccgaggacgagctccgggatgctgtcctcctggtgttcgccaacaagcaggacctccccaacgccatgaatgcggccgaggtacgactgccagcaggttacccgtgcaggcatcaagcggatgcgggctcagctccctcatgtcaaagtccacgcctactttgctcccgtcaccccaccgacagcagtggcaggaagtggacagcgactgtgcaggtgctgtgtcattctctgacagcaactgcctgggcccaaggggtgatgaggcatcctttcctctagaagacctgagtcttcctgaccgactccaccatcacccaatctgttgattc

SEQ ID NO: 45771 - DNA, 480 bp, Homo sapiens
agctgtttcctgtgtgtagaccaacagccacacctcgtgggcagtccgtcttgcctgggacaaatggcactgaacaggccactgtgaccatggtgtcatcagaggacatcgagatcctggagcatgcaggcgagctggtcatcgcctcgccggagggccagctggaggtgcagacggtcatcgtctagcatgaggtctgcggggtcctggccgggcagggacagggcagaggactctgagcgccccacccatgcctgcctggcctggtagagaagatggcacaggatggaggcgccccaagacggacagtgtaccacaaaaacaatcacttggtggagttcaaatcacacagagagaagatttagtaaattctcaaagttgcaaactggacccacctggagtcccaccgggactggacagcccccactggattatactggatatgtaggcatagagcttatgacagattactgaccagta

SEQ ID NO: 45772 - DNA, 437 bp, Homo sapiens
  misc_feature 131: n = A,T,C or G
ctatagggcgaattggagctccaccgcggtggcggccgcccgggcaggtactaaaagtttgttttattttatcaaacattaagcttttttaagaaaataattgggcagtgaaataaatgtatcttcttgtnaaaaaaaaaaaaaaaaaaaaaaccccagccgccccactgagtttgccttctatccgggatatccgggaacctaccagcctatggccagttacctggacgtgtctgtggtgcagactctgggtgctcctggagaaccgcgacatgactccctgttgcctgtggacagttaccagtcttgggctctcgctggtggctggaacagccagatgtgttgccagggagaacagaacccaccaagtcccttttggaaggcagcatttgcagactccagcgggcagcaccctcctgacgcctgcgcctttcgtc

SEQ ID NO: 45773 - DNA, 288 bp, Homo sapiens
gggcgaattggagctccaccgcggtggcggccgaggtggcgcaggaagaggaagatgttagagattacaatttgactgaagaacagaaggcgatcaaggccaagtatccgccagtcaataggaagtcaagcaggcattttatgggaagctttctaaactccaactgagttccaccagctttaattattcctctagctctcccacctttcccaaaggccttgctggaagtgtggcgcagctgagccacaaagcaaactttggtgcgagccacagtgcatcactatccgt

SEQ ID NO: 45774 - DNA, 585 bp, Homo sapiens
accctcactaaagggaacaaaagctgggtaccgggccccccctcgagagtacttctagaattaattaaggcgggcagatcacctgaggtcaggagttcaagaccagcctggccaacatggtgaaaccccatctgtactaaaaatacaaaaattagctgggcatggtggtgcatgcctgtaattccagctactcgggaggctgaggcaggagaattgcttgaacccgggagacggaggttgcagtgacccgagatcatgccaatgcactccagcctgggtgacagagtgagactctgtccccaccctgaagtacaaacaacataaaaaaggcccccccccccaggaggggacccccatttcgccaaagggagaggggtatacgccccctctcagagcctattattaaaaaaacgagacaggtgtgagcccagtggaggaagcccggggcagggaccaaccactgttgctggcacactggtgcacgcaacaccgtggcagatggacctgagagaaagcaggagggacagcacagtggagccaagaaagggcttaacatggccgggcacggtgactcacacctgtaat

SEQ ID NO: 45775 - DNA, 589 bp, Homo sapiens
ggagctccaccgcggtggcggccgaggtaccacatccccaccaggcttcatgcttcactgctagatgcagggggctagaagggtctgatgaatcaggagctgaactagaaccttcaagaaaagaaaaggcaagggggtggctctgtgccccgccaggagaggaaagaagaatgtgtgtggattgtccacagtgaggccagaaacgatgagatggtgttaggcagaaaagaagggagagggcttcccatgagaatctggctgggcatgggagggatacagggctcagttatcaaggcacctttgccatagtggggtgccagctacattgggtgggatgcccaggggctgtccctacctaagcactttcttgtctacaggaagtcttggtgcttttcaagttcagcataaggggttccatatgtgaagtggggattcacacttagaaaatctatcctggtcttcacctgaaacactcatctactgctgggtggcaggaacaagtatacaaaaccaggggccttgcctgggcagttcctaagggacattggcagggctgacctgggattcagctcccctgagtggacagtct

SEQ ID NO: 45776 - DNA, 493 bp, Homo sapiens
tacgactcactatagggcgaattggagctccaccgcggtggcggccgcccgggcaggtaggcaggaaggtgggtcagagacttggggatcatggcaagcagaagcagtgaggaagcaggagtgccaaggagatggaagcaacaaggcaaaggaaagacgtgtagagcaaaggaaaataagggaaattttagtaagatcggcaagcatctatactaaatttccttatagccgaggactttttttttttcaactcagctgaacatctacagactccagctgctgagtctcagaggccatcctagatctagttccgggtcaagggtcctggctgtctgctgctttctgttcttgtgtattatgtctttctgtctcccttccgccccgcatgtatcctgacgaccagaaacgccctctacttgagataactggagctggactctgcctcctgcaacgcaaagaacacagcacgcaaaaagaaagtgaaagacaattc

SEQ ID NO: 45777 - DNA, 398 bp, Homo sapiens
gactcactatagggcgaattggagctccaccgcggtggcggccgaggtacttcaggatagcaaatatctatctgctattaaatggtaaatgaaccaagtgtttttttttgttttttttttgagacagagtctcactgttgcccaggctggagtgcagtggtgcaatctcggctcactgcaagctctgcttcccaggttcacgccattctcctggctcagcctcccaagtagctgggactacaggcacccgccacagtgcctggctaattttttgtatttttagtagagacagggtttcaccatgtgagccaggatggtctcaatctcctgaccttgtgaaccacccgtctcggcctcccaaagtgctgggattacaggtgtgagccaccacgcctggc

SEQ ID NO: 45778 - DNA, 435 bp, Homo sapiens
  misc_feature 137: n = A,T,C or G
tagattggagctccaccgcggtggcggccgaggtcgcctggcctgcagcgctcccacccccggcggcggcacgatgccctttgacttcaggaggggtttgacatctacaggaaagggtgcccaagggactctttaanacctcagccaacgtactttggctgctttcgcactactatttataactttaatggtagtaggtgtagcagattgcactgatgctggaataatttgcacaggttgatcaattgtaactatttcattcatctgttgttcttgacttgccaatacatattttcggagaagttccagatgactccagagaatttctccccgaggaacccgctgaaaaaaatcttcttggttgagactacataattctctccccgaaatgttgagtgtggtgaggtctatatcggtcatgctgaattccttcat

SEQ ID NO: 45779 - DNA, 616 bp, Homo sapiens
  misc_feature 563, 564: n = A,T,C or G
gactcactatagggcgaattggagctccaccgcggtggcggccgaggtacagcaggcggttgggaccctctgcttgctcttcagcaaagagctcaaaggccagacgagttagctcttccaggctcctgcccccatccagagctgctagtgcaagggccacatctcggaagtccaccaaacccttggtatctgattatttctcccttgttcctcctcatgatgataacattgctcttcaatgcactggatgcctgattaaaaaatgaatcttcagtggatctcaggggatggccatctaacaacagctgtgagaacatccactgaggactccaaactgtgagtgactgatacggccactaggaacatgtcagcctggagggaagcctgggttctgctctgctctttgttccagctcctttacctgctggaagtagccaaaggcaccagccaccgtctgaggatcagagagctgtagctgcctggcaaactcttcctggctgatcattcgactccggcctggctctgccccagcgtccacatagccagcggacagcccagccttnncgagcacttttcccagttcccagagctgtggttccaacgccaccttcagccg

SEQ ID NO: 45780 - DNA, 510 bp, Homo sapiens
tacgactcactatagggcgaattggagctccaccgcggtggcggccgcccgggcaggacaaatcctctgaagcctttgcagttccagtcccaagattacactcatatacttgcaaatgtgcaaaataaactccatacaagtattgtcactggtgcaactacattcactctaattttctttcttgctacctctttagcaagagcacgtgaaaatccaactaatcctcctttactggcactgtaaacggactggccagagttgtcttttaagccaacaatgcttcctacattaacaatagaccctccctgttgttgaatcatagtcctcatggcagctttacaggtcagcatggaacccaagaagttagtatgaagctgagataccatatcttcagtttttgttcttactaaaagaccatccctgttaataccagctgcatttaccaagaaatttactcgacctaaatgtttctccatctcttcaaatgtattttgaacatcaatgttcttt

SEQ ID NO: 45781 - DNA, 525 bp, Homo sapiens
gcgcgtaataccgactcactatagggcgaattggagctccaccgcggtggcggccgaggtacctgcatcaacccctctaactggtgtgatggcgtgtcacactgccccggcggggaggacgagaatcggtgtgttcgcctctacggaccaaacttcatccttcaggtgtaccatgcggagaccatcaagaatgtgcgcacagccacggaaagctttgcttctgaccccatcctctaccggcccgttgctgtggctctagacactaaaggacctgagatccgaactgggctcatcaagggcagcggcactgcagaggtggagctgaagaagggagccactctcaaaatcacgctggataacgcctacatggaaaagtgtgacgagaacatcctgtggctggactacaagaacatctgcaaggtggtggaagtgggcagcaagatctacgtggatgatgggcttatttctctccaggtgaagcagaaaggtgccgacttcctggtgacggaggtggaaaatggtggc

SEQ ID NO: 45782 - DNA, 544 bp, Homo sapiens
gtaatacgactcactatagggcgaattggagctccaccgcggtggcggccgaggtacttcgatttttgcacacagtggtatttaccgtgtcccaggcagcctggcctgggaccacatgggtctgagggagggatgggacctcaggccaccttgaaggattttctcttgggtcctttcctggcttgtgtctgaatcttgggtggggtgggctgcggggagcagttaggtgcctctgcctttagactggctacccagagcatttccccagggaaaggggctgtgctgggagatgctggctgggtgggggaccagtgtggcggtacctgcccgggcggccgctctagaactagtggatcccccgggctgcaggaattcgatatcaagcttatcgataccgtcgacctcgagggggggcccggtacccagcttttgttccctttagtgagggttaattgcgcgcttggcgtaatcatggtcatagctggttcctgtgtgaaaatgttatccgctcacaattccacacaacatacgagccgggagcata

SEQ ID NO: 45783 - DNA, 501 bp, Homo sapiens
aatacgactcactatagggcgaattggagctccaccgcggtggcggccgcccgggcaggactgaggccagggacagagcgcctgtcagagccgtgtcccctgcctgccgcatgactggcgggtacaagcttttttttttttttttttttttttttaaggggaggctttgtctttattagtcaacatttgcatctaggaaaagtttcacatgattaaatcaagagatgcaatacactcaggcttttcatgaaattgacatcattattacaaatggtgctcatttgaggcaactgtgacattatgcaatgagaaacatctgtccccttccctctcaggtccccatggtggcctatgttcatgattacagccacccttaggattaaatacacaaaagccttactctatatatgcccctttgactttaacatatttctcaaaaagaagtgcaataaacttttattctttcttgattagatggagttacaattgccaaaataaaaa

SEQ ID NO: 45784 - DNA, 523 bp, Homo sapiens
cgaattggagctccaccgcggtggcggccgaggtacaagctttttttttttttttttttttttttttcttttttttttttctttttttttttttttttttttttttttgtttttttttttttctttttagttctcttgttttagggtagtggcatcttttgggctgattgtaacctccacctcctgtttcaagcgattctcaggcctcagcttcccaagtagttgggattacaggcgcctgccaccacacctggctaattttgtatttttagtagagatggggtttctccatgttggtcaggctggtctcaaactcccgacctcaagtgatctgcccgccttggcctcccaaagtgctgggattacaggcgtgagccaccgcacccggcagagtttttataatgaaaaattaactaatattctagtatgaagtgaggaggatactgaacaggatgtggctaaagccaacctgggacagccattggggtggcttggtttcttcactccagtgttgtccctacca

SEQ ID NO: 45785 - DNA, 535 bp, Homo sapiens
atacggcgaattgcagctccaccgcggcggcggccgaggtaccataaaaaaatgggcatgtgctgtatttgggacatgcggacacacccacacccacccacaatctctcccctcctcatgtttactagactgaaaagccaccctgtatcctatcattaaaaaacaaaacaaaacaaaacaaaacagtgcttttagtcaagcagcacaacacaaggacagatcatctgtgattaacagaagcgaacgccttaaaatgatgggagagagacaaattaactaggtactattagccatggtcaaccccaccgtgttcttcgacattgccgtcgacggcgagcccttgggccgcgtctcctttgagctgtttgcagacaaggtcccaaagacagcagaaaattttcgtgctctgagcactggagagaaaggatttggttataagggttcctgctttcacagaattattccagggtttatgtgtcagggtggtgactttacacgccataatggcactggtggcaagtccatctatggggag

SEQ ID NO: 45786 - DNA, 268 bp, Homo sapiens
atagggcgaattggagctccaccgcggtggcggacgcccaggcaggtacaactgcaccatagttcatagacacctgcacacaaccgcactatgcatggtggtcgctgcttgtagggtgctgggacgattgcaaaggggccacatgtcacctgcctggctctgaggagcctgtccaggagggctcagagggaggcagacattgaataggacttagagggcgactgcagttgatcaggccagtaagctgggacaggtgattgcagggcac

SEQ ID NO: 45787 - DNA, 465 bp, Homo sapiens
gcgaattggagctccaccgcggtggcggccgctctagaactagcggatcccccgggctgcaggaattcgatatcaagcttatcgataccgtcgacctcgagggggggcccggtacccagcttttgttccctttagtgagggttaattgcgcgcttggcgtaatcatggtcatagctgtttcctgtgtgaaattgttatccgctcacaattccacacaacatacgagccgggagcataaagtgtaaagcctggggtgcctaatgagtgagctaactcacattaattgcgttgcgctcactgcccgctttccagtcgggaaacctgtcgtgccagctgcattaatgaatcggccaacgcgcggggagaggcggttagcgtattgggcgctcttccgcttcctcgctcactgactcgctgcgcttggtcgttcggctgcagcgagcggtatcaagctactcaaaggcg

SEQ ID NO: 45788 - DNA, 586 bp, Homo sapiens
ggagctccaccgcggtggcggccgaggtaccgaggtcgcacgcgtgagacttctccgccgcagacgccgccgcgatgcgctacgtcgcctcctacctgctggctgccctagggggcaactcctcccccagcgccaaggacatcaagaagatcttggacagcgtgggtatcgaggcggacgacgaccggctcaacaaggttatcagtgagctgaatggaaaaaacattgaagacgtcattgcccagggtattggcaagcttgccagtgtactcttccgatgtttgtgtcacacaacactgatgtgacttttatatgctttttctcagatctggttcctaagagttttggggggcggggctgtcaccacgtgcagtatctcaagatattcaggtggccagaagagcttgtcagcaagaggaggacagaattctcccagcgttaacacaaaatccatgggcagcatgatggcaggtcctctgttgcaaactcagttccaaagtcacaggaagaaagcagaaagttcaactttcaaagggttaggactctccactcaatgtcttaggtcaggagttgtgtctaggctgga

SEQ ID NO: 45789 - DNA, 441 bp, Homo sapiens
gtaatacgactcactatagggcgaattggagctccaccgcggtggcggccgcccgggcaggtactgctcagtttcactcacaggaaacttgtgacttgtgtattatcgtcattgaggatgtttcactcatgtctgtcattttataagcatatcattaaaaagcttctaaaaagctatttagccaccttgcccggcctccagcacactttctaaaatctgattcaatgggtatgataattaagtaacattgaaatatgtccaatcataagggatggggccagcatattcttcaaagcagatagaagcctggattccttaggaagggatttggccaaagagactccagacagttggggaggaggaggagatgctgtggaaccactggtcttaacagaagccgacagtgtctgtgacttccctgtctgttgcactcaccaaccc

SEQ ID NO: 45790 - DNA, 464 bp, Homo sapiens
ttggagctccaccgcggtggcggccgcccgggcaggtacctgtattatgtggaaaggtcacaaggccagagacccagcacctagatgtgcaaatggggagaagaagcagggaagaaacgctggcttgcttttggctagggccaaataatctggcacattgaccaatccctgcctgtcttctggaagaaggtgcatttcaaaagcactttaaagaacttcagaaaccttaggaagttcagtgcagagaggctgtgacagaggtaaggtggagagattaccgtgttataaagaactttgggatatttttcaaaattaacctgaccattcttttgaaaccagagtccttaacaagcattgagatatatttctccatgaaggcttaacagtgaaaattggagattttggtttggcaacagtaaagtcacgctggagtggttctcagcaggttgaacaacctactggct

SEQ ID NO: 45791 - DNA, 460 bp, Homo sapiens
gctgtttcctgtgaggaaaagaacggccagcactcgggggcatacttgttgcctggtacaaaaaaaaagcctgacccgtaggggctcagctgcagggacgtcaaccatgagcccagccacatccctaatccactaagctctcaggcaacatttgcaccatgtgacccaccatcaggcataggcgataggtctagtggagatcacctgacccaaaggtagccaatgggaaagttgagttatctggcgaactgagccaatcagattctctcctggaggtgccactgggagtgtggacccacagacagcggggaaagaatctgagccaatgtgggaggagaggagcaggcaggaaggtgggtcagagacttggggatcatggcaagcagaagcagtgaggaagcaggagtgccaaggagatggaagcaacaaggcaaaggaaagacgtgtagagcaaaggaaa

SEQ ID NO: 45792 - DNA, 525 bp, Homo sapiens
atacgactcactatagggcgaattggagctccaccgcggtggcggccgaggtactcctcattgggggaccggcgctgcagcacggacgcggtgccctccgtgatgatgtaaaagtcgtccccaggctctccctggaccacaattttctctccatcttcaaactggacgggctccagcgcatccgccacggtcagacgctcccacttctccagggactctaggatggagaccttgctgaggaactcctcgtacctgctggggtcatcgggagacttgaagtccaggtcatacttcccagacctgaagaactcggaggccgctacgtccatgccgatgaccaccttatcagtgtagccagctttcccaatagcagtcttcagcagctccaggtcttctttattctccaggatgttgggagcaaacccgccttcatcccccacattggtggcatctttcccatatttctccttgatgacattcttcaggttgtggtaaacctctgctccaatgcgcatggcttccctg

SEQ ID NO: 45793 - DNA, 473 bp, Homo sapiens
cgcgtaatacgactcactatagggcgaattggagctccaccgcggtggcggccgaggtacaacttatagaaaaggtaaaggaaaccccaacatgcatgcactgccttggtgaccagggaagtcaccccacggctatggggaaattagcccgaggcttagctttcattatcactgtctcccagggtgtgcttgtcaaagagatattccgccaagccagattcgggcgctcccatcttgcgcaagttggtcacgtgactggaatgcttgaaccaaacgtagtgtctcatccactgatctacccacaggaagatcattcagagtaatttgtcttaggattcctttgtcatcaataatgaagagacctctaagagtgtggcctgagtcctctaggtatacaccatagtcctttgagatctgatgggtcaaatctgaaagaagtggaatccttattggcccaagtcctccttgtcttc

SEQ ID NO: 45794 - DNA, 611 bp, Homo sapiens
ctcactatagggcgaattggagctccaccgcggtggcggccgaggtactggcccagtcccgccgtcctgccctgccgtgaagtgtgagcagctttctcagcacttcctgcagagaagtctggcaggggtgtgaattctctcttcccttcagggagagaataaaagccgccctcattctaggggagaatataatgtttacagcacctttcaaagtcatgaaccggagtttgactatttgaaaagtctagaaattgaggaaaaaattaataaaattaggtggttgccacaacagaatgctgctcattttctactgtctacaaatgataaaactataaaattatggaaaataagtgaacgggataaaagagcagaaggttataacctgaaagacgaagatggaagacttcgagacccatttaggatcacggcgctacggatgacctgagaattaatttatggcacttagaaatcacagatagaagctttaacatcgtggacatcaagcctgctaacatggaggagctgaccgaagtcatcactgcagccgagttccacccgcaccagtgcaacgtgttcgtctacagcagtagcaaagggaccatccgcctgtg

SEQ ID NO: 45795 - DNA, 411 bp, Homo sapiens
tggagctccaccgcggtggcggccgaggtacactgcaggtgacaacacagtctcaacccagccatcccccatcccacaccagctgcagcaacattctctacactctcacataaaaagggttatctggggccaggcacggtggctcatgcctgtaatcccagcagtttgagaggccaaggtgggcggatcacaaggtcaagagatcaagaccaaacacggtgaaaccccgttgccacaaggaaaaaaaaaaattagccgggcatggtgtcacatgcctgtagtcccacctactagggaggctgaggcaggaaaatcacttcaaccgggaggcaaaggttgcagtgagccaaaatcgcgccactgcactgcatcctgggcaacaaagcgagactcctgctcaaaaaaaaaaaa

SEQ ID NO: 45796 - DNA, 373 bp, Homo sapiens
tccaggggtaaatctggatactggctttctggtcctggggcgcagtcctgccctgctcagaactaaaatcctgagcgattgaagtctgtgtgttatgtcctaaggtgttttgtctgcagtttgagagcatgtctttctcctggtaaaaggaattagatccatagtcatactgcccccggctggaactgaacacgacattctcctgtggcgaataaaagggagtcgagtagatccggttctgggcaacggccgctctagaactagtggatcccccgggctgcaggaattcgatatcaagcttatcgataccggcgacctcgagggggggcccggtacccaacttttggtccctttaatgagggttaattgcgcg

SEQ ID NO: 45797 - DNA, 456 bp, Homo sapiens
agctgtttcctgtgtggaaaacaacggccccaccgcgggggcggccgtgtggactatgagtgaatctttggttgtttgtgatgttgccgaagatttagtggaaaagctgagaaagtttcgttttcgcaaagaaacgaacaacgctgctattataatgaagattgacaaggataaacgcctggtggtacgtcaggaggcaggaacctgccagttctccttggtgcaaaaatctgaccctcggctgccctgcaaagggggagggcctgacccagaatggggctcagccaacacccctgttcctggggctcctgctccccactccagctaaactcaactgatcatccatctgctgactgctcactgctgctgccacttccagggaaaccactagcagctgccaatgtattctgaacaaataaattaatgctatagctgaaaaaaaaaaaaaaaaaaaaa

SEQ ID NO: 45798 - DNA, 616 bp, Homo sapiens
aatacgactcactatagggcgaattggagctccaccgcggtggcggccgaggtacatcaccaagctgcagcaggagagaggccagatgcaggaggaggcccggcggctgcgggaggagatcgaggagctcaatgccaccatcatgtgagcttctgggccttggggctccaaccaggcaccccatcccgatgcagggcctgcctcagaggtggtgggaccctgtggcctcatcactggtcagtgcctctttgctgcagtagttctgctctttgtcaacctccttccacagacctctcttctctgtgcctggctgtggcccggcactgggccagccctgccatcttttgtcccagggtccttattggccactggctgctccacagctcccacggctcctgtcatttcagctcctgccagcagctgctccctgccacgggagtccccgttacccggcgccagtttgatcacatgaaagacatgtttgacgaatacgtgaaaacccggaccttgcagaattggaagttctggattttcagcatcatcatcaagccgctgtttgagtcgttcaagggcatggtgtccaccaacagcctggaagagctgcaccggacggcgc

SEQ ID NO: 45799 - DNA, 497 bp, Homo sapiens
tacgactcactatagggcgaattggagctccaccgcggtggcggccgcccgggcaggtaccatgcggacatctacgacaaagtgtcgggcgacatgcagaagcaaggctgcgactgtgagtgtctgggcggcgggcgcatctcccaccagagtcaggacaagaagattcacgtgtacagcctctctcctggttgctttcatgggctagcattgagtgtcagaggcttttcttggtgcatggtgcaagctgttggtggatctaccattctggggtctggaagactgtggctgtcttctcacagctctactcggtggtcccccagtagggactctgtgtgggggcttcaaccccacatttcctttctgcactgccctagcagaggttctccatgagggccctccaagtttgctcatgcagcaaacttttgcctgggaatccaggcatttctatacatcttctgaaatctaggcggaggttcccaaagctcagttcttga

SEQ ID NO: 45800 - DNA, 489 bp, Homo sapiens
ctactatagggcgaattggagctccaccgcggtggcggccgaggtacagatggtggcctggtcatggagttggcagggagtggccggggctgagctggtgagacaaagagctcttgccagtctcctgctctggagggctggttcccttccccagaggaggcaccggtggaggacgtgccaggggcccgggcctaacgtcctgctcagcctctgcactcagccccaggtcgggccctggcaggtgctgggatgacccacggaaggcacttggctggggcctgcaggccccctggaggatgcggtccgtggctcagtagatttggggggaccagggaagagggaacccaaggaagagggaaccaaggagctgagccctggtgggtggcccatcctagggtgggcttggctgtggcattggcaggcctgagtcctaggggctcagagcttggcccgggggtggctctgcagcagggcacgcatgtccaggag

SEQ ID NO: 45801 - DNA, 439 bp, Homo sapiens
  misc_feature 319, 320, 321: n = A,T,C or G
aggagctccaccgcggtggcggccgaggtactatgagcgggccctgagactggctgctgactttgagaactctgtgagacaaggtccttaggcacccagatatcagccactttcacatttcatttcattttatgctaacatttactaatcatcttttctgcttactgttttcagaaacattataattcactgtaatgatgtaattcttgaataataaatctgacaaaatattaaaaaaaaaaaaaaaaaaaaaaaaaaaaaaaaaaaaaaaaaaaaaaaaaaaaaaaaaaaaaaaaaaaaaaaaaaaaaaaaaaaaaannntttttttttccccgggggggggggttttaaaaaatattcccccccccgggggggaaaaaataataaaattttttctcccccccccccccggggggggggggccccccccccttttttt

SEQ ID NO: 45802 - DNA, 682 bp, Homo sapiens
tcctgtgaggcaaagaacagctccaccgcgggggcggccgcccggcctggtacttaatgtatcgagtcattttctaaaggggaatatggaaccccagcctgcgtggaaggcatctcacataatgccttttcagtgagggtgttgatctaaatcttttaaaaatcatttggtgttagccatcaacggttgaaatttgtaatgtgggatacatctcaatttccttatctacaaattgctactacaaagaaaatttacatgtgttctctctagttttcaacttaaactgctccccagcagggaaacaaaaggtcatttgccctcgctgtagttggagatttgcactcatgatttccaggtgtttctgaattctttgaagctttttctgctgaaggacaagtggtgcacgttcagcagtttccttagaaccattgccaattgaaagaaccttgttcatcctgagagtcagcggaaaccctgtcattaatgagaggaactggaaagttgccttctatactgtgtaacaaaacctgagctgtatattttgtcatgcagttgtgcttggtgtgtatataagtctgacatactgtcatttaaggaaaagtttaaagtagaaaattttgataggtgaaaataacttgggaaataataaccttgttgttttccctctctgattttggtcatg

SEQ ID NO: 45803 - DNA, 426 bp, Homo sapiens
  misc_feature 124: n = A,T,C or G
tgattggagctccaccgcggtggcggccgaggtacggttttcagcaccacaaggaaactccgaaggtagtaaggatgaccggttgtttgaccaggaccattgcagcttgacccctgctccaaanggaaaaaatcgctgtgagggatatcattgtttaagcaactgtcatcctgcagaggagcctcttggatgttactccatgcagaagcatcatctgcagaactatgagattttgcctctgaatctgacagctgtattttagcttctgaagcaacagtcattttttcgagcggccgcccgggcaggtacggcttatagtcattgtatttacatctgatggagtagcagagggtggggcatgccagtttcctgagctaaaaggaaatatatgcaatgctttctgcaaatggtaaggaaaaaattgtt

SEQ ID NO: 45804 - DNA, 472 bp, Homo sapiens
agctgtttcctgtgtggaaaagaacggccagcactcggggccttccttgttccttgttttaaaaccaagaccacccatcagctttgttgcccattcatcactatgctgatacctgcaagacagaattactgttggaaacagcactcgaatttcaaaattgaaaaaacaacaaagcacataaaacagactggaaggtgacacaccaaaatgtttatagcagtattattgaatggtgcattataaataaatatttttcttctttatacttttcggcattttcttttctttctttttttatttttttgagatggagtcttgctctgttgccaggctggagtgcaatggtgtgatcttggttcactgcaaccttccacctctgggtacaagcaattgttgtgcctcaccctccaagtagctgggactataggcatttgctaacacacctgtagtcccagctactaggaaggctgag

SEQ ID NO: 45805 - DNA, 429 bp, Homo sapiens
ggagctccaccgcggtggcggccgcccgggcaggtcggcggaccccagtgtctttatccctcttttgcacagtcagcttctgcagctctcccgggctagcatggcagcgtggaagagttggacggccctgcggctctgcgccacaggcattgcttcagagtttggagttcgaggttatccaacaattaagctattaaaaggggacttggcatataattatagaggaccacgaacaaaagatgatattattgagtttgctcacagagtatctggggctctaattcggccacttccaagtcaacaaatgtttgaacatatgcagaagagacaccgtgtatttttcgtttatgtaggtggagaatcacctttgaaagagaaatacctagacgctgctttagaaatgattgtatatacctacttcttttctgg

SEQ ID NO: 45806 - DNA, 545 bp, Homo sapiens
cgaattggagctccaccgcggtggcggccgaggtgcgggttcgggatgttctatgccgtgaggaggggccgcaagactggggtctttctgacctggaatgagtgcagagcacaggtggaccggtttcctgctgccagatttaagaagtttgccacagaggatgaggcctgggcctttgtcaggaaatctgcaagcccggaagtttcagaagggcatgaaaatcaacatggacaagaatcggaggcgaaagccagcaagcgactccgtgagccactggatggagatggacatgaaagcgcagagccgtatgcaaagcacatgaagccgagcgtggagccggcgcctccagttagcagagacacgttttcctacatgggagacttcgtcgtcgtctacactgatggctgctgctccagtaatgggcgtagaaggccgcgagcaggaatcggcgtttactgggggccgggccatcctttaaatgtaggcattagacttcctgggcggcagacaaaccaaagagcggaaattcatgcaacctgcaaagc

SEQ ID NO: 45807 - DNA, 469 bp, Homo sapiens
ctaatacgactcactatagggcgaattggagctccaccgcggtggcggccgaggtacctctctctcctcggccctcgtaagctgtccgcggtctgtttggcccgaacggcggcggaggcgctgatcatggcgacattcatctcggtgcagctgaaaaagacctcagaggtggacctggccaagccgctggtgaagttcatccagcagacttacccaagcggcggggaagagcaggcccagtacttttggatcatatatatgtagatgtgcaccttcatccatcaaatatttgctaatatatatactagaagattctcttgtatcaccagtgtcctttttgaatgcaaatcccaaaatagctatcttcttatcagttactgtattaaacagactatctatgatccgggaagcaaacctcctcctctggtagtcattcatgtctatgacctgctgccaataacgagctact

SEQ ID NO: 45808 - DNA, 476 bp, Homo sapiens
agctgtttcctgtgaggaaaagaacagctacaccgcgggggcggccgaggtactgatcaatctgcaccttgtagccttccctggcgtgcgtgccccgtgactccttccgcgcctctgctccgtagatggtctgcagcgcacacagcatcaggttctgcagctccagggtctccaccaggtccgtgttccagaccattcctcaggttttcttctgccatctgtgacagcttcttgatctgacctcaggtggatggctgtgtttgacgggtgttgctcgtgacagttggggtcctcctcagcatcagtcttgacatggctgcaactgggggggtcctcgggatcctcccggaatctcttcctcagcattcgctcatgataaggtttcaggtgtcttgatggttcagtcctggagaaacataagcataacctctaccccaagttattattttacctatttcccaactttctgttatcag

SEQ ID NO: 45809 - DNA, 499 bp, Homo sapiens
gtaatacgactcactatagggcgaattggagctccaccgcggtggcggccgcccgggcaggtactgggaagaaatctggcatcgagttcaattccgccaataactgggcaagcatggctttgttctccttgatgttcatggtccttttcagcaaagcatctgaactctcctggctctcatcccgagagtcatcctcagactcagaggtagaatcttccctttgtatcacctgtctacagtctttctttctttcaagaattgtttttttctcattctgtaagcgtgcgctagaaaacaactgctcggaagaactgtttttatctggtttgttggccagcttcttggtggggaactgaaaggctactcgaagaccaatactacttcttctagacctgcttcttctaggggtagccttatcttcttcttcatcttcctcttcctcgctcaccaaagatgctttgccatcatcactcaaatctgactccacgaccattacttc

SEQ ID NO: 45810 - DNA, 512 bp, Homo sapiens
ggcgaattggagctccaccgcggtggcggccgcccgggcaggtactgcggtctgtggtaatttacatgggaatgggatgagatctagtagttttagatccaacgcaattctgggaagggttggtaataaaccaaaactcaatctatgcagtatttaaaaaataattgagagttgtgacaacttcgattcttttcaggaggtgctgtcttaagatagaagaaagggatcaagctcttatcttagaaagcacagacacgtttagctcagggtagtgcaattcaatgctaagtggctgctccatgaaatctaagggccgggtaaggggaagaggcccagggatttcttccttgtctgacactctcgggactagcattctggcaggtcttacaagttataatacaaaaccatcagataaattctaatcacgactgtgtagttcctccccaaaaataattttccttttagaagtaaaatcaggaaaggggctgagttctgaaaagaaacatcggggc

SEQ ID NO: 45811 - DNA, 341 bp, Homo sapiens
ttggagctccaccgcggtggcggccgaggtaccgagaacagatatacgaaacattgggttctcctcggaccacctgctttgcacttccaaagtcacagagttttaatacagcagtatcaggatccaacatgaggttctgcggttcaatatcccgatggcagattccaaaggaatggatataggctaaacttcggaacagctgattcatatacatcttgacataaatcacaaggagcgtctgtttggctcgactatagtgtgtggcaactctgtatactgtttccggaacatagtccagcaccagattaagatagacctcatgtttcttctcaccactggag

SEQ ID NO: 45812 - DNA, 360 bp, Homo sapiens
gcaccgcgggggcggccgtcctgcctggtggtgaaaccccatctaccaaaaatataaaaaattagctgggtgtggtggtgcacgcctgtaatcccagctacttgagaggctgaggcaggagaatcacttgaactcgggaggtggaagttgcagtgagctgagatcgtgccactgcacgatccgcctgagcgacagaatgagattccatctcaaaaaaaaaagtacccatctgcctttctcttgcctcctacattgcccccacgattgccccgagatccacgggaaccacggcctctctgctgttgagcaggaccccctctgccacccttagagcctcttggtggccccaaaggtgccccc

SEQ ID NO: 45813 - DNA, 413 bp, Homo sapiens
ttagggcgaattggagctccaccgcggtggcggccgcccgggcaggtactgacaaccacctggtgctggtggacctgcggcccaagggcctggatggagctcgggctgagcgggtgctagagcttgtatccatcactgccaacaagaacacctgtcctggagaccgaagtgccatcacaccgggcggcctgcggcttggggccccagccttaacttctcgacagttccgtgaggatgacttccggagagttgtggactttatagatgaaggggtcaacattggcttagaggtgaagagcaagactgccaagctccaggatttcaaatccttcctgcttaaggactcagaaacaagtcagcgtctggccaacctcaggcaacgggtggagcattttgccagggccttccccatg

SEQ ID NO: 45814 - DNA, 475 bp, Homo sapiens
gactactatagggcgaattggagctccaccgcggtggcggccgcccgggcaggtacatcttataaattcataaaaaccttcttttttccatcttaggcttcaaattcttcataacgtgtttcaataggtaacctgtatcaattcttggtaaccctaggcagttgtcagccaaatagccttaaatttgcatgctaaaagaaagaactcaggtgaaaatcaaatagcaaaatatacatcataagatatggtgagagaaagtctggtgtgctgaagagaaattaaaactgacttaattgccaattaaacatgaaattatagaaattataaaggccttctaaataaacacacacacacacacacacacacacacaaagattctatagctcttactttagagatgtaggcatgagataaatacaaattcaccagcttgcaaataaataacctgttggatacaaacaatggtttttatctt

SEQ ID NO: 45815 - DNA, 529 bp, Homo sapiens
gcgcgtaatacgactgactatagggcgaattggagctccaccgactcgcgtatgcggcgacagtgtgcaggtacaatcttaacccaaaaagtgtgtgtgtttgtgtgtgtgtgtgtgtgtgtgttttgtttttgacagagacatgtaggagacaggtggaaaatttgaggctgatgaaccaaagagaatttcgagtttttagtacctgattgtggtgaccgacgggcaccccctggagggctacaaggaaccctgtggggggctggaggatgctgtgaacgaggccaagcacctgggcgtaaaagtcttctcggtggccatcacacccgaccacctggagccgcgtctgaacatcatcgccacggaccacacgtaccttagccgctctagaactagtggatcccccgggctgcaggaattctatatcaagcttatcgataccgtcgacctcgagggggggcccggtacccagcttttgttccctttagtgagggttaattgcgcgcttggcgtaatcatggtcatagct

SEQ ID NO: 45816 - DNA, 337 bp, Homo sapiens
tacgactcactatagggcgaattggagctccaccgcggtggcggccgcccgggcaggtacaccgactacggcggactaatcttcaactcctacatacttcccccattattcctagaaccaggcgacctgcgactccttgacgttgacaatcgagtagtacagtccggcccggtggggaggagggagggaaggcaggcacacgaagacacaggtatgtcgggaagtgcacacaaaccgttgtctttcctttttggataaagaagaaaaactttgtaatcaatatcctgctcataagtaaaagtggaaaagaagaaacttgattgctttcatctggcgt

SEQ ID NO: 45817 - DNA, 506 bp, Homo sapiens
acgactcactatagggcgaattggagctccaccgcggtggcggccgaggtaccatttgggtcaggattttgtcatttagatccgtatttttcctatatttttatctggttgttccgtcagttactgagagagcagtattaattcaccagctataattttggattgtcaatttcctgcttttgttctgttgtttttgattcacatactttgaggctctgtgtgtgtgtgtgtagtttgtgtgcactttgaggcacaatttataattgtaacatcatcctctctgattcttttatttttattaaattaccctgtttatttctggtgatatattttgttctgaagcctctttcatctagtgttaacatctctgttgaagctttttatgattagtgtctggatagcatatttttatgtttaatctgcatagcatattttttctcatactttgtgtctttgtgtttaaattgtgtctctgtggatgccatattgttgggtcttgccttcct

SEQ ID NO: 45818 - DNA, 564 bp, Homo sapiens
  misc_feature 26: n = A,T,C or G
cgactcactataggggccgaattggnagctccaccgcggtggcggccgaggtacaagcttttttttttttttttttttttttttttttgagatggagtctggctctgtcgcccaggctggagtgcagtggcaccatctcggctcattgcaatctctgcctcccgagcccaagtgattctcctacctcagcctcccaagtagctgggattacaggtgtgagccactgtgccaggccctgattcttttttttattaaaacataggctgggcacggtggctcatgcagattaaattttacattcatgtgtgattaaaatctcccctcatgagtttaggttgcaaaatccatgagagtagggactatgtttgactgtaatcagcaagatctttctaatgccttccctatgcctggcacacagtagatgttcaataaatatttactgactgaatgaataaactgtctcattagacactgttaggaatgtaaattgcttgctttatcgcttgttttcaaattaggagaaagcacatggataataaatgtttaagcaaagctcagctctaa

SEQ ID NO: 45819 - DNA, 466 bp, Homo sapiens
taatacgactcactatagggcgaattggagctccaccgcggtggcggccgaggtacatgaagcagccccttttggaagcatgtccatgcaggtccacatagtaagcaacgccactctctttgggggggatggtatcaggggctgactcttcaagccccgcagactgttgtggcataatccacacactgttgagcttctgttctgctggctctgtttgtttccaggcttcagcgttatgcctgtcagctgagtgcccacactgagcttcattttggagattgttggctttctccaggtcagaaacaggagcatcaggagggagacaggaactgggctggtgctcagaggaactctgggagttcagacgagagtgcacatggtggtagagaagcacagctttggccccatagatggccgggtgcaggacggcatcaggcttcaggtacctgcccggacctgcccgggc

SEQ ID NO: 45820 - DNA, 476 bp, Homo sapiens
gaattggagctccaccgcggtggcggccgaggtacggctcgctgggtctctacgtggccgagcagtttggggaagagaacgtgaacacctacttcgtgctgtccagctggtgggccaaggccctgtttgtcttctgcggcctcctcacgtgctgctactgctgctgctgtctgtgctgctgcttcaactgctgctgcgggaagtgtaagcccaaggcgcctgaaggcgaggagacggagttctacgtgtcccccgaggatctggaggcacagctgcagtctgacgagagggaggccacagacacgccgatcgtcatacagccggcatccgccaccgagaccacccagctcacagccgactcccaccccagctaccacactgacgggttcaactaaatccaggaggagctgtggtcagaggaggagccggcgcctggccacgccaaccttagaatcatgaactggtgtcacagagat

SEQ ID NO: 45821 - DNA, 430 bp, Homo sapiens
ttggagctccaccgcggtggcggccgcccgggcaggtactccagcctgggcaacagagcgagaccttgcttaaaatcagtgttgaaaaattttagaagctaaataggtaaaaaagcaggaaggtgcagacctccactagtgctgctgctttatccatctggtcctgtgaaggctcaccctgaagctatgggatggctgcttttgtttcatttttctcacttgtgatttctgagtccttttaacaatgatgaggcatggttggggatgtggaagatgagtaggatggtggtgctacagctggaggccacaggagaggtgcaagctgggctcagtttgtgtggctgccccacccactgtgttacgccacagaggcagccctgggggttaggattggcagatctctcgtggagacctgccatcgtgctgatcc

SEQ ID NO: 45822 - DNA, 640 bp, Homo sapiens
ttggagctccaccgcggtggccgagcggccgcccgggcaggtggagggggaagatggctcaccgggacccgttctgctaggaagaaggggagcaggtggtgctgctactcgggaggaagcagagcagcctccgtcgctgtcgctgagagcctcacgagtcgaggtcctgcaggtggagctccggcagccgccctggttgaaggtttagaacagatgtggaaaaatgtttacttcagagaaaggggttgtggaggaatggttgtcagagtttaagacattaccagaaacatctttaccaaattatgccacaaatttgaaagacaagagttctttagtttcatctctctataaagttatccaggagccacaaagtgagttgctagaacctgtctgtcaccagctctttgaattctatcgcagtggagaggagcagttgcttcaatttacgctgcaatttctcccagaactaatttggtgctaccttgcagtctcagccagcagaaatgtgcatagcagtggatgcattgaagctcttcttctaggggtttacaatttggaaatagttgacaaacagggacataccaaagtattgagttttacgattccatctttatccaaaccatctgtataccatgaacct

SEQ ID NO: 45823 - DNA, 602 bp, Homo sapiens
gactcactatagggcgaattggagctccaccgcggtggcggccgcccgggcaggtacacatcccatctgggcggtggcttcactcctgagtctgcaaaatcccaggaaacttgggtcttgctgcccatccttcctcagcacagggaacccggaaacccgttgcaccgacagaggctcacaccctctgggttttttgttttttttttaaacttcatttctcttccaacccattgtgttcctctgccctcattctttacctttgttgtaagaactttagctccagggaactgaggcagaggccctgtttgtggtctgtgttgacagccacccaccctctcccacctcatgctcctgcacctgcaccaccaaggttgatgccggattcgaagccaggaaggcccagtccctcctctgctctcctcaaagacgcaaaacattttccaacaagagctgtcacagtggcagcaaagcaggggccacccgtctccacagtccttcagagtttcagctgcatcctggtgtcccaccccagtcgagcccccaggcttctggaaaagagtgtgtgctctactttgatggaaacatggcaaggaatttaaaga

SEQ ID NO: 45824 - DNA, 506 bp, Homo sapiens
acgactcactatagggcgaattggagctccaccgcggtggcggccgaggtacttgaaatgttgctggttaaaagtttttctgctttgctcattcctttgacagcattaatttgtgaacatttatattcagttcagctgtatttatggcacaagatctcatttccaaaatggcactaattttccttaagtgtaacagcactctatttttagcagtaattatatttttaaaggttaatttgtagaacaaatgttttaactatactttttttctactctatactccccagttacaatatttacaaagggctgaagtctatataaaaaaatgatctttggctgggcatggtggctcatgcctgtaatcccagcagagaaaaaaggatgaaaaaaaagacaaaggaggggaaagaggagcagcagtgaaaatttgtaataaaaactcttcttaatttataggtaagttttggcatttttaaatccaacgccccctcccaccccctaaagtt

SEQ ID NO: 45825 - DNA, 666 bp, Homo sapiens
gactcactatagggcgaattggagctccaccgcggtggcggccgcccgggcaggtacatgtggccttttggattcccaagaatatgtggaagttttaaaagcctttattctccaaaatatcttactttccagcttttcctcccaggctttttggtgtgtctattgtttgccttagctattattctttgcccccgatggcagaggctaataaacttgcctttacaaatttttgacaaatgcctgtagtcacctttcttcctcaggagatttccaagttaggggaactaaaataagcctccataattctttgaaaagaaggtccacggccaggcacagtggctcatgaccggccagctactgtcttttctttgacccttcctttccagtttttgaagataaagcaggaaataatcttctctgaagatacttgataaaaattcccaaaacaacaaaacacatgcttccacttcactgataaaaaatttaccgcagtttggcacctaagagtatgacaacagcaacaaaaagtaatttcaaagagttaagatttcttcagcaaaatagatgattcacatcttcaagtcctttttgaaatcagttaatattattctttccccatttccatctgaatgactgcagcaatagttttttgtttttttttttttt

SEQ ID NO: 45826 - DNA, 444 bp, Homo sapiens
gtaatacgactcactatagggcgaattggagctccaccgcggtggcggccgcatccgcgagatcgagctcaagaaccggcacggcctcgtgcccttcgccttcgtgcgcttcgaggacccccgagatgcagaggatgctatttatggaagaaatggttatgattatggccagtgtcggcttcgtgtggagttccccaggacttatggaggtcggggtgggtggccccgtggtgggaggaatgggcctcctacaagaagatctgatttccgagttcttgtttcaggacttcctccgtcaggcagctggcaggacctgaaggatcacatgcgagaagctggggatgtctgttatgctgatgtgcaaaaggatggagtggggatggtcgagtatctcaaaaaagaagacatggaatatgccctgcgtaaactggatgacaccaaatt

SEQ ID NO: 45827 - DNA, 453 bp, Homo sapiens
  misc_feature 343: n = A,T,C or G
gagctccaccgcggtggcggccgaggtcttcttcctcctgcccgtagtagccatggcggccatgagtttgttgcggcgggtttcggttactgcggtggcagctctgtctggccggccccttggcactcgcctcggatttgggggcttcctcactcgtggctttccgaaggctgctgctcctgttcgacacagtggagaccatgggaaaagactatttgtcatcagaccttctagattctatgacaggcgttttttgaagttattggtaagtttaaattttttgttgaattaaagtctttgcatgtaacagggaaaaaaattttgcctctttagaaaacatctntcattttatgaaatattttattttgtaaatttatatttctttctgtagaagatactgagactgtaaagtctgatttgttattgaatttctctttaaattagtgaagcttt

SEQ ID NO: 45828 - DNA, 424 bp, Homo sapiens
  misc_feature 125, 126: n = A,T,C or G
ggagctccaccgcggtggcggccgaggtacatcccttgctaggtgagaagggggtcagagaggtcaggcacagacagagaagggaacgcaggctcctggccactagcctctctcaagaacagggnntcgaactttgtgttaagcgaactcatttaatattttgggcctaatagaagttatttgtattttctctcctcttttttccctcctctctctcactcaccctccccccactcccaccaaaaagtaccctgtgcagggagcggctagaagacacccacttcgtccagtgcccctcggtgcccggacacaagttctgctttccctgctcccgggagttcatcaaggcgcggggcccggccgctctagaactagtggatcccccgggctgcaggaattcgatatcaagcttatcgataccgtc

SEQ ID NO: 45829 - DNA, 438 bp, Homo sapiens
gctagattggagctccaccgcggtggcggccgaggtacccggcctccttctggttcgaggtccccagctccgcctacgtgttcctcattgtcatcaatctcttcatcggcatcaccgccaccgtggccaccttcctgctacagctcttcgagcacgacaaggacctgaaggttgtcaacagttacctgaaaagctgcttcctcattttccccaactacaacctgggccacgggctcatggagatggcctacaacgagtacgcaggccaggggtcttgaagacccttgagtcaaacctgggtgtcaggcctggagttggtttgaccatggacacctccaatcggcccacggctggggtaacagtgttagcacggcttgaccttttcccttttccttttccttgtatggactgagttctcttcttggatggaggacacct

SEQ ID NO: 45830 - DNA, 537 bp, Homo sapiens
gcgtaatacgactcactatagggcgaattggagctccaccgcggtggcggccgcggctccagcctggaggagctcagggtggccggcattcacaagaaggtggcccggaccatcggcatttctgtggatccgaggaggcggaacaagtccacggagtccctgcagaccaacgtgcagcggctgaaggagtaccacaaagggacccaaattcagcggtctgtgcctacaaacttcattaataactgcttgcagattggcagctatctggtcacttgacatatccaatgttgctattttggtctggagaaagttctccctttcttcatctaccttaatttcatgtccatttttaaataattcaagcattttggggatgtcacggccaatggaatttcgagaaagctttggatattttttattcagtttcttccttaatcgattaagttcaggcattatttctggaacagctacgtaaaagtctgcaacaatttcatcatcccaaatcttctgtatcagactagtgcctcctgcaaatgc

SEQ ID NO: 45831 - DNA, 270 bp, Homo sapiens
ccgcggtggcggccgaggtcaagctttttatttttttaatttttttttaagggttaaatgttccttttttgaaagttttaaaaaacctgtttgggtgtgttatttttgaaaacaaattttactctattatgattcatttttgcctaactcatatgagagatgcagagtatcaacagggggagcatcataaaatgaattttccaagtggacaggagtaggaagcagccatatgatagtattgactctggacagaattgatgtctttcgttt

SEQ ID NO: 45832 - DNA, 253 bp, Homo sapiens
atacgactcactatagggcgaattggagctccaccgcggtggcggccgaggtacaagctgaattgtagctccaccgcggtggcggccgcccgcgcggttggttttcggtttattcaagattaatgcatttagaccattcctttttcacacttacccttaagagtcccaatactttgttaaggaggctcatgtttctgcagtcctaattaaccatgaccagcactcccacctgagagtgagccactcggttgat

SEQ ID NO: 45833 - DNA, 417 bp, Homo sapiens
  misc_feature 189, 191, 192, 194, 195, 197, 203, 209, 212: n = A,T,C or G
cgcgcgtaatacgactcactatagggcgaattggagctccaccgcggtggcggccgcccgggcaggtaccaggcagctgggccccgcaggacaggccgcagcgggtggccggttctgttctgatagatttacagtatcaaactggaaaagaaagattgttacgaaaaatctgtagataaactgtgaatncnnannanaaaaanaaaaanaanaaaaaaaagcttgtactttcttgtcaaacaaaaccaatggctctgggtttggagaacacagtggctggttttaaaaattctttccacacctgtcaaaccaaaaatctatcagcccacgtggtgtggttggtgaacagtgcatgccaggaggaagcagtccctcctcaccagctctccagccaggacgatcacacagagatgaatg

SEQ ID NO: 45834 - DNA, 408 bp, Homo sapiens
  misc_feature 113, 203, 204, 209, 211, 212, 215, 219, 222, 292, 299: n = A,T,C or G
gcgggggcggccgtcctgcctggtacccaaggaagaaataaatttggaatagtcccctcccctccagggctgagatccaaaacatgttggaggagttgtggacatgactcaanccctgacggtagaggtctaatgagctgctgcaggctaaagctggcaatgggtgctttggaactcactggtcaattgtctcattgagaganntgtgnannaantccncantggacccactgatacttgacacggtgagtgccactagaagtccccatatatgccactggcagccacacanaatcacnaatagacacacactggaactaaaaaaagaaagcccttcctcttgtagtatcctctgaaggccctctactgacaaaacgttagcctgtccactaacgaggaagaaatgct

SEQ ID NO: 45835 - DNA, 458 bp, Homo sapiens
ttggagctccaccgcggtggcggccgctctagcacgagcggagccaaacatcatgaagactctgacgtctagcacatcaataccgtagacatcaaagcgggtcacctgacccatctttataacgctaataagaggtgtaattgagcacttggcgaaaacatggacgtaacggattcctggtaatggtaggctttctggagaaaatgatatttaagccaagaactcttagaagttagctaagagagagatgggaaaatgagacgacattgctggagtagataaaactgcatgttaaaggcaggaaggtggggaaaaaaagttcagtaaagctggaatggggaaatgtagtcagggactgaattttaaaggactttatcaacctcagtaaagagtttggaccctatgttgagggtggctgaaaacatattcatagtgtcatgaacaaattttatcttcag

SEQ ID NO: 45836 - DNA, 662 bp, Homo sapiens
actactatagggcgaattggagctccaccgcggtggcggccgaggtactcggagacaggtccagggctagggcacacagtgggccaggtgttcccggggaaagccaggcggcacaagctgcttagccctgtttgactgtgctctcagtgcccaggtgcagagggcatctgaggtctgagaatggggattcctgctaccagggctccatctcctgggggaggggtggaggcaactcgagtgaacacagcagaatgaacagtaagactcctgcccacacccctacctcctcggctctcaaattcatgtggacacacctagtttgggggatggtcccagactctgccatcccggcaatgaggacacatgaggccactggatgacagccctgcccaccctccagaagcccgggtctgccacacctagcacctgcagccaccaccttgatgggctcacagaagagaaatggagatgcttagaggtatgggaactgcttgcattcataaagttctctgactacagaactgggccaagggccctggtcctagaattctgctgtctcttaaagaaaattcacatctttaagaacaagtgtctaagtaagccttgaccctgtctgttttctatcttagtattctgtgttacacagaataaaccactcaact

SEQ ID NO: 45837 - DNA, 585 bp, Homo sapiens
tagctgtttcctgtttgctaaattactgataggagctccaccgcggcggcggccgaggtactggtcctactattatagaatgtttgcttcataagaacaggcactgactgtatcatctctgaacacaatggaatgaagctggcaataacaaaagaaaaattggaacatttacaaatgtgtggaaattaacagatttctaaacaatcaaggggtcaaagaagaaatcacaagggaaattagaaaatactttgagatgaatgaaaacaaaaacacaaaataccaaaactgagagtgtgtgatgacaacagtgtgcagagggaaattcatagctgcaaatgtccatattaagaaacaagacagtaactatgtgaggtgatgggtgttaattagctcagctgtagcaatcatttcataatgtatatcaaaacatcccactgtatactttatacttttttataaaaataaatattcttacaaaaggacaggcgctgtgtctgtctggctcaccattgtacgacgagctcaagaaggtgatctaaaggccgaggtcttctccacacacacacacacacctggggaaccaag

SEQ ID NO: 45838 - DNA, 308 bp, Homo sapiens
ttggagctccaccgcggtggcggccgaggtactggatgatgtcctgagtaagggggatgagcttgaggaggtggagcatggtgctgatagtaaggatggtgtggaggttgttccattccagggtaacgaggcataccttgccaaggcggtggcatagctcccttctggatgctgctcaacagataccatcaattccacggccagggctcctgcaatcacggccagtcctggacgactcacagtgcactgctggtccaaggtccggtctctggttgaatctcctggggccaccacatcattgcagaagt

SEQ ID NO: 45839 - DNA, 466 bp, Homo sapiens
cgactcactatagggcgaattggagctccaccgcggtggcggccgcccgggcaggtgccccgctgaatttaagcatattagtcagcggaggagaagaaactaaccaggattccctcagtaacggcgagtgaacagggaagagcccagcgccgaatccccgccccgcggcggggcgcgggacatgtggcgtacatttgaaagcctctaaagaacaactgaagcccaaattcatataaaagttgcgtttaagttgtattaaaaatagatatataagaaaaaattctttcacttgatgtttgttagaccagaaagtgtgtgtgttctgtagctcagttcccagacagctttttaggtagtggaggaggtggcttcatgtggcacttgggcatttatattccacttgggagggtcaggctgtggccttctggagcaggtggcttgttaaggaacgctagcagggcatggc

SEQ ID NO: 45840 - DNA, 474 bp, Homo sapiens
tgattggagctccaccgcggtggcggccgcccgggcaggtacagtcgcgcgatctcagctcattgcaacctcctcctcctgggctcaagtggttctcctgcctcagcctcccaagtagctgggattacaggcgcctgccactgtgcctgactaacttttgtatttttagtagagacaggtttcaccatgttggccaggctggtcttgaactcctgacctcaggtgatccacctgcctcagcctcccaaagtgctgggattacaggggtgagtcaccacgccctgctgatcacaataaaatttctttcacatgattcaccgtccacaaacctcctacaaccttcttatattccatcagttttttatttatcctatctataccttccctctttctcattttggggcaacctgtcattctacgttagggtgaaaattactctttttttccttaacaaagacacatatttcatacctc

SEQ ID NO: 45841 - DNA, 575 bp, Homo sapiens
ctcactatagggcgaatggagctccaccgcggtggcggccgaggtacccaagtcggggacttgaagttggacggaggaagacaatcaactggtgcagtgagtttgaaagagatcattggtctggaaggtgtggagctgggtgctgatgggaagactgtttcctatacccaatttctgttacccacaaatgcctttggagcccggagaaataccatagactccacctcctctttctcccagttccgtaacctgagccaccgcagcctctccataggccgggcaagcggcacccaggggagcctcgacacaggtagtgacctgggagactttatggactatgacccaaatctcttggatgacccccagtggccttgtggcaaacacaaacgcgttctgatcttcccttcctacatgacaacagtgattgactacgtgaagccctcggatctcaagaaggacatgaacgagaccttcaaggagaagtttcctcacattaagctgacactcagcaaaattaggagtctgaaacgagagatgcggaagcttgcgcaggaggactgtggccttgaggagcc

SEQ ID NO: 45842 - DNA, 497 bp, Homo sapiens
tagctgcttcctgtgaggctaaaaggagctccaccgcggtggcggccgcccgggcaggtactcgcggcagggccggcgcgccggcggagagccatctgttgaatcgggccggaaggtggagatccggagggcctcgggcaaagaagccctgcagaacatcaacgaccagagcgatcgtcttctgatcaaaggaggtaaaattgttaatgatgaccagtcgttctatgcagacatatacatggaagatgggttgatcaagcaaataggagaaaatctgattgtgccaggaggagtgaagaccatcgaggcccactcccggatggtgatccccggaggaattgacgtccacactcgtttccagatgcctgatcagggaatgacgtctgctgatgatttcttccaaggaaccaaggcggccctggctgggggaaccactatgatcattgaccacgttgttcctgagcctgggacaagcctgctcgctgcctttgaccagt

SEQ ID NO: 45843 - DNA, 439 bp, Homo sapiens
cgcggtggcggccgaggtacatacttgtaaacacggatttttctgggttttggtttgctttttccttttgtccccctgcccctgttctagcttgttcttcttggtttgctttcaacctgcttgatggatgtctgcagagtgctctctaagagtccacctcagtgcctcgtgtactcagtggtcatgggaaggagcgaaggaaccatccttggttctcccagcttggttgtgtagcaatccctcagcattgtttttctcagcttcttggcaaaaattaaaacaacaacaacaacaacaacaacaacaaacagaaggataaactggcttgcctgtggaccctccccggctctggggccagtcgagagccattgagggacccagcactcagagacacaacacacatgtgtagctgcttctggctgagtgtgtttcctgtcac

SEQ ID NO: 45844 - DNA, 383 bp, Homo sapiens
tatacgactcactatagggcgaattggagctccaccgcggtggcggccgaggtggcttgttctattttccttctcaaagagtcagggtcaacattttcttttgcacatcccaggacttccctactcttatcatccactccaataaaaagatagcctcctccagtgtttgcaaatgcagggacgtattctggaattgtcctttttacatattcttggaagtgttttgtagagaactgtttaaactctactaactgagactcaggaaaaggcaggatttcaccatattcaagatagtctttttggaaaattaggtcagcaggatccgagtttgggtcagcaagatccgagttagggagctcttggtatacacccttgtgaatttt

SEQ ID NO: 45845 - DNA, 338 bp, Homo sapiens
cactatagggcgaattggagctccaccgcggtggcggccgaccgggcaggtactgcaagacctcttgaacactttccagaggataggatatttaagtcatgcccttggcgttgcctatggcacctttcccttctgaaagtctggttcctgcccagtgacccttggccttgtgagccaagatgcttaccctgcataaagggccaaaggagggctgcggcttccttccctcactgaagagcccttatttgaattcactgtgtggagccctagccctccattctcgacattccccaaccttccagcccctttcaagcatgactaggtgccctgtattccac

SEQ ID NO: 45846 - DNA, 468 bp, Homo sapiens
ctccaccgcggtggctgccgcccgggcaggtacttgcagatggcccgtaagaaggctcgagagtcctatgtggagacagaactgatattcgcactggctaaaacaaaccgccttgcagagttagaagaatttatcaatggaccaaataatgctcatatccaacaagttggtgaccgttgttatgatgaaaaaatgtatgatgctgctaagttgttgtacacccagcactttgcgacctgcggcccatcaggcgcggaggatggcggggaggaagccagcagcccctgtgtttactgtcgtcagaaaggtcttgtgttttggttttggggtttttgttttgtttgtgttttgtttggcttgtttgttttttaaggggaaaaaagtttgtaattatttcatccaaatctcccgttatatatctgtgaataataagagattttataatagcaagaaaatgatgtatatttt

SEQ ID NO: 45847 - DNA, 477 bp, Homo sapiens
ggagctccaccgcggtggcggccgcccgggcaggtacttgtggaagatggccacgaggaggccaatggcctgatccagggggcatgccatggctgagggctgggcttggagcggtagggaggcggccaaatgcgacgcgagacagaggacaaagacccctcacgatgaatgctcttcagccagcttatcagcttttgccacagcttcttcaatgggtcccaccatatagaaggcctgttctgggagatggtcatattcacctgccaaaatctgctggaatcctttgatggtctccttcaggggtactttttaatggaaacaaacttgaccaaaaatttgtcacagaattttgagacccattaaaaaagttaaatgcgaaaaaataaataaaaaaaaaataaactaaataaaaaaacttaaaagcttgtacctcggccgctctagaactagtggatcccccgggctgcaggaattcga

SEQ ID NO: 45848 - DNA, 325 bp, Homo sapiens
ctcactatagggcgaattggagctccaccgcggtggcggccgcccgggcaggtacacgtatgaataatagcacaaaataatgaaaaacaaacaaaaaacaaaacaaaaaaaccccaatctcccaaattaatgactatttacaaattccgaacctatttctactcagtaattatttagacagatgtttttcttggtactatcactatttgatcataactcctgattctacgtattagaggattatgactgtttcacgtaactatttcttttcaatagttttcatagttgtcatacacaaagaaaggctcattcctctaataaacca

SEQ ID NO: 45849 - DNA, 430 bp, Homo sapiens
gactcactatagggcgaattggagctccaccgcggtggcggccgcccgggcaggtactaagcaaatgcaaggttataatttagctaatagtagtttacagacaattctgatgattatgatttcatttggtttaactaagctgtaccgctcacattcctcgtgccagtgctgccacttcagctccagctctgtcagtgtctgggtgttcccaggactaagaatgggcattgtcctcatcaggtcccccatgattcggcatatgcctgcagaggcggggctggcatcggcttccttggagagcatctgtcgggcctcattcagccggccctgcagcaccaagatggtcaccaagttccagaagctgtcatgtttgcttggattctcactgcccagaacatttgccgacaaactgtccacctcgcacacatgg

SEQ ID NO: 45850 - DNA, 455 bp, Homo sapiens
gctgattggagctccaccgcggtggcggccgaggtacctattctcttatttgaatctaatggttcattaatatatactcccacaattgaaattaatagtagtcaccacagcgcaatggagaagagattacaagagatgaaggagaaaagggaaaatctttcccccacctcttcccaaatgattcagcagtctcatgataatccaagtaactctctgtgtgaagcacctttgaacatttcacgtgatactttgtgttcagatgaatactttgctggtggcttacactcatcttttgatgatctttgtggaaactcaggatgtggaaatcaggaaaggaagttggaaggatccattaatgacattaaaagtgatgtgtgtatttcttcacttgtattgaaagcaaataatattcattcatcaccatctttcactcacctcgataaatcaagtcctca

SEQ ID NO: 45851 - DNA, 456 bp, Homo sapiens
ttggagctccaccgcggtggcggccgcccgggcaggtacttttttttaataatgaagagattttttgtgcagtattaaaggaagacatttttcttctctagtcaattaaccgtatccacttgtctagtgtttggcggaatgaagtttctataagtcatgccacttttcttataattgttttaaaaaattatacctttcctttctctagttcttgcaacgatagcttttgcttttcttctcctcccgatgtgccagtatttaacaagaccctgctcacctcagaacaagatttcctttggttgctgtggacgtttcactgctgctgagttgctgtcattctctctgtctgtcatgctcgtcctcatctgggttctcactggccattggcttctcatggatgcactggccatgggcctctgtgtcgccatgatcgcctttgtccgcctgccgagcctc

SEQ ID NO: 45852 - DNA, 569 bp, Homo sapiens
  misc_feature 496: n = A,T,C or G
gtgtggctaattggagctccaccgcggtggcggccgaggtcttgatgccaaaatgactttatacaacgattgtatttgtgacttttaaaaataattattttattgtgtaattgatttataaataacaaaattttttttacaacttatttctgagttgtgcgtttgttttgagggaaggagtgagagaaggcaggcaacagcttcacccctctaaaagtggacactcacaccaaactctgtgacaacggtttttcatttaaaaatgtttcagaggccgggcacagtggcacacgtgtgtaatcccagcactttgggaggccaaggtgggtggatcacccgaggtcaggagttcaagaccagcctggccaacatggcaagagcctgtctctattaaaaatacgaaaattagctgggcgtggtggcagacgcctgtaatcccagctactcgggaggctgaggcaggagaatcgcgtgaacccgggaggtggaagttacngtgagccgaaattgcgccattgcactccagcctgggcaacaggagcgaaactccgtctcaaaaaaaaaaaaaa

SEQ ID NO: 45853 - DNA, 667 bp, Homo sapiens
tcctgtgtgtcaaactacagctacgcccgcggtggcggccgtccgggctggtacagaaacaactcagcgtttgccttgtttgagcacagtttgaacatttggcagtgcctgagtggttgaagtttggccattgggattgaccaagatgtagctgttgtttgaggtgcatacactcaagttaggttttcattcttgtttacctattaaggtaggttgcaggtcatccacaaggactcataaatataattatggagtccttctcaggacatacttagttcactttaacaatgccttccctttggttattttctcaattttgagagactggccaaaacttcagtcactggtgtcactattacccttgcaaatgtacagaggtctctggaaagattggcagacctgctaggaaagatccagaaagcattgggagaatatctggaaagagagcggtcatctttccccaggttctattttgtgggtgatgaagatttgcttgaaatcattggaaacagcaagaatgtcgctaaattacagaaacacttcaagaagatgtttgctggagtttcgagcatcatcctgaacgaggataactctgttggtttgggtatttcatctcgggaaggagaggaggttatgtttaaaactcctgtgtcaattactgaacatc

SEQ ID NO: 45854 - DNA, 467 bp, Homo sapiens
ggcgaattggagctccaccgcggtggcggccgaggtatcccatcgactgcgtcaagacccggatgcagagtctacagcccgacccagctgcccgctatcgcaatgtgttggaggccctctggaggattataagaacggagggcctatggaggcccatgagggggctgaacgtcacagcaacaggcgcagggcctgcccacgccctttattttgcctgctacgaaaagttaaaaaagacattgagtgatgtaatccaccctgggggcaatagccatattgccaatggtattgagccttcctgtgctggttcccccactttcccaactctttgggctttgctgctgtcagtgctttccagtctcagcatggtttggagctgaagctttgggctgggataggccagattataagggagggacttccaaacctgatgttctcagacaacgggccgcttcaaccctgccttt

SEQ ID NO: 45855 - DNA, 394 bp, Homo sapiens
accgcgggggcggccgaggtacatatatgtcacctgttggcccgtcaaaatgcatactccttctgtgaccagccaacaggtgacatatttgtatgcattttgacgggcctgggcttcaatggctttgaagaaaagggcaaggcaaagtgggatgcctgtgccaacatgaaggtgtggctctttgaaacaaacccccgcttcactggcaccattgcctcattcaacatcaacaccaacgcctgggtggcccgctacatctttaaacgactcaagttccttggaaataaagaactctctcagggtctatcgttgctattcctggccctctggcacggcctgcactcaggatacctggtctgcttccagatggaattcctcattgttattgtggaaa

SEQ ID NO: 45856 - DNA, 487 bp, Homo sapiens
gcgcgtaatacgactcactatagggcgaattggagctccaccgcggtggcggccgaggtaccagcagtctcagttctccagttttttccaaataaatattggcccccgaggagtccgtgaaggacctgatgcacacggtcaggtgccgggcaggcgagaaggtgttgggccgcaggttaacgatgagagcacctgttgggtacaacacgcctccatgtttcagcatctacgtcatgggcttggttctggagtggattaaaaacaatggaggtgccgcggccatggagaagcttagctccatcaaatctcaaacaatttatgagattattgataattctcaaggattctacgtttgtccagtggagccccaaaatagaagcaagatgaatattccattccgcattggcaatgccaaaggagatgatgctttagaaaaaagatttcttgataaagctcttgaactcaatatgttgtccttgaaagggca

SEQ ID NO: 45857 - DNA, 459 bp, Homo sapiens
  misc_feature 386: n = A,T,C or G
ttggagctccaccgcggcggcggccgaggtactctctttcagtaaggagatttccaagattctgagaagttcctgcgctcaggcctagctcctctgtgttgctttgggccacctggggctgcaccccctgccctttctctgccccatccctaccctagccttgctctcagccaccttgatagtcactgggctccctgtgacttctgaccctgacacccctcccttggactctgcctgggctggagtctagggctggggctacatttggcttctgtggaagcagctggcttcactgctcaggtgattatcctgaaccatccaggccaaataagcgccggctatgcccctgttttggattgccacacggctcacattgcatgcaagtntgctgagctgaaggaaaagattgatcgccgttctggtaaaaagctggaagatggccctaaattcttgaagtct

SEQ ID NO: 45858 - DNA, 461 bp, Homo sapiens
tatcgacttactgtagggcgagattggagctccaccgcggtggcggccgaggtacccattcctgccgttgcttcctatcctgggcttggaagaatcctggaagaaaggccaaagtgggtttgtggagtccccactgcgggaccagcacgaaagctgcttgtctgctttggcggagctgagctgtgtatgggatccatgaggctggggtgatttattttatgggattcctggagcgcagggctggtgaatccatgacaaggtccgggagcagcacaccaaatccacagcagcctcctattaagttaacaaatagttaagcaactcgggctacaaacaaagactttgctaccttcctgctccacaagccccaagtaattagccttctggagctggctcttagctgaggctcctgctacctactgctccagccgccccttcctaggttacaagtaaatcattgt

SEQ ID NO: 45859 - DNA, 467 bp, Homo sapiens
agctccaccgcggtggcggccgctctggcaggtactataccttccaaatgcccaaggcagacacacccctactcagatccctatttaggacctaagctgtgccatttgaacagctacttccaagttcagtctagatgaaaccgacacttgaccacacacaaaggctatcactgccttgaggggtgcagaccgcagaattttcacagcaggggctcttggaactctggaaacccccttcttaaatttgggaggaggagtatgcctttggtgtccccctcccaaggggcaattctgaaccccatctttggcaggcatacatatttcactgtttccaaagctatctactctgccaaacaacacccagtcctattccaaactctcaacgattctatcttgttcctgtttttctatgtatttatggttgccgtttgtgtctgatttgattttactgttttttccctgatttt

SEQ ID NO: 45860 - DNA, 490 bp, Homo sapiens
tcatagctgtttcctgtgtgtagaccaacagccacacctcgggggcatccctctttcctggtacaaaaaaaatgcccagctcatccgtccagtccctgttgaccacgttgacgcacatctcgccattggcgcccacgttcgggtggaagatcttggtcaggaagtagcccttgggtggggaggcagggaagtccttccccaccaggagtttcatgcggaacagacctccagcatatggggtcccctcagggccctcgatggtgacctggaggtccgtgaggtcctcctctttgggaaagaccttgatgcctccggtgggtctgcgtcagtgtcatcacctccttgtaccttggccgctctagaactagtggatcccccgggctgcaggactgcgatatcaagcttatcgataccgtcgacctcgagggggggcccggtacccagcttttgttccctttagtgagggttaattgcgcgcttggcgtaatca

SEQ ID NO: 45861 - DNA, 200 bp, Homo sapiens; identical to SEQ ID NO: 41040

SEQ ID NO: 45862 - DNA, 412 bp, Homo sapiens
cgcgcgtaatacgactcactatagggcgaattggagctccaccgcggtggcggccgaggtacttgaacaaggaaagagacggctgtgccataaacaaggaatcacaggaaaactcagaagtgcccgcccttctttcttgctagtttcgtggtatgttctgctttgcttgtctgttttggtggacacacagtggtgccaattcgtatttcctaaaagagccacattggctgcttgtaaagagacctctcatttgaacagtgttggcaagatcgattgttctggttctagacagagccccatggctcccaccacctggacaggcttaaggcatatgggggtatctaatgtgtttacagaagccaaggcaaaagaaaagcttgcgagctatgaatttgcttttgcccaataagct

SEQ ID NO: 45863 - DNA, 493 bp, Homo sapiens
actcgttatacgactcactatagggcgaattggagctccaccgcggtggcggccgcccgggcaggtacaactcccgagccttggattctgataactggacatttttcaagagtggtgcaggcatgtcatctttaccgatgaaactcatgacaagaacatgacttcttagcattattggttctggacatggtatctctgctgtgtttagcctgattaagttcctcatttctttttctgcccaagttttcaccattttcctagggtttcctttacaatagccatgacgaaatatatttatcccgatctttgaacaccaaaatagaagttttataaattttgattgctctgctctctccatttgctgtgctagcatggtatacattagcttcttttcctgtgctaatgcagccatttatctctgttatgattcctctagtcaacatcttgaataaaatcattcttgttctgggatccaacacctgttctacagttg

SEQ ID NO: 45864 - DNA, 463 bp, Homo sapiens
tggagctccaccgcggtggcggccgggtgcagtggctcacgcctgtaatcccagcactttgggaggccgaggtgggcagatcacgaggtcaggagatcgagaccatcctggctaacacagtgaaaccccgtctctactaaaaatacaaaaaaattagcccggcatggtggcgggcgcctgtagtcccaactactcaggaggctgaggcaggagaatggtgtgaacccgggaggtggagcttgcagtgagccgagatcgcgccactgcactccagcctgggtgacagagcgagactccgtctcaaaaaaaaaaaaaaaaagctctacctcctgcttgactggcaacacaggatgtcttgtgcagcaagtataaaggacaaaaacacaaacatataacactttccagtggggcttccatcagtccccaaccggacagtgccccctaaaccatagaccccacagag

SEQ ID NO: 45865 - DNA, 458 bp, Homo sapiens
ttggagctccaccgcggtggcggccgaggtgcgttgcgcagaaggcggcggcggtggtggcttgtggtgcggcctcaccatacaggaacagggcagacgttagcgtgagtgatcactctcaatcccggggacccggtggccttagtctttcaggtggaacggtgtgcgacatgggaaagaaaaccaagcggacagctgacagttcttcttcagaggatgaggaggagtatgttgtggagaaggtgctagacaggcgcgtggttaagggacaagtggaatatctactgaagtggaaacctttgccagaaatacatataccttgtatattaaatctgagtctcagatttaatcatcgaagcgtagctgggttaagaaacagtctgatcgtaaggatgttgtcgattctgacccatggatgaccacaagaaaaagatatttatttctgcctggataattga

SEQ ID NO: 45866 - DNA, 474 bp, Homo sapiens
tagctgtttcctgtgtgtagaccgacagccagtaatcatggtcatccctgtttcctgtgtgtaaaacaacggccagcaggaatgggctttcatgcttcttgataccaaaaacctacagggggggcccggtacccagcttttgttccctttagagagagggaattgcacgcttgacgtaatcatgatcataattggatcctggccaagttgaattatgtggaaggtgattataaagaagctctgaacatttacgcccgggtgggcctggacgatctgccactgacagctgtcccgccctacaggctgcgggtgatcgcaaaaccctacgctaccaaaggactttgtttggagaagctgcctatttcttcttctaccagtaatctccatgtggaccgggaacaggatgtcatcacctgttatgagaaagcaggggacatcgcactcctgtatctccaagagatagaaagggtaata

SEQ ID NO: 45867 - DNA, 630 bp, Homo sapiens
atagctgtttcctgtgaggaaaagaggagctacaccgcgggggcggccgtccggcctggtacacgtatgaataatagcacaaaataatgaaaaacaaacaaaaaacaaaacaaaaaaaccccaatctcccaaattaatgactatttacaaattccgaacctatttctactcagtaattatttagacagatgttttccttgttactatcactatttgatcataattcctgattctccgtttttgaggattatgactgtatcacgtaactatttcttttcaatagttttcatagttgtcatacacaaagaaaggctcattcctctaataaaccacaatctagttagctgtcaccctgcagccgaacagtttccagttcttgcctgtaatatacagagcagcctcaaatgtctgtatgcaaatattttttctcttacattattttcccagaatgtattccccaaagtgagacaactgattcttataatcatttttgtcattcttgcaaagtctagccaaattattctccaggatcatttttatagtgccaggagtctatttctccgcaagatttctcacccatttatttaacatttatttttgaccactgcaagtggatttaattatttattt

SEQ ID NO: 45868 - DNA, 476 bp, Homo sapiens
aattggagctccaccgcggtggcggccgaggtacttcagcgttgggagccaggtgtcgtgccggacgtgccaggagcagcggctgcagggcgaggtggtagcctttgactaccaatccaaaatgctggctttaaaatgtccctcttccagtggaaagcccaaccatgcagacatcttgctcataaacttacagtatgtttcagaagtggaaataattaatgaccgaacagaaacccctcctcccctagcttcactcaatgttagtaagcattaaagactgtaaatggcaagaaaaaacatcgtagtcatggaagaagttgttattacacccccatatcaagtggaaaactgtaaaggcaaagaggggagtgcactgagccatgtacctgcccgggcggccgctctagaactagtggatcccccgggctgcaggaattcgatatcaagcttatcgataccgtcgacctcgagggggg

SEQ ID NO: 45869 - DNA, 575 bp, Homo sapiens; identical to SEQ ID NO: 45841

SEQ ID NO: 45870 - DNA, 586 bp, Homo sapiens
gaattggagctccaccgcggtggcggccgaggtacttcattaacaagtcaacgccgtttctgtccagtgactgcacagcctgctcaatctcactgctcttgaagtttgtgagcactttcagcaccacgccctgggctcgctccttcacagcttgattcttggtgttgacgggagagttccgcaaggctgcatggaatgcccgaagcatgtcccctgtgcatcaccaccagttaaggatagctaggctcaagcacatccatgccgtcatgaacaagctcacttcagaaacagctcaggaacagagtcagatgggatctcatccataccacccaccttccacggcttccaggggggcagagacggtttacagcctgcacagggaggctgcagggcacctctgccaaccatgcaaaccctcctttcaactccctctctaccttccacgtcaaagcaactgtcctggaggggtaacttgatgtaaaattggattgtgctcacttgcacctgcttggtgctgagcactgtatctaccctactggatcctcacagcacccgtgtgagacaggagcccaggggagaaagacag

SEQ ID NO: 45871 - DNA, 460 bp, Homo sapiens
tatacgactcactatagggcgaattggagctccaccgcggtggcggccgaggtactgcgatatccacatatttttgagacaaattcccaagccaggcgaatgtggattggaataaagacataggcagtgtataccaccatagcaataatggttagtaagatggtgttaaacatagatcgctcccagggctctaaaacagcacagcagctaatgatttggtattgatagtagagccaggagaaatattccttcacacgcctcaaatccatggctggctccttcaagctgcagtaagtttgacccaagaaagtgcaggtctggttgttcagccttgctccttcgcgaaatgatcctgtgcgggttagttctcctctctgggatgctgtttcctcatctcccaggtgggtgtatctccctgcggcttacgtgagcgccgaggctgtggctcctccccagctgc

SEQ ID NO: 45872 - DNA, 469 bp, Homo sapiens
ttggagctccaccgcggtggcggccggcagccggcagctttgcagcggtgtgttctaggtcagtggcttcaaagactccagttggattcattggactgggcaacatggggaatccaatggcaaaaaatctcatgaaacatggctatccacttattatttatgatgtgttccctgatgcctgcaaagagcttcaagatgcaggtgaacaggtagtatcttccccagcagatgttgctgaaaaagctgacagaattattacaatgctgcccaccagtatcaatgcaatagaagcttattccggagcaaatgggattctaaaaaaagtgaagaagggctcattattaatagattccagcactattgatcctgcagtttcaaaagaattggccaaagaagttgagaaaatgggagcagttttcatggatgcccctgtttctggtggtgtaggagctgcacgatctgggaacct

SEQ ID NO: 45873 - DNA, 454 bp, Homo sapiens
gagctccaccgcggtggcggccgcccgggcaggtacataaaggatgcttaagggaacatgcggacatggattactgtggactcactgctggctgcacaccccctggccagccatgcggcctccgtgggttctgaacatgttgatggtgccaacctcctgggccgaagtggaaatggaatgagttctagggcatctgtctcttagatcatgttaatgtttgctgtgttttttctgtattgctctgttagagtaataagaaacgtgatggtgtttctggcctcaggtgcggattgatgagtacctcggccgctctagaactagtggatcccccgggctgcaggaattcgatatcaagcttatcgataccgtcgacctcgagggggggcccggtacccagcttttgttccctttagtgagggttaattgcgcgcttggcgtaatcatggtcatagct

SEQ ID NO: 45874 - DNA, 533 bp, Homo sapiens
  misc_feature 418: n = A,T,C or G
gcgtaatacgactcactatagggcgaattggagctccaccgcggtggcggccgcccgggcaggtacaaaccagccaacccaccacccaggccaccatccacctgccctgatcacccagggcagggtatcggacaactcaggacagcccctgtgccccagagcctgctgaaatggcgcaaccagccactctttaccctaccttatcccacagaaaacacaaggaagccgcttgctcgtggtctacctcctgggcaccattggtgcgtccccatgtggcccctgtggcatgccccctcctctggggaagctgtgagtataacaagtcatcttcctttctttcttttttcttttctttcctttttttttttttgagatgtagtcttactctagcctgggcgacagtgagactccacctcanaaaaaaaaaaaaaaaaaaaaaaaaaaaaaaaaaaaggtcacgctgggcccctctctacagggggacacacaggcttagtttagtatatgtctaaccagattttgcatgtcaagca

SEQ ID NO: 45875 - DNA, 402 bp, Homo sapiens
ggagctccaccgcggtggcggccgcatgagcatcaaagcctacgtcagcactttaatgggagtccctgggaggaccatgggagtgatgttcacgcctctgacagtgaaatacgcgtactgtgtgcagcagctcaaggaatttgatgggaagagcctggtctcagttaccaaggagggtctggagctgcctgaggatgaggaggagaagaagaagatggaagagagcaaggcaaagtttgagaacctctgcaagctcatgaaagaaatcttagataagaaggttgagaaggtgacaatctccaatagacttgtgtcttcaccttgctgcattgtgaccagcacctacggctggacagccaatatggagcggatcatgaaaagcccaggcacttcgggacaact

SEQ ID NO: 45876 - DNA, 448 bp, Homo sapiens
  misc_feature 146: n = A,T,C or G
tagctgtttcctgtgtggcaaagaacagctacaccgcgggggcggccgaggtacctcttcaacacaggcattcggaagttgcctgccagtgtagccaggtaaggccgtatgcctgggaacttcttgctcacttctgtggcctctgntgcccctaagttgcggaaggcacccaggcccatgataccatgggggtggtatccaaagatatagttcctggtggtcagcaggttgtgtgtcttcaccagctggatgggaaagtagtctcgaaagtagcgccacacagcccagtttcggacccactgtgacctcctgccacctttcttgggtgtgttccagtcaaacaccagccaagtgaagtagagcacagcgatgagccagcaatcagtgcagaatatgtacctgcccgggcggccgctctagaactagtggatcccccgggctgcaggaa

SEQ ID NO: 45877 - DNA, 534 bp, Homo sapiens
  misc_feature 323: n = A,T,C or G
atcgacttactggttggctgattggagctccaccgcggtggcggccgaggtagctgtgctacgtcgccctggacttcgagcaggagatggccaccgccgcatcctcctcttctctggagaagagctacgagctgcccgatggccaggtcatcaccattggcaatgagcggttccggtgtccggaggcgctgttccagccttccttcctgggtatggaatcttgcggcatccacgagaccaccttcaactccatcatgaagtgtgacgtggacatccgcaaagacctgtacggctgaggtcagtccccatccagagtctctcanagctggagagggcccggctgcaggaagtggctttttatcagttgcaacaggactgtgacctgagctgtcagatcaccattcccaaagatggacaaaagagaaagaaatctttaagaaagaaactggattcactaggaaaggagaaaaacaaagacaaagaattcatcccacaagcatttggaatgcccttatcccaagtcattgcgaatga

SEQ ID NO: 45878 - DNA, 452 bp, Homo sapiens
aattggagctccaccgcggtggcggccgcccgggcaggtacctgctactttttaaacaatttcaactgcagctctctttcactaagtaagatgggtaaagcatgccatttctgttttcttgagatttttactttttagaaacacacatgcttccactgccatctgacacttctccacacgctttcatcttgtaaacctgaattctatttcgagtactattctaacattgcgctttataagggatgatatttctaccacctcactcatatttttagctgaaatgattttcctggtatgtctgttattttgtggaaaaagaaatattgtgtaaaatgggtgctgccaaaattccaggccattttgcagggactctgaagtgacctttagtagtaatagtcttatgtgcagtaactataatggtaaagaatgttaaataataaaatttaacattt

SEQ ID NO: 45879 - DNA, 499 bp, Homo sapiens
ctcactatagggcgaattggagctccaccgcggtggcggccgaggtacttgaaacacctcctttgcatttctccatttgtgccattcactagtggaaataaattgtattataccatgatctactggctttttaaaactgtattaaatatgcacatttttggtatagctattatcatttgtatgtatatattgtatatacatatgagtgtctgtatgtgtgtatagatggattaaccagccccagttccgggctgtcttgggggaagtgaaactgtgtgagaagatggcccagtttgatgctaaaaagtttgcagagacccaacctaaaaaggacacaccacggaaagagaagggtttcacgggaagggaaacagaagccccaggctgagcggaaggaggagaaaaaggcgggtgcccctgctcctgaggaggagatggatgaatgtgagcaggcgctggctgcttagcccaaaggccaggaccccttcgctcacctgcc

SEQ ID NO: 45880 - DNA, 555 bp, Homo sapiens
cgactcactatagggcgaattggagctccaccgcggtggcggccgcccgggcaggtacctgccagccgtctcactgggccggatgatcttcaccacctgcccacgctttatcccaaagtagcgcgccacagggtcccccgcctggatcctgggcagctggttctctcggagcttatatcgggccagcagctctgtcacctcctccttggtcatgacgacgtgctcagggactagctcgtgctccgtgatgttgatgagcagctcctgctgtagaaactgctccaggatgtacatttacaaagatgcgttcaaatagtgctctaagagttttgttcagtggctcacttcggctaaaatgcagaaatgcatgctgtcagcgttggtatttcacattcaatggagctgaatgttcaggacctcttcccattgaagctataatttatttggaccaaggaagccctgaaatgaattcaacaattaatattcatcgcacttcttctgtggaaggactttgtgaaggaattggtgctggattaatggatgttgctatctggg

SEQ ID NO: 45881 - DNA, 409 bp, Homo sapiens
ggagctccaccgcggtggcggccgaggtacttgcttgtaagcatgaggagggggttttgatgtgggttgggtttttatgtacccgggatgcccgttaactaaaagctttgcagaaataagaagaggctgctcctgttagagcggcttgactagctggtccactccgggcctcagtctggggggctggcgggcaggttgcagcctctccgtgatgcagcgcagccttggattccattggacctcttagtctggccctcatttttgaagctaacagaaactgtctgtagtgactcttggcgtatgctacctgggaggaaacgcactatttgtgtcttggaattagcccgcattagacgataaagcacaaacccttgtaaatgaaatgcggccccacgggcagctggacaga

SEQ ID NO: 45882 - DNA, 481 bp, Homo sapiens
ctatagggcgaattggagctccaccgcggtggcggccgaggtactgaagattttttatttcattggtagttcttttccttttgaaaggtgactttggcatatcagccacagggatcatttgttctcctggacgaacccacatgatgggaccatcatcactatcttttcgactctgtaattttagactagatagcgtcccccatggcagtgtaccacgcacaggagccgtcacttctcttgatgcaggcgaagaacttggcctggtgcccgttgatgttcttctctgtgacccagtccatccagaggcactcgtccggggaggagatgtagcacgggatcatggggcagcgcgtgatcttgcactcgcagcccatctggtacctgcccgggcggccgctctagaactagtggatcccccgggctgcaggaattcgatatcaagcttatcgataccgtcgacctcgagggggggcccggtacc

SEQ ID NO: 45883 - DNA, 456 bp, Homo sapiens
ggagctccaccgcggtggcggccgaggtactgacatggctgatacggttctcgtgctctggcttgaccagcactgccaccttgatattccacagtgattgcatggcaatctgggtagagagtgcatggtcaccactgccctgctgcacccactgcctgcatttccccctgcactataaatagacttttgtgtccatcacagggtaggaaggcttgccacccctcttcctgacggactggagagaaatggttcctctcgtggcatgaaggactcaggtcagatctcccaaaggatatgctcagggaccagagaaaaagccagtgaagctgtgctcccagggttgcccatgaagtcaagtaagctagtttggaggtggtgtgtgaggacagggtcctggacaagatgaccccccctcaccgggcggtaatccagatccgtaagctccttgaggccccc

SEQ ID NO: 45884 - DNA, 415 bp, Homo sapiens
atacgactcactatagggcgaattggagctccaccgcggtggcggccgcccgggcaggtacccagtatgtgcagggagacggaaccccatgtgacagcccactccaccagggttcccaaagaacctggcccagtcataatcattcatcctgacagtggcaataatcacgataaccagtacacttactgcaactgcatgttgtctaaaatagtttttctataggatgtatataaaaactaatccctcttgagctgatttataatgtgtgtatatagccacacataaaaagctagtaatagtagggctctcagaaaatactttccagttgtctaaccttgaatgttattaactcttctatattacaggagatacaactcgtcaacgaatcaaattcagtgatgacagagtatgcaag

SEQ ID NO: 45885 - DNA, 590 bp, Homo sapiens
tagggcgaattggagctccaccgcggtggcggccgaggtacttgtatccacctctatgatctcaaaccttcccatggaaaatgtctcagcttatccccaagcagctgtttccccaccacagatggatgcctgtacagttctccttagcaagtgataagttgtgtatgggttctaaaggagggaaaatcacagaaaaatgttgtcctgttttgaaagtgttttaattagacaaaagcatcaggacaaaccattttaaaaacaacgtcttcaacttgggtgttgagattggcaaaaggggaagcaagggaaaagccaaggaaagataaaatattcagaagaaagtcaaagttatctgcaattacatgttagaacagattttgcaggttaaaaagatgttgcttaaatatattcataagcctgttgtaagattttcacttatgcagtttcagaaaatttagctgcttaacatatgacagaactgtattttaacaaatgacattaaaagtcaggggagctactcagttaattgataaagtagaggcaacgtgggggagccctccccacgtttattgaagatttgtggctccccc

SEQ ID NO: 45886 - DNA, 616 bp, Homo sapiens
cctcactaaagggaacaaaagctgggtaccgggccccccctcgaggtcgacggtatcgataagcttgatatcgaattcctgcagcccgggggatccactagttctagagcggccgaggtacacagtttccttaggggttgttctaagtattgccatacacataggtaacttatcacagcttactggtgtcaatgttttaccacttccagtgaggtgtagagaccttacctccatttagatctctgtatcccctccagttttaaaatacaattatcttaagtatttcttccacatgcactgaccagcaccatcagatgtcattataacttctgcatcaccatttctttcatatgatgaaagaagctcatgagataaagaatagtctagtatgtttacttctatttttactcatcctgttctccctgctctgaaaatctcagctttgggcttttaccattttctttctggtggagaagttcctttagctattctttaagggtagatctactagaaacaagttctcttagttttcctgcagccatgctggagacctgcatgccttaaagtcatcagtggctgagcctcctggaagacctagcactacccacgtggcact

SEQ ID NO: 45887 - DNA, 587 bp, Homo sapiens
gcgtaatacgactcactatagggcgaattggagctccaccgcggtggcggccgccgcatccagtcgtcccagaaggcctttggccacttgggctccagctcagcccagagctcggccaacagcagccagcccaggccagggaaaaagtcggtgcggtagagcagctcaggcctgctggcgtccaccatctgctccttgccgttgtcattccaggccgagacgcaccacagggaggggtcggccttcagcagcggataggtggcccgaaagtacgcagacccagtagctgacctgctggacaaatggggggccttccgggcccggctgtttcgagagtcctgcgtcttccaccgggggaactacgtgaaggacctgagccggttgggtcgagacctgcggcgggtgctcatcctggacaattcacctgcctcctatgtcttccatccagacaatgctgtacctcggccgctctagaactagtggatcccccgggctgcaggaattcgatatcaagcttatcgataccgtcgacctcgagggggggcccggtacccagcttttgttccctttagtgagggttaattgcg

SEQ ID NO: 45888 - DNA, 450 bp, Homo sapiens
ggagctccaccgcggtggcggccgaggttctaaacagatggatttactgcaggaattctatgaaacaacactggaagctttgaaagatgctaagaatgatagactgtggtttaagacaaacacaaagcttggaaaattatatttagaacgagaggaatatggaaagcttcaaaaaattttacgccagttacatcagtcgtgccagactgatgatggagaagatgatctgaaaaaaggtacaacaggcagcaagccatgtatttaccatggcgagggtcacatttcaccatctggttggctggctcaaagcaagcattggtgatctctgctacagaaagctgttcatggtaggctttctcagcagagatgacaggggcatatgtggccaaagggaagtggatgcgggggtagggcaccaggttggtctggaattctgtcaggtcaacattc

SEQ ID NO: 45889 - DNA, 488 bp, Homo sapiens
tacgactcactatagggcgaattggagctccaccgcggtggcggccgcccgggcaggtactcctgtcatggagtgcccaccatcgaatggacatattcatccaattggggaacgcagaagatcgtggagtggaaaccagggactcaggccaacatctctcaaagccacaaggacagagtctgcacctttgacaacggctccatccagctcttcagcgtgggagtgaggggttccggctactatgtcatcaccgtgacggagcgcctggggagcagccagtttggcaccatcgtgctgcacgtctctgagatcctctatgaagacctgcactttgtcgctgtcatccttgcttttctcgctgctgtggccgcagtattaatcagcctcatgtgggtttgtaataagtgtgcatataaatttcagaggaagagaagacacaaactcaaagaaagcacaactgaggagattgagctggaagatgttgagtg

SEQ ID NO: 45890 - DNA, 349 bp, Homo sapiens
gtaattgattttaaaagtttctgtttaaaatatttggctatgttttagactatggaagaatgaactttgcttctctggataagaaagtcacatacattgttccagctccaagtttgttcggccctcgccacaagtggatgtagcgtttggccctttgtgtgccttgctggtgactctggttttgggagctcggatatgtcccaaaagcaagcttatggcacttctgtaactcccttgctacccttcctttgtgtctagataagtgactgacatgcttttctttggtctcaggaaagtgggggctcagcaagaactgattaccgaaccattcaactagccaaggaaaaaa

SEQ ID NO: 45891 - DNA, 648 bp, Homo sapiens
gcgcgcgtaatacgactcactatagggcgaattggagctccaccgcggtggcggccgaggtacaagcttttttttttttttttttttttttttttttcttttttttttatttttttttttttttttttttttatatttttttatttttttttattttttttatattttttttattattattcttttttttgtttgacaataaaggtaaaaaagacttgttggatgattgtaaaaaagggggggaaaaaaacagtaaaaagaaaaaaaaaaacgcaagcaaaaaaccaaagaaaaagggggcatgaaacctaaaaaaaaaaaaggggttaaaaacggggaaagaaaaaaacaatcggggggggggaagtcaagtatatgcccgagaaaaaacaaaggaaagaaagattgagctggccgcataaaaaaaaagtttgctgattggggggcccccaaagggggaaaaaaaaaaaaaaaaactacaaacacttaaaaaaaggggaaaaaaatttttaggggggggggaaaaaaaaaaaaaaaaaaggggaggaaaaaaaaaaagagtgtaaaaaagaaaaaaaaaaaaaaaaattatttttgggggggaaaaaaaaaaaaacttaaatggtgggggaaaaaaaaaaaaaaaaa

SEQ ID NO: 45892 - DNA, 713 bp, Homo sapiens; identical to SEQ ID NO: 45655

SEQ ID NO: 45893 - DNA, 447 bp, Homo sapiens
gctccaccgcggtggcggccgcccgggctggtccgggcaggtactgagcccctaccctctggctgcctctttgagtctgatttttgaggccccttctctccaccctatgtgtgcatctgtaatttaaaattgcctttttatctttttctctgctgttcatctgtcttaagtcagtttcattctgaggccagccacagaacctagaagggtagaggcaactttcttcttttcctgccactgcggcagcatatccccacgggcagacacagacgtggaaatgcacgaagatggagcagcagcaggaaagggactggacagccctgggcacccacctgccactcggctaagctctgctcctccctggcctgcagattccctgtcctggtgatctgctcccgaaggtacagggcggcagggggctggtgggctgctggtgccactggtacc

SEQ ID NO: 45894 - DNA, 394 bp, Homo sapiens
gcgcgcgtaatacgactcactatagggcgaattggagctccaccgcggtggcggccgcccgggcaggtactaagcccagccaaggaactacaccttctcgctgaaggaggcgcctccggcttcccattggcagagctgaacggcggcgtgagtgctccggtgctttggggccatgattaggtaaataagagtggcttgaacatggcactgtgatatggtgatgggggatgtgggaaccacaccggctgctaagtgatcaacaggtggtggcatgaatagcctggacacgctggacaaaggttatgtcttatgaagtcaaatggtcaatttcctgatgctcatgtgcctttgggcttccccaaacaccaccactccctgagcagagacgcgccta

SEQ ID NO: 45895 - DNA, 467 bp, Homo sapiens
ttggagctccaccgcggtggcggccgaggtaccctggcattgccgacaggatgcagaaggagatcactgccctggcacccagcacaatgaagatcaagatcattgctcctcctgagcgcaagtacgaccatcttccagctgttttccggcaaagatcaacctctgctgatcaggaggaatgccttccttatcttggatctttgccttgacattctcgatggtgtcactgggctccacctcgagggtgatggtcttaccagtcagggtcttcacgaagatctgcatcccacctctgagacggagcaccaggtgcagggtaaactctttctggatgttgtagtcagacagggtgcgcccatcttccagctgctttccggcaaagatcaacctctgctggtcaagaggaatgccttccttgtcctggatctttgctttgacgttctcgatggtgtcactgggctccacct

SEQ ID NO: 45896 - DNA, 490 bp, Homo sapiens
ctatagggcgaattggagctccaccgcggtggcggccgaggtactaagtttcagggttctcttcagcaatcattaattaatacttcagccattaattcagatgcaaataattttcttttttcttttttttgagatggagtttcactcttgttgcccaggctggagtgcaatggcgtgatctcagctcaccgcaacctccgcctcccaggttcaagcgattctcctgcctcagcccccctagtagctgggattacaggcatgcgccaccacactcagctaattttgtatttttagtagagacggggtttctccgtgttggtcaggctggtctcgaactcctgacctcaggtgatccgcctgcctcggcctcccaaagtgctgggattacaggcatgagccaccacacccagccagatgcaaataattttcttagaaaattatttcaaaagttattttaggcccagaaatcaaggattgttccaaccatgaa

SEQ ID NO: 45897 - DNA, 470 bp, Homo sapiens
tagctgtttcctgtttggttgagtgcagctccaccgtgggggcggccgaggtaccattaaatctccaatacttaggacactctctggcttaatgtttgttgaacaaaaaaaaaacattactttatcgttatggggttccatttctccacctgtaaataataaaagtgcctaccccacagagctaaaaaaattagactatttaacaagcaaaaaatgcttaacgcggtgcaggcacacaggaggcactcctatcagtattagtggctatactgcttacaattctttgaagttcgatgataattcttttattttcccacccaaaaaagtagaagcaaattctactttcacaagtggtaaactgagaagccaataaaatgtggccatgggaatttcactaaataaactcatgaacagtctattttaaatccaaaaactcgactactgaatgctgaattaaccggaatgaacca

SEQ ID NO: 45898 - DNA, 435 bp, Homo sapiens
ttggagctccaccgcggtggcggccgaggtacgagctcttgtcattgacatggcaagctgatggcgtgcggtggctgcggggtatcagggccgggagccctttgggaggaagggaggcgttagaggagctgccttcggaggctcagggagtccctttggagctggttgtttccttggccctgcagcgcactgctcggggctcccaaggaggttgtgtgtatggttcttaattcatcaggacaaagacccccagcatgtgtgtacttatttcaacaattcttagagatgctagctagtgttgaagctaaaaatagctttatttatgctgaattgtgatttttttatgccaaattttttttagttctaatcattgatgatagcttggaaataaataattatgccatggcatttgacagttcattattcctataagaa

SEQ ID NO: 45899 - DNA, 598 bp, Homo sapiens
gactcactatagggcgaattggagctccaccgcggtggcggccgaggtactttttttttttttttttttttttttgcagagtcatactctgtcacccacgctggagtgcagtggtgcaatctcagctcactgcaacctctgcctcctgggttcaagcaattctcgtgcctcagccttccgaggtagctgggattacaggcatgtggcaccatgcccggctactttttgtaatttcagaagagactggttttcaccatgttggccaggctggtcgcaaactcccggcctcaagccatctgcctgtctcagcctcccaaagtgctgggattacaggcgtgagccactgcaccgttttttactgtcatttgagttggcaaatattcatccactgaaggtgggggcttggttttaataagtaaacaggtaaataagtaaataagctgggcaatacatatgagagtgtagaaaagcataaatactactcatattttacttgtggctgcaccatgattgcagaccctctgtacctgcccgggcggccgctctagaactagtggatcccccgggctgcaggaattcgatatcaagcttatcgata

SEQ ID NO: 45900 - DNA, 337 bp, Homo sapiens
taatacgactcactatagggcgaattggagctccaccgcgtgtggccgtccgacgtgctggctgtcgttgtactgagcaaggattgttcctaaaaagaactgtggtaatccttgttgaatagcaagtttggacagtatacggtagggaaatctcaggaatactataaacaaataaaatgatggggtgagccctatgaagcgtgtgttctcctgtgggcagtggcagagttacccttcacccctgagtcctgatttctcagcctcttcatgtgactgtctccttggctcctgggaaagaaagaagcctctacctttcctggattggatgcagcccttc

SEQ ID NO: 45901 - DNA, 457 bp, Homo sapiens
ggagctccaccgcggtggcggccgaggtggccatctatctggagtcaaaggacaaccagaaactgagctgcgtgatcagttctgtaggagccaatgagatctgggtgaggaagacaagtgacagcaccaagatgaggatctacctgggccagcttcagcgcgggctcttcgtgatccgccggcgctcagctgcttgactttctacagtgctcttctcttgaccctttttctggagtgggttttatttttgttttgtttcgttttctccttaatagaaaaatgttaacttactgggaatagctactcagccttggaaatggagagcactgcagtgaattctttagggcacttttgtggccggatgcttccaactttgtcagtcttttctgcctcaacttcttccagacatcagtcaccatgagactgttttactttcaggcgtattggggggtatgat

SEQ ID NO: 45902 - DNA, 459 bp, Homo sapiens
ctcactatgggcgaattggagctccaccgcggtggcggccgcccgggcaggtactttcctttttaaaagaagttcaacttttgctattcttatgccccataacttttaatttgcacaagatcagccatgcccactcactgaattctattatattacccacacctctggaaattcacaaagtctgaattcagatctatgcataaggacgacgtgtccgtcagcacctcaggggccaggaactccggggtcccacagaatgtgctggtccggtccccatagcccatcccctccttgcagaggccaaagtctgcgatcttgacgtaaccctcggtgtccaggagcaaattgtccaacttcaggtccctgtagacgatcttgtgttcgtgaagaaactgtaggcccagcaccacgcaggcggaataaaagatggcacggggctcagagaacacgtcgctgtgg

SEQ ID NO: 45903 - DNA, 704 bp, Homo sapiens
tacgactcactatagggcgaattggagctccaccgcggtggcggccgcccgggcaggtacatgtgagtgtggggctggggtgccctgagagagaaaaaggggacccatctgtcagggcagctggggtgccccacccccaccctgggactagggagcagagtagaaaccctctctggagggtcccagggctaactgggagccagccctcccttcgaggtagaccatcggggagggaaccgagaagtagctcccatggtggcagtggcttcctcagtggtacttctgctgttccaagttctccaactgtttcagaactttgcactgaatcatagccagggcatattcttggcgagtttctctttcagttgatttttctaaaaagttacgaaatgctgcaagaatgattcttgttactttctctttgacagactcctgaaggatatcagacagaactggaatgatattatagcgccgcaggtgttcacacatttgaggactgaatgccaggagccatattgaaaaaatcatttgatactggagctgaaagccacacttgttactcaacactcccattatgcaatttaccccatctgcttccacccaagcaaagcggtacctcggccgctctagaactagtggatcccccgggctgcaagaattcgatatcaagcttatcgataccgtcgacctcgagggggggcccg

SEQ ID NO: 45904 - DNA, 447 bp, Homo sapiens
gcgtatacgactcatatagggcgaattggagctccacgcggtggcggccgcccgggcaggtaccctggtaagcagttggtggccgcccctgctggtcccttccccaacttcccaacctctccccaacctgggccgagggggagcagggtcgtagctgtggggcgaggggaggccaggccctaaagatgaacaggtgagaagcctccaaacaagatgggatgagggcatggggcacgtggtgccgaggtctctccagcctgagtgtaccgtgaacaggaagctattcgcctttgcctaaaacacttcagacaacacaactatacagaagcttttgagtcactgcaaaagaaaaccaagattgcactggaacatcccatgttaacagatattcatgacaagctggtgttgaagggtgattttgatgcttgcgaagagttgattgaaaag

SEQ ID NO: 45905 - DNA, 632 bp, Homo sapiens
ttggagctccaccgcggtggcggccgcccgggcaggtacaatactgttgcgtgctccccgctctggccggtctttgttctttggaggcaagggagcacccctgcaaaggggggatccccgactttgggatatccccctcgccacccgcagacccaccttccaagagctacagcgtgtgctccataagctgaccactttgcatgtctatgaagaagaccctcgggaagcagtcagactgcactcacctcagacacactggaaaacagtaagagaggagagaaagaagcctactgaggaagaaataagaaagatctgcagggatgaaaaggaagcgctggggcagaatgaggaatctcccaaacagggtttgattactatctggcaactgtcagatctgagtttctgtcctaaaaatgcactggcaaattccctactctcataactgacccatttccttatttaaacacacacccacagtgtctatcttagcaattactgagacatgtttagtgacctttccaaatctattatctcttttgttatggatgtttccccagagctaagaaaatctttgtgtggaacaaatgcgtggatgtgttgcatggatctcacatagtttatctttgattgga

SEQ ID NO: 45906 - DNA, 389 bp, Homo sapiens
gactcactatagggcgaattggagctccaccgcggtggcggccgaggtacacagactggtatgtttccttcttgcgggtggtcatggcgttgcgcaggtgtatggcgagctggcggatgtagaggaaggcgtgctggtaggccacacccggctccagggccagcagctccgtcaaggtccactgcatgaaactgatgaaagggagggcaccaggcgaggtgaacttgcagttccccacatacgtgatgtacaagaaatagctctactacgggtaactgatttaacaatttcccaaacaccctttccactacccaagcccgtggccctcagagagaaccgggatggattgccatctgggttcagaggcaatatgaggaggttggggggat

SEQ ID NO: 45907 - DNA, 467 bp, Homo sapiens
cgcgcgtaatacgactcactatagggcgaattggagctccaccgcggtggcggccgcccgggcaggtacccagcacggcgccggcacgcctcccacgccagcttccccatgacaagcccctgccttctccctaggaatttgaagtggttgctttggacgggaatgcggccccttgcccatgactagtttcggataataaagtcactttctttcaaaaaaaaaaaaaaaaaaaaaaaaaaaaaaggcttgtacctcggccgctctagaactagtggatcccccgggctgcaggaattcgatatcaagcttatcgataccgtcgacctcgagggggggcccggtacccagcttttgttccctttagtgagggttaattgcgcgcttggcgtaatcatggtcatagctgtttcctgtgtgaaattgttatccgctcacaattccacacaacatacgagccgggagcataa

SEQ ID NO: 45908 - DNA, 475 bp, Homo sapiens
agctgtttcctgtgtggcaaataggagctccaccgcgggggcggccgaggtacctgaggagtcgcactctatcccagagttggagcacttgctgcccatgaacttccagagtaggccagcggccagcgcagctcccacgaggaaggtccccagggtcaaggtgatgcacagtgctttcttagtctttgaggtgcacactgtcccggatggggatttgggctgcgtgcagacgacggggttggaagcctgcgtcaggaccctcggggcgtactggctcactcagagaagacgtccttcaactatgccatgaaggaggctgctgcagcggctttgaagaagaaaggatgggaggtggtggagtcggacctctatgccatgaacttcaatcccatcatttccagaaaggacatcacaggtaaactgaaggaccctgcgaactttcagtatcctgccgagtctgttctggcttataaag

SEQ ID NO: 45909 - DNA, 438 bp, Homo sapiens
ccgaatacgactcactatagggcgaattggagctccaccgcggtggcggccgcccgggcaggtacaagtttttttttttttttttttttttttttttttttttttttttttttttttttttttttttttttttttttaatttttattttttttttttttttttttaattgtttttttttcaaaaaaaaaataatcattctatgtttatcatggtcgaaaagaaccataaaaaaggcgaactttacctggacaggggattggcccacacccaggggattccatagcttgatggttttatctcgagatccaaagacaatctgccggttgtcagaggagaaggccacacccagcacaaccttggaattccccacaaaacgcctagaggagacgcccctgaaagggaggagactgtcattctcagacttacaaaacactctt

SEQ ID NO: 45910 - DNA, 426 bp, Homo sapiens
ggtggcggtcgaggtgctgctttcacggctgctttctccgtcctcccctgttactaccttgggctgtttcagcgggcgctcgcgttggtcttcgacccactttgcgtttgttcacgtgtgctcccgacacctagtgatgatgcgggtgtgctggttggtgagacaggacagccggcaccagcgaatcagacttccacatttggaagcagttgtgattgggcgtggcccagagaccaagatcactgataagaaatgttctcgacagcaagagtttgaggaagaggcatagaaccctggcctggaaacacacaggaagagaaagagatcaggcaacagtgattctatagaaagggatgctgctcaggaagctgaggctgggacagggctggaacctgggagcaactctggccaatgctctgtgcccct

SEQ ID NO: 45911 - DNA, 554 bp, Homo sapiens
atacgactcactatagggcgaattggagctccaccgcggtggcggccgcccgggcaggtacattttaaaaacatagaagattggaaaattggaaaaatccccatcaaaaatagtaaataacttaaaaatagcaacattttgggtatgttaccttccaatattgttttctgtgtaatttttttggtctcattttgccggagttgtaatgtatatgtagttttgtatcatgatccttttttatttttttgagacaaggtctcgctctattgcccaggctggagtacttctgaatcatacagatgctccggggatggagatggactctgaggaagtctgaccagaccctgatgctggcctctgtagggataagtggttttggagttgtagcggtggggagtggtgaggaacctttgccattgggaatggatttgaccctccagacaccatcactactcagcactccctctgcactcagaaagtcttggagataagggttcttgggatagagttcctctttgtgtgtggtgagctttccctgccatgctattgcagca

SEQ ID NO: 45912 - DNA, 480 bp, Homo sapiens
atagggcgaattggagctccaccgcggtggcggccgcccgggcaggtcacctcgctgctccagcctctggggcgcattccaaccttccagcctgcgacctgcggagaaaaaaaattacttattttcttgccccatacataccttgaggcgagcaaaaaaattaaattttaaccatgagggaaatcgtgcacatccaggctggtcagtgtggcaaccagatcggtgccaagttctgggaggtgatcagtgatgaacatggcatcgaccccaccggcacctaccacggggacagcgacctgcagctggaccgcatctctgtgtactgggctgcccttccacgtgtggtaaaccctgcagctgctacatgtcttcacagcccaggaattcaaggcccaggtggcagcaggaagaaacagtggaaaagcaaggggaagagaaaagagaaaaaggagggggaaagtctgcataactgtcataacc

SEQ ID NO: 45913 - DNA, 403 bp, Homo sapiens
gactcactatagggcgaattggagctccaccgcggtggcggccgcccgggcaggtacaaggcgtgcaaggcccgcaactctgggcacctgaacgggccacgagggacgctcctggagcaaacattctggcctcagcccatggctcctgcgctccagagctgtgggagagagtattattttccagccccaggtgtgtggtcagtgtcacagcggccacgggacatacagaggcaccttcctcagctctgatccagaggaaaatgtcatttcctcaggaaaacaccacctggtttctaggaccacaaagttccctctgtcaggggctctcggagccaccccatgtcctcttttaacagaaattatcccggggtctctccctgcagttacctagtggttatttgac

SEQ ID NO: 45914 - DNA, 533 bp, Homo sapiens
  misc_feature 355: n = A,T,C or G
taggagctccaccgcggtggcggccgcccgggcaggtacttaagcagtaagcgtatttaggtaaaagcagttgaattatgttaaatgttgccctttgccacgttaaattgaacactgttttggatgcatgttgaaagacatgtttttatttttttgtaaaacaatataggagctgtgtctactattaaaagtgaaacattttggcatgtttgttaattctagtttcatttaataacctgtaaggcacgtaagtttaagctacataaactgtgggggcctgggcagccacactgcacgcaggctgggccgactgaggggctcagaggccaggctctgaggcccacgcagggcctanggtgggaagatggcaggtgggggcggcgacctgagcaccaggaggctgaatgaatgtatttcaccagtagcaaatgagatgaaccatcttcctgcacacagccacgatttgcaaaggatgttcacggaagaccagggtgtaaatgacaggctgctctatgacattgtattcaagcact

SEQ ID NO: 45915 - DNA, 480 bp, Homo sapiens
ctcactatagggcgaattggagctccaccgcggtggcggccgaggtacctgcatcacctcctttagacttatgttataggcatacctgtggggagactggggtgacaccagggccttcactggcctttcagcaggcttagaactatgactttgatagacattggagaggaatctggatggaacaatatggaaggggagggtttaggaaggagaaagtctatgctgaggctagaacttaataatgctctccttgctccaaatactactggtctttccatttgggatgtcgaaggaataggttcctatttggagacaaaacacttacgagaaagcctctaccttcccgggatcaccccgaggagaacagggaggggctgctcttacttgagagagttgatttccaggacgagattgtcacaagaaatgttctcctctttgccccgttgtagtgttcctaaaacttcattctggaacactttg

SEQ ID NO: 45916 - DNA, 492 bp, Homo sapiens
ctactatagggcgaattggagctccaccgcggtggcggccgaggtacctttgttcctgaatatcaagtaatagggctcatctctgtgactgcttgcgacaagcacatagggcaactcattaccaactgctcattataaatgctgagctcttgagttcctgaggagggggtgggaatcttaggatttgttgccagatttgaaagtcactggaacttgcatattttcattttaatcctaagtgttattacgcaccagttggggttcacccttcatccctcacatttaattgtctgatatagaatagtgttgtgtccactgccccgctagacggctttcttaggggaattttcttctggttgtttcacaagacagattctgtccttgtcacccgggacagaaaactcagtcttttcaccctcattcagatgaagggactcaggacaggctctgtgacttacagggacccaatcaattcacaatgagaaattaccg

SEQ ID NO: 45917 - DNA, 458 bp, Homo sapiens
ggagctccaccgcggtggcggccgaggtacaggcttgtggcggcctccagggtgtcccggctgtcttctgtgccaagctcttctctcctcagccgcgccaggacggtgcccccctccagcctgagagacacaagcagtgggtcttccaggacaagcttcatcatcgtctcatgctggtcaattaactcggcgacttcctgggctgttcttggggttctgtgggtgttcagggagcagaatgaattctgtaggaaaatgatggcttcttcacagtttgcagcgaagtgttccagcctctgacggaagcagatccagtcaccatggctgtagggaaaggagccgtcgaggtctgcggtcagctggcagctgtcaacaaatttgtgcacggccttcagggagctcacgacctcacactgaattattgcatccttgtcaggcctaaatgcagattctttatc

SEQ ID NO: 45918 - DNA, 429 bp, Homo sapiens
tatagggcgaattggagctccaccgcggtggcggccgaggtacatgaggacctggagggttcatcccgagggccggtgtcggagaagcttccgcctgaagccactaaaacctctgagaactgcctgtcaccatcagctcagcttcctctaggtcaaagctttgtgcaaagccactttcaagcacaatatagatcttccttgacttgtccccactgcctgaaacagagcaacacctttgaccttcctggtgtgtcctacctatcctggcgccagacgaggttcttgagtgtcaccttggtcttcccctctaagagccagcggttcctgcgggttggcctggccgtgccgatcctcagcacagtggcagccctgaggaagatggttgcagaggaaggaggcgtccctgcagatgaggtgatcttggttgaa

SEQ ID NO: 45919 - DNA, 458 bp, Homo sapiens
tgtgtggctaattggagctccaccgcggtggcggccgaggtaaaccatcgagacggagggccagagagtcacggcggggtctgctgggagccagccattgaaggtgctggagcagagagagatatggtattggagctgatccctatgatgaaagatctggacccttgtgtagatgttccgtgaagcaggaggttttcgtaacaccccagggcctgtaaggtttggtgtttccctttcaagatgccactttcagactttattctggctctgaaggacaatccctactttggggctggatttgggctggtgggtgtgggcacagccctggccctggcccggaagggtgtccaactgggcctggtggcattccggcgccattacatgatcacactggaagtccctgctcgagacaggagctatgcctggttgcttagctggctcacccgccacagtacctg

SEQ ID NO: 45920 - DNA, 498 bp, Homo sapiens
tacgactcactatagggcgaattggagctccaccgcggtggcggccgaggtccggaaggatgcatggcccggggtctcctgcacctgagggtgggcgggaggcggccccgcgggttgtgttactggaaaaaggggtctcgatccagaccccaagagagggttcttgggtctacttcagggaagaattggaggcgagtcacagagcgcagtgaaggaagcaagtttattggaatctactccgttagagagtgcaagtcctcagactgcaggaggaggaactcccgtccttcggtagtgtcactacttagaggcaactgtgaggagctgtgattaatcgtggaatgtgctgatgtgcccactaaagagctttgcccttggagtccaggctggagtgcaatgatgaaatctcagctgactgcaacttctgcctcccgggttcaagtgattctcctgcctcagcctcccaagtaactgagattacaggtgcccacacccggg

SEQ ID NO: 45921 - DNA, 477 bp, Homo sapiens
atagctgtttcctgtgaggaaaagaacggcacacaacgcgggggcatacttgtttcctgtggtaaaaaaaacagccacgacctcttcctgctcgggctaaacggttacatgaaccaccgctctggggaacatcatgggctgtcatgggccatcatgaccatcccaggcaatgctaccagcatccccagctttgacctgctgcaaccgccttgcccgcttgggaagaacaaattgtgcgacgttccagccataccagaatctgacctggcaaggggaagcccaagaattttgctactaagaatttggagatagcatctgtggacaagtggagccaggtagaggaaaagggtttgggcgttgctaggctgaaagggaagccacaccactggccttcccttccccaaggcccccaagggtgtctcatgctacaagaaaaagcatgaaacaggccccagggcttctggctagaacccgaaa

SEQ ID NO: 45922 - DNA, 351 bp, Homo sapiens
aaagggaacaaaagctgggtaccgggccccccctcgagagtacttctagaattaattaagggggaaaagccaaaaataagtaaattagaaagaaaaatagagtagaaattgcaaataactctaaaggatctttggaagaccaataaaatgtataagccaatttattctaagcttgattagggagaacaaagagaaacaaaattaggaaatagaaaggattacaggtgtgagtcacccacctgggccaaaaaaaaaaaaaaaaaaaaaaaaaaagggggccccccccgggggggacccccaatccccccttagggggggtttttccccccccccaatggggggttttttaaa

SEQ ID NO: 45923 - DNA, 191 bp, Homo sapiens
ttcgactcatatagggcgaattggagctccaccgcggtggcggccgaggtttttttttttttttttttttttttactaaacatttaaaatatatttctaaacagaatgggccgactcagtcacagtaactgttgatctccatagtagagcaacccacaaagacagaactgatttttttcccataatcaggg

SEQ ID NO: 45924 - DNA, 601 bp, Homo sapiens
acgactcactatagggcgaattggagctccaccgcggtggcggccgaggtacagaggcccactgagcaggatgtgatgcacagttccacgggacagaggggcatgggtggtggtgtccctaggggagttccgctgttctcaggtggctaccaggcctgggggggccatacagggtcaccgaggcaatgtggttgttctgcatgacctcaaagatcattcgctgaagaccaaagcagaatgtggaaccaaatgggttggtgttgtttggggaggaagacctgtgcaggacaacaggcttctccacagggtggcccaggagctcctggatgttgtcccacttgctgtaggtcgtgcatgtttctgtctgaccatctgcgttttctttctttatggctagtgggatcttgaactcacagcgatgataaatgttgaaattataatgcccagggtaattggtgtgtagaacaaacttcttcactttgtgtgtattcgcatcaaagaggatgtccactccaagagtgaagtagttaaaaaagtagtcattacacttcgatggaacttgtttatgaggggaaggagaatgaattttcatcttgtcttc

SEQ ID NO: 45925 - DNA, 483 bp, Homo sapiens
atacgactcactatagggcgaattggagctccaccgcggtggcggccggaagattcaacccgatcttgtccaacttctcccgcaaggaccggcctccatttttcgatttggctcttctgagaacacctcccagtaacgaggcatttaagcattcaggtggggacagtcgcctctgtacctggtcattggtgacctgctcttctcagctctctggaccttcctgtggtttgttggtttctgcttcctcaccaaccagtgggcagtcaccaacccgaaggacgtgctggtgggggccgactctgtgagggcagccatcaccttcagcttcttttccatcttctcctggggtgtgctggcctccctggcctaccagcgctacaaggctggcgtggacgacttcatccagaattacgttgaccccactccggaccccaacactgcctacgcctcctacccaggtgcatctgtggacaactaccaaca

SEQ ID NO: 45926 - DNA, 490 bp, Homo sapiens
  misc_feature 392: n = A,T,C or G
cgcgtaatacgactcactatagggcgaattggagctccaccgcggtggcggccgaggtcagccgcagcctggaggagctgctgctcgacgccaaccagctgcgcgagctgcccaagccttttttccggctgctgaacttgcgcaagctgggcctgagcgacaacgagatccagcggttgcctcccgaggtggccaacttcatgcagctggtggagctggacgtgtcccggaacgatatccctgagatcccggagagcatcaagttctgcaaggctctggagatcgcggacttcagcgggaaccccctctccaggctccctgatggcttcactcagctgcgcagcctggctcacctggccctgaatgatgtgtctttgcatgcactgcccggngacgtgggcaacctcgccaacctggtgaccctggagctccgggagaacctgctcaagtccctgccagcgtccctgtcatttctggtcaagctggaaca

SEQ ID NO: 45927 - DNA, 439 bp, Homo sapiens
taatacgactcactatagggcgaattggagctccaccgcggtggcggccgcccgggcaggtaccgggcgcgggcagagcgcggcggcgcggaaatgggagtcttgctatgttgcctaggctggtcttgaattcctggcgtcaagcgatcctccggtcttggtctcccaaagtgctgggattactggcgtgagctacctcatttggccaaattttaaataagaaatgctaacgtttactgttactgctgtgtgctatgcactttgctaagcagctttaaactgtggagttttcttttcatttaaacatcacaacaattaagtgagtagagacggggttttgccatgttgacctggctggtctcgaactcctgaacgcaagtgatccgcctgcctcaacctcccaaggtgctgggattacaggcacgagccactgtgcctg

SEQ ID NO: 45928 - DNA, 316 bp, Homo sapiens
atagggcgaattggagctccaccgcggtggcggccgaggtactaaggctgagagggcgctggacctttctgggaagtctctgcagctgtcatcggggaagatttggaaggcgatgctggattccgtttctggagtggatccatggaggtctggtcccagctggaagctccgccaggccctcgggtccagaataggaggtgaagctggaggttctcagacaccaagaaggtggctaggaatgtgtgctggcagaacccatacgtcactttcttctggccaggtctgtttccaagccagaaatgctgaaccaaacgca

SEQ ID NO: 45929 - DNA, 468 bp, Homo sapiens
gcgtaatacgactcactatagggcgaattggagctccaccgcggtggcggccgaggtacacacaccagagtgacgtgtggtcttttgggatcctgctatgggagatcttcaccctcgggggctccccgtatcctggcatcccggtggaggagctgttctcgctgctgcgggagggacatcggatggaccgacccccacactgccccccagagctgtacttgggttcaaaagaattcaactttgggaccacacactttgcattcaaactggaagtctcattctctggaattagactgtttcattgaaaaagaatggtgtccggccgctctagaactagtggatcccccgggctgcaggaattcgatatcaagcttatcgataccgtcgacctcgagggggggcccggtacccagcttttgttccctttagtgagggttaattgcgcgcttggcgtaatcatggtcatag

SEQ ID NO: 45930 - DNA, 612 bp, Homo sapiens
cgactcactatagggcgaattggagctccaccgcggtggcggccgaggtacagttggcccaaaatgaagagcaggcagtagtagaggattaagggcaaagtgccttgttgttaggcctgtcatgaagatgtggggtgagatctgtcttgggcaacaactgatattaagctgaggtctgcagtctcaacttgccactagcttaatgtgcctcccatggggcacagctactgaaagctgatgctgcccaagcatttagggagataattatgccacttggaccacactggtgcgactctaaccccagggctggggccagaatgaggtaaaggaggcaccacgggggtaaacccaaggaagcactctcttggcacctgcaagcaagcaccaacttaaatgtatgccccaggtgcctcatttgtctcaccctagccctggccctgctaatccggggcacaccccttttaggataacacggactaatttggacactttccccaaaccgtagcccagttagacatgatggtggaaaaggtctaactaaagacattgcaggggagatgggcgcggtggctcacgcctgtaatcccagcactctgggaggccggggcgggc

SEQ ID NO: 45931 - DNA, 628 bp, Homo sapiens
  misc_feature 24: n = A,T,C or G
gactcactataggggcgaattggnagctccaccgcggtggcggccgaggtaccagctacaagtatgaggtggcactggctgggccagccctggagttgcacaactgcatggcgaaactgttggcccaccccctgcagcggccttgccagagccatgcttcctacagcctgctggaggaggaggatgaagccattgaggttgaggccactgtctgaaccatccctgtactgctaatccaagagctaatgtgtatgaaagggcacatgaagtggcctaaggaagatgggtttaaatccatctctctccctcactctgcatatagaccaggggtcaacaaactacccctgtagtttggctcaggggccaaatccagcctactccctattgctatgaatattgtccgtggctgctttttcactgcagaagcagatcaaatgaggcccataaagctgtaaatatttactatctggtcctttacagaaaaattacggcaatccctgatcaaacctagatgtaagtccctctctttgtggagcagatctctgtgagaacagaagacacagggcagcacccttactctgcatgattttaatacacagcagtggtcgtgatccttaaaacatctaca

SEQ ID NO: 45932 - DNA, 303 bp, Homo sapiens
tacgactcactatagggcgaattggagctccaccgcggtggcggccgccgtccacgtggctcggactccgatctcacacagagccctctgtcgccatgtcgcagaacggagcgcccgggatgcaggaggagagcctgcatggctcctgggtagaactgcacttcagcaataatgggaacgggggcagcgttccagcctcggtttctatttataatggagacatggaaaaaatactgctggacgcacagcatgagtctggacggagtagctccaagagctctcactgtgacagcccacctcgct

SEQ ID NO: 45933 - DNA, 445 bp, Homo sapiens
gctccaccgcggtggcggccgcccgggcaggtacatgaattatattgcaaaacagctgttaatagaaagcagcaaaatctagctgatctgtgtatttcacttctttacagtattttctgatttactcttttgttgccattgcacagattttttttctttaacctctcttacttccagagatttgatccttttttttttttgaaaagggattttggttccttcccccaggttgtatggcataatggacacattttgggctaattgaacttttggcctccagggttaaagcaattttcctgcctaaccctctttatttggaattacggggcccccccactggcccgaactatttttggtttttttaaaaaaaacgggttttccccttgtggcccgggtttgtttaaaactctgaccctaaggtaatccccccccttgggcttccaaa

SEQ ID NO: 45934 - DNA, 262 bp, Homo sapiens
ctcactatagggcgaattggagctccaccgcggtggcggccgaggtacttctcctggccagctgtgtcccagatctcaagcttcagagaggtggcacccacatccaccacctttgtgaagaacgcacctgaaacagggaggcccagagggcttactcagaggacgaggttgccacatgcggctcaggtgggaccacggcaagccgcaggcacagcaatgggctcagagggacagctggccatgcatttcccacgcccgcatg

SEQ ID NO: 45935 - DNA, 599 bp, Homo sapiens
tacgactcactatagggcgaattggagctccaccgcggtggcggccgaggtcccttctgtcccctagtaagcccagttgctgtatctgaacagtttgagctctttttgtaatatactctaaacctgttatttctgtgctaataaacgagatgcagaacactggtgccgccacagtggccaagttgcgacactgcccacggcccctccctctgatgcagattcagggcttctcttcgatcatgttgggttttgattctgtttttccttgactgcaaaaccctctttcctctcctcttttgggacaagagccctggttttctacgctgcccttggccaccacactgcctacggcccctccctctgatgcagattcagggcttctcttcgatcatgttgggttttgattctgtttttccttgactgcaaaaccctctttcctctcctcttttgggacaagagccctggttttctacgctgcccttggccaccacactgcctgccccacgagctgggaggcaggttttgacgtttgatgttttatatcatatcaataacaacgtacctgcccgggcggccgctctagaactagtggatccccc

SEQ ID NO: 45936 - DNA, 506 bp, Homo sapiens
ttggagctccaccgcggtggcggccgaggtactgttgcagccctctaacaatacactactgatcatggggttaaggacctcggccttcttgttgctcccaacagtggttaaagaattcgtaaacttctttgataaggaggccacttcattgcacattgcagtagttaattttattagaacttttgcttggtcctgagctggtttttcctcttcttgtccatgaagaattaattctgctactttatgaagctgctcaatacagcgcgctgttacctccgccagacttttaatggacgacatgtatacttcctctatggtcttagttttcttttcctcctttttgtcttcttgagggtcttgagatttctcttccttttcttccttctttgtttcttcttcggacacttttgccacatctactgacaccacggtttgatcctcttccacccagtcatgagccctcttcatggccttattgagtttgtcaggtgtggccgccacatgta

SEQ ID NO: 45937 - DNA, 539 bp, Homo sapiens
aaagggaacaaaagctgggtaccgggccccccctcgagagtacttctagaattaattaaggcggggggatcaaaacataagggttttaattctacagctgtaggagctttgtattgctgaactttcatctggaaaagtttcacagtgacatttttaaaagagaatttttttatctgccgaattctaccagtgtaaccttttttctaaataaacaatagttttcccaagccctaaataaacaaaaatatataaggggcccccccccgcgggggaccccaattgcccccttttggagtttttttaaccccccccaagggggggattttaacaaaaatagtcttcagttttataaaacactatgttacactgtagagctacacaactccttacagtgtcgtagctaggggcttaaaaataagccagttttggctgggcgtggtggctcacgcctgtaatcccaacattttgggaggcttaagtgggcggatcacctgaagtcaggagttccaaaccaacctgaccaacatggagaaaccctg

SEQ ID NO: 45938 - DNA, 493 bp, Homo sapiens
cgcgcgtaatacgactcactatagggcgaattggagctccaccgcggtggcggccgcccgggcaggtggccgcttctgtgtggtgtggggagacgctggtcctccccgtcctcccatagcgcttattgcctcaccctcaccccctaggggccggatccaaaggcgctgcactccccaagccttggggcatcagccaggaaggtttcctacctcctaattcaggggcaggactcctcttttccccccacggggaaaagaggcagaaacttaggggtttccctcctttcttagggtcagacgctcttagggtccacttcttcaggggcggaagcctctcctacccttcccataggggcacaggcctttaccccactgtacctcggccgctctagaactagtggatcccccgggctgcaggaattcgatatcaagcttatcgataccgtcgacctcgagggggggcccggtacccagcttttgttccctttagtga

SEQ ID NO: 45939 - DNA, 663 bp, Homo sapiens
ctccaccgcggcggcggccgaggtaccaatatttgtgtgtagctacgcaccttaatagaccatagctaattagatgaggaacggtagacccaattcaaccatacaggcatcgaccatatcagcatacaggcatccctctcccaccgtttccttcttgtccccactccaaagccttctccattttatttgtattaattttctattgctgcatactaaattactgcaagcattagcggcgtaaaataagaatgatttattttcttgcagtgtccacagatcagaagttcaggcctggattctctgggtcttcttctcagggcctcacaggctgaaattaggctgggtttctttctggaggttctggggaagaacttcctctcaagtttcctcaggttgtcagctgagttcagttccttgtgactgtaggactgagatctctgttttcttgctggctgtcagccaggggcctctcgctgctcctagaggcctcccatgttcccactgcatgcttcctccagccagcagaggaggatcgccctgcatggaaacccttctgcacttcacatctctccaggaagtcctcagtccctccaaggaactcacgttcactaggtcaagctcatcagataatctgtctatcttaaattggaccgatttgggatc

SEQ ID NO: 45940 - DNA, 471 bp, Homo sapiens
cgcgcgtaatacgactcactatagggcgaattggagctccaccgcggtggcggccgaggtacctgctgcaggagcagctaaagatcatcaagaaggagctgggcctggagaaggacgacaaggatgccatcgaggagaagttccgggagcgcctgaaggagctcgtggtccccaagcacgtcatggatgttgtggacgaggagctgagcaagctgggcctgctggacaaccactcctcggagttcaatgtcacccgcaactacctagactggctcacgtccatcccttggggcaagtttttttttttttttttttttcttttttattttttttgttagggttctgctagcctttatttgagaaaatttacacaaaaatccccaatccaacatttacaagtgaatctgtataaatcccatatgcctctttcccaaacaaaccaagaaatggctttatgacaggggtccacga

SEQ ID NO: 45941 - DNA, 473 bp, Homo sapiens
  misc_feature 327: n = A,T,C or G
ttggagctccaccgcggtggcggccgaggtacagccgctgctcgtcaggaggccgcttgaggatgccctcgacgatgcgcttcagttcgaacaccgtgctggactccttggcgtccgtgaagatggtggtcttgtggcgccggatcatgaggaacacgtccatcgcggctgcacaatattacgagaaaaaccctaaaaaatttataaaatgaatgatattacactatcaaataaaaagacaagtcattttgttttcatgagatttcaaggttgatttgagtcagcttcccccggaactgcacggtgtcctgtgtggggagggcccancgtgctgccagtgctggggggcagggcttacactccttatctagcagaagtgcacagagaactctggacttgagtaacaaagtcataaggaaggagattttaaaatgggctccatgaaatgcagctcatctagttcaaggctgggc

SEQ ID NO: 45942 - DNA, 465 bp, Homo sapiens; identical to SEQ ID NO: 45582

SEQ ID NO: 45943 - DNA, 459 bp, Homo sapiens
gctccaccgcgggggcggccgaggtacttattcttcccacgtttcctggattacaggtaaatcatttgacctgacttgggtatgggagggggattaattggtggggataagacccttatctttgtggggttactgatctgataaaaagacattattctcacaccccagtggtgcccacactaacccaactctgcccttctctcctttcccctaaggccaggccatggagataggcagcgcagccctgactatactggtagaatgctgggatgggcacctgacaccccctgaggttgcatccctggctgacagggcatcacgggcaagagactccaatatggtgagggcggcagcagagctggccctgagctgcctgcctcacgcccatgcattgaaccctaatgagatccagcgggccctggtgcagtgcaaggaacaggtatttctacgggcaatctg

SEQ ID NO: 45944 - DNA, 488 bp, Homo sapiens
tggagctccaccgcggtggcggccgcccgggcaggtacctgtgacaggagagtgtcctgatgtgcttgggagaaaggccgtatgggggccagggatggaagagacagtgtgtggccacagaaattcctgtccatccaccaccagtgctgctccctgtgtgggctctagggcgagtggccccgaaccttggcccagtgctttgtcccaggccagagtcttggcaatgccacatgctggcagctttctcactgagaaggtcctagcttacccctgtgtgctggccttggattcagccccgagagaggggagagaccattcctcctgtggagtgggttccttatcaccagaccggccactctcagaactggcgtccactgtaaatccaggtgccttacgtgtggctctgtcccttatgctgcaggggaaagctgcattgccattgttcccacctgctcactggcagaaagatgccagggctgttagcactg

SEQ ID NO: 45945 - DNA, 470 bp, Homo sapiens
gtaatacgactcactatagggcgaattggagctccaccgcggtggcggccgaggtacaagcttttttttttttttttttttttttttttttcctttttttttttttttttttttttttttttttttttttttttttttttttttttttttttttttttttttttttttttttttttttttatttttttttttgggccccaaaaaaacccatttattccccccaaaaaaaaaacgcccccaaaaaaaaaccccccggcccataaaaaaaaaccccccccggaaaaccccccgccccccggggggggcccccccccccggggaaaaaattaaaaaaaacccccccccccttttggggggggggccaaaaaagcccatggggggggaaaaaaaaaaaaccccccccctattttaaataggggggtgttaaaaaaaaaccccccccgtgaaaaaaaaaaaaaataaaaagcggg

SEQ ID NO: 45946 - DNA, 463 bp, Homo sapiens
ggagctccaccgcggtggcggccgaggtacgcggagctgcgcgccaagagcacgccgagcggcttcacgctggacgacgtcatccagacaggcgtggacaacccgggccacccgtacattctggttactggtggtgttatatcaggaattggaaaaggaatcattgccagcagtgtgggcacaatactcaagtcatgtggtttacatgtaacttcaatcaaatttgacccctacattaacattgatgcaggaacattctctccttatgagcatggtgaggtttttgtgctggatgatggtggggaagtagaccttgacctgggtaactatgagcggttccttgacatccgcctcaccaaagacaataatctgaccactggaaagatataccagtatgtcattaacaaggaacggaaaggagattacttggggaaaactgtccaagttgtccctcatatcacag

SEQ ID NO: 45947 - DNA, 513 bp, Homo sapiens
gagttggagctccaccgcggtggcggccgatcctcaggatgcagagaagtcatgtagacccaccagccccaccttggggggaggcgtgccagcctgtgtcaggtgtgcttgtgtattgctgtgctgtcatggggccctctccttgagagccgcctctctgttcttcctgtagtatattcccctttgaaccaccctttcctgtctgaattctactttgcctcctttctcttcctcctctttgcatggtttgtgtgtatagacagtggaacctgaggatgggatctgctcagcctatcttcggggcaattgctgagcttcaggatgggctattaatgtgggataagcccaggtgcaaggggaggagggcaggctgggaacagagcggagaatgcccatggccctttattccttcttccctcggtccaagaacaggaagaggctgaggccatgctgggcagggtctggatgcccactttccattgccacagcatttcattgctcaaaaccatcctt

SEQ ID NO: 45948 - DNA, 455 bp, Homo sapiens
gtaatacgactcactatagggcgaattggagctccaccgcggtggcggccgaggtacctaggagagttatggctgcctctgctgagtcatgcaggttgtcagggaagtgggggaaagctggcagtcacaggcctcacccagctcccacacaaacccaagggccggtcttactcccaccgtgttcccccacaactgccccgagtctgtttccaggcagagggtgagactggcttgaaaatttgccccaaggctgtgcccctcccagcggcgaaagaaaagggctgtagttcttcccccacctgtgaagtctgcatgctggattcgtgcagttgcccaagttctggccaggaggcttctcaccctgtttaaattgttacgaagttcgactagagaattcttctccctgtggagttttatcccttgctcctctggccaccctcccgatggatccctgt

SEQ ID NO: 45949 - DNA, 353 bp, Homo sapiens
gggcgaattggagctccaccgcggtggcggccgcccgggcaggtacacattacatagttcagcagttcacagctttttggtctcaggatccttttgcacttgtaaagaaatcatcaaagaccccagagagcttttgtttatgtggattatattcattgacatttaccattctaaaaattaatatatgaagaaaataatatttaagataacaagtgaattacatgttaatataaatagcatttttatacaaagtaattatattttctaaaaattcagtaagtaaagtgacactgattttatacttttacaaatctctttaatgtctgtcttaatagaagacaacctggattttc

SEQ ID NO: 45950 - DNA, 462 bp, Homo sapiens
gactcactatagggcgaattggagctccaccgcggtggcggccgaggtgccgaggtgactgcagagcggctcgcgagagtctccctctgttgccaggctggagtgcagtggcgcgatctcggctcactgcaacctccgcctcctgagttcaagtgattctcctgcctcagcctcacaagtagctgggactacagttctgtgatatgagcaacaatggaccagaagattttatctctagcagcagaaaaaacagcagacaaactgcaagaatttcttcaaaccctgagagaagttgactaatctccttcagaatcaagcagtgaaaggaaaagttgctggagcactcctgagagccatcttcaaaggttccccctgctctgaggaagctggaacacttaggagacgtgggatcagcaatatgtaatccaactcacctccatgttcaaggatgtccctctgact

SEQ ID NO: 45951 - DNA, 497 bp, Homo sapiens
gggcgaattggagctccaccgcggtggcggccgaggtactggtgaaacagttttaataccctaacatacacagtagtgattcattcttgtttaaaacaagaggtgatttcgacttgggattgggatttttattttttgagatggagttttgttcttgttgcccaggctggagtgcaatggcacaatcctggctcactgcaacctccgcctcctgggttcaagcaattctcctgcctcagcctcctgagtagatgatgggattacaggcatgcaccaccacgcccaggtaattttgtatttttagtagagatggggtttctccatgttggtaaggctggtctcgaactcccgacctcaggtgatccgcctgtctcggcctcccaaagtgctgggattacaggcgtgagccgccgtgcctggccttgacttgagattctgaagtgaatttattcacactgattgtgccctctactttagtaaggttctggcttacagag

SEQ ID NO: 45952 - DNA, 495 bp, Homo sapiens
ggcgaattggagctccaccgcggtggcggccgaggtactggacaaggagtcaaaaaacttgatttcaggtcctagctctagcacttacagctgtgtgatcttgggcaagtcacttaacctctctttgcctcaatttcctcatcttgaaatgaggataataatacctgctgtacttgagccgcatctgcagtccatgggcctgagactgcacctgacgcagctctgcctctttccgttttgccttcatctgctctttcagctcctctgtcaagcgctccttcttctctttcaacttgtctactgctttctcatcccagcgccgtgccttggccttcaggtcactggccccaccagagatcactcctgacttctggaatagggttccatccagtgccactgtcttgtggcgctggtggcctccaaaggcaatgcggcgggcatattccacgttgtcacagacaagggcattgccacaagcttactgcagggcctttt

SEQ ID NO: 45953 - DNA, 580 bp, Homo sapiens; identical to SEQ ID NO: 45654

SEQ ID NO: 45954 - DNA, 588 bp, Homo sapiens
ggagctccaccgcggtggcggccgcccgggcaggtactaggattatagccatgagccactgtgcctggctagttaaagaggttaattttatgttatgtgaattttacatcagtaataaaaaagaagccggaagaaaaccagacatcaaagatgttagaaaaagggatatatttacaaaccaaaaagtctccaaattcccactggaaggaggtagcaagtatgagcaggtctctttagaagcccgtcctcattcctatagaaaccccaagtacacaccagttctcaccagcggggttaagtcaagactttttcagctcatccctggcaagccccagcctacccctggcttctacaggaaaatttgcactaaactctcttctccagcggcagctaatgcagtccttctactccaaggctatgcaggaagccggaagcacaagcatgattttttcaacaggtccatacagcacaaactccatatcttcccaaagtccattacaacaaagcccagatgtcaatggcatggccccatcccccagccagtcagaaagtgctgggagcgtctccgagggcgaggagatggacact

SEQ ID NO: 45955 - DNA, 265 bp, Homo sapiens
ggagctccccgcggtggcggccgcccgggcaggtacgaatgcgatcactgtgggaaggccttcagcataggctccaacctgaatgtgcacaggcggatccacaccggggagaagccctacgaatgccttgtctgcgggaaagccttcagcgaccactcatccctcaggagccacgtgaaaactcaccggggagagaagctctttgtgtcatccgtgtggaaaaggctccagtgagcgcgcctgctttagagacacaggatgattc

SEQ ID NO: 45956 - DNA, 472 bp, Homo sapiens
actactcactatagggcgaattggagcttcaccggcgggggcggccgaggtccaggtttaaggtgcaggaatgaagatggggcagactgggccccagcatctgaggccccacccccatgccagagagctccagtccagagcctgaagtgtggtccagcacatgtgagctatctggatgtccaggaatatctaagtgtgctgcccccgtaggaggcactggaattccttgcccagcagctgggcctaaagagaagaggctgaggaagccaggccctagaaacggcccagcacggtggctaacagagccatgcggatgtacctgcccgggcggccgctctagaactagtggatcccccgggctgcaggaattcgatatcaagcttattgataccgtcgacctcgagggggggcccggtacccagcttttgttccctttagtgagggttaattgcgcgcttggcgtaatcatggt

SEQ ID NO: 45957 - DNA, 487 bp, Homo sapiens
gggctagattggagctccaccgcggtggcggccgcccgggcaggtaccaggttgccgggaagtccacccttgagagctcacaagtcagcaccacccgctctgaggttgtgaaggtcaacgacaccttgtcctgggggctcaggatgtgcaccgggctctcttggattgtgagggcagctgagtcctgcacgccggggcagctgaagccgaccagggcaccgctgtcctggtgcttgacggcatgcaggatgagtctgtgctgcagacccttctgctctatacggtcgcccagaaacaatcctttcaacttctgaacatttggtttggaacacttatttgatgaatattcagttaaacatttggatacaagctcttgccagaaggtcagatctctgccatttatcttggaatgtttctgaagacattctattccttctgttaactctacacacttctgtgcttggatctctaatgcaatgataggcaa

SEQ ID NO: 45958 - DNA, 353 bp, Homo sapiens
ggagctccaccgcggtggcggccgaggtcaagcagacagcaaaggctgagggcctgggagatggataccgacttgtgatcaacgatgggaagctgggtgcacaatctgtgtatcatctgcacattcatgtacaagtagtggataccaattagtcagttcatgtcttgctccctgaaggaagattttgaagtaaaagaaaccctctcaagcaagcaacatacatccctggcctgtctgccagtttgtttggtttttgccggggaaggagatagaaggaagaagaagggaatggaacagggggaataggacaatctggttgaaactgtttctattccttttttttttttttttaa

SEQ ID NO: 45959 - DNA, 504 bp, Homo sapiens
gcgcgtaatacgactcactatagggcgaattggagctccaccgcggtggcggccgcccgggcaggtaccttccctattgaacccttctttaggcttgctcactctttttgatgggtgtctttccaaagctggctggggacctccctgattgagagacatggggccagttctgttgctgtggctacacgggaataataaagcagaacaccttaaaaaaaaaaacaagcgaaaccaaagtgacgtgggtccataggattggggatgggtggtggggtctgactgccttgtcccaagagttgggtgaatgccgcctttgctcacttgtgcggtcactctccaggactcctgcctggcttctcccactccaagcccgagatagcccagcaaggaggaaggtctggccccaaaatacgagctccccaagtggatatcctaaaattcatctttcatggccctactttattgggagggaatgtgaaaattgtgggaatatgttcattgaca

SEQ ID NO: 45960 - DNA, 556 bp, Homo sapiens
agggcgaattggagctccaccgcggtggcgggcggggtacttcatgaagcagaccattgggaattcctgtggcacaatcggacttattcacgcagtggccaataatcaagacaaactgggatttgaggatggatcagttctgaaacagtttctttctgaaacagagaaaatgtcccctgaagacagagcaaaatgctttgaaaagaatgaggccatacaggcagcccatgatgccgtggcacaggaaggccaatgtcgggtagatgacaaggtgaatttccattttattctgtttaacaacgtggatggccacctctatgaacttgatggacgaatgccttttccggtgaaccatggcgccagttcagaggacaccctgctgaaggacgctgccaaggtctgcagagaattcaccgagcgtgagcaaggagaagtccgcttctctgccgtggctctctgcaaggcagcctaatgctctgtgggagggactttgctgatttcccctctttccttcaacatgaaaatttatacccccccatgcagtctaaaatgcttc

SEQ ID NO: 45961 - DNA, 567 bp, Homo sapiens
actctatagggcgaataggagctccacccgcggtggcggccgcccgggcaggtgaacggcagcaatggtcaacctggctttcacctttctctgcttcagtatctctctctgtttgctgcagttgtcacaggagtccaccttcaaactcagctgactgttggtcaaagggaactccggatgtgactcctgttacatgaaaatggaagaggtcagagttgtccaagagggaggccagccacatccaggcagggcccccatggtcagaaccctgctagagccatcaaggtcccagatgagtctggaagtgttccttgcaaagatatgcatttacttctctggctacacaaaggaatggaaatgcacaaagcaatatcacagtgaggaaaaaaacgccatcacccttagatcgaccaaagcccgtgcttggctgcccaccgtctctatgcccagccctagtgtcttgccaccctgcccgagagaaaggctgaaggggatgctaagggagataaagcaaaggtgaaggacgaaccacagagaagatccgcgaggttgtctgctaaacctgct

SEQ ID NO: 45962 - DNA, 511 bp, Homo sapiens
ttggagctccaccgcggtggcggccgaggtacagccccactacggaggaggacccgggccccgccagaggcccccggagcggcctcgctgcctactttttcatgggccggctcccattgctccggcgcgttctcaagggcttgcagctgttgctgtctctgctggccttcatctgtgaagaagttgtatcacaatgtacgaggaatgacctctagggcctgggcaacagccctgtatggccattgttccacaccagtcatggccttggatttttctgtcaaggcatgggccacagccatctcggaggccccaccccctggcaccagctgagggtccaggagaacattgcgacacacttgcatggcatcctggaggttgcgttctacttccgagagaatctctttgctagccccccggaggagaatggtgcaggccttggggtctttgcagtcagtgatgaaagtaaagtattcatctccaattttcttgatttccaacaggcctgctcctg

SEQ ID NO: 45963 - DNA, 577 bp, Homo sapiens
cgactcactatagggcgaattggagctccaccgcggtggcggccgaggtaccgtaagttttcttccacatattttgggaaaaactaaaaaagaaaaaggacttcctttttgtggacatctacagatgttagggttgccagaagcaaatcccaggaatgagatcagtattttcattgcatcttaaatgtataaccttcctgtgggagttcagtttgtctgtggttaagtgggtgtgcttaatcattctcgaaattgtgatcagatgaaataaaaaaaaaaatcttgatgcaataacagtggttttgccacttctggttgtttgcgatggatctgtcccatgtcagtctggggttttattcagcttgtgttgctaccagcagttcacaggtaaagcagaaattctctttaaccagcaagtttctgcttttttaaggttacttttagaataaatcatcagggaaacagagaggatgctttgctttgggttgtagtcaaaaactgattaaataatttaatgtctctggcacacactaaaaaccatacacttcagttgtgatctcagtggcatatttatttg

SEQ ID NO: 45964 - DNA, 418 bp, Homo sapiens
gctccaccgcggtggcggccgcccgggcaggtacatgaaggcgcggcccttccccgacggcctggccgaggacatcgataaaggcgaggtgtccgcccgtcaggagctcaagcagcgggcgcgctacctggccgagaagtactgatgatctgtggtcataagaacttcaataccgttgcacatagtaaacacttcactgttactgaatcctaaactaaaactactatgtggtaacatggatcgatttagggaaagatgtacctcggccgctctagaactagtggatcccccgggctgcaggaattcgatatcaagcttatcgataccgtcgacctcgagggggggcccggtacccagcttttgttccctttagtgagggttaattgcgcgcttggcgtaatcatggtcatagctgttt

SEQ ID NO: 45965 - DNA, 566 bp, Homo sapiens
gactactatagggcgaattggagctccccgcggtggcggccgaggtacaccgactacggcggactaatcttcaactcctacatacttcccccattattcctagaaccaggcgacctgcgactccttgacgttgacaatcgagtagtaccacttggcacgaacattctcgaaggaggccgggctcaccagagagaagcagatcagaaagacgtcagtttgggggtaggagagtggccgcagccgatcgtagtcctcctgacccgctgtgtcccacagccccaagttgactggtttcccgtccaccatcacgttggcagagtagttgtcaaaaacggtggggatgtacctgcccgggcggccgctctagaactagtggatcccccgggctgcaggaattcgatatcaagcttatcgataccgtcgacctcgagggggggcccggtacccagcttttgttccctttagtgagggttaattgcgcgcttggcgtaatcatggtcatagctgtttcctgtgtgaaattgttatccgctcacaattccacacaacatacgagccgggagcat

SEQ ID NO: 45966 - DNA, 345 bp, Homo sapiens
cgactcactatagggcgaattggagctccaccgcggtggcggccggctcgacgcgccgatggaaggcgcgatcttcgtcgagaccatccctttcaccgagacgcgcggctatgtgcgcaacgtcatggccaatgccaccaactatgcctcgatcttcgagggcaagccgcaatcgctgaaggcgcgcctgggcacaatcagcccgcgcccgggcagcgcttcggtcctggactgagccggggaggatgagcgtgagcgtgcggccaccgaacgtggtgctgatcggcggcaccggcttcatcggccagcacctggccgtgcggctgtccgacaacggcgtgggcg

SEQ ID NO: 45967 - DNA, 230 bp, Homo sapiens
gcgattggagctccaccgcggtggcggccgaggtaccttccacatagattcacaagctgccctgcagtggccttggcttcaggaaaggagcattcagacgcttccgtcagcctcccaggatggcagcccctgacccggcccacggacgcggtgacctttgacgacgtggctgtggacttcacccaggaggaatggactttactggacccatctcagagagacctctacag

SEQ ID NO: 45968 - DNA, 378 bp, Homo sapiens
  misc_feature 181, 183, 185, 190, 192, 212: n = A,T,C or G
ttggagctccaccgcggtggcggccgctctagaactagtggatcccccgggctgcaggaattcgatatcaagcttatcgataccgtcgacctcgagggggggcccggtacccagcttttgttccctttagtgagggttaattgcgcgcttggcgtaatcatggtcatagctgtttcctgancncngaccngngaggtaacaaaaaataccgngccctgaggttggacgtggggaatctctcctggggctcatagtgttgtacaagttctcttgggaatctacgcatggcaaaaataccatctcctttcatctttacagccctgtcagtgctgtgctcttcaaagcctttcccttaatagcaagagggccaatagtggc

SEQ ID NO: 45969 - DNA, 504 bp, Homo sapiens
tacgactcactatagggcgaattggagctccaccgcggtggcggccgaggtaccacaggtggaattcctcaaaggcaaacttcatggctctttctaggcactctgacagcatctcatactggcctcttcttccaagagcaatggtgagtaagtcatagaccacagatgcactctgcagactgatgaggcggtcactcttgtgttcaggtatcctgctcagcacagcgtcccggttggccattgattcactaatcagcaataacaacagggcttcttccgtattttcttgaggacaaaaaatgttctctcctgagtagacacgggctctccgagtgagagtgtaggtttttgtgtttgctcctttgcggagaggatcgtccagaggtgactggcacggtggatcctccagagggttccagtagctctgctcacacataccccgcaacaagatctctgccagctgcctggctattgtcattcgcaggttttgagttgttcttgttt

SEQ ID NO: 45970 - DNA, 459 bp, Homo sapiens
ggagctccaccgcggtggcggccgctctacacgtattgtatcccctggactacgcgaatcagatctatcgctaattgattccgtgtacctggagggggggcccggctcacatcttttgttacctttattgacggtaaattactcgcttggcttaatcttggtcataactgttatctgaccagcttcctactttggagtcagtggagaattataccctgaccataaatgatgaccagtgtttactcctctctgagactgtctggggagctctccgaggtctggagacttttagccagcttgtttggaaatctgctgagggcacattctttatcaacaagactgagattgaggactttccccgctttcctcaccggggcttgctgttggatacatctcgccattacctgccactctctagcatcctggacactctggatgtcatggcgtacctgcccgggc

SEQ ID NO: 45971 - DNA, 459 bp, Homo sapiens
gctccacctcgggggctgccgaggtacgccttctcccctaggaattctcttccacagcacctgaaagagtttttgggccatcctcatcataacacacttcatggggggctcctttccattgtcggatgagaatgatgtttgtgacaagctacgcgtgatttcataatagtcatagagcggcaagcagaatcctggtgacagctgcagcctcgggaccccgcctgggcaggggccccaaagctaggctctgagaaggaaacacactcggctgggcacagtgacgtactctggacacatgttagcaatcgtagctcggtcagcaatggacaactgggctactccaggcccgaagaactcgacaaatttgcccactaccccaacctggcggaggtgcttggtaatggtgagcacgatgtcagtggatgttaccagagggtggggcttccccatcaacctgcc

SEQ ID NO: 45972 - DNA, 399 bp, Homo sapiens
gctacaccgcgggggcggccgtcctgcctggtaccggggtcccgagggcccccagggacccccaggacaccaaggaccgcctgggccggacgaatgcgagattttggacatcatcatgaaaatgtgctcttgctgtgaatgcaagtgcggccccatcgacctcctgttcgtgctggacagctcagagagcattggcctgcagaacttcgagattgccaaggacttcgtcgtcaaggtcatcgaccggctgagccgggacgagctggtcaagttcgagccagggcagtcgtacctcggccgctctagaactagtggatcccccgggctgcaggaattcgatattcaagcttatcgataccgtcgacctcgagggggggcccggtacccagcttttgttcc

SEQ ID NO: 45973 - DNA, 607 bp, Homo sapiens
cgtatacgactcactataggtgcgattggagctccaccgcggtggcggccgcccgggcaggtgagggatactccccctttccaccatgggcaagaagggcaaagttggcaagagccgacgagacaagttttatcacttggcgaaggagacgggttaccgttcccgatctgctttcaagctgatccagctcaatcgccgctttcagttcctgcagaaagcccgagccttgctggacctgtgtgctgcgccagggggatggctgcaggtagctgccaagtttatgcctgtatccagccttattgtgggagtggacctggttccaatcaagcctctccccaatgtggtgactctccagcaggacatcacaacagaacgttgtaggcaggccctgaggaaggagctgaagacctggaaggttgatgttgtgctcaatgatggggcccccaacgttggggctagctgggtccatgatgcttactcacaagcccatttgacactgatggctctacgtttggcttgtgactttttggcccgtggtggcagcttcatcacaaagggtttccgttctcgtgactatcaacctctgcttatggatctttcagcagct

SEQ ID NO: 45974 - DNA, 118 bp, Homo sapiens
ggtgatcaattagtgctggtggttactctctcctgcgtgttttgagcaagtagggagctgaggctaggcaggccctgggagtctgtgctgtggggctgtgagatggggccccaggggt

SEQ ID NO: 45975 - DNA, 445 bp, Homo sapiens
agctccaccgcggtggcggccgcccgggcaggtacgactacaggcatataccatcatgcttgggtaatttttttgttttgttttttgtagagatgggatctcactatgttgcccaggaggtctcaaactcctggtctcaagcaattctcccaccttggcctctcaaagggctgggattataggtatgagccaccttacctagcctgaataattttttcaaagaatagaatttataagtaaggctgggaattatatggaaaaactcccacgtttttatctgatgccacaaggagtcagagaaacagctgctaatgtgtgctcacaggtctcctgaagttgcaggagtatcagcctcccagcaacactttgagattcaaaccttagttttaagtgagagattggaaagctcctggaagtgtcttattgagagagggaaggaaacact

SEQ ID NO: 45976 - DNA, 464 bp, Homo sapiens
gctgattggagctccaccgcggtggcggccgcccgggcaggtactgcatcgcttggaggattcctgatttgtggtgaagactttgtgttaattttgtcatacagatctagtaatgtgtgaagatgctgatcctggaaaacactgtgtagaaaatctaggtccttttcactgcagtctgtaagcgcatgaatctcttccaggctgtccagcacctgtgagactgctcctgaggaggtagggtcttcggagaaatctggtaactcttcagggggatccccatagaatgagttgaatttgtgacttgacacagcggctagtacatctgtgcgaggtccggcactctgttctcatccagtaagtggtcgagccctttctgcagaattgctgttaaatgttctcctaatagctgtttctccacacaagcaatcagtggtttctgtgtgctgtggtccaagtaagtgatt

SEQ ID NO: 45977 - DNA, 501 bp, Homo sapiens
gactcactatagggcgaattggagctccaccgcggtggcggccgcccgggcaggtaccacctggaacgccacatgcgtgcgcacagtggtgaaaagccttaccagtgtgaacggtgtcatcagtgtttttctcggacagatcgattactcagacacaaacggatgtgccaagggtgccagtccaagacttccgacgggcagttttctctataggcgcaaggggccccgggtggtgggagtgatcagaagagcctgccgaagagcacaccccctctggtctgatggtcccaccaccgccccatgtgaacctgtcccactcctggaggagtggacccaggagaccagaagagtgcatcaggggacagtggccccagaacctcagctctgaacaacccaagactggtcccaagttggctaacagctgctcaagaaacaaaggaatctggggtcttctgacatgcctgttgagcagtatgagctgttctccctccccaagtccta

SEQ ID NO: 45978 - DNA, 521 bp, Homo sapiens
acgactcactatagggcgaattggagctccaccgcggtggcggccgaggtactcgttggagcgttcgtagcaggcacgcactccttcatcctcccacagagcctcggcatgctcatagaattcgggagggaagtcaaagtcaggcacgttcatcacactcaggatgtagtccactctgaactggttctcggggttggccagctccacggggggcaccaggttgctcatggcggaggctctgaacctcttcaagagcatctggaacaacagatggctgcgcaccatctctgtgatcctgttcctcaacaagcaagatctgctcgctgagaaagtccttgctgggaaatcgaagattgaggactactttccagaatttgctcgctacactactcctgaggatgctactcccgagcccggagaggacccacgcgtgacccgggccaagtacctgcccgggcggccgctctagaactagtggatcccccgggctgcaggaattcgatatcaagcttatcgatacc

SEQ ID NO: 45979 - DNA, 469 bp, Homo sapiens
cgggcaggcacaaatagcacaggaggacctcagccccatgcagatggtagcccaggggcgggggtggggggtcgcaccagagccttttgtcctcatgttggcagagatatctactctgaagcctttgtaggggcctgggtacctggacctagcacccagcacctttctctgagctgagtggctggagcggtcaataaagccacatgtgcctgcgaaaaagcataaaaaaagagccaacaaaacaaactgatgcttgtacctcggccgctctagaactagtggatcccccgggctgcaggaattcgatatcaagcttatagataccgtaaacctcgagggggggcccggtacccagctttcggtccctttagtgagggttaatggcgcgcttggcgcaatcatggacatagctgtttcctgtgtgaaattgttatccgctcacaattccacacaacatacgaaccgggag

SEQ ID NO: 45980 - DNA, 578 bp, Homo sapiens; identical to SEQ ID NO: 43112

SEQ ID NO: 45981 - DNA, 630 bp, Homo sapiens
  misc_feature 84: n = A,T,C or G
ctcactataggggcgaattgggagctccaccgcggtggcggccgcccgggcaggtaccaaatcaatatttgcatgcatatatangagaaaaaagtctagaaggatacactaaaagacttaatattatctctagactaagaatatacaagacgattcatatcatctctctagaagggaaaattaaatgtgatttcttatttttctcttttgcttattgctattacctaaaacgggttgctaaacgacagtctgaaggccacatctggcccattgcttacttttgcaaataaagttttactggaacatggccacacacgtttgtttacgtattcctatagctgctttcaggctacaacggcagagtcaaataactgtgacagagaccataaggcccacaggtggaaaatatttgccatctggccttttatagaaaaagctggctgactcctgatataaaatgatcatatatacattagacatgtatttaaaatatacttcagctgtgctccaaaggaaatatttatcttccaaatccaaatttcagcaaaattcattcattcattcatctaaactataaaggtcagtcaacactatttgctaagtgtttactacgttccaagcattgtttta

SEQ ID NO: 45982 - DNA, 552 bp, Homo sapiens
ctgtgtggcaaataggagctccaccgcgggggcggccgaggtacgaagtcctcgtcgccgacgtgcaccttgatgaagtagtttgtccccgcgaccacctggctcttgaatgacacggccttaaacacagggaacttcttgttttctttctcttcaagctgggacctcacctggtcggcgatgtgctgggtctcggcggtggccggctgcgtggcggagggcgccccgcacccaatttccagtcttcagaacagcatgaacacctttggaatctacattcactgctaatatttctgttttttcaggtatacaaagctttttaggagtcctttggaaacagtcgggaaccttcggtgctccaccagttttgacaacctgcaattcatcaattctaagtaacctacaatcctgcaggagagaagaagggtcagcatctggaccagagctgttctgacagttagtattactggaggttcctggaaattttacagcaacataggcaccatctacttttaacaccttgccaacaggaacattcttgacatcttccac

SEQ ID NO: 45983 - DNA, 259 bp, Homo sapiens
  misc_feature 112, 130, 147, 208: n = A,T,C or G
ggcgaattggagctccaccgcggtggcggccgcccgggcaggtactgcagcgcgtcgagcggctgtccaatcgagtcgtgcgtgtgttgggctgtaacccgggtcccatganccctccaaggcaccaacnacctacctagtgggganccggccccaggaagaaatcctcattgaccatctggggaaccagccaattcccagaatacantcacgctgttttaaagcagggctcttaactggaatttaaacacagcaattc

SEQ ID NO: 45984 - DNA, 600 bp, Homo sapiens
gtaatacgactcactatagggcgaattggagctccaccgcggtggcggccgaggtacaagctttttttttttttttttttttttttttttttttttttttttttttttttttttttttttttttttttttttttttttttttttttttttttttttttttttccccccccccctttttatttaaaacaggaaaagggggaaaccccccctttttcccaaaaacaaaatttaaaaattttcccaaaaaaatcccggccccccccccccttaaaaaaaacgggcccccccgggggggaggaaatcaaaataaaactttattccccccccccccccggggggggcccccccccccccttttttttcccttttggggggggaaaaaccccccctgggcaaaaaacgggaaaaagttttttccgggggaaaaaataatcccccccaaatttcacaccaaattccggccggggaaaaaaaaattaaaacccgggggccccaaaagggaccccccccccaataattgggggacccccccatcgccccttttacaaaaaaaaaaaccgtggccccccgttttttaaaaaaaaaccccccccccccggg

SEQ ID NO: 45985 - DNA, 529 bp, Homo sapiens
gcgtaatacgactcactatagggcgaattggagctccaccgcggtggcggccgaggtcgatctgctgctcgtctcaggctcgtagttcgccttcaacatgccggaaccagcgaagtccgctcccgcgcccaagaagggctcgaagaaagccgtgactaaggcgcagaagaaggacggcaagaagcgcaagcgcagccgcaaggagagctactccgtatacgtgtactcatagcaggtagcttcatcaagggtagttttcaatgcattttctgttgggtaaaaaactttcccctcaaaaatctgatgacaggcttctgctaacagtgaagcattggacagagctgccctcagaaaacgtttattctcccataactcagtattgtaaacaaatacaaaaatcagggcagagataagagacgcgctaaaaagacagtgcttccaagagcccatcattcacaaccaggaaatgagtaaaatatctctctcttgagataggatcagagtgtagatatatttaacttacattttc

SEQ ID NO: 45986 - DNA, 487 bp, Homo sapiens
tagctgcttcctgttcatagctgtttcctgtgaggaaaagaagagccccaccgcgggggcttcctaggttcttggtagtcttgagaagaaaagttgaatactgttttgttttcatctcaaggggttccctgggtcttgaactactttaataataactaaaaaaccacttctgattttccttcactgatgtgcttttggtgaaagaattaatgaactccactacaaagaaagttataagtcaaggcctcaccaattcctacagtattagtattgtgtctcaattctcaaaactaacttttaaaaagcttaaacttaacctaaaggattttaaatgaaaatataaactagaatgaacaaacatgataaatatttctttgaatcacggagctagcacctttgagttttccaaaaaagcacgtctccccagtgtgttcactgtgatgtggtgtaaaagatccacatttaacatacttaaactacttaaact

SEQ ID NO: 45987 - DNA, 382 bp, Homo sapiens
  misc_feature 318, 358: n = A,T,C or G
ggcgaattggagctccacgcggtggcggccgcccgggcaggtacttgggacagttacaggcatgctgctattgccatgatcttcgggaagctgaagtgatgagcagcagtgtgtgattctgaggacacagagggctggggtctaggagctatctcaggtgggctcagtcagtgccatcctcccttttggtgcctccctagaagtgctgagaagatgcaaaaccaaaagcttttactccaacattgcttagccaagctaagcacatgcattccctatgattcagcaattctgctcctagcatgtatcccagagaattgncccatgggtccataggggcatataagaatgggcattgcancaaagttctggttggggtaggggg

SEQ ID NO: 45988 - DNA, 490 bp, Homo sapiens
gcgcgtatacgactcactatagggcgaattggagctccaccgcggtggcggccgcccgggcaggtactgcatgttacatattcttctttaaaattttgtaataaacattgacagtgtttggtaggcacagggaaacaggataacgtagagtcattacagaagaaaaaaacttattgctaacattgcagtattccttttatcagaattaggtgagtattgattgtaaaagctctatcaactcttgctcttatttgatgactttgagacttttttactcttgctataaaaagaaggctactttctttccctaatatatttctaccaatgcgaataattcaggaaacaatgagagaaaagtaattcacacttaatgtgttgttacttaagagatttgacggataaaataaaatcaaattaaatcattgaaaaggcaggcttagacccccttaaaaacaccgttagttgcctaccataatttgagcactttttt

SEQ ID NO: 45989 - DNA, 51 bp, Homo sapiens
gggggaaaaaaaaaatttgggggtttttttggggggggggggggaaaaaaa

SEQ ID NO: 45990 - DNA, 505 bp, Homo sapiens
gctccaccgcggtggcgcctgaggtgcctaatgagtgagctaactcacattaattgcgttgcgctcactgcccgctttccagtcaggaaacctgtcgtgccagctgcattaatgaatcggccaacgcgcggggagaggcggtttgcgtattgggcgctcttccgcttcctcgctcactgactcgctgcgctcggtcgttcggctgcggcgagcggtatcagctcactcaaaggcggtaatacggttatccacagaatcaggggataacgcaggaaagaacatgtgagcaaaaggccagcaaaaggccaggaaccgtaaaaaggccgcgttgctggcgtttttccataggctccgcccccctgacgagcatcacaaaaatcgacgctcaagtcagaggtggcgaaacccgacaggactataaagataccaggcgtttccccctggaagctcccttgtgcgcttctcctgttccgaccctgccgcttaccggatacctgtccgcctt

SEQ ID NO: 45991 - DNA, 156 bp, Homo sapiens
acgactcactatagggcgaattggagctccaccgcggtggcggccgaggtactgaagtatttattgataaagtgatgtgatatttgagacttgcatcaaaggaacccagtggagggtggggcataggtgaggtttaggtgaaataagattggctat

SEQ ID NO: 45992 - DNA, 614 bp, Homo sapiens
  misc_feature 497: n = A,T,C or G
agggcgaattggagctccaccgcggtggcggccgcccgggcaggtagcctcgttgcggccatcgccctgccggaccgcgcctcaggctcccccagccggaagaattaacctcgagtctgcacgcttttaagaacaaggcctttaaaaaatccaaagtgtgtggagtttgcaaacaaattattgacggtcaaggtatttcatgccgagcctgcaagtattcctgccacaagaaatgtgaagccaaggtggtgattccctgcggtgtgcaagtccgactggaacaggctccagggagttccacgctgtccagttctctctgccgtgataaacctctgtggcccgtcatcctgagtcccaccatggaggagggccatgggctggacctcacttacatcacggagcgcatcatcgctgtgtccttccctgccggctgctctgaggagtcctacctgcacaacctacaggaggtcacgcgcatgctcaagtccaagcacggngacaactacctggtattaaacctttcagaaaagagatatgaccttacgaagcttaacccaaagatcatggatgtgggctggccagagctccacgcaccgcccctggataagatgtgt

SEQ ID NO: 45993 - DNA, 587 bp, Homo sapiens
gaattggagctccaccgcggtggcggccgcccgggcaggtacgtctgtgagagggtgtgttccgggtagaggtggagagctacgctgaagaggacgcctcctgcctgctgcggctatgtcatcgcctgaggcctcgtcccatcttccgtgaggtcataccactgggtccagcctttggcaagttcttcagatgccggagcaaccaatactttgccaaggagccctttgtctttggacaggaagccgccactgttcttcacggcaacgtcgagcgttctcctctgcacttctggtaacgaaacactgaaatcaaagctttgatcaaacactggatttaatgttttctttgacacgtgtgttttcctccttcctgaccgcctcttgtctggtaataaatacatgcggacataggggtcagagccgtcttcagagaaggcaatgaggtttctgcaggcatgcacgaccacgataagcttgtttctctgcgagctgtgccggatggtcagctggatctgccccagtggagactgtcccagggtcgacctcggccgctctagaactagtggatcccccgggctgcaggaatt

SEQ ID NO: 45994 - DNA, 478 bp, Homo sapiens
tacgactcactatagggcgaattggagctccaccgcggtggcggccgcccgggcaggtaccatccacacctatggcctctatgtgaacttcaagaactttgtctgcaacatcggggaagatgcagagttgtttatggccctctacgacccagaccagtccacttttatcagtgagaactatctaattcgttggggcagtaacgggatgcccaaggaaatagagaagctcaataacctccaagcagtgtttacagaccttagcagcatggacctcatccggccccgcgtcagccttgtgtgccagattgtccgcgtgggccatatggagctgaaggaaggcaagaagcacacctgtggactccgaagaccttttggagtggcagtgatggatattactgatatcatacatgggaaggtggatgatgaagaaaagcagcattttattccctttcagcaaattgcgatggaaacctacatc

SEQ ID NO: 45995 - DNA, 311 bp, Homo sapiens
ttggagctccaccgcggtggcggccgctctacaactaatggatcccccgggctgcaggagttctatatcaaactcatcgataccgccgaactgcagggggggcccggtacccaacttttgttacctttagcgagggtaaattgcgcactaggagtaatcatggtcatactggatgctgacggtgatgatgatgatgatgatgatgatgatgaagatgaagaagatggagaagaagagaatcagaagcgatattatcttagacagagaaaagctactgtttactatcaggctccattggaaaaacctcgtca

SEQ ID NO: 45996 - DNA, 266 bp, Homo sapiens
aatataaggcgaattggagctccaccgcggtggcggccgaggtacctgtggagcgaaggagaggttgtcatctgggcccctgtttcaccagtcaaaacctatggagcagtcagaagcccgaagcatccaagcccagtggccaggaagcttctgaaataaacggcactgggttgggaaggatgagaaagccaagacaggtgggccaggttctccgaacatggggcaacagtgacctgggcaaaagcctggaactgagcggctgataa

SEQ ID NO: 45997 - DNA, 616 bp, Homo sapiens
  misc_feature 601: n = A,T,C or G
tggcggccgccgggcaggtactatatatcctcaatatgcatgtctgcccatcacatcaaatgttctgtcaacaagatgtttggtaatttttttttaaaaaggttggaaaattaattatagaaggttctatactgtttttttaattaagaaactaaatctagcaggctaaaggttaattgtagtgattttttttcacatagatatctttctatgacctagttagttactgcaattcagaattagttcacattgcataaagaattacttgttgtaagcaaaatgctgaaactaccaaaccagtggatgaagaccactaagaactttgcacataatcatacaatcttttgaaaatattttgcaaatatgtgtttagacaataagatggactagagttcgacaaaatgatttctttatttaaattttgtataagtattttcttcgacactttcaaattatattgtgttcttgatatatgctgtatatttatttgttagtgcatgtgtttttaatttacatgaaaacatgagttaggagaaattacaggttgaaagatgaaatgcctgtatgtgctctgaagaaatggtaattccagattgtgcanggggaaacaaatcta

SEQ ID NO: 45998 - DNA, 507 bp, Homo sapiens
aatacgactcactatagggcgaattggagctccaccgcggtggcggccgcccgggcaggtacatctatgattcagcttttcatcctgacactggtgagaagatgattttgataggaagaatgtcagtccaggttcccatgaacatgaccatcacaggttgtatgatgacgttttacaggactacgccggctgtgctgttctggcagtggattaaccagtccttcaatgccgtcgtcaattacaccaacagaagtggagatgcacccctcactgtcaatgagttgggaacagcttacgtttctgcaacaactggtgccgtagcaacagctctaggactcaatgcattgaccaagcatgtctcaccactgataggacgttttgttccctttgctgccgtagctgctgctaattgcattaatattccattaatgaggcaaagggaactcaaagttggcattcccgtcacggatgaaaatgggaaccgcttgggggagtctgcgaacgctg

SEQ ID NO: 45999 - DNA, 464 bp, Homo sapiens
gactactatagggcgaattggagctccaccgcggtggcggccgaggtacaccgaacaaagagacagggtcatttgtaacctgatgcgtccaccctactgctgtgtccggtttccattggctggaacgggacctcatattctgtatttgtcctgattgggaagcaacttaaaactttttaaaagaggcgaaggcagaagagaacaaaggaaggagaaagtaacttgtggaatggtgagaaaggcatgaggcgaattctcagccatgacaaggctgaaggccagcaggaacaggctctagcgaaatgggtgctgtgtccccttcctgcatgtggcagaaagttgcaaaggactctctcgtgatccctgaggcagatggactgggagcccctctgaccaaccttcttttttttttttaagagggaatcttgtctgttgcccaggctggtatgcagtagcatgatctc

SEQ ID NO: 46000 - DNA, 464 bp, Homo sapiens
tccaccgcggtggccgagcggccgcccgggcaggtaaaaaaaaaaaaaaaaaaaaaaaaaaaaaaaaaaaaaaaaaacttgaacacattagaaaattggacctgatggcaaaataactggtaaaagcaaatgtagaagttcacaactcatgaaaatgctgtggcagttatgtacaaaagacaaaagcaaatttgcaacacagatatgtagaactcttcttgaattctacagcaggagcaagcggtggtgcttacggtagccaaatgctaggaggcatgggtttgtgtaaatatcactttagtgtctttttttttaagctaaccttttgtatgcctttcctctcatttcagaacacatatttgtagaactcttctggaattctacagcaggagcatgcggtggtgcttatggtagccaatatgatgggaggcatgggcttgtcaaaccattccagatacgggggc

SEQ ID NO: 46001 - DNA, 471 bp, Homo sapiens
agctacaccgcggtggcggccgcccgggcaggtacttgtcaaacacctttctcaaatgagacacacttcgtgttccaaagatggtgataaacttttcttcatctgtcccccatttaagttctccagcctgaaataaagcctgagcatcttgttcaacttgagcttcatcaattccagcatcagggtctctgttagcctgaaggagaaccaccaacatccgctggtagtacatctggggccactctctgggcactggcgtggcgacaaatctggtgcggcgcctctgtgagcgagagacgcctccagatgcccttatattggaatctccattcactaatatccgcgaagaagctaagagccatccattttcagtgatatatcgatacttccctgggtttgactggttcttccttgatcctattacaagtagtggaattaaatttgcaaatgatgaaaacgtgaagcacatct

SEQ ID NO: 46002 - DNA, 376 bp, Homo sapiens
tgtttcctagattggagctccaccgcggtggcggccgaggtactggtcttcaaaggtggagttttgaggaatgtcaagaggatcccagggctgtgtcagggtcatctttgagcactgcttggtggcttggtcaatctgaaacatcactccatccttatacagcaaaatatattcaaataatctcctgcaggggatcagcgccttcctctcgtccagcacccgcacgcgctggttgagcccgtcgtaggagagcagggcgcggctgttgcgcccgctactttgctggttaaatttgcccacagaaccctctaaatccccttgtaaatttaactgttagtccaaagaggaacagctctttggacactaggaaaaaacc

SEQ ID NO: 46003 - DNA, 608 bp, Homo sapiens
gaattggagctccaccgcggtggcggccgaggtacagaaataaaattcaaaagatactaaactgggagtcaggacacctgagtcttaccctcagctctctgatgcgactttaagcaaagtcgcttgctctttctggacctcagtttccttgtttgtaaaaacagaaatgatttctaagatcactcagaattgtaaaattctatgaacacttatgaagtctattgagcttgcgtcactgttcactccaatgagtggggataagttgtaagcagaaaaatatcattacttcacatcttttcgttcactatcaacacttaaaaacaaacagccttaataaaaatcaagtccactttgttttctctcttaaacagacaaatcataacgaacagagtccagtgagtccctctgtcgcaacaagttcaggatcactcaagcaggtaaccgcacacaacgcacaatgatgaagagcataaacacaagccataagtatatttttatgtcgctttttcttaggttattgatgcatttccagaatctcttcatttctttgcaataactgaaaaccccagaagaaagacaccatttacattaagaatgtgatcaatgtt

SEQ ID NO: 46004 - DNA, 526 bp, Homo sapiens
tacgactcactatatgggcgaattggagctccaccgcggtggcggccgcccgggcaggtaccagtagagtggggtgttgttgaagagatacccaaaaatgtggaagcaactttggaactgggtaagaggaagaggttggaacaatttggagggctcagaagaagagagaaaaatgtgggaaagtttggaacttcttagaaacttgttgaatggctttgacaaaaatgctgatagtgatatgaacagtaaggtccaagttgaggcagtcgcagatggagttgaggaatttattgggaactggagcaacagtgaccattgtaatgttttagcaaagggattggtggcattttgcccctgccctacagatttctggaattttgaacttgagggagatgatttatggtatccggcagaagaaatttctaagcagcaaaacattcaagaggtgacttgggtgttgttaaaggcattcagttttaaaagggaaacagaacataaaggcttggaaaatttgcagcctgacaat

SEQ ID NO: 46005 - DNA, 480 bp, Homo sapiens
tacgactcactatagggcgaattggagctccaccgcggtggcggccgcccgggcaggtactaacttccaatgggatggtgaggctttggggaggtatatattattagattttgaggatggagccctgatgacgagataagtgcccttctaagaaaagacatgaggcaggtgatctctccaccacgtggatacagcaaggagatggccatctgcaaacaggaagagacatggaatctgccagtgccttgatcttggacttagcttccagaacagtgagaaataaatgttgttcaagccactcagtccgtggtagttacagtagcacgaactagctgagatagaaatgagattcataaagacaatgttaacttcttttcttttttttttttgagacggagtctcgctctgtatcccaggctggagtgcagtggcgcaatctcggctcactgcaagctccacctcccaggttcacgccattct

SEQ ID NO: 46006 - DNA, 456 bp, Homo sapiens
gagctccaccgcggtggcggccgcccgggcaggtaccttggttcagtccagtaaggtgggacaacccttaagtgggggcttcctggttgtagtagataagagacaaaaggttgcattcttttgagttcttgatcagccttccactgaacacacaatttagtctggctcagtgagtctgcatttttacagaagcgataggggaaaggaagcaatcagctatgcaggtgagcctcagggggatgactgtgaatagaatgggaggcagctttgccctaagcagttcccagcttgactttttcctttagcttggtgattgtggagtctcaagatttgttttcttttcacaatctgaaattcaaagttccctgggtatcctgtattttcatttgcacactttggcgccctagtcccagagtcctggagcggcatactgggggtggctgtgcagtcccagca

SEQ ID NO: 46007 - DNA, 439 bp, Homo sapiens
acgactcactatagggcgaattggagctccaccgcggtggcggccgcccgggcaggtactaacttccaatgggatggtgaggctttggggaggtatatattattagattttgaggatggagccctgatgacgagataagtgcccttctaagaaaagacatgaggcaggtgatctctccaccacgtggatacagcaaggagatggccatctgcaaacaggaagagacatggaatctgccagtgccttgatcttggacttagcttccagaacagtgagaaataaatgttgttcaagccactcagtccgtggtagttacagtagcacgaactagctgaaatataaatgagattcataaagacaatggtaacttcttttttttttttattttgagacggaggctcgctctgtatcccaggctggagtgcaatggcgcaatctc

SEQ ID NO: 46008 - DNA, 468 bp, Homo sapiens
ctgtgtggaaaagaacagccccaccgcgggggcggccgaggtaccgccggaaacctcgcagccgctccctgcagtccaccggccaggtgttcctgggtatctacctcatctgtgtggcctactcactgcagcacagcaaggaggaccggctggcgtatcaaggccaggacaccccagaggtgctaatggacatagggctaaggcaagaggtgaccctggagctgcagggggacgggtctgtgtccaatctgacagtgtgtgtggcagcctacactgctgctggggatggaccctggagcctcccagtacctgcccgggcggccgctctagaactagtggatcccccgggctgcaggaattcgatatcaagcttatcgataccgtcgacctcgagggggggcccggtacccagcttttgttccctttagtgagggttaattgcgcgcttggcgtaatcatggtcatagc

SEQ ID NO: 46009 - DNA, 629 bp, Homo sapiens
  misc_feature 534: n = A,T,C or G
cgactcactatagggcgaattggagctccaccgcggtggcggccgcccgggcaggtactcactctttaggtctcacaattaccattgttcctggcccggacttcaatctggcctctcacattattcctgatatcacacctgacccccatgactgtatctctctgatccacctgatattcaccccatttccccatatttccttctttcctgttcctcaccctgatcacgcttgatttattgatggcagttccaccaggcctaatcgccacacaccagcaaagtcaggctatgctatagtactgtctctcctgtgtttgagagctcaagtagggctctcctgggactcagggggagctaattaccttgaaaaaggcatatagcacccataccatgtttctgtttcttggctgggtttgggtttaggtttttggtttgtttcttgcagtgccatgctgaccttaggccattgttgctggggtctcctcagccagaaaccagcctgcttggagccaaggctcctgtgaggtgcctganagtgcccccacagctaggagacctaaagcctcttccttttcttcccattgtgttgactgggtttttccaggggaggagtggggccagttaaaagc

SEQ ID NO: 46010 - DNA, 412 bp, Homo sapiens
  misc_feature 108, 112: n = A,T,C or G
gctccaccgcggtggcggccgcccgggctggtactatacttcacaacaatcctaatcctaataccaactatctccctaattgaaaacaaaatactcaaatgggccatnaaanaaacacaccagcgggagatcattgctcggcacggccccgtctcggcttgttcagagcacacctctcgaaccacctcttccacagactctgtggtggtggtggtggtggtggcaatgctggtggttctctctgtggcttcttcgtagggttcctcagcctcttcctgtacctcatcaccatcctcatcgtcctcgtcatcatcggcttcttcttcttccacctcagccacttcttcctcctctgctacttctactactttgtcttcactcccatctgcatagtgtgtgtctgctccgcccc

SEQ ID NO: 46011 - DNA, 459 bp, Homo sapiens
gctccaccgcggtggcggccgaggtaccagctctgttatataagggggagcggttggctcattcccttatctgcacatttgatgtctacatggtgatggttatttgttgtatgattgatgataacattcgcccaacctttaaagaactagccaatgagttcaccacgatggcccgagacccaccacggtatgtggtgataaagagagagagtgggcctggaatagcccctgggccagagccccatggtctgacaaacaagaagctagaggaagtatatctggagccagaactagacctagacctagacttggaagcagaggaggacaacctggcaaccaccacactgggctgggggtgagcctaccagttggaacacttaatcggccacgtgggagccagagccttttaagtccatgatgtggatacatgcccatgaaccatggtaatcttggggagtc

SEQ ID NO: 46012 - DNA, 261 bp, Homo sapiens
gcgaattggagctccaccgcggtggcaggcaggtggtgaccccgctcatggtggccgacaccaggtggttgaggtccccgtaggtgggggtggtcagcttcagggtgcggaagcagatgtcatacagggcctcgttatcaatggagtaggtttcatctgtgttttccaccagctggtggaccgagagggtggcgttgtagggctccaccaccgtgtctgacaccttgggtgagggcatgacgctgaaagtgttcatgatgc

SEQ ID NO: 46013 - DNA, 452 bp, Homo sapiens
gctccaccgaggtggcggccgaggtacatccggcttcctttccagaagaaccatgtcgccaggcaagccaaaggacttggcttggtaagtgaggtaaccaccatatgaagaaaccttgtcccccaggtaggaggtgggtgcgacccaggacgcgctgtggatggttgcgggcagctcctggagatccgccaccatactgttgctgcctgggttgaaagagacagggatgtccactctgtctgctgtctccaggtgccagcccagcaaatccacaaacttagtccttcgcttatgtgagctgtgacattgattatttactccaaaacagaaacagctggtacctgcccgggcggccgctctagaactagtggatcccccgggctgcaggaattcgatatcaagcttatcgataccgtcgacctcgagggggggcccggtacccagcttttgtt

SEQ ID NO: 46014 - DNA, 451 bp, Homo sapiens
ggagctccaccgcggtggcggccgcccgggcaggtactagctatgaccaaccgaaacttgtcacccaagtctacagggtaaatttgaatgtttacatctaagattggatccatcttgaaagattcactctcacaatgcagtcgagacactcggtcaaacttcttgccctccgggtcaatatccttcacatcgaaaatatcctcaaacaggatgcacgccatcgcgagggggccacgagagcagcagaaggggtgagagcgcgaccacagttgggagtacatccagaacttcaaaatactacaagcaggttttaagagaatgggtgttgacaaaataattcctgtggacaaattagtaaaaggaaagtttcaggacaattttgaattcgttcagtggttcaagaagtttttcgatgcaaactatgatggaaaagactatgaccctgtggctg

SEQ ID NO: 46015 - DNA, 605 bp, Homo sapiens
atacgactcactatagggcgaattggagctccaccgcggtggcggccgcccgggcaggtaccgtttattgtcgttacacaaatgaacccagcctctggcttgggcaccgtcccacggaccagcagatgagcatggtcagccgacccctttccccacccccgagtcatgtgcagtcatacactccaggcagaaagtcgcagtatcgaataccggacacaggttcccttggcttggtggtgcatctctgatccacagactggcccacctctcggagtggccaacggagtcgctgaaacgttgtcaaataagcaagtaagtgcaggagcccacggaccagcagatgagcatggtcagccgacccctttccccacccccgagtcatgtgcagtcatacactccaggcagaaagtcgcagtatcgaataccggacacaggttcccttggcttggtggtgcatctctgatccacagactggcccacctctcggagtggccaacggagtcgctgaaacgttgtcaaataagcaagtaagtgcaggagccctgggctgggggcctctggcctctgcaaccgggtgggaggaggatgtccaaggtgtctgcggg

SEQ ID NO: 46016 - DNA, 520 bp, Homo sapiens
cttactactcactatagggcgaattggagctccaccgcggtggcggccgaggtacttcttcgtttactgtaactcaaatctaacccagcatttctcaatcttgcactatggtcattttggacctggtagttcttcgtcgtggggactctcctgcatattacaggatgtttggcagcactagatgccaaagtcacccactccagtggtgacaatcaaaaatgcctccagacattaccaaaattgcccccagttgagaaccactgatgtcatccaagaggacgaggtccatttaagaaacgtacaggggctggggcatatgcccccagcagcgaggacggcagtcccgagagtgattttcagaaaataaaaaaaaggaccccaggggcaggcgttggtgcccctccccaccccaagacacaccaaatttcaagactttatatataatatatctctgtgcccccaggggaggagagggacacctggcggcatcctggaggggggcccaggcagccccaagcca

SEQ ID NO: 46017 - DNA, 515 bp, Homo sapiens
gagcgcgcgtaatacgactcactatagggcgaattggagctccaccgcggtggcggccgcccgggcaggtactctgatccacaaagctcttttataaaccaggtttgaggttgtgtgtgtgtgtgtgtgtgtgtgtgtgtgtgtgtgtgtgtggtcagctctgggttaaatggaaagaccacggtcgtggaagaggcagctctgagtccagattcttctgtgatcttgggcaaattccctcactttctgctaggactacaagaacagaatacctcagagactgggcgtcttctgcagcagaaacaccctctcactgtcctggaggccagaaagccgagacaaaggtgtgggcaccgttggtctctcccgaggactctctccttggttcgcagatggcggcttcccccggtgcccgtagcatcttccctgtgcgcgcacctccctggtgtctctctctggtcgtaatctcttcttcttaggacaccaatcagattgtattagggctcaccctaatg

SEQ ID NO: 46018 - DNA, 601 bp, Homo sapiens
taatacgactcactatagggcgaattggagctccaccgcggtggcggccgtcagctctcgaggggcctctgttatgagagcactgattccattcacactggctctgcccctgtgacctcatcacctcccacaggccctgccttcagttaccgtcacctgagggctgaggattttgacaggaatttgggaggacataaacattcaggccttagcaaatgtgttttattttccaactatcatcaattttaaaaaatcagaatcgtgcttggtgtaatcacattatatagaattacatgttcaaagttatatatgttttttggaaatcacattctaattggttggttggttggtttatttatttatttatttttgaggcagagtctcgctctgtggcccaggctggagtgcagtgacatgaacatagctcactctaggcccaacctcctgggctcaagcgatcctcccacctcagtctcctgagttgttgggatgttgggactgcaggtgtgccccaccacgcccagctaatttttaattttttttgtagagaccgggtgttgccatgttgcccagactggtcttcaaactcctgggctcaagc

SEQ ID NO: 46019 - DNA, 388 bp, Homo sapiens
cgcggtggcggccgaggtacaaggaccgctctgctttgtaagcaggaaccgcagtcccctgaggagggtgtgtgaagactcgctcatttgagttctttgaaatgggtcccttggtcctgctgtcacattgccttgagctaacggatcatgttcccatcataggccggtccttggggcattgggcaggtgggggctttgtgcctctgtggctgctgctgtctgttctctaacaggcagaactgagggattctgaactcaggatgtgcagctctccagactgagaccccaaggctgactccaggtggatccattgtctctttattctcattacgatttatcaaaaaagtgagacaaatgcaggattctcaaatgctgaagcagccccgga

SEQ ID NO: 46020 - DNA, 512 bp, Homo sapiens
atacgactcactatagggcgaattggagctccaccgcggtggcggccgcccgggcaggtactgattggtccattttacagagtgctgattggtgcatttacaatcctttagctagacacagagcgctgactggtgtgtttttacagagtgctgattggtgcatttataatcctttagctagacagaaaagttctccaagtccccactcgacccaggaagtccagctggcttcacctctcacaagcaacgttatgtttctcatcttctaacagagcgttctgtgaaggtctgagatgctcctacatttctagtctcatggaatctcgtcttttttcaatcgtaggtaaaagtgtcagaagcctaaaggtgagccagtggaaaagcctgaagacccctgcaaggttattagctaagcctccataacgcaggcggcaagtgtccaggagtctggcgtctgctcgcctgcaccacgacctccctcctggggagaaggacatgcatggtaagccatt

SEQ ID NO: 46021 - DNA, 473 bp, Homo sapiens
gggcgagattggagctccaccgcggtggcggccgcccgggcaggtctccactctggctgggcgggaaagcaagaacagcactgctgggctggagacggcgggagccgctgctctccggctgagggaatcagagacagctccgtccctagtggagcgcaggggaggcagaagtcatgacaggcgaggtgggttctgaggttcacctagaaatcagtgacccatacgtcatttcacaagaggaagcagatagtccttcatatagtggacagggcagctatgaaacaattggacccttgagtgaaggagattcacatgaagagatatttgtacgtatgaagtgaagaacatgaactgttctacaagacagtgattccgaaacagaggacacaaatgcctgtccagagaaaactacctatgacagtgccgaggaggaaaataaagagaatttatatgctgggaaaaaaaaaaaaaaa

SEQ ID NO: 46022 - DNA, 442 bp, Homo sapiens
ttggagctccaccgcggtggcggccgatgtactcataatacctgtagcggcctgttggcacagagcctagccctcacagatcacctgaacttaaatgagatgccggaggacagcacttctgctcgatagatgccagcttcatagcccgcttagcctcctcatgaggcatcttatgctgtgaagtagcctatctatggaagagacttttgtttgtgtttaattagggctatgagagatttcaggtgagaagttaaacctgagacagagagcaagtaagctgtcccttttaactgtttttctttggtctttagtcacccagttgcacactggcattttcttgctgcaagcttttttaaatttctgaactcaaggcagtggcagaagatgtcagtcacctctgataactggaaaaatgggtctcttgggccctggcactggttct

SEQ ID NO: 46023 - DNA, 460 bp, Homo sapiens
ttggagctccaccgcggtggcggccgaggtacaagcttcatgctttatgatggtgctgtcctttggagtttgcttatgctgccttccaaaagggacctggtgggttctgttctccctggcaacacatctggctgttccagccaccagcgagagcccaagactggtaactgtccacaggcaacagggagtcatgtcgcggttctccaggagcacccagagtctgcaccacagacacgtccaggtaactggccataggctggtaggttcccggatatcccggatagaaggcaaactcagtggggcggctggggtacctcggccgctctagaactagtgtatccccacgggctgcaagaatacgatatcaagcttatcgataccgtcgacctcgagggggggcccggtacccagcttttgttccctttagtgagggttaattgcgcgcttggcgtaatcatgg

SEQ ID NO: 46024 - DNA, 362 bp, Homo sapiens
tccaccgcggtggcggccgaggtcgcccagctcgcccagcgtccgccgcgcctcggccaaggcttcaacggaccacaccaaaatgccatctcaaatggaacacgccatggaaaccatgatgtttacatttcacaaattcgctggggataaaggctacttaacaaaggaggacctgagagtacatatccataagaatggctaaaattaaaaaggctgaaaatagcacatgttggtgaggatataaagcacttggaagtcttatacttgtaggaatgaaaaatggtattgctcctttgaaaatctaacagtttcttaaaggttaaacataacacaaatcagatagacagtcattccattcctaa

SEQ ID NO: 46025 - DNA, 428 bp, Homo sapiens
  misc_feature 360, 361, 362: n = A,T,C or G
ctaaagggaacaaaagctgggtaccgggccccccctcgagagtacttctagaattaattaaggcgggtatcagaaatacacgtggataaagaataatcactcatcatcttaccataacagtatgagagtctttctttttaccccttgcaggcttataaaagcattaagacatgagagaaaaaaaattgaggaataagaaaagtacaagtgataggacttagaaaagaaaaacaggccgggtgcggtggctcacgcctgtaatcccagcactttgggaggccaaggtgggtggatcacgaggtcaggagatcgagaccatcctggctaacatggtgaaaccccgtctctactaaaaatccnnnaaaaaaaaaaaaaaaaaaaaaagggggggcccccccgggggggggccccaattcccccttaagggg

SEQ ID NO: 46026 - DNA, 529 bp, Homo sapiens
  misc_feature 436, 437, 438, 439, 440, 441, 442: n = A,T,C or G
tgattacggcttccgcgcaatgtaactcctcactaaagggaacaaaagctgggtaccgggccccccctcgagagtacttctagaattaattaaggcgggggccaaaacaggaaaagaacaaccttgcagaagatggtgttgttgcagaaagcagagaaaacgtgtttttagaagaaagttacagttttccttgcagagagaagttatttcatatccaaaataataataacatttatgaaagaggagcaattagagaacaagaaagagctattgagtattacaaattaaatactggaatttaaaaaatgttgaagttgtatctctgaaaagtagagtaaaaaagatggagttaaaaagcaggagagaaaagaaatatgaaaaattaaaatgtgatctaaaaaattcaacattgctattatagtagatgcagaaaccnnnnnnnaaaaaaaaaaaaaaaaaaaaagggggccccccccggggggggcccccaattcccctttttgggggggtttttacccccccttttggg

SEQ ID NO: 46027 - DNA, 503 bp, Homo sapiens
ccctactaaagggaacaaaagctgggtaccgggccccccctcgagagtacttctagaattaattaaggcgggatgtcattgacattcgcagaatactcaacagagaatacacattctctttaagtccccatgaaatatatatcaagataagctgtatcttgggccataaaggaagtcttagcaaatttaaagaattcaaatcatacagagtatgttctccaatcacaatggaatcaaattagatattaataacaaagataacagaaaaacctccaaatatgaaacctgaacaacatacttctaatactcatgagtcaaaaaggaagtttcaagggaaatttaaaaatacatggaactgaatgaagaaaaaatacaccatataagaactcaagggacatagctaaagcagtattaagaggaaaatttatagcactaaaaatgcatattttagaaaagaggacaagtctcaaaaaccctaagctctcatctcacaaatgtagaaa

SEQ ID NO: 46028 - DNA, 492 bp, Homo sapiens
  misc_feature 439: n = A,T,C or G
ttaaccctcactaaagggaacaaaagctgggtaccgggccccccctcgagagtacttctagaattaattaaggcgggctactcgagtggctgaggcataagaatcacttgaacccaggaggccgaggttgcagtgagctgagatcccatcactgcactccagcctgggtgacagagtgagactccatctcaaaaaaaaaagataataaaaataataattttttttataaaatactaactgtattttgaaattagaagaaaaagcaaaaaatgaacagtaccagactattttatgattaagagtcaataaatggtagaaacaagaacaaatattagaaactttcatggaagacagcatttgcatcctaaggatgtacacaggatttggactactgccgggcagatgttacaggttgggaagcagaatgcacatggcttanagatgagaattatatgagagtgttgataggacaagaggaaaactcccttgctg

SEQ ID NO: 46029 - DNA, 499 bp, Homo sapiens
cgcatactaaagggctcaaaagctgggtaccgggccccccctcgagagtacttctagaattaattaaggcgggcggatcacgaggtcaggagatcgagaccatactggctaacacggtgaaaccctgtctctactaaaaaatacaaaaaattagccgggcgtggcagtgggtgcctgtagtcccagctactcgggaggctgaggcaggagaatggtatgaacccaggaggcggaggttgcagtgagctgaggtcgcgccactgcactccagcctgggagacagagcgagacgccgtctcaaaaaaaaaaaaaaaagacgtaatgccactgggaaaggactgtaaagaagacaattaaaaatcaacaagtgcccagctgtttataatagcctacaaagtgattcaaagacaatttgttaccttacctctctaccattacaaagtgaccaaaattaaatgcaaccatccttttaacagggtctttcacagagcgtaagttt

SEQ ID NO: 46030 - DNA, 467 bp, Homo sapiens
accctcactaaagggaacaaaagctgggtaccgggccccccctcgagagtacttctagaattaattaaggcgggagcggtaaataggctggggagtcgtaagggatagcttggtatgatggagggacaagaatctggggacacctggacgagactttggtacacccctggatgccgtgtgcgacgtcacctgctggatggataaaacatgggactcgtgtcataatggcctggacactacgtgctggatattcaccacatcctgtacctgcccaagagtaaacacgtaaaaatcgcataaatgtttttacattcccaaaaaatcgggggaccggtcgcactggctcacgcctgttatcccagcactttgggaggccgaggtgggtggatcactcacttgaagtcaggagttcgagaccagccgggccaacatggtgaaagcccgtctctactaaaaaaaaaaaaaaa

SEQ ID NO: 46031 - DNA, 522 bp, Homo sapiens
  misc_feature 343: n = A,T,C or G
agggaacaaaagctgggtaccgggccccccctcgagagtacttctagaattaattaaggcggggggagccgacagagaacttctgggccagagtacctggtcacttcgccagacctgtctgaatgccaggacttatcctgtcaataatgcctgagcagagaaaagagctctggccttagatgactgggctgggggaatgtagagaatgggatcaagcatcaaagtgctcttgggagactaaggggctgtcctctgataccacccccaacccttgtccctgtgaagctgaatgggaacaaagaaaagatcctcaaatcagtcaggagatctgggcaaggcaganaataacttctaagatctttggttctaacattctacgttacaattacattctactctacatttacaatttgcatgatatagaactgctgagtctactacattgaaagtagtgcctggtaacccccactgctggaaaattaggaccaaaaaacagagcagagggagccaagtaaaagacca

SEQ ID NO: 46032 - DNA, 531 bp, Homo sapiens
ctaaagggaacaaaagctgggtaccgggccccccctcgagagtacttctagaattaattaaggctggtctcgaactcctggtctcaagagatccacccgccttgaactcccaaagtgcttggattacaggcgtgagccaccgtgcttggccttgaatgattatccttatcactaaattttgcacacttcttagttatttctttgaaatacattccaatgaatagaaattcctaatcaaaaggtacgcactttttgaagacatttggttcatatttccaaattgccatccatatattttctcctaattaacactcccaccaatggtgtatctgagagtagaattccacattccgtctctaacaatgcatattataatcctctctttagtctttgccaatttggtagattaaaaatggtacttgttctgaattgcatttctttccatttactcaggtttttttttttttttttcttccggggagaccttttttttggtgggcttaaaatttttagagggtttttgaaaatttt

SEQ ID NO: 46033 - DNA, 461 bp, Homo sapiens
aaagctgggtaccgggccccccctcgagagtacttctagaattaattaaagcgggaggaagttagcactgagaggagagagtttattgagataaaaagataaagacaatcctggtacttcttctcttatgaaattcagatcctttccccacttttaaatgggatgattggtttctctgctgttgagttgtttgagctccttgtatatatactgggtatcagcccctttttgaatgaggagtttgcacatatcttcttccatttaacgggttgtctcttcgctctgttgattgtttcctttgctgggcagtagctgttgagtgtgatatagtcccatttgctcaacatcactaatcaggaaagtgcaaatcaaaaccacagtgagatagcatctcaccccagttagcatggctattatcaaaaagacaaaaaataacgaatgctcacaaggatgtggataga

SEQ ID NO: 46034 - DNA, 419 bp, Homo sapiens
tactaaagggaacaaaagctgggtaccgggccccccctcgagagtacttctagaattaattaaggcgggagaaaggataaattgaaacaaaaattccaagtgataattctaaatacttatttccttttccgcacaccccctctttcccttccaaaagctttcctcaggtgtggaatagactaaaggatagatggggccgggcgcggtggctcatgcctgtaattccagcactttgggaggccgaggtgggcagattacgaggtcaagagatcgagaccatcctggccaacatggtgaaaccccatctctactaaaaatacaaaaattagctgggcatggtggcgtgcgcctgtagtcccagctactcaggaagctgaggtgggagaattgcttgaacccgggaggtagaggttgcaatg

SEQ ID NO: 46035 - DNA, 503 bp, Homo sapiens
  misc_feature 362: n = A,T,C or G
gcgcgcaattaaccctcactaaagggaacaaaagctgggtaccgggccccccctcgagagtacttctagaattaattaaggcgggtggatgacttaaggccaggagtttgaggctagcctggccaacagtgaaaccccatctctattaaaaatacaaaaactagccaggtgtggtggcagacttctatctggcaaatttctattaatttctcaaggccaggttcaaacatcacttcctctgagggagctttcctctctctcaatctatctgctgaacttgtctttcaaactaaattgtgggcagctgtcccactccaatcagttctagcactggcttaaatctctgctttcaccaaaagctntaaaaaataaaaataggccgggcgcggtggcttggcctgtaaccccagcactttgggaggccgaggcgggcagatcagctgaagtcaggagtttgagaccagcctaaccaacatggagaaacccgtctctattaaaaatac

SEQ ID NO: 46036 - DNA, 462 bp, Homo sapiens
agggaacaaaagctgggtaccgggccccccctcgagagtacttctagaattaattaaggcgggggaaagggttaaagaaagttatcgtgcaaaaaatgaaaggaattaaaaataaaagattagaatgtgatgctaaaaaaaaagacatcaactgaaaataaacggatgcaaaaaaaagttttctatcaataaaaacaagaaagaacaggaatagctatagttgtaacagccaaaatagattttaatatgaaaaaaaaaaaaaaaaaaaaaaaaaaaaaagcggccgccaccgcggtggagctccaattcgccctatagtgagtcgtattacgcgcgctcactggccgtcgttttacaacgtcgtgactgggaaaaccctggcgttacccaacttaatcgccttgcagcacatccccctttcgccagctggcgtaatagcgaagaggcccgcaccgatcgccc

SEQ ID NO: 46037 - DNA, 482 bp, Homo sapiens
tgattacgcctagcgcgcaatgtaaccctcactaaagggaacaaaagctgggtaccgggccccccctcgagagtacttctagaattaattaaggcgggagtgggcatagagtccgagtccacaccattagctaccatatacacattgcctcatccaagggccaaatggagcagggtgcctccacactgaaagattagcaccactggtagggcgcggtggctcacacctgtaatctcattactttgggaggccaaggcaggtggatcacgaagtcaggagatcaagaccatcctggccaacatggtgaaacctcatctctactaaaaatacaaaaattagctgggcgtggtggcatgcgcctgtagtcccagctactcaggagactgaagcaggagaatcgcttgaacccgaggcggaggttgcagtgagctgagattctgctcactgtactccagcctgggcgacagagcaagactctgtct

SEQ ID NO: 46038 - DNA, 474 bp, Homo sapiens
agggaacaaaagctgggtaccgggccccccctcgagagtacttctagaattaattaaggcgggcgcggagtgaaacacgtggatagggagcactcagtgatgttttcgcgaggcaatcacatgcttcatggttagttaccagacagaacgctgtgaatacctcatgtttttactcagagggcaacaaattaactgggcatggtggtgcaggcctgtcatgccagctactcgtgaggctgggacaggagaatcgcttgaacccaggaggcggaggttgcagtgagccgagatcgtgccattgcactctagcctgggcaacaggagcaaaactcagtctcatgaaaatgaaaaattacacaaaaaaaaaccttttaaaggggcccccccccggggggaaacaaatttccccattttggggggggaaaacccccccccctggggcgtgttttaaaaaaaaattttttaaaaaaaaaa

SEQ ID NO: 46039 - DNA, 621 bp, Homo sapiens
taactaaagggaacaaaagctgggtaccgggccccccctcgagagtacttctagaattaattaaggcgggaggatcacttgagcccaggagtttgaaaccagcatgggcaacagagtgagatctgtctttacaaacaagtcaaaacatttttaaaaagaaagatgtaattctttgctcaaacccaagccactataattttaaaaaacattccaaatggaaaacattcattgatttattaaaaataaagactaggctttccccccacccccaatatgatatattctgttcatttcattaaggaatgatggccatgcttgtgctctccctttagtctaaatcagaatcaagcaactgtctctttaaaaaccccatgatattcttctgagtttagccctattttgaaacggtcccttgacaacctttatttattactgtacttggactttaggagacagattaggaaggagacttggtagcaaagaaaaattagttaataactttggagcaaattctagtcacgaaatcccagtgactagcctaatataattttactttgtcaaatatattgttcatagaattatgctttttctagaaagctattttaactaacatttctgcac

SEQ ID NO: 46040 - DNA, 455 bp, Homo sapiens
ctaaagggaacaaaagctgggtaccgggccccccctcgagagtacttctagaattaattaaggcggggggaaaaggaattagagaaggtagtctagagacagtgagaagacttacctgaaaaacaaggcttgcttcctgtaaatcattatttaccaggagactgcgcaggaagagaggaaacaacatgagcaaaggcatggcttcagttctcatttgtgtgtaaattaacaccacatggaaatgattgctgatgatgatgttcattctatcactttgtgacttagtgttctctttataaaatcctttacaacatcattgctggcattgctgttcgtctttcatatttccttagcccaaataagaactgataacagtatattgcaagtcctaccacatttttaaggatacatagccatcacatttcaaggaatctatcttatagaaatagcagcat

SEQ ID NO: 46041 - DNA, 428 bp, Homo sapiens
aaagggaacaaaagctgggtaccgggccccccctcgagagtacttctagaattaattaaggcggggctaacccttagcgttattgtgagaatacatgagctaatgcatgtaaaatgactatctgcttaaaaatagaaaaaatcatataatggtggttattaatgaaatgttagctattttccctgctatagctcatgtattacctaatggttttacataaaacatattaccataagattagaaaaaacttttttaaaatttttgtacagtttgtaatgtgcaattattaaaaatgttttcagcagtgcaaatgaactccttagggaacactactgtgtattacaaacatattaaaaataaaatgatctgtttcactttctagagctaattttcctggatactatagtgaggtaatgattaatgttttt

SEQ ID NO: 46042 - DNA, 490 bp, Homo sapiens
cgcgcaattaaccctcactaaagggaacaaaagctgggtaccgggccccccctcgagagtacttctagaattaattaaggcgggagtaaacacttgagctcaggagtttaagaccagcctgggcaacttagcgagaccccgtttctacaaaaaaaatttaaaattagctaggcatggtggcacacacctgtggtcccagctacccaggaggctgaggcaggaggatcgcttaagcccagaaggtggagactgcagtgagccataatcacactattgcacttcagcctgggtgacagtgagaccctgtctcaagaaaaataaaaacacagaaagaccttttgatgtgcgtattcactgctaaaggttcaatattaaagttttgcaaatcctttaatcttcagcaatccctttctctgcattttcaaaacactggcatctgttacaagtattaaaagcacaaagcgcacggtcagaattgggattcaaaccc

SEQ ID NO: 46043 - DNA, 501 bp, Homo sapiens
ggacaaaagctgggtaccgggccccccctcgagagtacttctagaattaattaagagcggggtaagttttaaatctaagtttgacttcaaagcctcgttcttaactgtaagccaatactgtctcattttcatgctgttccatgcaatcaaccctcccactgtggcctactaaagtgctggaattacagcttgaaccaccatgcccatcctcggtctttaactggatattgttgatgctgactatagagtagcatgcacggtggaaagttaattggagtggtgatctcaaaaaaggatatttaaattttcctgttgtaaagatctcatgaatacaattcctgcatccatttgagagtatagcttcagcctgtctgtgcacatgaaaatagagaaggttgtcataaatcccagaactgaggatctctgtgctcagcccactctgcaaaggtggatattatcctctcaaatcaatctgtgacttgctcaacggtgaattaccaa

SEQ ID NO: 46044 - DNA, 467 bp, Homo sapiens
accctcactaaagggaacaaaagctgggtaccgggccccccctcgagagtacttctagaattaattaagggcggggactaagaggtcaagatccggttgattggaacaattcaatttgctgacattaaacattccaccttaatatggaatttaccattggggaaatcatcatgatttagagaaaataccgtttttatattaaaagcaaaaacccaaaacagacatttaaaagcattacaaatgtattggtaaaaatcggtttgtatttattgatagtaaaatacatcagatttgccttaagtaaaccattcattttcttttcaaatatatgaattaatctgggagtggactaacatcttcacactattcagtctttaaacccatgaacatgttaaaccactggtttttagatctctttttgtgtctttcagcaaagttttaagtcttgccataggttttattaaatt

SEQ ID NO: 46045 - DNA, 704 bp, Homo sapiens
taaagggaacaaaagctgggtaccgggccccccctcgagagtacttctagaattaattaaggcgggagttctgaacattatttaaactcgatgttaacatgctgtagataataacatatccacagaacagaagctaggtcttccattggccataacatatgcctctaaatgccctcccccctaccaaagtagcatccagaggtatgtgctattacttgagagatcattctgcaatttaaaatttaaactcgacaaattattaataccataaacatttcagtgtcaaacactgaagatgcaatgataacacccggctatcctgctcaggtagctcacaatctgaagggtagatggtggtgggagcagagcagttaacagataaaatgaaaagtagtaagtggagctcttatttgttgctggtgggaatgcaaaatggtacagccacttcagaagacagtttggaagtttctggcaaaactaagtatactcttaccataagatccagcaagcatgctccttggtatttatccaaaggagccgaaaacttacatccacacaaaaacttccactcagacatttccagtagctttgttcataactgccaaaacatgaaagcaaccaggatgtctttcaataggtgaatggataaacaaactgtggtacatacatgcagtggaatattattcagcactaaaagcaaatga

SEQ ID NO: 46046 - DNA, 386 bp, Homo sapiens
tactaaagggaacaaaagctgggtaccgggccccccctcgagagtacttctagaattaattaaggcgggaactgaaaaaagaaatgaaggtatgcttacatgggaagtattttaacacaacaggtaatttttgagtgctcattatgtccaaacactgatgagcacttagatcaaagatattattcttgtcaacaagaaacttacttagggtctagctgttgaaaagataacaggaaatttagagtctagctgttgaaaaaggaaaataagataattcatgaataattaatgagggaaaaaaaaaaaaaaaaaaaaaaaaaaaaaggggggcccccccggggggggcccccaattcccccttatggggggttttttacccccccccc

SEQ ID NO: 46047 - DNA, 480 bp, Homo sapiens
accctcactaaagggaacaaaagctgggtaccgggccccccctcgagagtacttctagaattaattaaggcggggggcaggggcagagagtagtataaggaaaaagaaattagtgattcctaattgtcttaatggatggctatcataaagctactattattaatgcaacaaattattttaaaacttaaaacacttatttcaaagtcaatgatgggacaaacaggtgtaaaattacctagagcaaaaattcatccttctcatcatgtaattaacattcttggtgcttatgatgatttcaatcttcgtctactgtctttaaatgtggaaatatttatgcaagaaagccctgagaggctgggtgcggtggctcacacctgtaatcctatcacttatggaggccaaggccagcacatcccctgaggtcaggagttcgagaccagcctggccaacatggggaaaccccatctctactaaaaatac

SEQ ID NO: 46048 - DNA, 467 bp, Homo sapiens
aagctgggtaccgggccccccctcgagagtacttctagaattaattaaggcgggggaagtctatacaagaatattaaggccctgtgcgtgagcatgtctatagttaaagacttaatgagaaagcatcaaattgtggtgcaaacagctgaaagtagaagtaaatcagaacgtaataagatgcaactttggaggagctcaaagcaacagatacgtttttatccaaaaaggagtaaaacaaaaaaatcgtcaacggcagttccttcagataatcaacagatgattcatttgaaaaccataattaactaggttgtttgtaaaataacttttttcaatttatactttttaatgtttattaaattacttttctctatagatatgcagataagatgttttaaatgtgtaagtggtataaatgtcccatgtgtcttttattctagagcataagaaaagatgggaagctacctcaa

SEQ ID NO: 46049 - DNA, 460 bp, Homo sapiens
ctaaagggaacaaaagctgggtaccgggccccccctcgagagtacttctagaattaattaaggggggagaagaaaaaaatcataaagattaaatactgaagcatcactgatactaaaatatgtttcccaccatacaaatgatgttgctttaaatgtcacctaaaactatgcataccatggaatattctgcttataaaaatttcctcctttccatgaagcgtatgctctatctcaacttgttaactacatttcttgttgaggtttagtgaaaaatatttttaactgacaaaatttattaggattccagaaagcagaccaccaaaggtaaaatctcatctggaaacagtctaaaagaaaaaccatttattcaagaaataaaaacaaaaacaaaacagaaaggggagccaagcacactaaagcattaatttcataaagtcaaaaatattcatctactatcaac

SEQ ID NO: 46050 - DNA, 452 bp, Homo sapiens
aaagggaacaaaagctgggtaccgggccccccctcgagagtacttctagaattaattaaggcgggagattctacatataagccatgtttagatgataaaaatattgataattgtaaacaagtgtatattaataaatttaaaatattcttaggatttcccaaaatagagttagcatattgtacttttccaacagcctatgaatcctgactttaaaatttgctaatcatatggtaaaataatttaatcctctttttctcttactcatcaaagcacataaataaatagcattttattcacaaaacacattacaaattataacatattgaactaacgctaaatgaagcagttatttagtgaccgacatcatgacacttcattggtcaggaaacaaggagcataaatatcagccatgttaaattgtaatttgaaaaagttctcagtccaaattagca

SEQ ID NO: 46051 - DNA, 391 bp, Homo sapiens
aaagggaacaaaagctgggtaccgggccccccctcgagagtacttctagaattaattaaggcgagatcctgccattgtactccagcctgggtgacagagtgagactctgtctcaaaaacaaacaaaaacaaaagataaactgttctacacatacaacacacaaacttagaatgatgaatttccagtaggattttgaagttagaggagaaaattaaagaaatagtctttagaactgccagcccttatgtttctccaattgatggcattgagtaatagagcaagatcccagcattagtcattgtgtgtctgtaacatatgtacaacagttaatatattggatatttaactgtagctcacaagagggaagatttataatatgaataaatatttt

SEQ ID NO: 46052 - DNA, 444 bp, Homo sapiens
  misc_feature 402, 421: n = A,T,C or G
aaagggaacaaaagctgggtaccgggccccccctcgagagtacttctagaattaattaagggggaaacttaaaaatatctatatatttgtaatacaaaatacagaaaataaactcttttggtaggtaataatagaaagtacagtaatttttaaaccagtgcactcctaaattatcagtggatcaaagaaagaaattacaagataaatttaatacttaagattaatgaaaacaaaaacttaacataccaaaactcatgaaatgcagctaaagctgtgcttggaggaaaatttatagcttataaacatctatattaaaaaaaatatatatcgaatcagtaatttaaccttctaccttaagaaattagaaaaagaagagtcaactcaacccaaagcaagtaaaanaaaaaaaaaaaaaaaaaanaaaaaaggggccccccccggggg

SEQ ID NO: 46053 - DNA, 488 bp, Homo sapiens
cgcaattaatccctcactaaagggaacaaaagctgggtaccgggccccccctcgagagtacttctagaattaattaaggtgggaaaaggaactgtaggttaattagtttaggaaataaatggattaaataaacttaaaagagattctttactggagggcttctaagaaagcctttaatattcttatgatcctgatttaatatcctggtatatctgtgcatcttgaagacagagacaggataagcagtattcccccaactgttgtgtcgagggagccctttttacagtgagcatttcatggaaccactgtggtttcaaaaaaaccacctcctcaaaacgcactttgggagatgattctattcagaaatatctgggagtccatgatacagctggagatggaattcgcctttcattctgtcagtggtgagtgaggacctgacctgcatgcgtcaggccctgggcaagggctttgctttacagcagtgagga

SEQ ID NO: 46054 - DNA, 380 bp, Homo sapiens
cgcgcaacgcaaccctcactaaagggaacaaaagctgggtaccgggccccccctcgagagtacttctagaattaattaaggcgggctgaccaaggccacttataaacccgacttaaacaaatggctccttaaaaataagagataagaaaataaattcaggctgggcgtgatccacctgcctgggcctgcccaagcgctacgattacaagcgtgagccaccgcgcctggacaatgctgctgattttgatcatcctacctatctttatctttgaatccagatcattctctgctaacttttgccctaaaaacacctttaaaaatttaccttgagcaaccaaagccatgtactggtgatgtttgtggggaacatcactggatct

SEQ ID NO: 46055 - DNA, 474 bp, Homo sapiens
caaaagctgggtaccgggccccccctcgagagtacttctagaattaattaaggcggggcttcccgggatcagccgggaacaaccgactcccgggcgaaggaaacttttatctgggaggagagaagaagaaatgagatcaggcggtttagagcaggaggatttcaggtctttgggctccctcctgacgttgatccttgggctgtggggcttttccttacctctgttacaagacagagctgcctaccttcccagatcagcatgccaattatcttaataatgtttcctcccaaaggcaattagaagagactccctttcaaaaatctgatggctgttgaaagttaatgaacactttaccaggagatcttacttcctggttcctttgctgctcccctaagccgtttcctctggtgggtgacggccagagatatcggtttgtgggttgatgaaactccctcccccgcctttgtacacctt

SEQ ID NO: 46056 - DNA, 413 bp, Homo sapiens
ctaaagggaacaaaagctgggtaccgggccccccctcgagagtacttctagaattaattaaggcgggagagaagagagggatggtcacagagcaatggaagaatagagcctattagcagacctattcatatatgaaaagttaaggtatgacaagaggcgctcttacaaattaatgaggagaaaatgacccattcaggaaattgtactgggacaattggtaatccaaatggcaaaaagaaaataagatcctgccttatgccatacacaaaaatcagtttcaggtgcattaatgacctaaacgcataaagaaaaactacttataaaaaaaaaaaaaaaaaaaaaaaaaagggggccccccccggggggggccccaaatcccccttttaggggggaatataacccccccccatggg

SEQ ID NO: 46057 - DNA, 630 bp, Homo sapiens
agcgcgcaattaaccctcactaaagggaacaaaagctgggtaccgggccccccctcgagagtacttctagaattaattaaggcgggtggtggggatacattacagaaaagttatattcaaaactttttaaaaaatgataaaaaaaaaatgctaggaaaaaaagccactgaaccaaatgtagaaagagaaagttgaaccaatggctacactataaatttaacctaacacttttatgtgttctcacttatagatctttagaattcttacttacaaaggagaataaagagaatcttggtttttgtactgtttgcagtgcagaggtgccaccaatcataactgacaaatagttccattttaaggccttaaacattgctaaatacctctgcaagaacttgttctgttgccctttcgaaggataaacaccagtaaagaccaatttgagttggaaagaggactttctgttagagagtaaagaacatttcatttctatgatacagcaactcctcagaagtgattgtatctgttgaaaacaattagcaccaagaagcaaacaacaaaagccaccaaagaactgaaacagcactagtgtcaggggcagaaaacacacatcctttatacatattcccatgg

SEQ ID NO: 46058 - DNA, 400 bp, Homo sapiens
taaagtagcgttctagcaagtctcttgtgtttcttacgtctgaagaataaagcacctttgaaatacaggaggatttagaattattactccactaacctaatctgctttaaaaagttaagcgactaccaagtgtttataaacaatcacgctttggggttacaaaattccccaacaaactttttttttggccttgctctaagtgggtttatttccagcattgtattctccatactttctcagagaaaggctagcaacctcacctttatgcaaactgaacttgccaactatgttttctgatatagcttcacacataaacaccatttaagactgatctgaaattcaaatcttaaaaggaacatttgctttcacaaagctagccttaaaaaaaaaaaaaccaaaa

SEQ ID NO: 46059 - DNA, 458 bp, Homo sapiens
  misc_feature 324: n = A,T,C or G
gctgggtaccgggccccccctcgagagtacttctagaattaattaaggcgggagatagaaattaaacaagtgtcctataaacaagataatctcagatactaaaaagtactatgaaaaagaaaacaaactaaggtgatgagatgaagagtgactgagtggtgcttgggggctacttcagatagacatcagaaaaggcttttctgaggatgtaacatttgcgctaaaatctaaatgacatgattgaaccaacgataggaacatctgggctgggggtggtggctcatgcctgtaatcccagcaatttgagaggctgaggcaaggtangaggattgcttgagctgaggaggttgaggcactggtgagccatgattgcaccactgcactccagcctgggcaacacagcgagactctgtctaaaacaaacaaacaaacaagaaaactggtagcagtagaattaa

SEQ ID NO: 46060 - DNA, 492 bp, Homo sapiens
aaagggaacaaaagctgggtaccgggccccccctcgagagtacttctagaattaattaaggggggcggaggtgacaggaagccgagatcacaccactgcactacagcctgggcgacagagccagactccatctcaaaaaaaaagaagagaaattgaataaaaataggccgggcatggaggctcacacctgtaatactatcaccttgggaggccgaagtggtaaacattcaaatcattctacatggccttttcttcataaactgccctctaatctggcatttcaacatggatgggttctctcttctaggcaatattataggttccaacctaaaatgatttttccaaaggagtctacccctcatagttcactttttctgtttcattttactcataaaataaatgattgctaaatttcacttctaaatatatttgatatgggagatcccaaaacacagtttgtttctttactagttagtagttgatgattctggt

SEQ ID NO: 46061 - DNA, 305 bp, Homo sapiens
cctcactaatgggaacaaaagctgggtaccgggccccccctcgagagtacttctagaattaattaaggcgggctgggagagaagggaactacatgcacaaaaaatattttttattgtgtgctagagccgttcatcaccaccccacgcataatttcatctgcttacgttgaacaaatacaacaagtttatcctcaagtttatatgcagcaacaaaggtctatgaatttgggctcataaaactcaggcgaaataaagaggaaacagccacacatgaaaattaaaatataaattacataaaaatatat

SEQ ID NO: 46062 - DNA, 403 bp, Homo sapiens
  misc_feature 381, 385: n = A,T,C or G
agggaacaaaagctgggtaccgggccccccctcgagagtacttctagaattaattaaggcgggcattaaacttagctgtgctagaaatagttgtcaatagtatgggtagacatttctgaagtctgctctttgaatgttgtgtaagaattaaataataaagtttaaaaagagatagtgtcatttttaccctattaatgttgtctgtctagataacatttgattgaatgttttgttgtgcagtaaatcctgaactttattactttaattctgttttgtatttggatttctgtggagattgtactactaacattctttcaccaggtcagtgattctaaactcttaaattgggacactttaactgaactgatggacataactccntctnaaaaacaacaccaacaaa

SEQ ID NO: 46063 - DNA, 578 bp, Homo sapiens
accctcactaaagggaacaaaagctgggtaccgggccccccctcgagagtacttctagaattaattaaggcggggttctcataaaatcttatattaggccctgtgtagcctggcagtatctgcagaaagataagaatatgttttaatatgacatttgtgatatttaaatgttatatacacaatatacaactttctttgaaaagttttattgcccaattttttcctttacagtttttccttacagtcgattttagatttgtagcttttcagaataattttactttcttatcatagcctatcattgcctctaacattaaaaaaagtgttcttatgagattaacctttttcatgcctcatgttataattttattatttacagttctgagattgcagtgcatgcatttatcttgaaagtagggcaggtgagctgaacagcttttgaaacttgaagagaatcgcttgaacccgggaggcagaggttgcagttagccaaggttgcagtgagccaagattgtaccattgcactccagcctgggtgacaagagtgaaactccatctcaaaaaataaaaatgaaaaa

SEQ ID NO: 46064 - DNA, 441 bp, Homo sapiens
ctaaagggaacaaaagctgggtaccgggccccccctcgagagtacttctagaattaattaaggcgggaccattattagaattcagctatctttattcccaacctagtgtgttttccataataatgtaccttttaactatgtcaaagatagcaaatacagttcatctgtgtcaactttaatcagttgatagtggctgtctagcacattgtgaatggggtcaatcagaaagaatgtcattagatcaattagctattactttatattacctaaacttagtataatttaaaatttgataatgagtttattcagtttataaagagttctgtttttggcatggcctagtagctccattgcacaattccttctgcagaaaactactataacctatgaacaaaataggaaaaataactacccgaaagcactggagagcaaacaaaagca

SEQ ID NO: 46065 - DNA, 328 bp, Homo sapiens
ggaacaaaagctgggtaccgggccccccctcgagagtacttctagaattaattaaggcgggggatacatgaagttgggatcatggtggagtcaatatctaatactttatataatctatgtttttgcttttataaaacttttcaaaaacagtgataagcaggtctttcttatattttagtataaaaagattttcttacctctgatgaggaaggtcgacttggattgagtgacatattcactaatgtctgaatgggataattatcaattggaatttcgtttcttttcttatctttcttcatttaagtagtactaaataaaaattataata

SEQ ID NO: 46066 - DNA, 497 bp, Homo sapiens
ctactaaagggaacaaaagctgggtaccgggccccccctcgagagtacttctagaattaattaaggcggggcccaactatacctgtcagacggctcatataaacactgcgctaagagatacagcgggtaaagtctaaaaaagagcatacattacctgcgagaactaatgctcccatttttaacgtaaagcattcatacgtcaatggtatacatgtaactgctgatctggacatattacttctagatgtctccatacaaatgagtcaaaaaagactgtgagaatagctactctgatgagagagttggaaaatatgctcaccatggctcaagaaaccatgtaacataataatgcagccaatctcgacctacaacacaagctgtaagttaaggtaccctcgagaacactactctttcctcttccattccttcaggtgttataaaagcaagcctaagttaaagttctatttcctaagagggaaaagaattgcttttcaatg

SEQ ID NO: 46067 - DNA, 691 bp, Homo sapiens
accctcactaaagggaacaaaagctgggtaccgggccccccctcgagagtacttctagaattaattaaggcggggggtaaataaaccaaagttaaaatcaccattcttctttcaactacaattgccaagatctcatttcaaccctataaaataccaatgtttattacaccacctggattgtcctaataactgatggcttttattctataatctatagttctcataagtcaaatgttgaataaatgatgtactgcatgactactacttattctaggatagccttaatagagtctgtgttcttaactgatcaaagggatagaactattaattgaaataattattttaatttttctttcattctttctgtattctaaaacgacattgattatgtcttttttacagttaaatcaagtagaatttctgattgagtagcaaaatccaaaataattcatgtttaaatacaaattttaggaataatatccctaggaaagtcaatagtgcatcaaagtggaatggcttaactggatgatgttaaatatttgtggtcataattaagcttttagaagccattagtgtgtcttttcaataacaatatagataaacatagatttactaaaaatctttcttctaaaaaaatataatttattattattactgttgacatttaatctttatgtgataatcaatatgt

SEQ ID NO: 46068 - DNA, 479 bp, Homo sapiens
agggaacaaaagctgggtaccgggccccccctcgagagtacttctagaattaattaaggcgggaggatcacttgagattgggagttcaagaccagcctgaccaacatggtgaaaccccatctttactaaaagtagaaaaattagttgggtgtcatggtgcacacctgtaatcccagatactcgggaggctgaggcaggagaatcatttgaatctgggaggcagaggctgcaggaggctgcagtgagcaaaaatcccactactacactctaatgtgggtgacccagcaagattccgtctaaaaaaaaggaaaaaaaacaattagcagtggagagtggggaagtaacttttggttgggtggtcaggataagtctgaggagaaaccatctaagctaacaccagaattgcaagaagtcactggagagaacatgtgcaggaagaaccttctaggcagttgtaactgcaggcacaatggtccttc

SEQ ID NO: 46069 - DNA, 469 bp, Homo sapiens
ctaaagggaacaaaagctgggtaccgggccccccctcgagagtacttctagaattaattaaggcgggactgtaaataacctgagatgagccaatggggcagctgctttctctttccatttatttctccccaggtcagcagacctaacaagagccccatattcgtgtgtttgtacttattttctaggcaaaatataaatgaacaattaaaagagagggtggcagctgggtgcggtggctcacacctgtaatcccagtattttgggaggccgagctgggcagataacttgacagcaggagttcgagaccagcctgggaaacatggcaaatccccgtctctactaaaaatacaaaaaattagccgggcatggtggtgcacacctgtagtcccagctgctgtggagctgaggcaggagaatcacttgaacccaggaggcagaggttgcagtgggccgagatcacgccactgca

SEQ ID NO: 46070 - DNA, 552 bp, Homo sapiens
  misc_feature 543: n = A,T,C or G
accctcactaaagggaacaaaagctgggtaccgggccccccctcgagagtacttctagaattaattaaggcgggtcaatgaacaagtgtccaagccaaagacttagtactcagggtaagtgtccacataggctggtgcagctggttttccctctctactttcctttttcttctcccaatttacagcacaaaccaagctaaaatgctagctcaacttctctcttttcacttcaaaacaacccagctcaccagccgggcatggtggcagtagctcacgcttgtaatcccagcactttggcaggccaaggcgggtggatcacctgaggtcaggaggttgagaccatcctggccaacatggtgaaaccccgtctctactaaaaatacaaaaattagctggatgtggtggcacacacctgtagtcccagctagtcaagaggctgaggccagagaatcgcttgaacctgggaggtggaggttgcattgagccaagatcacgccactgcattccagcctggtgacagagcgagactcagtcccaaaaaanaaaaaaaaa

SEQ ID NO: 46071 - DNA, 423 bp, Homo sapiens
agggaacaaaagctgggtaccgggccccccctcgagagtacttctagaattaattaaggcgggcagtgtactgggactcttggaaacggttgaaagtccagctcaactccactctgtggcggcagctgctgtctgatctccagcgggtaccctggacaccacaagcattccctctacctgattcatatccaaccaaattatcaatgaggctctggtgcctccagctcctcagatttgacaacatgcttggtccattgctgaaagcattctcttcacaccagcgatgagagaagcgaagaatttttaacccaaatgctctgaacctcaataaaaatgatacagggggtgagtagaaaagaacaatataatccttccacttggaataagcatattctgctcatgatcttatctcacaagatcgtg

SEQ ID NO: 46072 - DNA, 473 bp, Homo sapiens
  misc_feature 394, 395, 397, 398: n = A,T,C or G
tgattacgcctagcgcgcacatgtaaccctcactaaagggaacaaaagctgggtaccgggccccccctcgagagtacttctagaattaattaaggcgggtaggtcttggttttttaatttgtaaacatcaatagacttgtttaaatgctattgtgaagagaaagagagagattgaagatactgcataaagaaggaataattgattgagaaggtaagaaaacatgtgacccaggtggaaaacttggctttagaaggaaggaaagatagtacttttgttgtgataggaaaaaaaaaaaaaataaaaaaaaaaaaggggggccccccccgggggggaccccaaatcccccttttggggggttttttacccccccctagggggccgttttttaaaaannanngtttttgcccccccttttaccacagggccttacccttttttgtttttcaaaaaattttttctttaaaaaaggggg

SEQ ID NO: 46073 - DNA, 587 bp, Homo sapiens
acataaagggaacaaaagctgggtaccgggccccccctcgagagtacttctagaattaattaaggcggggtagaaaaataactttgtatactagaaatggtcttcttaggaaaccaacaaaacccaagacatatgttaaaatagttttgatggcatccaaattaaggatttcagttcaacaaaggaacatacacaaagttctctcaacaaagaatatcaaatttaatagataatggaaagactaagagatgatgtttgcaatgtctaaaactgataagggactaatatttaaaatatatttaaagaatacctgctaatcaacaaaagtaaacagaaaaaaaaatcaaaagaaaaaaataggcaaagaagatgttaggcaatttacagaaaaagaaccctaaatagctatttaaatatgaagtagattgaatgctactggtggatatgtaaaaatgtgcagccattctggaaagcatgctttatttgctaggaaattaagtatgtacatgatttgccctttgatgcaacaatattattcccaatatatttgccagaaaaatgcttaaactggcctgaataggaacatg

SEQ ID NO: 46074 - DNA, 525 bp, Homo sapiens
ccctcactaaagggaacaaaagctgggtaccgggccccccctcgagagtacttctagaattaattaaggcggggcgggaatacatgccaagtggtaagtggatttactctgtcaagtacagcagtgtcctactggaaagtactaacactggtctcataaaaagttacttgttgtctcgacaaaggcaatatctgtcaccttgtgcgctggctagattatgtctaaattatatatgttgcgttctaagttgtaaaatgctttttacctgaagctttattgactgaatagacggctatattcatttcgctgtccttaactaactatatccgcctgtcccacacatgtgtgattggagaacatgaacctccggttaagcgaaaatatgtgtatcacattagacactgtgtgtcctttactgtctgatgcatgttttccggtgaatggtaacagttttcatcatagatttcctctgcaactaaactgcaccctttagttaaataaatacttgccatttttgtagaatag

SEQ ID NO: 46075 - DNA, 496 bp, Homo sapiens
agggaacaaaagctgggtaccgggccccccctcgagagtacttctagaattaattaaggcgggaaataagttttaaaataagattaattttaataatagttttaataaccacaacaacaacccctccccccaccaaaccattattaactatcaacttattacttctataactctagcctagtctgcaagtcccaataaaataaaaggatgtgacaagcccgggcaacacagcaagaccttgtctctacaaaattttttttaacaattagccaggcatggtagcatgcacatatagttccagctaggagaatcacttgagcctgcaagtgaatgaggctgcagtgagccatgactgcaccactgtactccaccctgggtaacagagcaggaccctgtctctattaaaaacaaaaaaaaacaacaaaacaaaaacacagggtatttccttgctaaggcaaaagcctaaaaaaatacttgaccttaaaatagtggtata

SEQ ID NO: 46076 - DNA, 383 bp, Homo sapiens
aaagggaacaaaagctgggtaccgggccccccctcgagagtacttctagaattaattaaggcgggaagtggagagagggaagcctgaccccaaggcccatggcactgcccacctgatggtctggatcacgcctcctggcttagctattttctgtcccctttcctagaacatccacaccagggggactgggagtctcatctcagtcactgtcacatcccaatgcccaagaccctggaacaagggagaagctgcaaaaatacttaaatctacaattccctggaacttcaacatgctttggaaaaattggctcctgcatgttaatttaaataaaattccacgggttttctattccacactggcacacgttacccattccctgagta

SEQ ID NO: 46077 - DNA, 490 bp, Homo sapiens
  misc_feature 463: n = A,T,C or G
aaagggaacaaaagctgggtaccgggccccccctcgagagtacttctagaattaattaaggcgggagagcctgggagaattggagtcaagatcttaaagatgcaataatatcccttagtcccaggaactaatagcctatgcctattgtggagttctcctttatatcaaacaatccagctgaggcagtattactgcctgttgacttcaacccaggagtacaataaccatttaggaacttagaaatgtttacatcagagagcttaggatttaaacaaagctttataatgtgcttcctttctcactaataatttccacttttttcattatatgggttttctctaaattcttctatttaaaatgccatggttacaaccaggcttgttattgcaatatgatatgtgggcaagttctggattccagatcctgctagcatctttaagcaggatcttggcataaacagctntatgtcccagaaaaaaaaaaaaaaaaa

SEQ ID NO: 46078 - DNA, 293 bp, Homo sapiens
agcgcgcaattaaccctcactaaagggaacaaaagctgggtaccgggccccccctcgagagtacttctagaattaattaaggcgggaatgtcaactattgaccaggttcttgctgagagagctacagatactggggtgattcagactgatacagtcgctccctacaccagtaaatctcccagtctgatggtgaaggcagatatcaaacgaatcgttaaaaatgtattgaatgttcctaataatgcctgactcagagtcacatgggtagtgatagggactgtgccatcttttct

SEQ ID NO: 46079 - DNA, 560 bp, Homo sapiens
aaccctcactaaagggaacaaaagctgggtaccgggccccccctcgagagtacttctagaattaattaaggcgggaggattacccgaggtcaagagttcaagaccaacctgaccaacatggcgaaatcccatctctactaaaaatacaaaaattagccacgcacggaggcaagcacctgttatcccatctactcaggaggctgacgcaggagaatcacttgaacctgggagacagaggctgcaatgagctgagatcgtgccactgcaccctatcctgggcaacacagggggactctgtctcagaaataaatcaataaataatatgcctttttaaaaaatgggccatctataccagctaagaagaatgtaagactcagactatcttcattactgatttatttctttggtctggaagcctgtcaatttttgccagttgaatattcagcaataaatagtcatcaagcataatgtttgaataaaaatgttattcttcaaaccaaaataaattcaagatgatttgagatccaaatgcaaataaatgtaactataaaagctacaaa

SEQ ID NO: 46080 - DNA, 564 bp, Homo sapiens
taaccctcacttttgggaacaaaacctgggtaccgggcccttcctcgagagtacttctagaatttattaagacggggtttcactatatgttggccaggctggtctcgaactcctgacctcaagtgatctgcccacctcggcctcccaaagtgctgggattacagccatgagccactgcgcctggccgaaagaaatatttattgattgcctactaggcaccatcattagcagctgagaatcctgtggtaaaagaataaaaagcagacaagaatctatgcccttgcaaaggttacagtctgctaagacaaacaataagctaattaagtaaaatagtatgttagagagtagtatgagagaaaaaaaccaggaaaaggacaataaaagatattatggtacgatgtcaatatttttagataagatactcaataaaggctaagaaaatgactctcaccactcctacccacatatctatatactgtaaaccagtaccctgcatttcaatatataagattttttttagttacataaataaaacaccacaaactttatgtatgtcaattcctg

SEQ ID NO: 46081 - DNA, 508 bp, Homo sapiens
agcgcgcaattaaccctcactaaagggaacaaaagctgggtaccgggccccccctcgagagtacttctagaattaattaaggcgggaggtttattactgaatcatgagatctgttttaatatactgaggggcttatatttccagagtgattagatataaattactggtaggtaaaaacagtaagtattaacttcaaggagaaaaaaaaagcctgcccagaattgaaaataaatcacagcatattccatggcttatctaaagctttaataatacttacacagccctaattaaaggtaataatggaccaatcaaaagttatataactacagttaaaagatgtaagggatcattatttcatgttgaaatggttaaaagtggtaagaattccagcttttcaagaaaggatttcttaaaaatttttaacctttgcttcttaattttaaggaccagtaattgatcccaaggatctgaagaaacatccaaattaaacacttaacttagggggaaa

SEQ ID NO: 46082 - DNA, 412 bp, Homo sapiens
  misc_feature 319, 320, 321: n = A,T,C or G
ctaaagggaacaaaagctgggtaccgggccccccctcgagagtacttctagaattaattaaggcggggaccatctgtgttcaactttctgatgactttcacaagctctgcattttatctcccagctctgttgtaaggtattgtcagtgccttgcagaaaagaatcagattccttccaagtgacatagacagcaagttttggagagctaaggacaaacagggccgcagctcagctcagttggcttgcttctcccacaccagcattccctgcgcagcccaagttctcagatacttctgagatcttagtcaacaaagcttannnaaaaaaaaaaaaaaaaaaaaaaaggggggccccccccggggggggcccccaattccccctttagggggtgtttttccccccccccctgggc

SEQ ID NO: 46083 - DNA, 537 bp, Homo sapiens
gccaagcgcgcaattaaccctcactaaagggaacaaaagctgggtaccgggccccccctcgagagtacttctagaattaattaaggcgggagaaaggattgcattgcatataccagttaatagattaatatcaatacaatatgaaaaaaatctaataatttgatagagcaatagaaaaataggcagataatttgaatgagtaatttacagagagcaaaaataactggccagccgtgtatgaaaagtcttaactatataaggaaatgcagatttaagtaacaatatggcattatgctatatcccttggacaggcaaaatattaaaagtatgataattccaattgctgacaaggatagagaaagagtagtttcatgtcttgctggtagaaatgtgaattactacactctttttggaaaataatcaggcaacagctaataaaatttaaattcttctcctggaactaaaattagcttaagtaatgatacgtgtacaaaaattatgcattgcagcactggttatagtagggtaggcagaccc

SEQ ID NO: 46084 - DNA, 414 bp, Homo sapiens
  misc_feature 343, 344: n = A,T,C or G
accctcactaaagggaacaaaagctgggtaccgggccccccctcgagagtacttctagaattaattaaggcgggcaagcatcacaaaccatgcaagtcctgtgatgacctccaaagctccccaagtgggcggctctgcagtacagcggggtctggttccacccaacccaggggtttccaaaagataatttcctattccccaaatctgacactgctgagtgcctcagcccttaccacgctactcctacctatctacccttttatactaataatcttatgaaacagtctcagactaaaaagaaaaaaaaaaaaaaaataaaatatttaaaaaaaatataaaaaanncctttttccgccccccccccccggagggcccccctaattcctatttttaatcacttgtgccccccccccc

SEQ ID NO: 46085 - DNA, 473 bp, Homo sapiens
aaagggaacaaacgctgagtaccgggccccccctcgagagtacttctagaattaattaaggcggggtagcatataaacatgcagcattttctgaggtgtatttgttggacccttaagatttttacttctcttcagtaggtggatccttttctccagatcagtcacattttgttccttaaggccagttatgctctagttttaatctggaatgaacttgtgttcttgtttgagacacctcttcctagtgggtgcgtcattatgggagattgtatctatctatataatcttctgtaatttagcatagagaagaaaactgggtgatgagttgccagctaatttatataaatgagatatgggaaaagatctaaccccttcctaaatcccccaccaaaaaaaaaaaaaaaaaaaaaaaaaggggccccccccccgggggggcccccaattccccctaaaggggggttttttaccccccc

SEQ ID NO: 46086 - DNA, 423 bp, Homo sapiens
  misc_feature 337: n = A,T,C or G
aaccctcactaaagggaacaaaagctgggtaccgggccccccctcgagagtacttctagaattaattaaggcgggagcctgagggcagtcggtggataggaaaagagaaggagaaaagtgtcatcctagattgtgctttacttctactgattttctgtggattgttctttttctccctctctcattttccagtgtatacagaacagtacattttaatgtcgaggaagacagaacgacgttatcaaaagacacagttcttgagaagtttctactccaagtcaacataacagttcagcacctataatccaactcttataatttagtagatgaacaaaanaaaaaaaaaaaaaaaaaaaaaaaaagggcgcccccccccgggggggaccccaaacccccctttgggggggttttttcccccccccc

SEQ ID NO: 46087 - DNA, 529 bp, Homo sapiens
agcgcgcaattaaccctcactaaagggaacaaaagctgggtaccgggccccccctcgagagtacttctagaattaattaaggcggggctgtttgagtcagagatgttcagttatttccatgaccttctattgagcctgttctttttccaaataacacttattataccagagcagagagactcctggaattttctataaagcaagtgtcttgtatttaatttacttttaccatttgcttccattataatttgagagttgtttttcaatggcaagtaaatacagctcccacaaaaggaacgtcatcttcaagaggcctgacaatctgttttcaaaatgtgtgaatgccaggtacatttaattccttgatatattacagaacgtgcctaatactgttatggttaggattgaatacatatgaatgtgaaacacctacataggaagcactcaataagtgttagtgtgagaaaaaactactagacaaactgctctaacttttgttgtcagattacacatttatgaaaacatttgg

SEQ ID NO: 46088 - DNA, 472 bp, Homo sapiens
ggaacaaaagctgggtaccgggccccccctcgagagtacttctagaattaattaaggcgggggatggtacagaaggttgtgatatttggactgaagcaggagcaaggggaaggcttgaaagaaactatggcaggatacaggaaaaagaaaaaggactgaaccagaacagcatgtgtcagtggagctgtttctgaggcaggaggaaaatctggtaggtatgaggggaaaaggaagggaataactgagaatcactcctgggtctctagctctacacataacatggtgactgtcttaacttaaagaaggctggggtccgggtgcggtggctcatgcctgtaatcccagctactcaggaggctgaggcaggagaatcgcttgaacctgggagacagcggttgcgatgagccaagatggtgccactgcactccaccctgtgcagcaagagtgaaactccatctccaaaagaaaaaag

SEQ ID NO: 46089 - DNA, 463 bp, Homo sapiens
agggaacaaaagctgggtaccgggccccccctcgagagtacttctagaattaattaaacacagtttatacctttatcgctgcacttggcaagttttgggaagttaaagactggtggtactgctactcggaagttatctgtagaaaacagccttaagtcttttccaaacaaaatatcattttaaaatgaagttgggtcaaaattcaaataaaactccctctaaaatgaagtgtgcaatatccactcttaatgtgtgttgtatcgtgtagtcaaaagactcttaatgattgcctgggaggttggtacagaagggatttttatttttaacagtctctaaaacacaccttttaatactcattctttttggaattctaagttaatttctattcttcatcactggtgcttttaaaaaaaaaatcacaaatttcagaattaagtgtctgagggatttatttcctaaataa

SEQ ID NO: 46090 - DNA, 518 bp, Homo sapiens
cgcgcaattaaccctcactaaagggaacaaaagctgggtaccgggccctccctcgagagtacttctagaattaattaaggcgggagagaaatggaactctgagatctctgcaggtaggagagagaccagggagtaaccctgggttccagcttaaaatcaaagagggaggacaaggacgttgatatgtcctcctgtgcctttttcaaatggaggcattggcatgatgaaaccctgttagtttccttcaggaaaaactagccaactgctgagagaagaaaagctctgctgccaactattttattccctctgaaaagataaacaggaggaagcagataagcctgaataacctgcttcagagaacaaacaaaaatgaaatgaagaatgacaaaggagagaggggactgaagtaagacagatgaaggaaagagagaatgattagcaagaccttaaccaaaaataaagagttctgggtgtgggcaggggtcattacaaaatgaagtcagaagagaagtaaaaaa

SEQ ID NO: 46091 - DNA, 470 bp, Homo sapiens
  misc_feature 325: n = A,T,C or G
taaccctcactaaagggaacaaaagctgggtaccgggccccccctcgagagtacttctagaattaattaaggcgggcacagtagcacactcccatagtactacctacacaggagcctgaggtgggaggatggcttgaacccagcagctggtggtttcactgacctatgatcatgccactgcactccaagctggtcaatagggcgagactctgtctcggaataaacctgaaaagtgaaacttgcagtgggccaccacggggggagtgcactccatcctggtcaacagagcgagattccgcctcccaaaatggtaatattatataanaaataaaaaaatgaaataaaataaataaaattaaaaagtgataaactggacatcatcaaaattaggaaaatttgttcattgaaaaacattaaagagggagaaagacaagccacagattaagagaaaatcaatacatacatctagc

SEQ ID NO: 46092 - DNA, 504 bp, Homo sapiens
agcgcgcaattaaccctcactaaagggaacaaaagctgggtaccgggccccccctcgagagtacttctagaattaattaaggcgggacaggagagcacttcctgagttcagaaaaacacacgagcttcacaggaaacagtgcttcaagactgtagtatagtgtgtcccttctcattgatttaactaagtggatactgaaaaaatatcacagaggcattgatcttggtgcagaaaccacctgtccctgactaggggaaaataagctagcaagcagtgtgtcaggaagacccctcttgaaagcaaaacagaatttatactacagctagctttcacaaagctgttagcagtttatggcgttcaactataaataaatatgccaccaaaagcataaggtgttactcttaagaaaatggcatgtttatcagactaaaaagctctataaaagaaccaatttaacaaaaaaaaaagcggccgccaccgcggtggagctccaattcgccctat

SEQ ID NO: 46093 - DNA, 499 bp, Homo sapiens
gcaattaaccctcactaaagggaacaaaagctgggtaccgggccccccctcgagagtacttctagaattaattaaggcggggggggggctgggggttggacggtatagatgaaggtccgcaccatctgtcgatcttaacttgccataaacctcacatattgggagcgcatggaggcttacacctgtaatcccaactcctcacgacgctaaggtgggaggatggcttgagccctgatggtgggcaatgagcccagattgagccactgtactccagcctgggcaacacagggagacccttgtctgcaaaaaaaattaaaacaaataaaaataaaaataaatacaagctggagaacttactgatgatatgatgtctgtgatttgccttaaaatactggactgaggaaaaataaggggggttacagatgtcacaaaataggcctcgtgctgataaccctggaagctggttgatggcaactgaggttcattattctactatgct

SEQ ID NO: 46094 - DNA, 554 bp, Homo sapiens
gccaagcgcgcaattataccctcactaaagggaacaaaagctgggtaccgggccccccctcgagagtacttctagaattaattaaggcgggctcccactaacctcatttccactagttctgccttggagcttgggctttcttgttctgattcttacttgatttttgtttttgctgcttctctggaataaccttccctcatcaccaggattagaagtattattttccctctcacattgagaaggtggagaaaaaccacaggaaaaactaagtctccaaaaaaaaaaaaaaaaaaaaaaaaaaaaaggcggccgccaccgcggtggagctccaattcgccctatagtgagtcgtattacgcgcgctcactggccgtcgttttacaacgtcgtgactgggaaaaccctggcgttacccaacttaatcgccttgcagcacatccccctttcgccagctggcgtaatagcgaagaggcccgcaccgatcgcccttcccaacagttgcgcaacctgaatggcgaatggaaattgtaagcgtttaattttttgttaaaatt

SEQ ID NO: 46095 - DNA, 449 bp, Homo sapiens
ctgggtaccgggccccccctcgagagtacttctagaattaattaaggcgggggtatgtaagtgcttaagactgaaattgtaggatctaaggttagtatgtacttaactctgtaagaaaatattcatgtcttacctcacatctctagggaatgaaagattttagatcagaatggtagggtagaggaaaatccattggggaaattgttcctttggtatttacttaatctgaacattttttaaatgcaattgtaactattgatgaaatgtgaatattgattgaaaaaagacgttgatgttaaataagactttacaagcttgtaaaagaaaatatagttacagaaggaaaacaagtttttaaaaacagctttattgtgatataatttatataccatagaattcacccatctaaagcgctcaattcagtgaattttgtttatttacagagttgg

SEQ ID NO: 46096 - DNA, 504 bp, Homo sapiens
gcgcgcaattaaccctcactaaagggaacaaaagctgggtaccgggccccccctcgagagtacttctagaattaattaaagcgggggtattctcttcctcctttacatcatttccttccatttaaatcttgctccatgtgccacagaaatttctacaagagtcgaggacacggagttcagtaacaatctctagcacaagtttcgcattgtcctgctttctgtcttcccccacagctaaagccctcagctctgtgaccttccggatgatttatctggctgaatctttgttcctggttacctgtgcacatgaaatcgtctttcttcctgttcatttggtactacagggtgctaaaggcatgaattcaaagctccttcaatctgtgtttatatctgggcattagcagtgggttttgaagtactggtcatttcaggtgatatttttgtgtactatttcaagatcatttacagctgaccttgcagccttgtgggctttgatacaggtgg

SEQ ID NO: 46097 - DNA, 540 bp, Homo sapiens
  misc_feature 490, 491, 492, 496, 497, 515: n = A,T,C or G
ctaaagggaacaaaagctgggtaccgggccccccctcgagagtacttctagaattaattaaggcgggagactattacctgagattactattggaggaagatgagaatgaagaaagtggatcaattaagagatcgtatgaatttttcaatgagctttatcatcgcttcttgctcaccccaaaagtaaacatgaagtgtttatgtttacaagcccttgctattgtttatggcagatgtcacgaagaaataggaccttttacagataccagatatatcattggaatgttagagaggtgcacagataaacttgaacgagataggttgattctcttccttaacaagttgatccttaataagaaaaatgttaaggatctcatggattcaaatggaataagaatccttgtggacttgcttacccttgcacatctccatgtaagccgagctacagtaccactgcaaagcaatgtaattgaagctgctccagatttaannnaaannaaaaaaaaaaaaaaaaangggcggcccccccccgggggggccc

SEQ ID NO: 46098 - DNA, 523 bp, Homo sapiens
  misc_feature 479, 481: n = A,T,C or G
aaccctcactaaagggaacaaaagctgggtaccgggccccccctcgagagtacttctagaattaattaaggcgggggcttaagggacagcttacaagttcataatctaacagagaaagggtttgtttctggggagagggattatgtatgatatttaatagacacctgcgaactttaggatatctggggggttctcattaactaacgagggtcctgaccctaacagctatcttttctctaaagattttgtaatgtttaaaatttttttaaattaagataaatatattttaaatcatactgtgaatccaactggtatagcattctgtagagaagatcactggcttaagaggattgttagaaggtggctcacacctgtaatcccagcactttgggaggctgaggcgggtggatcacgaggtcaggagatctagacatcctggctaatatagtgaaaccctgtctctactaaaaatacaaaananaaaaaaaaaaaaaaaaaaggcgcccccccccgggggggcccc

SEQ ID NO: 46099 - DNA, 500 bp, Homo sapiens
aaagggaacaaaagctgggtaccgggccccccctcgagagtacttctagaattaattaaggcgggggcgggtgctggctcccatcctgccggataacttctccacgcccacgggctctcgcacggactctcaatcggtgcggcacagcccgatcgccccgtcttccccgagtccccaagtcttagcccagaagtactctctggtggccaaacaggaaagtgttgtccgcagggcgagcagaaggcttgccaagaagactgccgaagagccagctgcctctggccgcatcatctgtcacagttacctggagaggctcctgaatgttgaggtgccccagaaagttggttctgagcagaaggaaccccccgaggaggctgagcctgtggcggcagctgagccagaggtccctgagaacaacggaaataactcgtggccccacaatgacacggagattgccaacagcacacccaacccgaagcctgcagccagcagcccggaaa

SEQ ID NO: 46100 - DNA, 634 bp, Homo sapiens
aaagggaacaaaagctgggtaccgggccccccctcgagagtacttctagaattaattaaggcgggcacttataatcccagctactcgggaggttgaggcaggagaatcgcttgaacctgggaggcagaggttgcggtgagccaagatcacaccactgcactccagcctgggcaacaagagcgaaactctgtctcaaaaacaaaacaaacaaacaaaaaaaacgctataggcctagatgtgatcaccaagggaatttagttatcttatcctgatccacttaaaccccagctttcaaacactcacaaccaaccttagtgctacttcaggaatattttcataaaggctggcagttaaattactaagttccaacttgctttgcacattatctgaagatagaaatgatttacttaatgatgatttggcaattatctgatgttttgctttaataaaaaaaaaccaaatcctttttttcagattagctcctaaaaataaattcaaataaaaactttcaaggatcaaaattaaagatgatttacaaaattgtatcaacactgaactcctcatgggccgggggcggtggctcacgcctataatcccagcactttgggaggccaaagcgggtggatcacgtggt

SEQ ID NO: 46101 - DNA, 221 bp, Homo sapiens
gggagtcgacgcgtaagacgtgttttgcggaacaaaagctgggtaccgggccccccctctagagtacttctagaattaattaaggcggggcaagtcctttcacagccggctgggatgctcatcaggaggcgtgatggatgactgtcatttggcagcctcgggattaatgatctggaggtcataggggagaattccacagggaagggtcaccgtccagggca

SEQ ID NO: 46102 - DNA, 475 bp, Homo sapiens
  misc_feature 386, 387, 388, 389, 390, 391, 392, 393, 394, 395, 396: n = A,T,C or G
aacaaaagctgggtaccgggccccccctcgagagtacttctagaattaattaaggcgggagaaagttttcatcaaaagagcctagaagaactaatacttaaccaagcattagggtggcaacaggaaacagaagaaaataaatgtcaaataggctggctttttactgtgacaaataatacactgtatttatgaaaatgtatttatgaaaatggtgcccattaccagttcaacagatttaacttgctgcttttaaacagaactcctggctcaagaataagaactacttatacagcccagatcatactttctgccatcacagcaaccacatactcagtagcatatatctgttttaccttgtgatgactattacatggaaactgcaaaannnnnnnnnnnaaaaaaaaaaaaaggggggccccccccggggggggcccccaatcccccctataggggggtttttaccccccccccctgg

SEQ ID NO: 46103 - DNA, 506 bp, Homo sapiens
gcgcgcaattaaccctcactaaagggaacaaaagctgggtaccgggccccccctcgagagtacttctagaattaattaaggcggggaagtgataagtggtaaaaagagacatttcctatgggtagaggtacaaagctaaaaaagaaggaaacccagactgaattttacgtttcttatttccaactcctctcgatgtctacctggaaaactttccaatctttaagcattcagctgcagtgaaatatcctctggggaccttctgtgacatcccaagacagagttcatcacccttttttaatagtgtcctgtacttttcttatctttctattgttgcttttaaaacatattttcttgcaattaccttcacatgcactgtgaacaccggcaatttaatgtgtttttgtgcatgtgtatgcatgcacgctgaataagttccttgcatgctaaaaaatgtttcaacctacaaaataaatagtaatgtcattgcctggttcgtgaaaatttgg

SEQ ID NO: 46104 - DNA, 460 bp, Homo sapiens
  misc_feature 239, 241: n = A,T,C or G
ggaacaaaagctgggtaccgggccccccctcgagagtacttctagaattaattaaggcggggccctgtttatatctttcggtatcagttaggaaatactttgatataaaatttggatttatatgtcaatcagcttggcaattgaggttcttttgttgctgatcagaaatcttggctggcagttaaatatgtcctttttataaaaaaaaaaaagaaaaggaaagaaagaaaagaaaacananaaaaaaaaaaaaaaaaaaaaaaaaaggcggccgccaccgcggtggagctccaattcgccctatagtgagtcgtattacgcgcgctcactggccgtcgttttacaacgtcgtgactgggaaaaccctggcgttacccaacttaatcgccttgcagcacatccccctttcgccagctggcgtaatagcgaagaggcccgcaccgatcgcccttcccaacag

SEQ ID NO: 46105 - DNA, 518 bp, Homo sapiens
ctaaagggaacaaaagctgggtaccgggccccccctcgagagtacttctagaattaattaaggcggggctagtctgtcttgtcacattacattcaatcgtcactcaagatcattctacaaatatttatcaatttttttttagtgactttgtacaacacagacactcccgtcattgcccagtggctcttccattctaatgggacgagacagaaagtaaagttgaaaatgtaggatgttaagtggtgatatgtaggtaataagtgctagggagaaaaagcaggaagaggaataaatgaaatcagtttgcttcactagcttctggccctcgacccgaaatgctaacactttgtgtgtgtgagaaatttttattgaacacggggtttaataaatgcaaataccaagatcaggaatttcctatttttgaggagctcattatctaatgccttaaacggctacataaagaaaccattaggataccttttgacaagtgttatgatgggcaggtagagaatgtttgc

SEQ ID NO: 46106 - DNA, 453 bp, Homo sapiens
ctaaagggaacaaaagctgggtaccgggccccccctcgagagtacttctagaattaattaagggggaaggtaaaaaaattccgtcatgcccatctcacttgtatatcccttaatattaatacctggttttttcatataatgtaaattgagtcactcagtgtaaagtattttcccagataactaggggttttatgtaatggggttttcaaataaaaaggattccagggatatctttataaaatatactaagtaaatgtccttgcagcttaatttacattccacagtatctaaatttctcttgatgattcggagtaattaattttgagatcagtaatttttggccatgggaataccacgtggagacataaaatggaatacataataatagctggtatatattgagtgtgccaggccctggcttggtattttaagcacattgtttaatttaatcct

SEQ ID NO: 46107 - DNA, 503 bp, Homo sapiens
ctaaagggaacaaaagctgggtaccgggccccccctcgagagtacttctagaattaattaaggcgggtggattacctgaggtcagaagttcaagaccagcctggacaacatggtgaaaccccatctctagtaaaaatacaaaaattaactgggcgtggtggtgggcacctgtaatcccagctacttgggaggctgacgcaagaaaattgcttgaacccaaatggcagtgagctgagattgtgccattgcactacagcctgggcaacaacagcaaaactccatctcaggagtgcagttaaaaaagaaaactatatggcggggcccctctttgggttgcccccccttaatccaagatggcggatgattacgccccgacatcgggaccattttttataacatggtgaaacccctctactaaaaatacaaaaaattagctgggcatggtggcgggcacctgtagtcccaactacttgggaggcttatgcaggagaatcgcttgaacc

SEQ ID NO: 46108 - DNA, 492 bp, Homo sapiens
agggaacaaaagctgggtaccgggccccccctcgagagtacttctagaattaattaaggcgggataacagaaaagcatattaaattcttgattagaaaaatgacaaaattctttctgaagaagagaaactgcagctgtcacatgtaatacacaaccaagtagtcatggtttagattagtagtgacagaatcacaaagaaatggcaatgaacatatagaaagagaatctcctgatggattagtttggacacagaagataaagggaaagagaatgtaagaacactccaaagtcaaagaagtgggaggatggtgatgccatttttaaaaccataaagctatatatatgaagaaaaaaaaccccaaacaaacaaatggaaaacccataaagcttcctcggatacccaaatcctccttctgcttttattacaaattatgcatcaatcatctgactcagtttctaagtcgccacattttcttgaatttcttcctatgt

SEQ ID NO: 46109 - DNA, 552 bp, Homo sapiens
  misc_feature 514: n = A,T,C or G
taactaaagggaacaaaagctgggtaccgggccccccctcgagagtacttctagaattaattaaggcggggctgcacagtgtgagcctcaggacttgtattttccatcatacctagtcaggaggcaaaattcctgctgtcatgttcaacaactaaacaaagtatttgcatccaaggttatttcctttgagggacccaggcacattttgtgttgacttctggccccattgacaggtcccagaaaggactggtgagggccattctttctgagatggttccccttactgctttcctctgtcctgatgtgggaatagggggaagggggtgctatgatccttttatgcctgatatgtgcctggtaaagaattctagaactggccaggcacagtggctcatgcctataaccccagcactttgggagttcagggtgggaggatcacttaaagccaggaagttcaagagtagcctgggcaacacagtgagacgccatctctacagaaaatacaaaaaattanctgggtatggtggtgcatgcctatagtctcagctactc

SEQ ID NO: 46110 - DNA, 461 bp, Homo sapiens
taaccctcactaaagggaacaaaagctgggtaccgggccccccctcgagagtacttctagaattaattaaggcgggttattaaagaggaaatttgagccagctgattacaaacacataatcaaagcttctgagcagtcacaaaatgagataaaggtttcagtgttttcacgaaaaactgatatactaattcctgtgagtaaatgagatcttcaagaaagagaatgtaaaaattgaagaacttatgacatgttgttcaatcttagggaatagacatttgaaagaaaaggaaggaacatgaggaatgaagggaacaaatgagaaacatgtgcctgctatcaacttagagttggtgaagcaaattggtaaacattggcgaattttatggggttattgatgacccaaactctaagcttctttgtaaattgggaatttttcaaaataaaatgttctgggagatggt

SEQ ID NO: 46111 - DNA, 493 bp, Homo sapiens
tactaaagggaacaaaagctgggtaccgggccccccctcgagagtacttctagaattaattaaggcggggggaagaaagaagaagcaatctcaaagtgcagataaaaatcagttctaatgggttatcatacgtgtaaaaatagagaaaaatgcatatatacagtaaaaacctatgatatcatttcagatataaagcaatttaccggctccagacccccagaactcatggccaacttcatttgcaggtttgttctggtcatttcactaacctcacagaaatataaccctgaatttttttgtaaactagatttcttggatcccacttatggcaggatttttacatatctatctatctctacatttgcttctatgcacgtggaataggtatggaaagatacataacaatttcaagtatttattgattgggaagagggaccatgcctgccagatggcaagttgtagaggcagggaggaagagtaagagagagctcat

SEQ ID NO: 46112 - DNA, 478 bp, Homo sapiens
gaagggaacaaaagctgggtaccgggccccccctcgagagtacttctagaattaattaaggcgggtggaattaacaggactggatcattaattagatatgaaaaaaagagtccaggataatctaattctcagttatctggtttaagcaccaggatgcttgataatgccatttattgatttattgagcataggaatacagggagagaaagagcaagtttggagagaagagagtagaagacagtgttgtgcttttgggtcaggtgtctggggtgtcgtagacgtctgagtagacctgttaaacaggcttctggtcttggctagagatacagatttgggagagttgctagagagggccttaaaagtgacctagtctaacttcttagattttacatgtgaggaagttaaagatttaattgagagaatacattgttcatttttgcaggagacagaataagaattaggatgtgaatctagggct

SEQ ID NO: 46113 - DNA, 440 bp, Homo sapiens
agggaacaaaagctgggtaccgggccccccctagagagtacttatagaattaatgaaggcgggctgttatttacaagcctggcagcaaaggcagctgaggggagaatatcctttaactacgtccacctactgccatgatgctcccacacaaagtcaattaggaaacaatgcatgctttatatataggcaaagccaaaaaaaaaaaggaaaacactgtctgcactactgaccaaagcctttttaaaactgcaatgatgggacagctaaactccaagccccaggaagttctaactgggaattctacccaaaattactcccaagagccacatctaatattgacacaggtccctgcagtatagcccaggcagctagataatcactaaacaaggaactcaagcatcctggtaaaaaggagataatgccaattttacctgtgtctc

SEQ ID NO: 46114 - DNA, 474 bp, Homo sapiens
gcgcgcaattaaccctcactaaagggaacaaaagctgggtaccgggccccccctcgagagtacttctagaattaattaaggcgggcggggaaggaggggtctttgagcaaaaaattttttttttttgtctctgttctattcagacattcatgtatttcttaattcttagttgcctattatagatgaactaaattctgtagaaaatatatggagcacataatagggaaatgagtcacataggattgaattaatgagtacacaaaaacttacttaaaaacactctaacccttacaatcacaagggctctggaaaatgctcttgtggttagtacacagtaagtatgcaaacacaacacgtggtacaaaatgatgcgaatttatggtctagagggcctatatgaaatagggatgttaaaattaccttaaaaatgacatatgtttttatgtaccttgttaagaagaattttaattgact

SEQ ID NO: 46115 - DNA, 506 bp, Homo sapiens
  misc_feature 82: n = A,T,C or G
agggaacaaaagctgggtaccgggccccccctcgagagtacttctagaattaattaaggcgggtattgtcttgagacctcanaagagtactctggctacaataggaagcatgtctaaagaaaagactatatgggattcatggagatgcattgagaagctgttccagcaagccaggaaaagttcagaatggccaaggcaagagtaagagtattagtaatacaagtacagagatttgggcaatagtttcaaggcataattaataagatctggggtttggttatttgaaggtataaagaagaaaaagagccagatttctggcttgaacaaccaggtgaaggggatggcatctttcactgatcggggacatgtgggaggaataacaagattgacagacggaagagtttcaccattggattgatacgtccaataggcagctgttaggagatattggagctcagaagggccatctaagaggaatttaaatgtgggagtttttaaaataatga

SEQ ID NO: 46116 - DNA, 450 bp, Homo sapiens
ctaaagggaacaaaagctgggtaccgggccccccctcgagagtacttctagaattaattaaggcgggccggcagtaccagttttccataatattaaaataacttattaaaattacaaaaccaatgcataatcattacaattaatttaaaccttacagatatatttaacctagaaaatgaaagcattctataatttcatccttatagagtaaaattcctctacttttttctgtacatgtactaagagcgattttccccttgtttataagaatgtttatattctgcatattatttttacatttttatgtaattcaatgaacatgcctgtcttatttgttttcatgtctcaatataggtgaactatggtttacttaaccaagctcctactgatagacatttgggttgtttccagtttttacccattacaaccaaagtgaaaataaatatcctc

SEQ ID NO: 46117 - DNA, 475 bp, Homo sapiens
agggaacaaaagctgggtaccgggccccccctcgagagtacttctagaattaattaaggcggggtgatcttactaacatcagtggaaatgggaatgttgtgtatggattattgatatagggattgggtcattgttttgttttgtttctgataatcattttgactacattaagaagacagtgagtgaaatcccagttttcagtattccagaatagtctgtgacttttcaagactgagaagtagttatttgattaggaaaaaaaaattaaaatctcaattgcctatgttttgagacagcttttatcaaattagtttaaaagcatccccaccatctcccaaccattttgtgatattatattgttttaatttccatttgatttcctattttaaaaataatttgtagttcctctccaaccagtctggaatatacttccagagaccccagagcaagctgaatgcattgagggaattctgga

SEQ ID NO: 46118 - DNA, 598 bp, Homo sapiens
cagcgcgcaattaacctttactaaagggaacaaaagctgggtaccgggccccccctcgagagtacttctagaattaattaaggcgggggcataatcattaaaaatgtcctgtcactaagttctcaatctattcagttgtttaattctcagtccacagacacaggtctgtggctgcacccctaagaattctagtctgactcaaggagtgagacaaagtgtacagggcaggaggagaaagccctggcttccatggccctaatcctttctttttccattcttctttatcatctggtcaaatagagacttttgccctgtaaatcccaagccagcactgtctccttgtcctccatgttttggtcttactgacctaggcagtttatttccagagaaataatttttggcatattaaaatagctaagagggagagagatggctaacagtcgatgtgggtatacatttcttttcttttcttttttttttagatagagtctcactctgtcacccaggctggagtgcagtggctgatctcagctcactgaaacctctgcctcccgggtccaaacgactctcctgccctagcctcccaagtagctgggac

SEQ ID NO: 46119 - DNA, 429 bp, Homo sapiens
accctcactaaagggaacaaaagctgggtaccgggccccccctcgagagtacttctagaattaattaaggcgggcctgtctcctattttccgtgtatcattctgtctttttttatagtgtcttccaaacagtttgccaaatactgctgtgtgtttcaagtatgattccgtcatgtgccacccactctacactttgcaaagtctaactctgcattagaagtgctacaataggctgggcgcagtggcccatgcctgtaatcccagcactttgggaggctgagacgggcagatcatgaggtcaagagatcaagatcatcctggcaaacacaaaaatacaaaatactctactctccactaaatgcctactaaaatacaaaaaattggccgggtgtggtgccacgtgcctgtagtcccagctactcggaggctg

SEQ ID NO: 46120 - DNA, 441 bp, Homo sapiens
aaagggaacaaaagctgggtaccgggccccccctcgagagtacttctagaattaattaaggcggggtggggggttggaaagacgaggtgagccagtctgtaaagttagaaataccaaatggcttatcgggtaatacacagtgtatttaagctgttgttgcttaattgcctcagactactcagataacatcaacaacatttcttaagtaaaatttaaatattttagatgtaattttaaaaactgatccaaattttttattatacaactcactcatatatttgaaagtcttcactagcatagtagcatcaccttcatctaaatgtcatttaaattactgaccccctttttgctcccaaaaagacaatggatttgtaccaaaacacacactacaaaggcaaacaaaacatgataatctgcaaaagttcatgtatctacttcatt

SEQ ID NO: 46121 - DNA, 503 bp, Homo sapiens
ctaaagggaacaaaagctgggtaccgggccccccctcgagagtacttctagaattaattaaggcgggaatggagcttttaggcgagtttcagcttttcgaacagagctgagacaaccgcacatgtttgcaggggaaagtggctcggtctaaagtatctgggtccttatccgaaaaagcagcaggccatgtcacaaagggctatatatgctaagttaaggagttgattaatttttctttggagaacagggtcttgttatgtggcccacgcgaatctataactcctgggctgaagcaatcttcaggatctacctccctaaatgttgagactacaggtgtgagccacctttccctacaagtgaaggagttttaaactttttcctaaaagctatagggagccaataaatgattttaagcaactaagcgtcaagatctcatctacatattagagatattttctatttgcagacattttaagttactagcacttgtgaagtcactgaat

SEQ ID NO: 46122 - DNA, 618 bp, Homo sapiens
aaagggaacaaaagctgggtaccgggccccccctcgagagtacttctagaattaattaatatttctttacaaagccaaaggtacaaaaatatcttttgtttgtttttattgtaatcaaaccccatcagaggctctttaataagtgtatctgttttgccttttactttgttgagaataaacatagctttctaaaactctcctgttttgagatacatatcaaacattggcaaaaatatttgttaaaattcaccgtaactattactgtgttcattggtatatatagggatagaaggcacagtgaccctccttggtttttagctttatatttaaaaaattttacttatgacatttaggctttttaagaactcttgtcgaatacacttttcaaaaaataccaaggaacaaaatttatttttttccaaataaccaattgtgtagtatttttaagggaatattaaacaaaatcttatccagcctgaaagcttcattcttgtatgatacacattataatttgttctgtttaagatctatgtatatatttacttagtaatttaatgcatctcctcttgaggaagggtaaaataagtaatatttcagtacaaatgataactgttaaac

SEQ ID NO: 46123 - DNA, 363 bp, Homo sapiens
gccccccctcgagagtacttctagaattaattaaggcgggcactagagtgagcagcaggcagcatggacactggctatccattttgtactacatccagaatgtttccctgcatcctgcaagaaatccgagatgattccctgtttactcacgtgaggatttcgccaataatttcccattaactacagtgatattagcatgcctctcttttatacaaccactaaaagattagtaaagattactaaagaaagaaagattacctctaacacaaagtctgaaggcccacactaatactcacatgtaaaatgcttagtacttactagtcacttagtaagtattcaataaatttctttttttcttttttt

SEQ ID NO: 46124 - DNA, 584 bp, Homo sapiens
taaagggaacaaaagctgggtaccgggccccccctcgagagtacttctagaattaattaagcggggcacacaattacattacattagcaatattaccagcacaggagatggcagaaggaaagaaaatactacattttcttcatatcctaattttgctgagtaagcaaacaattgacagtcaaaaacagtaatttttttataaattaaattctaaggaaatatgcttaacaattttataagtaaacaattacaggctctctctctctcctctcaaaatgaaagctactacataacatcaacacccctccccaaccaagcaatattttagactagtgataaacaaacaaatgcacaggaaaattttagctcatttctagaacatttgttaaatgtctacatctgccaggctctaaaatgcaaagcacaacaaaattacacagaaaattaaagtgcacgggggtctcttcattagggacaattatgaataaaggtaagtcattcaagtacatacacatacataaagtatcattttaaaactagaagccaggcacggtggctcacgcctataatccccgcactttggg

SEQ ID NO: 46125 - DNA, 455 bp, Homo sapiens
gcgcgcaattaaccctcactaaagggaacaaaagctgggtaccgggccccccctcgagagtacttctagaattaattaaggcggggggagcaggaggggaggacatcaagaccatcctggccagcatggtgaaaccccatctctactaaaaatacaaaagttagaccggcatggtggcgtgcgccaggagctccagctacttgggaggctgcggcaggagaatcgctagaaccgaagaggtggatgtagcacatgagctgaaatcacgccattgtactccaagctgttgacatagcgggactccttctcgatcgactgacttacactaaaaagccgggaactgcctgaacagacaaagaacatatggaagatagtaagtagagggtcacttatatgctacagaaaatcccccaataaatgtgacttgaagcgaaaaaaaaaaagcggccgccacc

SEQ ID NO: 46126 - DNA, 484 bp, Homo sapiens
ctaaagggaacaaaagctgggtaccgggccccccctcgagagtacttctagaattaattaaggcgggggagggaacttgatttgcaaattgcacccatgtggtcaagcgtggattctcactcttctcatgtatgaggccattatttgtcgctctaaaaaaatgtcgcgaaacctcatacactattagtagggcttggcatgataattggtcaattacacatatcactaccagcagctagcgtgaattcaatatctgttctgtgtctatggataccaatacatatactcccactctgaaaaacaggactataagtacatgtgagacatttactaatattcaagccgtgcctgctgcttgtcaggatgtgtgggctccttgcaatcatgctgcggccctgacagggcctaatctggctcagagtggacatgctcagaaataatctacttgatgattctcaaccacagtttggtgttgcgattggct

SEQ ID NO: 46127 - DNA, 494 bp, Homo sapiens
ctggccgtcgttttacacacaggaaacagcgtatgaccatgattactggccgtccctttccacacaggacacagatatgaccttgatgcggtggccgtgactcacctacacaaaactactgatattttgatggctgaccgatgctgtgaaataaatgaactggaagtagctcctctgcaggctgaatgcgcccgaccgttctaatttccactattgacccagcttgcctcagagcacctccctgacaaagtggccagttactatgtacttagagattgcaaatcaatgcaaatattagctcatactaggaataattaagaaggtaaatatgctgaaaacatatattccaaaaccaaaatagattttttcgattttaccctcatttttgattatcaccacctttctgccaataattatccgttaacatgaataatttagaattgaacagatatctgctttggacattacactttcaagaaaaaaaaaaaaaaaaa

SEQ ID NO: 46128 - DNA, 452 bp, Homo sapiens
ctaaagggaacaaaagctgggtaccgggccccccctcgagagtacttctagaattaattaaggcgggtggattgcttgagctcaggagttcaagagcagactgggaaacatggcaaaacaccaaaaatacaaaaattagccgggcctggtggcacatgcctgtaatcccaactcggcaggatgagacaggagaattgcttaaacccgggaggtggaggatgcagtgagctgagatctcaccactgcactccagccctccagcctaggcaacagagggagactctgtcaaaagaagaaaaaaaaagccataaaagtaccagaaaaaaatctggaatattttaataatattaaggtggagaaagccttcctgagcatgacttaaaaacccataagctataacataaagagtaataattttggctacattaaaatttaaaacttctgtgtggaga

SEQ ID NO: 46129 - DNA, 522 bp, Homo sapiens
taaagggaacaaaagctgggtaccgggccccccctcgagagtacttctagaattaattaaggcggggccgggcacagtggctcatacctgtaatcccagcaattcgggaggccgaggcgggtgcatcactggagcccaggagttcaagaccagtctggccaacatggcaaaaccccatctccactaaaaatacaaaaattagcccggcgtggtggcagtgcctgtagtcccagctactcaggaggctgaggcaggagaatcactggaacccgagatcgcgccactgcacttcagcctgggcgacagagtgagactctgtctcaaaaaaaacaagcaacaacaacaaccaaaaaaaccccacacaaaacaggtggaatatccataaggatcagaactgaatagagggaatgggaatttccaggaaatgcaattaaagaaaaaagctagaaaacaaatcagttatcaggttcagggaaaacaaaaaggtaatttagaaattgtaattatgatatacattataca

SEQ ID NO: 46130 - DNA, 498 bp, Homo sapiens
ctaaagggaacaaaagctgggtaccgggccccccctcgagagtacttctagaattaattaagggcgggtcacaaggtcaggagtttgagaccagactggccaatatggtgaaaccccgtctctactaaaaatacaaaaattagccaggcgtggtggtgcgtgcctgtagtcccagctactcgggaggctgaggcagaagaattgcttgaacccgtgaggcagaggctgcagtgaggcgagatcgtgccactgcactctaacctgggcaacagagcgagactctgactctgtctcgaaaaacaaaaaaaagactgagctggaccagagggtttctaggtctcttctccctccaaatatacattctaatacataaaaggatctctgtagagaattttaaaacttttaacagtattttaagtaacagcaagacttagggagtacatgaaaaacaagtatgaccttaaacaactagctaggccctgatacataactatatga

SEQ ID NO: 46131 - DNA, 474 bp, Homo sapiens
accctcactaaagggaacaaaagctgggtaccgggccccccctcgagagtacttctagaattaattaaggcaggggggggaccatattgaaaggatactaaagggacctacctaaaatgtctgtaatgtgaaataaataagctgtttaatttttgactcctaaactgactcttttctgccagttttacttaatatatgtgtatttcccacttgtgaggtgattgaaaggaaaccttgaactatgctacagccattcagtaagaaattctctataaagagtggcaaaataattcagattattagaatgttgctgtctttatcaaagtcaaagctaattttgttttatgaagccgccaaaagaaaatgcttggggaaactctccaggacatcggtctgggcaaagatttattgagtaataccccataagcacagacagccacagcaaaaatggacaaatgggatcacatcaagtta

SEQ ID NO: 46132 - DNA, 507 bp, Homo sapiens
aagcgcgcaattaactcctcactaaagggaacaaaagctgggtaccgggccccccctcgagagtacttctagaattaattaaggcggggttgaggaatgctggggtggcagctactcaccgtgtgcttcccagggagcatcacctgttcctctgaagccctgcctgggtggcttgagcttggaatcaagctgacccattttgagagagtggattctgagctttttcctagcgtaaggtcgttttgataaaggagtggtcctttggacatccctgttctgccgtcctgatacctctagttgtgggttttatgtgtagcacagggtgaagctttagttctcagaacccacccctgctgtaccctgtgccctcgccctccgctgtgtttgccctgaccctcctgtaccctgcgtcctcgccctctgctgtgctcacccgaccctgctgtaccctgcgccctcgtcctctgccgtttgcccctgaccctgctgtaccatgccctcgccctc

SEQ ID NO: 46133 - DNA, 500 bp, Homo sapiens
tactaaagggaacaaaagctgggtaccgggccccccctcgagagtacttctagaattaattaaggcgggtcaatgaacaagtgtccaagccaaagacttagtactcagggtaagtgtccacataggctggtgcagctggttttccctctctactttcctttttcttctcccaatttacagcacaaaccaagctaaaatgctagctcaacttctctcttttcacttcaaaacaacccagctcaccagccgggcatggtggcagtagctcacgcttgtaatcccagcactttggcaggccaaggcgggtggatcacctgaggtcaggagttcgagactagcctgagcaacatggcgaaaccccgtctctactagaaatacaaaattagctgagcatggtggtgcatgcctgtaatcccagctacttgggaggctgaggcaggagaattgcttgaaccctgggaggcagaggttgtagtgagctaagactgcgccactgcact

SEQ ID NO: 46134 - DNA, 427 bp, Homo sapiens
accctactaaagggaacaaaagctgggtaccgggccccccctcgagagtacttctagaattaattaaggcgggaggatcacctgagcccaggaggtcgaggctgtaatgtgccctgattgggccactgcactccagcctgggtgacagagcaagaccttatctcaaaaaaactttaccaaaaagaaaaaaaaagaaaaaaaaataagggggcccccactggggggaaccccaattgccacattatgtggatgtatcaccccgccccatttgccagggtttgagaaaaccatctaaacaacttcctgtgggccttggagtactccttgataccttccaggccccagtttccccagtctgggtttaagcctgcagggaaaaacagatatgagaaaataaaaatgttgcgggccaccacccgggggggac

SEQ ID NO: 46135 - DNA, 473 bp, Homo sapiens
  misc_feature 397: n = A,T,C or G
taaagggaacaaaagctgggtaccgggccccccctcgagagtacttctagaattaattaaggcgggggacccctggggcatggaggggaccacgcgtcccttcccattcgtgccctgccaggctgtcctcacagcagcgtcctcacatgggaggaaaccacggcagccgcagcggctcctggtgcctagctttccttaaaaatgagcccatggatgttgcagtgagccgagatcacgccactgcactccatcctgggtgacagatcgagacttcgtctcacctttttgcagtctataacacaaaatttaaaccgccccccccccccgggggggtcccccaggcccccggaaggggttaaaattatcccccccaattggggaacttttttcaactacntttaattcccccatctgtaatacataatatacagtcccaaaatataacccggttccttttttaacctggaaaaaaa

SEQ ID NO: 46136 - DNA, 252 bp, Homo sapiens
gtaggtgaatcgtttcttctgccaactcgaattctgtccacagttcctgacacctaaatgggtccaagctacctagctccccctctagcctgcacgctccacccaggaaggacaaggcagaggctctggcgagtacagtatctttttcttttctttctttcttttttttttttttttttgaaaaaaattttcgtttttggccctggtttggttttccttttttccggggttttccccccccttttttggggc

SEQ ID NO: 46137 - DNA, 531 bp, Homo sapiens
gcgcgcaattaaccctcactaaagggaacaaaagctgggtaccgggccccccctcgagagtacttctagaattaattaaggcggggtgggtatcacgcctctcttaatataaaaagctattttacttatgctgggtcttgcagctagttaagtggtaacatagaaattaaaatctaagcttggattccaaataagttttactttcttgagaataaacgtcctaccacagggcatagcatttttgctgtatgacttagacaacttttctgcatgcaaaattccttttgttgattgatgaataaacatcaatgctaaatgtgtttatattaatatagcagcaatggttctcactagctagtgatagagagttggagagtcggtttattctcctgtacattttaatttttatcttatccttcatttccttactagaaaatcaagcacatgccatctttaaaagctgactagaaatgtaggtcactggaagcagtactgagcctttgcatgtttttttttagtctttttactttg

SEQ ID NO: 46138 - DNA, 357 bp, Homo sapiens
agggaacaaaagctgggtaccgggccccccctcgagagtacttctagaattaattaaggcgggcaagtagaccagacactcgtaatccccgatctctgtcattcaactgctattgcaatgatttaaatcaggactcttgtccctatgggagctagattaattctggatcgccccttattctcaaggaacagcctttcagagtcccaaccaaatgccaaggagtgttaataaaggtccttcaacgtggcaggtcctgacttcaatttctgtccccacccttgtgaatctggcaagagctctgctgagaaacttagataaacctccattcaaacaagcagtcttccactgccagaaaga

SEQ ID NO: 46139 - DNA, 464 bp, Homo sapiens
  misc_feature 360, 361, 362, 363, 364, 365, 367, 369, 375, 376, 377, 378: n = A,T,C or G
taaagggaacaaaagctgggtaccgggccccccctcgagagtacttctagaattaattaaggcggggactaggcaacgggattaggaaataatagtatccagataatttgttaatattttctcagttgtgtaaatgtgtcattatatttactttttgcttcttgtaagagtacatactgagtgaaaaatgttgttttgcattaataatgtgactctgcatttcatgcaacttcatatgttattgcattatggtagatttagtgctttttatattctactctttctgataaaagaaaaatattttataaactgactttcccttataggttatctcatatagactgagtcccagagtacttnnnnnnananaaaaannnnaaaaaaaagggggggccccccccggggggggcccccaatcccccctttggggggtgtttttaccccccctcttggggggtttttta

SEQ ID NO: 46140 - DNA, 479 bp, Homo sapiens
ccctcactaaagggaacaaaagctgggtaccgggccccccctcgagagtacttctagaattaattaaagcgggctgagttcacttgacttctgactcccatccttcccattggtatacgtggtgctacactcataaatttcttaattttccggagtacagctagacaaggcagaagtgaggcactgcttgggaggagtgggggaaaatgaaagagaagtgcttcctggaattccgcattccctattccttaggtcaggattatctactcctttctgagataatgtcttggaccttgtgcaatagttcaatcgtgtgtgtatatatatatatataaatatcccatatatatatatatatatacgtatatacacgtgtatgtatatatatacacgtatacacatatacacacgtatatatatatatgtacaagctcttggggggatggaaatctgggtatttctcatcgtatactcttttt

SEQ ID NO: 46141 - DNA, 473 bp, Homo sapiens
ctaaagggaacaaaagctgggtaccgggccccccctcgagagtacttctagaattaattaaggcgggcagattcttttgcttaaacttccttctcttctctcatcctcttgtaataaaatgatgggaattcgttcaacatttttctttaaagtgatcttaaaaatagagatcattgatataatcagttgatgttaaaatgaagctaatctctcttctatttgcttatgatagatagcagctaaagtctatgaagattccagtgatctcatgcataaagcaaacagtgccataatgtgcttactgcaccaaaatcaatgccatatattttttattggtttataaaatgtataaccaagtaatatagcaaataacatcataattaaagtcagaagaaaggttaataaaatatttaaaatgtgacaagatattatatctctattatgcaaagaacttgtacatattgtgaagaaaa

SEQ ID NO: 46142 - DNA, 500 bp, Homo sapiens
cgcgcaattaaccctcactaaagggaacaaaagctgggtaccgggccccccctcgagagtacttctagaattaattaaggcgggggaaggagggaccttctggtccttaagaatacggtcaccaattcttgacctagatatagattgatttctttaaagtcaagttttatcttggtttgtgatttagaacccttccctctgaagagaaagcagggtccattctatgtctgatcgcagatgttcttcatgtgtcagcaacatctgacttcttcaaaaggtaggcttctgaatcatacaaaatcaggactaaaaaggctgctcatgatcctctggtgaaactcgctcatcttgtagatgacaaaggaaattctgtgtgtaaacatattggctagcggccgccaccgcggaggagctccaattcgccctatggtgagtcgtattacgcgcgctcactggccgtggatttacaacgtcttgactgggaaaaccctggcgttacc

SEQ ID NO: 46143 - DNA, 544 bp, Homo sapiens
aagggaacaaaagctgggtaccgggccccccctcgagagtacttctagaattaattaaggcgggcgcctgtagtcccagctacttgggaggctgaggcaggagaatggcgtgaacccgggaggcggagcttgcagtgagccgagatcccgccactgcactccagcccgggctacagtgcgagactccgtctcaaaaaacaaacaaacaaagtgcgcagcagtgtctggaacgcagtcagggatcaataagtgttagcaattatttccctggttaaccaaaagctgcctatagtttggtatggctgacacatgggaggtaggctagtggtggtgggaaaggctggaactgcggggtgactaggtaagcagtgaccagatcaggactttgcatgtcattaccaagaggatggactttaatcctcctggtcacaatttctgaagccattcctaatgggagacaagtgtgatcttctatctacaggagtgaggctatggcccaagaagccctccaaaaacataacattgttttatttcctgtttaact

SEQ ID NO: 46144 - DNA, 478 bp, Homo sapiens
agggaacaaaagctgggtaccgggccccccctcgagagtacttctagaattaattaaagcgggagccaccgcgcctggccccaaaattccttttttaaaccaatattctagtggcgcactattctccaacaattcccacattaaattgttgcatgacccctgtagtaaaaagcattactcagatctgacaaactcagacacccccagtttttacaaatttagtgacaccccctcaaagctaacagcattatcatataattgggaagagttgttcctaagagagaacatgagttccagagatgtataagaactatctatatgtgtaatctgtactgccagttagccccagaaatgccctggacacaaaatctgtccaagctgaaaacaaaatttgccatctctagcacatcattctgattcaagtggtctttactacaggacttttttcgtgtaacccttagcaagttgtttgaggcta

SEQ ID NO: 46145 - DNA, 474 bp, Homo sapiens
aaagggaacaaaagctgggtaccgggccccccctcgagagtacttctagaattaattaaggcgggcataaccttcctactctctctctctcacacacacacacacacacacacactgtctctctctttcatttccatattataatgcaagttattgaagttcttctctttgtcttttattcccctgctcaaacgtttttaatgattttcagaattttgttgcaagttatagattacacattatcatgtggactaccatttaataattactgtcttgcctcttatgagacagtgaagggtgttcccaagttgtggtagacagggtgtgttcctctttgcttgtgatactaccagtactagttttcattggtcctaaggtgcatattttagcattgccgaaatccagaagtgtcttaaaattgctggtgaccaggtgtcagctgtgacgtattatcattgcctgcacctgtgcaac

SEQ ID NO: 46146 - DNA, 355 bp, Homo sapiens
  misc_feature 269: n = A,T,C or G
ctaaagggaacaaaagctgggtaccgggccccccctcgagagtacttctagaattaattaaggcgggtgaattcacagcaaatgcaaatataaagccacagaactaagggaaattttgactctggactggcagtggggagaagaggacatctaggatactcgtaatgacctttatcttaaaggggtgtaatataaacatttattgagctgcacacataataactgtgcactttggccgggcgcagtgacagagtgagactccgtcgctnaaaaaaaaaaaaaaaaaaaaaaaaaagggggccccccccggggggggcccccaattcccccttttagggggttttttccccccccc

SEQ ID NO: 46147 - DNA, 384 bp, Homo sapiens
gcaaacaaccctactaaagggaacaaaagctgggtaccgggccccccctcgagagtacttctagaattaattaaggcgggggttgcagtgagccgagatggcgccactgtactcaggcctgggcgacagaatgagactctgtcttaaaaaaaaaaaaaaaaaaaaaaaaaaaaaaaaaaaaaaaaaaaaaaaaaaaaagcggggccccccccaggggggaccccaactcccccaaaggggggaggttaacccccccccttagtgtgaatgtaaaaaaaacatttttctcataagcagggatgtaaaactcgggatgctttccgctataactactagaaaccctaattccagctaacttaaacatgaaaacagccgggggggggg

SEQ ID NO: 46148 - DNA, 516 bp, Homo sapiens
  misc_feature 495, 496: n = A,T,C or G
ctaaagggaacaaaagctgggtaccgggccccccctcgagagtacttctagaattaattaaggcggggatggggtgtagatagataccaatcagttactttatcagacttcacatacagtaattttcttttgcagacaggctctatacctacacgtcaagcacgtaaaactgataaaagacaacgagaggccaggcgcagtggctcacgacagtaatcccagtactttgagaggccaaggtgggtggatcacttgaggtcaggagttcgagaccagcctggtcaacatgatgaaaccccatctttactaaaagtacaaaaattagctgggtgtgttgacgtgcacctctaatcccagctactcgggaggctgagacaggagaatcgcttgaacctgggggacagaggttgcagtgaggcaagattgtgccactgcactccagcctgggcaacagagcaagactccgtctcaaaaaaaaaaaaaaaaaaaaaaaannggggcgccccccccgggggg

SEQ ID NO: 46149 - DNA, 440 bp, Homo sapiens
gcgcgcaattaaccctcactaaagggaacaaaagctgggtaccgggccccccctcgagagtacttctagaattaattaaggcgggtgaatcacttgagcccaggagtaagagataacttctgatccaatagaaagctctagagcacacagagcaaatatacttcatcagtcgagctgtagtttctctgtaaaaaaacttcgaacgacttccaaagttcaaaaaaaaaatgtaaagacaacagcatgattgctaaagattcatgtggtcaaagactggaagaatgacacagtggaggtgttccctcaggggaattgtgggtgatttctcttaaaaaaaaaatgcctcttattgtgatacccaatcaagtaaaatcatgagaggagaaaaaaaaaaaaaaaattttacaaaaataaagaaataataaatttaaaaaaaaatt

SEQ ID NO: 46150 - DNA, 502 bp, Homo sapiens
cctactaaagggaacaaaagctgggtaccgggccccccctcgagagtacttctagaattaattaaggcgggagtaaagcaaaaaacagtatcatgagaaagcagccagtcaaataaagaatatgggatattttatgggatataggttctggattcattaacaaataaatagtataaaaaaagcagcaaagagaggactaataatagaattttttaaatttgagagacaaaacagcaaaatgcaatgcactgaccttgctgagatcctgattcaagcaaaccaagcctgtgatattttcttagaaatctgaataggaattgtaaatgataataagaaattcttaatttgttaagcataaaggtagtttttaaaaaagaccttctcagctaaaagtgatgcatgccgaagtatttaatgatgagattacatgacttctaaacttgcttcttaatattccagcaagaaaaaatgtggatggatgggtgaaggttaatagaggaat

SEQ ID NO: 46151 - DNA, 465 bp, Homo sapiens
taaagggaacaaaagctgggtaccgggccccccctcgagagtacttctagaattaattaatgggtaaggacctataaggtgtacaattttaaaatttttcttcaagatcccttgtgaatttttaagttttattctcaatgatgcccagaagaataacttaccaaatattttttatcaaagatcattactgctgtgaatctgacctagctggaacaaacatatagtatagaaaagttttgatttctatattgctattaacataaaatcatgtgtgcacacaactcacaggaaggaggttgaaaggggttaaatattttgagagctgatttatcttctttccgaaaggactgcttagaaaccaaggttttctaagaatatgtcttcagaagtatgccctacagctaaagtctgaaatatataaacaactcagacaactcagttgaagaaacttgattctcacacagt

SEQ ID NO: 46152 - DNA, 460 bp, Homo sapiens
  misc_feature 379, 380, 382, 383: n = A,T,C or G
ggaacaaaagctgggtaccgggccccccctcgagagtacttctagaattaattaaggcgggggagatgtgtgttctctgtactgtttttctttttaatacatttgtataagcttgaaaggatttcaaaataagtggtttttaagtatgtgcagtataatcattcctttaaaacaacacattttgtagaaataaacggaaaagctatatataaaaatatttgtaatgcttatctctgagtgtagtgattataagatacaggtaatttaaatttttgtttttaaaattgtgtacattcattatacactgagtataaatattaaaatatcactttattcttaagctaatttgtaacctatattagctaataggggaaccgannannaaaaaaaaaaaaaaaaaaaaaggggccccccccggggggggaccccatttccccctaaaggggggttaaaacccccc

SEQ ID NO: 46153 - DNA, 494 bp, Homo sapiens
  misc_feature 393, 394: n = A,T,C or G
accctcactaaagggaacaaaagctgggtaccgggccccccctcgagagtacttctagaattaattaaggcgggaaatgcagaccttaaaaatggaggcatcattatgaatgacctccaggctgtgtgcaaaagaaacattgtccataaatgtctgggacattgttcttattaaaatcaaccccaaacatatacatattgccatctgttaagttcctattttgagagaataattctgtttaggactgaactcaaaaaacataccaatgtatcttgctatcctagcctcccatactattacttaattgcaataaaattgtaccgtcttaaatagaaaataaccaagaaatactaatgttgattcaatattgtctgactctcaggaaatgcaatnnaaaaaaaaaaaaaaaaaaaaaaaaagggggcccccccccgggggggacccccatccccccttttgggggggtttttaccccccccctttgggcggttttt

SEQ ID NO: 46154 - DNA, 371 bp, Homo sapiens
  misc_feature 52: n = A,T,C or G
agctgggttccggtcccccccttgagagtacttctagagtgaataaatagtntcaaataaaaaatatataatgtcttaaaatctgatccatgttaatttaaaaataattttaggtgaaaaagcagtatcaaatttcaacttctctaaaatcagcatgaagtaccaattacctaatacaaagttggaacaagacataggcaatattttcagaaaattacacataattcaaagtaaaggcatagaaaattacattttaatatttttcaatttatttgtcatataaatattacgtgagtatgatggtgtttgctcctctttccctcctctttctgtttcaacatttacaaagagtaaatttcattcttgctttc

SEQ ID NO: 46155 - DNA, 485 bp, Homo sapiens
ctaaagggaacaaaagctgggtaccgggccccccctcgagagtacttctagaattaattaaggcggggaagcagaaggggagggtgactgtctccaatgcttttattgcagcctccaggtggaatagtgaagtggccaccttaactgcctcctggagtgtgagcagagaggaccaggacaaggctgcaatctgttggccaggcaccaactagcctgtgaggccaaccagggaccgcaggcatcaccaggaacaaggctataaaaaggcctcaaagagtgattacaaaattccacaccaggagaaagactcccagaagtttcccagggctcatacctgctgtgctcattaaagccacagtgttggctgggcgcaggtggctcatgcctgtaatcccagcactttgggaggctgagacaggcggatcatctgaagtcaggagttaaagaccagcctggccaacatggcaaaaccccatctctaccaa

SEQ ID NO: 46156 - DNA, 477 bp, Homo sapiens
taactaaagggaacaaaagctgggtaccgggccccccctcgagagtacttctagaattaattaactgaaaaatagaaaacataatctatataaacaggctgttatgaagctaagcatccaaatcaaaggaatgataaagtaagcaacgaaacagtcactgaacagaaatatctacccaataaaaatgacatggacggctgggcacagtggctcactcctgtaatcccagcactttgggaggccaaggcgggtggatcacctgaggtcaggagttcgagaccagcctgaccaacgtggagaaaccccgtctctactaaaaacacaaaattagccgggcgtggtggtgagcgcctgtaatgccagctacccaggaggctgaggcaggagaatcacttgaacccgggaggcagaggttgcagtgagccgagatcgcgccattgccctccagcctgggcaacaagagtgaaactccgtctc

SEQ ID NO: 46157 - DNA, 488 bp, Homo sapiens
accctcactaaagggaacaaaagctgggtaccgggccccccctcgagagtacttctagaattaattaaggcgggccttctaattggttgacaaagtaataatattaccaatcttctttctagtctaaagatataaaacaaataattgtagatattttatccttttggaatataaaagacagatatagacattataaatcccactcaagtttagaattaacaaatatttcattttgcattttttaggttgcttttgaatactttcgagttcaatgaggatattcatcccttgcttaccacataccacccacctcacaaaggttttcaaaagaaatccagttcaggtgaatgataattgatgtgggaattatcataatcgaaatatcagaaagcagccacacaatatcttatattgccaaacaagataactgtgactaaaagtggaagttctctatttttaaaagtttttaatattataatactaaaact

SEQ ID NO: 46158 - DNA, 357 bp, Homo sapiens
  misc_feature 263: n = A,T,C or G
aaagggacaaaagctgggtaccgggccccccctcgagagtacttctagaattaattaaggcgggacatatttgcacctgcaagtcttttgtaccacgtaacttgggtgtaatgtaaacaaaacaagataatttgaagccaacccccataaaaaaaaaaaaaaaaaaaaaaaaacggggggcccacccggggggggactcaaaattcccttaaagggagtgtttttaccccccccttttgggaggtttttaaaaaaaggatcanatcacttaagcctgagaggttgaggctgcagtaagctataattgcaccagtacactccagcctgggcaatgcagtgagactccatctctaaaag

SEQ ID NO: 46159 - DNA, 442 bp, Homo sapiens
taaagggaacaaaagctgggtaccgggccccccctcgagagtacttctagaattaattaaggcgggagctgaatatcatgagtcctaaaaattccagattcactattcacgatcccagagctgtaataaaatatctcacatgattcatcatataaatatcgctattgtaactcttctgtaggaccttttctaactattccagcagaagcctcttcttccttctttaaacccctgtaagatcatatataattacaggcattattaatattttggttttatatcacttaaaaaattggccattcaccaatatactcaaatatatttagatggccacttgttagtattattactattaatagtttctagactgtgataaagagaaattttctggctacttctgatagttccacataaagaaaacagatatgttttcttctgctct

SEQ ID NO: 46160 - DNA, 428 bp, Homo sapiens
ctaaagggaacaaaagctgggtaccgggccccccctcgagagtacttctagaattaatgaaggcgggggggttgtactattgtgaggagacacttaacttatggaagcttcattttgttttcagtaaatggagcagcaacaccattcttgtagcattactctgaggatagacatcagttaatgtatgtaaggtgccgggctcaaagctagtgcatagtacacagtcatcccttttctccctcccgcatcaatcttccttctcttctttcttccaggtttttttcttttaatttatttttagagacaaggtctcactccagcctgggcaacaagagcgaaactccgtcttaaaaaaaccaaaacctaaaaaaaataagaaaaaaaaaaaaaaggggcgccccccccggggggggccccaatcccccctt

SEQ ID NO: 46161 - DNA, 492 bp, Homo sapiens
ctaaagggaacaaaagctgggtaccgggccccccctcgagagtacttctagaattaattaaggcggggggaaccacttccaacaggtggcactaatcattcagggttttcgaaagttctctgtgtagttggatttcaagctcctgaattaatctgatagaactttctcatctggttgtaagaagtgcggttaatggggatatcttgactgtagaatcagtcctaaaacaccacatatacttctgacagtaggtaaatgttaccttgcgcagaattgcctggccttggtggtagttagtataaattagtctgaattaacttgggcatctgtgaactttactatagcataaattaatgaaggcctatgtgaaattttgcaattattttctatattcacctaaaatggcattgcactggaaatatagtatgcttcttttgtgatttctacatatctctgtttttttctcatatcagattctactttacccctcag

SEQ ID NO: 46162 - DNA, 484 bp, Homo sapiens
ctaaagggaacaaaagctgggtaccgggccccccctcgagagtacttctagaattaattaaggcgggaatgagccaagcccactcaccaagggaagactacaagaccaattaaaagcattccctttcctctccacatccaaattgggatctaaaagctatgattagtcttgattacttaatattttaaagggagagggacaaaataaatgtaaatctataaatagttccacgtgtagctgattatctgcaaagaccttgccatcaacttactattgcttttgcattttgtggattcaattccaatcagaattgttatcctctcaaacttgcattgtgttgccttgcttggttcaagagacaggagaaacccaaaatactaaaatatcacttatgttatattagcctggaaacctccacacagggttaaacacatcaaaacttaaatatacttttccaatgttaatcttattataggtctgaaat

SEQ ID NO: 46163 - DNA, 422 bp, Homo sapiens
taaagggaacaaaagctgggtaccgggccccccctcgagagtacttctagaattaattaaggcggggggaacaggaaaaagaggtagattctaaaggtgtttgagatgctctatcacaataaaaacattttttgtttcttgaaattatgcctataacttacctgaaatcatccatactatccttttccttgtaattaatcataaatttatctgaaaaagtcctacctatattaagaagattgaaactagagcaaaggaaaagtctattttcttactctgttaaaacacaaagcaggccaggcatggtggctcacgcctataatcccagcactttgggaggctgaggtgggtggatcaggaggtcaggagtttaagaccaggctggccaagatggtgaaaccccgtctctactaataatacaa

SEQ ID NO: 46164 - DNA, 475 bp, Homo sapiens
caaagctgggtaccgggccccccctcgagagtacttctagaattaattaaggcgggtggcacaatcactgaaccatataaacatagagaaaacagaagagaaagcagagagcagttgctttagatgtcaggcacacacaggctcaaatcccagataaagtcattctggcacaggcatttagtttcaatttgaaatagatgttcagagaaatattcagccttgccacatcaatatttgtagtgacagagctcagggaactaacaggaaaaaagtgtggttttttaaaatttgattttttgtattgtgggtttgattgccactaatagccagcagatggtatagacatattagggagagaaaattctcataggttttgggccaaaataatcacttatactttaaattgcatcataactttgagaacagcaaaattcttttcgatgaaatttttcaataataaaaataattttaaagg

SEQ ID NO: 46165 - DNA, 338 bp, Homo sapiens
ccctactaaagggaacaaaagctgggtaccgggccccccctcgagagtacttctagaattaattaaggcgggttattaaagaggaaatttgagccagctgattacaaacacataatcaaagcttctgagcagtcacaaaatgagataaaggtttcagtgttttcacgaaaaactgatatactaattcctgtgagtaaatgagatcttcaagaaagagaatgtaaaaattgaagaacttaggacatgttgttcaatcttagggaatagacaaaaaaaaaaaaaagcggccgcccccgggggggacctccaattccccctatagggagtcgttttacccc

SEQ ID NO: 46166 - DNA, 542 bp, Homo sapiens
agcgcgcaattaaccctcactaaagggaacaaaagctgggtaccgggccccccctcgagagtacttctagaattaattaaggcggggtaaatgatgaagattaaaaatatagtcctttccttcaaagattttaagcattaagcctagaagagaaaatgaagtaggatacaaacaactacagtacaatgcaatatataataaatgtcatgagatagaaaatattcttaagttttgaggagagactgaacatgagtaggggaaaataaggaaaaaaataaatatgcaaaatttgaatttggccttgaagtattccagctgacagaatgtagtaaaaatacaggtgaggaaaaatcactaatcatagtatgcctgaaaaaataagcggccgccaccgcggtggagctccaattcgccctatagtgagtcgtattacgcgcgctcactggccgtcgttttacaacgtcgtgactgggaaaaccctggcgttacccaacttaatcgccttgcagcacattccccttttcgcagctggcgtaatagcg

SEQ ID NO: 46167 - DNA, 370 bp, Homo sapiens
agcgcgcaattaaccctcactaaagggaacaaaagctgggtaccgggccccccctcgagagtacttctagaattaattaaggcggggaaaggaatagtgtgtagcatcgtcttagtggtaagacttaagttgatttagtagcaaatggaagtactagtgaaccacatagatttcagaagtaggagtaaaaggttagaagatgtgtcattttaatcttctctagactttttcttaatttttagaaatgtaagtggactgaacagaggaaaaccaaaacacagctggtcaataataagttaaattaatttgacaaactgcctgctatgcatttcatagcattttaaggactatataagcaatggaaaaaaaa

SEQ ID NO: 46168 - DNA, 512 bp, Homo sapiens
  misc_feature 422, 423, 427, 429, 430, 431: n = A,T,C or G
ctaaagggaacaaaagctgggtaccgggccccccctcgagagtacttctagaattaattaaggcgggggaagtaaaataaccaattgtttcatttgcatgtaacagataggaagaataattaagaaaaacaaacaaacaaaaaacacctgtttgcctagtgtcagttgcacccagataagtttatttttctttcagcatcagaaaagctagatctttttattaaaatccatttatctctagctgagatgcatcagtgattctgttaaataaaatttagtgttaatactgttatttgagagacattttagtttgattataaagagatagattcaaatagaactaaaaatggttttggtaaaaaaggaacaggttaattttttcccttctcatttgaccattattttagctattaagtaaagtnnaccnannnaaaaaaaaaaaagaaaaaaaaaaggggccccccccggggggggacccaaattcccccttaaagggggtttttaaacccccc

SEQ ID NO: 46169 - DNA, 479 bp, Homo sapiens
ctcactaaagggaacaaaagctgggtaccgggccccccctcgagagtacttctagaattaattaaggcgggggtaggcaagagtctgtgtatagtggagagctctgaatccccatctcccacaggaagtcagttaataatatctaatatcactgaatcaagagaaaatagaacaagcatttatgtagaaaaataaaaaagatgtccagaatgaagggcgaggtggctgcctctggggtaatagaccccgaggatgggagataggaggacaggaggtcactgctcttttcttagatccttgttagctccatttagtgtttttctcctttacttttgtgttttttgtctgtttttgctttgatagacgaaaaaaatagtttcaaaaattcaatgaagaaaataacatcataaactcaaaataggggcaagcctagtcttaaaactgacttggggcagggcacagtagctcatgtctgtaat

SEQ ID NO: 46170 - DNA, 395 bp, Homo sapiens
attaaccctactaaagggaacaaaagctgggtaccgggccccccctcgagagtacttctagaattaattaaggcgggggaagggtagagttataaggccgaccatgggagggatatatacgtaaccgattttgcacgtcataaaatgcttcccactggtgacatctaagctgagacctgaaaggtgagtaggatttggtcaggtgaagaaagagggaaggttgtgacatgtttatggaattgaaaatagttcaggccgggtgtggtagctcatgcctgtaatcccagtactttgagagaccgcagcagtaggatcacttgagcccagaagtttgaggctgcagtaagctgtgatgcaccactgcactttagcctgggtgacagtgagaccttgtc

SEQ ID NO: 46171 - DNA, 492 bp, Homo sapiens
taaagggaacaaaagctgggtaccgggccccccctcgagagtacttctagaattaattaaggcgggatgtgaagaagcccgaggtaggcagagcatatggtacaggacttacagatcaatgtaaaagaaattcagaccttcaacttgttgcaatgggatatcactgcagggttttaaagcagaggaatgacatttgtttatgctacagaaagatcaccttagaaaatgatggtctgaggtcaggagttcgagaccaccctggccaacatggtaaaaccctgtctccaccaaaaatacaaaaattagctggacgtggtggcgcgtgcctgcaatcccagctacttgggaggctgaggagagagaatcactttgacctgggaggaagaggttgcagtgagctgagatcacgccaccgcactccagactggacgacaaagcgaaattccatctcaaaaaaattaaattaaattaaattaatttaaaataaataaa

SEQ ID NO: 46172 - DNA, 489 bp, Homo sapiens
ctactaaagggaacaaaagctgggtaccgggccccccctcgagagtacttctagaattaattaaggggggaaaaagccttgctataaactgtattacaggaatactttcattatgtaaaaacctattttgttttcatgtcattcttagattacatcatagagtggctgcagccatctcacactatattataaataaatcactggcttaatcatagaatgagccagggcctcagatttaaaaggaaaacattagatcatttttaataactgatataactcaaaccagttggcattgaaccacggtgaggtgatctcatcctgaagaagtccaaaaaggacccaaagcaggtcagagctgagcaggtcccagagacacttccatttacagatgaagaggttgctaatggcacctgagtagaattcacccctggactagtcttgccattaaaatcaacacttactttccagtagtgatgcccaataagcctt

SEQ ID NO: 46173 - DNA, 365 bp, Homo sapiens
  misc_feature 271, 272, 299: n = A,T,C or G
ctaaagggaacaaaagctgggtaccgggccccccctcgagagtacttctagaattaattaaggcgggggaactgagaggaatctctggagtcacttattggaattgcctattcccactgagaaagccgcgtgagaattttccaggggacacaaatatgaggagtcagtttaagatctgattccctgattcctggtcctatttctttgcatcaataatgtgccctcactcctgatacagtggagagcaaagtaaaaacagctaaactattcnnaaaaaaaaaaaaaaaaaaaaaaaaaangggggcccccccccggggggggcccccaatccccctttaagggggttttttcccccccccccctgg

SEQ ID NO: 46174 - DNA, 490 bp, Homo sapiens
  misc_feature 446, 448: n = A,T,C or G
actaaagggaacaaaagctgggtaccgggccccccctcgagagtacttctagaattaattaaggcgggaacggtggaggaaacccacatattcagataaagcacaaaattgtcaagaaagtagagaatcagacttagtaaaatatggtaacagttcaagggatagatatgctacaacagatactgcaaaaaatagcaataatgaaaaatttattggtgatgaaaaagataagagacctgggtctttagaaacgtgtagaagagaatctaacccaaggcaaaatcaagagttttcttttggcaatttgagagctaaattcttgagaccctctgatgatgaagaactgtcatttcacagcaagggcagaaaatttgaaccacttagttcatcttcagcattggtagctcagggctctttgtgtagtggttttagaaaacccacaaaananaaaaaaaaaaaaaaaaaaaaaaaaggggccccccccgggggg

SEQ ID NO: 46175 - DNA, 624 bp, Homo sapiens
taaagggaacaaaagctgggtaccgggccccccctcgagagtacttctagaattaattaaggcggggttgactaaatctattagttagtgattaacaatttaactagggatgaggagctgatagtaaactctattcttaactagcctgtaaactcttaggagcattaactcaaatccaggagattctctttgcaaaataggattgtggtggctatagatgctaatagcaaacctaaagaagagtgatgattattccattgtgtagtagcaaaacgaagtagcccagctagttatgggaaatatataattgaaaagcccattattaagttcacctactgagggagtttactgtcagttattgcaatcataatcccagtgattgcaaaggttaatgtgccttgcatgactctggcagacagcatggccccaattttgtattatgtgtagtcatagcctgactttctgattacattctacacccagtctctcatctgacctctttagcaatttaatcctagtcttctaagtctttgtttacattaaatgactaatgtggattgctcacaaaagtatcttaggaaacagtctaccgctcattaaaataatactgtcatggcttattcg

SEQ ID NO: 46176 - DNA, 386 bp, Homo sapiens
accctcactaaagggaacaaaagctgggtaccgggccccccctcgagagtacttctagaattaattaaggcgggggtgggattcataagaatataaaagatcattgtttccccactgattatacttcctgtgtttcattttcagttgtccaataataacatacaaaaaaggaagaatttgagagtttctcagattaggcaattccttgaagaatctgagaacacagaagctcccctccctactttccatgattgaaatcggtgattcattggtttctttgtgtgggcttttgaaagatcattataaaccaacctgaagatcatgagattcttgtggacacaggagcaatgagtggcaatacagtgctttctaatccaacctacttt

SEQ ID NO: 46177 - DNA, 511 bp, Homo sapiens
cctactaaagggaacaaaagctgggtaccgggccccccctcgagagtacttctagaattaattaaggcggggagagagcacattataaaccactgagaaatacacctttctctattacctgtcgtcttaatcacatagcttcagctgttccttagtaaagataaaactactgaaccttcatggtggagatgaaatgttttatgttctaccttgaattagggaagaactgaataaattaagtatctttccagcttggaatcactgcctccatattacattgttagaaatatatttagtagttagattaaaccttattatattctcaggcaaaaaaaaagtttgttggtaaggaagaaagaaatgtcagcctcattatttcaactaaaagatctagacaattacaggttatgaaactgattcacctaaaggtagaagaatttttaatgtttacttgggagaaaatagtctatcataaaaagaacttgtctcttttgtctgtcagaaaacacca

SEQ ID NO: 46178 - DNA, 480 bp, Homo sapiens
ctaaagggaacaaaagctgggtaccgggccccccctcgagagtacttctagaattaattaaggcgggaatgagccaagcccactcaccaagggaagactacgagaccaattaaaagcattccctttcctctccacatccaaattgggatctaaaagctatgattagtcttgattacttaatattttaaagggagagggacaaaataaatgtaaatctataaatagttccacgtgtagctgattatctgcaaagaccttgccatcaacttactattgcttttgcattttgtggattcaattccaatcagaattgttatcctctcaaacttgcattgtgttgccttgcttggttcaagagacaggagaaacccaaaatactaaaatatcacttatgttatattagcctggaaacctccacacagggttaaacacatcaaaacttaaatatacttttccaatgttaatcttattataggtctg

SEQ ID NO: 46179 - DNA, 494 bp, Homo sapiens
  misc_feature 419, 422: n = A,T,C or G
taaccctactaaagggaacaaaagctgggtaccgggccccccctcgagagtacttctagaattaattaaggcgggtggatcatgacgtcacgagttcgagaccagcctggccaacatagtgaaaccccatctctgctaaagatataaaaaattagcccggcgtggtggtgcacgcctgtaatcccagctactcgggaggctgaggcaggagaattgcttcaacctgggaggtggaggctgtagtgagccgaaatcgcaccactgcgttccagcctgagcgacagggcaagactcattctcagagtaagtgaggttaatactattgtgccttcaaatatggcgcccccccccctgggagcaccacgtgatggcaatataacatgtttttcctcccgatctgctgcgccttttttagattnctnaaactcctatttttatatcaaattctactttggttgctggcatgactttaagctggcagggcaaagggcttt

SEQ ID NO: 46180 - DNA, 415 bp, Homo sapiens
  misc_feature 378: n = A,T,C or G
tgactgcctgcgcgcaattaaccctcactaaagggaacaaaagctgggtaccgggccccccctcgagagtacttctagaattaattaaggcgggggacgcagggcattcgtagaacaggggaatttgacctagttcaggcggaagctgaggaaggcttcctgaggaagaaacagttgagagctctctgcgtggtgaatatgcaaccatgaccaaacgaacctctcagctccttccctgtcaaagagcacccactcctagaggtcgtatgatatcatatgagacaatctgtgtaaagcatttgatactgagtagatggatagtaaacactcaatatttgttggctattctgatgtgaattttcatttatttcagcaatnatttatttatttatttatttatttatttatttttgag

SEQ ID NO: 46181 - DNA, 459 bp, Homo sapiens
taaagggaacaaaagctgggtaccgggccccccctcgagagtacttctagaattaattaaggcgggggaagtggaccctctgctcagggcaacggaactatcaaggagggtgagaagagacgtgcccctccatccttagttaaatgagtctggggtgccaagaattttcatgcatgtttattaatctcaataacaatcctgtttttttgccctcaaaatgtgttcaagatatttgtagatgtcatcttcttaatccttgtagtatcctgtttgagtaagtgtcatctgggaagttaagtaagttgtcaagggtcagctcactaggaagtggtgataccagaatatgaaccagtttcccgaagcccagagcctgaagccatgcgaaagccagcagggtgactcctccggctgcaggcgagtgggctgtgtttcacccggtttctccttttctaggttacg

SEQ ID NO: 46182 - DNA, 466 bp, Homo sapiens
aaaagctgggtaccgggccccccctcgagagtacttctagaattaattaaagcggggtagtggaacaagggattaacttcttttctccatttctgtggtttctgtgttacttctagagaaaacaacattttagaatatgcatgtaggcaccgtgcaagagacggtgtcccaccactactgggctggaagggtctggctgcgcatcccacacactgctcctgaatgcagcgattctggcctagcaggatccctgcagcatcccttcactgcagggccaaggctcctcctctcaccctaaaaaataaaaaatataaaaattaataatagcggccgccaccgcggtggagctccaattcgccctatagtgagtcgtattacgcgcgctcactggccgtcgttttacaacgtcgtgactgggaaaaccctggcgttacccaacttaattgccttgcagcacatccccctt

SEQ ID NO: 46183 - DNA, 497 bp, Homo sapiens
accctactaaagggaacaaaagctgggtaccgggccccccctcgagagtacttctagaattaattaaggtgggcggcttatgaggaccgtaaataaatactattctggctcacatggtgaagccaacccatctactgagagacaaatctttacaatctatgcgttcaagggcgaacgaaaatccagattctgcggatgcctcagacagatagtgggatgaacatccggatgcagagcgggctaaggacatgtatagaccattttcactagaagatgtgcaactggccaacactcctattgtgaaatgctcaacatcactaattatcagggaagtggaaatcaaaaccacaatgccataccagctcactcctgcaagaatggccataatcaaaaaatcaaaaaataatagatgatggcatggatgcgatgaaaagggaaccattttaaactgttgttggtaatataaactagtataacaactatggaaaaacagtgtg

SEQ ID NO: 46184 - DNA, 511 bp, Homo sapiens
aaagggaacaaaagctgggtaccgggccccccctcgagagtacttctagaattaattaaggcgggacaagtgacatatctacatataaaagaataaagaaaagttggggtagggaaggactatggataaaaagcaatgcagacactactgaaaagaaagttcctgtatctattgataccagacagaataaattttgaggcaaaaagcatgagtacattatatgccctcaaaatatataaggaaattttatagagaacaacatggaaactagataaatctgtacttatattcttctctttgaaattgagggagaaaaggacaaaaatcagtaaatacatatcaaaatagaacttctctactaagaaatgtgtgttaatggacaaatatagaactttatacccaacaactatagaatataccttcttatctaatacatatggtatatttataaaaattgctcatatgctgtgccgtaaagtaagtttcaacgaattttaaattattaaaatta

SEQ ID NO: 46185 - DNA, 422 bp, Homo sapiens
aagctgggtaccgggccccccctcgagagtacttctagaattaattaaggtatacacaagtcattcagggtaaaaggtccctgatgaagatcttctgtctttctgcaaaggagtgggagtcaagcaagatgacttacctttctgaaagtgatctgatttaaaataacagcaaaacctgggactctcaaatactaaaagtgtcaggatcatgccaaaggaacaaaggagatggcctctgttctcccttagcatctccagctggtaatgtttggggtgatttgcctttcaaatcataaaagcctaaaattagtatttatacgtgtgtaagtcaaaagtgtaatattttatatttctgtaatccataagatgtggataattgcgttaatttagaatcttgaaataaatatgatgaataatttaaa

SEQ ID NO: 46186 - DNA, 440 bp, Homo sapiens
ctaaagggaacaaaagctgggtaccgggccccccctcgagagtacttctagaattaattaagggggcgccaccgtggtggagctccaattcgccctatagtgagtcgtattacgcgcgctcactggccgtatgtatacaacaaatagcttgtggaaaggtagtataactagaagtatgtgaatcaatgtattactcttatatgaaagtaaaggcacggttgtccaatgaaccactagtttcccactgatccatcgtagtctggtaattagtgcatgttatggagcattaattagaaaaggtctacatcatatattatccatttatagaggcaacaacattggccctttactggttctgaattgtgagaggcctttgttttgacacttgataacagctcattctgatatgaagtcacttgatcactacaaagttggtgagc

SEQ ID NO: 46187 - DNA, 488 bp, Homo sapiens
agggaacaaaagctgggtaccgggccccccctcgagagtacttctagaattaattaaggcgggcattatattaaaatataatatagaaaatggtcactgcaaatgatcatattgcattatgatcacaatactgtttttcatggcatttgtcattaaaaattaactgccctccacaacagaagaaaacttaatctcctcctccttccctgtatatctatctgtatctatctagacagacctacctacctatcttccatctgtccgtccacccatccatccatccaacaattgagacagggtcttgttctgtcatccaggctggagtgcagtggcagtcatagctcactgcagtctccaactcctgagctcaagcgatcctcccaccttagcttgtggaactacagaaaggcacacagccaccatgcctggctaattaaaaacaattttttttttgtagagacggggcctttctatgtttcccatgctgg

SEQ ID NO: 46188 - DNA, 500 bp, Homo sapiens
gcgcgcaattaaccctcactaaagggaacaaaagctgggtaccgggccccccctcgagagtacttctagaattaattaaggcgggaagtgtgagccaccgtgcctggccagaaccacttcttattaacccccaaagtggcaacggctcccagttttccatcgctcacacttcccgcatattcggactcccacctttgtcatggtgctaaatgttccatgtgcttttggagctatatccggacggttcgttcggccactctcagtctgttcacaggcagttccattgggtcagaatcagtgtcacttcctggtccttttacatgtctggctgatgtaggatctcctctttatccttctctctcagggttttcttggttatttgcatgtatttgttttttcttttttctttctttttaaatttagtagagagaggactggaggcagtggctcgtgcctataatctcagcactttgggaggctagggcaggtggatcagttga

SEQ ID NO: 46189 - DNA, 414 bp, Homo sapiens
ctaaagggaacaaaagctgggtaccgggccccccctcgagagtacttctagaattaattaaggcgggaaaggtaagggatcaaaattatgaaatgccatttattcagcattaagaaatttggactttagtctacaggcaatgagaaacagcaatatcaaatacaaaaattagccaggaatggtggcatatgcctgtaatccctgctcgttgggaggctgaggcacgagaattgcttgaatccaggaggcagaggttgcagtgagccaagatttgcagagcaaaactctgtctcaaaaaaaaaagaaggaaaaaaatttttgtgggctagagattattactatcctcatgtgacatttataaagaaacaggagtggtcaggcacactggctatttttttttctttggtattttta

SEQ ID NO: 46190 - DNA, 424 bp, Homo sapiens
taaagggaacaaaagctgggtaccgggccccccctcgagagtacttctagaattaattaaggcgggtctgggaggttggcaagcctatcccctgtgtactgaggcccaaagttaatacaagatcagacagacaaataacaaaaatagatgagtctggctagaagagagttggttttttattgttgtttgacagggggtgggatagcaagaagcgtgggggaatgaagtatgcagcaggctgtagtgtaggtctcaaattttagacattgataatagcatgtacagacgcaggaagaacgccattttgaatgaattaggaggcaattcgatttgggttaatttttgtgtgctttgatttctttaatgtgtaaactactttcgaaaaaccataaacaacttggtatagtggagttctatagaaatt

SEQ ID NO: 46191 - DNA, 518 bp, Homo sapiens
accctcactaaagggaacaaaagctgggtaccgggccccccctcgagagtacttctagaattaattaaggcggggggcaggggcagagagtagtataaggaaaaagaaattagtgattcctaattgtcttaatggatggctatcataaagctactattattaatgcaacaaattattttaaaacttaaaacacttatttcaaagtcaatgatgggacaaacaggtgtaaaattacctagagcaaaaattcatccttctcatcatgtaattaacattcttggtgcttatgatgatttcaatcttcgtctactgtctttaaatgtggaaatatttatgcaagaaagccctgaaaggctgggtgcggtggctcacacctgtaatcctatcacttagggaggccaaggccagcacatcccctgaggtcaggagttcgagaccagcctggccaacatggggaaaccccatctctactaaaaatacaaaaattagctgggaatggtggtgcgtgactgtaatcc

SEQ ID NO: 46192 - DNA, 400 bp, Homo sapiens
ctggccgtcgttttacacacaggaaacagcgtatgaccatgatgtactggcgcgtccctttctatacaggacacgaatatgaccttaatgccggacagtcgcttgaatctgggaagcaaaaggtgtagtgagccaaaattgctccgttgcactagcctgggtgacagactgaaactcggtctgaaaaaaagaaaaaagaggaacgttcaaaatagagggtagagaatgtgagaatatgcacccatttgtgttttttaaacaattgcatacaataaacgggcttacagacgaagaaagtttctgggaagagacccaagaagcccccagaaggtagggggataagctgaagaattgttaaagattttatttatttattttttgagacagtgtctcccaggct

SEQ ID NO: 46193 - DNA, 411 bp, Homo sapiens
taaagggaacaaaagctgggtaccgggccccccctcgagagtacttctagaattaattaaggcggggggaaaaagaaaggaaaatacttgagttgttaacatatgattttttaaaaattaatgatgctcagttataaaaaatccagtggaaaatatcattaatgtattctgaaacagtttgaaaaagccactctgtgaatcaacctacttttggttttagaatttatttacttatttagaaagaaagaaaacagaaagacaggcaccattctctgtatgttattttcctgaaaggtgttaaggcgaaaaaaaaaaaaaaaaaaaaaaaaaaaaaggggcccccccccgggggggaccccaattcccccttatggggagggttatacccccccccctgggccgggtttttaa

SEQ ID NO: 46194 - DNA, 451 bp, Homo sapiens
actaaagggaacaaaagctgggtaccgggccccccctcgagagtacttctagaattaattaaggcgggggaggataaagctcagaacagtaaatactattttaaacattagaggacaggaaactctgtgttggtaggagcataactggcacaggacttaaggggaattgaaacaagaggtcagaaaaccgaagatagtctattgctgtagttcaatgaacactgttactaaaggaaagctatgaagtttattaagatactgaaaaaaaaggaaagcagtctttacctgaaaatgaaaacccactagcaaaggaaatctttccagggtaacttttcccaagctttctgaaatactgtttgaaagaacaaacaaaaaaatttttaaaaagtaaacaggccaggtacagtggctcacacctgtaatcctagcactttgggaggttgaggcagga

SEQ ID NO: 46195 - DNA, 480 bp, Homo sapiens
aagggaacaaaagctgggtaccgggccccccctcgagagtacttctagaattaattaaaaaatggggagaaacataatttgagccctttacagtatggttgtatcaaaacacattttattgagagatcaaacttgtaaatgatccaatttgtgattttccatgcctttgagattcaaggctgtaatattgacaatttattctggccaggtggagttgactgcaaaggcgtagggcaaaagcaccattccattatatttgtatgcaaatccaccagcaactattgagggagtgtgtgtgtgtatgtctcagctgaaagactcttgtaagaagtttctttagtgcatttgagggaactgacatctataattcatcaaaacagccatttggaaaatgaataaaacatacccacactacttttgaatcacaggtttcagatctgcttgttagaataaaagttacttattttgaaaagatgtgag

SEQ ID NO: 46196 - DNA, 494 bp, Homo sapiens
ccctcactaaagggaacaaaagctgggtaccgggccccccctcgagagtacttctagaattaattaaggcgggtttacatacagatggcaaacttcatttcctttttctcttaatcaacaaggtcatcccaagatcaggcttccttcagtttctgtggtaagtagtgatggacacttacggagttttcagagacttatgcattgggtaacaaggcactgcaagaaaccccagatagcacagcatcatctcacatttacaccacatcacatcaacatcgatgctaggaggtctaaagctgatgccaccttcagagctgcaagtatccaaaagactccactcatgacaccagctcactcctgagtcacatcagcccctttcagagtcacagccccagaactaaggctatccatatgggttgattatacaatccaaaaagcagctccaaatattagaaacacttatttgtctggcagacacattccctaatttaaag

SEQ ID NO: 46197 - DNA, 459 bp, Homo sapiens
  misc_feature 366, 368, 369, 370, 371, 372, 373, 374, 375, 376, 377, 378,379, 380, 381, 382, 383, 384, 385, 386, 387, 388, 389, 390,391: n = A,T,C or G
accctcactaaagggaacaaaagctgggtaccgggccccccctcgagagtacttctagaattaattaaggcgggactccttagtgccactgatacctgggaagactgttgattattcagtgtttcagtcccacctttgtcttgctttaacaggagcactaatttcctttccttttctcctttcccttgtcacaatgattcttttcatttggtctactcctgtcattttttttacctaccacaaagttagtagtccaccaacatatcctttcccttctcagaatggagtcccgcctgccattttatcttgaggaccttaaaaaattaataactctggttgtctaacctagggactggaagatgaccnannnnnnnnnnnnnnnnnnnnnnnngggccccccccccccggggggggccccaaatcccccctaaagggggggttttaccccccccccctggg

SEQ ID NO: 46198 - DNA, 187 bp, Homo sapiens
accctcactaaagggaacaaaagctgggtaccgggccccccctcgagagtacttctagaattaattaaggcggggggacggggcagacactagaataagagactagcctgtgtcatcatgatgagaccccatttgatggctatcataaagctactattattaatgcgacaaattatctgtaaaactt

SEQ ID NO: 46199 - DNA, 459 bp, Homo sapiens
  misc_feature 302, 318, 319, 323: n = A,T,C or G
accctaactaaagggaacaaaagctgggtaccgggccccccctcgagagtacttctagaattaattaaggcgggcagactgcatgagcccaagagtttgtgactagcctgggtgacatgatgagaccccatttatactaaaaatacaaaaattagctgggcatggtgatgcatgcctgtagtctcagctacttgggaggctgagctgggaggatcacctgagcctgggaggtcgaggctgcagtgagcagatattgcgcctccgctctccaactgaggcaatagagcaagaccctgtctcanaaaaaaaaaaaaaaanngaanaaaccggggggccccccgggggggcccctaattcccccttttatggatgcttttttcccccccctgtgtgctagttgaatgaatgatatccaagcttaaaaactacatgacactgctcactgaggtttttgtttgt

SEQ ID NO: 46200 - DNA, 491 bp, Homo sapiens
  misc_feature 364: n = A,T,C or G
ggaacaaaagctgggtaccgggccccccctcgagagtacttctagaattaattaaggcgggggcagaaagggccacctggccttcgaagaggggtccagggtctccagcttcagaggcggggagatggtgatgactggaaaacgtcccttccctccaacagggcggacgcccacaccagcagaaatgggcgcctttaagtcagaaggcgcagtgtgcctgcctgcaggcaccggggtcctcacatcccactcagccagcctgaacttccactgaaggctgagagctgtggggcctcgagggaacacactatgggggcagagcaaaaagggcttggtcctgagctggaaaaccaaggggaacggnggtgggcccaggctgactcatgcccaacagctcagtgcggacttccagggcaccgcatggcctgagcctcagtttccctgtcagtaccatggagagagggtgcaaatgattggacaagagggtcagt

SEQ ID NO: 46201 - DNA, 487 bp, Homo sapiens
aaagggaacaaaagctgggtaccgggccccccctcgagagtacttctagaattaattaaggcggggaaggcacgggtagacggggtcttgtcatgttgcccagggtggactcaaacctctgggctaaagtgatcctccttgccttggcctcccaaagggctggcattacaggcgtgagccaccgcgggtggccgtgatttattaaaacaacctagtgaacttcccaacttgtagtttatctcaccacatccttctgcttaccactatcagcttagccattcttaaacactcaccaactcaaaaaccaccggtaactcccaatttgccctgttacaaaatctcaccctcctgcccagctttcacaagtctttctaatctggtctctgcaaccaaagaaaggtatttcccacaactccctaacaagcatcaacgctgctctattcaggctcatctcctcagtgtttcctgcacattctaatgattattt

SEQ ID NO: 46202 - DNA, 492 bp, Homo sapiens
ctggccgtgcgtttacaaccctaactaaagggaacaaaagctgggtaccgggccccccctcgagagtacttctagaattaattaaagcggggtaactctaacatccttgactgcagatgcctactgtttttctcaacattggtgaagtctgacataatggtgcctcacaacaaggtgtgtcaaagttagcaaactaattttagtctaaaatttaaatatgaatccatttattcattcaaaaagcataaaaactttctatatgacaagcattatgctaggtgtcaataaaaatgtgaccagttaagtgaaataaattatatgctctctaggaattcccaatctagtggtgcacagagacaagcaaaatactaaaggtcgtataataatgcaatacacatatctttattatggtaaggaagtgtaagaacaggagaatccatcttgaattaagtttcagggataatagtccaggatggggttgaatgggaatat

SEQ ID NO: 46203 - DNA, 506 bp, Homo sapiens
agcgcgcaattaaccctcactaaagggaacaaaagctgggtaccgggccccccctcgagagtacttctagaattaattaaggcgggagaataaagtctacttgtatttgtaaagttgacacaatgttttatgagggaatttaatgttcttttcaggaacatgaggctggacagaaagataatcttacaagaaattatctcagtttttcattttggccttttgttcacaaaagagctagaattcaaaagaaaacaacatttagcctatttatttatttgtttattattttttgagagggagtcttgctctgttgcccaggctggaatgcagtggtgccatctcggctcactgcaacctctgcctcccaggtttaagcgattctcctgcctcagcctcccaagtagctgggactacagttacatgccaccacgcctggctaattttttgtatttttggtagggacagggtttcaccatgttgatcaggcttgtcttgaacacctgacc

SEQ ID NO: 46204 - DNA, 498 bp, Homo sapiens
cgcaattaaccctcactaaagggaacaaaagctgggtaccgggccccccctcgagagtacttctagaattaattaaggcgggaggactataaataaagctaccttggcaatgggcagagcagcagaaggaaaaagaaaagaaggtaggggaatatggaagggagcataagtgaggggaagagaactctctgaaaagctttggctatagaccctgcctcatgcatatttgtactcttaagtaaacataggctaggtaggccagggaaactcaagccttgaagcaattgtaaaactgtaacactttctaatgatatcatgaatacaatctattcatcccaggcctcagagaacaacaagaggaatgagagcaagcaaataactaagaacacagagatacaaggcactctgagtgagaacagcagaactaggcaacagaaagacacctatatagacttcagatggtgggattttcggaaagattgcaacaagaacatgtgt

SEQ ID NO: 46205 - DNA, 462 bp, Homo sapiens
accctcactaaagggaacaaaagctgggtaccgggccccccctcgagagtacttctagaattaattaaggcgggcgcctatagtcccagctacttgggaggctgaggcaggagaatggtgtgaacccgggaggtggagcttgacagtgagccgagatcgcgccactgcactccagcctgggtgacaagagtgagactccttctcaaaaaaataaataaaataaaataaaataaaataaaataaaataaaataaaaatctgggttctatagaaggtattctatctcttttaccagaaaccatgctcttttctcagtcattaactttagctgtgctactctagttacccaagggtttactaccttttaaatttctcttttcttgactctcacaactaaaatttccctttccttggcttccacaactaaactcctgtaaatcttcttgtaactcccaaccactcc

SEQ ID NO: 46206 - DNA, 535 bp, Homo sapiens
aagggaacaaaagctgggtaccgggccccccctcgagagtacttctagaattaattaaggcgggtggggttgctgtcttacctatcccaatctgtttctcaaatgtcattttaagaatctgagcttccctgatgaaaaccataaatcaatagaccacaaccccacccctaaattctcctcattaatgcttttcttcagagcattcactaccattggatgtctgtaagttatttcactgatttattcgtttacttgaagtcttttgccaccaaaatgttagttatttgaaagaagagacctctggtctcttgttcatgttgtttccccaatctgagttcgatgcttggcacatacataattggttctcaatactgtgtgttgcatgaatgaatgatatccaagcttaaaaactacatgacactgctcactgaggtttttgtttgtttttattaatagtacataattgaaggtgattttattatgtaattatatagttctgctggagcttattattacagtctttttttattttatg

SEQ ID NO: 46207 - DNA, 503 bp, Homo sapiens
agggaacaaaagctgggtaccgggccccccctcgagagtacttctagaattaattaaggcgggtccctacacttcagcctcacattagcaattgcttcaggacactaaattctgcatatgcctcatttctgcgactggcatagacgtaggcaatcaggcaggagcaagccagagggagtggcataagttcacgctagtaggagtaagtggtgattaaactctgaggctcaccaccctgctggcattcagctcttcaggcagctcctaagtgggggcgggcggaaggcttttcttttaatgtccgatcttctggctaactctggctatttgctttattcaaactcttaaaaagagatggtcatctcaaagagtctctgcacccattgataaaaggggaaaagtcagagagcagcctcctcgcccaccttcagtctctgggacctgcccacaacaggctcttccaaagggaatcaatcaggtcgccatgaagcctccctacgtct

SEQ ID NO: 46208 - DNA, 478 bp, Homo sapiens
gcgcaattaaccctcactaaagggaacaaaagctgggtaccgggccccccctcgagagtacttctagaattaattaaggcgggctgtggaacacatgtcatacagcgctccggtccctgcaacaacctaggagggaaatgcgaggatgcgcctatcttacagaagtacctgcccatggtcacacatctagtaagagaggcatcctcttcaccactcactgcactgcactgagggagaaaccccgcccaagtttgtctaaactaaaagaattgtcagcgaggacattttttcaaattacatctaaagtggcaagaatagcttttctcagaactactgggcaggacctgatccaccctgagaagagagtcttgtgctcaggagctgcagagcgtcactagatccatccagagtgccagacttctgcaccacaggctcctgagaacccggaactgcccatctacactacatccctaaaaag

SEQ ID NO: 46209 - DNA, 482 bp, Homo sapiens
ctaaagggaacaaaagctgggtaccgggccccccctcgagagtacttctagaattaattaaggcgggggagcatctaagaggatgctgtctgccactgagtgccttcagaagagagggatgcagcagctcaggccgtgacaactttagattcttaaggctggaattttcccatgtgtgcccatggcaagaacagtaaaaccttagggggaaaacgagttgggtaattgtagtcaaggtagcagggaagaaaaaaactgagaaaacttgatccactccatttaagggaagacccaagctcctcacaagcgtaaggggacaatgtctgggttattttttattttttttattttttgagatggagtcctggtctgtcaccaggctggagtgcagactccgtctcaaaaaaaaaaaaaaaaaaaaaaaggggcccccccccgggggggaccccaattcccccttttagggggggttttaccccccc

SEQ ID NO: 46210 - DNA, 470 bp, Homo sapiens
accctcagtaaagggaacaaacgctgggtaccgggccccccctcgagagtacttctagaattaattaaggcgggggtaatcttttacatattagttattgtactctgttacattgctaacagggtaaaacaggttaaccatgatttatgtacaaaatatagaatgtgagaaaataaataacacaatgagaaatacaaagactaaccaaacattaaataaaaaataccaaacacatgcataagatacaaactcatacagtaatactcagccttgaaataatcttctaaacttatgacaatagcatagcataatacaaaagagaaaatctcaacactgttatgtgaaagttgttgtaaatattgtgtgctaaatcattgatattaatattataagtaactgtaagtcttctagcacgctagatattaagcaatatatagccagaaacaactgttttatacattaaaaaaaaa

SEQ ID NO: 46211 - DNA, 472 bp, Homo sapiens
  misc_feature 384, 385, 386, 388, 409, 410: n = A,T,C or G
aagggaacaaaagctgggtaccgggccccccctcgagagtacttctagaattaattaaggcgggggaattgatagctatctctatgtaaatgtgattccttattaaattatagggagattgggtttaaaaaaataactgtccttatctaccctggtggttcttagatttttggattttatggactagtaaaatgtatttaaaaatttggaggatgtacaaagaagtgtaactttttatatttctaaataagagcataataaaattaaactataatcagctctcaccatgatatcataaaggaacatttgaatatcaaaaaacttggaaagacaaagtcactgaataaaaaaattttataaattcaataaatttagctttatccnnnanaaaaaaaaaaaaaaaaaaaannggggggccccccccgggggggaccccaattccccctttagagggggttttttcccccccccc

SEQ ID NO: 46212 - DNA, 371 bp, Homo sapiens
ttgaactactatgtgccagactttgtgacctccccttcgcatgttctacttaaactggatcctcaaagcaatactagaagatatttaaaaaagctttctccaaaatgaaactagttttagcaacttattagtaacacaatgcacacacatcttcataattacattaatggaagatgtgagtctgattctacctacaccatctgagtctgaaatcattaacaaaatgagctaaaaagatgatctacctaggctgggcgcagtggctcacgcctgcaatcccagcactttgggaggccgaggcgggcggatcacgaggtcaggagatcgagaccatcctggctaacatggtgaaaccccgtctctactaaaaa

SEQ ID NO: 46213 - DNA, 625 bp, Homo sapiens
  misc_feature 433: n = A,T,C or G
gcgcgcaattaaccctcactaaagggaacaaaagctgggtaccgggccccccctcgagagtacttctagaattaattaaggcgggagcagaaaatattagaatcaaatattaaacctcctagagcaagctgtttcacgattcaaaagtatataagagaagcagagaaaacaaagaatatacaaatgcattattccaaagacaatgcactctctccattagaaaaaattaccatatacaactccagtaacaacataatacaaatttcaaagccacatttgaaactatcagtaaaatgcaaaatatgtactgtcttcactgaaaagaaaagaatgtcttcttggccaggcatcgtggctcatgcctgtaattccaacacgttgggaggccagggcaggtgggctgcttgagcccaggagtttgagaacagcctgngcaatatggcaaaacttcatctctacaaaaaaaaaaaaaaaaaaaaaaaagcggccgccaccgcggtggagctccaattcgccctatagtgagtcgtattacgcgcgctcactggccgtcgttttacaacgtcgggactgggaaaaccctggcgttacccaacttaatcgccttgcagcacatccccctttc

SEQ ID NO: 46214 - DNA, 534 bp, Homo sapiens
ccaagcgcgcaattaaccctcactaaagggaacaaaagctgggtaccgggccccccctcgagagtacttctagaattaattaaggcgggagcagaaaatattagaatcaaatattaaacctcctagagcaagctgtttcacgattcaaaagtatataagagaagcagagaaaacaaagaatatacaaatgcattattccaaagacaatgcactctctccattagaaaaaattaccatatacaactccagtaacaacataatacaaatttcaaagccacatttgaaactatcagtaaaatgcaaaatatgtactgtcttcactgaaaagaaaagaatgtcttcttggccaggcatcgtggctcatgcctgtaatttcaacacgttgggaggccagggcaggtgggctgcttgagcccaggagtttgagaacagcctgtgcaatatggcaaaacttcatctctacaaaaaaaaaaaaaaaaaaaaaaaagcggccgccaccgcggtggagctccaattcgccctatagtgagtcgt

SEQ ID NO: 46215 - DNA, 503 bp, Homo sapiens
  misc_feature 353: n = A,T,C or G
gcgcgcaattaaccctcactaaagggaacaaaagctgggtaccgggccccccctcgagagtacttctagaattaattaagagttgccagcctctctgtatgtttggattattatgtcatgtgaatttgcactgatcctaaaaccaaaacacagattcctaggccccgccaatcagaaagtctgatacagctgccctgcagtgaggagttggaggttgtgtttccaagaggtggaacctatcttcttttaaacagttgcccagtcattacagccatgtgctcagtttcctcaaaggaaaccgaatattgaatgttaaaacttagcaataatgatcaattatatcaagtactctnttacttaaaggcaatttgtttagatatttaagaaaagtttgtaaaactgatattgttataaattaaaacattttatatacaacatttttcaggtcacaatgatgtgtttcaagtataatgttgcaaaagtattgtagctttgaatttagc

SEQ ID NO: 46216 - DNA, 452 bp, Homo sapiens
acataaagggaacaaaagctgggtaccgggccccccctcgagagtacttctagaattaattaaggcgggaagtatgaagctccaatggaggctgagaaggcaggcccagcagcagacgaggagaaagaaccagaggccctgacaggaccccagtacctacacaactaacaggaagaagaccagagaacctccaaaaacagccaggctttgaagtagctggggatccttttctgaaggaataaaagaagacccgtggagagctctcagtgagggcacgtccagggatcacagccaccgaggggaaaaagaaaagaaaggagttaccagattacaagtgggaaacagtgcccctgagttgctgtgaaatctgggcttggtttttgttttttgtttttttaaattgtcttgctctgtcaagcaggctggagtgcagtggtactatcatagctcaa

SEQ ID NO: 46217 - DNA, 416 bp, Homo sapiens
  misc_feature 314, 315, 316, 341: n = A,T,C or G
taaagggaacaaaagctgggtaccgggccccccctcgagagtacttctagaattaattaaggcgggggaagggtaaatgtatgagtaagtataaataattttttttaaatagtgaactttaaaatatacataggaaaaaaaatgcgtgacaacaataatgcagaagatggggttggtaaatgaagtcgtgagattctggcatcattggggaagtagtgaaagtaaaatttaaagtagattatatcaggtttgcacagtccaatctctaatgcaactactaaaaataaaggatttttaacaaattaacacaccgnnnaaaaaaaaaaaaaaaaaaaaaaaanggggggccccccccggggggggccccaaatcccccttttgggggggtttttaccccccccctctgggccgttttt

SEQ ID NO: 46218 - DNA, 574 bp, Homo sapiens
  misc_feature 560, 561: n = A,T,C or G
accctcactaaagggaacaaaagctgggtaccgggccccccctcgagagtacttctagaattaattaaggcggggggaggacacgaggttctataaacggctctgagagactgggatattcatatgctaacatatgaaactgtgtctcaccatatacaaatataaaattggagcgtattacagacttagatctaaaactttaaactatgaaaactactacaagaaaacattgtggaactctccacgatattggtctggggaaagactttttgagcaataccccagaagcacagacaacctaagccaacatggacaaattgaatcatgtcgagttaaaaagcttctacacagcaaatgatacagtcaactaagtgaatagacaacccatagaatgggagaatatatttacaaattacccctctgacaagggattaatagccagattatataaggagctcaaacaactctataggaaaaaaataaaataatcttatcaaaaagtgggcaaaatatttgaaaagatatttttcaaaagacaacatacaaatggcaaactggannaaaaaaaaaaaaa

SEQ ID NO: 46219 - DNA, 453 bp, Homo sapiens
ctaaagggaacaaaagctgggtaccgggccccccctcgagagtacttctagaattaattaaggcggggggtttggagaaaggactgagcaggaaggctgagtgcaaagtttgcaatcaggcgtgtaaacttagccagctccctagctagatgggagcctcttggaggcaacctgcttcacgtaaaaggaatcgtcagcgtcgctgttgcaaccttggaaaattcccttttaataacatcttcacaatggagagaaaggtttgttcttcttcttcttacttgaaaacactgttaatcctaccacctggtggagagtttgatgaataaagactgttgctcaggaaacatgttagctgccacgaataggaatgtctttgtgaggtgtattactggttgtttctaaaacataatcttatgttttaaaattcagtcttttggcaaaaaaaaaaaaaaa

SEQ ID NO: 46220 - DNA, 479 bp, Homo sapiens
aaagggaacaaaagctgggtaccgggccccccctcgagagtacttctagaattaattaaggcgggggagagaaaatgtgaatattttatatatgatctgaatgacctctaaaacatactggtaaaggaaaaataaggtagtgtgtgtacaaaaaccaggtaaaaacattaatacttaatgcttatccacacaatttttctcaacactggttgcctctacagatggagtcgtgggaggctgagggttaagatggatgggacacttgaacctcctgagttttatacctttatgaacgcattatttattcacaaagttactttcttcttgaatatgtgaaaatcaaggcaaatcaatgattctgtgccctcacctatgtttatacctgtggtctgacaactactttctgttactactcaaccccctctaagtactaaattacctttaacacctgagcctctcaagcctccgtactagttctg

SEQ ID NO: 46221 - DNA, 457 bp, Homo sapiens
taaccctcactaaagggaacaaaagctgggtaccgggccccccctcgagagtacttctagaattaattaaggcgggtgcctgtagtcccagctactccagaggctgaggcaggagaatggagtgaacccaggaggcagagcttgcagtgagccaatatctcaccactgcactgcaacctgggcgacatagcgagactccgtccccaaacaagaataatataagcccaaatggctgttaataccccatgaacaccatttataagctccagggtcagaccaggcccaagggtttataagagctgaatgaatcgctggactcattcctttactttaatcccagcaccctgagaggccaaggcgcgaggatcgcttgaggccatgagtttgaaaccagctgggcaacataatgagaccctgtctttacaaaacatttttttaaatcattagccgggcatgg

SEQ ID NO: 46222 - DNA, 424 bp, Homo sapiens
aaagggaacaaaagctgggtaccgggccccccctcgagagtacttctagaattaattaaggcgggggagactcagaatgtttttctgctcctttccatcattagcttatgtttctggctgctcaggtgaatttaccctggatattcatacttagtaactgcctaaaagctgaaatttcagattttaaaaagagaaatcattttaacaggaatctgtgcccagggagtccaagaattggtgaatttacagttttggaatgtgggcaggctgggaaagtttgaagaaacagccagttatttgcttttccacagagaatatatactgaacttccttttccttagggagcaggtagcatttgaaacttgcctttgagtgtcattgtttccctacctcatggtgggtttgggccctagcccctcaaacc

SEQ ID NO: 46223 - DNA, 407 bp, Homo sapiens
  misc_feature 333: n = A,T,C or G
ctaaagggaacaaaagctgggtaccgggccccccctcgagagtacttctagaattaattaaggggggaagaaaataaatatattgtgttgaatgctggcctggagcttattaaatgagatttgggctgtgatatggattttaaagtcactggagtgaaaaagattattaaatttatgtatgtggaagatatctagggaaaatatttgaagagaaacagctccaggaaagcatattaggaaaaaacacatgcataactactattgaaggaatgtaaatctatacagccaactttaaaaacacatccaaaaaaaaaaaaaaaaaaaaaaaaaaangggggccccccccggggggggcccccaatccccccttttggggggttttttccccccccccctgggccggtttt

SEQ ID NO: 46224 - DNA, 571 bp, Homo sapiens
ctaaagggaacaaaagctgggtaccgggccccccctcgagagtacttctagaattaattaaggggggtgtttaaaaagaatcaatgataatgaagtttcaacctttcattaatatcttcttttacatccaacagtcagaaaatgtttttaaggacaaataggaaagtaccaaaatataatctactcactgaaccagttaatttcaaagctttacacagtgctttgagaggataagacttgctggaaaggtacagtgaagtatgagattttttttttttctaatcaaacttccccaggaggaaaatgttttaactctgcctcctaaaatggaaaatgtacttcaccttcattaggtgatgaggcagtccaccacaaatccaagagctaaaaattccttagcacaaaaaaattagctctttgtcatgtccatggaacatctattgtttggctagcttactctggaaggggtttctaagttagttggctgtcattaatctaagcgcatatgggggcagctaattaaagagggcacttttctgtttgagcaacactgcctcaggtgaggcttgaa

SEQ ID NO: 46225 - DNA, 531 bp, Homo sapiens
tgattacgccaagcgcgcaattaaccctcactaaagggaacaaaagctgggtaccgggccccccctcgagagtacttctagaattaattaaggcgggggtaaaatagagtctctggactctaggacacaagcaaattcagagccagagtgtactatcctgaaagcacgagtaagtgaagggttttgagaccttagccctcatataccacttggtgcccagaacagtgccaggtcattaccctctaggctggacagtagagaactctactggaaatctgaccagggaagagatataaagagaaaagctggaaagacactgacattgaggattcctggatgaaaccaaatcaagtccagccaaatcatatgctgtggccaggcgctcatgcctgtaataccagcactttgagaggccgagatgggaggatcacttgaagccaagagtttaagaccagcctgtgcaacatagtaagaccccaactctacaaaaaatttaaagaagaaaattatccgagtgtggtggcaagcacc

SEQ ID NO: 46226 - DNA, 389 bp, Homo sapiens
actaaagggaacaaaagctgggtaccgggccccccctcgagagtacttctagaattaattaaggcgggcggatcacaaggtcaggagatcgagaccatcctggccaacacagtgaaaccctgtctctactaaaaatacaataatagtgtattgcacatttttaaactgaaagtaaatttaaaatgtgcttctcacaaaaaataaggtatttgaaatgatggattagcttgatgtaattacttcatattgttcataaatcagaacatcactctactctataaatatatgcaattataaattgtcaaattcacaaaaaaataatatgaaattcggggcccccccggggggggtccccaaacaccccctataaggaatgattgacccccccc

SEQ ID NO: 46227 - DNA, 498 bp, Homo sapiens
aagggaacaaaagctgggtaccgggccccccctcgagagtacttctagaattaattaaggcgggcgcctgaagctccagatacactggaggctgatgcacgagaatggcgtgaaccgtggaagcggagcttgcacatagcctagattgggccactgcaaaacgtgatacgagctgcgcaagcgatcgagactcggtctcatcccagcactttgggaagccaaggctggcggactgcctgagatcaggagcttgagagcacctctggtcaacatgatgaaaccccacctctactaaaatagaaaaaattagctgggcgtggtggcacatgcctgtagtcccaactacctggggaggctgaggcccaagaattgcttgaacctgggaggtggaggttgcagggagctgagacggcgccactgcaccccagcctgggcagcagactaagactctgtctcaaaaaaaaaaaaaaaaaaaaaaaagggggcccccccgggggg

SEQ ID NO: 46228 - DNA, 445 bp, Homo sapiens
  misc_feature 370: n = A,T,C or G
ctaaagggaacaaaagctgggtaccgggccccccctcgagagtacttctagaattaattaaggcgggtggtgagtgacaagaatgaggcactaacagcgtgcgctgagaggtgtgtgtgtgcccctccgtttcaggctgaagttgactacattcctggcatttatgtaaatccctagactgggatgggtctttttaaaaatcaaaaatgggccgggcgcggtggctcacgcctgtgatcccagcactttggtaggccgaggtgagtgggtcacaaggtcaggagttcatgaccagcctggccaacacagtgaaaccgcgtctctactaaaaatacaaaaattatccaggcgtggtggcgtgtgcctgtantcccagctgcttgagaggctgatgtgggagagttgcttgaacccgggaggcagaggttgcagtgagccgagatcg

SEQ ID NO: 46229 - DNA, 472 bp, Homo sapiens
gcaacgaaccctactaaagggaacaaaagctgggtaccgggccccccctcgagagtacttctagaattaattaaggcgggaagctgacataccgacttgacaaagctcttatctattgtgggcattttcatctatacaatgacctctaagcactgctttacctgcatcccaaaaggactggtatgatgttatagtcacataccttacccagctccttttccttgcactttattccaatcctcacaaagcacactgtggcagcatttcttagggttttgtctttgaaatttatagacatcgatatttattaggtttttacttttctagaattgtttcttgcctttgtttctaaaatgtcttgctttctttcactttttattttttatgttcattcactctttttttcctctttgcatgctattgattgttttgcaacaacatggagaaatagcagcaaagaataaacaggaaa

SEQ ID NO: 46230 - DNA, 461 bp, Homo sapiens
cggccccccctcgagagtacttctagaattaattaaggcggggaaagaacaaagggaagaaaacagaaaaaactaaattaaaaacactaatgtaagctaatactgcttacatatgaacatcaagatgccaagggacccaatacaatcctcagtctaacattttcaatggcacagcctagtgatcacacgatactggtgatactctctagttacccctggcaacctttctcaactgtaacgatgctaccctacaatagctttcactgggcagctttctcttcacttagctgaatgctctgggaccatctgcgtcggcaagcataaaaggccagcctgcctgtgggcccgtcactctgaacaccacctctctgaccctgattaaatacaactttcaatcctttttgtcctccctgttgacttctcctattaagggagccctctgacaaagaaagcggaagagt

SEQ ID NO: 46231 - DNA, 470 bp, Homo sapiens
  misc_feature 380, 383, 384, 385, 386, 387, 388, 408, 409, 410: n = A,T,C or G
ccctactaaagggaacaaaagctgggtaccgggccccccctcgagagtacttctagaattaattaaggcggggggaccggaagacatgattccactgtgcgggcacactggctgcaagggaagcatgttacacatctgtttacaatgtaaggctcacgctgtcctgctgtgggtgtcctgctctcaggaagggagcagtttcacgtaaagtcactccacacaagtggaagcagctgtctctgaaactccaggaatgtgcacctttcctgctgttgcttgctctcccgtccttttaatgaacttttacacgtcgggggatatttctctgtggttgaatagtgaacattttaactgatcaagagcactatgttctgaattgnccnnnnnnaaaaaaaaaaaaaaaaaaannngggggcccccccccgggggggcccccaatccccccttaagggaggttttttccccccccc

SEQ ID NO: 46232 - DNA, 463 bp, Homo sapiens
ctaaagggaacaaaagctgggtaccgggccccccctcgagagtacttctagaattaattaaggcggggtaatcagcagtgataaaagggtagacagagggcagtggaattgaacagaggaagaggggggtgaaatgaaggcaagaaagtaaggaaaacatgagtatttatttaaagtgagtagttggaggctaaaagggaagttgcaccaagtttgggtctaacatgttgtggtagtaactgtgttcttcatattataggtaaagaagtcattgactacttttaaatagggagattaggtggtcagtgtagagttgctgggtgagcagaatgcataaatgtgcctgattaactaaagatggcaaggattatggatattcaaatagcctttcccacctctgttgatgaattggtagtaacctacatcctgttggtaagtagtcagtctagctaggaatgggcta

SEQ ID NO: 46233 - DNA, 464 bp, Homo sapiens
  misc_feature 374: n = A,T,C or G
caaaagctgggtaccgggccccccctcgagagtacttctagaattaattaaggggggaaagctatcattttaagaacagtgtaagtcacttgttctgggaccttgctgtgtatcagaattgtctggggagcctctttctttaaaaatgccctctgtcccactaagtcagattctccataagtgaggacttgaaacctggaattagcaactactaatggcagccctacagcttcacactctcagagaaggaatcttcctccagggttatctgaggtatgctaacctgcttaaacctggtgctgggccttggaaaaagaaaaaaatcagatttaaacttgcggttacattaagatgatacttttgtatatttgctntccattaataaataaggcagtcatttacaaaatcaccaggaaaaggagaatgaagtattcatggcctgtcacttcccagcaaattgggag

SEQ ID NO: 46234 - DNA, 529 bp, Homo sapiens; identical to SEQ ID NO: 46087

SEQ ID NO: 46235 - DNA, 451 bp, Homo sapiens
accctcactaaagggaacaaaagctgggtaccgggccccccctcgagagtacttctagaattaattaaggcgggatagagttagggtagggctgggaacagggatgtgtgggaaataagccagtactagtgcaaagaagtaaactaattcatgtcaatttttgccttgaaaatatatatcacattttccaatattaatggaacaataacaaaaataattgtgaaatagagtacagtgaaactgtcaattagatctagatataaaagtagtacaggcaacattttctgaggtcaatataagaaaataagctactaccggctgggcacagtggctcacacttgtaatcccagcactttgggaggccgaggcgggcggatcacgaggtcaggagatcgagaccgtcctggctaacacagtgaaaccctgtctctaccaaaaaaaaaaaaaaaaa

SEQ ID NO: 46236 - DNA, 455 bp, Homo sapiens
acataaagggaacaaaagctgggtaccgggccccccctcgagagtacttctagaattaattaaggcgggggatataaccaggccttaagaaggaaccagaactagaaaccagaagctccaggaagctcaggaagtcttcattcttcctttttctgtatgcatcttttcctctatttccatggtaggtatgcatctcttttcacagttcttaaacggttctgccacactgacgttaacagttgtctttctatccttttttaaattcctaggaaagtgatcctctctggtcagctattagaggtgggagggaaggtacacacacacagtacaaatgtggctcctagaaaccagagcagttctcaggaaaaaaaaaaaaaaaaaaaaaaaaaacggggcccccccccgggggggaccccaattcccccttaggggggtggtattacccccccccccgg

SEQ ID NO: 46237 - DNA, 474 bp, Homo sapiens
ctactaaagggaacaaaagctgggtaccgggccccccctcgagagtacttctagaattaattaaggcgggaaaagaaaaataaatatagatggcagaagacaatgaagaattctgaaggagaaagtgtgtgacccaagaattccaaaagcagttattgctttctacacataaaagcaatagaaagacactcctggccgggcgcggtggctcatgtctgttaatcccagcactttgggaggccgaggcgaggggatcacctgaggtcaggagtttgagaccagcccggccaacatggtgaaagcccgtttctattcaaaatacaaaaattacctgggtgtggtggcacacgcctgtaatcccagctactcgggaggctgaggcaggagaatcacttgaacccaggaggtgggggttgcagtaagccaagattgcgccactacactccagcctcggtgacagagaaagactccgtc

SEQ ID NO: 46238 - DNA, 494 bp, Homo sapiens
aagggaacaaaagctgggtaccgggccccccctcgagagtacttctagaattaattaaggcgggggagatcagagatactgagtttaaagacggcagtgtactgagaaaaatggtaaacttctacttcctgaaattaagcgtttctgaacagagattcatcaaatctgcagaaaagagaaaggcagataaccgtaggttctgaggctcggtgtttcctccctaatggctttgccaacagaaatactgacaggttttgtctgtcacgggccttcctatttatcaccttttcctctcctacctcctactgtggtcttgcctcatctgtacttcatgtaccttaagcctaatagtgaatgttgaagaaatgtctctctttggaaattatctgttttattttattgatttaaggtcaaattaagaaataagataatgagacttgtcaaagaaaacgaatacgtagaagatgaaacttgcaatcctaatgcctctcctg

SEQ ID NO: 46239 - DNA, 463 bp, Homo sapiens
  misc_feature 452, 455: n = A,T,C or G
taaagggaacaaaagctgggtaccgggccccccctcgagagtacttctagaattaattaaggcggggtaaccattttacaagggaaataactttcctcgctattttcttcctgaaatacgtgcaatgtaacacacagctagtaccagaccttttgaaactactttttcctgaacaagccattttaaaattccttagtattttcttctctaccgatgtcaggacttttttttttgggattaacacaatctgagctgtgactcaaatggaagagcatgctgaccgtcatcaagccacagcagtgggtcagctgggggacaccaagggaggaggtgagcacagcaaaggcagggacagcatgaccggggctcccccaaacagttccacctctacccattccagttggatgagaatgaacgggtgaaaaagaaccgcaaaaacatgtgagtcatcngtnaaaaaata

SEQ ID NO: 46240 - DNA, 453 bp, Homo sapiens
accctactaaagggaacaaaagctgggtaccgggccccccctcgagagtacttctagaattaattaagggggctgagggtggatgtagaaggcacaggatgaccgattttgaggacacttttcctttgcttcagtctcctttatgtggaaggtgacaacaaaagagctaagctggcaagtcgtgaggtccttctctttctaagagttaccaagagtaaggcctgtctgtcatcaaatacaaatttggagcttacagctggttgagatttggcatacagatccttccttctttaaagtgttttccacgtgccatttttagaattgggataattctaaaacacagtaaattaactcaactgtgaactttttctccccatacttgacttttatcagggctgcctcttcctaccttttggatcttatctcaccactctccccctgtgctctagctat

SEQ ID NO: 46241 - DNA, 473 bp, Homo sapiens
tacataaagggaacaaaagctgggtaccgggccccccctcgagagtacttctagaattaattaaggcggggcgcagccgggcgtgcagtgaccttggacagctcagatcctgcggaccttggctttccactccgctcgctgagccggtgcatcacagcctgggctccacctgtagaggagatgtagcaggagggtccgccaggccaccttccaaaatccgagtgacgggcaggtccgtgcgttcgtgcatttttctgggcagagatggtagatttaatccggttgccacaggggacggcatgcagagaaggccacatacctactcatttgcgatgctgtttgcagtcgtcttaggaaggaaaagcaggccggaggggtgtggcccgttcctgagatggggccgaatctaaggttggcgaccaggtagagaagcgggcccagccacacccggctgcccaaggagggaaggagcc

SEQ ID NO: 46242 - DNA, 497 bp, Homo sapiens
  misc_feature 450: n = A,T,C or G
cgcgcaattaaccctcactaaagggaacaaaagctgggtaccgggccccccctcgagagtacttctagaattaattaaggcgggaagttgcccatcccattttgggtagctgaatgttaaaatgaaattttagtttcatagctgctgtaagtgcccctttgtcttttaagaatagactgtatgtgtgtactttaacaggtttattataaaagaatagaatttcgacaatcattttgactaattatattatcttatattgaaagaaaataaaattgatttacctgtggttacacaactaatggtaggttgttagatgtgtagagctacttaacatactatttattcattcacatgatttcccaaagaataacctgcgacaggataaacattctttaggagccacctttcaaaagttagattgttttttaccctaaccttttgagatatatntttaaagaaatattttatagttaataagttgtagcaaaaattaatct

SEQ ID NO: 46243 - DNA, 414 bp, Homo sapiens
ataaagggaacaaaagctgggtaccgggccccccctcgagagtacttctagaattaattaaggcggggtatatggctattaatatgatcattaatttattcattcaacaaaatattactgtctacaaaatgacagacactgttctggatgattgagatattgcaatgaacaaaaagtctctgccctagcggagtttctattcttgttggccaatagagacagaaaaataaaacaattatttattttttttaagatggagtctcgctctgttgccaggctggagtgcagtggcgtgatctcagctcactgcaacctccacctcctgaattcaagcgattctcctgcctcagcctcccgagtagctgggactacaggtgcatgccaccacacccagctaatttttgtatttttagt

SEQ ID NO: 46244 - DNA, 480 bp, Homo sapiens
cctactaaagggaacaaaagctgggtaccgggccccccctcgagagtacttctagaattaattaaggcgggggttcccccaaaagggagtccgaaaggagtgaggagtgaagacacacttggctcctcgtgcccctctccactgctaggtcaccaggtatttagcctcagactttcctcatgtgaaacacaggtgcttgtaaatggtggtgtttaccatgattactgttcttactatcagtaacacttgtccactccatcgtgttcctctcccatgggaagatgtgggtaccagatgatccagaatgactgatttcaaaacataactctcggccgggcacagtggttcacgcctgtaatcgcagcatttgggaggcctaggtgggcagatcacttgaggtcaggagtttgagaccagcctggccaacatgatgaaaccctgtctgtactaaaaatacaaaaaaaaaaaaaaaaaaaaaaa

SEQ ID NO: 46245 - DNA, 530 bp, Homo sapiens
gcgcaattaaccctcagtaaagggaacaaaagctgggtaccgggccccccctcgagagtacttctagaattaattaaggcggggttcttgaccaggcatggtggctcacgcctataatcccagcgctttgggaggcggaggcaagtggatcacgaggtcaggagataatgttccttttaagactagatagtaaatgatattaacatagattttcttcctcggtaatatttttctcttcttaaagcattccgactctccatggagtaactaccagccaggagactgtcagtaaataatatgtgataatagagcatattcttcccctagtaaagcttcttgctgaaattattgcaattgatagttttcatcaatgcaactccaaactggtaggcaggaccctattgtcttataattgccttataatgatgataacaataatagtatgaaccatttacttacttgatggattcatagatttattcatccagtattcatttgttgcctactaagctaggtattctgctgggtgc

SEQ ID NO: 46246 - DNA, 473 bp, Homo sapiens
aaccctactaaagggaacaaaagctgggtaccgggccccccctcgagagtacttctagaattaattaaggcgggaaggactaagattcaaattatgaaacgtaacatagaaagggctattgcagtggccagactgtaactcaagtacagttatgacttcacatgctagcagtatgcgacactgtcttataaggcaataatttaaatatgtttagaagcacgagtgcgcgcgcacacacacacgcacgcgcacacacacaaatgcaatttgccaggtggtggcttgtgtctgtagtttcagctacttgaaaggctcacttgagcccagaagttcaaggctgcaatgagctaattacaccactgcgctccagcctaggtgagggctggagactccatctcaaacaaacaagcacacaatgttagacatgggaagtcaaagaaaatacattgaaaatctaccacaaccaacctaag

SEQ ID NO: 46247 - DNA, 482 bp, Homo sapiens
aaagggaacaaaagctgggtaccgggccccccctcgagagtacttctagaattaattaagggggattagctttttaatttttcttaataaggtcatttaaaaaactataattgttgcatgaaaggatattttaataccaaaaatatagaaaaatataaagttggaataaaagctaatagttttgaattgaataagtttaatgagaaattcaatactttgactttaattggctcatttttgcctcaaaatattacttattaaaaactttgatattggaagttgctgtttagtaaaacataaatttaaaaaaagatggctgggcacagtgtctcactcccgtaattccagtactttgggaggtcaacaagggcggatcaccagagctcaagtttgagaccagcctgggcaacatgatgtaaccccatctctactaaaaatatgaaaattagccaggtgtggtgacgcctgcctgtaatatcagc

SEQ ID NO: 46248 - DNA, 473 bp, Homo sapiens
  misc_feature 121: n = A,T,C or G
aattaaccctcactaaagggaacaaaagctgggtaccgggccccccctcgagagtacttctagaattaattaaggcgggataagatgtttgcagaatgaaaattttttttcttatcaaacncaattcaggcatgttaccaaaattaattcatagtcaagctgctcttatccagggaacacttatctggtaacctctgctattaaaaaagatagcttacatccaaaaaccttctaaacaccccaaattggggatatgaagcccatgtactaaaactctctaattttattcacaggaggagcaaaacatgtgcactccaaaatacaatttaagtattattcattgagtagctactatatgccaagtattttcactgcattgacttatttacccctaatgataaaccccataagggatttaatttacaagtgaaacttaagtttagaaggtaagtatttgcctaggatcacataaa

SEQ ID NO: 46249 - DNA, 488 bp, Homo sapiens
cgcgcaattaactcctcactaaagggaacaaaagctgggtaccgggccccccctcgagagtacttctagaattaattaaggcagggcaaacacatcatctgcttttttggcataagcacttcaacagctacattttagtgcaaaaaagaaaatcactaacaatctaatgagatctaacaaagccccttaaattcaaaattatcaagactattttaaatatggatttgtatacattcattaggtaatatagtattaataaatttttttggtggagcatggtggcttatggctataaccctagcacttttggcggctaaggcaggagaattgcttgaggccaggagtttgaggccagcctgggcaaaataacaagactctgtctcctaaattaaaaattaaaaaaagaaaagaaaatccccaaatatttagaaactaaagaatattacataaccctaattaaaatacagaaaataaataatccatgattc

SEQ ID NO: 46250 - DNA, 543 bp, Homo sapiens
taaagggaacaaaagctgggtaccgggccccccctcgagagtacttctagaattaattaaggcgggggtcctgcagtaggatagggggtgaaactcagcaaaatgtcaggttatctgctgctaacataaccccatctgtaacctccaaggtccttgggcctttcaggaacatgtttttcacatttcatagaccactgtaaatctaaatagctaatacaacagctaaagatcttaaagcaatttggagacattcatatagtaaattcccttcgtctaccaaaggaaatatgagcatctctgaggcagagcagctgcttaatggttacagagcaatattacacaacagcttaatccaggaagaaaagaacaactctgcatttgtgtgatgctgtatttacactacatgtgtgctttttaaaaaaaataaaattgagtaggaaataaagacttctacaaactgaaaagtctcaaaagcaatatcaaattatattattttacttcttttttatttttctctgacaaaagcaacagtaaatcactact

SEQ ID NO: 46251 - DNA, 264 bp, Homo sapiens
  misc_feature 63, 64, 72, 74, 75: n = A,T,C or G
acaaaagctgggtaccgggccccccctcgagagtacttctagaattaattaaggcgggggccnnaatcctantnncttgatttggttaaaggccagggatgttgctaaatagattttaatacacaaggaaagcaccctcaaagaattacccctcccaaaatgtcagaagtgctgaggctgagaaaccctgatgtaaagatcagtcccagttataaactgaaaacagctatttacaaagcagtaaatgcacgaaaaaaaaggaat

SEQ ID NO: 46252 - DNA, 472 bp, Homo sapiens
actggccgtcgttttacacacaggaaacagcgtatgaccatgatgtactggcgcgcgctttctacacaggacacggatatgaccatgatgcgcgggaggtgtggaattctctataaagaaaaacaagctggatgtagcaataactagttattatttttacagataagcaaaaaaaaaaaccagaacaacccaccgggcctttttaatacatctccttatgataccataaacttacaatgttgtttaaatggacatcagcagggcataaataaaataaccctaattggttgttggcctttagggaataaataaatggcttatctttaacatgtcatttattggaaataacaattctaataattcttttgtcaaggctgtcaaaattgtcatttaaaaggcatagcacaaacatttttttgccaacattaccaaaaaaaaaaaaaaaaaaaaaaaaaggccccccccccggggg

SEQ ID NO: 46253 - DNA, 542 bp, Homo sapiens
gcgcgcaattaaccctcactaaagggaacaaaagctgggtaccgggccccccctcgagagtacttctagaattaattaaggcggggcatggacccatgcacacctgcccgcctagctgcctttctcccaaggccctccctgcattcctgcctaaagctcactggaaatgtcgctgtctacaccaccaccactttaaacacccacagttgtcttcctggaggtggcagcttttatagcaactacaccagtgagtcctaaattcctagcaggggctgatgagcaccagctgtattctgcaaagcccctcacccacccaaaccctgtgcctcctgcctttagctctctataattaaagtgtttaaataaacaagagcctttggttatagctattcaagactcatctaagatgcagaaaacctaatctaagattaggaagtgttcaatatttcacagcttcaccaacaaccttcaagcttcactattttctcctcaaagctctctgagaataccctcactctcaaaaaaaaaaaaaaaaaaaaaat

SEQ ID NO: 46254 - DNA, 458 bp, Homo sapiens
ctaaagggaacaaaagctgggtaccgggccccccctcgagagtacttctagaattaattaaggcgggatggtgagggagccactacgtgcactctctcagggtgacactggtatcctatcacttggatacgctggtggcatttggtccacactgactatgtgactggttacacaaagagaacccaggataacagactaataaaaaacatagtccggaggacatctctacctgcttttaaagaaagcgcttaaactgggcgtggtgactcacacctgtgatcccatcactttgggaggccaaggcgggtggatcacctgaggtcaagaattcaagaccagcccaaccaagatggtgaaaccccatctctactaaaaatacaaaaattagccaggcgtggtggtgggctcctgtaatcccagctactcgggaggctgatgctggagaatcacttgaactc

SEQ ID NO: 46255 - DNA, 329 bp, Homo sapiens
cgccaagcgcgcaattaaccctcactaaagggaacaaaagctgggtaccgggccccccctcgagagtacttctagaattaattaaggcgggaactgaaaaaagaaatgaaggtatgcttacatgggaagtattttaacacaacaggtaatttttgagagctcattatgtccaaacactgatgagcacttagatcaaagatattattcttgtcaacaagaaacttacttagggtctagctgttgaaaagataacaggaaatttatagtctagctgttgaaaaaggaaaataagataattcatgaatagattaaaaaaaaaaaatattaaa

SEQ ID NO: 46256 - DNA, 494 bp, Homo sapiens
  misc_feature 406: n = A,T,C or G
cgcgcaatgtaaccctcactaaagggaacaaaagctgggtaccgggccccccctcgagagtacttctagaattaattaaggcgggttatagcagacttcactgatgagtaacactctggaaatgtgtaaaaagctatgctagcatcccaaatacaaacacaaaattttgttgtttggaaaaatctgaaaatatctcaaactttataagaattgtagagtttgggaacaaaaagaaccaatcgtgaagaagggacttctgtcttctttcctcatccttaaccaagtaactcattgcaaagacagcttattcagaaatatatcactgagaacggtctgattaaaaaagaagtctcttctgttcatttgtttttatgaggtttttttccttaggggaagagttttttanaagtttgcttcttataaaatagtttcgtggattaatgcagcgtttttcaacctgggttctgctagaaattaagtcctaatgccttgaa

SEQ ID NO: 46257 - DNA, 497 bp, Homo sapiens
  misc_feature 467: n = A,T,C or G
agggaacaaaagctgggtaccgggccccccctcgagagtacttctagaattaattaaggcgggtgctggcagggatactcatgggccccgggcatgaggccggtgaagaaagctctgtgtcggctgcagctctgggccgcaggagggcgccggtgcagggaggagatattgttgctgggtatcagagggttccggggagaagacaaaggctgggactcagccatagaacaggccacgtttccaggttgcccgagcaggcccacggctactcaaacagtgctttcctgtgaacccagcaaccttaccgttatcctttggcccagaaagtgttactgttggtatcaacaaggttttctcctaagtcttaacttttcaaaggttgttcagaagagagaatttaataaaactccacgagacagtagaacttacaaaaaaaaaaaaaaaaaaaaaaaagcgggcccgtttantttttttttttttttttagggggggggggg

SEQ ID NO: 46258 - DNA, 425 bp, Homo sapiens
  misc_feature 142: n = A,T,C or G
gtatgattacgccaagcgcgcaattaaccctcactaaagggaacaaaagctgggtaccgggccccccctcgagagtacttctagaattaattaagatggggttgtttagaaagaggcctactctgattgatggtaatgtttnatatcttgactgaggtttttgaaaacacaggggtattcagtgtatcagaatctacaaaactgtgcacctcaaatccatatattttattaaattaaattatacttaattttttaagctaacaaggaaatttaaagcttggcaggagatgaaaattaatgatcaaaattcataatagtaagcctacctaaaaatgaacttgaggtttgaatttgtattacctgtgtgatcttggaaactgtatgccaagaatctaattttgctaaaactccattgaagaatttac

SEQ ID NO: 46259 - DNA, 512 bp, Homo sapiens
caagcgcgcaattaaccctcactaaagggaacaaaagctgggtaccgggccccccctcgagagtacttctagaattaattaaggcggggtaaacctggggacacaggccctacctgcaagggcagctatgcctcagctccgtcagcgttaccagagaggaacacagagccagcacccacagatcttggattttcaaaaagcatccggatttctatgtgaagtctccggatccctcaaggatgataactagctcaaaataaaaacaaatacaaaaagtcagctgttggccgggcgcggtggctcacgcctgtaatcccagcactttgggaggccgaggcgggcggatcacgaggtcaggagatcgagaccatcccggctaaaacggtgaaaccccgtctctactaaaaatacaaaaaaattagccgggcgtagtggcgggcgcctgtcgtcccagctacttgggaggctgaggcaggagaatggcgtgaacccgggaggcggagcttgcagtg

SEQ ID NO: 46260 - DNA, 572 bp, Homo sapiens
taaagggaacaaaagctgggtaccgggccccccctcgagagtacttctagaattaattaaggcgggaagcagaatgtctgtggaaacagtgaagcagagagtactgcgactgttaactacagaaggctgccccggccccagcacgccttacatgcagaaaacaaaaaaacaaaactgacatccagaggactagccccacaaatagctagggcagtgaactccaactcattttatgatgagtaataatttttttttaactggcacaatatcacttcaaagatattttaaaaatcaggaaaagaacatgtaaaacttatctaatgaatgttcatcagaaaaacatagccaaagcatactattttctgaatagccatcagaaaaacaaaaccagaggaaattctgggcaagcatcatagacaaattatgtaacttaatccaatcacttccattaagagtaatcacaaggcagaatcagaactcaggaaagagaccagatgacgaggaggtaaaaatgtgagcaatcaggactcaagaaaaataagaacaaatcaaaactatcatagacatgaaga

SEQ ID NO: 46261 - DNA, 444 bp, Homo sapiens
taaagggaacaaaagctgggtaccgggccccccctcgagagtacttctagaattaattaaggcgggctcatatacttcttacggattactgtaaaaagatgggattatgcttcaaagctttatatattgtatggaagttataagcaagccgtactcatttcgtaggacttgatatcagattaatgctttgatgcctggaatacgaccccagcttgttataagttaaccattttgttccctaaagtggtagcaaaacctgttcctatttctgagctgtgtttgagtgcaagctaaaaagtgtaggggttgttaagaaatgatataagataaattcagcctttaaaaaagaaatcacctgagcatattaagcagcttgtttatattggtatgcctgcagcaagcatatacatcacaaatgagagatattgtgttattaaagaatag

SEQ ID NO: 46262 - DNA, 442 bp, Homo sapiens
ctaaagggaacaaaagctgggtaccgggccccccctcgagagtacttctagaattaattaaggcgggaggcaagggtgaaggaacctccccattcattacaaggggctttagctggctgatatgaaggttgaagccaatgctagcagcccactgaggacaacttgcattgcaggctaaaatgactctgatgtcggccaggcgtggtggcttacgcctataatcctagcactttgggaggccaaagcgagcggatggcctgaggtcaggagttccagacaagcctggccaacatggcgaaaccccgtctctactaaaaatacaaaaatctgctgggtgtggtggtgcactcctgtaatcccagctacctgagaggctgaggcaggagaattgcttgaactctggagacggaggttgcagtgagctgagatggtgccactgcac

SEQ ID NO: 46263 - DNA, 478 bp, Homo sapiens
agggaacaaaagctgggtaccgggccccccctcgagagtacttctagaattaattaaggcggggcaaaggcaaaaactattgggtactattctcactacttggtgacatgatcaatcataccccaaacgtcagcatcataaaaatatctatgtaacaaatctgcgcatgtaccccccaatctcaaataagttgaaattatatttaaaaaaaatcttcaacatacacaatacatggaaacgtcaaaatgttaggcactgactagacagcaaaataggcggataattaagttgacctatacttgggctggacgcagtggctcatgcctgtaatcctagcactttggagccaaggcaggtggatcacttaaggtcaggagttcaagaccagtctgggcaacagggcgagacccccatctctaaaaaaaaaaatacaaaaagcccaacttgatggtgcctgcctgtagtcccagctacatag

SEQ ID NO: 46264 - DNA, 483 bp, Homo sapiens
ccctcactaaagggaacaaaagctgggtaccgggccccccctcgagagtacttctagaattaattaaggcgggaggtggatgggaggaaggaaaactggtatctaaccaaatatttcacctgtgtttttggtttttgctactgaattggacagaggctgtcaccattcatggtggttctgaaaaaacaaacaaaaaagccactccattcctgattattactctaactagactgttgttgctctcccttgagtttcagagtagttgtacctctgccacatcagtgaaaattatactactttaaaggagtttttcttctcacttgttttacatttgtcacctattacatagctgtcctttgggcatctggctagcatctatgagccattggtacatttcttccttgataaatccccagtgtctaggatagtgccggtacatagcaggcatttgttaattacatgatgaatatttttggtaaggat

SEQ ID NO: 46265 - DNA, 478 bp, Homo sapiens
ctaaagggaacaaaagctgggtaccgggccccccctcgagagtacttctagaattaattaaggcggggagggggtaggtgctggaggtacagaaggtcatgccttctctgccggcaaatatgattaatgtgtgtacagggaggagaaaaacgccactcacctggctatcagccagcctgactcatgcctctgggcatcttagaacaccaaatatccagcaactctggctggggtctagagagatgtctattagctttcacaatgtctgggttaggaaggtgcttctaatcttgtttgtaataaatattagttcaattgttagaagtgtttttaatcacctaaaaggaagtaaacaggcttgcctcacaacctcgacaggcagtgtatgtgtgacttgttctttctatccggaatcactcggttcaaatgctcagagggaagaaagatggtcataaaataaaagtgttatattaaaaat

SEQ ID NO: 46266 - DNA, 490 bp, Homo sapiens
  misc_feature 469, 470, 472: n = A,T,C or G
ccctcactaaagggaacaaaagctgggtaccgggccccccctcgagagtacttctagaattaattaaggcaggcagttgggatgagagggttgtctgaggtcaattgctggtagcagcagtgttatctggatactgaatcttgggtagcctctgctaagactagaccctcaagggcctgaagcctaaggtagtagtggccatggctgctgacaaaagtagcagagcctctttgctggaaagcttccccattctcaatttaaccctgtaagactcttgctcattaaaatctagtaatggcctcatagtctgtggttactaaataaaatagcactaggacttattggtacatgcaacaaacaatatatttatgctctgagaggacacagataatggactttcacctacaggatatgtaactgctacctataaagaaagtaaggatgtagtcacaagctgtccataacaaannanaaaaaaaaaaaaaaaaaa

SEQ ID NO: 46267 - DNA, 281 bp, Homo sapiens
  misc_feature 254: n = A,T,C or G
cagggaccgggtgccgggccccccctcgagagtacttgtagaattaattaaggcgggcgggggggggggagaactacatgcgctaaaaatattttttatctagtgctagagccgttcatcaccaccccacgcagaatttcagctgcttacgttgaacaaattcaacaagtttatcctcaagtttatatgcagcaacaaaggtctatgaatttgggctcataaaactcaggcgaattaaagaggaaacagcctcnttagaaaaaaaaaaaaaaaaaaaaaaa

SEQ ID NO: 46268 - DNA, 446 bp, Homo sapiens
ctaaagggaacagaagctgggtaccgggccccccctcgagagtacttctagaattaattaaggcggggaacatttctatctggacagtcgtaaggaaggcgccggcccagaatccacaaatgctacgtgtcccttctgtctccctatcccgcatcagctctgtcgtctcacctctcacacatccctacccaactggcaccgacaccactcatgtccccaagaatcccctctaagccagccatgacaaacgctcagctccattcactaccccacagaggatctcggattaagagcacaggacccggccgggcatggtggctcacgcgtgtaatcccagcactttgggaggctgaggcgggtggatcacgaggacaggagatcaagaacaccctggctaacacagtgaaaccccacttctactaaaaatacaaaaaaaaaaaaaaaat

SEQ ID NO: 46269 - DNA, 464 bp, Homo sapiens
accctactaaagggaacaaaagctgggtaccgggccccccctcgagagtacttctagaattaattaaggcggggatgttatcaaatttggaaaatcaggcaagctgagattcttagagtttgtaggtgctcattacaattttattttattttttctgatagtagtaataacatattttctgactatgataaaagccaaagtgttatctatgttctttacgtgaaagttcacttagattctctttctcatatggattatagattgtcccttattcaggaaagcaggacattttttggtctgaagagatttccctctgggtttcatttgtatcaaaagtgaattgtgaatcccaaaggcattcacattgtaagatgatactactagttgggatactgaggttccatttttattcctttaatagcttcctaattatagattccttttcctttaatttcagcctctat

SEQ ID NO: 46270 - DNA, 514 bp, Homo sapiens
  misc_feature 416, 417: n = A,T,C or G
agcgcgcaattaaccctcactaaagggaacaaaagctgggtaccgggccccccctcgagagtacttctagaattaattaaggcgggggtaatttgttacacagcaacagaaaatacaagcctactctccttaagaaaccttcccactgcatgagtaaggattatttttaccttctcaaagtctttgttacagggactacaaaaatggaaggccacacagaccctgagtacaactgtataaaagcagcaaccttaggtttagtcatagttgtctgcattagaactacagaatgttaagagttggaaggaaactgagaggccccttagtatcatcctttatgtttacagataaagaatgcaaggacatgtaatagttcataacttgttcctgatcacatagctgattaaaggccaaannaaataaataaaaaaatttaaaaaaaagcggccgccaccgcggtggagctccaattcgccctatagtgagtcgtattacgcgcgctcactggccgtcg

SEQ ID NO: 46271 - DNA, 640 bp, Homo sapiens
ctaaagggaacaaaagctgggtaccgggccccccctcgagagtacttctagaattaattaaggcaggcacacaagtatctgttatattatttttataattttccatatgcattaaacatttcattaaaagattaatcacttgcataaaaaaatgaaagagaactcttgggtattgcaaattggaaataaaattgtaaaatatagtccagctctatctgataaagactacatatccaaatgtaatatctattaaataataacttttttatttcaccttaatggttaacttctatacaagaaaggtgaaggacaaagacaatactaacaagattaatcttaaggagatatgtcaatctgaactgaggctaaaggcatttttgaattatccacataattgtctaaactctccttttcatcttatctaacataaaaacattaatattttcaaaatcacctggcactggtaaaagattcttgtatctcatgaatgagtatcaagcaccaacaatgagttagatgagatacggtcacacacaaaaaaataatgtttattttgactgtactttttaaatgacaaagagtaatttcaacaaaaccaaatgctgcagtgtggcactcaactataacagtgtattttctt

SEQ ID NO: 46272 - DNA, 525 bp, Homo sapiens
gccaagcgcgcaattaaccctcactaaagggaacaaaagctgggtaccgggccccccctcgagagtacttctagaattaattaaggcgggcggatcatgaggtcaggagatggagaccatcctggctaatacggtgaaaccccatctctactaaaaatacaaaaaaaattagcgggtgtctgtagtcccagctacttgggaggctgaggcaggagaaaggcatgaacccaggaggcggagcttgcagtgagctgagattgcgccactgcgctccagcctggacaacagagcaagactacgtctcaaaacaaaacaaaacaaaacaaaaacaaaaacaactcaaagtgtaagcacccaaagggaaggtacttgtattgcttgccattgtatatatccatagcacctattactctacttggaacacagtacatggccatttgttaaataaatgaacaaacaaaccaagatagtgatgttatgaaaaccaaatgcaaagggagtttcaagaagaaggaatcacttata

SEQ ID NO: 46273 - DNA, 445 bp, Homo sapiens
ctaaagggaacaaaagctgggtaccgggccccccctcgagagtacttctagaattaattaaggcgggaggagtaagttttagtgatctattgcacagcacgaaaatcacattattaataatgtatttgtatacttcaaaattacttagaggagatttcaaaagttttcaccacaaaaaaggaaatgaggtgacagatatgtcaattaacttgatttaattattctgcaaggtatacatatatcaaaacacgctgtattccataaatatatataattattatttctcaattaaaaaatttaaaaaaatcgttcctactttaaggcaatgacatccttatacctaatctttttaaaaagcatatgattaatatatttagtaatttgcatgcctgctttttcaagttaagaatgtaattcttgaaggtttattaatttgtctcaaata

SEQ ID NO: 46274 - DNA, 479 bp, Homo sapiens
ctaaagggaacaaaagctgggtaccgggccccccctcgagagtacttctagaattaattaaggcgggttgcaatgtggattctgacatcgtattgatgagcttttataaagtccattgatgtaccttgtgtttaagtagaactgttacctgtgtgtgacagggataaaaaagcttggatatgggccatgcgctgtggctcccgcctgagatcccagcacgttgggaggctgaggcaagaggattgcttgaactcaggacttcgaggctgcagtgagctatgactgcaccactgcactccagcctgagtgacagagcaaaactctgcgtcaaaagaaaaaccaaggctgggcacagtagctcatgcctgtagttccagctactcgggaggctgagacaggagaatcgcttgagcctgggaggaagagggtgcagtgagccgagatcgtgctactgcactccagtctgggtgagagagtga

SEQ ID NO: 46275 - DNA, 456 bp, Homo sapiens
  misc_feature 363, 364, 365, 366, 389: n = A,T,C or G
accctcactaaagggaacaaaagctgggtaccgggccccccctcgagagtacttctagaattaattaaggcggggtagtcagggtgggaaggtagcatatctaagggattcagaattttctgggaggtggagacttggaatatatttatcacataattctcacagtcagtgaaatggctgattcccagaagtgaatacatatcctagtggaattataaaaggtattggttatatgtattaaatggaaccttacattagaccagtaaaaaaaaatgaaagctattgtagaacagtaaattaaggaaataaattaaaataggatactgactataatacaaactataattttgttgtaaagacttnnnnaaaaaaaaaaaaaaaaaaaaaangggggccccccccccgggggggcccccaatccccccttttgggggggtttttacccccccccccggg

SEQ ID NO: 46276 - DNA, 479 bp, Homo sapiens
  misc_feature 329: n = A,T,C or G
gggaacacaagctgggtaccgggccccccctcgagagtacttctagaattaatgaaggcggggtaagaagaacaaatgcattcatctcttgaggttgtagagggtggcttatgagctctgctgggaacttcagtttttagtgtgttacatgatttgatatagaaggatccatcaggcagctgtgtgtcgaatacactgcagggaagacaagagtgagaaaaccaataagaaggctacaacgatatggctattgttgtgaaaaatcttaaataaattgctaccatataaaatccatcaggattaaacaataatgcatatccaagaggctntattttaggagtatagagatgagttaatatcagaaaaactattagagcagtataccatattaacaaattaaaaggttaaaaaagcatttagttaaagagagcaatagttttcaaagaagcaactgacataatttgatgcttattatatat

SEQ ID NO: 46277 - DNA, 507 bp, Homo sapiens
gcaatgtaaccctcactaaagggaacaaaagctgggtaccgggccccccctcgagagtacttctagaattaattaaggcggggaaagaatttattgaaatgctactttatgcttagctaaaccactaatggtaatgacagccctaatattttacattagttcttccagtatgatagtgaaaccattatattctgaaaatgatttttaccttaatgcatatattaagacctatttaatcaagagtgtcgataatagcaatattgcttttaaaatataatggtcccatatatctgttagcttaggtcacagtttgtctataaatttacgtttattaacatattaagtcatacaaagatagcatgtagctctatttttaaaaatctgtgttacaaagaatgaattaatgacctatatttgtcttctgttctgatttgaggtcgaggatttgattgcacagatccgagaagtttttattcagactttagatgacctcacttggatggatgc

SEQ ID NO: 46278 - DNA, 507 bp, Homo sapiens
gccaagcgcgcaattaaccctcactaaagggaacaaaagctgggtaccgggccccccctcgagagtacttctagaattaattaaggcggggctggactgtattaatatctagagactgtctttatattacagcaaattaaaaccaaatcagttaccatagctttttgaaatagaagagaataaccagagacccccacagcccaataaatcaacaaaaactggaaataccatttatggaaatacagaaatattatgtataaatacattaaaaaatgttctatgttaggcttgcaaaacatgctgaaatgtcattatggtatgtgacattttattcagaaagagggaccatggtaaaatacttaaaaaataggatactgaagtttaaatttctaactcaatttctaacatttaaaaaaatcatgtaagttaccaaaatgttttgagcactacctttctcatctaaaaattagggatacatagccgtaaaattttatgtgcattacatgg

SEQ ID NO: 46279 - DNA, 367 bp, Homo sapiens
cgcaattaaccctcactaaagggaacaaaagctgggtaccgggccccccctcgagagtacttctagaattaattaaggcggggggcaggcaacgtctctacacagagctgctgccacatggctgggaaggactcagatccggtacatccactgatctgccgccaagtgtgaaccctgaggtcagaacaactgaacttggatgaggagggggatacctgtgtactgtagtatcaggtttatgagtacctacaaattcaaatcattttgcatccttcaatacattgaatttcctcaataaacctgtgagaatcattggtagctcaattttacaggtgagaaaactgaggctcagagaaatagcttgccc

SEQ ID NO: 46280 - DNA, 478 bp, Homo sapiens
tactaaagggaacaaaagctgggtaccgggccccccctcgagagtacttctagaattaattaaggcgggtggataacttgaggccagtagttcaagaccagcctggccaacatggcgaaacctcatctctattaaaactacaaaaatgagccaggtgtggtgatgcacgcctgtaaccccagctactcaggagttcgagaccagcctagcttctactctagtctcagtgacatagtgagaacctgtctctattaaaagaaaaaaaaaagaatccaagcacctaagcactgcattttcacttactcaaccagatttgtaaaatgtaaataatccttgctctatctcccttaaatatttatggggaaaatcaaataagctggttagtatacatggacttacactacaaggagttataaaatgagtaaagccttccgttttccttaaaagttcctcagaacttatcattattataagcaaa

SEQ ID NO: 46281 - DNA, 465 bp, Homo sapiens
  misc_feature 419: n = A,T,C or G
gggaacaaaagctgggtaccgggccccccctcgagagtacttctagaattaattaaggcgggacgggtgggtgtgtgcgcctgtaatcccacctactcggaaggctgtggcatgagaattggttgatccctggaagcggaggtcgctatcatcgaatatggcgccactgacctatctagcctgggactgaagctagattccatctcacaagtattatataactaaagacatagtactgttatccattagataacgagcaaaatccagaaatatccagatttgcttttataacccaaggcaggttcacaaggtgaggagtagtagtttttaatcactcgtattttcatttgtagcattgcattccgtgtatttaccttttctttaaacactcttgcttttaatttttaaaaatgcattantgcggccgggcgtggtggctcacgcctgtaatcccagcacgttggg

SEQ ID NO: 46282 - DNA, 473 bp, Homo sapiens
aagggaacaaaagctgggtaccgggccccccctcgagagtacttctagaattaattaaggcgggaggtggatgggaggaaggaaaactggtatctaaccaaatatttcacctgtgttcttggtttttgctactgaattggacagaggctgacaccattcatggtggttctgaaaaaacaaacaaaaaagccactccattcctgattattactctaactaaactgttgttgctctcccttgagtgacaaagtaattgtacctctgccacatcagtgaaaattatactactttaaaggagtttttcttctcacttgttttacatttgtcacctattacatagctgtcctttgggcatctggctagcatctatgagccattggtacatttcttccttgataaatccccagtgtctaggatagtgccggtacatagcaggcatttgttaattacatgatgaatatttttggtaagga

SEQ ID NO: 46283 - DNA, 487 bp, Homo sapiens
taaagggaacaaaagctgggtaccgggccccccctcgagagtacttctagaattaattaaggggggaaaatatgtgaaggttggagaggggaagaacctacattaaaatggatttaaaaggcaaagaactaaatgtaatctgtggacctggtttggatcttgatttagacaattaacaaccacctggtgcttggctcactggttgctcgtcccagcactaagggccaagaataaaaggacatcaatttacctttctcaatcttactccccaatactccccttcactgattctgtgcaccagttgaactgctctgctctgcacattaaatattgcatttttcagctgtttttgtttgtttgtttgtttgttttgagacagagtctttctttgtcacctaggctggagtgcagtggaaccatctcagctcactgtaacctccacctttcaggttcaagaagttcttgtgcctcagcctcctgagtagct

SEQ ID NO: 46284 - DNA, 484 bp, Homo sapiens
  misc_feature 443: n = A,T,C or G
cctactaaagggaacaaaagctgggtaccgggccccccctcgagagtacttctagaattaattaaggcgggagttaagagattacatttttgagaagttcagagctatgttagaatcttggctgtacaactttttagacatcctaccttggaaaacatacctgatgtctccatgtttcaatttattaagtcataaaatgtgattatcttataagtttatggtgaggactgcaccatatgtacctagagcagtgtgttcttatgatgttgataattgttcttttagcataaagtgttgacgtggcaagattcataaaaactaatcagaaaaagaactcaaatattctaccttattatgcattcgcaatgtgtctataatattcaggcttaggacttccagctccagcaaaataaccctgaaaaaaaaaaaaaaaaaaaaaaaanaaaaaggggccccccccggggggggaccccaattccccctt

SEQ ID NO: 46285 - DNA, 398 bp, Homo sapiens
ctaaagggaacaaaagctgggtaccgggccccccctcgagagtacttctagaattaattaaggcgtgactcattggaggaggggaaggtctgtgggagagaagggagaaccgagtccaaaaagaggcaccaggggttcacagtgggctctgagcatcaggtgtggggccaggaaaaccatgaggtaggacaggagacatagggattgaagttaagggaaggaattaagagttcagaatatggcttgtgcaaaggaagggattctagaaacaagacgtggccatcactggggtcaagaagagggcatggagacaggaaatgaaatggggaaaaatgggccgggcgaggtggctcacacctgtaatcccagcactttgggaggcagaggcaggtggatca

SEQ ID NO: 46286 - DNA, 656 bp, Homo sapiens
  misc_feature 569: n = A,T,C or G
ctaaagggaacaaaagctgggtaccgggccccccctcgagagtacttctagaattaattaaggcgggtagatagataatgcgataataatagataagtaataataaataaattaataataaatagaatgaataagactgactacttgatagcacaacagggtgactatagtcaataataacttaatggtatgttttaaaataatgtgaagaatataattcgattgtttgtaactcaaaggataaatgcttgaggagatggacatgctattctccatgatgtacttatttccaattgcatgcttgtgttaagtacatatcaggtactgcataaatttatacatctactatgtactcacagtaatttaagaaataaataaaaataaaaaattatataatgtatgaaaaaagacagtcactaaagtattcatagagccatagattatataatttcatttatgtgaccttcaataattagataaaactaaactgtatttttttggaaataaatcctggatggtaaaattctaaaagaaaagcaaggaaagtatctttgtggaggaagaagtantgattaagagagcacagaggatgggcttccctgtactgacaatgttgtacttcttgacttgaatagtagttgcatgggtgttcactt

SEQ ID NO: 46287 - DNA, 380 bp, Homo sapiens
ctaaagggaacaaaagctgggtaccgggccccccctcgagagtacttctagaattaattaaggcggggagggataagccaggtcctagagaatagtaattttcaatattattgatatctttggaaattaggttctggaatagccagtttattttgcaaagtctactttaaagctacctgtggcacgtgtgtattatatgtattatgtgctgtgtacatgcacatacatacacaattatttcaaaacttcattttagggcatattccataaaactcaatagatcaaaaataaaagaattcaaaaaaaaaactggggggccccccccggggggggcctcaaattccccttaaagggggggttttaccccccccccccggccc

SEQ ID NO: 46288 - DNA, 517 bp, Homo sapiens
gcgcgcaattaaccctcactaaagggaacaaaagctgggtaccgggccccccctcgagagtacttctagaattaattaaggcgggggggaataaagttaaaaaagacttcaccaatcaacgccacccatgttaaaaattactaatgaagtaaaaggctaaaacctcttctacagaaactaacagttccccaacaagggaacagccacaccctatctacctctttcctgcgaagaaatcatctatggttgtttccatacagaaacaagtttcaggtattacagtattataagaaatcactcttctgggaaagtatgtgaatgagccaaaagaataagaggccaggtgcagtcgctcactttgggaggttgaggcgggcagatcacttgtcgggagttcaagaccagcctggccaacatggtgaaatcctgtctcttctaaaaaaaatacaataattagccagggttggtagtgcacacttgtaatcccagttactcatgaggctgaggcaagacaact

SEQ ID NO: 46289 - DNA, 531 bp, Homo sapiens
accctcactaaagggaacaaaagctgggtaccgggccccccctcgagagtacttctagaattaattaaggcgggcatttgggctggaaaaagagtgcttttccttatttctccaataggaaggctatgggtccacgtgacttaggtgcttataaacctcaaatgcccttgctttgctatggtgacaaagaaaattccacatatttggatggttgactgtcaactatttttgagagtctagatatttgctagaaacttctaaaggaatgaatactaagcatataccctccaaatttagtatagaactagaaacaatgagaacaaataatttgtttgcactcataatctcacagttgcacagttaacttaatatgctccctggtggacttggcctatgtcattctgggatagaaatcaaatttcactaaattccattaaatgagagtgaaataacacatacagctgcctcccttatcaatttgactggttataaaaatgttgtttttaactcagtattttggatcccagaata

SEQ ID NO: 46290 - DNA, 458 bp, Homo sapiens
ctaaagggaacaaaagctgggtaccgggccccccctcgagagtacttctagaattaattaaggcgggagtttctcctggtatggattaggaaaatgaaatgagaacaattaaatcctttacccatgacatagttataggcagtggcaaaatcagaactacaaactagttatagtgatatccagtgtagtaacctagtattcctaccatgatcccttttattccttaaactttgagaggtctaaaattaagtcaagatggattaaagacttaaatttaaaacccgaggcatgatggttcgtccctgtaatccaagcactttgggaagccaaggcaggctgattgcctgagcttaggagttcacgaccagcctgggcaacacggtgaaacctcatctctactaaaatacaaaaaaattagccgggcgtggcagcgtgcacctgtagtcccagctacttga

SEQ ID NO: 46291 - DNA, 498 bp, Homo sapiens
cgcgcaattaaccctcactaaagggaacaaaagctgggtaccgggccccccctcgagagtacttctagaattaattaaggcgggggatgagtgggaaggaaaaagcaagacctcctagtttgtaggagtgaaagggctgagacttgacagtggtaaaattgcttttagggtctacctccctctcaaagttttcttttcctgagtaacctgagagcagtcaaaattcctgcaattgaaaactcttctgacactggagagggtaccctacttgcctcactactcccacgaaagctaaaaataaaggctattagtcctcattttctcacacacacagaacgtgcagtaagccatgtcaggagacaagtcaacaccagttttcctaatatccttctttgataaatatgaagaatcaccaaacgtctgaggaaatcagaagcacaaagagaaaactgatgtgaactaatatttcaatgcaccatataagaaactggtaactta

SEQ ID NO: 46292 - DNA, 385 bp, Homo sapiens
actaaagggaacaaaagctgggtaccgggccccccctcgagagtacttctagaattaattaaggcggggtgatggacatgtttcatattttgactgtgggtagatatgtggctctatacatttaataaaacacatctaactgtacacttaaaatgagtacattttacagcaagtaaattctacctctaaaagctgtttttttaaggcgtctcaaatatttcccctaaaaaaatttaagtgatatcacaaatctgtaatatgtgctatagtctaaacagagctttctaaaaggctgcgtggattcttgtcaaaccaaaatgttagaaaacattatttagagtttgaaacaaatttattcacatgtatgatttcaattttttttttt

SEQ ID NO: 46293 - DNA, 501 bp, Homo sapiens
gattacggatgattacgccttgcgcgcacctaactcctcactaaagggaacaaaagctgggtaccgggccccccctcgagagtacttctagaattaattaaggcaggtgatgaagctgagggaagacacttatcatcttaaatcccagagaccaacgctttcaacttaaaaatgaaaatgtcccaattataaatccctgaggtggaaaaggctgcaacacgaaagcattctaagccatgcctttgtgttgtattgcagtcaagaggaaataaagaggtcccctttgtttaataagcaactgaaagtttttctttcatgcctctcatatttcttggcatcaccataactgttgccatttaatcaagattccctttaaactggtgaatgctagcagaatgtctcaagagagctgatttccttcactttcaagttcattgtgaccacgaatgcattaacctgggctgcctacatttcttcctgtgctgtcacataagatatact

SEQ ID NO: 46294 - DNA, 463 bp, Homo sapiens
agggaacaaaagctgggtaccgggccccccctcgagagtacttctagaattaattaaatgagaaatacataaacatattctccttgtgaaaggaaataaaacattataaatacaaaaaagggtgaagtttctttcgaccatgatctttaatctggtttggctcccctgtctcataggtaaccactgttgggacttcggaatatatccttctgtgtctttttctatatgtttacacacatatacttgacactgaaaagatatggtattggttgtattctgtgctgtattatataagtggttgtgcaacttgcttttttttcactttataatacatcttagagctctgcttatgtcatgtggatccagtgcggttttgttttgttttttttttttttaaaagggagttttgcttttgtcccccaggctggaatgcaggggcccaatcggggttaattgaaacctc

SEQ ID NO: 46295 - DNA, 514 bp, Homo sapiens
tacgccaagcgcgcaattaaccctcactaaagggaacaaaagctgggtaccgggccccccctcgagagtacttctagaattaattaaggcggggggggcgtgacgccacgagcctcggcgccggccactgggctttccagccggaaggtttggtacatctctgtctacccctagggaaggaggtgagggagaagttgagagggcagcctggagggggaggggactctgctcctgcgtgtgttctatcagggactgactgtgaggtcaggagcctctgcattctggcacacaggctgggtgactcttgctctccagctgctactgcagctgcacctttgtgctcaatgaatgcagcagccatggccgcacggtcctgtctcagcgcgagcctcctgcagggatggagcagcagcacggggagcaaacccaatgacccacgcctttaccctggggattcgcacagagatggtgctgcctggacaccttcctctactcagaacctgaggaaccactg

SEQ ID NO: 46296 - DNA, 489 bp, Homo sapiens
actaaagggaacaaaagctgggtaccgggccccccctcgagagtacttctagaattaattaaggcgggccatactgagccagtagctgggggaagcatccagtatacctgggcccccctttgtccaccttcctacacagcttgtggacttgcttccacaattttgtttctaaatacactttcattattgtcttaaaactcctaatgccctttgggaggccaaggcgggcggatcacgaggtcaggaggtagagaccatcccggctaacacagtgaaaccccgtctctactaaaaatacaaaaaattagctgggcgtggtggcaggcacctgtagtcccagctactcatgaggctgaggccagagaatggcgtgaacctgggaggcggagcttgcagtgagccgagatcgcgccactgcactctagcctgggcgacagagcaagactcagtctcaaaaaaaaaaaaaaaaaaaaaagcggccgccaccgc

SEQ ID NO: 46297 - DNA, 488 bp, Homo sapiens
cgcgcattaccctactaatgggaacaaaagctgggtaccgggccccccctcgagagtacttctagaattaattaaggcggggtcacataaaatactcttgggcatatcaatagggcacataagtcatcttaaaattccttccactaaaggtagaaaaacacaagacctaagaagaacttataaaactttgaaatgagacctgaggtaaatggatattcaaaggacactggtctagagagatctggattccttatgtctcacataaatcttaaaaatagacttttcattcatataccttatagatattttctcttatagatatgcaaaactcaagatattggacaagtagacagtggaaacaggcatgaaagggccagaaaatactatatccaaaaagagtaccaatgtgattcaataaccaaaaattaccaggtgaccttattctttaacaatacaagtataataaacccagtgcttaagaatctcaa

SEQ ID NO: 46298 - DNA, 463 bp, Homo sapiens
ctaaagggaacaaaagctgggtaccgggccccccctcgagagtacttctagaattaattaaggcggggaaaaaagcctgtgcaggctgggtttctttctaaagtgggaagttaaagcaacgggaaaccaccaggtaggatgtttttcctatattggatggtggcacaaagttctcttccaaattattccagggatgcaatgcaatgcatatcaagtcaatggagggggccatctgcaatattagatattaaaacatattttaagcctacaatagcaaaaacaaggcactgacacaagaatagataaaaggccctattgcagacacaaattcagcataagaaaaatggtgttttaaaaagatttgtgccaataattttggattatatttttattttctttctttatgagtgtttctcttttatataactttaagaatagacctgaattataatatcacatatat

SEQ ID NO: 46299 - DNA, 475 bp, Homo sapiens
accctcactaaagggaacaaaagctgggtaccgggccccccctcgagagtacttctagaattaattaaggcgggatttatatatatgtatatataaaatttacaaatgggtaagttaatttagtctgttatttaatctgtattctctttatttgcctagcaaagcccaaaccaatcagaaattgttatagcaaaaagaatcaggagatcacttagttctgtggttcccaaacccagtgacatcagaattcccctgggaaaccatcttgagggtatccatgagaaatctgtcaggtagttcttatgtagctaccccctgttttctccatttgtggttattactgctctcatcttagaagttggaagcccaaataaggcagctgttaagtattttataaataaatttgcccaagtaattggcacagctcaagtcaaaacaatagtctattctccaaatggaattgttcctgtcagaa

SEQ ID NO: 46300 - DNA, 414 bp, Homo sapiens
taaccctcactaaagggaacaaaagctgggtaccgggccccccctcgagagtacttctagaattaattaaggcggggcacaatttcaaccaactttaaattatttcattctggaagtatgtgttgagtaaatatgaagtataaggcccctagaggtacagatggctatggccgtctaaaccattttactcttaacttttagtgtcatggacctctttgtcaatctagtgaagtctatggaccgctttttttaaaaaagcctttaaacatataaagtacagtacattgaattacaaaaggatccaagaatattgaaatagttcccaaattaaaaccccacaaaaaaaatggcccggggcccccccggggggggggccccacccgcccccaaaggaagtgctttgaaccccccccc

SEQ ID NO: 46301 - DNA, 504 bp, Homo sapiens
  misc_feature 483, 485: n = A,T,C or G
ccctactaaagggaacaaaagctgggtaccgggccccccctcgagagtacttctagaattaattaaggcgggtggatcacttgaggtcaggaattggagaccatcctggccaacatggtgaaaccccatctctactaaaaatacaaaaattagccaggcatggtggcacgtgcctgtaatcccagctatttgggaggctgaggcaagagaatcgcttgaacccgggaggcggaggttgcagtgagatgagatcacaccaccgcactccagcctgggcgacagagcgagacagtctcaaaataaaacaaaacacaacatcctaaactgatttcaaaagaaatagcccaggagcatgattctaggaggcaaacaacactcaataaatgctttagtagataaaagcagataaatattggaaaagcaaaaaaaccaacgtaagattgatctttaaaattcaatttaacacctgagttcttgcaaaananaaaaaaggaaaaaggaaaa

SEQ ID NO: 46302 - DNA, 472 bp, Homo sapiens
aaagggaacaaaagctgggtaccgggccccccctcgagagtacttctagaattaattaaggcggggtttcaccattttggtccggctgatctcgaactcctgacctcaagtgatccacccacctcggcctcccaaggtactgggagccaccatgtgtggcccactgcagggttttgagcagagaaataaaacattggttttatggtatctttagattttaagtattatttctgtctccattatgttttagcctctttttttgactcatgagcaagtaatcaaaatgattcagtattctatgaaatgtactactagtgaaaagtatctcatagataatttaagctcaaatccccactaatttactttatgtgggtagaatactaaaaacagataatattgtttctgttaaattcaatcatgtgactcaaagaaatgagtgtctgtggatggagagacagaatcataattctgt

SEQ ID NO: 46303 - DNA, 526 bp, Homo sapiens
  misc_feature 458: n = A,T,C or G
tcactaaagggaacaaaagctgggtaccgggccccccctcgagagtacttctagaattaattaaggcggggggagctgagaaggggactgagggactgtcccggccattaccattttggaaatctccgctgagataccattgaagagacacagtggtgaatggtactctggatgcacacatgtgtgcggacaggcccatgttctagagtgtgacaaactcttctggtggaatcgcggcctaagccaggcatggtggctcacgcctgtaatcccagcactttgggaggccaaggcaggcggatcacttgaggtcagagttcgagaccagcctggccaacatggtgaaaccccgtctctaccaaaaatatacaaatattagccgggcacggtggtgtgcgcctatagtcctagctacttgggaggctgaggcaagagaaacacttgaacccaagaggcanaggttgcggtgagctgagatcatgccactgcactccagcctgggcgacagggcacgactgcgtctcaa

SEQ ID NO: 46304 - DNA, 489 bp, Homo sapiens
aaagggaacaaaagctgggtaccgggccccccctcgagagtacttctagaattaattaaggcgggggccaaagaaaactaaaagtatgagtggagacaaaatagagccaaaaaagaaatgtaaaaatgcataccataatgccagcactcctgttactagtgtttcacaaggaccaccataagctttgtagcagccagatttaaaaagaaagaatgtaaaactcagcttccttccatcaaaagaactcagttgttcaggtgaatcgcaactgttcttggccttaagatcagacagacttttatcctaacgaccttcataaagaggatataatgttaagttcattcatctcacagtaggcattcaaataagtgtttgttgaatgaattgtagtaccttcaatataagttggtggcattgcatgaaaatgtatttcagcaaaagcagttttgccaaaattgaaggtgcacagtgggcaacaggatgttgttg

SEQ ID NO: 46305 - DNA, 603 bp, Homo sapiens
ctaaagggaacaaaagctgggtaccgggccccccctcgagagtacttctagaattaattaagggggaagtagtataagatacacttatgttagttaatccctgtaaagaagaatgatattttagtggaatatggaggctccaaatagcttgtggaaaggtagtataactagaagtatgtgaatcaatgtattactcttatatgaaagtaaaggcacggttgtccaatgaaccactagtttcccactgatccatcgtagtctggtaattagtgcatgttatggagcattaattagaaaaggtctacatcatatattatccatttatagaggcaacaacattggccctttactggttctgaattgtgagaggcctttgttttgacacttgataacagctcattctgatatgaagtcacttgatcactacaaagttggtgagcagcacagtcttgttaaccattggtttggtttagtatatatcttccaaatttgccaaaccaatggcttttcacaaggtgtttataattgttaaatgcctatgaggtgataactttcatgtgtggttggattaatactggccattaataatttaatcttggatgg

SEQ ID NO: 46306 - DNA, 290 bp, Homo sapiens
aaagggaacaaaagctgggtaccgggccccccctcgagagtacttctagaattaattaaggcgggagataaaccagaattttctagacattcatataagttccagccatgaaatcagacagatttacatctcagaaaactaaagcatattcaatgtaaacttacttttgaaataaacgtgagtttccaaaaaaaaaaaaaaaaaaaaaaaaggggggcccccccgggggggggccccaattcccccttttggggggttttttacccccccccagggggcggttttttaaa

SEQ ID NO: 46307 - DNA, 481 bp, Homo sapiens
accctcactaaagggaacaaaagctgggtaccgggccccccctcgagagtacttctagaattaattaagacgggatggctgagttcaagctaaatagtatttcaagtttcaaattgtttggatttctttttggttacatagtcctaatatataaatcagctgccttctgaaaattggagttttaagcagaatctcactaagacttctcttgttatctaaatctaaataaaaagggatttacatactgtcagtatatactgaacagaaaaccttgtaaaacagtagtaaactggagggatgcattagttttaacacaaagcaaaaccttgtaaactcaggagatagataaacctgccaatagaatcacaattctaaatgtgaatctttatcgaagtggtaactcagtgtaaagaagggttttaaatcagttcattagtctttatggtcgcttccgttgactagaagtaaaaccaccagcaga

SEQ ID NO: 46308 - DNA, 509 bp, Homo sapiens
agcgcgcaattaaccctcactaaagggaacaaaagctgggtaccgggccccccctcgagagtacttctagaattaattaaggcggggggggatagctttaggagatatacctaatgctaaatgatgagataatgggtgcagcacaccagcatggcacatgtatacatatgtaacaaacctgcacattgtgcacatgtaccctaaaacttaaagtataaaaaaaaaaaatccaaagttagtagaaggagaggaatactgaaaaatacagaaaaaaataaaatggaaaatagaaaaacagtatcagtgaaattagggagttggttcttgaaagcataaacaaaatagacattttccaaccattaccaagactaagaaaaaaaagagatgacttaaataaatcaaatatgaaagaggagatattataatttatgccatagcaataaaaaatgaaccattagaaactatatgagtgctagaagtcaaaaaattagattacctaagaaaaaaat

SEQ ID NO: 46309 - DNA, 497 bp, Homo sapiens
aaagggaacaaaagctgggtaccgggccccccctcgagagtacttctagaattaattaaggcggggcagtgattcagtaatacttagtatatttaatcagccaacttcaaacctgtgaagttctactataataagagttttgactttttttaaaaaggggatagggcatgagggaaaaaaaaacaatcctagaattttaagttctagaagtagtggtagagtgtggtgggcaagcaaaagaaaacacattgtaaatacatgtcctaatgggaacgatgatccctttcttcaaaaataaagccaaaaaaaattaaggtatctaagagtcctctgattgaaccttagctcggcaacactctggggaaactaaagagaaaaggagggaggcagaaagagagagaggaagaggtaaagagagacttacagatttgcaaattcacatacacagacatcaaagtgaatagtatcacttctgaacctgaataatgttaatactg

SEQ ID NO: 46310 - DNA, 632 bp, Homo sapiens
  misc_feature 345: n = A,T,C or G
tgattactgccacgcgcgcatattaaccctcactaaagggaacaaaagctgggtaccgggccccccctcgagagtacttctagaattaattaaggcgggcggaacactatgccgtgagaatgacatctccccaccatgcaaaatccctaacccttctatctactcaaaattcaactatttgccatgcctggtgcctctcatgccatctactctagatgctagggcaacacaatcgattggacccaatacgcggaagttacgttgcactgagaccataccactccactgcactctagctacgaaatcagaccccatctctttcaaaacaaaaacgaacaaacacgnaccgggttggccaggcgaggtggctcatgcctgtaatcccagcactttgagaggctgaagtgggtggatcactaggtcaggagatcaagaccatcctggctaacatggtgaaacaccgtctctactaaaaatacaaaaaattatctgggcgtggtggcggatgcctgtagtcccagctactcaaaaagctgagaccggagaatcacttgaatccaggaggtggagattgccatgagctgagatcgcaccactgcactccagcctgggcgacagagggagactccatc

SEQ ID NO: 46311 - DNA, 434 bp, Homo sapiens
tacctaaagggaacaaaagctgggtaccgggccccccctcgagagtacttctagaattaattaatattttatattcacttaaaaaactagacatgcaatgtctaattacttggtaaagcttatctttcagtaaatcaaccacaagataaacctatttatcattcttcttaaaaacatgcaaatatataataagcatagcaaattggaaaagtctaatttagatcgaaagaactgttgctagaatattattagaatgaaattacaagaaacattcagtgaactcttaaacattcaggagatcacatatcttgggattcacagcaagttagtagattttttggctttagaagaaacatatgtgaatttattttttactccaatattgatccattgacatacatattggcgaaccaaatagacacatttacacatct

SEQ ID NO: 46312 - DNA, 559 bp, Homo sapiens
ctaaagggaacaaaagctgggtaccgggccccccctcgagagtacttctagaattaattaaggcgggtgaatcacttgagcccaggagttagagataacttctgatccaatagaaagctctagagcacacagagcaaatatacttcatcagtcgagctgtagtttctctgtaaaaaacttcgaacgacttccaaagttcaaaaaaaaaaatgtaaagacaacagcatgattgctaaagattcatgtggtcaaagactggaagaatgacacaggggaggtgttccctcaggggaattgtgggtgatttctcttaaaaaaaaatgcctcttattgtgatacccaatcaagtaaaatcatgagaggagaaagtggtttgatataaaggaagcacttgggattcagggaaaccagaagagaaactagccccttcccttgctccctggacaacagtcaagtggaacaaagcaaactctagattatcacaacgataaggcctagaagtacattggggggatgcattttcatcctgaatcagaactaccatgctttttttaaaaaa

SEQ ID NO: 46313 - DNA, 460 bp, Homo sapiens
aaagggaacaaaagctgggtaccgggccccccctcgagagtacttctagaattaattaaggcggggtaagtccaaactggttatgtgtctggtacaatgagaagcatgcttccccaacaccgcaaaaaagaaaggagagagtgagagcaagagatgagatgtccttaggacaactatttaccaggtaaagttgaattcagaaagactcataaggatttaaccatatgagaaaaagccaaaacattccttaaagccccagtatcatgacacatagacataggaagaaatatgcaaagcaactggaatttcattgatgttggagcaatgagcaccttcctatgcctacatgactagatacaggtattagccctgtttagtccgaaatggattgggttaggtatttgaacctgatgaaaacacagtgataagtgagattcttattaacaaaaaaaaaaacttt

SEQ ID NO: 46314 - DNA, 623 bp, Homo sapiens
ccctcactaaagggaacaaaagctgggtaccgggccccccctcgagagtacttctagaattaattaaaattaaccctcaaaatcttccggcatataaattggtgtttgggaattaaaaaaaaacttctggcataggttttttcgtttgcttttatataatgtgaaaaatagcattaaatgtgaattgttttgtgtcttctgaacaagttggtagacaaatattatttagaagtttgctctaaaaagatgatttcttaaggatataaatccagagatttagttctttcttaagtttctaaggtcaaactcgtggttttttgtttgtttttttctattgatgagtttagcaaatttcagcaaatactttgaagtaaggagcttttagataatgtgtagtcacatttacaaccttagtagaattttaaaaacatttaaaagtgcatttctaaattcagtatattcagtttctatttcaagaacctctgttccctgatttaaaaccttttcaagtacataagtatcttttataaatagaacaaattagtcttaatatgtagaaccttgaattatcttggctatttcaatgcctcagataacttaataagatttctactttaaaatga

SEQ ID NO: 46315 - DNA, 518 bp, Homo sapiens
  misc_feature 498: n = A,T,C or G
cgcgcaattaaccctcactaaagggaacaaaagctgggtaccgggccccccctcgagagtacttctagaattaattaaggcgggaggatcacctgagatcaggagttcgagaccagcttggccgacacggcgaaactctgtctctagtaaaaatacaaaaaattggctgggcatggtggcacatgcctgtagtcccagatactcaggaggctgaggcaggagaatcgcttgagcccgggaggtggaggttgcagtgagctgatatcatgccacagcaactccagcctgggcgacagagtgagagagactccatcccagaaaaaacaaaaacaaaaaacccacattagatcaggcttgttatagagtctcagggagagttttttttctcccttctacacagcaccaaaatcaagaaaggcaagattctttgctgcccttcttcatgacaaatttactttttgttcatgttcagagtgtagctgtttggaatcccagctntacgtagggaatctcctgtt

SEQ ID NO: 46316 - DNA, 434 bp, Homo sapiens
aaagggaacaaaagctgggtaccgggccccccctcgagagtacttctagaattaattaaggcgtggtgatttataggcctgtctgaatacagatcgcacacagtattgaaatactggaagattcaaacactgtctatgactcaaatagcacaagcagtgatagtaaattagctaagtgctcatctctccagacaagagtttccttaggaaaataatatctatttttggtatttcagtagctctagaaagagatgaatactactaaaagagatgaatatgtcaatgctaagtcatgaatgttttaaaaagccacatttctacacaaatggaaggaaaattttgctttttttttttttttaaaaaacttatttttattctattattttgaacacattgtttcacccccactcatagctgctttccaaaacagtttt

SEQ ID NO: 46317 - DNA, 497 bp, Homo sapiens
aaccctactaaagggaacaaaagctgggtaccgggccccccctcgagagtacttctagaattaattaaggcgggaggatcagtttagcccatgagtgagagaccaccctggacagcacagacaggccgtgtctgtacgcatacaatgctgacatcgtcgtgtgagcacacacctgttctgccaactactaaggagctgacgcatcccgattacttgaatctgaaaggttgagctgcagcaagccgtgatcgtgccactgtactacagcctgggcaacagaacacgaccaactggaaaaaaacggactctttaatatatgctcctaagctatttatggaaagaagctaagagtttccacttctctcttctctttgtgacttcttgatttgtttacactacctatttctacttccttacctcctgctaactcatattcaatctaaaaaggcactttaattcgccaatgactttaaaataccgaaaataagatactttcc

SEQ ID NO: 46318 - DNA, 536 bp, Homo sapiens
gcgcgcaattaaccctcactaaagggaacaaaagctgggtaccgggccccccctcgagagtacttctagaattaattaaggcgggcggatgatctgaggtcaggggttcgagaccagcctgaccaacatggtgaaaccctgtctctactaaaaatacaaaaattagccgagcatggtggtgtgtgcctgtaatcccagctactcaggaggctgaggcaggagaattgcttgaacccgggaggcaaaggttgcagtgagctgagatcgcaccactgcactccagcctgggcaacaagagcgaaactccatcccccccctcaaaaaaagtgttttaagagtcctaaaacatggctttgcctggaaaccaaatgcaagaggtgggacagagggaaccatcggtcagtctccaagctccatggtgtggctatgtcttagaaaaagaatttgcctggccaggcgccggtggctgacgcctataatcccagcactttgggaggccaaggcaggcggatgatctgaggtcaggagttcgtgac

SEQ ID NO: 46319 - DNA, 540 bp, Homo sapiens
taaagggaacaaaagctgggtaccgggccccccctcgagagtacttctagaattaattaaggcggggtatctaagaattgattttataaaataacatattttaagaatgagaactttctcaagttattttactcccagaacaaagactataatcttactatatttttaggactctcgtctagggcaggcttttgatataaataaatgatgcattaacattatatgaagacagaagtgtatgtgccagcagaaaactaaatggggagaattgtatgtttatacaactccaaggtcagttcactaactccttcctgaacatcacagctcagatttttttcttcttttgatacatgttcctttttctgttagtagatgtctctttatcaaacattccataaatctgagtctagtgagataattttttattaactctccctttacctatttctgtgcagttttgtaaatatctaataagcagttgcataaaacaacctagtaatctgaaaacactggacctaaaactaaaaaaaaaatagaaaa

SEQ ID NO: 46320 - DNA, 571 bp, Homo sapiens
ctaaagggaacaaaagctgggtaccgggccccccctcgagagtacttctagaattaattaaggcgggggcaatctttaggctaatgatattataaaattgtttgtaaagcctggggcttaaacatctctagtgccataactagctactgttttaaaaaggacatttggttcacatttgcatctttgagataaagatttttatgtcagaagttcagccctctggacagcgtaaaatcttaagaaatactgtctgggttttacgaattgtccacaaacttagtgtttggtttttgaagatggtttgtggcccaggctcccatgtgacctcaccctccaaaggttaaggatgcagtctaaagaattatccataagtttaaagccttctaaaagttattaatgttctcaacttgtataaccttgtctatgctacctacatgctatataaaacagtgttttctcatgtttgttcttgaattcttgctagtttcaagcaggttcactagttttctaattactatagttggtgaacaaattctatactcacttcttttgattagatatatttcaatca

SEQ ID NO: 46321 - DNA, 472 bp, Homo sapiens
aagggaacaaaagctgggtaccgggccccccctcgagagtacttctagaattaattaaggcggcgggaatactgcctcctatgcctttaactggaaaactcgcagttattcaacaggcaaactaaaagtgttggcagagatgtaattttaaagcacaattccacacattgcttcagtattacagctgctccttgtttgtttaataatagaactgatgagtagataatttgagaggaaagctggtgcaggtgtagtgctatttagatgtcatggaggacacatgtgacatctgcagctagctatatggtaaaagcaaaacagaagttaaaatcagccctgtgtcaaatctgcatagttttaggcttcagagagtttctctgtatgttgaggccggaagtttagtataattccaagggaataatataagaaccaacatttgtagattttgccttctatgggggaactcattcaa

SEQ ID NO: 46322 - DNA, 447 bp, Homo sapiens
accctcactaaagggaacaaaagctgggtaccgggccccccctcgagagtacttctagaattaattaaggcggggggatatgaaatattttatgtctaaccttaataagccccacctagcaatgcagggctacaatgatattgaattttaactagatctagagtacaacctctaagtgtagattcaacattaaagcaaaatacatgcaactagttttgaaattttgagtaaactgacaaaggagtacttttaaagtaaaaaaatcaaggaacacccaatgttaaaatataacatttgaaaaacatttcaaaaataatgaagctttaaattggcaaggtccgaaccatcaacttgcttcaatttgaacacttaacgcaaacaagaaatgcagcagctgtcagatgccgttagtgattcaactctgaaataaaaggttccaaccataac

SEQ ID NO: 46323 - DNA, 358 bp, Homo sapiens
cctcactaaagggaacaaaagctgggtaccgggccccccctcgagagtacttctagaattaattaaggcgggaggggtggagaaaggggaaagcatggttaacaggaaacaacatgtaacggaagagacagcccagatgtgtctggctcacaacagacgtgatcatgttatgctggcctggaagagcatcggatcagacgtgacaagtcactgcttagagaccatcaagcaaatttatatatagattggagaaaaaaaaaaaaaaaaaaaaaaaaaaggggggccccccccgggggggaccccaattcccccttaagggggggtttttacccccccccccggggccggttttaaaaaa

SEQ ID NO: 46324 - DNA, 487 bp, Homo sapiens
taaagggaacaaaagctgggtaccgggccccccctcgagagtacttctagaattaattaaggcgggaggatggttttagaccagcctgcgcaacatagtgagactctgcaactatttaaaaaataataataataaaaagtttgtttaaaagaaaacaatggaagttctgaggtgacgtctgaacacgtcatgttatatgctttatgaatccatcacacacatttccttttacaatgtgggatctggtcaaggtaaattctctgtgaaacctatgagggaaatggacagttctggagactaacacaaaccttaaagaacttgggagtcttattcttcatatgatcatcttacaccatcaggtactttttgtgtggtgaccctctgggtggggaatcttcaatctttttagttcctccaaaataaaaggatgatatttaaaactgtagaaaggggaacaggccaggcggggtggttcatgcctgtaatc

SEQ ID NO: 46325 - DNA, 309 bp, Homo sapiens
aaagggaacaaaagctgggtaccgggccccccctcgagagtacttctagaattaattaaggcgggagataatctttgataaatggtgtctggaatttttcttaggcagaagaaaatcatttagattcttacctaaatgattagagaaaaataggtcccaactggaaatagtaaaataaaaaatcaagccactggtgaacttaaaaaaaaaaaaaaaaaaaaaaaaaaaaaggggggccccccccggggggggcccccaattccccctttggggggtttttataacccccctcctgggcggtttttttaa

SEQ ID NO: 46326 - DNA, 529 bp, Homo sapiens
taaagggaacaaaagctgggtaccgggccccccctcgagagtacttctagaattaattaaggcggggccgagagggcagagcccaagcctggaggggcagaactaggttcaacctgtgggctaaggcttgcctgggacagggacctgtagaggaccaggcggggtctgaactgcacgtgcagtacggttgactcgggagactagcaatccagagggtgtcgtaagcaggtgtttatatccattcgctgagtatctaaactagtgccaggtctttggtatgtctttggtactcccccatccccacccccaacgtatccatctaccctatcccacctccccaaaagaagcccgaataaaacaaaatccttgatctcaaggagctcaacatctatttggcacggggggagggggattttttggggaagggcttatggaggggctaatttttaaaaattaagttgaatgaagccgggcgcggtggctcatgcctgtaatcccagcattttgggaggccgaagcgggtggatca

SEQ ID NO: 46327 - DNA, 373 bp, Homo sapiens
actaaagggaacaaaagctgggtaccgggccccccctcgagagtacttctagaattaattaaggcggggaccggggcctctgggtggtgcgagcatcatgttgccttttaatatggagcatgtgccatagctctccaggagaacccctctgtgtcacagcgaacctcagtcactgacactcaaaagaaggaattatttcaactcaataataaacaaataaccctattttaaaatcaaaaaaaaaaaaaaaaaaaaaaaaaaaaaaaaaaaaaaaaaaaaaaaaaaaaaaaaaaaaaaaaaaaaaaaggggggggccccccccgggggggggccccccccccccttaaaagggggaattacccccccccccccc

SEQ ID NO: 46328 - DNA, 485 bp, Homo sapiens
tacataaagggaacaaaagctgggtaccgggccccccctcgagagtacttctagaattaattaaggcaggagaaaggcgtgaacccgggaggcggagcttgcagtgagccgagattgcaccactgcactccagcctgggcgacagagcgagactcgtttcaaaatagtaataataataatagttaatactcaatgagtgcgtactatgtatgagggaccctactagcacttgataagtaaaagttaactgaaaattcttaatagccccatgagataggcaggcttattatccccccattacaggatgggtgtggtgggtatttcaggcacagacagattacgtatcctgcccaaggacccgcagctaaataaaagccaagctttcagctctacggtgtgactccaaacctgtattcccagccattacactataattcctcaaagtctgggccatgtatttaggcagcacctagcttcaatcatca

SEQ ID NO: 46329 - DNA, 469 bp, Homo sapiens
  misc_feature 453: n = A,T,C or G
cctcactaaagggaacaaaagctgggtaccgggccccccctcgagagtacttctagaattaattaaggcgggcgtcctaatttcacaactgacgtacatcttggagactatctattataacttccctgattatatagagaataaaatgaagttcacagaaaggaggtagaactgagatgacaactcaagttcctagagtcatccatcaaataccctttataaaataacaagcttttcctcaaatactcattctaatattggcacatgtcacagcatgtgaatgtggggtctctgtcttatcactgcgcttatagagacaatgtttgccaaaagaactgtgccactatgcatgatattatacatgtcctatttaaaaatactctttctcaaatcgtgtgcatatccaggcaccggtatcacatgaaaagcttctggctgcgatatttactatanagactttttgaaataa

SEQ ID NO: 46330 - DNA, 542 bp, Homo sapiens
ctaaagggaacaaaagctgggtaccgggccccccctcgagagtacttctagaattaattaaggcggggcagggagcattggataagagcaaaaccctcattctccagtaacatctcaccatgtataaagctgctaaaccaaggaggagcagcaagagcacataattgagaagtatggagagagctaagacaaaaaaaaatgggtgaaagctttgaaagaagctgacgctagggccgtaatggaggagcaaaggagggccagggcttggtgagttccacagagacaatagtttctacagattctacagtttcagtatttaaactgtactaactttgggggttctttttgtttcttttatctatgtatctgtatttctttggtaactattaaaataaagaaacacactagaattccaaactaaaaataacaggctgagggcagtggctcacacctgtaatcccagcactttgggaggccgaggcaggtggatcacctgaggtcaggcgtttgagaccaacctggccagcatgtcaaaaccccat

SEQ ID NO: 46331 - DNA, 451 bp, Homo sapiens
ccctccctcgagagtacttctagaattaattaaggcggggccttgtcggattttagtgtaaccgcgtgttgggtatatacagttattgctccggtttaaaacaaatctggagatggacagtgggatggtcacacaacattgtgaatatactcgctgccactgaactacacacttcaaaatgcctaaaggataaattgtatattatgtatattttaccacgagagaaagttataaataaatctttaaaaaattgtaaatatatatttattaaaattaaatagaagtcagaatactaaaataaatagggcagcagtaaattttaggcaagttacactaataatgggcactcaacaatttgtattcttttagtaatacaagcagaatttccatgtttgaaagtttcaatgaaacgttttcagatccatttccctttgtagatggtaatatccct

SEQ ID NO: 46332 - DNA, 548 bp, Homo sapiens
aaagggaacaaaagctgggtaccgggccccccctcgagagtacttctagaattaattaaggcgggaggaacatggaggagtgaagagggatgtcaccttgtaatgaagagatggcagtgaggactctgatggtgggcagactaggggaagacctttctgtttgttttcagcttgccccttagcatctcactatcctcattgataaaatgaagctaaggctgttttctaggtcatggaggaggattctatctgacaatgtctattaattgcctagtataatacctggcatgtcatgttcaataaatactaccagccattattattgttgtttttgcagctattattgtcactgttgttattttactaatgtcggtgagaaatcaatgtctgaacttgaaatttctgtctcttcattcattgtctggtgttgtaaggtcacatggctgcaggagaaagacagagaccataaatgacaacagtggactaaaagtaccaaaaaaagaagaaaaaaaaagattctgtggaggatatttattatctaaatgatg

SEQ ID NO: 46333 - DNA, 480 bp, Homo sapiens
ctaaagggaacaaaagctgggtaccgggccccccctcgagagtacttctagaattaattaaggcgggttcttcccttgtctcagtatccatgagcctctctgggtttgagcatttctccacactgaatatggattctgtgtttaacaatacggttttttgtctgtttgtacaaaacctaaacacaagaatctagttgacctagtgcttagtcaaagaaacggtgatctctttcaacactggaggaaaatcattagtgttgtatttgctgaaagaaagtgtatgggcctccaaaacaatatactcctagtaagcatacaatatactcctttgcaaggtaagtttaaacacaatttttatgttataggctgacaatagcaactaacctcctcctgagatacaaccccattgctgtacagtatatttttctgcaacaatcatgtgttatttttgagatattaaaaataaaaaaatagttaatt

SEQ ID NO: 46334 - DNA, 412 bp, Homo sapiens
ggggtaggagggaattgaaagttattgcttaatgggtatgaagtttcagtttgagaagttgaaacagttctggagatggacggtgggatggtcacacaacattgtgaatatactcactgccactgaactacacacttcaaaatgcctaaaggataaattgtatattatgtatattttaccacgagagaaagttataaataaatctttaaaaaattgtaaatatatatttattaaaattaaatagaagtcagaatactaaaataaatagggcagcagtaaattttaggcaagttacactaataatgggcactcaacaatttgtattcttttagtaatacaagcagaatttccatgtttgaaagtttcaatgaaacgttttcagatccatttccctttgtagatggtaatatcc

SEQ ID NO: 46335 - DNA, 248 bp, Homo sapiens
atcgcgcaattaaccctcactaaagggaacaaaagctgggtaccgggccccccctcgagagtacttctagaattaattaagggggcagtttgaatcagaacctcacatttccttttgccacatctttatgaccatggtcattactcccaccctctgcaagtacctaagactctttcacagaggaattcatgtctttataccagtaatattttttgactaaattttttttccatttttcttgttgataa

SEQ ID NO: 46336 - DNA, 392 bp, Homo sapiens
aaagggaacaaaagctgggtaccgggccccccctcgagagtacttctagaattaattaaggggggctgggcaagcactaactggagagtctagactacaacataatggacaacaatacaattttttctctttaagatattcagtaaataatagatatccatagtagaaacctctttattaaaagcaataagtcaattataatatagcatttttagatattttcttatctaaaagaattgtgccttgagcttcaagttacgtggacacaggaaatcccgttgcattacagtgctattaaaccttctaccacagccacagtatcacgatgattaatgcttaccatgaccttcaggtactgaaataaccataactgcctttggatcatcgaaaag

SEQ ID NO: 46337 - DNA, 598 bp, Homo sapiens
aaccctcactaaagggaacaaaagctgggtaccgggccccccctcgagagtacttctagaattaattaaggcgggcgccgctggctacgcgaatgattggagctaggatctgaagcgtaagtgttgtcgtgttattgcttgatctgcgaaggaataaatactaatatctggtgctttcatcattagtccaattatctaaccatcctttcatccattgcttttcttgctgctccttagtcaagggtgtttctgtagacttacgtccaagtggtttctcagccaacatacctcagtcttcctgagccagttgcttagaatccattctgacttgtccgttccatgggatgcggtagttaaatacattaatattacccctgaatataacctagataatagtctggtagcatacttgcattattgtgggatgttgagtggaatgctgagctctatgcttgccaaactatatcacctacttatgctgttctcatcaaacatttgaactctggatgtcttccaagaagcttttttctactatttcattttggtaaaacaggctacttaggaagtcaaaagagacaaaactgctgatttatgggtc

SEQ ID NO: 46338 - DNA, 487 bp, Homo sapiens
ccctcactaaagggaacaaaagctgggtaccgggccccccctcgagagtacttctagaattaattaagggggaaaaaatccattttaagaaaaatgtgattctacaactacatggataaatctggcattatactgagtggagtaagtcagacataaaagagtacatactgtatgatttttttttatatgaaattctgtaacaggcaaaactaatctagtgatagaaatatgagcatttgtctggggtagcaagtggggaggtagactgactgcaggagggtatggaaagccttttgggagagagggaaatgttctaaatcttgattggggcatatacatttgtcaaaaatcatcaagctgtacacttaaaatctgagcattttatatgtaaattatacctcaatttttaaaaactgtgagccataaagagccaatgtcttcaaaagtagcaaagaaatatcaaatatgttaaattatccacccatgc

SEQ ID NO: 46339 - DNA, 503 bp, Homo sapiens
acgccaagcgcgcaattaaccctcactaaagggaacaaaagctgggtaccgggccccccctcgagagtacttctagaattaattaaggcgggaatgtatgaacaaaagttacctaaacatagactttgattggcacagtaagcttttgtaatcagcattttcatcctttcctctgcctaaatgcaaactggccataaagccaataatctcctaaatatcccttgaatataatccccagagaaatgaaggactggtaagtaaatccctattacataaagctgtttgctactattccaagaatttaagatttgacaagctatggatattgttcatacatacatctagtaggatcttaattttccttctaaatctgaaaaaaaaaaaaatcaagtcaaactggacttttctccaacagtttactgactactaaaatacagtaggtactaacaatctaagaacacagatttttttaaagcttacagatgaatacttttatttataag

SEQ ID NO: 46340 - DNA, 555 bp, Homo sapiens
ctaaagggaacaaaagctgggtaccgggccccccctcgagagtacttctagaattaattaaggcgggggagcacacgtgcatagcaatactgaaatgctgcaatatacgtgaagtaagccaccagcctttgacccccgagcttccattaagactgtcatgttgggcccaactgaagtgaaggagaggaggagacagcatactcaaatgctctgctctttttcaaggcagtgattagacaattgcttatcattgcattcgccaaacctggctcttgcatgttccacaaggggccaggtatttgagactgattaaaagaaggtgatgtgatttcctactcctaccggaattggtgggttcttcgtctcactgacttgaagaatgaagccacggaccctcgcgcctctgccatccacgaaggcatgccagaaaaacagttggaaaagatgctgatcaaacctatcagaatcttatgacatcttaactatccccttgctatggtctgaatgtttgtgtccctgcaaaattcatatgttgaaacccaaccccatggtgat

SEQ ID NO: 46341 - DNA, 526 bp, Homo sapiens
aaagggaacaaaagctgggtaccgggccccccctcgagagtacttctagaattaattaaggcggggtaagtctggattcataagtagaaagttacctacatggtgtgacttcatagaacttgtgttgacaatctcttcagcaccagcccttgtgggcaccttacagcactatatcatctaaccctcctcacattgctatgaggtggggaacactgccccattttacagagaaaatgttcaaaaaggtaaatggcgtctgtccaagatctgtctcctgccagaactcctgttctttctaaaatagctcagtgcctaagtgaaaccaaaatatctctcctccttggcctgaaatgccaagacaggagactcagttggtttttttggggcggagtgggtggttataggcatcctctggtaaacactgctgggctcacactttaagacaggttgaggctcacagggaggactgctctcagggaacacaccgacactgaggcaagagacaagctgtctcctggaacatggg

SEQ ID NO: 46342 - DNA, 374 bp, Homo sapiens
ctaaagggaacaaaagctgggtaccgggccccccctcgagagtacttctagaattaattaaggcggggagggggaggggggtcccacagtgagagaacataaagttaagatccaggccctgagtcaaactgaccctgctgaaggggtttgtaaaagacttttcccagtggtaaaaatacatggtttttttggcctgtagcatatacatgtttttatatccacaggctcttagtgttaaacaaacacttacaaaatctgtaagcaaactaacatatcctaatcacgttccaaaaagtaacaagtactcgaaaaggctcaaaatgaggtaaatggcagcctttaagaactgtaatacatcctttcaaaggcaaaat

SEQ ID NO: 46343 - DNA, 456 bp, Homo sapiens
tgattacgcctagcgcgcacttaaccctcactaaagggaacaaaagctgggtaccgggccccccctcgagagtacttctagaattaattaaggcgggagcaggcatctcacttgagcagaacaggtgcaagagtggggtgtgttaaatttgagatgttaattcatctccaagtgaagatgttgaatagatacatggatatatacatttgtagtttaggaagatgtcttcccagggatgttaattggagtgagtaatgcatggattatatttaaaatcatggaattagattgggactactgtggggatgagtaaagttacaaaataggtcaaaagattgaggcctagatgacttcatctttaagaggttgggaaaaatgagataaaaaaccaaaaaagcgggccgccccccggggggagccccatttccccttttgaagagactcttcccccccccc

SEQ ID NO: 46344 - DNA, 404 bp, Homo sapiens
ctaaagggaacaaaagctgggtaccgggccccccctcgagagtacttctagaattaattaaggcgggagatggttccattattttggatgaagaaaggtatttagaaaagagaaaaagtgagattgtggttacatgagaacaaacatgctttgtctagtgaaagaggtcctctttctgtattggcctttgtcacttagaccttgacgttcttatttgcataatgaatattgtaaatagaaaagtgggttagattaatttgtaaattttagtaatttttataactattttgtatgagaagatgccctatcatctattaacctaacaccattgttttattatctttactggtcattgagtcaggctgttgaactaatcatatgctgtcttccactgaggataaatt

SEQ ID NO: 46345 - DNA, 474 bp, Homo sapiens
taaagggaacaaaagctgggtaccgggccccccctcgagagtacttctagaattaattaaggcggggtaaatgaaaaagatcacaaacagcccctaccccactagactgtaaactctacagcagcagggcccttgactctgttcaccattaaatccccaagaatcatacagaggtaaaaatatatctgtaattttaaaacagaaagccacgtgaagagaaagttcatttatttataagaaattggcctggtgcggtggctcacacctgtaatcccagcactttgggaggccgaggcgggcggatcacgaggtcaggagatcaagaccatcctggctaacacggtgaaaccccatctctactaaaaatacaaaaaaattagctgggcatggtggcaggtgcctgtagtcccagctacttgggaggctgaggcaggagaatggtgtgaacccgggaggcggcgcttgcagtgagct

SEQ ID NO: 46346 - DNA, 531 bp, Homo sapiens
taaccctcacgtaaagggaacaaaagctgggtaccgggccccccctctttattacttctagaattaattaaggcgggaatgaggtaacatgactgttgatggtactcatctaaatgtttaaatatattttgaagttttaaaacttaagccatttgcagttttagtttaaaattcttggtttcttcatagcagcaagttaagaattgtggatgcttcgatattcaactatttacactgtttagagaagaagctgtgctaggagaaaggggagaaaggaagaccactggaggcagccactcctctgttctgggtatttcacctctgctctgaaacttgcaggctgcattgagcaaaagaaaaacaatgtgctttgtgacagcatgcgtgaatgtagaggactttatgctcagtgaaataagccaggcagaagaaaacaaatactgcattatctcacttgtatgtgaaatctaaagagttcatttcatagaaacatagagtagaatggtggctataatggggaagagggagctg

SEQ ID NO: 46347 - DNA, 419 bp, Homo sapiens
ccctactaaagggaacaaaagctgggtaccgggccccccctcgagagtacttctagaattaattaaggcggggggagaggggaagggggccaatttcatcatgctcagatgggcaattcgtggttagcactggtggatataggctcactttgaactcctattagctatttgacatctgataacttgactcaaccgctatgaccaaaagcacccctcccccatgggagttgcttttcattgacagtgcccgaagcctggaaggaaaggcccctgagtgcccccagaagtcacccactccatgttccaagccgctgacttttaacttggacatctcgattccctgaagcccagagccttctaagtaaactgctgtctgcagtctgtgggtttctttagaactgactctctaaaaaaaacaa

SEQ ID NO: 46348 - DNA, 653 bp, Homo sapiens
taaagggaacaaaagctgggtaccgggccccccctcgagagtacttctagaattaattaaggcagggaacagtgctttcatttattttcacgataatcttacgtgtcaatagtccatagttagcaggtaaataatatataccaagataaaagataaaaacacttaaacatgaaaattttaaagttatgtcaaattatttccaaaattccaattaacccataaaaggcaaagggaaagaggttggcagaaggcaggtttcttgcatccccatctatggagttactctgggcactaggcatacttgatcagcagacatcccactgtgtaaatgtagaaaccagaaggagaagtagtggtagtggtagtctacttctaccatattgtgtaaaagtagaaaaccagagcatgacttcctgtcctttgcactactgaattccaggcgtgctgaaaaggtggatgtaagtcaacttccaaagtagaaaccaaagaagtactgttgaaagaaatgctgatttttatgcagctggtaaagaaactgccaaatacaatgggctctacctggatgccaacacataaacactttgacctcttacttcaccgctagtagaattcttctggattttataaaagcaggccatgatcatgggtgattc

SEQ ID NO: 46349 - DNA, 548 bp, Homo sapiens
gcgcgcacttaaccctcactaaagggaacaaaagctgggtaccgggccccccctcgagagtacttctagaattaattaaggcgggggggctgggaaagccggagagtggggggcaggggctggtcaggtcggtatcccagtggaaatggcttaggagcggccacgcattgcttcttacacgaaattaagtaactcgctctgggtcattcttgcagcttgcatacttggcagagctgcagccagatcccgtgcttctaactcctaggttgcttgtgttgcataattgagcctacgccttaattattgtgcctccaaggagtgtattttggaaagacccctacgtccctttcagaaacattttcgagcacttaaataccaagagatttatattccctctagtcctcacgtaacaaacacctctgcgaggtgttatccccatcttaccaaaaactgaggtttgaggttggttgtgcttggtcacaccaacgatggcgagctgggattccgacccaagtctgctcctctatgacaaattcataaaatacaaa

SEQ ID NO: 46350 - DNA, 411 bp, Homo sapiens
taaagggaacaaaagctgggtaccgggccccccctcgagagtacttctagaattaattaaggctggtctcgaactcttgaccttgtgatctgcccacctcggtctcccaaggtattgcatttgtatgcaatgaccaatgacttatcgttattacgctcctcttttgtattattatctgcgtaacgggtgctacacactttttccaagttgttaatattccagtttgtgaagtcactttatatatatctaaaattttcataccacccattattgcttttttcactgctagttcaaccttgtagctcatactgaaaaaaaaaaaaaaaaaaaaaaaaaaggggcccccccccgggggggaccccaaattccccctatagggagtgttttacccccccctctttgcccgttttt

SEQ ID NO: 46351 - DNA, 512 bp, Homo sapiens
gcgcgcaattaaccctcactaaagggaacaaaagctgggtaccgggccccccctcgagagtacttctagaattaattaacttctacaatagcttcaaggcaggtctattcttgtgaaaagtaagatggccacttgagattttaatgtttttgataaatatgtttgttcttcataactactttctttcttttttttttttcctttcctttattaggaaactctgagatttccctcatgctagctaatggtgacacaggagtgtgaaaggcacagatgccttcaatcagggtttagtattacacatggtacaaaataagcacacaataagcatctgaaagaatgaacaaaccaccttcagcctgaaggaaaacgctttttacctagggtcctgcatattttaaaagccctgaaggaagaggtcttctacagactcttcacttgagagagttcaagagctactgccatatgggaactaacttttgagcctgtggctagacgtgggaactgacaaa

SEQ ID NO: 46352 - DNA, 450 bp, Homo sapiens
ctaaagggaacaaaagctgggtaccgggccccccctcgagagtacttctagaattaattaaggcggggggataaagagaggttggtcaaagggtacaaacatacagttagaaaatctaagttgtagtattggatatagggtagattaagtgtagttagaaacaaagtcttttatattttaaagtagctagaagagaggacttgaaatgtcctcaacacacagaaatgttgagtactcaaggtgataccccaaataccctgatgtgatcattacacatgtatgcaacaaaatatcacatgtaccccacaaatacgtgtaatgttatgtatccataaaaagatacattgataatgtaatcatatcccactgtataattatttttggaagatatgtatcttcatatatatatatagtcattttaaaccatgacttgagtactaaaccagtagt

SEQ ID NO: 46353 - DNA, 468 bp, Homo sapiens
taaagggaacaaaagctgggtaccgggccccccctcgagagtacttctagaattaattaaggcggggctagctgacccagaagaacccatccataagtcgtcttctttgtgtgcgagataaattaagtctgccacttaactaacattgacgattagattctaagaaattgccacacgttcagtatacaacctattttgaacagcttgccatttttgaataagccatgataacttagcatagtatcaccctgtgcaatgtctccaactttaggagaaaagtaggtgcggctaccaactttgtttattcggaaatttacaattgttaattccaaatggcttcaaacattaagctttatgtgagaacaaaaagttgctataattggcttccatgaataagaatgtacacttttaaatttatccttttactaactgtactccagtctggacaacagagtgcgaccctgtctc

SEQ ID NO: 46354 - DNA, 497 bp, Homo sapiens
ccctcactaaagggaacaaaagctgggtaccgggccccccctcgagagtacttctagaattaattaaggggggagaagtaactttcttattactcaaccgtcttaaatagagttctttaagtgtatttttaagaggtctcaaaacttaatctgaagggacgtcaaatgctggacaaattctgtgtatacaactcaagtcagcccccaattttactggtctttaaatcatgtcctttttaccagaagtttgcatttctaagctaaactattactgttagactagatccaaaacttaaaaacagtttaggaaaaaaaaaaaaaaacaaataataaaaaggcggccgccaccgcggtggagctccaattcgccctatagtgagtcgtattacgcgcgctcactggccgtcgttttacaacgtcgtgactgggaaaaccctggcgttacccaacttaatcgccttgcagcacatccccctttcgccagctggcgtaatagc

SEQ ID NO: 46355 - DNA, 622 bp, Homo sapiens
tcactaaagggaacaaaagctgggtaccgggccccccctcgagagtacttctagaattaattaaggcggggcgagatcacctgaccattggaccgacgcggcatagccttacgagatttacctgatgctaaacgagcagttaaagggtgcagcacaccaccatggcacatgtatacatatctacctaacctgctcatcgcgcacatgtaccccaccacttaacgtataataattccttaaatacttataatgatacttggactgtgacccaataagtctgtctgacctcaatgccactgtggcctattactgcaaagtatccatacagaaagttaacaaggatacccaaaaattgggctcacctctgcgccgagcacacctaatccatatctacagaactctccaccccccatcagcagaatatacattcttttcagcaccacaccacacctattccaaaattgaccacatagttggaagtaaagcactcctcagcaaatgtaaaagaacagaaattataacaaactgtctctcagaccacagggcaatcaaaccagaactcaggattaagaaactcactcaaaaccactcaactacatggaaactgaacaacctgctcctg

SEQ ID NO: 46356 - DNA, 481 bp, Homo sapiens
ctaaagggaacaaaagctgggtaccgggccccccctcgagagtacttctagaattaattaaggcgggggagagagagagagaaagaaaaagagagggagtgagaaagaaatcacaaggggagaagcaactgcaaagcagtctgaaacctccatgctgacttgtcagcacactctttctcctgtgggaaagtcagaatctagttagaaggttggtttttgtggaatcaaagcaaggtgagcaaaatgagtgattttaatcaccaggaaaacctaagatatttgtaccctctgagggatacaagagtctagagtggcagcactgctagtataattgccccttcctgtgcttgtggtagaaatgtctgatcaatcactgcatcttttccttcctactgctccctgggccagccctaagattcttagcaagagagtattctggccctgtgcggtggctcatgcctgtaatcccagcactttggga

SEQ ID NO: 46357 - DNA, 488 bp, Homo sapiens
agggaacaaaagctgggtaccgggccccccctcgagagtacttctagaattaattaaggcggggtaaggacattttttaaagcatgaagttaaataccagaagaaatcaaatttagaggaggcttggtgataaagggtaagagtggttcagaaacctgctgttttctgctttaagcctaatattgtattggtcaacttttaaatgtatgtatatgtactactttgacaagaaaatgaaaatttaaacatccagttagagggcaggattaatcaaattcagtcctagtgagttaggcattccagcacactgaaaacccaactttgcttttccctccttgaggacacggccttgccaatactgtattttgttcaacaactgggagagctctatgtttttaaacattcccttacatggaaatgttagtgtaagttttctgcaataatgatgtaaatcctgttgataaaaagaataaagaggtcataagaat

SEQ ID NO: 46358 - DNA, 487 bp, Homo sapiens
  misc_feature 367, 368, 392: n = A,T,C or G
tgattacggattgagtgcaccgtaagccctaaataaagggaacaaaagctgggtaccgggccccccctcgagagtacttctagaattaaagcatgtacggtatcaacgcagagttattaaggcgggagctgacatactccatggatagtcaattcctagagttaataaagaatacagtagatatctttgcattaaaagtgccaataaggatgtttacctttatatgtgttaggagatcttctgctatcagtgtcaccctgaatcaagggaggaactaggaagtaagagtttatggtcatcagatactgtggcctaatgtccttcagagaatacctttgtgtgaactctctaaaagtttattcccaannaaaaaaaaaaaaaaaaaaaaaaanggggggccctttccggttgttttttttttttcccggggttttgttttttttttccccccctttttgggttttttttaaaaaaagggtccctcttt

SEQ ID NO: 46359 - DNA, 505 bp, Homo sapiens
agggaacaaaagctgggtaccgggccccccctcgagagtacttctagaattaattaaggcggggcttcccgggatcagccggtaacaaccgactcccgggcgaatgaaactattatctgggaggagagaagacgaaatgatatcaggcggcttagagcaggaggatttcaggtctttgggctccctcctgaccttgatccttgggctgtggggcttttccttacctctgttacaagacagagctgcctaccttcccagatcagcatgccaattatcttaataatgtttcctcccaaaggcaattagaagagactccctttcaaaaatctgatggctgttgaaagttaatgaacactttaccaggagatcttacttcctggttcctttgctgctcccctaagccgtttcctctggtgggtgacggccagagatatcggtttgtgggttgatgaaactccctcccccgcctttgtacaccttccgtaatctgtctggagtatgactg

SEQ ID NO: 46360 - DNA, 437 bp, Homo sapiens
  misc_feature 323: n = A,T,C or G
gggaacataagctgggtaccgggccccccctcgagagtacttctagaattaattaaggcgggagggtggaagaggaggaggaggctataatataggccaatggcaaaggagagaaagtgtgcagatcctctgcaggtccactagtctacctcacttgctctcagtgggcaatgaagagaaactgcacccagagagagggggaaatggtggtgcttttcactcacatctaatgaggactactgccagttctagcctgaaccaaagtagcaacattattcccttgggaatgcaccatggtgtctgtctggcacaagagggttcanaatgttggtcttatttttttattttcgagacggagtctcgctctgttgcccaggcgagagtgcagtggcgcgatctcggctcactgcaagctccgcctcccaggttcacgccat

SEQ ID NO: 46361 - DNA, 484 bp, Homo sapiens
  misc_feature 301: n = A,T,C or G
accctcactaaagggaacaaaagctgggtaccgggccccccctcgagagtacttctagaattaattaaggcgggcggatcacgaggtcaggagatcgagaccatcctagctaacactgtgaaaccccatctctactaaaaatacaaaaaattagctgggtgaggtgtcgggcgcctgtggtcccagctactcgggaggctgaggcaggagaatggcgtgaacccaggaggcggagcttgcagtgaggcgagattgcgccactacactccagcctgggcgacagagcaagactccgtctcanaaaaaaaaaaaaaaaaaaaaaaaaaaattccacaaaacagtgactggcgctaatatacatgagctttatttagcagcctcgtgaaggtcaacatacaaaaaccacaggcacttccatgtgctaacaactggaaatggaaaaaaagtgccatttacaatagcactaaaagagtaacagtagtta

SEQ ID NO: 46362 - DNA, 476 bp, Homo sapiens
aaaagctgggtaccgggccccccctcgagagtacttctagaattaattaaggcgggaggatcgcttgagcttgcgagattgagccctgattatgccactgcattccagcctgggtgaaagagtgagaccctgtctcaaaaaaaaaaaaaaaggaaaaaaaggaaaaaaaaaagaaaaaaaagaaaaaaaaaagaaaaagaaatagataacttccaaagctatgtatctatttttaaaaaattaatagttaaaaatattctcacaaagaaacactagtggattcttccagacacttagggataacactgtgtataccaattatatacaaatcttccagaaaactgaagaggaaggaatacgtctcagtttattttttgggggccagcattaccctgatacctaaaccacacaaagccattacaagaaaagaaaactatagcccagtttccctcttgaacatggatgtaataattctc

SEQ ID NO: 46363 - DNA, 508 bp, Homo sapiens
gccaagcgcgcaattaaccctcactaaagggaacaaaagctgggtaccgggccccccctcgagagtacttctagaattaattaaggcgggaaggaagatctgatacagagcagggataattcattcacaggaacgagaagaaagcacagtagatggtaacagaagcaagatgcttggtagatttggtggaaggggaaaggttaaagttctcttttatttcttttttcttcccaacaaaattagaggcacatttattttttgaatgggaggaggtagcgggggtcgtttcaagtttgaggaaagtgggagaagacatggaacattccactccactaaaagactaggagctcaaatggacaggggagaatttctatcctctcattggtctgagaatttttcagtattatattcattagatataaaagttcatagatggtttttggcatagtagattaatgtatattgtgtaaattactgagacattcacttaaagaatcacattattatt

SEQ ID NO: 46364 - DNA, 410 bp, Homo sapiens
  misc_feature 30, 31: n = A,T,C or G
cccccccataatagtacttttaaaatccannaaggcgggagggagaggagctttgctctggatgattttccaccataaccagggacatgaaggacaaaaggacttggctgctcagcacaaaagcaaaattccctagaatgttcttccaccaggttgagtccttccctacttcctccttcaaggggcagagtcccagtggttagccagaggaaagtccactggtcaggatgtctgtcccactctcccagtccaagctgagcccacctgtatgtcctggagtcaccatattttctgcccagtctgacaaaatcagtgaccttaacagtgtgtaaaatgtgcctaattgctgcccttcctttataaatctgctagcagtctgaaaggttggccgaatggaacatgcaaagcag

SEQ ID NO: 46365 - DNA, 488 bp, Homo sapiens
aaagggaacaaaagctgggtaccgggccccccctcgagagtacttctagaaagaactaaggtgggttgataagtatactcgtatatttatagaacattccaaaagaatccataagaaactgttagcatcagttaccccaaagtatcctaaaacctattgcctatttctatatcctttgcaccagtcccacactattagatttccctcaacagtagtaaataatggtagttactatttttagtgtactcaacaaactttcccacctcacctccaccttgcccatttatttattcatttactccttataagtttaataagatcagacacagtcactgggtttagcaatgtggaaatcactagtgcccttaaaaacagcagtttcaggccaggcatgatggctcacgcctgtaatcccagcactttggaaggccgtggcgggtggatcacatgaggtcgggagtttgagaccagcctggccagcatggtga

SEQ ID NO: 46366 - DNA, 421 bp, Homo sapiens
  misc_feature 358, 359, 360, 361, 362: n = A,T,C or G
gggtaccgggccccccctcgagagtacttctagaattaattaaggcggggtatctgtgtgtggaaggaacaaaatcaatcactaggcgccagaagcgggactatgatagtcccccaccttctaagatggtgaccagtggtccttgtctcctggcattaacccactgatgcagtcccttcccatgatgaccagagctgatctgtaacaccaacggggtattatagaaatcaaagagtgtagccgggcgtggtggttcaccctgtaatcccagcattttgggagggcaaggcaggcggatcacttgagatcaggagttcaagaccagcctggccaaaatggtgaaaccccatctcttctnnnnnaaaaaaaaaaaaaaaaaaaaaaaaggggcccccccccgggggggacccccaattccccc

SEQ ID NO: 46367 - DNA, 238 bp, Homo sapiens
  misc_feature 228, 230: n = A,T,C or G
aaagggaacaaaagctgggtaccgggccccccctcgagagtacttctagaattaattaagggggagttggagtcggagtcatggtggtggtgcctgggcctctcaggagatgtgggagaggaggtggcctcagctggccgcctgtgctctttgtctttcttcttcttctctttcttgtgtttcctctttttctttttcttcttctccttcttgcttttcctgtggctntnacaactgc

SEQ ID NO: 46368 - DNA, 483 bp, Homo sapiens
taaccctcactaaagggaacaaaagctgggtaccgggccccccctcgagagtacttctagaattaattaaggcgggcaggtacaatttacatttgacacacagggtaactgagttccaggcctatgcatggaggagacaggattttaaaattccaaatctcatgggttttctcaccacatcatgtgaggtgtcctatagaacaatccttaagtgaatgcgtttcgtgtccgttttcaaagatcatggtcagtgtataaaaatagacagttaaatgtccatggaacgtgtactgtccctctccttcccctgaatcatggccacaaagaaatccttcaaaagatcaaagaaaatggagatattgaacaggtcacactctgtgatcatgatgcaatgggtatagaaataataacaagaaggcgatttaaaaaattttacccacttgcaaattatgaaacacactcactgataaccctggaatcaaa

SEQ ID NO: 46369 - DNA, 187 bp, Homo sapiens
tcactaaagggaacaaaagctgggtaccgggccccccctcgagagtacttctagaattaattaaggcgggtactttacaaagagatatgagcattcattggcctacgtactctctgattattagaaatccccgataagctaaattaaagtttccaaggctaatattctgtggtgtgtgagtgtagtg

SEQ ID NO: 46370 - DNA, 486 bp, Homo sapiens
taaagggaacaaaagctgggtaccgggccccccctcgagagtacttctagaattaattaaggcgggaccatttgactgtctaaatcctggtacataggggtcagcattgagaggcctctgtcctctgtggtcagcctgcctgaaccacttttaccaaagaccaatggtcccgcctgcatcagccacacattgagcctacggagtctgccccatgacgtacgccacccaatggctctgacagtcagcctgcggttaggcaggggcagggatggatgactcacgaggccttcactccaggagcctgccattcatttctaactgacaaaagtaacaatgtgaagaaaaatcaacgccccattacaccacaagtctacaaaaaatgggggggccccccccgcggggggaccccaattcccccttatagagatgtttttccccccccctattggcccttttttaaaaaatttgggggggttttttcccccc

SEQ ID NO: 46371 - DNA, 465 bp, Homo sapiens
ctactaaagggaacaaaagctgggtaccgggccccccctcgagagtacttctagaattaattaaggcgggtaagttgagtctaaaacttgctgaagtgtctgtagtttaatgttttaaagccctagaatagtgttaggttcatgaaaagtgttcaatgaatattacctaatattactattttttaatagtttaaaagatgtcttgtaaacataaggttcttttaaggtataagttttttgttaagagaaataacgtttaagaaaatctgtcagtagaaaaaagtctgtttaacaattagcaaacttgccaacaagcttcaaagctcaaattaataattaacatgcctattgtgtagaaatccaaaaagctgggtaaaaaaaaaaaaaaaaaaaaaaaaaaaaaaggggcccccccccgggggggacccccattcccccttatagggaggttttttcccccccccc

SEQ ID NO: 46372 - DNA, 476 bp, Homo sapiens
ctaaagggaacaaaagctgggtaccgggccccccctcgagagtacttctagaattaattaaggcgggaagctcagcatttgcacaactaaatttagagaactaaaacctctccactcccagacactacttctattctaatgggatggccttaaagattcctgaaaactcctaccacaggacatgaataaattcctgaccaggctaaaaagctttctctcctatctactctctgtaaacttttgccttctatgagacaagaggaaagggtaggggagagggaggggcctgaatgatgtaccctctaccagatcctgcaaagctggctacacaaagggctagctgaacctccagcaatgatctattgctgagagaccttgggttgaacagtttctctaggccccttccctagctcccgtgagctctgctcagaggcctgagtcaattctatgggtcactgctcactgaaggagcaaag

SEQ ID NO: 46373 - DNA, 481 bp, Homo sapiens
agggaacaaaagctgggtaccgggccccccctcgagagtacttctagttttaattaaggcgggcggatcacttcaggtcaggagtttccgaccagcctggccaacatggtgaaacaaaaattagccaggcttggtggcgtgtgcctgtaatcccagctactccagaggctaaggaggagaatcacttgaacccaggaggcggaggttgcagtgagccaagattgcgccactgcactccagcctgggcgacaaagcgagactttgcttaaaaaaaaaaaaaagatataggcatctttagggaatcattattctgcctaccatagagtctagggaaaatttgtgctttaagggaaaattgcattgtctagagcagtagttggcaaactgcttcctatggggtaaatccagcagccacaaatcaaggcttggcgaaggccaccagaagctgtaagaggcaaagaacagattcacccctaaagct

SEQ ID NO: 46374 - DNA, 440 bp, Homo sapiens
ctaaagggaacaaaagctgggtaccgggccccccctcgagagtacttctagaattaattaaggcggggtaaatatgctagctacacagaatagagatacatctcctagccgtccttgcagttagttatggctaatcagacattatcagaaatactgtatggtgtggtagcttccagttattccttgacacaactaacagacagcctttgtcctattttcttcttcacctcttagtctactctgctacttagaacacaaaacacatggctccttttttatggaatgtgatttacaatattaataactattatcagtttataaatatattgtatttaggtgaaggaatgcttacttgagataaaacctccatacgtaatgactcaatctttgtgtaacgtaaacaaaatgcaaactcagagctttctttgactggcaaaaag

SEQ ID NO: 46375 - DNA, 489 bp, Homo sapiens
agggaacaaaagctgggtaccgggccccccctcgagagtacttctagaattaattaaggcgggtggatcacaaggtcaggagatcaagaccatcctggctaacatggtgaaactccgtctctactaaaaatacaaaaaattagccgggcgcggtggcaggcgcctgtagtcccagctactcgggaggctgaggcaggagaatggcgtgaacccgggaggcggagcttgcagtgagcccagacaacgccactgcactccagcctgggtgacagcgagactccgtctcaaaaaaaacaaaaagaagcccaccaagaactcaaattcaaaagaaaacaaacatagaatactaaagcattaaaatcctaacagaaaaatgtgcaaggtaacaggaaattcacagaaggatacaaatgactaaaaatacataatcaaagaaatacaaattaaaacacaatgcatactctatctccaccaacggaatagagcccc

SEQ ID NO: 46376 - DNA, 499 bp, Homo sapiens
ctaaagggaacaaaagctgggtaccgggccccccctcgagagtacttctagaattaattaaggcgggtcattattctctaaacaatacagtatagcaactgttgaaaatggcatgaacaccagaaggcggaacttgaaatgagcaaaaaatagcgccactgaaccccaacctggacaaacaatgcgcgactccctctcgggggaaaaaatttaaaaaacggaatgggaagcttctaaccccccccgtgaagaaaagtttttcaacttttttttaatagtcaaagcatactacattccacattcttgccctgttcacctttaggaaaaggctacaatggaaaatggatttaatattaggcaatttatcagtattttttcagttacatcacacattagttaatttatcactttctctcccattttcatactaaaatcaaactaggatatacagaccagccgtttaaaacatattgaactggccgggtgcggtggctcatgc

SEQ ID NO: 46377 - DNA, 405 bp, Homo sapiens
  misc_feature 115, 328: n = A,T,C or G
agcgcgcaattaatcctcacgaaagggaacaaaagctgggtaccgggccccccctcgagagtacttttagaattaattaaggcgggagattctcatcagatgtgggaaggaagtntatagaagaaagaaaaactgtcactggatggcaaaatcataccctaagctaatttatgtgtcttaaaccataaaataacttaatacatgtaaattatttattatattttacagctcctataaaataaaagtttaaattaggacattgcaaaaaaaaaaaaaaaaattaaaaatgcggccgccaccgcggtggagctccaattcgccctttagngagtcgtattacgcgcgctcactggccgtcgttttacaacgtcgtgactgggaaaaccctggcgttacccaacttaa

SEQ ID NO: 46378 - DNA, 476 bp, Homo sapiens
accctcactaaagggaacaaaagctgggtaccgggccccccctcgagagtacttctagaattaattaaggcgggaggagaagctccttctggacgcccaaccaaagtcctgaggcctactggtgggagcattaactgctcccttgatgaaatattcatatactcagatccttgataatctgaaggaggaaaagccttaacaaaagagagcaggaacactgccactggagggcaaagcctgaatggaaaatgcagtcagcttggaaaaaaagatcccgatgagcctcagagaccagaatgtgattcagggtgatgcagcatgtttgtggtttctgtagggaaatgtgttctaccttgtaactgggatagaaaagcacatttcatctctaccctgtatttcctgccaagtcagaccttggttttgattccagagtgccctgaccaggggagctgccaaagggctgcggggcctgcttt

SEQ ID NO: 46379 - DNA, 492 bp, Homo sapiens
ttacgccaagcgcgcaattaaccctcactaaagggaacaaaagctgggtaccgggccccccctcgagagtacttctagaattaattaaggcgggggcggggctgcaactcctgtgcacaaaggaagggccctgggtaggggtcaggagctgccttgcccagagatgtgtctgggtcactttggaaacaggaatcctctccccaaaatgggtagcaatgggggtacagaggccaaagacgcagctgcatgtgctgcagtgcctgggacgccccgtagtgaagagtgatgtggcccaaatgtcagcagtgccagtgtcagactcctgctaagagacagtatcaagaaagataacttcaaaatacactttctggaggcctggcgtggtggctcaggcctgtaatcccagcactctgggaggccaatgcatgtggatcacctgaggtcaggagttcgagaccagcctggccaactgcctgaaaccccatctctact

SEQ ID NO: 46380 - DNA, 379 bp, Homo sapiens
ccctactaaagggaacaaaagctgggtaccgggccccccctcgagagtacttctagaattaattaaggcggggttcttagatcaaatatgaaattgtgaaagtttgctatgtatagtttaatgacaagtatataataacaaatatctaaatctttcatcaacagatgtctgaatctgtggcctgttataaagtaaggtttagacgaaaactttcagtttttaatacaacagcactaaatacttggtatagaacacatagtaaactcaagaaaaaggaaaaaaaaaaaaaaaaaaaaaaaaaaagggggcccccccccggggggggcccccatccccccctatggggggggtatttcccccccccttgggccggtttttt

SEQ ID NO: 46381 - DNA, 408 bp, Homo sapiens
  misc_feature 346, 347: n = A,T,C or G
ccctcactaaagggaacaaaagctgggtaccgggccccccctcgagagtacttctagaattaattaaggcgggagaatggcatgaaccccggaggcggaggttgcagtgagccgagatcgtgccactgcactcctgtctgggtaacagagcaagactccatctcaaaaaaaagttgtctgcttattaatagtcttactcatttggggaatactactttaaaagacttgtcagagaacagaatttgtttatagaaagtttattttcaaaattcagagaaaaaatattctctattctgttaaagaaaagtattctgttaaagaaaaaaaaaaaaaaaaaaaaaaaaannccggggcccccccccgggggggaccccaattccccctttaggggagttttttacccccccc

SEQ ID NO: 46382 - DNA, 525 bp, Homo sapiens
accctcactaaagggaacaaaagctgggtaccgggccccccctcgagagtacttctagaattaattaaggcgggacgcagctggcggggtttctgcaggcggaccccacttggcactgcatgcttggtccccaaggtccatggtagttttcctactattcgctaaaaagcagtatcaggtaacaacccatcaaactgtaatcccagcactttgggaggctcatgcaggaggattgcgttagcccagaattcaagacctgcctgggtaacatagggagacctcatctctacaaaaaaataaaaattagctgggtgtggtggcacatgcctgtagttccagctatttgggaggctgaggtgggaggattgcttgagcccaagaggtggaggttgcagtgagccaagatcacaccactggactccaacctgggtgacacagtgagactctgtcttaaaaaaaaaaaaaattatttcccacccttgattctaatggggggctagcatgtctatcccattaggcaaacgt

SEQ ID NO: 46383 - DNA, 407 bp, Homo sapiens
actaaagggaacaaaagctgggtaccgggccccccctcgagagtacttctagaattaattaagggggtggggtgggcaacataaatagctaagttcatcgctgtgtgaagcctctcgtgaccaagatgactcttccacagaatgtatttgtagtaaatcagtttgcgttagaaagagtcaaacaacagacccaaatgttacttaggggagagaagggattcctaagataatcattttaaaaatcactatacaatccctacttatagttcctgctgatacagtctaactgaggctcaagcacaagtccaaataaaaaaaaaaaaaaaaaaaaaaggggggccccccccggggggggcccccaattccccctatggaggggttttttccccccccccccgggccgtttt

SEQ ID NO: 46384 - DNA, 483 bp, Homo sapiens
aattaaccctcactatagggagcaaaagctgggtaccgggccccccctcgagagtacttctagaattaattaaggggggaaattcccaaaatataaatgagtatctggtggctccatggatcaaaaacacatatgcaaggcgtatgtgattaatttgcctttgaacattttcaagtctgaggggcctatgatacagctacggagagatattaagctggcaggtagatggcattgaaaatctggataatctccactggagacatggatttgggaaagagtataaagaatgcacgcccatctcaaatgacttttcagcaggtgagaaaatccctcatgcagcagaatgtctcacctagtgtcgctgctgcagccaatccagctgtgtaggggtccgtccctgggggagcagcgctgatgatgtatggattggggacaaaaccagcgggagctaaacctgctgaaaacatacctgtcagtaaaaac

SEQ ID NO: 46385 - DNA, 599 bp, Homo sapiens
ctaaagggaacaaaagctgggtaccgggccccccctcgagagtacttctagaattaattaagagcgggtggacagtttaaaagatcaacgaagcatgctgttgtttgattgtgtagtcgacttaaaacgtaacgatttttgcaactcaacccatataacaccatcagaattggttgcatctattttaatacaggttcattaaggaaaaaaaaatcatccttcacagtttatttcagaactaaacccataatctgtgggtgaaaatcacctgtgtgctactctttaggattttattggtctctagttggaggcatatgagaggtaaatcaataaaaccaaactttttcatttaacttgaggtcattcttaggttacttcaatcttgcttcaaaaggtaatttaaggaagaatttattttgtaatcaggcaacttgatttacaatttttttctaataatgaactttgtatgcttaatgtttaaaatgttgtaaaaataatagccagaatggatagtacatgcagaactgtgacttgagactaaaaacttgtgcataggaaacatagaatgcagtggaaaaataactcaatattattaagaa

SEQ ID NO: 46386 - DNA, 593 bp, Homo sapiens
acataaagggaacaaaagctgggtaccgggccccccctcgagagtacttctagaattaattaaggcgggtacttttcataagggataaatgtttatcctcacctccagctttaattagttatagtcccggcctcctccatctagtccagggaagactggtggcttttctgatgggcttgtttggaagaacaaaggggctcggccccttctgctctgccagaagctgcttgcttgcagaaggctcttgtaagtttaacagacagactctgcctgcctctgcagagaaagacctgtggttgtcccacacttatagagatttgcagggtaagttcatctatctgtatgcctaaatctggatcaatattaaaaacccatgactgctgcataccaaagccacatccttcaacctaatctttactaatattaaaggtaaaatatataaaaagatggaatttttatatccatctgtctttcaattggttccactcttgggccagaaataaaagttacttattgtctcccttcatcctaacacttgcttttgccattttacggacgagtgtatttaggcttaaaaacaccgtatcagtcta

SEQ ID NO: 46387 - DNA, 524 bp, Homo sapiens
  misc_feature 418, 464, 465: n = A,T,C or G
ctaaagggaacaaaagctgggtaccgggccccccctcgagagtacttctagaattaattaaggcgggagaatcacctgaacccggaaggcagcagttgcagtgagctaagatgcgccattgcactccagcctggcccactgcactccagcttgggcaacagaaaaagaaaaagaggagtcaaggatctttttccttagatcaattaaaaggaagcaaaacaaattagtgaaacacaatatatagggtagaagaaattaagtgtccactaaatgtctgacactcttcttcgtaactgtttgtattagtccattctcacgctgccatgaagaactgcctgagcctaggaggttgaactgcagtgagctgtgattgcaccaccgcattccagcctgggcaacagagtgggacccttctcanaaaaaaaaaaaaagggagggagggaaaaaaaaaaaaaaaaaaaaannggggggccccccccgggggggaacccaaattcccctttagggggggttttttacccccc

SEQ ID NO: 46388 - DNA, 485 bp, Homo sapiens
accctcactaaagggaacaaaagctgggtaccgggccccccctcgagagtacttctagaattaattaaggcgggcctttgctaatgtgactaaccgaaaatgccatggcaatgataaatgtatatttctcccatctaggtcctgctctctgctcacaactccaagaatctcatactcatgagggtggaaaaatcgacagacatctcacctttccgatccaacaaacaaactatccagacacatacccttcatgatgctgaatcccaatttaggaaacctcagacagctcaaagcactgtcttatccacacggctgaaaatacaacactttcgtcctgcaaagttaaaagtataaatgatatcactaagcttggtgtactgtcccacaagacgccaccttattccatgtccataccactaatgaactattgagaataatgacatattaaaaaagatcactcctctgttttccttatggcattttta

SEQ ID NO: 46389 - DNA, 587 bp, Homo sapiens
agcgcgcaattaaccctcactaaagggaacaaaagctgggtaccgggccccccctcgagagtacttctagaattaattaaggcggggggtggggtgcggggagggatttagctttaaatcgtgttacttgctgcctagaaacctagatctctcagagcaatgttgagaagtgtaaaattaaagtgaattaaagttggaagtgtaaaaataaagtgtaaaattaaaaggagagaaaaaaaaaaaaaaaaaaaaaaaaaaaaaagcggccgccaccgcggtggagctccaattcgccctatagtgagtcgtattacgcgcgctcactggccgtcgttttacaacgtcgtgactgggaaaaccctggcgttacccaacttaatcgccttgcagcacatccccctttcgccagctggcgtaatagcgaagaggcccgcaccgatcgcccttcccaacagttgcgcagcctgaatggcgaatggaaattgtaagcgttaatattttgttaaaattcgcgttaaatttttgttaaatcagctcattttttaaccaataggccgaaatcggcaaaatcccttataaatcaaaag

SEQ ID NO: 46390 - DNA, 480 bp, Homo sapiens
  misc_feature 425: n = A,T,C or G
aaagggaacaaaagctgggtaccgggccccccctcgagagtacttctagaattaattaaggcggggaacatttctatctggacagtcgtaaggaaggcgccggcccaaaatccacaaatgctacgtgtcccttctgtctccctatcccgcatcagctctgtcgtctcacctctcacacatccctacccaactggcaccgacaccactcatgtccccaagaatcccctctaagccagccatgacaaacgctcagctccatcactaccccacagaggatctcggattaagagcacaggacccggccgggcatggtggctcacgcgtgtaatcccagcactttgggaggctgaggcgggtggatcacgatgacaggagatcaagaacaccctggctaacacagtgaaaccccacttctaccaaaaaantaaaaaaaaaaaaaaaaaaagggcggccccccccgggggggacccccaatccccc

SEQ ID NO: 46391 - DNA, 454 bp, Homo sapiens
aaagggaacaaaagctgggtaccgggccccccctcgagagtacttctagaattaattaattaaggcgggtctaggcagccgtccttgctgagaatctggacagggaccaccggggctgagcgtgtggcactgcctccagactcattctggcctggacctcctttctggggagcctgctgctgtctggcaggcttccagaatggaccgtagcccactcgctagatgagagtggcaaacgcatccagaagcaaagacgaggaaaaaaaaaaacaatcaaaattgggcctcatctaatgttcatggttcttaaaataaatgtattgcttgacagaggaagtaccccatacacaaagtctctactaccccaaatcaagtgagtcacatctgttggcagcgagcacaataaataacaaaactcacctgggctccccatcgtttccctttaaaacaatca

SEQ ID NO: 46392 - DNA, 440 bp, Homo sapiens
ccctcactaaagggaacaaaagctgggtaccgggccccccctcgagagtacttctagaattaattaaggcggggggaacattcttaaatttgaaactaggaattatgatatttgcagtttcatattgtatacagtaaacagtcttcaaattctagttctccttgagatcttatacaatgataacagttttaaaattatgccttctgttttttgaacagctctttactattgacagcttttaaggaagtagttttcatgttgtcgtgtttactctcttactagacaggaagacagaacagaaatccatcctcaacttctggggataatctgaggattataatgaaatatcagatgcttaaatgatttcaacagacttttagatgaagttgccattagcaccttgttatcatcaatgtaacacataggcaagtggattaaaa

SEQ ID NO: 46393 - DNA, 531 bp, Homo sapiens
  misc_feature 363, 364, 365, 366, 367, 368, 369: n = A,T,C or G
atgattacgccaagcgcgcaattaaccctcactaaagggaacaaaagctgggtaccgggccccccctcgagagtacttctagaattaattaaggcgggggaatgacataagcacattgggggaatgacataagcacattggaagtagctaggatttgtctaatgtatttcagaaggcactgacaggtttgctgaaatgtaagtcaatataaggaagggatcaacaaggttagaaaggtaaattgggagaagactgtggggcacattgaatgctgggctaggagccattgaaggaaatgatgaagggagaatcatctaatagcagtgtggtcaatataatggaataaggagagatcgaagaccnnnnnnnaaaaaaaaaaaaaaaaaaaaaggcggccgccaccgcggtggagctccaattcgccctatagtgagtcgtattacgcgcgctcactggccgtcgttttacaacgtcgtgactgggaaaaccctggcgttacccaacttaatcgccttgcagcacatccccctt

SEQ ID NO: 46394 - DNA, 508 bp, Homo sapiens
agcgcgcaattaaccctcactaaagggaacaaaagctgggtaccgggccccccctcgagagtacttctagaattaattaaggtaggaggatagtttgagcccagaagtttgagaccagcctgggcaatgtagcaagacctcgtctcttcaactgataaaaaatttagagaaaaaaaagaaaagaaaaatgttttacagttgagtctttgtcatacctttttacttgcagttggttgtcgtttgttttggaattggactattcaaaattttttttttccaccactgtcttatggtgctgaggactcttcatattctcttattttaacctttccagaagatatacttacatatttgctttccctgaatatattttaatccaaggcttttttgtcattaggaatattccaatttctatattacattatttaactggccagttcatacccatttctgttcagatttagtttgtttgtttattcatttatttttaggaggttatatagaaatg

SEQ ID NO: 46395 - DNA, 555 bp, Homo sapiens
  misc_feature 535, 536, 537, 538, 539: n = A,T,C or G
agcgcgcaattaaccctcactaaagggaacaaaagctgggtaccgggccccccctcgagagtacttctagaattaattaaggcgggtgatggtggcacgtgcctgtagttccagctactcaggaggctaagataagaggatcacatgagcccaggagttggaggctgcagtaaattatgatcgtgctactgtactccagcctggatgacagagcaagaccctatctctaagaaaaaaaaaaaaggaaaaaaaaactggttcaaattggatttttctattctttcataagatgataaatgaaaaaaaaaagaaaatagatttttgaaaagcaaataatctcttggaatttcttattaaagtataaaaaattatctaattgaggcatgttaatccaatattaaagtattaaaggctgagtgtggtggcacaggcttatagtcccagctactcatgagatttgagaccaggtgaactgcctgagttcaagaccagcctgagcaacatagtgagaccctgtctctaaaacaggtaaatnnnnnaaaaaaaaaaaaaaaa

SEQ ID NO: 46396 - DNA, 556 bp, Homo sapiens
tacgccaagcgcgcaattaaccctcactaaagggaacaaaagctgggtaccgggccccccctcgagagtacttctagaattaattaaggcgggggggcagagaggagactcctaaaacaagctttttaaagttaatcttgattttgaagattctaaaattatagtcatgaatctagtctggtcagtgataatcccactaagaaaaaaacattcttaagtttataatgggtcatcacattccacattacataaacaaagaaaagccaaattcaggcccggcacggtggctcacgcctgtaatcccagcactttgggaggccgaggcgggtggatcacctgaggtcgggagttcgaggccagcctgaccaacatggagaaacctgtctttactaaaaatacaaaattagccgggcgtggtggcacatgcctgtaatcccagctactcagaaggctgaggcaggagaatcgcctgaacccgggaggcggaggttgcggtgagccaagatcatgccattgcactccagcctgagcaacaagagcgaaactccgtctcaaa

SEQ ID NO: 46397 - DNA, 458 bp, Homo sapiens
ccctcactaaagggaacaaaagctgggtaccgggccccccctcgagagtacttctagaattaattaaggcgggggtaaaaagaagccactacaccttttaaacaactcttctcctgtcacctctcaggtgttttattttagtttggtattatatttaagaattctttcttagtggcatacatttcatttctgtgatcagaaatcagctacaattaatattttactgacttatttgatattctctgatggctgtatcaattttcttctttatccatgcatctctttctttactttggctgaagggataaagttttcaaaagggatatatgagtggaatcgtttttgaatcttttcacgactaaacaggtattttattttgccatcacactttattgatcttttgctctgtttagactttcatgttcaaatccctttcctcttgtctagcagcatttagt

SEQ ID NO: 46398 - DNA, 464 bp, Homo sapiens
agggaacaaaagctgggtaccgggccccccctcgagagtacttctagaattaattaaggcggggcaggcagagaggccatgatactggagaaatgtaggaccatattgagaagagtttgtctgtcagaagtttgggcttgtcctgggagaacagggagccattgaaggattttaagtggagattctaaaaaggtgcaatttacgcgtgtagaaaatggattggcagcaaccagttaggggactttttttcacctgtatggtttttatcttaaagaaaagatagatatgaaataagtatggcaaacatatatgttcattatttcatcctttgtgctcttctgaataaaaaattaaagtattgaaaataaatgaaaattctctaaatctgggagggacagggattagcaaacaattcagtctaacgaagaaacatcaaataaacccaaactgagaggcattctata

SEQ ID NO: 46399 - DNA, 511 bp, Homo sapiens
gcgcaattaaccctcactaaagggaacaaaagctgggtaccgggccccccctcgagagtacttctagaattaattaagggggattagctaacaaattatcttctaataaaataggttttacctagttaaaatatggaaaaagacttaacatattttgttctgctgatttggtgggggagattatgtgtggtcacttaaatcatgagagtcagggtgctagccacatagaattctaatgtgtctttcatccccagtgaagacatatgggtgaagtgttagtgaacctcccctacccatctgtttttctgttagttgtagatttgggtgaaacttaaatttttggtgagtttggtcacattaaacctgagatgagtggcagtcttggatattttggcatataggacaccatttctgtttctaataaaatgtggatttgtacttgggaggctgaggtggaagaatcacctgagcccaggaacttgaggctgcagtgagccgtgactgtgccact

SEQ ID NO: 46400 - DNA, 460 bp, Homo sapiens
aagggaacaaaagctgggtaccgggccccccctcgagagtacttctagaattaattaagacgggagtttgagtaaaactgacgtgtaattctagaaatgcccaagcaggatttggaaaaggagtcctagaaattgagaaagaaattggggctagtgacagaggcataggattaagtaataactgaatttattaagagtgaaataggcctccaagttgctgacttagaataaaatctcacaaaattaaggactgatttttaaaattagcctgcactgttaaagctggagatgaaaaaaaaaaaaaaaaaaaaaaaaaaaaggcggccgccaccgcggtggagctccaattcgccctatagtgagtcgtattacgcgcgctcactggccgtcgttttacaacgtcgtgactgggaaaaccctggcgttacccaacttaatcgccttgcagcacatccccctt

SEQ ID NO: 46401 - DNA, 472 bp, Homo sapiens
caattaaccctcactaaagggaacaaaagctgggtaccgggccccccctcgagagtacttctagaattaattaaggcgggggtatgtaagtgcttaagactgaaattgtaggatctaaggttagtatgtacttaactctgtaagaaaatattcatgtcttacctcacatctctagggaatgaaagattttagatcagaatggtagggtagaggaaaatccattggggaaattgttcctttggtatttacttaatctgaacattttttaaatgcaattgtaactattgatgaaatgtgaatattgattgaaaaaagacgttgatgttaaataagactttacaagcttgtaaaagaaaatatagttacagaacgaaaacaagtttttaaaaacagctttattgtgatataatttatataccatagaattcacccatctaaagcgctcaattcagtgaattttgtttatttacag

SEQ ID NO: 46402 - DNA, 491 bp, Homo sapiens
cgcaattatcccttactaaagggaacaaaagctgggtaccgggccccccctcgagagtacttctagaattaattaaatggaaccactacttatatacagatttacatgcaatccagatctttaattttgccttcacaaaagcctaatgtctgtaattaacctttaatttttatttctgtatgagacaaaagttgaggacttggtgaaaggaaatagcagttacagcaaaacctcagtgattacaattgaggaaaaagtcaaaattataaaatacctttaaagacatgcactttccatattttcaagtcaattttaactaaaaactaagataatgtttcctagtagagttgcttgaagattagactagacagggttgatttattattagcatgtcatttgtacataaactagtagaaaatagcagttttaaaagttttctatttcagttttgtttacacttctaattgctttaaacacttttttgtgtgtgt

SEQ ID NO: 46403 - DNA, 457 bp, Homo sapiens
cttgagagtacttctacaattaattaaggcggggcaatagcattaggtctgtgaaaatttgtagtctgtgggcctattgttagttaaacctcagacaggttttctggaaatacctgtgtagagcaatatatgaatcctggaaataaaaatcagaaagattagataaccgccaggacaaaacaaaacaaacaagcacaaactaaaaaaaaaataaaaaatataaaaaaaatgcggccgccaccgcggtggagctccaattcgccctatagtgagtcgtattacgcgcgctcactggccgtcgttttacaacgtctggactgggaaaaccctggcgttacccaacttaatcgccttgcagcacatccccctttcgccagctggcgtaatatcgaagaggcccgcaccgatcgcccttcctaacagttgcgcaacctgaatggcgaatggaaattgtaag

SEQ ID NO: 46404 - DNA, 482 bp, Homo sapiens
cgcgcaattaaccctcactaaagggaacaaaagctgggtaccgggccccccctcgagagtacttctagaattaattaagggggggatggaaggaaagaataatggaaggaggaaaggaattataaaagaaaattggctaaaaaaattaactcattactaaaatattaagggttcaaacagtattctcaggacttggtatctgcatttctacagcctatttttcttaatacttgctttaactgtcaaaggagttatttcctaatgtcatcctttagcaactctaaacttacatcttgccattttctaatataacataaaaaagagcaactctccctgaaatacctatagaagtcttggcctcactttgatgagacaaacttgcatgtttctgttcctaaagcaactgtggatccaggggggttcaatgttttgattgtccaaacctggatcacatgcctgtccctgaagtcggatagtttcag

SEQ ID NO: 46405 - DNA, 654 bp, Homo sapiens
  misc_feature 360, 361: n = A,T,C or G
acgccaagcgcgcaattaaccctcactaaagggaacaaaagctgggtaccgggccccccctcgagagtacttctagaattaattaaggcgggtatcagataataatgatcttgtgttgtctactttttgggtaaacagtgtattgaagatattttctccttttatacggatgcacatttagatcagcatcaagaattctcaaagtgtattcaaagaattaatttcattagaaattaataggctaggcaccatggctcacgcctataatcccagcactttgggaggccgaggaaggtggatctcttgagcctaggagtttgagaccagcctaggcaacatagtgagacctcgtctctattnngaaaaaaaaaaaaaaaaaaaaaaaaaaaaaaggcggccgccaccgcggtggagctccaattcgccctatagtgagtcgtattacgcgcgctcactggccgtcgttttacaacgtcgtgactgggaaaaccctggcgttacccaacttaatcgccttgcagcacatccccctttcgccagctggcgtaatagcgaagaggcccgcaccgatcgcccttcccaacaattgcgcagcctgaatggcgaatggaaattgtaagcgttaatattttgttaaaattcgcgttaaatttt

SEQ ID NO: 46406 - DNA, 462 bp, Homo sapiens
gcgcagcgcgcaattaaccctcactaaagggaacaaaagctgggtaccgggccccccctcgagagtacttctagaattaattaaggcgggggaggaaggacagtcatagcaggattgtcaaaggtatgaaacataggaacagcatcaggacatgtaagtggctgacacacacatatatatacatgggaatatatgtatatcgtgtgtgtatgaagtattatgtatgtatagatattcatattataaggctgaggctaaaaggattgtataccaagaactgataaaagctgtcctgtaaaatgactagataaaatgaaacttttgaaagaacaatttggaaataattgaaaatctataaattccaccaatgaagtattcttattaaaaatcaagcatgggcaacatggtgagatcccatctctacaaaaaatataaatgtaggctgggctcggtggtacacgc

SEQ ID NO: 46407 - DNA, 495 bp, Homo sapiens
gattacgccaagcgcgcaattaaccctcactaaagggaacaaaagctgggtaccgggccccccctcgagagtacttctagaattaattaaggcgggcagatcacttgaggccaagagttcaagatcaaactagccaacacggcaaaactccatctctactaaaaatacgaaagaaattagctgggcttggtggcggatgtcagctactcgggaggctgaggcacaagaattgcttgaacctgggaggcggaggttgcggtgagccaagattgcgccactgcactccagcctgggcaacaagagtgatactccacctcagaaaaaaaaaagtacactacgagaagttagaaactttatggttaagcaacagattagacttctccctaaagggagaatgaactggaaatagatctgaagttacacagagagagcactgacatacagagaagtggaaactaaggaaaagaggttaaaaaacatggaagaggctgggtg

SEQ ID NO: 46408 - DNA, 408 bp, Homo sapiens
gggaacaaaagctgggtaccgggccccccctcgagagtacttctagaattaattaaggcggggctgacttagacagctgctgacaatattaccagaagtttaataataaactaatttttaaatacaaacgttctaatgccatataattgagaacttatcaggattctcttctagctgtttaccttctcagcttactgatttctgttctgttcaaactttcagttaaaaaagaaaataatattcttataaaaaagcggccgccaccgcggtggagctccaattcgccctatagtgagtcgtattacgcgcgctcactggccgtcgttttacaacgtcgtgactgggaaaaccctggcgttacccaacttaatcgccttgcagcacatccccctttcgccagctggcgta

SEQ ID NO: 46409 - DNA, 437 bp, Homo sapiens
caattaaccctcactaaagggaacaaaagctgggtaccgggccccccctcgagagtacttctagaattaattaaggcggggacgagctgtattctaaactatagagcacatcttaaaaatggtattctgaaattaggctttttctcaattctttttcccattaaaatagtcgtgactgaccaaagaactatcttttagaaagataaaatggctaataaatacatttaaaaatactaaacgacactaaagacccagaaatgcaaattaaaatgagatactggctgctaaccatcagtttggcaaaaattaaaggctgataacattcagtgctggtaaggagctggggaaaagggcattctcacatactcttggaatgtcaaagaatgggcataaactttttcttttttttttgagacagagtaagactttgtctcaaa

SEQ ID NO: 46410 - DNA, 489 bp, Homo sapiens
agcgcgcaattaaccctcactaaagggaacaaaagctgggtaccgggccccccctcgagagtacttctagaattaattaaggcgggtgcccataatcccagctactcgggaggctgaggcacaagaatcgcttgaacccaggaggcagaggttgcagtgagccaagatggcgccactgcactccagcctgggcaacaagagcaaaactccacctcaaaaaaaaaaaaaaaaaaaaagagaaagcgattgaagcctgtaatatggctgcaagtttggaacctggccagtaaacagtagattctccgtggcagagaacagcagatgaattttgagaacagtggtgtctaacactcaagtttgaacttgttgcctgttctgtaactacttttgagaatcccaaaccttctatcaaagttaagacacaacacccttacaataactgtattttgccaagcatgaataaaaagaaccttgaaaataagccctcag

SEQ ID NO: 46411 - DNA, 511 bp, Homo sapiens
  misc_feature 398, 399, 401, 403, 405, 406, 407, 409: n = A,T,C or G
tacaaccctgaataaggggaacacatgctgggtagccgggccccccctcgagagtacttctagaattaattaaggcgggagaactgcttgaacctgggaggtggaggttgcagtgagccaagatcgtgccattgcacaccagcctgggcaacgagcgaaactccatctcaaaaacaaaaaacattgatcgaagtctggctgtgttcaggggctttgctaagctcctagttttgcgccatttaactcctgtagtggttaccaccccccaaggaaaaggttccccccacaaaaaaaaaaaaaaaaaaaaaaaaaaaaaggggcccccccccgggggggaccccaaattccccctaatgggggttttttaccccccccttttggggggttttttaaaaaannancnannnangtgggaaccggaacaggaccttcaaaccggggacgttcagatacccaccaccagtagcactagtattgccactgggccatagggcatggagacacaaacgtc

SEQ ID NO: 46412 - DNA, 625 bp, Homo sapiens
attaccctcactaaagggaacaaaagctgggtaccgggccccccctcgagagtacttctagaattaattaaggcggggagtgggtcggagccacgtcttaagagggtcttgaatgtcatcaagccggtgacacatgaactcgattctgttgtcagtgagtgggaacctgggttcttaaaagcgaccaacttggccgggcacggtgcctcacgcctgttatcccagcactttgggaacccgaggcaggtggatcacgaggtcacgagttcaagaccagcctgaccaacatgatgaaaccccgtctctactaaaaaaaaaaaaaaaaaaaaaaaaaaaaaggcggccgccaccgcggtggagctccaattcgccctatagtgagtcgtattacgcgcgctcactggccgtcgttttacaacgtcgtgactgggaaaaccctggcgttacccaacttaatcgccttgcagcacatccccctttcgccagctggcgtaatagcgaagaggcccgcaccgatcgcccttcccaacagttgcgcagcctgaatggcgaatggaaattgtaagcgttaatattttgttaaatttcgcgttaaatttttgttaaatcagctcattttttaacc

SEQ ID NO: 46413 - DNA, 442 bp, Homo sapiens
actggccgtcgttttacacccgcggaacacagcgtatacacatgatgtattgccgcgccttttctcgagagaactaatagaataaattaaggcgggtgtcaggctgcagagcagctcagtggggtggaggggtggtcagtcaaggcaggcttcccgggagaggcttcagcagggtttataagatgaaaaagagggccgggcacagtggctcatgcctgtaatcccagcactgtgggaggccgaggcgggcggatcgcttgaacctgggaggtggaggttacagtgagccgagatggcaccactgcactccagccttggcaacacaagactgtctcaaaaaattatatataaaaaaaaaaaaaaaaaaaaaaaaaaacgccgccccccccccggggggacccccattcccccctatagggggcttttttcccccccccccttg

SEQ ID NO: 46414 - DNA, 671 bp, Homo sapiens
aattaaccctcactaaagggaacaaaagctgggtaccgggccccccctcgagagtacttctagaattaattaaggcgggaggccgaggcaggcggaccacctgaggtcaggagttcaagaccagcctgaccaacaaggtgaaacgccgtctttactaaaaatattaaattagccggctgtggtggcatgtgcctgtaatcccagctactcaagaagccgaggcaggagaatcactttaacccgggaggcggaggttgcagtgagccaagatcgtgccactgtactccagcctgggcaacagaatgagactctgtctcataaaaaaaaataataaatatataaataacataaaaataaatacaaaatttaaaaatccatctgatacaattataaccaaattgtatcaggaagtttctaagcctgacactggaggggaaaagtgtgaataggttgcccagctaactcaactgcatcctgtagtgataagccccatcacagtaagtgcaaagcacagacctagctagattaaagatgccctaacacccaagtactcctaagaccattaaaaccagagatctgaaaaattccaggaaccttcttgcccacagatctaattcaaggaaactctgaaagaaatcactgcattgggactatcaagtaatgttttacag

SEQ ID NO: 46415 - DNA, 438 bp, Homo sapiens
aaaagctgggtcccgggccccccctcgagagtacttctagaattaattaaggcggggacttaatagtgtggtcttcggtggaaaaatatcctgttatacctgagaggatttgtctggagtactctgtaaagacactttcattctttcaatcttttctcattgtttccagtggctgaactttcttaaaagtagtctaggccaaggcaggaggatcacctgaggtcaggagttcgacaccagcctggccaacatatagtgaaaccttgtctctactaaaaaatacacaaattagctgggcgtggtggtgcacacctgtatagtcccagctacttgggaaactgaagcaagagaatcacttgtactgtggaggcggaggttgcagtgagccgagattgtgccaccctactctagcctggggaacagagtgagactctgtct

SEQ ID NO: 46416 - DNA, 576 bp, Homo sapiens
gccaagcgcgcaattaaccctcactaaagggaacaaaagctgggtaccgggccccccctcgagagtacttctagaattaattaaggcgggggagaaaagagagattcaacattactcagctattacaaaaataaataggcaaatgataagaatatctaatttattgtaagagccttgaggcaagaagtaagcatcctaatgaaaacagggttgcatgaaacaagaattatatgaaccacacggtaaaaatctgacagaatcagaattattgtcttagtcacagtggtaaaaattattaccagttgattactgagaaagaactagagaatagtagagcccactacgtatcttttctagtttgctgcatataaacacatagtaaactatatttctctctgttcattaaagagtaagggtttgataattctcaacaaatgctacaaccaccttcataataccttaagtaaaagaacttctctggtttaattgtagtgtaggagaggaagaacattttttttcccttatactctgttaggtttaccagctgggcccttgaatcaaattggcaagaaacac

SEQ ID NO: 46417 - DNA, 514 bp, Homo sapiens
gcgcgcaattaaccctcactaaagggaacaaaagctgggtaccgggccccccctcgagagtacttctagaattaattaaggcgggcggatcataagttcaagagatcgagaccatcctggccaacatggtgaagccctgtgtctactaaaaatgcaaaaattagctgggcgtggtggcacgcacctgtagtcccagctactcgggaggctgaggcaggggaatcgcttgaacccaggaggtggagtttgcagtgagctgagatcgcaccactgcactccagcctggtgacagagcgagactccgtctcaaaaaaaaaaaaaataaataaaataacaaagtcaaactcaaatacgctttctactggtttacctcaaatctatttcttgtatggtatttgcaactctacatagtttttttgccccttcttagaaactgcagggtgatcactcagcagtgatttttaatgaatagcaaaacttgcttttgtctatacaacggacagaataatttaag

SEQ ID NO: 46418 - DNA, 473 bp, Homo sapiens
ggaacaaaagctgggtaccgggccccccctcgagagtacttctagaattaattaacttttcaaccagcatacagatgtgcttcttgtgatcattatcaagaaatcattttctttcagcaaaatgagaagccctggtggcagattgtaacttacaatgattgatcacatcatgagatcattaaccttaaaatgctcttaatcatttattgaccaaatgaaaaaaaagcttataaaccagtattgaatatatctaaggcacattatcatgtaccttttggaagattaagttaaaggaaatatttttacaataaaataataattggtgaaaaaaaaaaaaaaaaataaaaaaaaaaggcggccgccaccgcggtggagctccaattcgccctatagtgagtcgtattacgcgcgctcactggccgtcgttttacaacgtcgtgactgggaaaaccctggcgttacccaacttaatc

SEQ ID NO: 46419 - DNA, 520 bp, Homo sapiens
ctggccgtcgttttacacctcgaaacaagtgtatacacatgatggttgccgcgccctccctcgagagaacataataaaattaattaaggcggggggttaatatttaacccatataaccaaaatattaatcagtacatttaatctattttatactgtgggcaatggttaataatgcctattagctctgtcagcaaatgatacatttcctgtatgagttaagaaaaaggtagaaatcataacaataataaatctttgagtggtcactgtttaggcactctattcacatgcattatgtatattataaatatacgcatacacacacacatattcacgtaatgtacagagtagcccgatgaaagaaggacttggccaggcacagtggctcacgcctctaatcctggcactttgggaggccagggcaagtggatcacctgaggtcgggagttcaagaccagcctggccaatgtggtgaaaccccttctctactaaaaatacaaaaattaaccaagtgtggtggcag

SEQ ID NO: 46420 - DNA, 411 bp, Homo sapiens
  misc_feature 319, 320, 321, 322, 323, 324, 330: n = A,T,C or G
taaagggaacaaaagctgggtaccgggccccccctcgagagtacttctagaattaattaaggcgggtgtgctcaataacatggtctcatcttgcatatttagttgccattccatcctgctagcattccaatcccattcctatgctaggcttaaccaccattattagtataattattcatactttacagagccaatcacatagttacatatgtattgtcatctcttctcattaacctttttttaatccatttccaataatcacctctcctaggaagataattttttaatgatagtagaggaatagacgaaagagatctannnnnnaaaaanaaacaaaaaaaaaaagggggccccccccggggggggcccccaatcccccctttaggggggttttttccccccccccctggg

SEQ ID NO: 46421 - DNA, 464 bp, Homo sapiens
gcgcaattaaccctcactaaagggaacaaaagctgggtaccgggccccccctcgagagtacttctagaattaattaaggcgggaaaatcatctgagcccaggagtttgaggctgcagtgagctatgataatgccactgcactccagcctgggccatagagcaagtcctgtctcaaaacaaaaagcaaacaaccaaaaaagcctgcaagtatgtctgactctgaattagaactctgataatgaggcttttttcatcaagtgcctaccttaacctaattaacacaacttaatgcagcaaacaaataaactattgcaatactagaattgggaggcaggccggttgtggtggctcacgcctataatctcaacactttgggaggccgaggagggaagatggcttgaggccaggagttggaaaccagcctgggcaacatggcaacatagtgaaactccacctctaaaaaa

SEQ ID NO: 46422 - DNA, 498 bp, Homo sapiens
cgatttacactggccgtcgttttacaccccggaacaagcgtgtacacatgatgggtagccgggccccttcctcgagagtacttgtagaattaattaaggcggggcagggaggactgtcagttatcactcctgtgtttctttcttagtgaccacctctgaccacccaacttaatacttttactcctccctgccccaaagctgtatgtatctcctctctgctttatttcctccagggcatgtgtgcctcctgtgtgttgcctgcccccatgtggaagggcagctccatgggacgcggctctgtccacttagcttggtgtttgttactggggcccaggatgttcagtgcttgtggaatgaaaaatagagtagaataatgaaggggattaaatatgtgacattttagtatgttgactgtattatacactgctactaaggaattgaagccgatgtataaacattgtgtctacacattatactattttatgattattgtatgga

SEQ ID NO: 46423 - DNA, 434 bp, Homo sapiens
ctggccgtcgttttacaccccggaacaagcggtacacatgatgggtgggcgcgccctttcctcgagagaactagtagaattaattaaggcggggactaccggggaccacagcagacggcagtgaataaagacaaatgaaattaaagaccctcttgggtgtgctgactgcctaccgcagggagacttcattaacagggggcaagggatacaagactgaagaaaacacaaaatagaacttattttcaaaccacagcagtttcaacagttacccaagcggtgtaccgaaaccacacacaggactgactttagcaaaaacaatatgaaccaaatggtttaccacagtatgtactgttaaaaaaaaaaaaaaaaaaaaaaggggggccccccccgggggggaccccaaatcccccttatagggagttttttaacccccc

SEQ ID NO: 46424 - DNA, 517 bp, Homo sapiens
tgattacgccaagcgcgcaattaaccctcactaaagggaacaaaagctgggtaccgggccccccctcgagagtacttctagaattaattaaggcgggggaagaaagccaaggtcctaaagaaattatctaaggtcgttaaaagcagaaaaattctgatattacaaagtaataaagagcagtcttctcaaagcaagacaaaagctcttaatctgagccagatgattgctagtactagtagcccaaaaagcctaacctcagttagtattatatagtagtatttttactatacttcctcaagctgcactggcataaaaagggattcagacttctttccgtgtgatgaaggatcagaaaatgcttgaatcggatgcttcctccagtacgctgaaattaaacaagtaaaactgcctctgatttcttttttttcttttttgctaatgtgtattttaaaatgaaaagtacttcctaactagtcttcctagtcaatgttatggtttcaaaaaatctgatatccta

SEQ ID NO: 46425 - DNA, 535 bp, Homo sapiens
agcgcgcaattaacccctcactaaagggaacaaaagctgggtaccgggccccccctcgagagtacttctagaattaattaaggcgggggtaatcttcctaaagattatacacccaagaattaagtcaaagcctgtctgattccaaagtctaccctttttctattccacatggcacttggcctcctaaactcctccattttttttgaaatgtacgccataattatggaatacaaaaacatttcaatgtttttggtatcctgactcaaacattagaagcatattgaaatttttaaaaattgtttgttcaaagctttataaaatatttatacctgtaattaagatgagaaggtaataaaaacaaaaacaattagtgtatgtgatcgatacatggtttcatccttatcacaaatacaataataagcatgctaattcaaagataaaagttcttaaatctgactggtaatggccagataacctcagactcacttttcttcctctccttgtgagcttttaccagaacgttcaactgttttta

SEQ ID NO: 46426 - DNA, 410 bp, Homo sapiens
aagggaacaaaagctgggtaccgggccccccctcgagagtacttctagaattaattaaggcgggagagggcttggatgggaagagggtgtgtaagagcagagagtgtgtaagtgcagagaaagcactcttctaaccttaacaaagacaagaacagctcagtaagtcatgtgctttctgagagaaaatggtgagccttttacatataaataaggaattatctaaacaaaggaaataactgcatgtgttggaagacactaaaatatctgaataatttttactactgcgtgatctgaagtttctttcaaaagcttaatagtttcttcctatgtctcaaacagggactatttgaatttgattaagagtcaaggccgggcatagtggcttacgcctgtaatcccagcactttggg

SEQ ID NO: 46427 - DNA, 589 bp, Homo sapiens
gaaaaaaaaaataacgcagggcagggtttcagggggccatgatcacaccaatgccctccagcctgggcgacagagcaagactccatctcaaaataaacaaataaataaaataaaacaaaattctaataacatattgaaattagatttaccttaattttacaaaagaaaatctacatcctaacctacttttaatgaaataggggtgctattacatcaatcacagaatgttatttcaaaaccttaagagaactttgactagccctctgagttttgcagtcttcatgtaagtatgtactaattggttttgttttttaaaaattacaaacatattgaagtttagagggaataaaatacaaattccaatatacccatcacacagatttcttagttattaaggttttgctacattgtgccatctatcactcccctttccattcagctaagtcttcttttatttatttatttatttttgagttggagtttcactccagcctgggcgacagagcaagactccatctcaaaataaacaaataaataaaataaaacaaaattctaataacaaattgaaattagatttaccttaatttta

SEQ ID NO: 46428 - DNA, 512 bp, Homo sapiens
agcgcgcaattaaccctcactaaagggaacaaaagctgggtaccgggccccccctcgagagtacttctagaattaattaaggcgggggcctgtagtcccagctactcaggaggctgaggcaggagaatggcgtgagcttgggaggtggagcttgcagtgagccaagatcgcgccgctgcactagcactacagcctgggtgacagagcgagactccgtctcaaaaaaaaaaaaaaaaaaaaaggaacccaacctggaagtagctgagagccacctggtgtgaagagaggaagtctcctctcctgtgttctggttcctttgcggacactgtgccgtaggccacctctatcaattatgtcctgggcctgaatcttcaggctctcccttggcagcttcctgcctgaccttattttttatttatttatttatttatttatgtatttatttatttatttatttattttgagatggagtgtccctctgtcacccaggccggagcttgcagtgagctgag

SEQ ID NO: 46429 - DNA, 517 bp, Homo sapiens
  misc_feature 448: n = A,T,C or G
agctgttgcaaagatggaaattgattcagagttaggaaaatgaatactagaatttaatgactagctgatatgaagcctaagagaggaaggagagaagaataatacacaggtttctggcttaaacaactggctgggtgttggtgacaattactaaaaaggaaaataagtgtggccaggcacagtagctcacgcctgtaatcctagtactttgggaggccaaggcaagcagatcacctgaggttgggagctcaagaccagccagaccaacatggagaaaccccatctctattaaaactacaaaattagccgggcacggtggcacatgcctgtaatcccagctacttgggaggctggggcaggagaatcgcttgaacccaagaggcagaggttgccgtgagccaagactgtgccattgcactccagcctgggcaacaagagcgaaaccccnttagaacgaagaagaaagaaaagaaagaagaggaaagaaggaagaagaaaggaaagaagggaagaagat

SEQ ID NO: 46430 - DNA, 328 bp, Homo sapiens
ccctcactaaagggaacaaaagctgggtaccgggccccccctcgagagtacttctagaattaattaaggcgggaggtgtgggaggtttggttggggtagggtactagatagtaatattaatagaagggagatttacttttttattgaatattctttcgtattctttgaattttgtatcatattatgtattgccacatgaatacaccttcgacaaatctgaactaaagtcatgactagtagaaataaaggggaggggatcagacttgagaattatgtacgaaataaaattgatagaatgtattgattatacttaaagggaggatgaaag

SEQ ID NO: 46431 - DNA, 514 bp, Homo sapiens
taatgattacgccaagcgcgcaattaaccctcactaaagggaacaaaagctgggtaccgggccccccctcgagagtacttctagaattaattaaggcgggaggctgtggtcccctcgttgtattcagggttacacctacacagtaaggttgcagggtgtgtgtggggttccagccccccgcctagttgattagccctccatcttgatgattgtgcagggcaggagatgggtctccccaggggaaagagaagttttcacctcttagtaaatgccactaaggtttttcaggttacagtagttctttgactaaaggaagtcacaataatgtttataagtactgatgtggcctttggttgtatcacaaatttaaattaagattgtggaatcaccctgaaagattctttgcaagagatcatttgaagtaggcccagagcctctggctggttaattgaatacaggttgtttttgtccttctaacgtagtcattttccccttacatcttattttttaattt

SEQ ID NO: 46432 - DNA, 458 bp, Homo sapiens
taaagggaacaaaagctgggtaccgggccccccctcgagagtacttctagaattaattaaggcggatggtctcgatctcctgacctcgtgatccacccgccttggccttccaaagtgctgggattacaggtgtgagccacagcacccagccagcctcactaaagtttaaaagcaatgttaatacacccctaacacagaactcttgtgttgttatgatgaatgtgtggagtaatacactcagtagctgctttgttctactcaccgtctcatgctgttaatgagcattttttatttatttttattttatgaaaacaacatttatatcagtctgctggcattgatggtgaaaggctatcattttaaaattatttggctttttccattaaagggacagggcacaattacaactgccacacttctttttgacactagcaaatagctaatgttctttacatttt

SEQ ID NO: 46433 - DNA, 497 bp, Homo sapiens
  misc_feature 412, 413, 414, 415: n = A,T,C or G
ctaaagggaacaaaagctgggtaccgggccccccctcgagagtacttctagaattaattaaggaggaagggctagaaacgctcagctgagaaacctgaaacagggccgggggggttagataacctggtatcagtactgtctttctcagctgggcgcagatcacgcctataatcacagcattacgggaggccaggagttcaagaccagcctgggcaacgtaacgagactccaggtggtggcaggcacctgtagtcccagctacttgggaggctgaggcagaaggatcgcttgagtcaaggtcgaggctgcagtgagccgtgattgtgtcactgcactccagcaggggtgacagagatctcatctcttaaataaaattaaaaaaaaaataaaaaatactcttaaataaaatttnnnnaaaaaaaaaaaaaaaaaaaaaaaagggggcccccccccgggggggcccccattcccccctataggggggtttttcccccccc

SEQ ID NO: 46434 - DNA, 537 bp, Homo sapiens
gccaagcgcgcaattaaccctcactaaagggaacaaaagctgggtaccgggccccccctcgagagtacttctagaattaattaaatttcttaatataaccgtactaaaattacttgcaatatgtgatgtaattaaagttataatctcaacactttgtagaaggtgtatcagcaccgtgcttatataactgatacacaagtagtaatttaatatttacagagtacctgaacccaggccacacattttctctagcactctgctctcttgatttttaagtagaaaggttgaaggaaataaattccaaggtcttttctaatctaaggaaaacatatatcaataatggaaatatatctaggaccccatgtgttccaatctcagatgtactctatttaaaacatagtccggcgattagccgataaataaatataaacacacttaagtactcttcttttctccacctctccaggaaacaagatgaggaagacacctttcttccttttcatgtttgtttgtttgtttctttttttttgagatgga

SEQ ID NO: 46435 - DNA, 511 bp, Homo sapiens
accctcactaaagggaacaaaagctgggtaccgggccccccctcgagagtacttctagaattaattaaaataaaaataaagtaatacagcattttacttctaaagttactcaaaatatttattttgatctcacaagatggggactcagagtcaatgactatctcaaaaagcctaaaaagctagtgaaaaagccagaaataccagcaaacagacctaacaattaggagaagtagaaaaaaagagttgaaataattttcaaagattgctgtacagttttgtgaatacagtattagattgtttactaggagtgacacctaggtggagcaaataaacgctaatgactgagggccagattaactgatctaaaaggggtcaagctttatgaaagcttggagcaaaacaaaagccacagtatacaggagtaatcacatctaactgcatagcactaaaaaacaacctgatattttaaaagtgtgggcattgtgggtaatgataagagaggaaaaaaaaa

SEQ ID NO: 46436 - DNA, 268 bp, Homo sapiens
  misc_feature 245: n = A,T,C or G
tgggtcccgggccccccctcgagagtacttctagaattaattaaatttttcatagcacctagacagggcatttagcctctaagcatataaaagggattaagtgaggcttgttttcctacaacattaaagtgagttaaggatataatttaggtatgagttgaagacagtcaaatgtttcttcatgctttgttcagttttctgcaagtttatatctgccataagatagggctactcatcttcaattntgaaaggatggattgtgctactt

SEQ ID NO: 46437 - DNA, 359 bp, Homo sapiens
gggaacaaaagctgggtaccgggccccccctcgagagtacttctagaattaattaaggcggggtagggtggaaagccttcttgaaaaagaagagtaacttcagagtttgttgagtttgacatataaacaagacttcttagtgtcactaagatgcttggtagtcagttgagtgtgttggcctagggctcaggaaaggatactgtagggtcaactagtgcctagtgaggaagttttgcctagagttagtctagtggccttacaaaaaaacaaacaaggaggacccatatgtaactcactgtgttcctgcaggagcatagaagttcttaatgattgcccctatttcttttctagattattta

SEQ ID NO: 46438 - DNA, 580 bp, Homo sapiens
ctggccgtcgttttacaccccggaacaagatataaccatgattatgggcggtggttttccaaaaagaaaaaaaaaaaaactttattgcggggcgggcctctgagttggctggaaaataaacttaaggagtaagatagggaaagaaaagaagattggagctggactacatatcagtcttcacttagattcacaaataccagcatatttgacaatgtgtttcaattttctttttgtagagacagagtctcactatattgcccaggctggtctctaacttctggcctcaaacaatcctcctactttggcctcctaaagtgctgggattacaggcataagccatcatgctttgcctcaaatttttaatttatcacagaattcttccccgtaaaagaaatattaactggctttgaaatttatttcacaaactgaatgagaaaagcattccttttttaagttttataaaaaatagattgaagttctactgaaatcagttctactgaaagaggccaggccaggtgcaatggcttatgtctgtaatccccacacttttgaaggctgaggcaggactatctcttgagcc

SEQ ID NO: 46439 - DNA, 480 bp, Homo sapiens
  misc_feature 291: n = A,T,C or G
gcgcgctttatgattcgctaagcgcgcaattaaccctcactaaagggaacaaaagctgggtaccgggccccccctcgagagtacttctagaattaattaaggcggggaatatgacaggaacaaggaagcgcgggacaggagacagaactgtcattactgagcttcagctaaagcacgaatagttcgtttttttcttttaatgtatttttttctttttataaagatgggggtctcactatgctgcccaggctggtctagaactcctggcctcaagtgatcctcacacctcanaaaaaaaaaaaaaaaaaaataaaaaaaaaaaaaaaaaaaaaaaaaaataaaattaaaaaaaataaaaaaaaaaaaagcggccgccaccgcggtggagctccaattcgccctatagtgagtcgaattacgcgcgctcactggccgtcgttttacaacgtcgtgactgggaaaaccctggcgttacccaac

SEQ ID NO: 46440 - DNA, 487 bp, Homo sapiens
  misc_feature 420, 434: n = A,T,C or G
cgcgcaattaaccctcactaaagggaacaaaagctgggtaccgggccccccctcgagagtacttctagaattaattaaggcgggtgaggctggtcggccatagtgggctccgcctgagacagggtgatggggtggccagggcggcactcaagccatcccttaggaagcagcaagatctggctctggttctctcctggctcctcttggatcttgaggctggtgcctttttttattgtaaccaaatacccagacttcaaggagattgaggctggtgtctttccgtcagcttgtgcccaaggggacatcatcctctcctctctgaaagcactgtggatgtgaggggtgactctcctatccagcaaggaatgtagtggtggattttctaccttcatctctaattctctccacctcatccaaaanaaaaaaaaaaaatnaaaaggaaagcggccgccaccgcggtggagctccaattcgccctatagtgagt

SEQ ID NO: 46441 - DNA, 405 bp, Homo sapiens
tacgccaagcgcgcaattaaccctcactaaagggaacaaaagctgggtaccgggccccccctcgagagtacttctagaattaattaagggggttgttctctaaacagcacgcacattagttgtaagaaaaatgttgtgttatagtatttatactgttgaagaataagaataaaatattaaactgcagtaagttaatagcaagaacattatacaacatttatccctgttgtaaagtttgaatcataagcagtaagccaaatattaattattaatattctaaactacagcttttgaaacctatttcaatgttattaaatattttaaactcatggtgtctaacatttcctggaaaaccatggtgtttttgtgtacaccctggtcaacatgatggtatgtgtgtgtgtg

SEQ ID NO: 46442 - DNA, 465 bp, Homo sapiens
ctggccgtcgttttacaccccggaataaggggaacacatgctgggtgccgggccccccctcgagagtacttctagaattaattaaggcgggttggacaggcttggtgtaaaatctctattttggcaaatctttgagcacaatctccaactgtatgggctggggagatgaagagaaacatcctgggatatctcaggccctactctttactttcagagtgaagaagggaccagagaaccaggaaaacagcagaatctttaagggaaaatcagggatattggatacaatttcttaaactcagagggaacgcatagggattacctataaaatcagaacagtaacctcaagaaggaaatctttagtaaatcaaaattgccaaaatacaaaagtttttttttttaatttttatttattaatttttttttggaaacaaggtcttgctctgttgcccaggctggagtgcaaaa

SEQ ID NO: 46443 - DNA, 327 bp, Homo sapiens
ctggccgtcgttttacactccggaacaagctataaccatgatgtctggcccgcgcgcttttccataaagaaaaaaaaaaaaactttattgcttggccggtccctgatgttaagaaaaaaaaaccaacctgaccatcttggtgcacccctgtctctaaaaaataaaccgggcatggcccggtgcggtggctcatgcctgtaatcctagcactttgggaggctgagacaggcagattgcctgagctctggagttcgagaccagcctgggcaagatggtgaaaccccatttctactaaaatacaaaaaatcagccgggcatggtggcagg

SEQ ID NO: 46444 - DNA, 565 bp, Homo sapiens
  misc_feature 516, 521, 531: n = A,T,C or G
gcgcgcaattaaccctcactaaagggaacaaaagctgggtaccgggccccccctcgagagtacttctagaattaattaaggcggggtttcaccatgttggccaggctggtctcgaactcctgacttcaggtgatctgcccgcctcggccttccaaagtgctgggattataggcgtgagccaccgtgactgacccatttcttttttaagtaatacatttttaaagaaaccactgacagattttcccatgtagatgtggagcttgatttcagggtaagtatttgcagagaaagacctgtggattcaaagtacaattgaacaagttttgttagtttgaagtcattggaatagtttaggatgtctttggaatagttgaccaactaagagtagaacagttaggtaaattggatttatatgttttcttttatctttggaactcaaatagagcaattcctgagcataaattttaattataaacttcaagactcattgaaatggtcctagaaagcctgagatanaaaanaaaaaaaaanaaaaaaaaaaggcggccgccaccgcggtggagct

SEQ ID NO: 46445 - DNA, 506 bp, Homo sapiens
cgcaattaaccctcactaaagggaacaaaagctgggtaccgggccccccctcgagagtacttctagaattaattaaggcgggaagagtttcttctgtgggaaaataacacagacgttccttgtttaggattgggagatttaacatttactttttccatagtgttatgccctcaatttaaatgacagaggagataaatacacattgagaaatgaaacacttatgttttccgtcctatatagttcttgaggatttcaagtcccattagaatatttctcatacttgattaacatgtagaccttattaaagactcctgtgaggctgtgtgcagtggctcacgcctgtcatcccaacactttgggaggccgaggaaggcggatcacctgagtccaggagttcgagaccagcatggccaacacagtactatctgtactaaaaatacaaaaattagccgggtgtggtagtgcatgtctgtaatcccagctactcgggaggctgaggcaggaga

SEQ ID NO: 46446 - DNA, 495 bp, Homo sapiens
gcgcgcaattaaccctcactaaagggaacaaaagctgggtaccgggccccccctcgagagtacttctagaattaattaaggcggggcccttcactctggcaaacttgacacataccccagacaatgcatgaatgaggctatcagagattgaaatcccactatttgcaatttagattttattcatataaaacacgatgtgcatagagaatatgcatttttcgaaagcccatgaaaaagtttaaaacataacccaaaaccaagccacaaatcgaagctcaaaacaatttcacaaaatgaatacctgcttaggccacgttctttgatctgaactttataaaacgacatattaaaccaacaaacaacaacatctgcctactggaaacgtttgaatcattctctgtaatgagtcatgagtccaagaggaaatcaagcaaaaatcacgtcctacgtagaggctgacagcaacaagtgtagtgacacagcgtccatgggcct

SEQ ID NO: 46447 - DNA, 520 bp, Homo sapiens
ctggccgtcgttttacaccccggaacacagagtgtaaccatgatggggggcgggcccctcctcgagagaactaatagaattaattaaggcgggctggtgaataagaaaatgcaatgttttgagattctgctggcatagtctcagagataggaaagcaactacaaaaaaaactaaggaaaagtcatttctagaaactcacaacaaaagtagctactagaaactgtagaagacactaatagttaccatcctctagatgataattcactctggaatgtgagtgacatgtaagaacttttattttttattcagagtacttagaagttttcatacataaagtgctagaggatctttatttctatctgtgatttaaatcagaaactttagttttgtgtcatagccatagcccctgagaaggttagcattattgggtgtggtatagaattctcagctaaaagaatagctgtcccatcctggatttttacctcatgccacaaaggtatgagacctttgtatttaatga

SEQ ID NO: 46448 - DNA, 530 bp, Homo sapiens
gattacgccaagcgcgcaattaaccctcactaaagggaacaaaagctgggtaccgggccccccctcgagagtacttctagaattaattaaggcgggttagtagaacaaaatggatataaataggaaaaagtgaaaaatcagtaagacagtatgttggaaaggagtacagtagatggaagaattaatgattcaatatttctataaagagtctccatttagatgattcaaagagtatccatgaagaaatgcacattttattgaatatacagaagtgtgattagtggtgaaggagggtgaattctgtttgctatatgactatgacatgtacagaacttctcattcaaggtgagtgtgaaaaaatattacaaaacatgtggagaattaactattacagagataatgaaatacttatacaaagatacctcctagagatgaattcaccacagcacatatgagaaatattatagcaaactaaattttccttttaagtgagaacacttagacatctcaactggctttttaagaagaaa

SEQ ID NO: 46449 - DNA, 611 bp, Homo sapiens
  misc_feature 326: n = A,T,C or G
gcgcgcaattaaccctcactaaagggaacaaaagctgggtaccgggccccccctcgagagtacttctagaattaattaaggcgggagaagatgggagttgcctcgattttcagacctgtttcctcatttcaaagatggggaaagagacagccctatcccacagtggtctggggaggacccagtgagatagtggtggcaaagcctacccccaaattaatcgtacatttgaggcaaagatgactttctgaggcaggaggatggcttgagcccaggagtaagagaccagtctgggcaacatagtgagacctcgcctctacaaaactaanaaaaaaaaaaaaaaaaaaaaaaaaagcggccgccaccgcggtggagctccaattcgccctatagtgagtcgtattacgcgcgctcactggccgtcgttttacaacgtcgtgactgggaaaaccctggcgttacccaacttaatcgccttgcagcacatccccctttcgccagctggcgtaatagcgaagaggcccgcaccgatcgcccttcccaacagttgcgcagcctgaatggcgaatggaaattgtaagcgttaatattttgttaaaattcgcgttaaattt

SEQ ID NO: 46450 - DNA, 410 bp, Homo sapiens
gcagaatctaacagtaaaactgaaatgcccattgcttgtgaccccggatttccattattatggagaggccccagagttaaactcatgtctcacgcatgtgcacaacatttaatactgtataacatttaaaaggaatgacggtcatctgtttcaacagggttagatagatgtcaaaaggatagtgttgagaaaagaagaaagaggtgataacagctttataaagtctaggccacctgtaatcccaacactttgggagtcctaggtaagaggatcccttaaacccaggagttacaggctgcaatgggcaatgatctcaccattgcactccagcctgggagacagagcaagaccctgttttcaaaaattaatacataaaacctaacactatatgtaactttatctagagggat

SEQ ID NO: 46451 - DNA, 651 bp, Homo sapiens
  misc_feature 525, 527, 528: n = A,T,C or G
agcgcgcaattaaccctcactaaagggaacaaaagctgggtaccgggccccccctcgagagtacttctagaattaattaaggcgggggacttcaacagcccactgacacactagaaaaacagaggcagaatatcaacaaagaaatactagattaaattggactccagatcaatttaatttaacttaatttaatctaacaaatttacagaacatcctattaaacaaatgcagaatataattctcattagtgcatggaacattttgcaaaatagaccatatgatactcccaaaaaatagtgacaataaattctgaaaaatcaaaatcacatcgagtgtcttcttgcactatggtggaataaaactagaagtaaataccaagagaaagtcttaaaactataaaatacatgacagtaaaccttaccatgaatgatctttgtgtccatatgaaattaagatggaaattaaaaagtgttttgaaaagcataaaaatagacacaacataccaaaacctctgaaatacaccanannaaaaaaaaaaaaaaaaaaaaaaaggcggccgccaccgcggtggagctccaattcgccctatagggagtcgtattacgcgcgctcactggccgtcgttttacaaacgtcgtgactgggaaaacc

SEQ ID NO: 46452 - DNA, 377 bp, Homo sapiens
ggccctccctctagagaacataataaaataaattaatgcgggcggatcacgaggtcaagagtaaaagaccaacctggccatgatggtgaaaccccgtctctactaaaaatacaaagaattagctgggcatggtggcgggcgcctgtaatcccagctactcgggaagctgaggcaagagaatcgcttgaacccaggaggtggaggttgcagtgagccaagatcgcgccactgcactccagcctgggcgacagagtgagattccatctccaaactaaaaaaaacaagataaaaaatttgcgcgccccccccggggggaacccccatatgccccttatgggggatcttttccccccccctgtgggcccgttttttaaaag

SEQ ID NO: 46453 - DNA, 468 bp, Homo sapiens
cgcaattaatccctcactaaagggaacaaaagctgggtaccgggccccccctcgagagtacttctagaattaattaaggcgggagttattgttgatattggaaataaaattaatttcatttttatggatgtttttgtttcttattatagaataaatgtataacttgataataaaccaaaaagttattttcagaaagttaccatttcatgttattttctgttctaaaacactgacaacacttagcctacactgttttcaaaagatgtccgtgatttacccatgtgttaattattttctttaatgaataataaaatttactcttcttaaaaataacattttataatctatgcttgaaaatgtaaaattcattcaattcaaaataataaactctacttcagtactccctatctgcatgacactttttttggtgttttggtaagttccaagatgaatatattgtcctagtcc

SEQ ID NO: 46454 - DNA, 576 bp, Homo sapiens
cgcgcaattaaccctcactaaagggaacaaaagctgggtaccgggccccccctcgagagtacttctagaattaattaaggcgggaggactgcttgagcccaggagttcaagaccatcttggacaacatattgaacccccatctctatttttaaaaaattatctttttgacagacctagttccttttcagcttgaattatagatgacacttcactttttgtgtgattaagaaagcagaaggttttctgtgacctcaccagtagcggaccaaaaccatattaaattctgatttgacttaaagattgatctttcagatttaaatatggggatgggtgtgttaaaccacttaagaactattttacatcctcgataataaaactctaatttagaaatataccataatggccgggtgcggtggctcacgcgcataatcccacactttgagaggccaaggcaggtggatcctttgatcccaggagtttgagaccagcctgggcaacttggcaaaaccttatctctacaaaaaatagaaaaatgaggcaagcataatggtacacatttgtgggttcacctactc

SEQ ID NO: 46455 - DNA, 501 bp, Homo sapiens
gcgcgcaattatccctcactaagcgcgcaattaaccctcactaaagggaacaaaagctgggtaccgggccccccctcgagagtacttctagaattaattaaaaaacatactagtatatgtaaaaagattatattttagaattccattaaatgtaatggttgtattctagattgctagttataaagatgatgatagtggctagtcgacaaagcactgtgatgaatggatcagtagataagtttttattttcttccccatgagttcaggctccatttctgtgatatagaagtgtcgagaacctgccgtttcaagaaattggctctgctccagcatgaatctgctgttcagaattcaggcgatgaggtattccaggtctttacttgaattcagataccaggtctacctcacagacaacctggaactccagagatggccttaactgtgtctccaagactcttacttagggacatggtggaaattcatttgggtgttttccgtgac

SEQ ID NO: 46456 - DNA, 661 bp, Homo sapiens
  misc_feature 519, 529: n = A,T,C or G
cgcgcaattaaccctcactaaagggaacaaaagctgggtaccgggccccccctcgagagtacttctagaattaattaaggcgggcaaggtgacactttctggatttgctcctcttgtctaagtgtttaaaaaacaaaacatacattacaaagatatgcctgcattcatatatggtaagggaaaatcttggagctcaattacccagtcttccttttacaaaaattaagtttattctcaacataaactagaaacacttattgactggaatgagagccaatccaagtattggttgaaacacattaaactaaaacacaaagttaagtcaaaaccatgaatataatacatcacttttaaaattcaagaaatgagtttagcataaaacagttaaaaacaaagtaattaagactattatagtgtagacacttcttttagcaaaggattcagctcttatgccattatagaattcttcgaatataaatatccaattgaattaaatattagtttaattgtatgtaaaanaaaaaaaaanaaaaaaaaaaaaaaaagcggccgccaccgcggtggagctccaattcgccctatagtgagtcgtattacgcgcgctcactggccgtcgttttacaacgtcgtgactgggaaaaccctggcgttacccaactta

SEQ ID NO: 46457 - DNA, 431 bp, Homo sapiens
ttacgccaagcgcgcaattaaccctcactaaagggaacaaaagctgggtaccgggccccccctcgagagtacttctagaattaattaaggcggggggaggggggaatgtagtaagatcaatttcttccagatacataaagaaggaaactgaaagaaaattaaacacatgattaagttttattcttcttgaggacagattttcaacagatatactcttttaaagtaattttttaaatgttttccttaaaactggcattttaaaagtttataatcgtaacaatattggggaaaatggtttttatttcagagttctcactactgggtagattattcaaaatatatcaaagataaaacatatatatgccatgtgtattactttaaaatatactgtcattacagcatggtataatgttctttataatcccattttt

SEQ ID NO: 46458 - DNA, 491 bp, Homo sapiens
tacgccaagcgcgcaattaaccctcactaaagggaacaaaagctgggtaccgggccccccctcgagagtacttctagaattaattaaggcgggggacaaacttttaagtcacggcagatgatactgattttgtaacaattaccacacaatgtgtatttggagatatcttgaatatatccaatattatctgtcaactaatattttaaaattaaacatacaaataaataaaatatgaaaataacttatccattgagcaaaaaaggcccactgaagatttctgaccaaaactaccattgactctttggtgctgtggggctgctgaaaactgaaagatgaagaaaatagcagaattatacagtcttcacagaaaagtcagctctgagggtgagatattaacttgggtgagacaatgacaggtgacagcaaatgaaaaagaattcattatattttgttagcttactggaaaaaaataaaattactagtcataaatc

SEQ ID NO: 46459 - DNA, 452 bp, Homo sapiens
  misc_feature 419: n = A,T,C or G
aaccctcactaaagggaacaaaagctgggtaccgggccccccctcgagagtacttctagaattaattaaggcggggaacagggatgtgtgggaaataagccagtactagtgcacacaagtaaactaaatcatgtcaatgtttgccttgaaaatatatatcacattttccaatattaatggaacaataacaaaaataattgtgaaatacagtacagtgaaactgccaattagatctagatataaaagtagtacaggcaacattttctgaggtcaatataataaaataagctactaccggctgggcacagcggctcacacttgtaatcccatcactatgtgaggccgacgcggtcggatcacgacgtcaagagatcgagaccgtcctggctaacacagtgaaaccctgtctctactaaagntgcgaaaaacccacctttagtcccagcaacatg

SEQ ID NO: 46460 - DNA, 489 bp, Homo sapiens
cgcaattaaccctcactaaagggaacaaaagctgggtaccgggccccccctcgagagtacttctagaattaattaaggcgggataacacatttcactctctcccaccttttcctccctcaaaacgcaaatactcagcatcacctagacaagctacatcagattatttggtaaggttcccatctcaaatactgaatttgggggaaagggagagttggaagcagtaatatttttaggaagcgatgaccagctgtctttttattttttatttgattgactgacagagtctagctctgtcgccaggctggagtgcagtggtgcaatcttggctcactgcaacctctgcctcctgggttcaagcgattctcctgcctcagcctctcgagtagcaggattacaggtatgcaccatcacaccgggctaatttttgtattagtagagacggctggtttcaccatgttggccaggctggtcttgaactcctgacctca

SEQ ID NO: 46461 - DNA, 459 bp, Homo sapiens
  misc_feature 385: n = A,T,C or G
aaataaagggaacaaatgctgggtgccgggccccccctcgagagtacttctagaattaattaaggcgggtgagagaaaaggcctgtggaattagaacttgcacttaaccatgccggaaatttctgtacctttctctgcaaagataacttagttacataagtgaataaatatatatgttaaacactcaagaactctactagacatttatggatattatatcctgggctatcactttgagttttatggtactaagcccttttcctttgttcagtgctgatgcaagggaatttcttttttaatatttattttatttggcctgatttttagcttttagattcactgtggtaggtatcggggaaaaaaaaaaaaaaaaaaaaaaaaaaangggggccccccccggggggggaccccaatcccccctttagggggggtttttaccccccccttaggggcggtttt

SEQ ID NO: 46462 - DNA, 493 bp, Homo sapiens
  misc_feature 342, 343, 344, 345: n = A,T,C or G
aggcgggagaatcgggtgttttcaggacgcagagcttgcattgagccgagatcaagccactgtactccatcctgggtgacagagcaagactccatctcaaaaaaataaataaataaaaaataaaacaagagaccaaattttcatgtctgctagggttaaattctaaccctaatattagctgttatactgagatgaagaagaaaacaggtggattgccttggtatttaggaaatatttttgttataaaattacaactttcataaaaccatattcagtatttgtaatggtggtatacaaaatgcttttacaataaattattaaatatttaaggtatcagcaccnnnnaaaaaaaaaaaaaaaaaaaaaaaaaagcggccgccaccgcggtggagctccaattcgccctatagtgagtcgtattacgcgcgctcactggccggcgttttacaacgtcgtgactgggaaaaccctggcgttacccaacttaatcgcc

SEQ ID NO: 46463 - DNA, 411 bp, Homo sapiens
actggccgtcgttttacaccccggaatacaggcggaacacatgctgggtgccgggccccccctcgagagtacttctagaattaattaaggggcctcctttagattatatgacaccgctcctatcaattatgctgaaaactaaatgtcataattttcatgcaccctaaaaacagggattagtatttattaatatatgaaatggctattgtatgtcaacacttggggagagggttaaaaaacaaacttaaaaactaatgatgaaggaaaaagacgttaaggttagagtcatcattgactagaaataagtggaaaaaaagggggaaaaaaaaaaaaaccccggcccccccccggggggcccccccatttccccctttttggaacctttttccccccccttttggcccgtttttt

SEQ ID NO: 46464 - DNA, 483 bp, Homo sapiens
cgcgcaattaaccctcactaaagggaacaaaagctgggtaccgggccccccctcgagagtacttctagaattaattaaggcggggttaccacactgagttcaataagcactatcactccagtgagaacattagaacatgaagcctaaaaccacttttctgctaggtgatcacaccacctaagtgatagctagatggaattgcagcccagaaatttaagtatcaggagacaggaaaactgggcatacagatgaacagatcacagtagtcattctctcttcttttgacctatacgtaaagaattaaaactacaaggagtcattcttaaaatgcatttgaaagtgtttttgtagcaggattaaaatctaagaaggtaatgaaatggtattagtattaatattctattcttattatgcttaaataatttttaaaatgtttggatgagcaataaactaaaaaacagattttagaaaacaatcataagt

SEQ ID NO: 46465 - DNA, 469 bp, Homo sapiens
taaagggaacaaaagctgggtaccgggccccccctcgagagtacttctagaattaattaagccgcaaataccacaagtgacaatttatgcaaaggttgagatctgaaaggagtatttagtgtgggctcctccaaaacaagggttgctttttgtcatcgtttaattagtgcttcaccggtgaatatcacgacatagatcaagccagttgctgcttaattttggctgtgggaaacaatacatcctatcagcaatttaatctgggtctcccctcacgttttcttcaacttcagcgtccagcagtgttaaaaatagttgtagttgttgttggagtattaactataacccagtgcagaagaggtatgccgcttggtattggtaatgtgctggcgttcaaccaccatttgtgtgctcttttggggcatagattatgcttacctacggaatacttattttaaacgctttgtattga

SEQ ID NO: 46466 - DNA, 326 bp, Homo sapiens
ggaacaaaagctgggtaccgggccccccctcgagagtacttctagaattaattaaggcggggttaccaaggaaagtttgacacaggggcttataattaaaataagtaatgaaaagatattctattcatggcttattacagtgcatattacaagagttatggtgaactcatggactaaagaaatactagatttaagattcacagttcctccaggcaccgtggctcatgcctgtaatcccagcattttaggacgctgaggcacgtggatcgcttgagctcaagggtttgagaccagcctgcgcaacatattgaaacccaggctccaaa

SEQ ID NO: 46467 - DNA, 497 bp, Homo sapiens
taaccctcactaaagggaacaaaagctgggtaccgggccccccctcgagagtacttctagaattaattaaggcgggaggtagaaggaaatcatagaaatggtagtgtccttataaacagattatacaagagaaactgttgggattgtgggaataaaaaaaataagagatttaaatattatttaaagtgacaaaaaatactcaatagaagaaccgaagataaacacattactaccaaaatttccagacaaatagggaaagggaagggataacgataagtgagctattcatctgtcatcacaaagagtgtataatgtctaaactctgaattcagaaatactagtagataatgcctaaagctgataaattagtaaacacaagggtaagcacattatttagcagtatggaggtaaccactgaagaaactgaacaaagaggttgaattgatagttaaagaccagattggttacaacattgtgctaagatattgcctgtcttt

SEQ ID NO: 46468 - DNA, 535 bp, Homo sapiens
gcgcgcaattaaccctcactaaagggaacaaaagctgggtaccgggccccccctcgagagtacttctagaattaattaaggcggggtggtcttgcttgctatcaggatgggggtaatcttttagatattagttattttactctgttacattgctaacagggtaaaacaggttaaccataatttatgtagaaaatatagaatgtgagaactgaaataagaaaaagagggacgtatagcggccgccaccgctgtggagcttcaattcgccctatagtgagtagtattacgcgcgctcactggccgttggtttacaacgtcgtgactgggaaaaccctggcgttacccaacttaatcgccttgcagcacatcctcctttcgccagctggcgtaataacgaagaggcccgcaccgatcgccctttccaacagttgcgcaccctgaatggcgaatggaaattgtaagcgttaatatttagtaaaaattcgcgttaaatttttgttaaatcaactcattttttaaccaataggccgaaatc

SEQ ID NO: 46469 - DNA, 488 bp, Homo sapiens
tttaaccctcactaaagggaacaaaagctgggtaccgggccccccctcgagagtacttctagaattaattaaggcgggggaaggactgtgggctcttacgaataagttatccttgttgtctttcaagtacttgaacgcagatttcaaaaaatagaaattatgtttttcttaccacataaatgaagacttatgattttgtaagtggtttgatatccaccacagttttaaaataacccagtaatacttgcagtgttatttttgtagtgtaaccacttgtgtgaatgaacacatagctaataaatggttaaatggaataaagactggcctaagagcatgacattatgaagtaaaaagtcaggcaaaaacttataatactttaaaaataaaaaagcggccgccaccgcggtggagctccaattcgccctataatgagtcgtattacgcgcgctcactggccgtcgttttacaacgtcgtgactgggaaaacc

SEQ ID NO: 46470 - DNA, 487 bp, Homo sapiens
  misc_feature 335: n = A,T,C or G
ctggccgtcgttttacaccccggaatacagagtgtacacatgatgggtggcgggccccccctcgagagtacttatagaattaattaaggcgggcgcgtgtagtcccaactacttgggaggctgaggcaggagaatggcgtgaatccaggaggtggagcttgcagtgagccgagatgcaccactgcactccagcctgggcgatagagcaagactccgtctcaagaaaaaataaaaaaaaaaaaaaaaaaaaaagggggcccccccccgggggggaccccccttcccccttatggggggttttttaaccccccctcgggggcctgtttttaaaaagnctaataaatgggcctagagggctttttgggcaccggcctctgtgcacattttttaagaacttttctgtagttgatgctgtaaactctatgggtttttaaaaacgaattcatggttttatttagtattggaaatccaatacacttttttaatc

SEQ ID NO: 46471 - DNA, 509 bp, Homo sapiens
cgcgcaattaaccctcactaaagggaacaaaagctgggtaccgggccccccctcgagagtacttctagaattaattaaggtgggaagattgcttgagcccaggagcttgagaccagcctgggcaacacagggagatgctgtctctacaaaaaataaaaaaatttgttgggcatggtggcgtgcacctgtggttctggctacttgggaggctgaggtaaggaggatcccttgagcccagagagagaccccgtcttaaaatatgcatgtttgtatgtatgtgtacgtatatatgtatacacacacagatacaaatatatatgtgtgtgaatgaaaatacatatatatctatatataaaaacacagatatataaaaatatgtgtgtgtgcatcctgaaagggtgttgtaaatgtcaagaataaaaatcatccagtttgatgtattttatagtgcatttctagaatgtacatattttgatacttaaaactgttaacagacattaacaaaaaac

SEQ ID NO: 46472 - DNA, 662 bp, Homo sapiens
aattaaccctcactaaagggaacaaaagctgggtaccgggccccccctcgagagtacttctagaattaattaaggcggggggatattactttaacttcctgtgcctcattttccatatagcctaataatacttgcctttatgtaccgcatgctctgagagtgtcagagtgttataaaggccaagttttattgtcaaatgcatttgtatgcaaatttagtcaaaagcgttttcagtcagtttttctttttttttttccaaagaggtacattccctatttgaattgtttgatttttttcactgaatggctaaggcctcagcataattccaggtagttgtttatgggcagcctgatttccttagacagcacagaaatagtacagtaggtgtgaatgtaagacagataatcaaataaaaaataaaggcctgatttaaatactaacataaatgttacatggattttcaaattacttgacaggctacagtacagtaaatgggactgtgcctttgataattccaatgaggcaatgcatggaaatataagaaatctcagtagttatagtttcagactaaagatcataggaacaaaaactaaacctcaggacaagattcactatggcaattaaactttggaaactcattcaactggacacaagtagttcat

SEQ ID NO: 46473 - DNA, 625 bp, Homo sapiens; identical to SEQ ID NO: 46213
  misc_feature 433: n = A,T,C or G

SEQ ID NO: 46474 - DNA, 473 bp, Homo sapiens
  misc_feature 389: n = A,T,C or G
ctggccgtcgttttacactccggaaacagctataaccatgattattggcggcggttttctttccaggactagtataataagtattttgtgggcgagctcacggggtgttgcgcagccccaactggccctctacacctccggcttgtctactttgggtggccacgggaggttacgacttcaagaccagcctggccaacatggtgaaaccccatctgtactaaaaatacaaaaatttgcctggtgtggtggtgcatgcctctagtcctagctactcgggaggctgaggcacgagaatcacttgaacctgggaggcggaggttgcagtgagtcgagataacactactgcattccagcctgggtgacagagtgagactccacctcaataaaanaaaaaaaaaaaaaaaaaaaaaaaaggggcccccccccggggggggccccaattcccccttttaggggggttttttccccccccc

SEQ ID NO: 46475 - DNA, 472 bp, Homo sapiens
accctcactaaagggaacaaaagctgggtaccgggccccccctcgagagtacttctagaattaattaaggcggggttaatgcaaactgatatataatgatcaagttatacagtatgtttctttcttattcaaacctcactaagcatgaagtatgtatgctgatatggaaaaataatataaacataggttgcttgttaaaatgctgaaaaatctccataatttggaggagtgtgagtcatgactgtatcaactgtgagcaaaagagcacaaacagctgcttctgatccctatggtgccattcaattttcctactttagaagcttcataaacacaataaaatgaatgagatagggactcagggtttctcatttttcagcaagtcattataaaaacggtctctacaacatattcacaaattatgattaatgtgctgcaaattcactttgcagcataatcagcttcgttttagctg

SEQ ID NO: 46476 - DNA, 489 bp, Homo sapiens
accctcactaaagggaacaaaagctgggtaccgggccccccctcgagagtacttctagaattaattaaggcgggacaggtgacgacctgcctgtgagaagcccatagagctctcttctcctcaccactgggtcagttgatcctcatctgtagatgagagatcctcatctgtagactcagccctcctgcagccattagtgcctctcctgtttctaatcacagggaatctaaagaaatttaaggagcctcgttcaggagctcagtgttagattgagctttctggtgggtccattctgactctgaatgttgattttactatctaaaatcattattcttgtttctatggctagggtcctacttgtattcaatttcctatagaactagcgtcctgtcttgttaattcccagtcattagaatcccacacccaagtttgggaccaggttagggctctgagtcccatgggcagaaatctctgatacctctgactcct

SEQ ID NO: 46477 - DNA, 486 bp, Homo sapiens
agcgcgcaattaaccctcactaaagggaacaaaagctgggtaccgggccccccctcgagagtacttctagaattaattaaggcgggcggatcatgaggtcaggagatagagaccatcctgtctaacacggtgaaatcccgtctctactaaaaatacaaaaaaaaaaaaaaaattagccgggcatggtgacgggcgcctgtagtcccagcttctcaggaggctgaggtaggagaatggtgtgaacccaggaggcggaggttgcagtgagccgagatagcgccactgcactccagcctgggtgacagagcaaggctccatctcaaaaaaaacaaaacaaaacaaaaaaaaaacagtcttctggctactcattagggaactctgagccaattacttaacctctctaagcctcattcacaaaatattcaaacatacctcggtataaaaatgaatgatcccctatcccacgatgtatacaattaagatctg

SEQ ID NO: 46478 - DNA, 453 bp, Homo sapiens
ctgggtaccgggccccccctcgagagtacttctagaattaattaaatacatagacaaatttagggatggggacatatccatgggcaaggcctgcttactacccgctgaagcaaaggcaagaggagaaacacatcctgcagagaaaaagaaagccatataaaatggaagtcccacccctgatgcctgggggcatagacagactgaatttaacatggtaaatggcgcagctggtgtagaaaaaaaaaatcatccatttggagatgaagagcaacgcagactcagtcatggttctctataaaacttatgtttttagatttgcaggtaatacaaagaaaggatacctataaatccaagttataattattttttgttgctttttatttgtctcaaaattacttttcagttaagtctggtgatttgatttaaatatttgagacttatggctgggattac

SEQ ID NO: 46479 - DNA, 557 bp, Homo sapiens
agggaacaaaagctgggtaccgggccccccctcgagagtacttctagaattaattaaaagctccctgatggaaccagagtaaagcatattaaataggagttcaaatgtgtaatcaagactttacaaagaatctccccctgcaaaaataaaaaaaatcagactttacaaggaaaataaaagtattctgcaagcaaggagtaaaccctatatatgatacctattcacagctcgaaaacatacttgagttatgaataggagttgtaaatcaccccaaaaaaacaagaaaaattatatttaaagtaattcaaactaaaatcttcatttatatgctgaaatggaaatatctggatgtattgcctaaaatcgaattaatagaaaacaaatgttatttgatttcaggtttcacaacagaccagataaaaaaaaaaaaaaaggaaaaaaaaagcggccgccaccgcggtggagctccaattcgccctatagtgagtcgtattacgcgcgctcactggccgtcgttttacaacgtcgtgactgggaaaaccctggcgttacccaac

SEQ ID NO: 46480 - DNA, 487 bp, Homo sapiens
  misc_feature 381: n = A,T,C or G
gcgcgcaattaaccctcactaaagggaacaaaagctgggtaccgggccccccctcgagagtacttctagaaataattaaggcgggggctgcggtgagttgaaatcaccccactgcacttcagcctgggtgacagagcaagactccatctcaaaaaacaaacaaacaaaaaataacattaataataataacaacaaaaacagcaacaactaccacatattaagccccaacttaaaaagcacagtgatagactctgtaggtacatatttcatgtgactcttatgaaaatactggagagcacatactgccgttctgatccaacagatggggaaactgaagctccaagcatctaattaccaagcccaaagacataggaaggtggnggctggaatacaaaccaaggactgttacttctcttttcagtccatctctgtggtccacacatatctgccactcactagtaaagaaaagactaaaggatgaggtgtc

SEQ ID NO: 46481 - DNA, 473 bp, Homo sapiens
ctaaagggaacaaaagctgggtaccgggccccccctcgagagtacttctagaattaattaaccactgcttggcaggtactatgttaagtgatttacatttgtgcttatatactcttcatgacaattctgttaggtaaatactagtataactgctttacatatgacaaaagtgactcctgggaagggaaataaactcaaaaagtgtagtatagtctgtgactggatgagacctaaaaggcaattgctgtagaagtaaatagatttaagacgtttaaaatggtatacgtttatatacttatccttcttcctgtgtatactagggacacataatttctacctacattgtggaaaacatataaattattaatatataatttttaaatgaaaaattaatttcataaataataaaattgccaagtcagaacacactgcattcatctatatgttaaattattactatcactttccaaaaa

SEQ ID NO: 46482 - DNA, 452 bp, Homo sapiens
ctaaagggaacaaaagctgggtaccgggccccccctcgagagtacttctagaattaattaaggcgggggaggtgtaggatttcaagaagacaaagtagacaacagtttacaatgcagtaatagaggcaagtaaaataaggatttattgcatcaaactatcttaatgagcatatactcattggtgttctagaaacaaaagccaaagtactttaggctgagaaataaatagaaggtgagaaaaaagaacagtctttatagtcagtaagagtgaaaagagaaagatggttgttggggaaagacagatggggagaaaggttggctggttgttaataaaacagtagaggatgagcatgtattataaatgctggtgggaaaaaaccttgtggcaaggagggtggtagtgttggagaagaaagagaggatatagtataaagttaaagaggaactggaag

SEQ ID NO: 46483 - DNA, 597 bp, Homo sapiens
gcgcgcaattaaccctcactaaagggaacaaaagctgggtaccgggccccccctcgagagtacttctagaattaattaaggcgggtggatcacttgaggtcaggagtttgagaccagcatggccaacatggtgaaaccccgtctctactaaaaataaaaaataaaattagccgggcgtgctggcccacacctgtaatctccagctactggggaggctgaggcaggagaatcgcttgaaccccagaggcagaggttgcaatgagccgagaccgtgcctgtgtactacagcctgggtgagagagagagactccaccttgaaacaaacaaaacccataatttttgatgatagattacatgatttctggcatgtaactcaaaaggagttccaagaactaagcaatattgctatgacaaatcttccatcaacttatttactaatgtaaacaaggtctgttagtacttccttctcaaaaaaaaaaaaaaaaaaaaaaaaaaaaaggcggccgccaccgcggtggagctccaattcgccctatagtgagtcgtattacgcgcgctcactggccgtcgttttacaacgtcgtgactgggaaaacc

SEQ ID NO: 46484 - DNA, 511 bp, Homo sapiens
cgcgcaattaaccctcactaaagggaacaaaagctgggtaccgggccccccctcgagagtacttctagaattaattaaggcgggctggtaccagaaacgtgggtcactaatagtggtgcccagagaagtcaaggaggcctctgggttacaatcttagatggtgtccttgtagttgttggtggttgctttggcttttgatgcatttagcacttaaaatggattctggagtagaaatagagaaatctcatactcctgtgttctgggaatctgaggcacattcactcaactagcacggactttggaggatcctgctttgcttgactttttttcatgtcaagttgaaaaccattaaaatgataataagtagtccgggcacggtggctcacgcctgtaatcccagcactttgggaggctgaggcgggtggatcatgaggtcaggagatcgagaccatcctggctaacacagtgaaaccccatctctactaaaaaaaaaaaaaaaaaaaaaaaaaaa

SEQ ID NO: 46485 - DNA, 504 bp, Homo sapiens
agcgcgcaattaaccctcactaaagggaacaaaagctgggtaccgggccccccctcgagagtacttctagaattaattaaggcgggggggagttgcaggggaggtgttcttacttagcccaaatgcctttttttaagtgaaaggtatccttcctactccctaatgaatctggcctgaaattgagaagttcctaacttaaaattgcaactgctaactttcctcgagatgcagttaaatgagaaaataaataatattttttaaagtcactagctttaacgcattggcaacacgatcatttcctgtagtgagtgaccctggttcctaaaaataactccagtgctattcaattgcttatattgggcattttttttaattcttatttgggaaggacattctcttccacagctgaagaaactcagtgtttgaaaagagctgcctaaaacactgtttcccgtaggctgttaaaaatgttcagcatctgaatgctggtaaggaatgctcaca

SEQ ID NO: 46486 - DNA, 536 bp, Homo sapiens
ctggccgtcgttttcaccccggaataaggggaacacatgctgggtgccgggccccccctcgagagtacttctagaattaattaaggcgggggagaaaatggaagtggtaggtataaattggtggtcatatggattgaagtatctctgtctctgtcatggtcgagattcttccttagttgaatattattctaccttgctcttggcttccttcaaacaattatcctgttgccagcatgtagaatcatcaaactgtacttgaaagagactcgaaaatatatccatttgtgggaagaatagaagggtacaaatcagtaaaaagttcctggagcaaatgacaactaaaataggttttgaagggcaaagtaggtttttcacagacaagatgatgaggtaggagaaagaaaaaccctttcaagcaaagggattatcacttgtttaggtagacctttttctgatctctgctggtagaaaaacctttttaatcctttaaaaccaagtcaaataccattctcattcctaagcagagttacttttcc

SEQ ID NO: 46487 - DNA, 497 bp, Homo sapiens
gcgcgcaattaaccctcactaaagggaacaaaagctgggtaccgggccccccctcgagagtacttctagaattaattaaggcggggaaggttggaagtcccaccccctccccttaatttaagaagaaggtaaagctctctggcgttctagtgtctccttcttgggaatgtggccctcggggccatggtctcctcacaccattcagaatgagcctatgaccccccaccccagcctgctctggaaatgcaggcagcccatataagaagcctggtcacatgctgttcctcttgcttccccctaagtcagcatctctaggcaggggtctcccctaactccagcttcccaaaaacccccattacctttccttctgaagccatgatgtggcggtgcatcgacttgtacttctagctgaactgcctgttttttaggtttttttttcccaaccatcttaactgattaaagtatcctatcagtccccaaatatcaagaagcccatt

SEQ ID NO: 46488 - DNA, 454 bp, Homo sapiens
aagctgggtaccgggccccccctcgagagtacttctagaattaattaaggcgggggatcaggaattatttaaatattttgagtaagctgtagcattgagaaaaaaataagataggtagtatcatagacatgctaactgaaatatcagaaatattactaaaagataatttgaggaaatgggacctagaaacagcaaatgacttgttgaagtcacatagctagttaatgtcagagccctatgatcactttagtttgttttatgtagccaatattaataacatttatagagtggttacatatgccaagcttggataagtgctttaaattcatatgttgacctggagcagtggctcacacctgtaatcccagcactttgagaagccaggggaggcggacctcttgaggcgaggagttcaaagaccagcctggccaacgtggcaaaaccccatctctac

SEQ ID NO: 46489 - DNA, 486 bp, Homo sapiens
cctcactaaagggaacaaaagctgggtaccgggccccccctcgagagtacttctagaattaattaaggcgggggttagaattaaataatgatgaattagtgataagttctagctaaatatttatagtacacttagcatttagtatttggtaatttttaaaaagtatatgcatcaatgacattcatacggttctatgattcctttaaatggttttacgggcaaattaatggtaaggtcttttcactcttaaataattttatgaatctatttccattctattcagattagtttgcggaagcaaatacccaaaaaaataaccgaggtggaactccaatttgcggtcgccaccgcggtggagctccaattcgccctatagtgagtcgaattacgcgcgctcactgaccgtcgttttacaacgtcttgactgggaaaaccctggcgttacccaacttaatcgccttgcagcacatacgcctttcgccagct

SEQ ID NO: 46490 - DNA, 454 bp, Homo sapiens
aaagggaacaaaagctgggtaccgggccccccctggagagtacttctagaattaattaaggcgggggaggagagaagttattaacttcttaaaatcatgttggatttttccacttgtataatcagcatatattatctttgagattaaaaaccaattaagaaaaagttactttttttctatataaattctcctgcatcgcaccctgaaaagttttactcaaaattgaattgactttcaatactgaaagaaacgtggtatactatggaatcacactagatgaatgtatttccaagtaaattgcagtatatttcattatttccatttctttggtcatatatgtgtggcattcaacttttatattttcatatttttgtttattgactaactttataaaaactagccttgttcaaagcaatgcatatgtgaagttatggtttggtgctatagttacgtt

SEQ ID NO: 46491 - DNA, 644 bp, Homo sapiens
agcgcgcaattaaccctcactaaagggaacaaaagctgggtaccgggccccccctcgagagtacttctagaattaattaaggcgggtggaggcaatggtagcatttctaaactttccacttccttactgcagtggttctcaggtttctctttgtgaaatatggtacactatcctcacattgttatggataacatgaaatacactacatatgaaagctctttgtaaactgaagatgagatgtaataataatgttttacatatgagttgtaataataatgttttaattcagtaaaaattactgagaatttactacctgctgagcactgatgaatatgctctgtttattttgttttcagcaacatcaattgaaaaggtattaaaaacatctgcttcaaagaactaggctgttattctctaggttagaatgtgattctgaaatactgagatataaaacttttggactgggctgtaaatactgctgaatattcatgccttaggtaagaagacggtccaagcaagatatctggctacatgcttgtctgtcctatgttcaataaataaagtctataaatattacttagtaaataaaatttctatcttttaaaatgtggcactatgtacttaagttataaaatggggaaact

SEQ ID NO: 46492 - DNA, 545 bp, Homo sapiens
  misc_feature 512, 513, 516, 530, 531, 532: n = A,T,C or G
actggccgtcgttttacaccccggaacacagcgtgtacccatgctgggtgccgggccccccctcgagagtactaatagaattaattaaggcggggggtgtagtgagccgaaataacaccattgcactccattgtgggcaacggagcgaggctccatctcaaaaaacaacttgagtcaactgaagctttgagagttaagggacttacccaaggccatacactgaaagttgagtggttcagccaggattcaaactctgtcctgtctgattcctccacccacaggtgctttttggggttcattcctgtcttaatctgtgcctaatattggctgaaacaatgttagcctaattcctttcaagcacttctatatcacacaggagtgtaatttgaaaaagtatattcgacatgacaatatgattttatagttagcaaaaagaaaaaaaaacagtattttaatgaaaagtcagcctgatgaaaacctggctggcttagttctttaaatccaggattttnnaanaaaaaaaaaaaaannnccgcggccccccc

SEQ ID NO: 46493 - DNA, 410 bp, Homo sapiens
agggaacaaaagctgggtaccgggccccccctcgagagtacttctagaattaattaaggcgggaggagctcttcaacctggtgggcgtaagtagcaatgctgctggatcaagccactgcaccctgcgtgtcacagctagacgctctctctcacatgcagaccgaaagaatatgtgattaattagtgggctaaatgggagaaatgatgcttttgtctttctgcgcaccatctacatacagtgtctacaattcaggtgaaaagattcttttatcgtggactgaaattgagattatagcatccgcagatagcttgttgtctagcgattaaacatctttcaggaaattaaagttgattacaagagctcattgagatcagtttgtgtcatagatggattattagttggctctaat

SEQ ID NO: 46494 - DNA, 482 bp, Homo sapiens
gcgcgcaattaaccctcactaaagggaacaaaagctgggtaccgggccccccctcgagagtacttgtagaattaattaaggcggtggctctcaatacaaacaaaccatattgatataaatgtaatttgcctatgaatacaatgcatgtatccataatgaccatgtctaaccacataaatattagtttaagcaaatccaaaaacaaatgcggaaaacactttggttggaaaacactatcttctcctttccctcattttctaggcaaggctcctacacttcgggctgcagctggaagtaaactgtttcatatggaaatgaactatttcttacaacataccatgctaatcacgcttacaaggcattttttcaccatttggttacagagaaagaagctttgaaaaccagcagcttgttcctaatttaaacttcccaaacccacacatcctcacataaaggaaataggttaaataacttcttccaaa

SEQ ID NO: 46495 - DNA, 501 bp, Homo sapiens
ggccccccctcgagagtacttctagaattaattaaggcggggtgggaactgagtctatgaaataatccatagcgaagaccttcggacatagtatgaacgaataggataaagcttcacactgttactgattggatatcttcattaataaaaatggagaagtgggagaattggttgggtacagaaggtgatgaccgtggccttagacttcctgaggtctgcagtggtggtgagccacactcatgccagtggatcatggtcatttgaactggagcttagtataagaactgaggctaagataaagatttcgcaaagcttccaaaagcaaagcatagaacaccattctctgagggaagaaatacaggggaggaacagaagactaagaactaagttttatgatataccattagtagagaaaaagaagttagtaggttaaacagaacaaaggaattcaaatgttgaaatttctgggagacagaaaaggagaaattttggagggagatt

SEQ ID NO: 46496 - DNA, 469 bp, Homo sapiens
aaagggaacaaaagctgggtaccgggccccccctcgagagtacttctagaattaattaaggcgggaggataattagaacccagaagttcaagaagagcctgggcaacagagggaaactgcatctctacaaaaaaaaattttaaattagctgggtgtagtggcacatgcctgtggtcccagctactcaggaggctgaggcaggaggatcacttgagcccaggagttcaaggatgcagtatgcagtgagctacaatcacgccactgtactccagcctcagacagagcaagaccctgtataaaaaagaaggtaatcttgctctacccaaagtcaactttctcaatacagtctttatcctgggacaaaactctgaaaaaaattctacctctggcacccaccttatatgggtgtgcaagcctgggagtggatggagagacaggagcagatgacaaatgcagtacaggccgagtg

SEQ ID NO: 46497 - DNA, 485 bp, Homo sapiens
gattacgccaagcgcgcaattaaccctcactaaagggaacaaaagctgggtaccgggccccccctcgagagtacttctagaattaattaaggcgggcatggtggtatgcgcttatactcttggctactggggaggctaaggtaggaggactgcttcaggtcaggagtgagctgtaataagccatgatcatgccactacactctagcctgggcaacagagcaagaccttgtcgagcaagaccttgtcaagcaaaaacaaaaacctaccaaaaaaaaccaaattattttctagattgtaccttacctagactctgccaaggactagcctaggaaaggagttatgactgtatcatcactaatctattccccctactataagaaaaaaactcaagccacagaccttacatatgctggtggcactgttgctccctgccccaaggttagtattattgttatattcctttgtattgtgaggtggtaacatac

SEQ ID NO: 46498 - DNA, 492 bp, Homo sapiens
  misc_feature 143: n = A,T,C or G
ttaaccctcactaaagggaacaaaagctgggtaccgggccccccctcgagagtacttctagaattaattaaggcgggatcatggaggtgaagaatctgttatctgatgtaaactgctattccatgtgaggtgaatgaactctntaaggggtgccacttagttcatgggcaaagataatttactgaacactacccagtcccagaggctgctgaattcgttcaattcgactaaacagactgttctgatgtacttgtttattccttcttgttcatccaaggctgtgtctaactcattagtaagaaatgacaccgtgttagccaggatggtctcgatctcctgacctcgtgatctgcctgcctcagcctcccaaagcactctactaaaaatataaaaaattaaccaggcgtggtggcaggtgcctgtggtcccagctactctggaggctgaggcaggagaatggcgtgaacctcggaagcggagcttgcagtgagc

SEQ ID NO: 46499 - DNA, 293 bp, Homo sapiens
ccctcactaaagggaacaaaagctgggtaccgggccccccctcgagagtacttctagaattaattaaggcgggtgggaaatgcccagccacaaggtgatacagggcaccttcttctgtgccgctttcttctgtggaggaagtcgctcaagtgatccccagatgctattgttactgggggtattatgctccccaaatactgggtgtttctgggatacagcatgttccccacatgctagtgggttccttaagatgttaatatgtttcaccaaatgctgtcattttcggagaatgt

SEQ ID NO: 46500 - DNA, 473 bp, Homo sapiens
taaagggaacaaaagctgggtaccgggccccccctcgagagtacttctagaattaattaaggcggggggtgcggggaactagtttcctataaaatgaaaacagtttcaaaaacattttttaagttagtaagactccttcaaccaaaattttatttttaaatttcaatttagcattgaagggcatctatcatttagcaaccaaacctcaaaccacttcacccagtaatataatacaaccgagtggttcttaaatatgaaaacagaaattgaatacagtgtacaaatataaacacaaaaacatttcaccaaaaagtatcagtctacctcaaaaaatgttgaaattatctaccaaggtttcttgattactttagtagatataaatttgagcaactacaaataatatctcctccatctgtagctctctccttagtatcaaaatatctaacaaatcaacaataactagataatgagaa

SEQ ID NO: 46501 - DNA, 400 bp, Homo sapiens
attacgccaagcgcgcaattaaccctcactaaagggaacaaaagctgggtaccgggccccccctcgagagtacttctagaattaattaaacaggatacactatcatcttgcaatttatagtgtgtaaggtaatagagccttgacaaaaggagaaacaaaaagcaaaaaatctaccactgtttatttagtactgagtattccatccacaacctacctacctacaaatacgtatgcatacgcgtgcgcgcgcacacacacacacacatacacacacgcacgtgttagaaagttaaatggtttaacaagatttagaaagatgagcatcagacccccgccttaattaaggcgggggagggggaaatgtaagaatactgatgaaaatttcttatactatatatga

SEQ ID NO: 46502 - DNA, 504 bp, Homo sapiens
tgattacgccaagcgcgcaattaaccctcactaaagggaacaaaagctgggtaccgggccccccctcgagagtacttctagaattaattaagccgggttgtgcaaacatcctgtctcccattaaaatgcctgagtgagcttagtccaaactgtgggttcatggagatgctataagaaaagactaatatttagttaatggcattttggttttttgcctgcagaatcaaactaagataatcctttgctttacagttcagttcttagtgtttaggatgtcagtatttcttaggcaatcttgattacacctgatttatatcagtgacctgctctgtacagctgacatctcatgaaacagctcttcttgcattatatgtaaaaggaatggaagaattttaaaatatgagatgcacttgatgaaattcctttttccaaattctaggaaatgaaaatatatttactttcacctagaaaatttttgactctctgattcttcttacaaaaaaa

SEQ ID NO: 46503 - DNA, 544 bp, Homo sapiens
gcgcgcaattaaccctcactaaagggaacaaaagctgggtaccgggccccccctcgagagtacttctagaattaattaaggcgggattagtcagatgtggctggagttcagcacagattgaagctggctagggcacaaagaaatgtggttgaaaatctaggctttgactaacaatatgtttatgtatataaaatgtgttatataagttttgaaacaatgtatttgctcccctcctaggttttcttttacttcaattccaaaataatatatttgttaaaactctgaaaaggcccagatagtaatgcactttatgtgatgcacataacacctaatttaggttcagtttagtcaacaaatcattatcctcaagcactgagaaatttctcacttgcagatgaggcacgagggggacagaaattcaatccagaatagcagggtaagtaacccagtttccaatagcagtgacattgtgagcagagtgggcaataactggagacatggggggaaatccaatggccactacaggacaactgtgatggcaata

SEQ ID NO: 46504 - DNA, 591 bp, Homo sapiens
cgcgcaattaaccctcactaaagggaacaaaagctgggtaccgggccccccctcgagagtacttctagaattaattaaggcgggtccataagtatagttacttaagtcataacatcagaaatagacttggaatgaaaaagaaatatgtcaatatggtgtctacatatttttcttaaatatgaaaaaataaaagtcaaattattaaaatgaagtggtaggtaacatatcacttttttttagtttgtataatgcaggactttaaaagctatttattaaaagaaatgaaattacatttttattgttcttcaagcctcttcaaggccattctttcaaactaactttagatactcatttattctacacttgattcattactgaattttattccagttctttgcccttgtgtttgaggtggtcatctcagatggttagctttttttcctcatgaaacatttttctttatgttgtaatgacttcatattttctattataaattctttggaagttagccctagtaaataaaattaaatctaattttctaaaatgtctttataatttgaactcagttacacttgatggtaagcagtattt

SEQ ID NO: 46505 - DNA, 462 bp, Homo sapiens
agcgcgcaattaaccctcactaaagggaacaaaagctgggtaccgggccccccctcgagagtacttctagaattaattaaggcgggagctgtctgcagtacacggggcatccgtctcacatcaatgggagaattaatccatgtcaatcctggatctcaatgtgactgtcataacagtagagctgcgtgaaaataatacaatagaatatctcagctcacgaagggattgctgcatttgactgaattaaaatcaagaactcctgtacatcagaagacatcagaagtgaaaagaacaagctaccgaggcaaagttactggcatcatatttaaatgcagaaaaacatatatctcgaatacagaattatcccagaatcgcacttttagcagtaagggaactggagcagcgttccagcctcagcttctatttataacggtgacatggaaaaaatactgctggatgccc

SEQ ID NO: 46506 - DNA, 377 bp, Homo sapiens
cgagagtacttctagaattaattaataaactcaattgggatataacatgtgactaccagatggcttcacagaatcatagtctagactaatagaaggaggaggttgagaagagggagagtgctagtcttacattattctgcaatgtacaaagttctgtacacaatgctacacccagggtattgtgttcagttccagttgtcacaattgaaaacgattcagggccgggtgcagtggctcacgcctgtaatcccagcacttttggaggccaaggcgggtggatcacctgaggtcaggagtttgagaccagcctggccaacatggtgagaccccatctctactaaaaatgcaaaaattagcaaggcgtggtggctcatgtc

SEQ ID NO: 46507 - DNA, 472 bp, Homo sapiens
taaagggaacaaaagctgggtaccgggccccccctcgagagtacttctagaattaattaaggcaggagtttaagaccaccctggccaacacagagagaccccatctctattaaaaaaaaattattaaaaataaattaacagggaggaataggcctggaaaacctgtgttgtcctttattggtaattaaggtagttttttctacattaacattttcctgtccaggacccactgaacgtcccctacatcaagaaacttccttttatttgacagaataagcctgttgaaacaatgttgctctgaagtatcaacagtgcaaagagaaaattaacaaaattgagcaaaggtctgctatatgtagcaatttgtttcttccacaagaggatgtgtttttgttttttctgaaccctttctgaacactgtaacattttcaaatgcaaagatatgtgagaaatctaaggtatggcttttaaa

SEQ ID NO: 46508 - DNA, 449 bp, Homo sapiens
aaccctcactaaagggaacaaaagctgggtaccgggccccccctcgagagtacttctagaattaattaaggcgggggacacaaaagctgtttctagaaacaggtgtgagctgacctctgcttttaaggtttggggtccaggcactactgtagaatctcaggtagcctcccttctcccttggaattagaaaaagggctgagaggccaggcgtgctggctcacacctgtaatcccagcactttggtaggcctaggcaggtggatcacaaggtcaggagatcgagaccatcctggctagcatggttaaacctctctactaaaactacaaaaaattagccaggcgtggtggcgggcgcctgtagtcccagctactcaggaggctgagggagaagaatcgcttgaacctgggaggcagaggttacagtgagccgagatcgcaccactggactcc

SEQ ID NO: 46509 - DNA, 588 bp, Homo sapiens
  misc_feature 412, 413: n = A,T,C or G
tgattacgccaagcgcgcaattaaccctcactaaagggaacaaaagctgggtaccgggccccccctcgagagtacttctagaattaattaaggcggggaagctagggaatgattcgcagcactatgggactggcaaaagaatccagaagatgacatactaacacttgcagttaccaatatgttgttaaatattagtgtctggggatctgttaggtagagataaaacttaatgagataagacggaaaattggctatatctgacaagtagccacttcttacccactaaattttctatattctttctctagttcttaaggtgcctcctagtgatatgattcagcacaatataatgcactgttacttcacatttgggaatttattcacataaaatcctaaaagaaatttaatcaannaaaaaaaaaaaaaaaaaaaaaaaaggcggccgccaccgcggtggagctccaattcgccctatagtgagtcgtattacgcgcgctcactggccgtcgttttacaacgtcgtgactgggaaaaccctggcgttacccaacttaatcgccttgcagcacatccccctttcgccagctg

SEQ ID NO: 46510 - DNA, 510 bp, Homo sapiens
gcgcaattaaccctcactaaagggaacaaaagctgggtaccgggccccccctcgagagtacttctagaattaattaatatggacaatcaaagtttgagtattataaggtggctctctaaagttttctgagctagatgtattccaattgctgattaattcctgaaactgtgcttctcttaagtgtttcaagatggtttagaatgataacttcatgaatattgggtagtaaattacttactaattaaatggtgttagaattacttttgaatagtggtagacaagggttagtaggagggtatttatttctccatggacaaatttggccactgtatggagacatcaaactaaagtaaggctctgcagagagggatgattcatacattttgtgctttctgatgataggagttggcagttttttaatgcttaaagaggaattacagagtttactctttcagaccaaacacttgataatctggttaaaaatttacaaactaaatgcactgcccactt

SEQ ID NO: 46511 - DNA, 352 bp, Homo sapiens
tggccgtcgttttacaccccggaacacagcgtgtacactatgctgggtgccgcgccctccctcgagagtactaatagaattaattaaggcggcttgggtgaacagtttgaggggtgagcctggagatcattagataacaattatgacttaaaattatttcaagagctgacttcgaataaggcaacagattcccccacctgccttccttaaagttatagagaagaccagaagcaattcaggaatgggaaaaaaaaaaaaaaaaaaaaaaaaaagggggggccccccccgggggggggccccaattcccccttagggggggtgttttccccccccccctggggcggttttttaa

SEQ ID NO: 46512 - DNA, 380 bp, Homo sapiens
tgattacgccaagcgcgcaattaaccctcactaaagggaacaaaagctgggtaccgggccccccctcgagagtacttctagaattaattaaggcggggaggaatggaggttccaggatggctcacaagcccagcagcttaattcagccaggctccttggctaggagttagtgcgcagtgacatcaatgagcaacacatggctcatatttatgaacgtccaggccaagttcttctttcatacagagaatggcagaaagctaaaacttgttaataggtaaaacaatgaatttaaatacagtattggctaataaaactgtttgagataaaaaaaaacaaaaaaaaaaaaaaaaaaaacccgccaaatggccggagaaaaaaaa

SEQ ID NO: 46513 - DNA, 503 bp, Homo sapiens
  misc_feature 417, 421, 442: n = A,T,C or G
cctaaataaagggaacaaaagctgggtaccgggccccccctcgagagtacttctagaattaattaaggcgggtccctgtaatcccagctacttgggaggctgaggcggaagaattgcttgagcctgggaggtggaggttgcagtgagcagagatcccgccattgcactccagcctgggggatagagtgagactccgtctcaaaaaaataaaaataaaaataaaaataaaaaaattaaaaataaataatgaacaactgggttcatctaggaatacaagtttgcttcaatatttggcaattagtaattgtattcatcatgttaatagatgaatgaaggtaaaccgaatgctaatcttaataggtgcagaaaatatttgacaaaatttgatatccattcataatagaaactattaatcangaanaaaaaaaaaaaaaaaaaaaanaaggggcccccccccgggggggaccccaattcccccttttagggggtcttttacccccccc

SEQ ID NO: 46514 - DNA, 593 bp, Homo sapiens
gccccccctagagagtacttatagaattaatgaaggcggggaaccccaaggatccactcatattctgaagctcgcattgcaattaccttactgctgccatccaatgaaaagacattcttcatttaagagcaaaacattatattattggccccttcccatgtgttgaatatatactctgacacaaataatctttaccacgaagctatttgtgccttaatcccctttaacccttttttatttaactttttacacctaacattagtgtgtggaataaatctttgattatgatgggacatgacagttgtctcagtccattaattaccatttggactatcaggggatctatcaccatttacgggaaattccatcacttctttgttgtactaccattccatctttgtcataaattaggtgatcatatatttgagagtctccttctggacccttaacaattaattttatatattgacttgttatgaaataattttacaaaattctctaattctgataatttgtaaataattttaaaactttctatgtataaaattatgctatttatatataagaacatttgctaatatgcatgaatactt

SEQ ID NO: 46515 - DNA, 562 bp, Homo sapiens
  misc_feature 521, 522, 523, 524, 525, 526: n = A,T,C or G
actggccgtcgttttacaccccggaacacagatataaccatgattatggccggtcgttttctttaaagaaaaaaaaaaaacctttattgcctggcgcgcggatttgtggtaacagaaaaaaaaactgaactaaaaaccttcctgaagatggtttatcactctaaaaaagaagtgggtttatgttcatacctttcttaacccacaattctatccctgggacatctgccccaggaaatactcaagtggtgcagacaaagataggagtccaagaatgccatcgacatggttgttggattgcaaaccctctagcaacaaagtaaatactcaacaataaacctctggtgagttaggatatctccaggtaaagaatattctttagatgttttaaaagtcattttaggccgggtatgatggctcacacctgtaatcccaacactttgaaaggccaaggcgggcagatcacttgaggtcaagagttcaagaccagcctggccaacatggtgaaagcccatctctaccannnnnnaaaaaaaaaaaaaaaatggaggcgcccccccccggg

SEQ ID NO: 46516 - DNA, 533 bp, Homo sapiens
ccctcactaaagggaacaaaagctgggtaccgggccccccctcgagagtacttctagaattaattaaggcgggatggcagtgagacgcagtgggtcataaaaagtgagagctttggagcttaaaatacctacatgtgatatcagccatctatctaagtgatattgggcaagtgactattctgaggctccttagcttcttatcagaagaaatggaaacaccacctccattacaaaggaggtattatttccattatgagatagcacaactaaagtatctagttatagtaggcattcagtaaacagtgtatctttcagttctgttttctatatcatctaaatgaaatcacacgaacacaattctgtactaccactctacagtttctaagatagaaacaacacaggcataaagggttcttaatttacaaatgtacctcaatattagagttggattacagtgattttgttaaataaagccaatgtatattcaatggcctgaaggatctttatttaaaaaaaaaaaaaaaaaaaaaagc

SEQ ID NO: 46517 - DNA, 637 bp, Homo sapiens
ttaaccctcactaaagggaacaaaagctgggtaccgggccccccctcgagagtacttctagaattaattaatacagccacagcctagctgagattctccccagcaactaggaagatgggtctgcgtcacctctcaggtactgaggagaccagctgggcaagatcttcaaaagctaatgatggggaccagagcaaaggtaggagtgtggtgagaatacagtggcctagccatgcagtgggatggctgggtacacaaatgctagctattggaattggattttctcagccaatgagaatatctacttggggctatttgcttttttggctaattaagaatggtcccaggtcaaattctgtctggaaagttggccactgagtaccaaaattatactttaagtaaatgtagcaagctctgaagggagctaacatccctgaaactgactcttaccatatgctggctctgtcttcaaggttctcagagttgctgtggttttatttgtcattttaggaaagggaagagggaattgattggatatttccttccccatgtgaggaaaaggaacattacttattgtttctcttcaaatcaattaaaagacaaatcatggctggaagactttgatacttaaatacagatt

SEQ ID NO: 46518 - DNA, 485 bp, Homo sapiens
ccctcactaaagggaacaaaagctgggtaccgggccccccctcgagagtacttctagaattaattaaggcgggagaatcgcttgaactcgggaggtgcaggttgcagtgagccagggtcgcgccactgcgcttcaacctgggtgacagagcaagactctgtctcaaaaggaatgacctgtgtagctaaaatataatgagcaaaatagaaacatttgaaatgaaatagtagagaaatgtattcattagcggcaaaattaatcaatatgggtataattttgattaaaatataaaaccagaattctactcttcaaaaaggcctgggattacaggcacccaccaccacgcatagctaatttttttgtatttttagtagagacggagtttcgccacgttggtcaggctggtctcgaactcctgacctcgggtgatctgctcgccctggcctcccaaagtgctaggattataggcgtgagccaccatgcct

SEQ ID NO: 46519 - DNA, 367 bp, Homo sapiens
agcgcgcaattaaccctcactaaagggaacaaaagctgggtaccgggccccccctcgagagtacttctagaattaattaaggcggggagtgcctaccaatatacttaattcttaccactacgacatttaaagtcttcaaaagaaatggctcaaaaataaagaaagtattatttaagggaggcagaaagaattgccaaatgtttgaggcctacagtgtaccatacaccatggtgggggcttgacatatgatatcccatttcatctaaaggaatctccatcatacatgcatagaatgtattattatcatcattttgccgaaaaggacacttatctttaatcacatatcaggtaatcgactgaaatggga

SEQ ID NO: 46520 - DNA, 514 bp, Homo sapiens
gggaacaaaagctgggtaccgggccccccctcgagagtacttctagaattaattaaggcgggcgaatcacaaggtcaggagttcgaggccagcctgaccaacatggtgaaaccccgtctctactaaaaatacataaaaaaaaaaaaaataaaagagtatgttgtccagtccatgcatgatatgtggttgtgcagtttgtgcatttgtagcaccctcaaagaaaggtgcatgtccttctccaaacaaagacccgaaggcaagttccatgtgttcttaccctcagtgaggcttatgtaattgttttggagattaccagaaaggttaatattaacagcttgttttaaagttcacctttaacatttattgcccctttctattttgattcccggggaataacacctatcatgggcagtaattgacttaaggtggaaaccgaatatgcttttattaacaataataatttttatgttttgataaaaaaagagaaaggccttaaaccaaaatatattgacca

SEQ ID NO: 46521 - DNA, 575 bp, Homo sapiens
aattaaccctcactaaagggaacaaaagctgggtaccgggccccccctcgagagtacttctagaattaattaaggcggggaagtgataagtggtcaaatgagacatttcctaggggtagaggtacaaagctaacagagactgaaacccagactgaattttacgttccttatttccaactcctctcgaagcctacctggaaacctttccaatctttaagcattcaactgcagcgaaatatcctctggggaccttctgggacatcccaagacagagtgcatcacccttttttaatagtgtcctgtacttttcttatctttctattgatgcttttaaaacatattttcttgcaattaccttcacatgcactgtgaacaccgacaatttaatgtgtttttgtgcatgtgtatgcatgcacgctgaataagttccttgcatgctaaaaaatgtttcaacctacaaaataaatagtaatgtcattgcctggttcgtgaaaatttggtgataatagatttcacagaaccagggagaaacttaataagatcaagctccagacatattactatggaggcccaaa

SEQ ID NO: 46522 - DNA, 477 bp, Homo sapiens
gcccgcaattatccctcactaaagggaacaaaagctgggtaccgggccccccctcgagagtacttctagaattaattaaggcgggattccagctacacaggacaattcactgtcctaggaacatgctttgcactttcctgcctttgtatctttgctcatgttgttcctatgtctaaccttctctccctgcttgttcactcagaagaaccatctttaaggttcagcataaatatcatatttacaaaaagctgcttcctgatttctaccatccccaagcaactgttttttctcatctctgtaatccctctcttatagcactcaagtcacaggattattgtgtgtccatgtcttccccacttgaccacgatccaattgaacacaaggatgtgtattattcacttttgtcttcacaagacctcagcagtttgatcccacagactttcacaaatccttctcttgtactacctggcacttgct

SEQ ID NO: 46523 - DNA, 484 bp, Homo sapiens
aattaaccctcactaaagggaacaaaagctgggtaccgggccccccctcgagagtacttctagaattaattaagtaagtgcattgcgggtatataggtaggcttcaagatatctgtggagtaatttcaaatgtattttggtttaattatttaaaatcctaaatctaaagattataaaataaaacacataacgtcctaccctacacaaaaaaaaaaaaaaaaaaaaaaaaaaaaaagcggccgccaccgcggtggagctccaattcgccctatagtgagtcgtattacgcgcgctcactggccgtcgttttacaacgtcgtgactgggaaaaccctggcgttacccaacttaatcgccttgcagcacatccccctttcgccagctggcgtaatagcgaagaggcccgcaccgatcgcccttcccaacagttgcgcagcctgaatggcgaatggaaattgtaagcgttaatattttgttaaaattc

SEQ ID NO: 46524 - DNA, 457 bp, Homo sapiens
caagcgcgcaattaaccctcactaaagggaacaaaagctgggtaccgggccccccctcgagagtacttctagaattaattaaggcggggaaaaggtaatttaagaataataattggagatttaattactgtattctcaaaaactaatggaccaactagacagaaaatcagcaaggttaaaaaaagctagaacaacattatcaaacagctcaatctaactaatatacatactgagtaactacagaatacacattcttttcaggtgcacatataaaattcttcaggataggccgtattctgggccacaaaacaaggctcaatttaaaaactattgaaatcataagtaggttctctgaccactgcggaatttgattacacctctgcaacaacaaaaatcagagaaacttgtacacatatctcaaaattaaccttctatttaacccacgggtgaaagaaga

SEQ ID NO: 46525 - DNA, 486 bp, Homo sapiens
attaaccctcactaaagggaacaaaagctgggtaccgggccccccctcgagagtacttctagaattaattaaggcgggaaaactgaggcgcagagacgctgtataagtcgcccacataactagaaagtggcagaaccatgattagtgattctggctccagagccaacagttctaactagaaggctacaaacattcatatgcactgcaagcagtatattctatactctctgcctcttgttttccccatgtacatgctctaaactccagaactgtgcacagagccatagccatgctatgttggacagacaaaatttgagaagtatgatgaataaattatcaatatcccccataaatatggtaagaaaatgtgaacctggtagtctagatatggccgagcagcagaaataaaatgagatcatcatattccttgagattttaaaatatctatctttcaccaatatataaagtcctcgtctcccagactat

SEQ ID NO: 46526 - DNA, 538 bp, Homo sapiens
gtcgttttacaccccggaacaagcgtgtacccatgatgggtgccgggccccccctcgagagtacttatagaattaattaagggggaaaataataatgatgttatgagacacatgtggtatctattactgaaagtagtgtttatcaaaatatttagtggcaaggaaatagaaaagaaaaattagagtatagaatagtagctacagaatgaactcagcaatgtaaaaaatattatgtctacatacccattacgtaaaaccattagttttctaataacagttttagattgagaggagtaaaaacacgattaatgccagactaaactattatatctatatgctttattttctgtcctgttacatttctaagtgttttttgttgctctcttttccatggatctctttttaaatttctttctgctttttaagaacgtttaaatcactttattttaatacattagccacatcttatgagattttcttttaatccaatatttttctgagggattaaacaaatgtctttcaatatataatagctctc

SEQ ID NO: 46527 - DNA, 496 bp, Homo sapiens
  misc_feature 414, 415, 416, 417, 418: n = A,T,C or G
agcgcgcaattaaccctcactaaagggaacaaaagctgggtaccgggccccccctcgagagtacttctagaattaattaaggcgggggagaggcctcacagagaagaggacctgcgcgtaaagtcctggaggaatcaaagcagctttggagatctctgtactagaatgcactgaagggcagtctctttacaatgtcatccatcactagatagtttaactgtactcacagccctctactcaaggcagagaaaatgtggctggcccaatctggacctcgtttaatcatgtatatgctgtgatctgctggtcttgtgcctggcttgctcaacccctgtcccaacactgtcccacctgctataacaaggtacaccacagattgtgctcaaggagattttagatttcctttaagacccnnnnnaaaaaaaaaaaaaaaaaaaaaaaaagcggccgccaccgcggtggagctccaattcgccctatagtgagtcgtattacg

SEQ ID NO: 46528 - DNA, 406 bp, Homo sapiens
aagctgggtaccgggccccccctcgagagtacttctagaattaattaagggggagttggggaaagacgagtctgtaagagaaattttgtaacatttctgaaaaaagcaaacaaagtgggataagaaggcctgggaaaaggactggaaataatatgagaaggggcatttgtcatattaatgaaaaatgaacatttatttttacatgatttttttcatctttaagaagatttgttttcatgtatgatttaaaattaagttccaaaattgtgtaaattgacattttaagggaagtacttttctatacatatttgccagagacataagttttctaaacttccttttccaggtagggtaaatttagggaggagcccatgtgtccaagtacgtggttactaggcagttctgc

SEQ ID NO: 46529 - DNA, 467 bp, Homo sapiens
ggaacaaaagctgggtaccgggccccccctcgagagtacttctagaattaattaaggcgggaaattccaagtctgcagagctcgctcaggttctgagcaccagagggggcttcctgggggccgctgaggactaacctgggcctgggtcagccagtacctgagtacgaggacgctgtccaaggctggggacgaaccacccaaaagatggccagaagccccggcactgccccagcagcggtgggaagggaagcgccagggagcagagaccttaaaggggcagaaaaccctggagaccagcacagctctgggtccacctgacagcttaagagtagcgcccaagccaggctcagtggctcacgcctgtaatcccagcactttgggaggccgaggtgggcaggtcacttgaggtcaggagttcgagaccagcctgaccaatgtggtgaaaccccgtctctactaaaaataca

SEQ ID NO: 46530 - DNA, 586 bp, Homo sapiens
  misc_feature 537: n = A,T,C or G
agcgcgcaattaaccctcactaaagggaacaaaagctgggtaccgggccccccctcgagagtacttctagaattaattaaggcggggatcataaaatagaaaacatactctttctaaaaaatactgaagaaataacttcatgcattcaattttcatgtttcacattatacatactaaagagctaacatttattgaccagtgctgggtactgttccaagtgttttgcataaacatatttaataaatgcacaggagcaaaaatagtacaaaaaatccatagcaactgaacaaaaaataagtaattcacagttaaccaactgtctaggaattctggactgctttactaggtgaaatgttttagaagtctctacagtttctagttagaatttctgaactctgaatgcaattaggatgctaatacattatcagcattttattaaagatggataaaccttcctctattctcaaagcattagaggactattgtcagcaaaccatcttccactcttcttttttgacacatcacaatggcaaactntttggtctaatactataattcttccacatgttaacttgctgaaaaccct

SEQ ID NO: 46531 - DNA, 389 bp, Homo sapiens
aaataaaggaaacacaatgctgggtagccgggccccccctcgagagtacttctagaattaattaaggcgggctgagaaaggcaaagttgtctaggaaaggtgattatacactactcagacaggtacaatccacaaatgctgttttttttgttttgttttgttttgttttgttttgtctgttttgagatgggttttgccatgtgggccacgctggtctccaactcctgacctaatgtgatccccaaagctaggtaatttataaaaaaagaggtataaggctggacacagtggttcatgcctgtggccccaaaaccttgggaagcctaagccggcttatcctttgagcccaaaatttggaaaccagcctaaacaacatgacaaaaccccat

SEQ ID NO: 46532 - DNA, 508 bp, Homo sapiens
cctactaagggaacaaaagctgggtaccgggccccccctcgagagtacttctagaattaattaaggcgggaggatcacctgagcccaggagttcaaggctatagtgagctaggattgtgccactgtactccagcctggaggacagaccaagaccctgtctcaaaaataaataaatatatttatatacatataaacacaaaagacggactttttagggaaaaaggaaatattttgtaatacctgaatagaatatttataaagctgctcaaaattaaaattatatctaatatcttcaagcccaatgttataaatcagtttcctcgtttgtaaaacgaaaaactcagatcaatgtgaattctaaagtcatattcaattatctgaacacaattttctgagccaaggacattgtggtgaaacctatagcagcaggcttctaaagggtagagagaagaaaacaccattctcttatgtctaggaagactgaagaagcactaccggaaggtagatt

SEQ ID NO: 46533 - DNA, 515 bp, Homo sapiens
gcgcaattaaccctcactaaagggaacaaaagctgggtaccgggccccccctcgagagtacttctagaattaattaaggcgggggtcaacaaacggttaaatctgatgatacctagtgggctgatataagtaatctcataggaaacaagaagagtattgttgcataaagaactaaaggagttctattattaagtaaataatgagtggatcttgtgaacaaacggagatgctggtgttatgtaagagcaaagaaactatgatgtcaggatcctttacactgttacgttactgaagccccccaaaaagcctctgtgtatccaagttatatctgtcagtatttgccatactgaaattaaaactaaaataattttaaatagtttaaaatgttacatgttaataacatgactttttttgaaaaataactctttaaaacaaaaatttgggtaagaatagtggcactgttttacatttttacaaatctcctaaatgtctgttagtagaagaaaacaggattt

SEQ ID NO: 46534 - DNA, 507 bp, Homo sapiens
gcgcgcaattaaccctcactaaagggaacaaaggctcggatagctgggtaccgggccccacctcgagagtacttctagaattaattaaggcgggcacctgtagtcccagctacttgggaggctgaggcaggagaatggcctgaacactggaggcggagcttgcagtgagctgagatcacaccactgcactctagcctgggcgacagagcgaaactgtctcaaaaaaaaaaaaagaattaaaaattaaaaaaaagaaaaagaaatgtcagttgagacatttctaagtttatgtgaaactgaggggaaacccattcttcacatgcattggtatatccgaagtattcctgtaatgtaaacaacagctacaataatgtcatgtacaatacatttggccaaatacctgactgtacactaaggcctgaactaaatagaacaaaatcttgaattcttacataaatgccaaagtacaatgaacattcaagaggcattaaccaggccacacaaata

SEQ ID NO: 46535 - DNA, 601 bp, Homo sapiens
aaataaggggaacaaaagctgggtaccgggccccccctcgagagtacttctagaattaattaaggcgggatgtgaggcgatgaaaatgcataactccctcataacaccaggtttctctgaataatcgaagcctacatctttctccacgtttatagaattttatacgcacatttgaaaagttgggggaagaaagaaaggaagcttttaggtgcctgtagtgccactattctcccatagcattgaaattttctcctctattctgttattttctttggtctgttttcatcgttatgtttttgtagtcagcactattcattgtcatagatctcacactattgggtcagttgtaaaaatggccccataaaaagtagacacaaataacagcaagacaggcatttcaatggcaattctttaactaatatatacctcatatgagttaagattaagtatagcttatatatattaatatttctggtttatgtattaatacatatgacttcactttaatttaatgaaggactgatattttgcacctaaaggatatcaaatgtcaattcttctaattccattgttgttggaattaatatatcattactataat

SEQ ID NO: 46536 - DNA, 446 bp, Homo sapiens
taaagggaacaaaagctgggtaccgggccccccctcgagagtacttctagaattaattaaggcggggcaggaccagcaagaccctagcagtgcttcctacaccacagctcaccatattatctgctctcagtttaaagacagacacttgtcagctatcagctcagtggacccaagtatttcccatttacaaaattcagtgtattttctttttccctttaaggtgagggcaccagctggggaaggcattcccacacaagagaacactcaactgtcattactctcaaggtattccgtggtccatggaggctggtccacttgacaaagcttccaaggtcttgtggctttgagtttctttgaccagctgagtttctgtacgggagtttccccaccatgcaaggcttccgtaaagctgctagcccagctgctctactgagctggttcctcta

SEQ ID NO: 46537 - DNA, 471 bp, Homo sapiens
  misc_feature 413, 432, 433: n = A,T,C or G
tacaaccctaaataaagggaacaaaagctgggtgccgggccccccctcgagagtacttctagaattaattaaagaatttggagtatgaagtgtactttctttttttgcctttttatttaaagttcatattgatttccatgaataaacaaaagcacgaagccagggtttatgcattcactttctgagcagaagggttcagccatgaaaaaccgaacttatctgtttgcaatatattttcttcaaattgggaacagatgcatgtgtcgttccagagtgtaggtaaaaaggactgagctctttactgaataacctcaactttcttcctttgaccattgtgacttttcttccatggaaggttatctgtcatctattttttttcccactgtgtgatcttaaaagatgaattccaaaanaaaaaaaaaaaaaaaaaannaaaaggggccccccccgggggggggccccaatcccccc

SEQ ID NO: 46538 - DNA, 463 bp, Homo sapiens
cactaaagggaacaaaagctgggtaccgggccccccctcgagagtacttctagaattaattaaggcgggggtgcgtcgggggaacacaggtctcatacccatgaagccattcctgttgacccccgacttaggacatttaattcaaaactaaaagcatgattattttccttaatatgtagtatagtagaggtaagaaacacaaaatcagcactgggaacattttcaaggatccaggccttattctttttctaaaagagtattttttacaaattaagcatatgcctgcttttatgatatgtagaaacattttcttccagccatcttcctgcttgagaaactacattcccacttgccctaaactgtcaaggggccactttgagtcatctgtcttcactaaagcaaatctttcaaaagctaagtagcatcatttcacatttatttagcacctgcaggacactttggt

SEQ ID NO: 46539 - DNA, 372 bp, Homo sapiens
aagctgggtaccgggccccccctcgagagtacttctagaattaattaaggcgggactctgtctcaaaaataaataaataaataaaatgcctttttaaaaaatgggccatctataccagctaagaagaatgtaagactcagactatcttcattactgatttatttctttggtctggaagcctgtcaatttttgccagttgaatatcagcaataaatagtcatcaagcataatgtttgaataaaaatgttattcttcaaaccaaaataaattcaagatgatttgagatccaaacgcaaataaatgtaactataaaagctacaaaagagctctcagtctgagaaaaaagaaaaaaaaaagaagaaaggggccccc

SEQ ID NO: 46540 - DNA, 491 bp, Homo sapiens
  misc_feature 365, 367: n = A,T,C or G
cactaaagggaacaaaagctgggtaccgggccccccctcgagagtacttctagaattaattaaagaatccaaaactgtttctttgtaaaaataattttgataatttcctagctaaggaaagcacaaatccatgaatctggaaataaagtgacacaaaagaagaaatttgaaaaatattcttgtaaaaatattttaaaatctacattaaatggatttttttagaaaatccaatttaacaaaatttgcccctatagagacagcaaatttaaaccggccaagtaacataaaataatcatagaaactagttaaggagttcccctacaaaacaaagcaggcccagatcgttttacagatgattctacccnanaaaaaaaaaaattataaaaaaaaaggcggccgccaccgcgggggagctccaatttgccctatagtgagtcgtattacgcgcgctcactggccgtcgttttacaacgtcgtgactgggaaaaccc

SEQ ID NO: 46541 - DNA, 423 bp, Homo sapiens
actggccgtcgttttacaccccggaacaagatatacctttgattctggccggtggttttccttcaagaaaaaggaaaaacctttatgccgggccgggggtggtccacccaaaaaagaaaaaaactactgaccttgtgatccgcccaccttggcctaccaaagagctggggttacaggcgtgaaccatcgtgcccggcctgtacctacaatatttttaacctttagcactagttttttggaccggtgacataagattatcttattcatgtttcaattaagatttccaataagatttcatgcatatgtttcaacttaaaacacaaaaaatttgataaagaaaaatctttgtattttgtattaggaaaggttcaaagacaaaaataacagatggtaataagaaattatcaaacctggaaataaagc

SEQ ID NO: 46542 - DNA, 471 bp, Homo sapiens
caattaaccctcactaaagggaacaaaagctgggtaccgggccccccctcgagagtacttctagaattaattaaggcggggggctagaggcctgtggggccatttctgtcctctaagctctagtctgatctcaccggcagctggtcacatgggaggacaggagatggagaacaaggctgacagtagggaggggagagcagagacaggtggctgagtttctctcacttagagaaaagaaactggctgagtgtataccacgtctgaaatgagcgaaagggaagattgcccaaatcctgtaaaggaccttttttgtggtattaatgctattcttttttatgtcaaaatgtttcaggtttacagaaaactatacagactaatatgaacactcacatagctgctatctaagtcatacttttaaaaaatacaggtttaaaaaaataataatacaaaagtgggtaaagcctcctgtgt

SEQ ID NO: 46543 - DNA, 480 bp, Homo sapiens
cgcgcaattaaccctcactaaagggaacaaaagctgggtaccgggccccccctcgagagtacttctagaattaattaaggcgggtggatcatgaggtcaggagttcgagaccaacctgaccaacatggtgagtccctgtctctactaaaaatacaaaaattagctgagtgtggtaggtgcctgtaatcccagctgctcgggaggctgaggcaggagaatcacttgggcccggtaggcggagcttgcagtgagctgagatcccgccactgcactccagactgggcgacagagtctctgtctcaaaaaaaaaagaaaaaagaaaaaaaaaggtcatcataataacacttaactcactcagcagttgtgagtacaaataaaattcaaatcctggaagtgtttgaaaaacatccacaagaatgacagaaaggagaagcacactgttgtttttgttagttttaacattcgtgtggcttttttctt

SEQ ID NO: 46544 - DNA, 471 bp, Homo sapiens
ggaacaaaagctgggtaccgggccccccctcgagagtacttctagaattaattaaggcggggtagggatggttcctcaaaagttattataaagaaacaatcaaaaggaatagaggttagacagacaaacaaatgttgtcttctatggtccattcctcagctgtctgccacgtcttcagccttattaccaaactgtttgcaaaaaatggcacattcctcagctctctgccacctcttcacccttattaccaaactgtttgtgaaacagggcacaatataatacaatggctacaataacattaaaaatagataacttataccatataaccactataactaaaaataaatcaaagacctaaagatataaaactcctagaagaaaaggggaaaactgcatgacattggatttggtagtgatttgttggctatgatacaaaaagtaaaggcaatgtgagaaaaaaataaataaact

SEQ ID NO: 46545 - DNA, 372 bp, Homo sapiens
ctggccgtcgttttacaccccggaacacagcgtgtacacatgatggttggccggccttttcttgagagaactagtagaattaattaaggcggcatccagattggaatggaagaaggaaaactatttgctaatgacatggtgccatatgtagaaaatcctaaggaatccacccacaagaaaaactagaactaaataactgttcagcaaagttgcagaatacaatatcaatatacgaaaaaaaaaaaaaaaaaaaaaaaaaaaaaaggggggccccccccggggggggaccccaattcccccttaaagggggttttttacccccccccttggggcggtttttaaaaaaagaaaaaaaaagggcccccccccccc

SEQ ID NO: 46546 - DNA, 484 bp, Homo sapiens
  misc_feature 429: n = A,T,C or G
accctcactaaagggaacaaaagctgggtaccgggccccccctcgagagtacttctagaattaattaaggcggggaatatcagtgctactttaataatataaaaccctattttaaaagattatatcaaagttctttgtatcttttagagctgtggttttcaaattttgctgactacacaacaccatcagttaaaaatatttgtacacacacctatttacttacaaaatatacgcatatattgtggtgagtctatatattcagtattaataaagattgtattttcttattttcagataaatagaaattctaagcctgcgcaacatggtgaaactctgtctctacgatacaaaaattagctgggcgtggtggcacacacctgtaatcccacctacttgggaggctgaggcacgagaattgcccgagcctgngaggaagaggctgcagtgacctgagattgtgccactgcagtgcagcctgcgcaac

SEQ ID NO: 46547 - DNA, 563 bp, Homo sapiens
  misc_feature 425: n = A,T,C or G
accctcactaaagggaacaaaagctgggtaccgggccccccctcgagagtacttctagaattaattaaggcgggtgcctgtagtcccagctactggggaggctgagtcaggagaatggcgtgaacccaggaggaggagcttgcagcgagcggagatcgtgccactgcattccagcctgggcaacacagcgagactcaaaaaataaataaaaaataaataaataaaaataaataaataaaattgtaaacttgttttataataatatgtcaatcctttatttgcagcatgtatgcaaactttataaggaatggagtgatttgagatatagagtatgcatcacagtctcatttattcctaaattatatttcaaagaaaataagaatctatattaagtttctaaatacacattaaagttttatcaaaanaaaaaaaaaaaaaaaaaaaaaaaaaaaaaaaagggcggccgccaccgcggtggagctccaattcgccctatagtgagtcgtattacgcgcgctcactggccgtcgttttacaacgtcgtgactgggaaaaccctggcg

SEQ ID NO: 46548 - DNA, 513 bp, Homo sapiens
gcgcgcaattaaccctcactaaagggaacaaaagctgggtaccgggccccccctcgagagtacttctagaattaattaaggcggggaaagagggggctgtcaggatttcacatttctcacagctggacaggaaacccttctttaaaggggaatctgagtctactacaggggtcatacattattcaaccctctatgttcaacatctgtttgaactccgatgatctgccgaatgcacatcttcagtagtaagataccaggacaccaaacaagactaaaaagccaaacttaactacaatagatgcgcttattttaaaaagcacgtagattattattatttctaatttcagttgtattatacgatattttaaatatgattatttatatgtttaaaatcttttatgaattgtaaaactgttatacaaaatgcattttagcacgacaaaacaatgcagtgaagagataaactatgggagaaaaaatttgcaaccatacacctgattaggggttaatatc

SEQ ID NO: 46549 - DNA, 447 bp, Homo sapiens
acctctactaaagggaacaaaagctgggtaccgggccccccctcgagagtacttctagaattaattaaggcggggacattctgatataatcaaggaagctgaatttagaaaaatcatatttttaaggaaaaagtatcccaaaataattgataaatgaatcaaaattaatagctcaagaatagggggcttgtaggaacttaaataaaatgacaaatgacgaaacacggcaaaaataaagtaagtctaaatgattcaaagtttcaatacaaaactaacatcaaaaatgaattttgcaaaaggagctatgtaatataaaaattatatttaaattaaattgtgtgggtcaaaaaatagattatattaacaaggagtcatacaaggagtaaaaaaagaattttgcaaaattcaagctgaccaaagatataatcaaatagtttatgactaaaa

SEQ ID NO: 46550 - DNA, 626 bp, Homo sapiens
aaagggaacaaaagctgggtaccgggcccccccttgagagtacttctagaattaattaaggcgggtgcagtggctcatgtccataatcccaacactttgcaaggctgaggtggaatgactgcttgagactaggagttcaagaccagcctgggcaacatagcaagaccccatctctacaaaaaatacaaaaattagctgggtatggtggcgcacacctgtagtcctagctacttgggagggtgaggtgggaggatggcttgagcccagcagtttgaagttgcagtgagctatgattgcaccactgcactccagctgagcaagagcaagaccctatctctaaaaaaataaataaaataaaatgaaaagtagaaaataaacttcatatatttgaacctttctcttcataatcaaagtctgtcagataattacttaactctgttttccttattctccacaatatttgagtactgtcttaagttgtcggaaaggaaaatcagctcataacaaccttctctggggtttccatatgcccacactgcattaagatgaccaataccagaagcaggcatggtggcacatctgtagtcgcagctactcaagatctagggtaggcggatcacttgagc

SEQ ID NO: 46551 - DNA, 515 bp, Homo sapiens
gccaagcgcgcaattaaccctcactaaagggaacaaaagctgggtaccgggccccccctcgagagtacttctagaattaattaaggcgggagagtttcaaagcaagtatttaaggatctcaaaatgacaatgacatgccatgctttcaaggaggctaacaaacaagaaaaccatcagtaggaccagtagaagaattctgtcacagttcaaagacaagatcttagagcctaacagagaaaaaagagagggctttcagaagagtaacactcacaccaaggaccaactttacaataaaaacagcggaaactagaagattaagtgctcataaaaaatacactgctaaactggaatttggtatcactaaaaactgaaaaggaaagtgcttattaaataacagaaaatatcaattagaaggaaaattatagtcatgatagaatacatgtgattgcatgcgaatcatatagctatataatgagtcattgaaaccaaaagttttatgcagaaagcatgtcaac

SEQ ID NO: 46552 - DNA, 540 bp, Homo sapiens
ctgggtgccgggccccccctcgagagtacttctagaattaattaagacgggttctcttgggttttcaagtagttgtacaatcataatgtctgtaaatagtgctagttttacttcttcctttccaattttttaatttctctctcatgtgattgtcttggctggtactgcagtatagtatttaaaaatagtgctgacagtgacatttgttgtctgttcttgacttcagagggaactgtttatagtgcttctccattaatcactatactgagttttgggcagaaatatatacacacacatacatatatatattttcatgttacggaagcatctatcttctatctattcttattttactgagtatcagaacactcattttctcaaatgcttccgtctcatctattaagacaaacctgtgatctttcctttgatgtgaaaacactgaatactgaaactggaataaatgcccccctcctccttaattaaatttggttggctttatatgtaaaaagaacattgatgaaattttaagtctagtatttt

SEQ ID NO: 46553 - DNA, 392 bp, Homo sapiens
cgcgcaattaaccctcactaaagggaacaaaagctgggtaccgggccccccctcgagagtacttctagaattaattaaggcgggaaagtgtgtagggattaatggagcaaggttagccaagagttggtaattattctacttttgtatattttgaaaatttccgttataaaaacatttttaaaaagccaccatgggctgggcacggtggctcacatttgcaatcccagcactttgggaggccgaggcgggcggatcacgaggtcaggagatcaagaccatcctggctaacatggtgaaaccccatctctactaaaaaaaaaaaaaaaaaaaaaaaaaaaggcggccgccaccgcggtggagctccaattcgccctatagtgagtcgtattacg

SEQ ID NO: 46554 - DNA, 412 bp, Homo sapiens
agggaacaaaagctgggtaccgggccccccctcgagagtacttctagaattaattaagggggatggataatatctacgggtccatagtgataaagatgtaagcacaggcacgtttacacttagccttgggcccagaatgcatctttattttgaaaaggtgcagattcctaatatttcagatttcttcgaaagtttgaataggttcttgctaaagcagagctactcacattttgcgtgtatttttctagattagcagcaggcgagatcaagatagtcctctgcttacttctgcttgagacattactgccttgtacaagtacggttccaagcagtgaatagacagtgaatggagatgtgggttttgtaagaatctcaaaaactagtctctacggtactttaaccagaattgcac

SEQ ID NO: 46555 - DNA, 377 bp, Homo sapiens
  misc_feature 343: n = A,T,C or G
tggccgtcgttttacaccccggaaaaagagtataaccatgatgatgggcgcgccttttctttaaagaaaaaaaaaaatactttatgcggggcctgttgttcatacggaactataaaaggccttccctcccagagtaccagctgctgctctgtatgcaaggtcaccaaaaaaggaggctgccaggccctggagaaggggcagcaccaactccataggccctctaggctcccaggtggggtctccaagtccaagaagccgtggcctggagcagcttctccttctctgttgcccccacagcactagggatcgccccattcaataaatacaagttgatttgctgatnaaagaaaaaaaaaaaaaaagggaatattaatttt

SEQ ID NO: 46556 - DNA, 514 bp, Homo sapiens
  misc_feature 230, 231: n = A,T,C or G
gcgcgcaattaaccctcactaaagggaacaaaagctgggtaccgggccccccctcgagagtacttctagaattaattaacttggaaatggcagaactgatacttgaaccctgatgtatctaaggagccctcatttctacctcactatgctccctctaagaaaaccaatcagtgtgcatacctatgtaacaaacctgcatgttctgcacatgtagcccagaacttaaagtnnaaaaaaaaaaaaaaaaaaaaaaaaaaaaagcggccgccaccgcggtggagctccaattcgccctatagtgagtcgtattacgcgcgctcactggccgtcgttttacaacgtcgtgactgggaaaaccctggcgttacccaacttaatcgccttgcagcacatccccctttcgccagctggcgtaatagcgaagaggcccgcaccgatcgcccttcccaacagttgcgcagcctgaatggcgaatggaaattgtaagcgttaatattttgttaaaattcgcgtt

SEQ ID NO: 46557 - DNA, 461 bp, Homo sapiens
attaaccctcactaaagggaacaaaagctgggtaccgggccccccctcgagagtacttctagaattaattaaggcgggttttcaattgtttgttggattaaatgcaaatcctgatgcctagcttttatgccttcctatcaacagtcttacccattcaacttcattttcactgctgtaattctaatctagctaaaacagtttccaaaatggtcccacatgttcaaaatctgctcaatcctacaggatttcatttcttctctcccacataaaatgtctcctatatgcttccactgcttaaatattaaactcctttcatagcacatctctgttaagcctcttccaactagctacatctaacagtaatcatattgctttatattcagtgttactgcattttggtctgaggcacatgtaactatttgtatcaggactagaattcttttttctgtaaagggccagag

SEQ ID NO: 46558 - DNA, 506 bp, Homo sapiens
gcgcgcaattaaccctcactaaagggaacaaaagctgggtaccgggccccccctcgagagtacttctagaattaattaaggcattggatagtctctaagcctgtgtgtgtactgaattaatctattagctttgcatctaattcttcactttgaatttcaagtagaaggaagctgtttgcctctaaagtttaaaagccattgatgtgattgttaaacttggtattttaagccattccaggctgcagcctggctttcagtggtaccttctaaacatgcctcaatacaaatgatgctttgttttatgtagaaaatacgaagctgcttttgattattctgtgctgccactgcccgttttctgtggttgtggactatttaggaatttagtgcagtgactctcttgctgagctatggatatttggtatcttcttgttaacattctccaaaagtgtttcccaagcaacaaaacaagcagaaataattcagtataaaggtattgtatttttctt

SEQ ID NO: 46559 - DNA, 410 bp, Homo sapiens
ctaaagggaacaaaagctgggtaccgggccccccctcgagagtacttctagaattaattaagggggaaagaaaaaacagctttttagtcaggcagcaccaggcattcctctgcagtacgagtcctttcagtagtatatacaataaagttcagtaaatataacagggaaaagaaagatttttaaatagtgttgagaaaacaagttaacagttcagaaatcaatttagattcacccttccccacacacatgcacatacaacaaaaatactacaaacaaaatagagttgatagaagctaatcaaatcataggaaagctagcaaaagataaaattatttaacagatctttagagagcttttaaaacttcaaagaactgggatccacaaagaaaaaaggtatcaatagatttaac

SEQ ID NO: 46560 - DNA, 497 bp, Homo sapiens
cagcgcgcaattaaccctcactaaagggaacaaaagctgggtaccgggccccccctcgagagtacttctagaattaattaaggcgggaggatcaggtgagcctgggagttcaaggctgcggtgaactgtgatcataccactgcactccagcctggttcacagagcaaaaccctgtctctaaataagataattttaaagttggaaacaaagcacaagggaaaacactaagttatgcaaaattagaatatattgatatcaataaccaaacattataataaaacccagaacacagaaagaggtaaattgttttcagtaaatataatgaggcttaggatctttacaatggaaaaaaactcatgcaaattgataagaaaaatgctaagaccttaccaagaaatcgacaaaggacatgaacagacagtttgaaaaggaggaactacaactagttaacaaagataaagaaaactggcaccattagcaaaaaataaaaaaataaa

SEQ ID NO: 46561 - DNA, 465 bp, Homo sapiens
agggaacaaaagctgggtaccgggccccccctcgagagtacttctagaattaattaaggcggggaagcaacttaacatcttacttctgtgaactgatgacttggactagcacatcatcacatcctcactcccctaaacactgtcttaacaaaaaaaggatctaaatctatattaatttgacttctctaaaaactaaaagatgttgtatatgctgcatagttgagaatcatacccagttaacctttaaaaatgatgtagtaagtttgaggaacccagaagcaaaggctttgctaggcagagaagtggaagagtacaagaaattaacaccacctgtaaggttcgaagtgttatctcccttggctagcagagtgttcctttataaagaagctactctttgattaatagacttattgaatcaggtgaactaacatagttttagtaattaaagaattgcaaaatgttcca

SEQ ID NO: 46562 - DNA, 48 bp, Homo sapiens
aaaaaaaaaaaaaaaaaaaaaaaaaaggcggccgccaccgcgggggag

SEQ ID NO: 46563 - DNA, 459 bp, Homo sapiens
ctaaagggaacaaaagctgggtaccgggccccccctcgagagtacttctagaattaattaaggcggggttataagttattggtagacagccttaacttcactgaagcaaatttagaaaagtgtggataagtaccccccaatttaaaatcacaaagctctaacctttacttgacatacttctcttactttactcttataaatactctgcaaagtgagtattattgttcctattttagaagggagaagactgaagcttagaaaagctgatttacctatacctattaagtagcagtgctagtatttgaacccagtctgtgatttcagcaatttctattaactcagaaaaggggaacatgtctggaaacaaaaggacagtaatagcacccatactcctcttctagtctaacttaaatggtattagtgagttgcttgacttttaattaggacaggctcctatta

SEQ ID NO: 46564 - DNA, 306 bp, Homo sapiens
  misc_feature 274, 277: n = A,T,C or G
ccctcactaaagggaacaaaagctgggtaccgggccccccctcgagagtacttctagaattaattaaggcaggtaggatggaattttggaagaaataaaaattttagttttagtcctctagtgaaattttattatgtggagatcagacctcaggaatggagttgatccagaagtttaaaaaaaaattttttttctgaaagcttagaagcagtctctaattgtgaagagtttcagtcacatctgactagctgtgagtaattggttaacccacccnganaaaaaaaaaaaaaaaaaaaaaaaaaaaaa

SEQ ID NO: 46565 - DNA, 481 bp, Homo sapiens
atgattacgccaagcgcgcaattaaccctcactaaagggaacaaaagctgggtaccgggccccccctcgagagtacttctagaattaattaaggcgggggtaaaaagaagccactacaccttttaaacaactcttctcctgtcacctctcaggtgttttattttagtttggtattatatttaagaattctttcttagtggcatacatttcatttctgtgatcagaaatcagctacaattaatattttactgacttatttgatattctctgatggctgtatcaattttcttctttatccatgcatctctttctttactttggctgaagggataaagttttcaaaagggatatatgagtggaatcgcttttgaatcttttcacgactaaacaggtattttattttgccatcacactttattgatcttttgctctgtttagactttcatgttcaaatccctttcctcttgtctagcagcattta

SEQ ID NO: 46566 - DNA, 581 bp, Homo sapiens
agcgcgcaattaaccctcactaaagggaacaaaagctgggtaccgggccccccctcgagagtacttctagaattaattaaggcgggtgtttctcacagattatatactccatgtatccactgatatcgttaaggaaaacaaagctaaatctctggtgccagaagtcacaataatgactactctagggtactggtaatgttcaaagcgattatgtggatgtatttacttatagataatacactgaagggcatgaatttatagtggggcacttttctctttatgcgtctccataaaaattttatgttaatcaaggaagaccatccctacataacagcaataaccagttaaaactatgaaatgaagagctttctaaaaatagtgacaaacaaaagcatccagtttagcaagaaatttctgatagggataactataacactgtgatacataccatatggatcgttaccctttgcttctttatgaattagcttatgacttaatgtagttcaaatattccaatagaaatttaacctgaaatatttcaagggattctaaagttcaccaggaagcataaaagggtgaat

SEQ ID NO: 46567 - DNA, 447 bp, Homo sapiens
  misc_feature 408: n = A,T,C or G
ctggccgtcgttttacacaccggaacaagcaataaccatgattatgggcggtggttttccatcaagaaaaaggaaaaacctttaatgctggccggggttggcccaaagaaaaaaaaataaatacaggattggagtcgaccattctgaaatagaaccacacacattgccaactaattttcagcagaatgccaggtcaattcaataaagaaataaaaatctttccaacaaatggtgctggaataaccagaaatccataagaaaaattaaaaaaacctcatgccatatgcaaaacttaattttaaataagttataagcctaaatgtataaaattgtaaggcttttagaacaagacattgcagaaaatttttacaaacttgaataagcagttatttgttaggcgggacacanaataaaaaatttaaagaaaaaaaaaaagggccccccccc

SEQ ID NO: 46568 - DNA, 360 bp, Homo sapiens
ccctcactaaagggaacaaaagctgggtaccgggccccccctcgagagtacttctagaattaattaaggcgggggcctgcctacccagctactctgtaggctgtggcacgaggatcacttgagcccacgaattacgcggccagcctatgcagctgggcgacatagaagacgactccgcctcttatatagaccgcaaaagaaaagaaaagaaaaagtggccaggcggggggactcaagcctgtaatcccagcactttgggagggcgaggcacgaggaccacctgaggttaggagtgggagaacagcctgatcaatatggagaaaccctgtctctactaaaaatacaaaaattagccgggcg

SEQ ID NO: 46569 - DNA, 454 bp, Homo sapiens
ctcactaaagggaacaaaagctgggtaccgggccccccctcgagagtacttctagaattaattaaggcggggagatagatgcaccaaataactaggtgagtatcttcgcatgggacaatgtgtggtaatggcattcccaaaacgccttcattgtctttgtttgtgttcaataatgtatatgtttcaatcctgagctcaaggggaatacacctttttttgaaccaagtgtagtggctcatgcctgtaataatagctacttgggaggctaaagtggaaagattgcttgaggccaggagtttgagaccattctgggcaacatatcaagaccccatctctcaaaaaaaggcgacccccccttaaaaaaaaaaaaaaaaaaaaaaagccccccccccccggggggtccccaatttgcccttttagggggttttttaccccccccccctgggcccttttt

SEQ ID NO: 46570 - DNA, 440 bp, Homo sapiens
  misc_feature 395: n = A,T,C or G
tggccgtcgttttacaccccggaaaaagatataaccatgattattggcggcggtttcctataaagaaaaaaaaaattaatttaggcgggcgcctgcagtcccagctattcgggaggatggggcaggagaatggcttgaacccaggaggcggaggttgcagtgagccgagatcgtgccactgcactctagcctggcgacagagtgagactttatcgcaaaaaaacaaaacaaaaaaacaaaaaattagccaggcgtggtggtgcatgcctgtaatcccagttacttgggaggctgaggcaggagaattgcttgaatcagggaggcggaggttgtggtgagctgagatcacgccattgcactccagcctgggcataaagagcaaaactctgtctcanaaaaaaaaaaaaaaaaaaaaaaaaaggggcgccccccccgggggg

SEQ ID NO: 46571 - DNA, 503 bp, Homo sapiens
aaagggaacaaaagctgggtaccgggccccccctcgagagtacttctagaattaattaaggcggggggtttcaccatgttggccaggatggtctcaaactcctgacctcaggcgatctgcctgcctcggcctcccaaactgctggaattacaggggtgaggcagcgcgccagggctatagcaacattttaaaaggacatttgcttgggtatataattttatatccaacattcttttccttaaatatttaaaaatatcccactccttcctttgttgcatccatttttgttgctacatctgatattctgatccttgcttctttgcaggtgatctctgactcactgtaagctttgtaaatttctctatgccttgcatgttctaaaatttctctctagcatttccaggcatagtttttctttgcatatcctgtttggcccaaaggcaaatctggcaatgaaaacccaacttcttacacacccgtgactctgctgaactgcttgcact

SEQ ID NO: 46572 - DNA, 583 bp, Homo sapiens
tgatacgccaagcgcgcaattaaccctcactaaagggaacaaaagctgggtaccgggccccccctcgagagtacttctagaattaattaaggcgggcgtggtggtgcatgcctatagtcccaggtactcaggaggctgaggctgcagtgagctgagatcgtgccactgtgctctagcctgggcaacagagcaagaccctgtctcaaaaataaataaataaataaataaataaaaattaaaaattacctgggagacttgttaaaaactgaagattcccaagcccatctcagacccaaggaatcctgtaattttctagattcagtatgacactcaaagttttagggaaaatgagaaggctcaggattagaaattccagatttaactgcttggtggatactggaatgaattatcctctctcagtctctctaactcctcctctggcaaggctcagggccctagcagatttgcccaggtgaaactaatactgagatattttattttcatttatttattattattttttattttttaagagcagaggtttagtaggcaaaagaaagcgaaaggaaggccgggtgcggtg

SEQ ID NO: 46573 - DNA, 471 bp, Homo sapiens
agcgcgcaattaaccctcactaaagggaacaaaagctgggtaccgggccccccctcgagagtacttctagaattaattaaggcggggtgaggagtagaatcctctgtgggactgccaggcctgtctcacagacctcatttcatccccaaaatactttgctttcccttcctgacccccttgcctaggaaaattcctagtatcttctaatctgttactcaaagaacaatcaaagagtgacaatagaaccaagtttacaattcagattttactcagtcactaaagtatctgcaaaacatacccctggatttgatgctagatcatagagatcatgtactcccatcaagtctatagaactctggccaatggcaccgggcgtggtggctgtaataccagtactttgggaggctgaagcaggtggatcacgaagttaggagttcaagactagcctgaccaatatggtgaaaccctgtc

SEQ ID NO: 46574 - DNA, 496 bp, Homo sapiens
cgcgcaattaaccctcactaaagggaacaaaagctgggtaccgggccccccctcgagagtacttctagaattaattaaggcggggagtgaggggacacggtagctcacacccataatccaaacactttgggaggccaagacaggcacatcgcttgagccaacacggcaaaaccccatctctacagaaaatacaaaaattagccgagcatggtggcacacactcataatcccagttattagggagactgaatcaggagaatcacttgaacccaggaggcagagactgcagtgagctgtaatggcaccactgcactccagcgacagagtgagactctctcaaaaaaagcaaaacaaacaaaaaaaaatcaaagaaatttaaaatcttttctataaacccaatctactggtaaggaaattaaagcacagattctccataaccatcttttctgattctaaacaagcaattaagcttactgccaccccccaccttcccaca

SEQ ID NO: 46575 - DNA, 594 bp, Homo sapiens
accctcactaaagggaacaaaagctgggtaccgggccccccctcgagagtacttctagaattaattaaggcggggtggggagggagcgagcaaaaggcatctttgacccttttagattgcatttcattcctcaaaactaggagaagtacagtatcttgtactggataatgattaggaaatctgtgtcagaacagtattaaaaattaacaaaaataaaagttacccgtatttggcacctactatggtaaaagctatattttaggtactttacacgcaatatttccagtccttatctccacctggttagaatttgcagataaggggccgggcccggtggctcacgcctgtaatcccagcacactggggggccgaggcgggcagatcacaaggtcaggagatcgagaccatcctggctatcctggctaacatggtgaaaccctgtctctactaaaaaaaaaaaaaacaaaaaaaggggcggccgccaccgcggtggagctccaattcgccctatagtgagtcgtattacgcgcgctcactggccgtcgttttacaacgtcgtgactgggaaaaccctggcgttacccaacttaatcg

SEQ ID NO: 46576 - DNA, 513 bp, Homo sapiens
cgcgcaattaaccctcactaaagggaacaaaagctgggtaccgggccccccctcgagagtacttctagaattaattaaggcggggtgtggtggtgcatgcctgtaatctcagctactcaggaggctgaggcaggagaatctgggaggtggaggttgcggtgagctgagatctcaccattttactccagcctgggcaacaagagtgaaactcctcaaaaaaaaaaagaaaagaaagaaagaaagaaagaaaagaaaacccccaagaatctcaattctctataaaaacttaaataaatagaggaccctccaactgttccaatgcagctaaagtaactgtcacactgcctaatcactaagcaaagctgtgctgctatatggatggtaacacaggcaatatctgcagacatgtctcatttaatccacagtattttaaaaggcatggtaagtaaccagctatttttcttttaaatgaccagtcaatattccacatttatgctatatgcctggccccca

SEQ ID NO: 46577 - DNA, 479 bp, Homo sapiens
  misc_feature 315: n = A,T,C or G
accctgactaaagggaacaaaagctgggtaccgggccccccctcgagagtacttctagaattaattaaggcgggttttatgtaatcacacttcaccagtctgaaaagccacaaaccaagaccaaaagaaagaaaagtcctgttggatgaaataatttcttgctgagcacaatcccttagtctagaactctgagtatatttttcagagaaaatgttccttttcggctgggcgtggtgactcaaccctctaccccctctagagcctaattatctgcattcaggctattacaaaagaccactgtttggtgaacaaaanacgggtccgccctcaaagaatgcctgggttacctataagcattaccttttcctgcccccccataggtgtgaatttaacccaatatttcccgtggggataggaggagacttacagctttgggttaagacaatgctttattgtacggagaatgcctaacacaccac

SEQ ID NO: 46578 - DNA, 484 bp, Homo sapiens
aattaaccctcactaaagggaacaaaagctgggtaccgggccccccctcgagagtacttctagaattaattaaggcgggaggggggattaagtcagattagagtaaattgaggagtgaatggggaagcaagaactgtggagggcttggttagcaaagtagataactctcccacaagaacagattgtaaagagaaatagatagagcaatagctaaaggaaaaagtgggataccaagaggtgactttgtttgatgagaaacacctgggcatgttaaaggatgataggaataatccaaggaatagggaaatattaaagatacataaaatgaagtattaataagtgggaaaaatacgaattacaacttaaaatataaagcggccgccaccgcagtggagctccaattcgccctatagtgagtcggataacgcgcgctcactggccgttgttttacaacgtcgtgactgggaaaaccctggcgttaccc

SEQ ID NO: 46579 - DNA, 460 bp, Homo sapiens
ctaaagggaacaaaagctgggtaccgggccccccctcgagagtacttctagaattaattaaggcgggccagacacagataattagtctggataatgaaagtctaggtatattttacattgaaaccaatgaacgaagaatctgtgagcccgaaaaagaaatcctgtgttttaaacatgtcagcaaaaacatggtatgtgcatggaatattcccatctgctccttttgagttctggatttcagactctcttgtcagacctccagggcctaacagtccctgtgctctccaaggcttcctacatttctaaggtgctgggagttcctctatctgatctatgctgtctccacccacctgcctttcattctatcaacaaaacaagacgaaacaaaacggaagcaccttaattgtgatgagttttgccccataacagcctttctccatgactgactaattaaaaaaaa

SEQ ID NO: 46580 - DNA, 607 bp, Homo sapiens
agcgcgcaattatccctcactaaagggaacaaaagctgggtaccgggccccccctcgagagtacttctagaattaattaaggcgggttgaaagagagctgttatttactaatcattgtcacctggatgtccactcttctccaatcctggcatgacacagaaagatagataagatcgaatctggaaatagaacaggggaagaaaagaaagtagaaaataattagaaatgaaagagtaaattaggctagagaagttagtaaaaaaaaaaaaaaaaatacaaagaaacacagtataaaaataacagttcagtacgatgtctgtaagtagcagaaagacaaggagggttgaaagagagctgttatttactaatcattgtcacctggatgtccactcttctccaatcctggcatgacacagaaagatagataagatcgaatctggaaatagaacaggggaagaaaagaaagtagaaaataattagaaatgaaagagtaaattaggctagagaagttagtttaaaaaaaaaaaaaataaaatttagcggccgccaccgcggtggagctccaattcgccctatagtgagtcgtattacgcgcgctcactggccg

SEQ ID NO: 46581 - DNA, 349 bp, Homo sapiens
cgcgcaattaaccctcactaaagggaacaaaagctgggtactcgggccccccctcgagagtacttctagaattaattaaggcgggtgctaaatgacgtgatggggttatttctttttcttcccttttccatatccttctttgcgttggcatgtaacatttttgttcacaccaataacaatatataaaggaatgggaaataatgaggatagacatggcccccaggacatctgtcaccttctcaccacctttgttgccaccatattattcaggtcaggatcctcctacctatctacccttttatactaataatcttataagagagaaatatcactaaaatatgaaataaaa

SEQ ID NO: 46582 - DNA, 506 bp, Homo sapiens
agcgcgcaattaaccctcactaaagggaacaaaagctgggtaccgggccccccctcgagagtacttctagaattaattaaaaatacttttatatacaggaatgttattgaaaaagatatcctcactcattcttcagaaaatgcgatggtctaaaattttaatgcaagttgacatatgttctaaagtaaggaaagtaaaggaagaccactatttattaaagaagatttttttaaaaggacataccataaaggaaaggactggtacagtttaaaacttcttttcatcaaaatgcatcataaagaaaatgaaaagtcaagccattagggaaagatagttttaacacatataactgacaaagggctggtatccataatatatagagaattgctttaaaaaaaataaagacaggccgggcacggtggctcacacctgtaatcccagcactttgggaggccgaggcgggaggatcatgaggtcaggagatcaataccatcctgactaacatg

SEQ ID NO: 46583 - DNA, 491 bp, Homo sapiens
gcaattaaccctcactaaagggaacaaaagctgggtaccgggccccccctcgagagtacttctagaattaattaaggcgggggatgaaggggagcggcattaagctaattcagcacactcaggaataatggtcacatagagaagagaagtggggtaaaggctgggaagtccatacacgtactgtgccacttcagtacctgggacgtttattttattaaaaactttgaactcttttatgacaactgccattcactgtacaaacatcaaatcatagtttaaaaatgtaattctaatgaatatatattatctttgtttatttcacttccattcatgtttcctgttatttggcttaattttaacctatttcatccaagttagctctcatatgcagaagtttgcaggtcagttaatgtcatgatgcctcaggtcttctgacttagcatttaaaattgggctctggataattatgcatattctcagagaatgttccc

SEQ ID NO: 46584 - DNA, 481 bp, Homo sapiens
aaagctgggtaccgggccccccctcgagagtacttctagaattaattaaggcggtctagaaggaacactcatgttcaataccaaaaaagcatctgttatgaccatttatacttgataggggcattaaaataaaggaaatagaaagcattatcacatatgtaataaaatctagctttactgagttaaagctgtgattccaaaggtttcactggttgtcacctaatatttttaaatgaccaaactgataatatagctagaagaagttttaatatcaagaatacacaagattacaaacacatagaaaagaaagtgccaacagcaagataatactaaaaagtgccttaccacaaaccaaaagttaacaaaaaagtaaacagtttgtcttcttataactgaaaagcaacaatctaatattaggtggtttctttatagcattaaaacacagaatatttgtaaattatggtttttatggtaaagagtt

SEQ ID NO: 46585 - DNA, 530 bp, Homo sapiens
  misc_feature 516: n = A,T,C or G
ggccccccctcgagagtacttctagaattaattaaggcggggatggcaactttttaaccctgaagaatttgagagtaagttgtgaccataaacaagaggtagggaatttatttcttcatttttctactttcttatgtgaatattactttttccttaaaaccaaacttaatataacagaaataataattattttaatttttcttaggaaatcgatgaaatagtattttttctgagttttgaaatgaaaaattctgtaactttcaagttgactcttcaatcttctgcactcatcaacttcaaatcttttatttttttgccattttgttttttattcatattttaatttattataggagaatttttcaaaagccatttctaagtctaatatctttgctattttctcttctctctcaaatatgaacttaaattatgttcttaattttttagattattttatttttctgatacatcatttatctgaagttaccataattattgagttatttcctcttcttntaaacattttaatg

SEQ ID NO: 46586 - DNA, 500 bp, Homo sapiens
taaagggaacaaaagctgggtaccgggccccccctcgagagtacttctagaattaattaaggcgggaagcagtaagaagtctgactcatcagcttttgcagagaagagaagtgctgagaatagatctgagggtgtgaggggataaagaataacagctcacccacgtctgtgcagttctttaccctaaagtttaagtgaaatgattcttcatcaagcttcttctcacttgatttaagaaaatccttagagatataacagcatcaatattgcaaaccaataaggaaacaaagcaatagcttagcccttgacatatatttctgataagtaatgtatttcatggtctttcctaaatgtacatgaggtagaagtagatatatccaatgtctatacttaattgatttttgccagaaagtctatcttgaaatgtgagcttctgataaattccttctatttgtgcttttttagaacaagttccatttttatgttgtctttgtcagtga

SEQ ID NO: 46587 - DNA, 431 bp, Homo sapiens
ctggccgtcgttttacaccccggaccacagaaataaccatgattatgggcggtggttttccataaagaaaaaggaaaaaacattaatgctgggtgggaggctggagaacttgataactatatctaaatattagaagtggagtcatgactgggaacctaaaaacagataattgcaaaaccttttaagatgcaattagaaattaacaacctgtttaaggaaatttaatgttaggtcactaaagttacagataaacttgaaaaaattttaaaaaatactaatatgctaaattagatacaggagtataagaatcactgaaaataacaggttttaaaagtcatacagtattgataagaagactccctcttcggctgggcatggtggctcacgcctgtaatcccagcaccttggaaggctgaggcgggtggatcacg

SEQ ID NO: 46588 - DNA, 484 bp, Homo sapiens
gccgtcgttttacactgcggcgactgtttacagccctaaataaagggaacaaatgctgggtaccgggccccccctcgagagtacttctagaattaattaaggcgggtacaggggtggagggagtgggctggttttgtacatgtgacttacaaagacctctacaacatctctagaaactgtcagaagggtcaaaagaatataaacctccataaaaacgacaaaggttttcttagacctgacaaaacctttactccacttagcagttcttagtcaccatgaagacatccaagaatccaaaaagctttatcttcaactgaaggtttactgaaaattatacctttcctagtacagctatgtctctgtactaagaagtttcaaactcctttgccacttgaatctttctgtcaattcctgtccactgtggtgcccataccagtcttaaaacagagtcctgggtgacagatacaaacagaatgtcacgtat

SEQ ID NO: 46589 - DNA, 461 bp, Homo sapiens
taaccctgactaaagggaacaaaagctgggtaccgggccccccctcgagagtacttctagaattaattaacgtggtcggcgacgctaccctcgggagccaatgaaacccgtgaatggcttataaaagtaaataataagctataagaaaaatattcctctaataatgataatgcactaaattatgattccgcctgattattacttacagaatactctcaaaattacttgaaaccttccaaattttggctctatcatctgttcaaacctctgtctgacaatggtactcactttatactctgcctccaacatatacacttgacttcctatccatagggttatccttgttgccccccataaatttgacttgcactttcatctcctctcaagcagtcatcagtatttattgaggcctacattgcagcgacctgtgatgctctaaggatacagaaatgatatcagaa

SEQ ID NO: 46590 - DNA, 475 bp, Homo sapiens
gcgcgcaattaaccctcactaaagggaacaaaagctgggtaccgggccccccctcgagagtacttctagaattaattaacgcggcggtgatgctgcccgggttgagagtcactgcaattatttactgatgagttcagcatcactgcctgtgaatctcaatttaaaattgacctgctgcctcctataagaatgggcataagtgttaatagtgattgcataacacacctcattggaccataaactacactcataacaaaagtataactctggtctatcataaagtaaaaccaacatgctagtacataccattggtattcagaaggatttgtaagaatgatcagaccaagggttctgaattgactaaccatttaacgatagtgctggtatattccaatacaactttaaaatgcctaattatactttattaaagtgataaatcccttgttttttaaccaataggccgaaatcggcaaaa

SEQ ID NO: 46591 - DNA, 503 bp, Homo sapiens
gccaagcgcgcaattaaccctcactaaagggaacaaaagctgggtaccgggccccccctcgagagtacttctagaattaattaaagcaataagtcattaactataatctggacagatttcaaatctacctaaaatattttcaaaatagattcacaaataacacatattagaataaaaattattaaacaataacaaaatcactagttgaggtaactttaaaacacacacgataccactatataatttcctcacagaaatgctgcacccagttggtggccctgtctccatggcagctgaagagcgtaagccagtgatgagcaaaaggggatacactctcaatgttactcctgcctcaaatttgtacccccgcttggtctcttctttttccttttcctccacttttagaagttaggctaccttgtcatgttttatgagtcatcataacccgccagaaattactgaacaaaataagatataattgaacaagcaaaccttatgaatct

SEQ ID NO: 46592 - DNA, 410 bp, Homo sapiens
attacgccaagcgcgcaattaaccctcactaaagggaacaaaagctgggtaccgggccccccctcgagagtacttctagaattaattaagggggaggatgagacaagaacaacaaactcaagacagctatgaggaaataaccattacccgttaagttttccctttaatgaccatgaggacaaagtcatgacaatgcagtcaccacccactttttgaaaaaaaaaaaacaatgccaatgtgggaaccgactgattcccaagcttatctactgtaggatccaagagagagacaatctcagtgttggagaatgcactgagaacatagaggagaaggctacaaagaacactgagtatacaaatgcatacagatagatgtgtatagatatatattcacatagatttcctgtccgc

SEQ ID NO: 46593 - DNA, 496 bp, Homo sapiens
gccaagcgcgcaattaaccctcactaaagggaacaaaagctgggtaccgggccccccctcgagagtacttctagaattaattaaggcgggagaatcacttgaacccaggatgtcaacgctgcagtgagccaagatcctgccactgcacttccagcctaggtgaaagagatcccgtctcaaataaataaataaataaataaataaataaataaataaataaataaaataatagtcaagcactatggccataaaagacagaaatgactaaaaatttgaaataaagactaaatataaaatgtctctgttaactagcttcttagactttgccttaaagtttagttggcaaccaaagagaaaaataaaaccaaaatcctaccagtttcttgaagaacaaaagccaaaatctggcactcttattaatttaacagagaaaatttaattcagccaaactatttcttgaaagtcaaacctttgtcctaaaacttcatcataatta

SEQ ID NO: 46594 - DNA, 444 bp, Homo sapiens
aaagggaacaaaagctgggtaccgggccccccctcgagagtacttctagaattaattaaggcggggtggaggaagtaaataagcatataacagactaacacactgctatatcagagagacaaatcatttgggtcataccacaaatagggtcataccacaaatcagacaaataagctacaaattagcttcacttaacagatacaaattaataaggttaatgtccactcattaaacatttcaatctctcaagtcaagctacccatataaacacttggtatccagaagatgttgatcatagtagctataaaacaggtttagtcagaaaagctattaggatcaaaaattggcagtcacacatcttggcttgggtattcctaacacataaaggacaaatatcacatcaaaaacataaaccgtgagcaacctaccggtgcaacaccatta

SEQ ID NO: 46595 - DNA, 513 bp, Homo sapiens
taaccctcactaaagggaacaaaagctgggtaccgggccccccctcgagagtacttctagaattaattaaggcgggggccaataacttgctaacaaacttgtaactgaacaagctatttttttctgtcaatgtgattgatatgctcattgttaaatttaacttgtttaaatatccattggtatattatcaagggctattactgcaataacctcaaagtatctttaagacaatgctgaatatcatacatagttaataaacaatgattggagcttttcaaaattgctgctctgcatggaaagtaaggtttaatgtgtataaatgtttgtcattgaagtttggaatttattttaatgtactcttttcttccatgctagatatggcttcaaagaaaaatgtattaatatattcatactatgcaaaaatatcattttatttttaccaaaaaaatgtagctttgataaaattttatggtttttaggccccttagagtaaaaaaaatcaaaatgtgaaat

SEQ ID NO: 46596 - DNA, 439 bp, Homo sapiens
cgcgcaattaaccctcactaaagggaacaaaagctgggtaccgggccccccctcgagagtacttctagaattaattaaggcgggagaggagcaaggtgtggctgacaccagctgcagcacaggctgtcagggtggggaggtggctgggcccttgtaatgggcccaggagatgctgctggcactgtgagagggcctggttaggagttaaaccttcatgcatctgagataaatcataagctcttcttggtatgaaaatgtaagaaaattattccatattttgcaggaaagctgcaggaatgtgaaggagttaaattgaatcagggtaagaaacgctcagggcctcatataaagctctgtgttttgtgcatcgcatcttctaaaacaagcttataacataggtcgtgttcacattccgtttagttaaatagcaggtttacca

SEQ ID NO: 46597 - DNA, 440 bp, Homo sapiens
cctactaaagggaacaaaagctgggtaccgggccccccctcgagagtacttctagaattaattaatgaaaattcaaaaggtaaaaacagatataaccagggaaaagaaagacagtttcctttttataacagccccataaagtatctcttgcttttgtcaccaatttctttatgtatccagcagctgtaagcacataagcacatatcctggcttaataaatgcacttgtatgtgtctttgtatgcataggtccactctttattacgcacaataggtagcttggtatacacactgttctgcacctacccactttggagatgaaaaacctggctgatattaatgctgatcttaccccatgaaggcccaaaacataacctcttagtgactaacccaccaaacctgtctaacttcaagcccggttctactctgaggacattcctc

SEQ ID NO: 46598 - DNA, 461 bp, Homo sapiens
  misc_feature 431: n = A,T,C or G
gccaagcgcgcaattaaccctcactaaagggaacaaaagctgggtaccgggccccccctcgagagtacttctagaattaattaaatgatatgaaatattaagcttttgaaggtcaataattgaatctattattattttcgtctatggttttgaactgcatgcactgtgaaacacatatgtaaaagttgctaagccaaagaagtgagttgtattgggaatggaagagagttggtaattaagagtgcagcaggccaggcacagtggctcacatctataatcccagcactttgggaggccaaggatggaggattgcttacttgagcccaggagttcaagaccagcctgagcagcatagctagatcccaccactacaaaaaaataaaaaaattagccaggagaggtggcacatgcctgtagtcccagctactcangagactgaggtgggaggatcacttgagccc

SEQ ID NO: 46599 - DNA, 494 bp, Homo sapiens
cgcgcaattaaccctcactaaagggaacaaaagctgggtaccgggccccccctcgagagtacttctagaattaattaaggcgggggaggagaaggaagggcctaaagggaatagaatgcattaatgtatcaaacttgtctttctgtattaccttataatctgccttggcaagattgggaaactagccctagataacagaagaatagaagatacagtgggggctgggcatggtggctcacgcctgtaatcccagcactttgggaggccgaggagggtggatcacgaggtcaggagatcataccatcctggctaacatggtgaaaccccgtctctactaaaaaaaaaaaaaaaaaaaataaaaaaaagcggccgccaccgcggtggagctccaattcgccctatagtgagtcgtattacgcgcgctcactggccgtcgttttacaacgtcgtgactgggaaaaccctggcgttacccaacttaatcgccttgcagc

SEQ ID NO: 46600 - DNA, 532 bp, Homo sapiens
  misc_feature 420, 490: n = A,T,C or G
gcgcgcaattaaccctcactaaagggaacaaaagctgggtaccgggccccccctcgagagtacttctagaattaattaaggcgggtaaatggcacacaggcattcactatatcagcatctattcttttttgtatgcttgaaagcatctcatagtaaaaaattaagtaggattatttttaaatattcctactcctgaatgattaactggatgtcccttgcactaggcatgctaaaaattaattaccggcatgaatctaaaagtctcacatgccttttacactctctagaatcgaagtaatatttatttatttacttatttattttatttatttatttattttgagacagagtctcgctctgtcgcccaggctagagtgcagtggtatgatctcagctcactgaaaccccgcctcccaggtntgtggtgagccgagattgtgccattgcactccagtctgggcaacaagagcgaaactccgtctcaaaaaanaaaaataaaaataataaaattagcggccgccaccgcggtgga

SEQ ID NO: 46601 - DNA, 312 bp, Homo sapiens
aaaagctgggtaccgggccccccctcgagagtacttctagaattaattaaggcggggtaggaatgaaattttgccaccttattttgtgtagtttaagctaatgttaaaaatgttgcattccctaattacctatcaactgacagtgaagagaaactcaaacacggaatgatggaaggaataaaatgaaacagattaagtctttacctgaataatcacaaactataaccatcataaagacaaaaaaaaaaaaaaaatacatgtatattatagcggccgccaccgcgggggagctccaattcaccctatagtgag

SEQ ID NO: 46602 - DNA, 546 bp, Homo sapiens
gaacaaaagctgggtaccgggccccccctcgagagtttttctagaattaattaaggccgggtctatatcataattgagacttaatggcattcgttaaattccaacacctataaatttacagctggggctagaagagactaatcagtggttccacagatatgtgcctgtcagcgaacatacatttactgagcatctactatgtacgtagtgggttccattctgaacactagaggtataactgaaaagacacgtcacacccttgtgggacttccttatattctaaaacagtggttcctacactttctggactttacagtccagaaagattgttgggagggcaacattttttattttgctaataaagacactgaaaatagcctttattatctcctctcatcatttcataaaagaatattttaatacaagaagggtgaaggatgtaattggaaaataaatgacatttctttgaaatgaatacatcggcttgatgaaatgttaccacacttactaaactttcttgattttgccgtgaaatgggagaagcct

SEQ ID NO: 46603 - DNA, 504 bp, Homo sapiens
cgcaattaaccctcactaaagggaacaaaagctgggtaccgggccccccctcgagagtacttctagaattaattaaggcgggggatgtatatttgcttgtacatacataacatacctctggaatgatagataggaaattagtaataccagccacattttgagtgggtaggggccagagttagaagaaaactttaccctatataccctatatttatactttatgtagtgtaaaccatgtcctgtttaaaaaaaaaaaaagaaattaaaaacaagaatgaatgctcttcattattctggtaaatgcaggctcattttacttttgtgcattttaattgaatgtactgccatttaacttataagaattaatacttagggctgggtgcagtggctcacacctgtaatctcagcactttgggaggctgaggtaggtggatcacttgaggtcaggagtgcaagaccagtctggccaacatggcgaaacccagtctctaccaaaaatataaa

SEQ ID NO: 46604 - DNA, 466 bp, Homo sapiens
caattaaccctcactaaagggaacaaaagctgggtaccgggccccccctcgagagtacttctagaattaattaaggcgggggactctatgggttgataaatgtgaaacgtttgtattctcgtgccaaagaggggaagaaaataaaactttacaaaaataaaaatttgtgaagtataggtattgtaagtgttgcgaaagaagatgaatattatttgggataaagaaaatattgagaagagatagtgtggtagaacttgtagttagaaaataaccaatgacgaaatataaagcaagggaaaaaaatacaagcgaccacaaccaaagtggcggccgccaccgcggtggagctccaattctccctatagcgagttggattacgcgcgctcactggccggctgtttacaacgtggcgactgggaaaaccctggcgttacccaacttaatcgctttgcagcacatccccatt

SEQ ID NO: 46605 - DNA, 477 bp, Homo sapiens
taaccctcactaaagggaacaaaagctgggtaccgggccccccctcgagagtacttctagaattaattaaggcgggggtctcgatctcctgacctcgtgatccccccgcctctgcctcccaaagtgctgagattacaggcttgagccaccgctcccggcccgcaagcaaattctttcagtaaattcttgcattaaacctatggtttgatggacatttgggtttagcggacttcattgacacagtaggtactgtgtgttgggatataaaagactaataaagaggttcctagtcatggagcttgcactggctattttccattgtacaggttacttaatctctgtcaagtgaagctaatagcatctaactccagggttgtgacctctaaagagttttgaaagattgaaaacattgtacctatgtcatatttaacaagccccttttgaagtcctatatttgtttagtagactgaaaatttg

SEQ ID NO: 46606 - DNA, 695 bp, Homo sapiens
caagcgcgcaattaaccctcactaaagggaacaaaagctgggtaccgggccccccctcgagagtacttctaaaattaattaaggcgggtcacttgaggtcaggagttcaagaccagcctggccaaaatggtaaaaccttgtctttactaaaaatacaaaaattagcgaggcgtggtggcgcatgcctataatcccagctactcaggaggctgaggctggagaaacacttgaatctgggaggcggagattgcactgagccaagattgtgccactgcactccagcctggatgacagagtgagactctgtctcaaaaaaaaaagaaagaaaaagaaaaaaagattttagtttgggaatagaaggattaacataccaaattaaaaaaaataaatacaaaatcagagttgggacttttagtcaacctgattaataaatctgcctgaataactactgtgatggtgaattaatcattactttccaaggcagtccattcacgatgacattcaagagatgcaacattaatacaatgcttatataactcatattcaaattttctgaatgtacactttacagctatatgtccaattcctaaatcagaatccaaacaagggcaacctactccatttaactgtcaggtctctttaagtctccttgcaactagaatagtaccccagcttttttttttttttttttttga

SEQ ID NO: 46607 - DNA, 648 bp, Homo sapiens
cgcaattaacccctcactaaagggaacaaaagctgggtaccgggccccccctcgagagtacttctagaattaattaaagtggagtacaaggaagaattcaggggctcaatcaatccacaaccacatttccagtggctactgaaacagcagaagcccagaacatttccatcatcacagcagttccaccattcagcactgctgtaaaactgtaatatgtgtggaatttgtttcaaatggcatatgcaagggggagcaaatttttaattgcattaataaaaagaaatttcacttcacaatcattattatttcaacattctcagtgaagagaatcaatgtggaaaacaaaagtaaccaccacttcaacattctcttgaatctacaaaattttcaaagtaatgtaatggaagaaataaatgttaatactggcacatttcatgagcaattttttctattgtacttagaaatttactatttatttagcatgctgccaatctggattaaaaaacattaaaatgggccgggcacgttggctcacgcctgtaatcccaacactttgggaggccgaggcgggcagataacgagggcaggagatcaagaccatcctggccaacacagtgaaaccccatttctactttaaattcaaaaaaa

SEQ ID NO: 46608 - DNA, 382 bp, Homo sapiens
ctggccgtcgttttacaccccggaacacagagatacccatgatgatggccggtccttttctatagagaacaaaaaaaaaactttaagcgggttttaggggggaagtcaaatttcagaataatttcatgagggttttactattgaaggaaataacttctcataatagttgctgtatttgtgtaagacaataacaatttatataatttaaaagtattttctaattcctagaaccattagcagtgaagtctgtgatttctattgtttcctagtatataattaacagaaaaaaaaaaaaaaaaaaaaaaaaaggcgcccccccccgggggggacccccatttccccttaaaaggggtttttttcccccccctcatgggccgttttt

SEQ ID NO: 46609 - DNA, 466 bp, Homo sapiens
cctcactaaagggaacaaaagctgggtaccgggccccccctcgagagtacttctagaattaattaaaaatcatactgctcaaagaatatagtttgaagctacaggtttttttgtcaaaaattacaatgcaaaagttttagtttatataatgaaaatacacacacgtatactttgttacggagtatcctttaaaaggctaataaaaacagttctataaattcccaagtattcaaatatgacaaggcagtaacaatattttacttagatgtacaaatggctaaaataaacaatcatcattttaattagaaatatcatgatgagactataaatacaatcctattaacttcagtgaagtctttcccataatgcactaaaaagcatgtgtatcccaaaaagaactctgtaaccagaaattaagaacgaaagaaaaattaggtggttgcaactcatatgctagctttattct

SEQ ID NO: 46610 - DNA, 342 bp, Homo sapiens
ccctcactaaagggaacaaaagctgggtaccgggccccccctcgagagtacttctagaattaattaaggcggggaaaagggaaagttgttgagaaaaaaatgaataaccttcactgccaacaagcatttattcacataactaaccattagacagtcatcttttgttgagaacatgtgataaaccttgtgagcataaagaattactactggctctgcattgaggggcttatcgtactgaagagccataatcattttggcatttacaatacccatggctttaatttggctcagtggttacagaaaagagaggaatactaatgtgttaatttgaaacacttaaat

SEQ ID NO: 46611 - DNA, 642 bp, Homo sapiens
gcaagcgcgcaattaaccctcactaaagggaacaaaagctgggtaccgggccccccctcgagagtacttctagaattaattaacctctgtccactatcctcactccccactccttcactgctaccaccaacaaatatcatgcttacacacataccttgaggggaggaggaagggaagacaaatcagaatttgctgtacatgcagtactctagaagccaatgtggagttgacctaaggggatccttataaaaacttagcagacaagaattatatgcacttcattggaattccactaattccagatttcagatcagctgggagggttgtctagactgaagctttacattgttatctttaaagataatgtaaattaaaaggatggaggggaaataggtaaagtgtataagtaaacaaatgatacaaagcactgtaattccccaaagcagtttctttggcaatgcacagtggtttctacttaatactgcatattttatagttttcactaactttaatcaacataaccatttagccaaaattatggtgactttcatcaaatgaacctcatgatgaaagggttgggaggggatgtggggttgcatgtaataaaatctccatatattttgcataaacaaacacacaaca

SEQ ID NO: 46612 - DNA, 462 bp, Homo sapiens
ccctcactaaagggaacaaaagctgggtaccgggccccccctcgagagtacttctagaattaattaaggcgggggatgcagtgaggaacttaggcagcagttgataagtttgtgcagaagaatgttctctgagttatgaagtgactgcattaggtcttctctgtgcttctgaaagtaggactttgtttcagcctgtcattaatttcaaccactgtttcttttgtccattgtgaaaacaattagaatgtgtatcttctggtattcttttctgctgaagaaaatatagaattttagctttcgaaaacccaaaagccaaagtttgactctcttctgctgtgacctgctttcagacacaccatcagcatccttcttcgtaaaaggaatgatttaagggagctatgactcaggcatgtttgtttatagttgacccttgaacaatgtgggggtcggggcactggtccc

SEQ ID NO: 46613 - DNA, 387 bp, Homo sapiens
caaaagctgggtaccgggccccccctcgagagtacttctagaattaattaaaattaaataaattcccaaagtgcaaaaattgaagtggtaaatgagaaccagagctgtaaggggaagcatacttcaactgccctgaggacatttttagaccttggtggggctttcgtttaaaatggcctaacagagatggatgataggttgtttaatgcatacagtttaggatttcttagccccctgtataaagccaggatcctgcaaggatcataacctcagtgaaagcatagatgagaaaataaaacctctccactgacaaaaggagaaaataaggaagcttgtgtttcttggcttgggttcctgggaacaggggagggatgtgtgtgcatgtgt

SEQ ID NO: 46614 - DNA, 510 bp, Homo sapiens
agcgcgcaattttccctcactaaagggaacaaaagctgggtaccgggccccccctcgagagtacttctagaattaattaaggcgggggagggatggggagtggcgtggcatcataggttgcatggagccgagattgtaccacttgactccagcctgggggaaagtgctaagaataaaatatatagaaagtggatctttcctctacgtgatcttttaagaactaatattcttacaatgagaaaatatataactaaagctcacagattccttcggtttttccatcacgttcactctttttctattaatttgtataaaattgctggttcacaaaacacaattacatggcaatgctattttcaagaattgtttctatctaggtatcagactgtctatctgctgacatgcacgaatgtctggaataatgccacttaatattaagcaatgattctttttttctgatggtgagatgaagtgatatcttgtctttactgcttcaatggtttatcattt

SEQ ID NO: 46615 - DNA, 415 bp, Homo sapiens
gcgcgcaattatccctcactaaagggaacaaaagctgggtaccgggccccccctcgagagtacttctagaattaattaaggcggggttctatcttttgttgtgacatgccagtctgacttccttctgccttttcccaacccgttcttatttctttcctctcaaggctgagttctctgtgaactaattaggtgacagaaaaaactcattaacgtggatctgagtaaatggcctgaatcaccgctgtggctggggactaggagatggcatttgtgcgagccctgggccccaaagacaggagatgaccaatttttcctcttagatctgaaaagggtggaggcgggagagacatcgttgctgcagcttcactgtccttggaggaaagaaagacattcctgatttgctccaagcttacct

SEQ ID NO: 46616 - DNA, 471 bp, Homo sapiens
tcactaaagggaacaaaagctgggtaccgggccccccctcgagagtacttctagaattaattaagggggatgtctcactgagagctgaactaaattagagtaaggtaccaaggtaccaaattacaagatacgtgctttcaaaaagctgcggattggtattttataaatgagctcctaagaaatataattatataaaaaaaaaaaagcggccgccaccgcggtggagctccaattcgccctatagtgagtcgtattacgcgcgctcactggccgtcgttttacaacgtcgtgactgggaaaaccctggcgttacccaacttaatcgccttgcagcacatccccctttcgccagctggcgtaatagcgaaaaggcccgaaccgatcgcccttcccacaattgcgcaggctgaatggcgaatggaaattgtaagcgttaatattttgataaaattcgcgttaaatttttgttaa

SEQ ID NO: 46617 - DNA, 464 bp, Homo sapiens
ggcaaacaagacaacataccccatacaatgcgtgactgaggctatccgaaattgaaatcccactattcgcagttcagattttattcatgtaaaacacgaggtgcatagagaatatgcatttttcgaaagcccatgaaaaagtttaaaacataacccaaaaccaagccacaaatcgaagctcaaaacgttttcacaaaatgaatacctgcttaggccacgttctttgatctgaactttataaacgacatattaaaccaacaaacaacaacatctgcctactggaaacgttggaatcattctctgtaatgagtcatgagtccaagaggaaatcaagcaaaaatcacgtcctacgtaaaggctgacagcaacaagtgtagtgacacagcgtccatgggcctggccaaaggtgccccgtgagaggaatgaattattaaatggtttattattcctagttttattcaaat

SEQ ID NO: 46618 - DNA, 465 bp, Homo sapiens
aagggaacaaaagctgggtaccgggccccccctcgagagtacttctagaattaattaaggcggggtagtagggaagtattcatatttggtctggaaaagaaagaaaggaccaggttgttaaatttttttcagtgtcatgctgtgaaatttgaaagtctctaggtaataagaactatagcatgagattttagcaagtgtgaaatgtgatcagattttaattcttgttttatttatctattttgagaaattaagaaaaatatagaatacaaaaaggagtaataacagctgtatgcccgtcacccataaattgacagttgttaacattttattaaatttgctgctgctgcttgaattaataaagcaaataaacaattacgcacactcaatgaccaaaaattgcggccgccaccgcggtggagctccaattcgccctatagtgagtcgtattacgcgcgctcactggcc

SEQ ID NO: 46619 - DNA, 484 bp, Homo sapiens
attaaccgtcactaaagggaacaaaagctgggtaccgggccccccctcgagagtacttctagaattaattaaggcggggtagtagggaagtattcatatttggtctggaaaagaaagaaaggaccaggttgttaaatttttttcagtgtcatgctgtgaaatttgaaagtctctaggtaataagaactatagcatgagattttagcaagtgtgaaatgtgatcagattttaattcttgttttatttatctattttgagaaattaagaaaaatatagaatacaaaaaggagtaataacagctgtatgcccgtcacccataaattgacagttgttaacattttattaaaattcgctgctgctgcttgaattaataaagcccgtggtcgctagtaaaaaaaaagtgtcaaaaaaaggcggccgccaccgcggtggagctccaattcgccctatagtgagtcgtattacgcgcgctcactggccgtcg

SEQ ID NO: 46620 - DNA, 473 bp, Homo sapiens
cgcgcattaccctactaaaggaacaaaagctgggtaccgggccccccctcgagagtacttctagaattaattaagcggccgtcaccgtggaggagctccaattctccctattgtgtgacttataacgcgcgctaactgtgcctctgtttacaacgatatgactggtaaaacactgacttacggaacttaatcgtgttggagcacatccccctttcgccagctggcgtaatagcgaaaaggcccgtaccgatcgcccttaccaacagttgctcagcctgaatggcgaatggaaattgtaagcgttaatattttgttaaaattcgcgttaaatttttgttaaatcagctcattttttaaccaatatgccgaaatcggcaaaatcccttataaatcaaaagaatagaccgagataggggtgagtgttgttccagtttggaacaagagtccactattaaatgaatgtggacttcaac

SEQ ID NO: 46621 - DNA, 472 bp, Homo sapiens
caattaaccctcactaaagggaacaaaagctgggtaccgggccccccctcgagagtacttctagaattaattaaggcggggggaaaaaaagatacaatttgatgtaacaatgaaacaaatgtaaaaggaatgaaaagacaagagaaattaagactatacttccagggatcatttctagtttgttcccagaagtttctcttaacgtatagactactacatttttacacaaaacaaacaaacaacaacaacaaaaaaaacagaaaatcatcactttacaatacctgtagaaatttactcatccagccaagaattatgtattggttttaaaaccatccactaaatgactgatggagaatgaaccaaagtaaacataacattttggtcaaagggaagtaacaatcaccagccatctggtatatctctcctaatggtatgcaatttgaagtatgtaagatcacctctgatgtattct

SEQ ID NO: 46622 - DNA, 502 bp, Homo sapiens
  misc_feature 353: n = A,T,C or G
gcgcgcaattaaccctcactaaagggaacaaaagctgggtaccgggccccccctcgagagtacttctagaattaattaaggcggggggatctttttttcaggtgtgagagagttaatctacattccaagcacaactgagcaattaaaacatgtaatgagcagaacactttagtgcttcacctatagagaagtctgaattgggcttctttctatctcccccatacaggccacaagaagctaaagaggtaatccactcctgaaaaagcccagaagaataactataatacttttcaaaccttagctgtgtcaagtgcttgctttgcttccatttctgctttcagaaactcaaaacnaaaaaaaactacaaaacaaaaaagcggccgccaccgcggtggagctccaattcgccctatagtgagtcgtattacgcgcgctcactggccgtcgttttacaacgtcgtgactgggaaaaccctggcgttacccaacttaatcgccttgc

SEQ ID NO: 46623 - DNA, 446 bp, Homo sapiens
gcgcgcaatattccctcactaaagggaacaaaagctgggtaccgggccccccctcgagagtacttctagaattaattaaggcggggccaggcctcccttaagctctgtgcatggttggctttggggagcctgttggttcctgctcccccttgtcaacatcttatctcttaacatttgagcaggtaggtgtaatagctgtagcttcattcatgggaagctcctgtgggagccagaggttgtgcttcactttaagaaattagaaaaaaaaaatgtagattaaacccaaagtcagtagaaaaggaaataataaagatcagagtggaaaacaatgaaataggaaacagaaacccaacatagacaaagcaaccaaaagcttatttttggagaacagttaatgaaattcatcagcttccagccagattgatcagagagaagacacaaattaa

SEQ ID NO: 46624 - DNA, 560 bp, Homo sapiens
  misc_feature 494: n = A,T,C or G
agcgcgcaattaaccctcactaaagggaacaaaacctgggtacccggcccccccctcgagagtacttctagaattaattaaggcggggccaggattcagtttccagaatttgtattgttagccactacaatgcctttcccagtttcctgtcctagatctgacagtgccattgctgttgaaaaaaagaaaaaggtaaagttacacagcagatgaacagttatcttcatcacaacttcttcacgatgaagacaacatcatgactaggcaggtatgaagctgctcatggagagccaggcgtggtggctcatgcctgtaatcccagcactttgggaggccaaggcgggcagatcacaaggtcaggagatcgagaccatcctggccaacacggtgaaaccccatctctactaaaaatacaaaaattagccgggcatggtggcacatgcctgtaatcccagctactggggaggctgaggcaggagaattgcttgaaccanggaggtggaggttgcagtgagccaagatcgtgccactgcactccagcctgggtgacagagtgagac

SEQ ID NO: 46625 - DNA, 552 bp, Homo sapiens
gcgcaattaaccctcactaaagggaacaaaagctgggtaccgggccccccctcgagagtacttctagaattaattaaatttacttgttggttgggattcctgaatttgtttgtatttctttgtatgttaattttaattcatcagattgtaaactcacaaatatggaaggacaagttagttccgcagagaaaaaaaaacccaggtctcagcactatgcaactcaggtctctttagctgtgtaataggaggtaatcatggcatttaaaaacattgactatggagttctctgagtaaatgagaatattagctccaccacctttatccgtatgacttttggctaattacttaacatggatgagtcagtttcttcctttctaagatgggaataatagtatttttactttatgggatgtgtaagcacaaaatgagataattgttttaaaatacttaccgtagtgcttaacaggtaagaattgccccataagtttagtagtttattattgtgattggcattttagtatatctcttacaagatcaataacactaatattt

SEQ ID NO: 46626 - DNA, 580 bp, Homo sapiens
actggccgtcgttttacaccccggaaaaagcgataaccatgatgggtgccgcgcccttcctcgagagtacttgtaaaattaattaagggggaaaacgtttttagaaagaaaaatgttactaacctctttctttttagagtacagaatatataaatgcataatctcctaggtaatacattataagaacatccattcttttcttttttaaaaaagggtttacttggctgggaacggtggctcacgcctgtaatcccagcattctgggaggccaagaggggcaggtgaccggagatcaggagtctgagaccatcctggcaaacgcagtgaagtcctgtctctactaaaaatacaaaattagctgggtgtggtggcacataaccataatctcagctacttaagaggctgaggtggcaggatcacttgagcccaggagttcatgcagtgagctacaattgcaacactgctcttccagcctgggtgacagagtgagaccctgtctcatttaaaaaaaaaaaaaaaggggcggccgcccccgcgggggacctccaattccccctatagggagtcgtattaccccccc

SEQ ID NO: 46627 - DNA, 492 bp, Homo sapiens
caagcgcgcaattaaccctcactaaagggaacaaaagctgggtaccgggccccccctcgagagtacttctagaattaattaaggcgggggttacagtgagctgagatcacgccattgcaatccagcctgggtgacaagagtgaaactccgtttcaaaaaacaaaaaaagaaatgaaaaaagagtctgccattccatgttaaagtggaagataaacataccatagggaaaaacaattctactcctacatgtattacctgaaattaacccaaaacatgcatattaagagaaacactggttaacaatagccaaaatgctcacttatagcagagtgaataaactctggtttagtcacaaaataaaatatcccacatcaactaataaacataaaaatgaaccacagctttataatgttttattaaggaagcctgatgtatacaaaattatatctcctggatgcatccatgaatataaagctcaaaaaagaaaaaaaa

SEQ ID NO: 46628 - DNA, 427 bp, Homo sapiens
ctaaagggaacaaaagctgggtaccgggccccccctcgagagtacttctagaattaattaaggcggggaagtgataagtggtaaaatgagacatttcctaggggtagaggtacaaagctaaaaaagaaggaaacccagactgaattttacgtttcttatttccaactcctctcgatgtctacctggaaacctttccaatctttaagcattcaactgcagtgaaatatcctctggggaccttctgggacatcccaagacagagttcatcacccttttttaatagtgtcctgtacttttcttatctttctattgttgcttttaaaacatattttcttgcaattaccttcacatgcactgtgaacaccggcaatttaatgtgtttttgtgcatgtgtatgcatgcacgctgaataagttccttgcatgct

SEQ ID NO: 46629 - DNA, 417 bp, Homo sapiens
tcactaaagggaacaaaagctgggtaccgggccccccctcgagagtacttctagaattaattaaggcggggggaaattttaccagtatgtgtattgtctgctagccattcttactatgtgtttttcatgtaacatctaaatcactaaatgcctgaatctctcaaagcccaactgactgtgttcctgattcgctagtccacatgtccaatttttattcaatctgcatatgctctgtttttctattccgtcaaatcaaatcacttccccttattattgctgagccttggctgccaaacttaacatcagcattctctatggctcacttttaacatacagaatgcacaacaaacactttgtattgagatgcctgattacaaaatcaaaatggttttctttatctatctatcttcgatactc

SEQ ID NO: 46630 - DNA, 295 bp, Homo sapiens
gcgcgcaattaatccctactaacgggaacaaaagctgggtaccgggccccccctcgagagtacttctagaattaattaaggcggggtcgggagtaaccctagtgtcttaagaaaacaactctcttaccttgtttccatctgctctggcaccacctcgcacccccgaccccgcctcccatgtatttggttaacgtcttaagatctttttttgactagtagagaagagatcgtattaggttaaacttaatacaatttcagttcagaaatgtgattaagttacttggaaaaaaacaaa

SEQ ID NO: 46631 - DNA, 480 bp, Homo sapiens
gcgcaattaaccctcactaaagggaacaaaagctgggtaccgggccccccctcgagagtacttctagaattaattaaagcggggcttgcagtgagcaaagatcacgccactgctctccagcctgggcaatagagcaagactccgtctcaaaaaaaaaagaaaaaagaaaatggacttaagactggaggaaaatttgaaattgcccctgggcaggaactctgcagcgaagatgaaacagcacattttatgtggtgctgggtatcagcaggcactaggaattcgatcaaaaagtataaaagggaaaataattatttttcaaaattaggcttaaataacatagaaaatccatctgaaacaactaagttacctggcacacaaagaaaacttacaggtgatgtgccatgtggccactgtatgaccgtggctaaaaacatctattccagggctgggcacagcagctcatacctataatcccagcac

SEQ ID NO: 46632 - DNA, 507 bp, Homo sapiens
accctactaaagggaacaaaagctgggtaccgggccccccctcgagagtacttctagaattaattaaatgatgtatttttatgctagccatattaagaacatagttctattaagttattaatggagtgactatacatactggtttaccttgttgtcacacctaagtactagtgcctcttttactctcataagtgtcctggattgaatgataaattaatcatcctggttattaaaattgctaaagcatttaaaattaaagtaaagcatattctatcaacctaatctgcaatcaggaaaaaaaatatattttgaggtcaaaataagagtgaatttcaacaggtagggaaagggaaatacagagtagagagaatgttgttaaaggaagtagatctgtcagatgaatgccacaatgcttttctatggtagatagcatgttgttatcttttgtaaagaagaaacaatgatggtagcagtcagcattttaattgagactttattttatatctt

SEQ ID NO: 46633 - DNA, 496 bp, Homo sapiens
cgcgcattgtaccctcactaaaggtagcaaaagttcgggaccgggccccccctcgagagtacttctagaattttttaagcccaggagttcgagatcagcctgtgttatatagcaagaccctgtctctattaaaaaactaaacaaaacaaaacagaacgataatttgatctacctgtcttcagccattttttttccctgagctctattcactatttcttgaatttacacaactttcccatactattccctctgcctagaatatttttccttcctattgctctcctttgatatcctatccatccttcaagacctgggctaacatactaactcatactaactcccgcaaacatttactgagactcgatgagctgaaaattggataggattttgttactatctttgtttttttattttttatattttcattgacattagcattattatgtgattgtcttataccccctaccatattatcatataaggtccttaaaaatgg

SEQ ID NO: 46634 - DNA, 281 bp, Homo sapiens
cgcaattaaccctcactaaagggaacaaaagctgggtaccgggccccccctcgagagtacttctagaattaattaaggcgggataacattaaaataagtatatacaacataaggtttattcaaaactattcaaaccaatcagaatctaatgtttttcattaatcaatggcatttcaatgagtaaagaaagttgggcgccaatttgaataaactccctgtggccaaagatagattattttcaacatcaataaatataatattgcaatgtattgaaacatgtg

SEQ ID NO: 46635 - DNA, 449 bp, Homo sapiens
  misc_feature 413, 415: n = A,T,C or G
tgtaaccctcactaaagggaacaaaagctgggtaccgggccccccctcgagagtacttctagaattaattaagataatctatctagtaagtaagtgaaccaacgctcaaagaggtttaagaacttgcttacttaggataatctatgtagtaagtggctgaagtgggagttgaatcttctctgactaaacttggcttttctgtttgctaagcctggcttttaacccctctgctggatttctgaggtatggcaaatcacttaactataagtaggttgtaggttttatatctatctactcatctgtccatcggtcttatactttctaatttagatatttcattatgttttcattccattaataaaatgcatttccttaaaatatctgtctcttaagaattataaaatacacagcananaaaaaaaaaaaaaaaaaaaagaggggggcccccc

SEQ ID NO: 46636 - DNA, 342 bp, Homo sapiens
gaacaaaagctgggtaccgggccctccctcgagagtacttctagaattaattaaagtgagatgaggataaataaaaataatattgactgtcactcatctgaaaataaatttacttcttggtaattaaatagaccttctcaatgcctcagcctttttcttcatattccatctacttgttttcatgtaactttgtctttcaattcgtttttgtttttttttcctgtcaggagaatttgacatagaaaaattttaaatttaagccttaaaataatgtctgggccaaagtttgtggttacttttgctgcaaattgtttacttaaagaattaggtgaattttttttt

SEQ ID NO: 46637 - DNA, 483 bp, Homo sapiens
cgcgcaattaaccctcactaaagggaacaaaagctgggtaccgggccccccctcgagagtacttctagaattaattaaggcgggagaattgcttgagcccgggagatggaggttgcggtgagccgagatcacaccactgccctccagcctgggctacagagtgagacttcgtctcaaacaaaacaaaacaaaacaaaacaaaacaaaaaagtattagtgcatgcagtaaatgatctttgttagatatttacataacaatctgcaaagtccagggaaatgagtgttggatgatatttactgaagggtttttactgcctttgtagcaaagaaggcacatgaatgtactctctaagaaagagaaagaacatagttgtatagggcatacaaaaaaaagtaatgttaaattagaaaacagcgcatgcaaaggcatgaaggaattcaagagtgagggacacttggaaaaatcacatgcagatcagtatg

SEQ ID NO: 46638 - DNA, 564 bp, Homo sapiens
ctatagggagtcgcgcgcaattaaccctcactgaagggaacaaaagctgggtaccgggccccccctcgagagtacttctagaattaattaaggcgggaacccaggaggcggagcttgcagtgagccgagatcgcgccactgcactccagcctgggcgacagagcaagactccgtcgcaaaaaaaaaaaaaagatgatgttcaaatgtattatatggaggaataggaaatcataaacctatttaaatgtcatttgttttatatccctttatttttgccaggggtatgtcctttttctgttgttcaaagttatattactggccagaatggaaattataggaactagctatgtatgaaattgcatgttttccatccattgtggccaggtttggtattcccttaagatggcaacaaagtaagaggcatttcttctagcacttattcgtgaaacccagtgacctccaatttcccattttaaaagtcatcttttatcctcgggaactttaacctactggcataagaacgggggcttaagttcttttttatcactttttggagttaaaaaa

SEQ ID NO: 46639 - DNA, 405 bp, Homo sapiens
  misc_feature 365, 366, 367, 368, 369: n = A,T,C or G
ctgtaaccctcactaaagggaacaaaagctgggtaccgggccccccctcgagagtacttctagaattaattaagtcagaaaatttggaagttataaaacaaaagacaaacatatttgactaggaagtttgtatggcaaaatacaccattaaaaaagccagtatacaaacaacagatttggggaaaatatttgcaatgtagatgaaaagagccaacatacatgtaaagggctcttacaaattgataagccaggctaatcacaaaatggacaaataatagaaatagaagaggaaatccaaagagccaaccaatttttaaaataagttaattagtagttagggaaattattttaacaatgcaacagcnnnnnttaaaaaaaaaaaaaataaataaaaaattataataa

SEQ ID NO: 46640 - DNA, 281 bp, Homo sapiens
aagggaacaaaagctgggtaccgggccccccctcgagagtacttctagaattaattaaggcggggaagttcagtttcagtggttacataaggtatgtcatttgaatactggttgtaatgtgtttccggtgttcacttgtatttataacctgaatacccagtaccccccccccaaaaaaaaaaaaaaaaaaaaaaaaaaaagggccccccccccggggggaaacccaaattcccccaaaaaaaaatttttaaacccccccctatgggcccttttttaaaaaa

SEQ ID NO: 46641 - DNA, 459 bp, Homo sapiens
accctactaaagggaacaaaagctgggtaccgggccccccctcgagagtacttctagaattaattaagggggttttataaagacaaattgttgttacaatatttgtaatgtaatctagttataatattgtaaataatgtgtatttacatcaataacttgccattctcctttaaatcgtacactatattttcaaactgatgaaataattcagttattattcctgaaaaataagattattaggtgcaaacactttctctggaaaaatcaattttatagtgtttgctgtcattctaaaggtatctgtaaaagagataccagtatgactgattgctctagcttggcaagaatatttgtttataatctcaaagatcaactgtgagaggcaatcaatcctttgtttggagttttctgtctttaggatatgaaagtatccaactagttgatattacaaatgtttct

SEQ ID NO: 46642 - DNA, 644 bp, Homo sapiens
agactggccgtcgttttacaccccggaataaggggaacacatgctgggtagccgggccccccctcgagagtacttctagaattaattaaggcggggtaagtactaccattcccattttgcagatgacagagctgaagagtaactcctgctatactgtctgtcaattaccagctccatgccaatgtagagatgcaattttgtgctaacagtgacttgacactgtttcttcctgtccatctatttgccacgctgtggttcctgaaagtcattttatttgctggcttctgaagtaacatttgtagagaatgtttgggataacttctatttctgggggagaaagttgtgacatttttcatgtactgagggggaggagaaggccccggagtcagagctttctccctgacgtggttgttgtcagtcattccctgacctccctcatttcctttcacatgttcccatcttggttttcctatctgttatatgaggttattatgaaacttccctacctgccacatctgggtgttgggcatctgaaataagataatgtgcatgagactactctgaaaaggaaaattaattttaacaatagaatgattttaagattgttgagattattttctcttatcccattcccctaacacaca

SEQ ID NO: 46643 - DNA, 498 bp, Homo sapiens
gggaacaaaagctgggtaccgggccccccctcgagagtacttctagaattaattaaagcgggtagcaatctaacccatataacgcctaaattgtgatctgcaaacatttcccactaaaagtaaccaaagctgcttcttcaagaaattagttaatccaagtctgtggcataagatgtacaaaacagggctagattaacaaaaaaaaacaaaactattagggcctcatgaaaatgacaagatgacagggctccaaccacctcaagtgcaggggttcacacctagaatgccagcattttgggaggctgattacaggttcacacctgtaatcccttccttttgggaggctgaggactgcttgaagccaggagtttgaaaccaccctgggcaacaaagagagactctgtctcctaaaaaaaaagaaaaaaaaaaaaaaattccgccccccccccgggggggaccccccatcccccttaggagggaagaccttccccccccccc

SEQ ID NO: 46644 - DNA, 468 bp, Homo sapiens
gggaacaaaagctgggtaccgggccccccctcgagagtacttctagaattaattaaggcgggaaaggcagaatcactagtttaatattctgaaaagccaaagttatgccattttgcttgagagtgagtgcaagctcttgactcccaggaacagtgcagctaacaattcacctcaggcgagggcagaagcaatagccagcttcttggttctgcctgtggctcagttcctacataattgagtaccaaataatatgtaaacctctagggaagcaaaaaagagtaattcagcttctacccccgaagttattggaggtataatggagagactgagacgtaatcaattacaatgtcatcctcaataataattaacatgtactgtatttagagtttattatggggacaattacaatatattaataatatactgtaacaataacaggcaacacttattgagcacttaaaaaaaaaa

SEQ ID NO: 46645 - DNA, 498 bp, Homo sapiens
gcgcgcaattaaccctcactaaagggaacaaaagctgggtaccgggccccccctcgagagtacttctagaattaattaaggggggaaaaagaaaggaaaatacttgagttgttaacatatgattttttaaaaattaatgatgctcagttataaaaaatccagtggaaaatatcattaatgtattctgaaacagtttgaaaaagccactccgtgaatcaacctacttttggttttagaatttatttacttatttagaaagaaagaaaacagaaagacaggcaccattctctgtatgttattttcctgaaaggtgttaaggcaaaatgaaaaaaaactctcctctataattatgtaatatatcctaatctcttattatgctttatgattttataattctgtgtaaaatctgtcatagttttaagtcccatcacctaatgcatgcattcttgtctagtctttttatgaaaggattcattcttgtgaatcaacaaggcatag

SEQ ID NO: 46646 - DNA, 499 bp, Homo sapiens
agcgcgcattaaccctcactaaagggaacaaaagctgggtaccgggccccccctcgagagtacttctagaattaattaaggcgggatgaaggtaaaaattttcttgaaattacattattatcaccactcactgcaaatataactaatcagttcttttaggataacagggcagggtacagtacctaagtccatgaagataaagcaaaaatatctagcagagcatactctcaaaaaagaccaaataaaaagctatagacagaagttacatgcataacattgtgttcaatgagtttcgtgagtgcttctttagtgaataaatctctccccacccaacccctctcccaatacttttttctgaaatttttttcctctgttggtttgataatgtagaaatcactaattctcctaaatataatatttgatttttttttctttttaaaaaattttgctggccagacgtggtggctcacacctgtaatcccagcactttgggaggctg

SEQ ID NO: 46647 - DNA, 326 bp, Homo sapiens
tgtaatgccagctactacggaggctgacgcacgagaatcgcttgaacctgggaggcgaaggttgcaatgagccgagattgtgccattgcactccgacctgggcaacaagtgcaagactctgtctcaaaaaaaaaaaaatggcacacgctggcttgctttaggaggagcatgctggctgctatgatgagaacagtacaggagggccaggtcataccctcggagaccagtttggaggtgatggcactgactcaggtgagagatgatgatggtttaaaccagggcaatatcaatggctaacaaatggtcagatcctgaatattttttga

SEQ ID NO: 46648 - DNA, 512 bp, Homo sapiens
ccctcactaaagggaacaaaagctggataccgggccccccctcgagagtacttctagaattaattaaaaatatgtcttaagtacctataggcttctttcttagaagggcctgaaatctaactgggagagcagaagtgacaaaatcgccaatttataattaaatatcaatcatcttatcatcacttattaggcttaaaaatatgtcttttagtggaatagtataaatacatacataaaaatatggctcatagtagaaagttgataaggagagagaggctaaatcaagtcgagcctccgcagtcccttcagaagccagattggagatgcagttccccagctccctcacttcactcttccaagagtatcctatccaaaactattcactgctgatagcaccatcattgtagatgcactgtggctggcctactcatttttaaaaacaaattaacagcaaacatgtaaatactggaaaattttcacataaaaattcagatgtggaatactggccctag

SEQ ID NO: 46649 - DNA, 495 bp, Homo sapiens
caattaaccctcactaaagggaacaaaagctgggtaccgggccccccctcgagagtacttctagaattaattaaggcggggtagggatgtgatatcttccattcataagaacccagctaactagaagggaactatctcaatctaataaaaggcattgatctagacatctacataaaaccagtagaggccaggtgaggtggctcactcctgtaatcctagcaccttgggaggctaagacttgagcccaggaggtggggaccagcctgggcaatatggcaaaaccctgtctctactaaaaataaaaaaaattagccgggcatggcggcagatgcctgtaatcccagctatttgggaagctgaagcaggagaatcgcttgaacccggggaattggaggttgcagtgagccgagatcgcgcctttgtgctccagcctgggccacaagagcaaaactgtatataacaaaacaaaacagaacaaaacaattcaacttaaat

SEQ ID NO: 46650 - DNA, 438 bp, Homo sapiens
  misc_feature 254, 279: n = A,T,C or G
gcgcgcaattaaccctcactaaagggaacaaaagctgggtaccgggccccccctcgagagtacttctagaattaattaaggcggggatgggaattagaacttactagaataaaattccaaatagaggtttggggaaacctacttgtgagtgctttttaacctcaaaataaggatttggggtgggtggagaaggtgatggggcagaagaagttgtttttggaggagagaaagcagattgaaaggaaaaggacagntgatagccacttaaataatgtaatngttagagtgatacctattttttgtaaaaagaaaacaatatgctccattcttacaaagcattgattgtattttaatatatacaatgtaaatactatcatgcactggtgtccatgggagagaatgcagtcatgagtgcttagttactgtgattgagtgggc

SEQ ID NO: 46651 - DNA, 483 bp, Homo sapiens
aagggaacaaaagctgggtaccgggccccccctcgagagtacttctagaattaattaaggcggggggaaccaatactgaacagcatttttatttttacagaaaaaggaccaattctttccctaagataaagcccttagagtactaatgaaacttttagaagctcaagtctccaagtctgttgctgcctttccacacacaagcacgttacactttaccaattaaaactttactgcaattccactttttagaggaccagtggtcaatgaatattcatgaaatattggtcattatttataagaaaataaagccatgaaatatactaatttgccctggagttccaaactaaatgtgtacatgtccttatgcaataattttctggattacaaagatgatgaaatatgttggactactccagtttgggaggtgcttgaaacactgtcaatcggtgagtaagacagactttgctgctcttatactcaatg

SEQ ID NO: 46652 - DNA, 505 bp, Homo sapiens
gccaagcgcgcaattaaccctcactaaagggaacaaaagctgggtaccgggccccccctcgagagtacttctagaattaattaaggcgggtggttcacagggtcaggagatggagaccatcctggctaacatggtgaaaccccgtctctactaaaaatacaaaaaattagctgagcgtggtggcgggcacctgtagtcccagctacttgggaggctgaggcaggagaatggcctgaacactggaggcggagcttgcagtgagctgagatcacaccactgcactctagcctgggcgacagagcgaaactgtctcaaaaaaaaaagagaattaaaaattaaaaaaaagaaaaagaaatgtcagttgagacatttctaagtttatgtgaaactgaggggaaacccattcttcacatgcattggtatatccgaagtattcctgtaatgtaaacaacagctacaataatgtcatgtacaatacatttggccaaatacctgactgtacact

SEQ ID NO: 46653 - DNA, 332 bp, Homo sapiens
aacaaaagctgggtaccgggccccccctcgagagtacttctagaattaattaaggcgggtggcttagggaggcgtcgcaactggggctgccagtcccatcctggctcagcttggccagcactgggctgctctcctttctgatacagataaaagctttatttgattccagtgtcctcgtctccctcccccaccacgtgcaatcaccttaacagctactttctgagcatttaccatgtgctgaatgttccctcctaggacgggtaattagcgcagggattttttttttaaatatcagctgattagacctattggtttccatggctgttcaaaca

SEQ ID NO: 46654 - DNA, 342 bp, Homo sapiens
agggacaaaagctgggtaccgggccccccctcgagagtacttctagaattaattaaggcgggtgcttacaaagcgcaagttctagaactgtagaataggaatggatgaccaaccaaagtcttccaagccatgggagtagaatctattcaagtcaagaatttcagaagaaaatactaacagacgtcaagatgaaatacgtatgtatatagtagttgactccctccattactataaaatatattggtggggggtcgggggattgggtatgttgagagaagatttgaggtattggaaaaatatccaggtagagatgctcagaaatagaatgaagttctaagtcag

SEQ ID NO: 46655 - DNA, 293 bp, Homo sapiens
cctcactaaagggaacaaaagctgggtaccgggccccccctcgagagtacttctagaattaattaaggcggggaagagaagtgggtaagcagcgtctcctgttttaacgcacttctccagaacacgtgcagggcaagcacatgtttgtgacaatctttttgcgattctatgaggaaggttcagacccagactatgaggaacacggctttcaggacaaggtttccaagagagactgagtgtcgtgtcagtaaagagctggttaaattagggctggaccaggtggtgggggcgct

SEQ ID NO: 46656 - DNA, 492 bp, Homo sapiens
acgccaagcgcgcaattaaccctcactaaagggaacaaaagctgggtaccgggccccccctcgagagtacttctagaattaattaaggcggggggtgatggtaaggagatggtagccagagtgggagacacaggttagctgatggatagtcttgcatgctatgctactgagccttcactcagtaaggaaggctttgggggaactgcagtaggattctaagcaagagaatgctttgataaaattttgtgatttagaaaggtcaatagatggcagtgtagaaaatgaattggaagggcttgtgtataggcagaggactgattaagaagccatagtgtaattaagatctgggcaagacatggacatgcacacttgagggtgaaggctgggaggagggagaggatcaaaaaactacttatcaggtactgtgcttattacctggatgatgaaataatctgtataaccaaccctcatgacatgtgatttacctatata

SEQ ID NO: 46657 - DNA, 594 bp, Homo sapiens
tgatgcttacgccaagcgcgcaattaaccctcactaaagggaacaaaagctgggtaccgggccccccctcgagagtacttctagaattaattaaggcgggtggatggcttgagctcaagagttcaagaccagcccgggcaacgtggcatgcatgttttgtctcaacaaaaaatacaaaaattagccaggcatggtgatatgcatctgtagtcccagctactcagaagtctgaggcgggaggatcacttggagcccgggagggagaggctgcagtgagctcaaattgtgcaactgcactccagtctgggtgacaaagcaagacattgtctcaaaaacaaaataaaataaaataacaaattcaatattatattaagggcttatttataatgtctatacatgtgatgtatataaaattaaagcataaatactagaaacgataattttttactcatttgaaactttcatatattttaaatatacttgcacaatattgttatatagattataaatgttaagaaaacgtacttccatccttaaagcaactctaaaaatatatgcaaagtaagtaaatacatccaaataaaattctaaaaa

SEQ ID NO: 46658 - DNA, 514 bp, Homo sapiens
gcgcgcaattaaccctcactaaagggaacaaaagctgggtaccgggccccccctcgagagtacttctagaattaattaaggcgggggtgtatggaaaccctccttattactagtttttcctcttaatatggaacaggcctaagacctgaaacttggcctaagcaatgaaaagaggcacttgtgtttactgctacctatggcagctggcagcctgggtatttacagaccagtaaccctgccagtctcattcaagttttcattgcagcatgggaaaagattaacagaaaaaaactacttcggctgggtgtggtagctcacacctgtaatccaacactttgggaggctgaggcggctggatcacctgaggtaaggagtttgagaccagcctggctgaaatggcatggcaaaaccccatctctactaaaaatacaaaaaaaaatttagccaggtgtggtggcgtgagactatagtcccagctacttgggtggctgaggcaagagaattgcttgaaccc

SEQ ID NO: 46659 - DNA, 374 bp, Homo sapiens
agggaacaaaagctgggtaccgggccccccctcgagagtacttctagaattaattaaggcggggcttgaaaggggataaagtctaatggcactagctggcatttcaaattctagatgcctgaggcagactggcaccgaaacagctcctcgtttctctcaaagtgaacatataattcatagagggttaacaaaataatatcgtgaagtttttcccctttaaatctctagcggtggcggggcgcggtggctcacgcctgtaatcccagcactttgggaggccgaggtgggaggatcccttgaggtcaagagtccgagaccagcctgggcaacatcgtgaaaccctgtctctacaaaaaattagctgggtgtggtgg

SEQ ID NO: 46660 - DNA, 507 bp, Homo sapiens
  misc_feature 363: n = A,T,C or G
gcgcgcaattaaccctcactaaagggaacaaaagctgggtaccgggccccccctcgagagtacttctagaattaattaaggcgggtggcgaaagcaaggtattcagggaaggtcagccaggagggaaacctcccagacagatgtatggacatgtgaaagaacttggaggtaaaaaggagtttagcaaattctaggaactgaaagaagatgactgggactagaatgcagtgagaaaaggtgtatgtggtggctttgaaataattaccactatacattatatgtattgaaacatcgctgtatacctcataagtatgtatgcacaattatttttcaattaaaaaattaaaaagaaattgtaaaaantaaattaaaaaaaatcatataaaaaagcggccgccaccgcggtggagctccaattcgccctatagtgagtcgtattacgcgcgctcactggccgtcgttttacaacgtcgtgactgggaaaaccctggcgttacccaacttaat

SEQ ID NO: 46661 - DNA, 635 bp, Homo sapiens
tatgattacgtgatgacgccaagcgcgcaattatccctcactaaagggaacaaaagctgggtaccgggccccccctcgagagtacttctagaattaattaaggcgggagatagagattaggatgctatcaatttataggtagttaaaacaatgtgagaatggatgatgcctaagagagtttgtagaataagaaagaataaagcagaagggaaacgctgggaaacactaccctgtaggaaagatgacccagtgaaaaagacagaaggaacagcctaatgacagtggatgtctagaagataaggagggagagaatccaacttaaaaaaaaaaaaaaaaactataaaagggcggccgccaccgcggtggagctccaattcgccctatagtgagtcgtattacgcgcgctcactggccgtcgttttacaacgtggtgactgggaaaaccctggcgttacccaacttaatcgccttgcagcacatccccctttcgccagctggcgtaatagcgaagaggcccgaaccgatcgcccttcccaacagttgcgcagcctgaatggcgaatggaaattgtaagcgttaatattatgttaaaattcgcgttaaatttttgttaaatcagcttattttttaaccaa

SEQ ID NO: 46662 - DNA, 481 bp, Homo sapiens
cgcggttaaccctcactaaagggaacaaaagctgggtaccgggccccccctcgagagtacttctagaattaattaaggcggggacaaatatccaaactatatcaaatggtaaagtaatggcatagccatttgatgaatcacgcagccatagaagtttgccatttttggaaaagtaggtaatgtatgtaaaagaatgctcttaattggccggcgctgtggctcacgcctgtaatcccagcactttgggaggccgaggtgggtggatcacctgaggtcaggagttcgagatcagcctggccaatatggtgaaacctcgtctctactaaaaatacaaaaattagccggacgtggtggcacacacctgtaatcccagctacacgagagtttgaggctggagaatagcttgaacctgggaggtggaggttgcagtgagccaagatcatgcaactgcactccagaccaggcgacagatcgagactcc

SEQ ID NO: 46663 - DNA, 462 bp, Homo sapiens
ccctcactaaagggaacaaaagctgggtaccgggccccccctcgagagtacttctagaattaattaagggggtagacttgaaatcatttagtgaactgtaatgtaacaataacaatcaccatcattagcttcctcctgggtcatttacagactccctatctggaagacttgacctgccagagatcaccaagtctcaatacttaggtgcaaaggggaacggctcaaagctaaaaagaaataaactagagacaaataaaattaaagcctacttaatgaactacccaggaccttttaacgttgaagagatggtacaggctaaagatataaacaaccttaactgagttgggctacattttcagatgaaagattcatgacagtagcgaccagcctgaccaacatggcaaaaccctgtctctgctaaaaatacaaaaattagccaggcgtggtggtgcacacctgtaa

SEQ ID NO: 46664 - DNA, 445 bp, Homo sapiens
gcgcgcaattaaccctcactaaagggaacaaaagctgggtaccgggccccccctcgagagtacttctagaattaattaaggcaggagaatcacttgaatctgggaggcggaggttgcagtgagccaacgttgtgccactgcactccactctgggtgacagagtgagactccattaaaaaaaaagaaggaagaagagggattatggaaattaattaatggtggggttcttcaagtaaaataactttaaacagctaaatagatgatgtctcccaaactggttttagaaaagatccaaaacctttttaatagtattattttaaattagccatggaaacagcctggagcttagtggattgtatttgcctataatctaatttactcatatatgcatacatgtatgcatattataaatatggatatatttgacacaaagaaaggagcatta

SEQ ID NO: 46665 - DNA, 499 bp, Homo sapiens
agcgcgcaattaaccctcactaaagggaacaaaagctgggtaccgggccccccctcgagagtacttctagaattaattaagggggaattgagcaagggaaattgagacttttggagagattaacagaaggttgtcattgtatgatttgacttgtagcgtgcttatttcaaggaagttcaaaccaaactacatctgacaaaaaatactttgtgctttctaaaggtcctttggattgtgattcagaagggtatttttctactatttagagcaaaactgttcaaaagtggctagaggaggaaggtgcctaccacctgttaacaatttagcctaaaggcccatcagcagccaggtgcggtggctcacgcctgcaatcccagcactttgggaggccagggcaggtggatcacttgtgattaggagttcaagaccagcctggccaacatggcgaaaccgtctctactaaaaatacaaaaattagccacatatggtggtgtgcacc

SEQ ID NO: 46666 - DNA, 614 bp, Homo sapiens
  misc_feature 558: n = A,T,C or G
gccaagcgcgcaattaaccctcactaaagggaacaaaagctgggtaccgggccccccctcgagagtacttctagaattaattaaggcgggggagggagggcaacgctcagaagcagagctgcgcgatgtgcctttctgggctgctcagcccaaggcccgagacctgcttgcctgaggaggggcagatgcacggcggctgcaccccgtggggaggccagcatgcctgcggcagctgaccctggcagtgcgagggccccccatccggaggccgcagcctagcacagtcccgggcaggacaggggagagcgtcgtgctcagcagaggagaagtgggcagtagagctccctttccgttcttgaagcagacgtttagagtctgctccttcccagtgtccgcaaagaaggattacaaggcgcgccacccacacggttggtctccctggggcggtctgaggccttgcttgtatacccagctcctttggagtcagggctcgaggccaggccccaaagggtcatttgctcaccgatccccaaaggctaagaacttgaggtgccctgngccccagcgagcctgttcccagcccccagcacactttcctggcccgtgtgtgtttt

SEQ ID NO: 46667 - DNA, 502 bp, Homo sapiens
cgcgcaattaaccctcactgcacggaacaccctcactaaagggaacaaaagctgggtaccgggccccccctcgagagtacttctagaattaattaagtcctctgaggaagacttttcttttcttcttcaaaaataacattgcccaagaaatcaaggagagaaggtggaaaagtctgctgtgtatgcaaacaagaaaggacaatgcttccaccaatatctccctgtaacctacttatacagctcttctaaagacttaaatctgacagaagtaggcctttttccctcatatagcacattttgtatcttaaaaagggtctcagacgatatcccagcaacagcctttcctcattacacactatctcatagtacaatgcttcacatccaacagatggtggagccatttttgatacttttctttttttcaataaaatggagcaacaccaaccagttgtcatcctacaaaaagacagccgtcaacactgacgaatttagaagcagccct

SEQ ID NO: 46668 - DNA, 486 bp, Homo sapiens
gcgcgcaattaaccctcactaaagggaacaaaagctgggtaccgggccccccctcgagagtacttctagaattaattaaggcggggcagatactgcatatggtaacaaggcttggaaagaattcctgcctttttctaacagcagtgggtaaagtttttaaatttgtattggtttccacaagatggtaatataaatatatgatacatgagaaaaagtgattcattgatttttcacaagtcaatcatttgagtaattggtaataggtaatagtttcagttttatcttttataactgtaacagtcatatgtatgacctaagtaatttttattttaatggaaggttttctaagcttctgtttatttaggttattaatattctgctgaaaactattgtaatctaaagttatcatgcgtgacacatacaatcttatttagctaatttatattgattttaaggtttattaaacttaaatgtgataatgtgtta

SEQ ID NO: 46669 - DNA, 441 bp, Homo sapiens
gcgcgcaattaaccctcactaaagggaacaaaagctgggtaccgggccccccctcgagagtacttctagaattaattaaggcgggatggctgagttcaagctaaatagtatttcaagtttcaaattgtttggatttctttttggttacatagtcctaatatataaatcagctgccttctgaaaattggagttttaagcagaatctcactaagacttctcttgttatctaaatctaaataaaaagggatttacatactgtcagtatatactgaacagaaaaccttgtaaaacagtagtaaactgtagggatgcattagttttaacacaaagcaaaaccttgtaaactcaggagatagataaacctgccaatagaatcacaattttaaatgtgaatctttatcgaagtggtaactcagtgtaaagaagggttttaaatcagtt

SEQ ID NO: 46670 - DNA, 475 bp, Homo sapiens
cgcgcaattaaccctcactaaagggaacaaaagctgggtaccgggccccccctcgagagtacttctagaattaattaaggcgggcagagtgtgaggggcagaattagaaacaaattgttctagtctcatctctgtcctttgttccagtggccaaaccacctagaaacaatccttttctgtataaccagataaactggttgcaaaagatgacaatcagaagagcaaaccccagccgggtgtggtggttcatgcctctcatcccagcacttcaggaggctgaggtgagcagatcacttgaggtcaggaattcgggaccaccttggccaacatggtgaaatcccgtttttactaaaaatacaaaacttagctgggtgtgctggcacatgcctgtgaccccagctactcggtaggctgaggagagagaattgcttgagcccgggaggcggaggttgcagtgagccaagattgtaacgtt

SEQ ID NO: 46671 - DNA, 479 bp, Homo sapiens
gccaagcgcgcaattaaccctcactaaagggaacaaaagctgggtaccgggccccccctcgagagtacttctagaattaattaaggcggggagtgggcggtagagaagggaggcaggcagggatcatagcatgcctgtacatggatggaaggagccagcagaggggaagctaatgacagcagaggcaaaggggatggctcacacctgtaattccagtgctttgggggccaaggtgggaggatcacttgagaccaggaattcaaggccagcctcggcaacatagtaggacccaatcactacaaaacatgtcttaaaaaatgagctgggcatggtggcatgtgcctgtgatcctagctgctcaagaggccgaggtgggaagactgagagttctagtgcagcgagctatgattgtggcactgaactccagcctgagcacccgagtgagatcccctcacccctaaagaaaagagcttaaaact

SEQ ID NO: 46672 - DNA, 272 bp, Homo sapiens
gggtaccgggccccccctcgagagtacttctagaattaattaaggcgggaaagaatgaaggacaaacaaaaggacacatatcaacgaatattgactgtgtaaaataagaatgtctttcttgtggattttaacatacattataattgaaatgcatgccagtacacaaaaggaggggtggagggaaagttatatgtgcgaggatctttgggggaacagtaaaatttctcatttatatcacactatagtaagtaaaggatatatttgtgatgtct

SEQ ID NO: 46673 - DNA, 562 bp, Homo sapiens
gccaagcgcgcaattataccctcactaaagggaacaaaagctgggtaccgggccccccctcgagagtacttctagaattaattaaggcgggtacctgtagtcccagctactcaggaggctgaggcaggagaatggcgtgaacccgggaggcggagcttgcagtgagctgagatcgcgccactgcactccagcctgggcgacagagcgagactccgtctcaaaacaaacaaacaaacaaacaaaaaaaacagctattctacttagcttgacttcaaattttaaaaataagtcaaggtcaaagtctttggcaaaccacaatgaatatctggaagtaatgtctatacacattagccaacgatgtggatagtaaaaattacttaatcattccatttttttctgttagctctacaaaattactgagtcctaaattccatcccccaccacaattataatttcacttatgccagacttgtaatctgtccacaaaactgttttccaactgctgcatagagcaacattcttctggctcaagttcctggaatttccccaaattcatgacttt

SEQ ID NO: 46674 - DNA, 461 bp, Homo sapiens
ggaacaaaagctgggtaccgggccccccctcgagagtacttctagaattaattaatggcttcatataggttggagtcttgttaggtgttgaccttttctatttgcttcacaggttgtttgcattcgctccacttggaatgctctctctccaaagctgagttgtgacacaagacctctcattctgaagacactgagtgaactattttctctagttccttccttaacggtcaatacaactgaatatgaggtatgcatttggagctcagcacattgcctgcttcttcatgggaaagatgtgtgttataataacttttggaataaatattcctaatctgtcaaagaaaaaaaaaaaacaaattgaaagcggccgccaccgcggtggagctccaattcgccctatagtgagtcgtattacgcgcgctcactggccgtcgttttacaacgtcgtgactgggaaaacc

SEQ ID NO: 46675 - DNA, 376 bp, Homo sapiens
cataaagggaacaaaagctgggtaccgggccccccctcgagagtacttctagaattaattaaggcggggaaaatataagaaacacagacataaatatccgctttattttgctttgcttggaaacgactgtttaagattaaactaacattcaatctatgaagttgagccaaagggcaacactgccaagagggctatatgaagttgttttctaaagctatttttgttaggaaatttaatttctctagttccctttcccatggtgaaataaggacagttcattctgttaatctgggttttcaccctgactctagattctccttaattatacctttattcctatccaaaatggcatcctttgacttcctaagaaatcctc

SEQ ID NO: 46676 - DNA, 643 bp, Homo sapiens
gcgcgcaattaaccctcactaaagggaacaaaagctgggtaccgggccccccctcgagagtacttctagaattaattaaggcgggcgtggtggcgggcgcctgtagtcccagctactcaggaggcagagcttgcagtgagccgagaacgtgccactgcactccagcctgggcgacagagtgagactccatctcaaaaaacaacaacaacaacaacaacaaacaaagaacttatggttagaagtttaggctctgaagtcagaccctgcctatgagccccatcatttactagcttaggcttaatgataagcaccacaggtaagtctatacatcctcatgaagcttacagttcagtgtacctaaatatttccttaagaagaactgagatcctggtgggcacagtggcttatgcctgtaatcccagcactctgggaggccaaggtgggcagatcacctgaggtcaggagttcgaaaccagcctgaccaacatggagaagccctgtctctactaaaaatacaaaaaatagctgaacgtggtggtgtgcacctataatcccagctacttggaaggctgaggcaagagaatcgcttgaaccaggcaggctgaggttgaagtgaacaaagatcgtgccactgcactccagc

SEQ ID NO: 46677 - DNA, 557 bp, Homo sapiens
gccaagcgcgcaattaaccctcactaaagggaacaaaagctgggtaccgggccccccctcgagagtacttctagaattaattaaggcggggtactgagtaacccggtggtcaagaatggcctggaaaaaatgaagaaagtcaaaaaaagaaaagccattagccttgaatcctagaacatcttttttacagaacagaattttaataactaggatttcacttctctttctatggctcagtggtaaatgttttttcattattatagtatgtctaccaacctatggcccacgcatggaggctttgtgatagttacagaaacctttacgacataataaaaataatgtaccccaaataaaaaaaaaaaaaataaaaaaaaaggcggccgccaccgcggtggagctccaattcgccctatagtgagtcgtattacgcgcgctcactggccgtcgttttacaacgtcgtgactgggaaaaccctggcgttacccaacttaatcgccttgcagcacatccccctttcgccagctggcgtaatagcgaagaggcccgcaccgatcgc

SEQ ID NO: 46678 - DNA, 468 bp, Homo sapiens
agggaacaaaagctgggtaccgggccccccctcgagagtacttctagaattaattaaggcgggaggatcacctgaggtaaggagttcaagatcagcctggccaacatggtgaaaccctatctctactaaaaatacaaaattagctgggcgtggtagcacgcgcctgtagtcccagctactcaggaggctggggaaggagaatcacttgaacccgggaggcagaggttgcagtgagcccagatcgtgctattgtactacagtctgggcaaaaagggcaaaactccatctcaaaaaaaacaaaaacaacaaacaaataaaacaaaaccccaaatataccaccagtggttttctttctagttttctgttttatagtctttttcattcataatgatagtcatttttaaattttattaagaggcacagaactttcagtttttatttaaaaggacttaaattcttctgtcttat

SEQ ID NO: 46679 - DNA, 444 bp, Homo sapiens
taaagggaacaaaagctgggtaccgggccccccctcgagagtacttctagaattaattaaggcgggctcatgtacgccacagaacgcactcaaggggactgtgactcacatgatatcatcataggcattggcacactgttcaaacacatgttcctatagcgaatcacattatattacttacgtgtgagccataattttcatgcagttcccttgcggccagaccactccagttcattctggtgatgctctgaaatacagactaactagaaattaaaattcctacccaatctctcttaagggttttaaaatcatctgtaggaatagataaataacttgtacctttaaaaatgtttcaggacagattatatacaactgtatatttctttcatttatcagatatttgcctataatgtgacaagcactgtgctaacttctgggaaaaaa

SEQ ID NO: 46680 - DNA, 591 bp, Homo sapiens
  misc_feature 448: n = A,T,C or G
aagcgcgcaattaaccctcactaaagggaacaaaagctgggtaccgggccccccctcgagagtacttctagaattaattaaggcggggttaacaggtcattgcagtaatctgtgggagagatgataaataagagcgtgcaaagacattattgcacacttttcatcctctgcttctaaacatctctagaattgggatatctcaagatattccatactgatttaaagtcatccgagctgcccctcaggcctttgagcatgtgatgcccatacccatctctcttattatgtcggtaaagaaacttcagccctagagaagttaagttgctaaggaacacgtaattcgtaagggacagagcagtcagatcttggaaacttagtttcttgaagatccagttgattttctactaaagctccagcctgggcaacaaagcgagacttcatcccaaanaaaaaaaataatataaaaaataaaaagcggccgccaccgcggtggagctccaattcgccctatagtgagtcgtattacgcgcgctcactggccgtcgttttacaacctcgtgactgggaaaaccctggcgttacccaacttaa

SEQ ID NO: 46681 - DNA, 438 bp, Homo sapiens
aaagggaccaaaagctgggtcccgggccccccttcaaaagtccttctagaattaattaaggcgggcgcatgtacgccacagaacgcactcaatgggactgtcactcacaggacatcatcataggcattggcacactttcaaacacatgtcatatacgaatctctttatatactaacgtttttccataatcaatatacagattccttggtgcctgaccactccagttcattctggtgatgctctgaaatacagactaactagaaattaaaattcctacccaatctctcttaagggttttaaaatcatctgtaggaatagataaactcctcgtacctttaaaaatgtttcaggacagattatatacaactgtatatttctttcatttatcaaatatttgcctataatgtgacaagcactgggctagcttctgggaaaaaa

SEQ ID NO: 46682 - DNA, 431 bp, Homo sapiens
aaccctcactaaagggaacaaaagctgggtaccgggccccccctcgagagtacttctagaattaattaaggcgggtattgagtttgttaaaacactcataggttacatatacaatgcacattagtatttcagtattcgtaatcagataacagaagcaacaacatagcagtgcaaaattgcctaggtagcaagagcagcaggcattgatttgctgtcctcacagtgtaggctaacttaaaaagaggacttgtaccataccccaattttaaataagctaaattctgacagatagcttaaggcaaccagggaataccataagcctcttttataaccaataataagtaagcttgaatgattgttctaccataagttccgatgtttgtttatttttagaaccattatagtactggcaggtgtgttttgggggtggg

SEQ ID NO: 46683 - DNA, 454 bp, Homo sapiens
  misc_feature 444: n = A,T,C or G
gcgcgcattaccctactcgcgggaaccctcactaaagggacacaaacgctgggtaccgggccccccctcgagagtacttctagaattaattaaggcgggtgaagttgtgggttttgcataaaattgaactgttaccaggctaagtcaactgaaattggaatctggggtactgcttgctttgaggttactcttatactgtccaccatttgctggctgtgtgatctctaaacctctctgtgccctgacttttctatctttaaaatggacgtaacaacagaggtttaataataagaggtttggaggttaagtgctaaaatgcatataaaatacctagcacaggacacagtaaaaagattgttaccgtatttcattgaatctggttttaagacacttcctgatttcaaagaaactaaaagctcatcttgaagtccaggaagtaggttntgggtcactc

SEQ ID NO: 46684 - DNA, 476 bp, Homo sapiens
aagggaacaaaagctgggtaccgggccccccctcgagagtacttctagaattaattaaggcgggggcttgaccttagctagcacaatgtgttcatccatggtaacaggagagaaggcactgcacacagatgcagatgcagtcacataagtagatgttgtgataaaaatatatggacattttctgagaaaacagaagcaatcattagagataagaaacagcccaggtgcggtggctcacatttgtaatcccagcaccttgggaggccaatgcgggatgactgcttgagtccaggagtttgagaccagtctgggcaacatagcaaaacctcgtctctataaaaaatacaaaaattagctgggtgtggtggcacatcctgtagtcccagctactcgggaggctgaggtcagaggattgcttgagcctcgggaggttgaaagttcagggctttagtgagccatgattgtgctactttcac

SEQ ID NO: 46685 - DNA, 415 bp, Homo sapiens
actgattacgcgtagcgcgcactgtaaccctcactaaagggaacaaaagctgggtaccgggccccccctcgagagtacttctagaattaattaaggcgggatattgaggggaaactgacaaaatagacaacacttttgaatacatggattagaagataaccatcagatgcctattagcttaatgctaattcaggaagcaactaagagtgtgttttaaagctcaaagactaaggacagcaaatgtgctgcggacaaaaccttggtccagaactccagtttcataagtccagatctgtctgattctgcaacagctgctctgcgtctgttctattttagatgtagagcagcgaagtatccttttattgtgctagtaagggattttacttacatatggagggggccccccccggggggg

SEQ ID NO: 46686 - DNA, 469 bp, Homo sapiens
  misc_feature 446: n = A,T,C or G
cactaaagggaacaaaagctgggtaccgggccccccctcgagagtacttctagaattaattaaggcgggggaaatagaaataaaatagaaattaaattcttttggtagactagagacagaaatataacatggtaatataaaaaggcatgcaattttcaagatggcctgaatattatcataacaaacataaactgttttagagaggattaacatttttatgaagttgctttctttccagtaacatgatatatttttatttgtcaaagcctatttttgtggcaagacatttttagtcatactgatactgaaagagtttatccctaataaacattcagaaaataatttttaaaagatatactttatcaagaggaaaattgagcccagaaggattgtgtgctggtctttgctgtttcctctcagatctattccttgcccttctcctgctntgttctatatttcatttcactcc

SEQ ID NO: 46687 - DNA, 469 bp, Homo sapiens
  misc_feature 437: n = A,T,C or G
gaacaaaagctgggttccgggccccctctcgagagttcttctagaattaattaaggcaggcattttctttttttaatgagtgctattcaaatgaattcagctgtgggaaattgtttgtggctcattcacatctgacaattctgttcatgggctcctcctcaacagctgtccctactaatgcaagataattttatgtaaaattaatgtttccataagaaggcctcatgagaggagttgtcttctgtggtaggaagtcaagaaccaaaggaaaactataaactcaaagaagaaatatgcaacaaagtaaatcagttttggtgatttcccaggtgattttacaggttctatgccaatttggaaaatgcgttctcttcttttgttgaaaaataaaaaaatacttgtgaaaaaattgttactgctcaacaaatagttctctntcattatattaattagacaaattatgtcttta

SEQ ID NO: 46688 - DNA, 449 bp, Homo sapiens
tgggtaccgggccccccctcgagagtacttctagaattaattaaggcgggggaggtgtaggatttcaagaagacaaagtatacaacagtttacaatgcagtaatagaggcaagtaaaataaggatttattgcatcaaactatcttaatgagcatatactcattggtgttctagaaacaaaagccaaagtactttaggctgagaaataaatagaaggtgagaaaaaaaaatctaaaaaaaaaaaaaaaaaaagcggccgccaccgcggtggagctccaattcgccctatagtgaagtcgattacgcctcgctcacttggccgtgcgttttacaacgtcttgactggaaaaaccctggcgttacccaacttaatcgccttgcagcacatccccctttggccagctggcgtaatatcgaagaggcccgcaccgatcgcccttccaaacagtt

SEQ ID NO: 46689 - DNA, 498 bp, Homo sapiens
aagctgggtaccgggccccccctcgagagtacttctagaattaattaaggtgggaaaacatgaaagtgctctaagcctgtgaagacagaattaaatgtgattttaaaggtgagggtttatagctatttcattagaatcatgaatgagacatgaatagaactattattatggttatttgatattgttttcttaggttgtacattatacaataaggcaagaaactaaaaacccatacaaatattgtcaaagaagcagcaaattactttgtttatagattacagtattacacatttagaaaatataagagactttgacagaaaacaatgtagtctacctcaggaaaacactaatattttaccagatggcatagaacagaaactgaaaaaagtgagagaaagaccatattttcttgataaaaatatttagtatcacaaaaatattaatgcttccacaattgtctaaaaaactcctccaatacaaatcacaattgcaatactt

SEQ ID NO: 46690 - DNA, 493 bp, Homo sapiens
cgcaattaaccctcactaaagggaacaaaagctgggtaccgggccccccctcgagagtacttctagaattaattaaggcggggtagtagctcagtaaatatttgttgaatgaatgaagtcacccttttttccccaagtgtttgttttttagaagttttattctacaaaaaaagctgaaaaaaatagtgcaatgcacatttgtatacacttcacttggatttaacaatgaacatttgccacattagcgttctatcttcctccatatgtaatatatccgtatgtgtgtatatatatgtgtgtatcaatttgtcttcatctctctgtatccatgattattagcagtagaagtgaaccatatgaaaggaagttgcagtcatagcatttttctcataataattccttgtttatctcctatgaacaaggtcattctcctacgtagcatattgttaagaaatttaacactgaaacagtgatatatttttatgtacaatat

SEQ ID NO: 46691 - DNA, 655 bp, Homo sapiens
ctggccgtcgttttacaccccggaataagcggaacacatgctgggtgccgggccccccctcgagagtacttgtagaattaattaaggcgggcatattctacataggaagcagcttaagcaaaagcttgagataggaatgagcaatcagggtattgggctagaaggaattcgactagaagtatgaatagaaaattagtaataaagttataaatatgtaagttaggtgccatattactaaagactatgtataccaagtttaagaatattatctctacttaaaagaaatgaagagctgattatttttgaaaagaacagtaaaacaatgaaaataacatttcagtagaactaacctgtctgaagaatttgggacaaacttatagtgaggggtagaagaaatcggaaacagagcaaccagtttagaggtactggttaagaacctgggctttagttaggcagatggacctgctctgctacttggtaagttactaaacctaagtctcagtttcctgtctgtagagtgggataataacaatgccaattttataaggttgttgtgtggctaaaagaatacatataaaagcatttaacatagtgcttggactataataatttcttcaacaaatgttagcaactattaccttcattacaaatcatt

SEQ ID NO: 46692 - DNA, 619 bp, Homo sapiens
gccaagcgcgcaattaaccctcactaaagggaacaaaagctgggtaccgggccccccctcgagagtacttctagaattaattaaggcgggcgaacaggagagcaccggaaggctgtacagtgccaacgtcgtcagcgggagagagaatcagcataagcctcaagggaaaagtttcacaaagacgaaagagcaattgtgtggctacagcatttgggaatgaggacattccccgtccccaccctgagagataaagggtacagaggatgcaaagtgtctcctggagagggcaagacgaggagtaaaggcttcctgcaagacccacggggcagggcaagtactcaggaaagacgctggggagctggaaatgagacttgcagaaagttctgtgaaaaggtggaaaagaaaggagaaaacccgagaaactatattgggaagaagactcagtacacacaagtatatggaaatacccaaatacacccttccccaattttctgacctatacaaattttatctatttaaggccgggtgcagtggctctgctatttctaccatgacaatttattcagcttcatcaaaaacttatttacagtccaatttcttacccactgtagattctagt

SEQ ID NO: 46693 - DNA, 568 bp, Homo sapiens
aaagggaacaaaagctgggtaccgggccccccctcgagagtacttctagaattaattaaggcgggatggctgagttcaagctaaatagtatttcaagtttcaaattgtttggatttctttttggttacatagtcctaatatataaatcagctgccttctgaaaattggagttttaagcagaatctcactaagacttctcttgttatctaaatctaaataaaaagggatttacatactgtcagtatatactgaacagaaaaccttgtaaaacagtagtaaactggagggatgcattagttttaacacaaagcaaaaccttgtaaactcaggagatagataaacctgccaatagaatcacaattctaaatgtgaatctttatcgaagtggtaactcagtgtaaagaagggttttaaatcagttcattagtctttatggtcgcttccgttgactagaagttaaaccaccagcagaaaggaagataaattaaggagtacccccagaaaagaattgcaattcatggtaaataagaaaacagaatttctctcgtttaaaactaaacaaaacaaa

SEQ ID NO: 46694 - DNA, 461 bp, Homo sapiens
aaaagctgggtaccgggccccccctcgagagtacttctagaattaattaaggcggggaccagttaggggaactatgatattagactgtggcaatgtcgacctccacacaggaggaaagagtagtcacataccctaaatcttgcgtaacgtggtgtcataaaatttcaataaatctactgagttaaattaacagcaaagcagaaaaatttgccaaagctatttatagctccactaaaatggaagacaagttaagaaaatgtgtgttctaaataatcatgtcagaagttagtgtttccttcaaatataatcataggcctaagaatttttatccaagattgatgaaattttattttacgcaacaataaatggaacacaaaggctgcacatcatttttttgtcttctgtacatatcactaaaaaaaaaaagcatcacactaaaacaatgaatataatattaaatg

SEQ ID NO: 46695 - DNA, 489 bp, Homo sapiens
aattaaccctcactaaagggaacaaaagctgggtaccgggccccccctcgagagtacttctagaattaattaaggctggtttattaaaagagaacttgaaagataatatccatgtactaaaagaagactaaaatatatttggtcaaaataatagatataattccaattttaagctgtaggaataaagaagagattaaacataatttaatactcaaataaactatattctctctccaaattctgtggcaagagaatccccacttgaggaacataagatctatcaaggaaaatagttaatgggatcaaggtaatgaatcaagttattaaatgcccttattaatatttttaaggctatatatataagtgtgcccatatattcagaaattctaggcaaggaaatgacattcctatacaagctctttgagatttggtaaacatttgtcacaggaactacctaatggcaaacctgttctggtaaatgctactgaa

SEQ ID NO: 46696 - DNA, 517 bp, Homo sapiens
actggccgtcgttttacaccccggaacaagcgtgtaaccatgatgggtgccgggccctttcttgagagtactaatagaattaattaaggcgggggaagggagggatggcaggtagagaggtgatttttaaggcagtgaaagtactctctagggtactgtaatttgtcaaaacgcagagaatggaaaacagtgaacggaaaacacagagtaaaccctaatgtcaactctggacttcagttaataataatgtatcactgttggctcattaattgtaacaaatgaaccataatgatgcaagatgttaatgattggggagcctgtggaagatgggaggggaaagggttatatgagaattctctatactttttgctcaactttctgtaaccctaaagctactctaaaaaatgaagtgtatcaagtaaataaataaccaaccaaccaaaaaaaaaaaaaaaaaaaggggccccccccgggggggacctcaattcccccttataggaagtcttttacccccccc

SEQ ID NO: 46697 - DNA, 486 bp, Homo sapiens
aattaaccctcactaaagggaacaaaagctgggtaccgggccccccctcgagagtacttctagaattaattaaggcgggggttccttgcctgttcatttatcaaattctgagtgtcttccatgtaaaaaaatattgtgctatcaagtgaagatacaaacttaaacgaggcataggtccttcttgcaaaaagctaaaaatttagcttagagaattaatatctaccctgaaaaaacagaagtggtttcaactagaagtgaaaaagtataattaaaacctctacaatagagggaatatgggaaatctctcaaaaggaaacccacatgggatctaatcctaagaaaagctctgccttctggaaatacatacttcatgtaagtgactaaaatgcagtagataatgtttcctaaagaaaacttcagatatccttaaaatctacttctcacttaattttcaaaaatcacactcctacacaggagaggtcatag

SEQ ID NO: 46698 - DNA, 492 bp, Homo sapiens
ttacgccaagcgcgcaattaaccctcactaaagggaacaaaagctgggtaccgggccccccctcgagagtacttctagaattaattaaggcgggggaaggggattctaggttgaaaagaacagcacatgtggcatctgtcaggattggccagaaggttttcatgatttagagcacagagagagggaagagaggaaggattgggaactgatcctgaggctagtgtgccctgaagtgtaggacacatccagctggcagcacaggagatgattgggggcaaaacaaggtcatggcatggaataacagaaaattatttccttttccattttcttccagtctttaagacatcaaaaagtgccaggtgcggtggctcacgcctgtaatctcagcactttgggaggctgaagtaggcagatcacttgagcttaagggttcgagaccagcctggccggcatggcgagaccccatctctactaaaaatacaaaaattagcc

SEQ ID NO: 46699 - DNA, 675 bp, Homo sapiens
ctggccgtccctttcacccctcactaaagggaacaaatgctgggtaccgggccccccctcgagagtacttctagaattaattaaggcgggtgaaactgaacaataggttaatatggtagaacaatgattacaagtttcccaatataattctaaaactaataattggggaggataaaatactgctcataatattatataagattagcactcaaagagaaaaatcattatacacgggttacaaactaccaataaaacatgcgtatatgtgtcttaagatatggttatattaaactataatttacagaaaatatattttattgcataaatgctgctgaaaattttgattatacttttgaaagaaagcaactgaacaatgtctctcaaacatacaaaattagcactagaaaaactataagcccattgtaaaaatttaagtataaaaatgacacagtagaacactataaacaataaaaaaatatagaaagcaaaggggtatttggtcatagaggtgtggaaagtagtaaatagacaaaaatccattttccagattgtttatccctaggtttttattgagaaattttataaaaagcaaatttaagagaggaattttttaaataaatgttagtaagaaatatattggtgaatatctgatctctttatgaggacccataagta

SEQ ID NO: 46700 - DNA, 490 bp, Homo sapiens
cgcaattaaccctcactaaagggaacaaaagctgggtaccgggccccccctcgagagtacttctagaattaattaaggcggggttatattacatgccaaatggatattttattggtgaattaacaccacagggaatccatcagaatgtatctactaacaatcttgtccaaatatctttaacatatacatataaatactgaaaaatcacatgcaccaattatcagaattacatgaatgctttatctgatttaactgcaatgaaattgtagagttttattcacttagataaacaatgaaattaattggagcttcataaaaggtttgtgtgcaatgagagtataagggagctcagcaagtttatagagatcaaaagaaaactgtcttataaaaataggtcatttttgcaatagatttgaatcctaggaagcaagctttctctgttggacatttgtggcctttaaggccattttgtttaatctctttactacac

SEQ ID NO: 46701 - DNA, 497 bp, Homo sapiens
gcgcgcaatattcccttactaaacggaacaaaagctgggtaccgggccccccctcgagagttcttctagaattaattaaggcgggcggatcatgagatcaagagatcgagaccatcctggcctcgccctcccaaagtgctgggatcacaggcgcgagccactgtgcccggcctaatcttagagctttagagccccaaatgtagttggcatacaatggtgactacaatagggtgtccccaacatttggtgacaaggaaaagaccaatctgaggttaaaattaaaaagtatcataacctgtatgaagccattatagagtaacacatctgaaaaacttggaggacactcaagtaactaacctgcccaattatcttagaactcatttaaggaaactaggtgctatgcacaggaatctatagagagtgcagtcatgattgctacctctccatgctagaaatggctaatgttacccttttactttgatataatgctcatctag

SEQ ID NO: 46702 - DNA, 484 bp, Homo sapiens
ccctcactaaagggaacaaaagctgggtaccgggccccccctcgagagtacttctagaattaattaaggcggggactctgttgattggtcagtcctgggtcagttgcctgtctctgacgggaaaggaaattaccttcatccctcaaaccctgggacttagtgtgatgcagaaattattccccaaaggggaatagaggtgctgttatcaaaagaagaaagagtctggggaggacactgggctaactattacatctgaatacagtaaaaaatttaatggtcaggagaagatgaagagaggtcaattaaaagtacagtttggtggaagaactaagccctagtttttgccagatcattagagtgactatagtttagagtaatctattatatatttttaaaatagtgaaaaaaaatttgaatattttttagcataaagaatagacaaatatttcaagtgatagccatcccaagtgatgctgatttgatc

SEQ ID NO: 46703 - DNA, 342 bp, Homo sapiens
agctgggtaccgggccccccctcgagagtacttctagaattaattaaggcggggggaaatggtctattttatactagaaagggatacatattcaagtgatgaattgtgttatccagcaccattaaggataagaatttataacaatggaaatattaagtttctgtagatatttttaaaagcctttagagagcaacttttgagctctaaactggtttcaggtaggctcaagactatactttaggactattttcaggttatcagagtttctttgcattcaatgccagatatttcctgagtatcttggcctagccagaccatcctaccactcctaaaatttatact

SEQ ID NO: 46704 - DNA, 453 bp, Homo sapiens
aaagggaacaaaagctgggtaccgggccccccctcgagagtacttctagaattaattaaggcggaggtggcccgtcatgagcatgacaaaacccaaagctagaaaactctcgcaatgtccaactgaaatgttatgtaaatctagcagaaaaaccatcagattgacacatatataaattttattacaaactaaatatatcctatcctgggtttttaaagtaagccttaaaatctaacttaaaaaaatgaacttgactgacaaagtttcactataaccacatacaatgattttgggtttcagcaacctgctctactgaaaccgatataatttaagcatcatcggagcaaaacttcactcctttagatggttggtggtgtgaggggtttgttcccagtggataagaggatggccttaaggtttgctgagtccttctctctcaagaacctcttagag

SEQ ID NO: 46705 - DNA, 418 bp, Homo sapiens
  misc_feature 324: n = A,T,C or G
gactggccgtcgttttacaccccggaatacagcgtgtacacatgatggttgccgggcccctcctcgagagtacttctaaatttatttaaggcgggccagtgggtacccatttctgaaaaaaccgacactctggggtgacgaaacaatttgctcaagatcacagggctgtttactgtggagtacaattcaaacccatgtttgactcccaccaaaaccagttttaaatctccttccatacccattacaatctccagcattccccctcaaacctaggaaaaaaaaaaaaaagggggggaaaaaaaaaaaaaaaaaaaaaaaaaaaangccccccccccccccgggggggcccccccccccccctataggggggttttttaccccccccctggggggctttttttacaaaaagggggggggg

SEQ ID NO: 46706 - DNA, 488 bp, Homo sapiens
cgcgcacttaaccctcactaaagggaacaaaagctgggtaccgagccccccctcgagagtacttctagaattaattaaggcggggtaaccaccagaagatctaaaaagaaaagtagttagagtggttgctgtaaaaagtgaataagaaggaatgaaagattgttgcttttcattataaatctttctccattattttgcttttctagtacttgcatgtatgactgaccacaaaagggcctgtaggaacttttagggtgacagaaatgttctatatattgaagttgtttttagttacatggatgtagcatttgtcaataatcggctaactggacatttaaaatggttccattttctcacatgtaaattatacctcaaagttgattcatacggaaaaaaaaaaaaaagaacaaaaaaaaagaagcggccgccaccgcggtggagctccaattcgccctatagtgagtcgtattacgcgcgctcactggccg

SEQ ID NO: 46707 - DNA, 486 bp, Homo sapiens
cgcaattaaccctcactaaagggaacaaaagctgggtaccgggccccccctcgagagtacttctagaattaattaaggcgggaagaggagaaatggaaatatacagctttaaggtcattgtgtgtgaaataggataattatacaaataaaccaggagagaagataaaaagaagtatcaacaaataatatcaaataatatagaaaaggaaaaaaagtaacaaaaaaacagatgtaacaaacagaaaaaaattggtaagctagtatccttaattgcatatacattaaaatataaatgatagaaacaacttaaaaggtaaggattgttggtccagcgcagtgactcacgcctgtaatcccagcactttgggaggccaaggtgagtggatcacctgaggtcaggagttcgagaccagcctggccaacatggagaaaccccatctctactaaaaatacaaaaattagctgggtgtactgtgtacgtctgcc

SEQ ID NO: 46708 - DNA, 489 bp, Homo sapiens
tgattacgccaagcgcgcaattaaccctcactaaagggaacaaaagctgggtaccgggccccccctcgagagtacttctagaattaattaaggcgggggaaagataatacttctgttgacaggaaatgaaaaaagcaaagacatgggctgtggaataggctgagatgtaagcagactatttaaatgaagttcttaggaaaataagttctgaaccctgatgaataccagcatttaagttatttggacagagagaagttaacataaattgttaaccaagtataaagtcattaacttgctaaatgaaagggtaatagagcctgaaagtttcatagagatcgcaactccagaaagcagctaccaccaccaggactgagggaacaaagggaaaaaaaaaaaaataaaaaaaaatataaaaagcggccgccaccgcggtggagctccaattcgccctatagtgagtcgtattacgcgcgctcactggccgtcgtt

SEQ ID NO: 46709 - DNA, 647 bp, Homo sapiens
gcgcgcaattaaccctcactaaagggaacaaaagctgggtaccgggccccccctcgagagtacttctagaattaattaaggcgggcagcaggtagaggaatgaacagggagagttttaccaataaaagtaacctaatggcttctatagaagaacaaaagaactttcaaaaaggatcagggcagaaggagggagacaagaaaataaagaattaagtaggcaaaaacacacacacattttagcacaataaactaaagggcaaacattcagccaaagtgctgcattccacagtggaaggagtaagggattcagctcaaacatcaacaatatgctcctgagcaagtaactgtgctttttatttttgtcttcatttttaaattgggggcaatagataccttataggattgttataaagaacagaaataaaatatggcataaagcaaacattccatgaacactcatcattaagtaaatctagaggattctaacccagatactatttaaattaaacaataatttagtgattcgattaaggtgataatttccatttgtttagaagactgaaacctcaagattaaataagaacaatcctgttttatttttctattgtggaatatgtgatctagtgcacattactttttatgccaca

SEQ ID NO: 46710 - DNA, 477 bp, Homo sapiens
ccctactaaagggaacaaaagctgggtaccgggccccccctcgagagtacttctagaattaattaaggcgggaccagggagaagcactaaagttctggacttttgctcaaacgaaaagctaaccaataatgagtacaacaaaaaatataaagcggggccctgcccgggggggcgctccccatcccacacaaatttagcttttttccccccccccctgtggccagaataaagtattccggtcttcttgcaagcagcccccacgctataaaggggaaaagactatatgagagtatgataaacaaaaatgtatttttgtctttataaaataaatgctacacagttggcagtattgggtatacttggcttatgaaccatcttgatcctctggcgagacttattaacaatcattaataagcttctcaatctttttaaaaaaatatattattaaaacacaaaaagcccaagtatcatcatctt

SEQ ID NO: 46711 - DNA, 360 bp, Homo sapiens
  misc_feature 282: n = A,T,C or G
ctggccgtcgttttcaccccggaatacagcgtgtacacatgatgggtagccgcggccccccctcgagagtacttctagaattaattaaggcggggtagtcagtccagaagtagtagagatctttaagaaacagctgatgaagttccgttatcctcagtccattttcagtacctttgcttttgctgctggacaaactaccccacaaataattttaccaaaacagaaggaaaagaacacttcttttcgtaccttctcaaaaaaaaaaaaaaaaaaaaaaaaaangggggcccccccccgggggggaccccaaatcccccttaaggggggttttttacccccccccttgggggggttttttaa

SEQ ID NO: 46712 - DNA, 338 bp, Homo sapiens
gcgcgcaattaaccctcactaaagggaacaaaagctgggtaccgggccccccctcgagagtacttctagaattaattaaggcggggaagggaatagcaagtgactgcaatggagtgctatttgactgacattttatcagagccaaatgagaagaacctagtcatagaaagacatagtaaagtgttttcactgtggaagcaggaggaagtttcccaagtatgctagtgaatttggtggggtcaaggaataatgagaagtccagtattgctggaacatggtaagcaaaagagaggtagtaggagagaggtctaaaaagtacttggagttgtccgggcgca

SEQ ID NO: 46713 - DNA, 498 bp, Homo sapiens
  misc_feature 369, 377, 384: n = A,T,C or G
gcgcgcaattaaccctcactcacagggaacaaaagctgggtaccgggccccccctcgagagtacttctagaattaattaaggcggggagagagcacattacaaaccactgagaaatacacctttctctattacctgtcgtcttaatcacatagcttcagctgttccttagtaaagataaaactactgaaccttcatggtggagatgaaatgttttatgttctaccttgaattagggaagaactgaataaattaagtatctttccagcttggaatcactgcctccatattacattgttagaaatatatttagtagttagattaaaccttattatattctcaggcaaaagaaaagtatgttgggtaggaanaaacaccnaaaaaangaaaaaaaaggcggccgccaccgcggtggagctccaattcgccctatagtgagtcgtattacgcgcgctcactggccgtcgttttacaacgtcgtgactgggaaaaccctggcg

SEQ ID NO: 46714 - DNA, 449 bp, Homo sapiens
aaagggaacaaaagctgggtaccgggccccccctcgagagtacttctagaattaattaaggggggaatgggttgaaagtctaaataaaaggcagtttaggtgccctgggtgccttagaacctacctactatatgtatagccaagtgactgccattgcccaaccctcagagaagacaccagtcttcaatcaaagttaaatagaacatggggacaaccaggcacagccatacaaaaacaaagtgatttagtgaaaacacattctcagaacagtaagatactgagcccccttctccagtgaacctctgaaaatgggcaccatgttatacactccaggtttgcggaggatatatgatttcattctgtgtcatgaaattaactgtcccaggacaatagacttataaatattaaaagctgggatctcccagcagaaaagtgtggtctcaacctaa

SEQ ID NO: 46715 - DNA, 495 bp, Homo sapiens
caagcgcgcaattaaccctcactaaagggaacaaaagctgggtaccgggccccccctcgagagtacttctagaattaattaaggcagggaaattttgctcaagaaacacattgcctggatggtggcaatagcacagaatgctgttgatcaagtggctgcttgcagcacagctaatcatcctatgttaggccaagtagatcactgaaccttttctcagaccaatcccggatgcgcctcttgctctctccagtgcttccccagcctaccaacatctcaactggccaccattccatcccaagtctttggcaaacccaggctgatatattaaccaaacggccagaaggggccactgttgaactagtctgggaagaaagctagcgttagccattcttttaccaagtggctattggccaggataaacacacccctgatttaatgtatgttatagtatatataatcatatttatataaattatatacttttaatataatttt

SEQ ID NO: 46716 - DNA, 310 bp, Homo sapiens
ggaacaaaagctgggtaccgggccccccctcgagagtacttctagaattaattaaggcgggcagggcctccagggtaaggtctaggtgtttggagggcgggacaggatctccaggggaggctctaggtgcctacggggcagggctgggtctccctaggggttggagctgcatctccggggccagaattaagagcctggctggccgcggtggctcgcgcctgtcatctcagcgttttgggaggtcgaggcgggaggattgcttttacccatttcgagacccatcctgggcaacatagcgagaccccatctc

SEQ ID NO: 46717 - DNA, 427 bp, Homo sapiens
  misc_feature 285: n = A,T,C or G
gggtcccaggggtgcagttcaatattgtgtgcgtgcaggaaagtagttttgctactctatgccccaatttcctcctacagaacagggctaatatgctcatttaatccacagatccactattaatgctggtacccacctaataccctctaagggtcactcatctcccttggaatttaatctacactcctccccaaggcccctgctcagtctcccttgacatctgccctgttgtggttcactccattccagacaggctggcttcctgctgttctttcacaggctcancctgctacatgaattttgccatttaagagctgctcccaaggccgggcgcagtggctcacgcctgtaatcccagcactttgggaggccgagacgggcggatcacgaggtcaggacatcgagaccatcctggctaatacagtga

SEQ ID NO: 46718 - DNA, 495 bp, Homo sapiens
  misc_feature 431, 432, 436, 437, 439, 440: n = A,T,C or G
accctcactaaagggaacaaaagctgggtaccgggccccccctcgagagtacttctagaattaattaaggcgggcaagttctcaaaagttttttactctcatgttgcagttctcaactaaaagatgtgtttcactaaacaatgagaaattcaaaaaagggaaatagaatttagcaaaacaaaataaaccgaatttaaaaaaaaaagaaggagaagaaaaaaaaagcagtaaaggaattatctgaccagagtccaagagtatggtgaagggtacctccaagattacaactgtgcaccaggcataaaagataaccaattgagattggagcagtatgatgaatagataagcatgttgaggacttttagcctcatgactatgtcatcatggcatgatttttaacctacgatgatacttcaggatgtgcttcatcnnaccnnannaaaaaaaaaaaaaaaaaaaaaaaaagcggccgccaccgcggtggagctccaattc

SEQ ID NO: 46719 - DNA, 371 bp, Homo sapiens
aaacaggactggccgtcgttttacaccccggaacaagcgtataaccatgattattgccgcgtccttttctttagagaacaaataaaataatttaaggcgggacatgtggaagttaatagtatcaacttcttcgttggacaaagctacatttgggtcttgttcccaccaatttacagtgtcttgagattacatctgtctgtcttgggaagtacctctgtacttaagagtacctctgttttcttgtatatcaaagggagtaatatatgtactttttaatatgcctgatataaagttgaaatgagagaatgtatttaaagtctggcacatcgtgtggacaaggaggcctagaatttggaagaacatatttccat

SEQ ID NO: 46720 - DNA, 308 bp, Homo sapiens
  misc_feature 263: n = A,T,C or G
ctggccgtcgttttacaccccggacaaggtatacctcatcattattgcccgcccttctcaaagaaaaataaatacattatgcggggggtcttgcattactttctgagagggaaaatctctgtatatatctgtcagactataagctaagttgttagctgtactacataggactgtggctcattactcaaatactcatcatactcacatgcaacttaggataccacaagttttccattcagagtgtgttatcccaagagtcattntaaaaagaatcacttctttcagtaaaacctactcccccattttac

SEQ ID NO: 46721 - DNA, 498 bp, Homo sapiens
cgcgcaattaaccctcactaaagggaacaaaagctgggtaccgggccccccctcgagagtacttctagaattaattaaggcgggtggatcacgaggtcaggagttcgagaccagcctggccaatatggtgaaaccctgtctctactaaaaatacaaaacttagctgggcgtggtggtgtgcatctgtagctgtgtgggaggctgaggcaggagaatcgctggaacctgggaggtggaggtttcagtgagctgagatcgtgccactgcactcccgcctgggcaacagagcaagactctgtctgaaaaaaaaaaaaaaaaagttttatgcccatttatccaacagcagtgttatgataccccaaagtttgtctgtagtaggcagaaattttatttaattttcatgtgtttattaatgaagttgattaatatatttctagattttaaaaaattaagcttctcacattccctaaaactttgagtagatctattatcatttga

SEQ ID NO: 46722 - DNA, 490 bp, Homo sapiens
  misc_feature 420, 421, 437: n = A,T,C or G
ccctcactaaagggtacaaaagctgggtaccgggccccccctcgagagtacttctagaattaattaaggcgggcgcctgtaatcccagctgcttgggaggctgaggcaggagaattgcttgaatccgggaggcagaggttgctgtgagccgagatcgtaccactaccctccagcctgggcgacagacactttctcaaaaaaaaagaaaaaaaaattaaaatgagaaatgtaaaattgtcagattaataaactttattaaacattcccaaggcaatgatgaaaataattaacagtgaattattctataaagatgtgtttccttgttaaacattggacttcttgataaacatggagaatgtctacgtacatttatatcttctttctcttctgaaacatcattagaatgatagtataggaaannaaaaaaaaaaaaaaanagaaaaagcggccgccaccgcggtggagctccaattcgccctatagtgagtcg

SEQ ID NO: 46723 - DNA, 297 bp, Homo sapiens
ttaaccctcactaaagggaacaaaagctgggtaccgggccccccctcgagagtacttctagaattaattaaggcgggagtttgagtaaaactgacgtgtaattctagaattgcccaagcaggatttggaaaaggagtcctagaaattgagaaagaaattggggctagtgacagaggcatatgattaagtaataactgaatttattaagagtgaaataggccttcaagttgctgacttagaataaaatctcacaaaattaaggactgatttttaaaattagcctgcactgttaaagct

SEQ ID NO: 46724 - DNA, 482 bp, Homo sapiens
aagggaacaaaagctgggtaccgggccccccctcgagagtacttctagaattaattaaggcgggggtgttcaggagattgatttgacaagatatgctaaacagttaagtttaatcatcatttattgataaccggcccctaatacccttgagttcaaagatcactaacatcaatggtattactcagtgcgacagaaataatatcactatttatcaagttttgatgcactgtgctaagcattttgagtgctcagcacaaaatctaatcctcacaacaaccctatacagcaagagcatacatcttttttgtgcaatgaaaaagctgagactaagtctggcatttttccaaaggccataatctagaaacaaccaggatacaagtaccctgaccccaaagccttttttttttttttggtgagtatgctacaatcgaatagacctttaaattccacgtccttgtaaaaattcaaaataaaattggggg

SEQ ID NO: 46725 - DNA, 475 bp, Homo sapiens
aaaagctgggtaccgggccccccctcgagagtacttctagaattaattaaggcgggcagatcacgaggtcaggagatcgagaccatcctagctaacatggtgaaaccccatctctattaaaaatacaaaaaaaaaaaaaagaaagaattctaaaaacagtggtacctgtcctaggctgattcacaaaacgttaccaacttacgcagcagggacagggacagggacagaggaagcactgttgaaaacagcgcacacacaaagttaacaccacaagaaatgtttctcattattctgaaaatcaaatattaaggtttaggctgggcttggtggctcaggcctgtaatcctagcactttgagaggctgaagcaggcagatcaattgaggtcaggagttcaagaccagcctggccaacatggggaaaccccatctttactaaaaatacaaaaattagccagacatgatagcatgtgcctg

SEQ ID NO: 46726 - DNA, 520 bp, Homo sapiens
  misc_feature 434, 435, 436, 438: n = A,T,C or G
gccccccctcgagagtacttctagaattaattaaaaataaaatacagttaagtattttatacatgtacaaagcaattgcctataactattaatgtttttaataaatgttttaaattaatgtttttaaaataaattggattatatttaactctgtaattctcaatacatgcttacttcaagttaataaatgagatatgcttatttttttctcagtagtatattttctcattaaattaaatcattaatttattctcattaagctccaaacctggtttctctaattcgggcagtctgttctgctgatttagaaatgggaccccttccatgttcaatatcactctttatgtataaaccacaagactaggggaagtagagtgacactgatccttaaataaaatttctgccacaaaacactgtgaatgaatttgaaagtnnnanaaaaaaaaaaaaaaaaaaaaaggggggcccccccccgggggggacccccattcccccttttagggggtttttttcccccccc

SEQ ID NO: 46727 - DNA, 459 bp, Homo sapiens
  misc_feature 359, 360, 385: n = A,T,C or G
ctggccggctcttcacccctgactaaagggaacaaatgctgggtaccgggccccccctcgagagtacttctagaattaaagcatgtacggtatcaacgcagagttaataaaggcggctctgacaaataagaaaaggtgctatcagcaaatcagaaatttacagtaattccaggaagatcaaaagtagataggactagaatgacagagtagaggaaatagattctatttaaaacatacataggctaggtgcgatggctcatgcctccaatcccagcaatttggaagtccaaggcgagaggatcgtttgagcctggagctcaagactagccccggcaacattgcgagaccctgtctctacnnaaaaaaaaaaaaaaaaaaaaaaaangggggcccccccccggggggggcccccaatccccccttagggggggttttttcccccccccttgggggggtttt

SEQ ID NO: 46728 - DNA, 496 bp, Homo sapiens
agggaacaaaagctgggtaccgggccccccctcgagagtacttctagaattaattaaggcagggtagtttttatcaggaagtctgatggagatcccaggagctctccctccaaacaaaagtaatttgcattcctgaaagaattgtcaaagaactgaaagatgcaaggattgcaattcctagcaggtacctacttaatacaactgtctggctaatacagaaaacaaatatttttagaggatgactgtgttttaatcttaatgactacaaggaagagctggtattcatatgtgatctgcttagttcagtacctgatatgcagctatcattctggcaaaggtttctctatctctacaaacagaatttcagaagcaatttgctttcatttggcttgtacagcagtacatcttcactatactgcctcaagttaagtcagttttctggctttcatatgatatgctttgtttgttttgagatgggagttttgctccatctcaa

SEQ ID NO: 46729 - DNA, 347 bp, Homo sapiens
gcgcgcaattaaccctcactaaagggaacaaaagctgggtaccgggccccccctcgagagtacttctagaattaattaaggcggggagccaagcccagactctcaagagggtagaaatggctactaggtataatcatgctaattatttttctttctactaaatctgcagtaggtgaattatttcaacagccagagtatcagaaccacagagcccattcgagatttttaaaaatcagtattaccgtgaaaaaaaaaaaaaaaaaaaaaaaaaaaaaaggaaaaaaaaaaaaaaaaataaaaaaaaaaaaaaagcggccgccaccgcgggggagctccaattcgcccta

SEQ ID NO: 46730 - DNA, 484 bp, Homo sapiens
gcgcaattaaccctcactaaagggaacaaaagctgggtaccgggccccccctcgagagtacttctagaattaattaaggcggggggcctggaaacggggtgatgtggacagtgactgtcttaagggaattgaggatgttggttgagaatagttgaagtaattgatcattgggtccaggccaaattggaaaggaagcaaagctaatgaatatctgtggggtcaaatcataagaatgaaagatacttcctttcagtgtataaaaacttttgaaatttattgtaacaattttattttaaatatttaattatatgaagcaagaacaagctaccttacattttattctttaattgaaaactacatatatctactaattactaagtacaccgaatcaagagagttagaactagtcccagatctgtactagtgaactatgtaaccaactaagtcactcagccactttgtgcctcaattttacctctgtaaa

SEQ ID NO: 46731 - DNA, 495 bp, Homo sapiens
agcgcgcaattaaccctcactaaagggaacaaaagctgggtaccgggccccccctcgagagtacttctagaattaattaaggcgggagaagtagattgaagatacaagaacaaagggagataattgacggagagcccttgaggatgatggaggggttgagattcatgagggattggccctagacaaggtacatgggttaaaaggcagaaagaaagaaagaaagaaagaaagaaagaaagaaagaaagagaaagaaagaaagaaagaaagaaagaaagaaagaaagaaggaaagaaaggaaggaaggaaagaaagaaggaaagaaggaaagaaggaaaaggaaaagaaaagaaaagaaaagaatggaggaagaaaaaaaaattatattaaaaaaaaaaatagcggtcgccaccgcggtggagctccaattcgccctatagtgagtcgtattacgcgcgctcactggccgtcgttttacaacgtcttgactgggaaa

SEQ ID NO: 46732 - DNA, 608 bp, Homo sapiens
ctaaagggaacaaaagctgggtaccgggccccccctcgagagtacttctagaattaattaagggggaataggaaggaaagaaggaaggcagggaaagagaggaaatgcaacaggacaggtgtcatgctgagaatctgagaagagctgcaacaacagccagcaagaaaacagacctcatggcccggcgcagtggctcatgcctgtaatcccagcactttgggaggccaaggcgggtggatcacgtcaggagatcgagaccatcctgactaacacagtgaaaccccatctctactaaaaataccgaaaaaaaaaaaaaaaaaaaaaaaaaaaaaaaggcggccgccaccgcggtggagctccaattcgccctatagtgagtcgtattacgcgcgctcactggccgtcgttttacaacgtcgtgactgggaaaaccctggcgttacccaacttaatcgccttgcagcacatccccctttcgccagctggcgtaatagcgaagaggcccgcaccgatcgcccttcccaacagttgcgcagcctgaatggcgaatggaaattgtaagcgttaatattttgttaaaattcgcgttaaatttttgttaaatcagc

SEQ ID NO: 46733 - DNA, 414 bp, Homo sapiens
cgcaattaaccctcactaaagggaacaaaagctgggtaccgggccccccctcgagagtacttctagaattaattaaggcggggtttgttggagggcagattagaaagagtttacttgggaatcaaaaaactcaagaagcaagtgattaatatacttgaacctaagttttgctcaaatcatcaaaaacaaaggtataatacttaaagctagaaatgtatatacatcctacaaactgagggtcttcttcgggacctgatggatgaactaacttctatagggaacaattggaagtcatgtctttgcctgagtttctagcaacatagtaaaaaaaaaaaaaaaaaaaaaaaaaaaaaaagcggccgccaccgcggtggagctccaattcgccctatagtgagtcgtattacgcgcgct

SEQ ID NO: 46734 - DNA, 430 bp, Homo sapiens
gcaattaaccctcactaaagggaacaaaagctgggtaccgggccccccctcgagagtacttctagaattaattaaggcgggagccaccgcatgagtccttttaatcaattaattgctttttctctataataattgtagacagctgaagagggatcaatttaaaaaaattcaagtttacttcagtaatcattctagattacagaattgtgctttaaaatagctacattgtatatatcagtactagaaacatccaagaaataggagtctacattacattggcgaaataacaaaaaggacacaaaaaggcggccgtcaccgcggtggagctccaattcgccctatagtgagacgtattacgcgcgctcactggccgacgttttacaacgtcttgactgggaaaaccctggcgttacccaacttaatcgccttg

SEQ ID NO: 46735 - DNA, 460 bp, Homo sapiens
ccctactaaagggaacaaaagctgggtaccgggccccccctcgagagtacttctagaattaattaaggcggggcaaagcttcttaaaataacattcttcttaaatcgcatccatatgatttagcaaattgatacggccaaagtcaataaatcatgatgccgggtttttactttaatgtataactgcttttattttattttttgctttgagccaactccttataatttttagcccaaagttaaatgtatattcttgtctaggcaaaacaagctacttctcacataacgggttcctggttttcaatgtcaaaccaccacgaatgcaggaaatcttcccccagcggttcagcaagacacagagctggctgcctctggttgcaccaacatgcaacccattaactgcttttcagttggcagtatttgaatttgtagattttttcaccacttttcaatgtgtaagt

SEQ ID NO: 46736 - DNA, 467 bp, Homo sapiens
  misc_feature 18: n = A,T,C or G
agctgggtaccgggcccnccctcgagagtatctctagaattaattaaggcggggggatagcatgaggagttatcttcttacaaggtcactgccctatctaattagacccctccaccctttgaccctcatttaaacttaacttctaaagaccctctctccagatagttacattgggggttgggcttcaacataggactttgggggaggtggaggacacaattcagttcttaaggatatattaaactttttaatgtggatagttggtcttccacaaaatagagaaccagagtacctactgaaaaattagaaagccgtggacgaaaaatctaataagctatcttaatttagaaaaagacaaccttttggctggacatggaggcttatgtctgtaataccagcactttgggaggctgaggagggaggatgggttaaaaccaggagtgcttgcaccagcctgggcattattg

SEQ ID NO: 46737 - DNA, 430 bp, Homo sapiens
ccaagcgcgcaattaaccctcactaaagggaacaaaagctgggtaccgggccccccctcgagagtacttctagaattaattaaggcgggattaccatacccagctctgggttcaagtctcaactcagctactgtctggcttaacaacaactggacaggccctctgacctctcaggtctcatttccaccagatttcctgggaaacaagccactgtctttattagtaaactacaaaatgtattttgcatgagtacaaaatgtattttgcaagtgagtaagtatgtaaataaataagtcatcttttgataataacatgaattctggtttgtttgttttttttttgagagactctcgctctattgcccaggctggaatgcagtggagtgatcttggctcactgcaacctccaccttccgggttcaaagcggttc

SEQ ID NO: 46738 - DNA, 305 bp, Homo sapiens
gaacaaaagctgggtaccgggccccccctcgagagtttttctagaattaattaaggcgggtcatcgtagttctcctgagaaaggaagcaaaaacaagaattattttcttgctgtacaagatgacaccccactggcctctgtgctgttgtagacccagtcagataaaacagttggaggtaatccgtgaaggatgcacaggatagactaagggcagcaattgaagccaatcactccagaaggattctgggtcagcagaacagtggtcctgagtgggtgatcacttgcccactggctcttgctgtaga

SEQ ID NO: 46739 - DNA, 637 bp, Homo sapiens
gattacgccaagcgcgcaattaaccctcactaaagggaacaaaagctgggtaccgggccccccctcgagagtacttctagaattaattaaggcgggaccaaacctattagtaattggttaattttggatacagactgaagcagaagagggacttacatttttaaatctgtgtgcttttgtactgtgtgatgtttctaaaagcatacacctatgtattatgtaatttaagcattttaaaagtattttcctggccgggtgcagtggctcacgcctgtaatcccaacactttgggaggccgaggtaggcggatcacgaggtcaggagatcgagaccatcctggctaacatggtgaaacctcatctttaccaaaaaaaaaaaaaaaaaaaaaaaaaaaaaggcggccgccaccgcggtggagctccaattcgccctatagtgagtcgtattacgcgcgctcactggccgtcgttttacaacgtcgtgactgggaaaaccctggcgttacccaacttaatcgccttgcagcacatccccctttcgccagctggcgtaatagcgaaaaggcccgcaccgatcgcccttcccaacagttgcgcagcctgaatggcgaatggaaattgtaagcgttaatattttg

SEQ ID NO: 46740 - DNA, 181 bp, Homo sapiens
aaacagaaaactataaaaaattcaggagaaacaggagaaaatttttggcccctagggattcatgaaaagttcttgtcatgactttaaaagtgtgatgcatagaaaaaattatcaacatttaagaagtgttgcttcatgaaaaacttttagaatgaagagcaacagattgggagaaatgatt

SEQ ID NO: 46741 - DNA, 460 bp, Homo sapiens
gcaattaaccctcactaaagggaacaaaagctgggtaccgggccccccctcgagagtacttctagaattaattaaggcgggagaatcgactgaacccagaaggtcgaggccgcggtgagccatgatgacaccactggactccagcctgggcaacaaagcaagatcctgtctcaaaaacataaaataaaataaaaaactaaagtcaacagtcctgttctgttaataagtgcgctaaaaaactttgatattatcaaaatttaggtggcaactgtacctccttctgtgcgtaatgattgagatatggaaaatgtatttcaaatgacaccttttttccccaagaaagcttaacatacagatcaggcgtctaccaaagtaagttaccaatggttaactccaagtgtcacacagggcactgacagttcaagttggtcttctatttctgaaagattttaacacataa

SEQ ID NO: 46742 - DNA, 418 bp, Homo sapiens
gcggggtttggattagaaggtcttcagagtgcttcctaactctgaaatgtttgtaattggtttcacagtgtgcctctaatgttgatgattctgttagttgagtggtctcgttgtgacccctcctcacccccaaacacatgcatcttctgaactgtcctttagttcacatctcagaaaatgctggccaatagggcactgagtagaaacttgaattactatgtctccattatatgcataggtaccgtttgctacatattctcacatttagttagactattcctcatcagaagttaccgaggagtattttgtaaaatggcaacctatatttttaataacataagccctgaatcttagttcttatttaagagatgcatcatttacagatatataagctccatgaggacaagagggaattttg

SEQ ID NO: 46743 - DNA, 653 bp, Homo sapiens
gcccccccctcaaaagaactaataaaataatttaaggcgggagaatgccatgaacccgggaggtggagcttgtagtgagctgagattgcgccactgcactccagcctgggcgacagagcgagactccgtctcaaaaaaataaaaataaaaaagaagagaccctttaatttgtgcattcttgtggtgggataattttaaaccttaattttgtatgattaccctcaaattttacacatataaacaatggtaatcctgaacagaggatggcaaaaaggaagaagtgtttacaagaaaggcaaaagttaatcatcctcttccaaaactgaaaaaaaacctcagcatttactttgggcaggtgaaatgtctaagggcactttctaaagataaacgagacaaagtctcagtacgtatcaagcaaataaagtaacaaaggtggaggtcagaagacctagttatatatctctgccattaactgacctatacagcaaattagataaagtgaggataggatacgtaaaatagttattcaaatgaaataaatgtatgtctaaattataaaatgtctaaatcaataacttttaaataaatcaatttatttttaaatgcatataataattcaaatgaagaaaaagtgttacctaataaaatttctg

SEQ ID NO: 46744 - DNA, 279 bp, Homo sapiens
cgcgcaattataccctactaaagggaacaaaagctgggtaccgggccccccctcgagagtacttctagaattaattaaggcgggaggaagtgtctgttaaacacttatacaccgaggttcaaaagttggagaaaaggtggtattggatcgattagtagagatatgggagccatgtgtgagtagatactaaagcatagggagaaagtatggagtaagaagagaaacgggtgacttccagtttctggtctggcacataagaacctggccatcatcactcca

SEQ ID NO: 46745 - DNA, 484 bp, Homo sapiens
cagcgcgcaattaaccctcactaaagggaacaaaagctgggtaccgggccccccctcgagagtacttctagaattaattaaggcgggcgccacttggcaactacttatttggcgcaggattctaaggcgctatctaacccacgtctgggacttatccgagataaaatacatactatacctgctgcttacatctacaacgtatatacaggctttggaacaatttttatatccattcattgtcccacgtgattcctctgcatatcccaggagagatgtgggtactctcatgccctgtatatggatagataaattgagggtgaggttatgaaacccagtgacagaattgggactaggaccttgtgggacaaggatcttggtttgctgactcctgattcagggctcttctataatagctcataagaactctaactgaaaagatttctcatgggtaaaggaggataaccctttaaagatacacatgaaa

SEQ ID NO: 46746 - DNA, 235 bp, Homo sapiens
ctggccgtcgttttacaccccggaataaggtgaaacaagcatgggggcgggcccctcctcgagagtacatactagaataattaaggcggggcgatgattcagtattaattgattagtcagataaatagtaataccatttaaacacagcaactgactttgtttaaaagttagattataccgaaaaaaaaaaaaaaaaaaaaaaaaaaaaaggggggccccccccggggggaacccc

SEQ ID NO: 46747 - DNA, 591 bp, Homo sapiens
  misc_feature 496: n = A,T,C or G
gcgcgcaattaaccctcactaaagggaacaaaagctgggtaccgggccccccctcgagagtacttctagaattaattaaggcaggctttacattacacaccccactggtatgttcaggctcacaaagatgcaaccaagaactatatgcggttgcaagcacatattacagaaggttttattttaatgttaaggctgatgaatcttgtcctaagcaggtaggacacctcacaagcactgagtctgaagcagtgaagatttttttttctttagtttaacaaactgcttaatcgctcatcaaattaccccatatatcatgaaggccccaaacatagtgaagcttcactagtttttcatttttaagatgtattcaaacatcaagtaatgcacaacttgccaagaatatttgaaaatggttacttttttaaaatttaaactcgttagtgcataactgcagggtttaatattacaatccgaaatccaatgttaagcactattncgcagtgaatctatatgaatatgagcattctaagatcataaatcaactagcattttacacattcttcaaataaaacatcagattccatttatttt

SEQ ID NO: 46748 - DNA, 444 bp, Homo sapiens
ctaaagggaacaaaagctgggtaccgggccccccctcgagagtacttctagaattaattaaggcggggattttgatacacataaaagtttgtgatagctgctactgcagacagattctatgatagagttgagtttattttacaaagggagttctacttctctaatattttaaaaatttctattcatattgttacctcacaacctgaacttggcttcttgaattgttaagtcattcaaatattttttgtgttgttcctgagttggccaggtcatatgagctcacccaaggggagagtgggtctatcaatggcaagtcaacctttggagacctgataattgtcaactgaggaggccttgggtgaacccagtgagagtctgatctgtgattaaagtatagttgtatgaattgaataacagaaaccgtttctaacaacactggagcca

SEQ ID NO: 46749 - DNA, 642 bp, Homo sapiens
tggccgtcgttttacattacggaagaaggaagacacatgatggttgccgggcccttccttgagagaactaataaaattaattaaggcgggacagtcaatcggcctgcagtgtcacctgccacctcgctgaacagttgacaatgcaattatccagtgtggaggcagggagttggcgtgtgtcaaacgcacttagccactttccgggcctcctcgataacgcgtttcactgcctcacgtcaggagagacgcagagagacagacgccgtttaaaaccatggatacttgctccttctgcctgcactccctctgtcctagcttaacaattgtgttccaaaaggcgattaaatcccatcagttgccacgggggacagaaggtgccttgctccttgccacctgtgctcacccctgccaacaggcgacagagagaactaaagatggtagggagtcacaaggcagcagcccaaccctgtgcactccaagaccgcctccagcagtgtgctgttccaacacctgtcactggctggaccaacagcagaactgcactgggggacatttttagcacctggggctcccttcttttgagaactcgacaccaaaaaaggcagcagctagggcaaggcctatgtgcccatgccctggggc

SEQ ID NO: 46750 - DNA, 488 bp, Homo sapiens
agggaacaaaagctgggtaccgggccccccctcgagagtacttctagaattaattaaaatctcattaaagtatgtaaaactaaaactgacacaatttatataaaaaaaagtaagagaaagtatactggggcaactagtcaagtcacagaaatcagagatttttatattttatctgcatctattgctacctctacaagttgccttctatttttgaagagtttccataaagtgccatagttttcattttttacaacagttcaaaaataagcaatgataagtatagaaaaaaggtattgatatgctggaggataaataattatgacaccatatgaaatttatgaagcattatcagatattattacatgaatccctacaacaccatggcgtactaattttattattattatagataaggaaataactacagagaggtttactaacttgcccaaatttatatagctagtaaatgtaaagcctggatttttctt

SEQ ID NO: 46751 - DNA, 555 bp, Homo sapiens
gcgcaattaaccctcactaaagggaacaaaagctgggtaccgggccccccctcgagagtacttctagaattaattaaggcgggaggggagtacacaggctgtaaacagcagtgcccaagctgagacggagcaagctgggaatccgcccgggtttcattcagtcttccacaccccgcatggatactggttatacctgtgatcagttatgcctgtgatggttttttagaaaacaaaactattttatcactctgctttaaagatggccgagtggaaagacacagtcctggaatgtttaaattcaagctgaagagcttactagccacgtgactgagcaagttatggttccatctttctaagcctcacttcattctttgttaagacaggcctcagcatgctgttagtaggaatctaaggaacccagtgctgatggagaaaggggtccagtccagaccctaagagagagttctcggatcttgcgcagggaggaactcaaggcagtcgcagagtgcagtgagagacagctgctctgatacagagtggggagcccgcggaaag

SEQ ID NO: 46752 - DNA, 477 bp, Homo sapiens
  misc_feature 383, 386: n = A,T,C or G
taaccctcactaaagggaacaaaagctgggtaccgggccccccctcgagagtacttctagaattaattaaggcgggcatttgacctgaaccaggccagcgggagtcttgtcattctttgtagattcttccctcttaggttaaagagtgggaatcagagactttcttaaacataggaaaatcttccacacgtgtaaacttaatatagaatttatatacttataaatctaacatacagtaaaataaaatgaacacataataaggaagcattaagcaatagggggaaatgaaatagtcaatacatgatgtagggagaaataatttttcaataattttagaagaaaataaatttaaaagaaaatgaagttctatccctaacccacanaanaaaaaaaaaaaaaaaaaaaaaaaagcggccgccaccgcggtggagctccaattcgccctatagtgagtcgtattacgcgcgctcactggcc

SEQ ID NO: 46753 - DNA, 510 bp, Homo sapiens
cgcaatttaccctcactaaagggaacaaaagctgggtaccgggccccccctcgagagtacttctagaattaattaaggtgggaccagctgttgtagcaggtttctctaaaatgcagcaacattttagctgaatcccaaataatgaaaagtaggtaaacatattgaaatttgtggaatgagtttcaggaagaattaaaagcaagtccaaagggactgaggtttcaagtcttggtgtgttttaggaatgtctttgtgactgaagagtagtggacaaaaagggaataggaaacaaatgaattcagaaaaaaaaaaaaaaaagacagatttgggccatagaagaccttggaggccatagaaataaattttgacttatattgagtgtaatacaaaatatttaagaattgtaagcaggcctgtattataatcagatttacattaacaaaatgattctattcatttgtgaagaatggattatggaggggccagtggggaagcaataggtccaagttg

SEQ ID NO: 46754 - DNA, 532 bp, Homo sapiens
cgcgcaattaaccctcactaaagggaacaaaagctgggtaccgggccccccctcgagagtacttctagaattaattaaggcgggaggatggctcgaagccaggagttcaagcttgctgtgatggtgccactgcactccaccctgggtgagagtgagactccatctcaataaataaataaaacacggtcactatcctggattatttgggcaagtctaatcttatcacagtcctctaaaaccagagcattttctcaggcagaacttttcaggtcagataacctgtgtgaaaagatgtcaatgtgccggcatgccagtgctggctttgagggtaactgggtctctggcagcagagtggcctcaggtaacagcagcaaggaagcagatctcagacccaccaccacgaagagccagactcggcccacaacccaaacaagcccctgaaacactccagataaacacccagcccatggttcagaccttgtgagaccctgagcaggaatccagcgggccctgcctggatgtctgacttaca

SEQ ID NO: 46755 - DNA, 200 bp, Homo sapiens
taattaaggcggagaagctaacatgagcttttctgtctataagatctcatcaaaagcttaaataacgaaggtaagagtcagtattctgtggacagcttagctctacacaagaccttctgtccatcttgctagttattttccagttaatggaaatcttatagacagaaaagctcatgttagcttctcccgcatagtattat

SEQ ID NO: 46756 - DNA, 426 bp, Homo sapiens
agggaacaaaagctgggtaccgggccccccctcgagagtacttctagaattaattaaggcgggacaacagcctgttgcagtgaatccaaatctgttaccagactgatttggttcaaaatggccaaaaagaataaagtaaacggcagtacatttcatagacagaaccctatgtctaggaaccaagaatcctcttgattcatcaggctacaatataactcggcctccagcaacaacttaatgtatcaaaatcagaaatatacgtacacgatgcagcgactggctcaggtgtgtagtattactatcattgggaacactatttcgtcaaactgtaaagtgcaagcaaactgggttcctgacctgaatttcatggaagtctaaacaactccattactgtacacaggagtcgccccaaacaaacatcacaca

SEQ ID NO: 46757 - DNA, 597 bp, Homo sapiens
cgcaattaaccctcactaaagggaacaaaagctgggtaccgggccccccctcgagagtacttctagaattaattaaggcgggcacctatagtcccagctactagggaggctgaggtaggagaatagcgtgaacccaggaagcggagcttgcagtgagccaaggtacagccactgcactccagcctaggtgacagagtgagacttcatctcaaaaaaaaaaaaaaaaaaaagtcttacggagtgctactccggtctacttttaattttgaaaaaaagttaaccacagagagagacttaagacttcaaatatatagtatattcagttttcttaatattttagcaaaaaattcacttggaatgacaggtttgttgccaccttatttttaatgaaacgtgacatttggaaaacatttgtggaacagatagatgaggtggcacatatttcttaaagtggagcccatggcccatttatgtcataattaggtgcgttataaaagtatagatacgtaaactctgatttcaaacctaactgttcaatggggctgagaatcttcgtttgaaacaggtaccacaggggtttttatgtcaataaaagct

SEQ ID NO: 46758 - DNA, 443 bp, Homo sapiens
ctaaagggaacaaaagctgggtaccgggccccccctcgagagtacttctagaattaattaaggcggggcacggtgactcatgcttggaaatcccaactctcttggaggctgaagctcgtgcatcatgacgccacgacctcaatatcctcctggccagtacggagaaaccctgtggctactacacacgcgttagttctctgggcatctgtaacccagctactagggagacagaggaagggaactgcttgaacctgcgaggcggaggttgcagtgagctgagatcgtgacactgtactccagcctgggtgacagagtgagattccatgtcaaaacaaaaacaaaaacaaaaacataaaacaatcaagaataaataaaaaaacgctgaagaataaaaagtagtgatattcattcaatattcacaagtatctcaacaaagaaaagcc

SEQ ID NO: 46759 - DNA, 619 bp, Homo sapiens
  misc_feature 413: n = A,T,C or G
tgattacgccaagcgcgcaattaaccctcactaaagggaacaaaagctgggtaccgggccccccctcgagagtacttctagaattaattaaggcggggaagctagggaatgattcgcagcactatgggactggcaaaagaatccagaagatgacatactaacacttgcagttaccaatatgttgttaaatattagtgtctggggatctgttaggtagagataaaacttaatgagataagacggaaaattggctatatctgacaagtagccacttcttacccactaaattttctatattctttctctagttcttaaggtgcctcctagtgatatgattcagcacaatataatgcactgttacttcacatttgggaatttattcacataaaatcctaaaagaaatttaatcaaanaaaaaaaaaaaaaaaaaaaaaaaaagcggccgccaccgcggtggagctccaattcgccctatagtgagtcgtattacgcgcgctcactggccgtcgttttacaacgtcgtgactgggaaaaccctggcgttacccaacttaatcgccttgcagcacatccccctttcgccagctggcgtaatagcgaagaggcccgcaccgatcgc

SEQ ID NO: 46760 - DNA, 457 bp, Homo sapiens
ctaaagggaacaaaagctgggtaccgggccccccctcgagagtacttctagaattaattaaagcgggagatgatgagatagaagttcagagaggttaggaaattaccaaagttatacagtcagtatgaagtagaattggcattcaaatctaggttgtttggtcccactgtttgtttttaaaaataatttattctctggggggacaggaggaaagaacttttaaaggagagaagtaatccgttgttcttaggagccaaaacattggcacaactccaaataaaagtaatacgtttattgtcctatcatcttaatctcacgattccttctaattttaccaattattataacttcaaccaatacttgcaaagacactgcttacctcaactatgtaaaaacttccattgcatacacttttactttcagccttaattatttcaaactggcgctggataactat

SEQ ID NO: 46761 - DNA, 531 bp, Homo sapiens
tgattacgccaagcgcgcaattaaccctcactaaagggaacaaaagctgggtaccgggccccccctcgagagtacttctagaattaattaaggcgggggggaataggattaaaggtcagagaggtaagttatttttgaaaaagaagttcttccaaatttgtgtttggaatagaaaaaaagggcagataaagtaatcccatcctacctgacactaaaaagaagttaacaaaaggtattcttcccagtagacgggaaaagatggtgcatttattcaatagagcagtgatgcacagtttttagtgttcatgaaaattacatggagaactgatttaaaattcaaatttataggctttctattccactctcccacttgaagatttttattcagtaggtcccaggtatggccaaggaattcacattttaattagattattccagtgactctaatgctggtgggtctaaaatcaggcttaggcatacaatggtacaaaggcaggtctttttaactgctttcagaaaaaaaaaaaataa

SEQ ID NO: 46762 - DNA, 485 bp, Homo sapiens
ttaaccctcactaaagggaacaaaagctgggtaccgggccccccctcgagagtacttctagaattaattaaggcggggttggggactaggaggacagtttcagggctggtgggccctgaggtctatgtcttccatgtacctaaggttattttgcatataaaagatggtgttgattaggaccatcttttttcacttcctgaaatctcaggactttacctgttttggattaagatatttacaatgctgaattccctgatactatgagattcctgaagagcccagcattgcccctcgtggagtgttcatgtccctggtatctttggaaatgtctggaagtgttctgtcccaatgaaaaaactgtgaaaatttaaactcgcggccgccaccgaagaggatctcctgtccgacctaatttgaaactaatgattggcgctcactggccgttgttttacaacgtcttgactgggaaaaccctggcgttaccc

SEQ ID NO: 46763 - DNA, 476 bp, Homo sapiens
  misc_feature 344, 348: n = A,T,C or G
tcactaaagggaacaaaagctgggtaccgggccccccctcgagagtacttctagaattaattaaggcgggatagaaagtccaaaaacgagcctacatatatgaggttgtagtatgtgatagcatcggaattgcaaatcaatatggaaagtaatacctagttaataaactgacggttagatattcataatttttaaataaatatataaagatatatctctccatagccacgcgcggtggctcacacctgtaatcccagtactttgggaggccgaggcgggcggatcctgaggtcaggagatcgagaccatcctggctaacacagtgaaaccccatctctgcttanaaanagaaaaaaaaatacttaaacaaggcggccgccaccgcggtggagctccaattcgccctatagtgagtcgtattacgcgcgctcaatggccgtcgttttacaacgtttggactgggaaaaccctggcgt

SEQ ID NO: 46764 - DNA, 476 bp, Homo sapiens
accctcactaaagggaacaaaagctgggtaccgggccccccctcgagagtacttctagaattaattaaggcgggacctatctgtccttcacggtagattcattgtattatttctgacgcaccgaggctgttgtgttcactggtttttggaagccaagatgtcaaacacttccgaagtatgaaaagaagattgcgaaagttacattagggttctgctgtccccaaaaagccctttgtgcacaagtcctcacagtcccgccccatgcattttgtgccacaagtgcaaattgaaggacttcaggcagatcgcgccagggaagagcaatttgaagttttttttttttaaagcttttaaatttcagttaccagctccaatgaaaaaagaaatccagtctagaacagccactctgaaagccaaaacaaaaagagctccaaaaaactgttgagcaaagttaagtgccttttcggaagcaaatc

SEQ ID NO: 46765 - DNA, 625 bp, Homo sapiens
aattaaccctcactaaagggaacaaaagctgggtaccgggccccccctcgagagtacttctagaattaattaaggcgggggcaagtaagttaaagtaaatccttgccattctgttaatgataccactattctcagtcattagattggacaagaaatagcagttttggtattccacccttcttgggctccctgccatgttcaagcactttaacttgaggtcttagttctgtgattgtgagaataactctagacccatggtgtccctgtagtcctcagtgcgatcttatggctgtggtttggcctttcttctgactccttgagatatatcctgatcctgtacattagaaagtggctgttggagaacaacactgcaaatacaactttgcttatagttgtatttagttgcttatagagcaaccttgagattctgtcagggcagtgctagtgactttcctctccctttaatagattcggctgctgagttcatcagaagctggtaagtagtgcaggtcagaatctgttcttacttgtgcacatgcaccaccaccaccttatctcacaccagtgtgatgaacaagactagattttgttttaagttttacataatgccttactttcctttttc

SEQ ID NO: 46766 - DNA, 467 bp, Homo sapiens
ctgggtaccgggccccccctcgagagtacttctagaattaattaaggcgggagtgataaagaggtcaattatgcctcatatctgtgattgaaaataatcatacaatgtaaacattttcggaaaaaaattcctaagtttatcagcatttaaaaacattgtgtcatatgcagagaaaggtgatcataactcatatgcagatgaagtaattgaaatactcgattttggttctcaaaatatgaagcatttacattccaagtatctttgcagcggtagtgctatgtcgtgtcatattgcaattgatgctggataaaagttcttctaaaagagaaaatgaactttgacaaaaaacaaagaaaccaaaacagaacaaaaaaaacttacttccaaataagagaaaattatagaagtcataagccaataatacttgctttcctttaatcccatttaacaagcaattatattaaaac

SEQ ID NO: 46767 - DNA, 743 bp, Homo sapiens
gattacgccaagcgcgcaattaaccctcactaaagggaacaaaagctgggtaccgggccccccctcgagagtacttctagaattaattaaggcaggaagccaaagccaattattatctgagtgagagacatgtcaatccatcagccacagcatggtgtactgaacattgccttacgactttcaaatctagaaataggaagaaaggcccatgttggcaagtgtgaggaaatttccaccaatgtccaagatgaacaagtgttaccatttttcatttttctactattgataatctgttatctaatctcagctccctccactctttcttccatatgtaaactcattaactctgatactgggacttgctacaatatgacaaagttatgccatttttcaaagtgtgaaatatgtcatatacatgtacaatctgaaccccaagctggtagtgacattgcggcttctctgatggaaatttttaatataattcatagaaaaacagcataagaaacagtgtagtttttatggatcattttctttctttgtttttgaaacaaaagaaaacatcaaatactgattaatgtcctcatttcagaaatgctaccctcagtgaactaaacaataagcagtaactgggagcttccagaagataaatataaaatggtcttagaagaaaataaacaactttttcattattaaaagcaccctaaaggaatttttggtctttgaactgagacttgtctttcatg

SEQ ID NO: 46768 - DNA, 480 bp, Homo sapiens
cctcactaaagggaacaaaagctgggtaccgggccccccctcgagagtacttctagaataaatcaacgcgggagagggtagatgacaggcggtggcacttccctatacttgctgtcccttacaattatgtggactaacaattacagccttactctttaccaaaacactttctcccttggtgttcatgaagacatcctatttccaaatgttttcaaacaaagaagagaatatttagtcaagggcagagaatctcattcagaatagcttgtccaggtgatttatccagggtaactaaattgttgagtagcagtttgaacgaatgataaggttttcaccataagttttataacctatcatgaagagctgtctttctgcattgttggtattgtctaaccctgataaggctgaggagtcattcatctgtttcaccaccaccttctaacatgttgttcttacatgttatccacagctggcttttcc

SEQ ID NO: 46769 - DNA, 536 bp, Homo sapiens
aggccgtcgctttccctttcaaccctaactaaagggaacacatgctgggtaccgggccccccctcgagagtacttctagaattaattaaggcgggggatggtggggtctgggggaaatactcaaattacagtttttaatggggtattgtggtcaggctagacctcattgagaagatttttttttcttcatacatttagttttaaacctcacatttgtccccagcagaacatttgggaatcaattaaaagtgatttcagctgggaataacctgcaagctgtatagtatctcttgtaagagatgtggcactaagcggttttcttagtggtacaatagagatactgtataccacatgaaataacaatgttctgatacagtctttgttgcatatagtttctcatccattccttcaggacctatggactgcgtacaatatgcttgatactgtgtgggctctggagaaactgcaagtgacaaggtcaccatggtctctcttcccagagaccttagagtttagtaagggagatttaccatcat

SEQ ID NO: 46770 - DNA, 637 bp, Homo sapiens
gccaagcgcgcaattaaccctcactaaagggaacaaaagctgggtaccgggccccccctcgagagtacttctagaattaattaaggcggggtagctccttggatgtggcccttcatggtccagggacctgagaactgaatagccaagttatctgcctctcacaaacacaagttaaacagaagacacagggcaggaaattcccaacagacactcccattccaaaggcgcagaataaggagttacatagcaaccacactgctctacagtaattccaaacccagtcatcagctgtcgttggggtctcccattctgtaggaacacagatttgagcttcattctgctccatggaagtcattctctaatccgttgttctctatgcttagctccaccttctgagacatctttcaacaggaaatggaccatgtctgtagctaagtagctttcttagactactctcgttacataaaaatttggggttctggaagcttcttttcaaatgtttttgcctttttagtccaattgggccatgctttcattcatatgactctcttacaactttgtgggattcactctatgccccaaatttcataaccatacttatttttgagacagacttctttcaaattttggtctgttg

SEQ ID NO: 46771 - DNA, 496 bp, Homo sapiens
attaaccctcactaaagggaacaaaagctgggtaccgggccccccctcgagagtacttctagaattaattaaggcgggaaatcagtcctgctgaaccaatgaggcctgccactcttcaaggccagcagcccctctgacctctctttcaagcaccagcccatcctcaaaatattgtttttgctacttcctgcctcaagagttggggaagttgcaaagcatgcttctgaatgctttcagtcatgaatattgtatttataaaatgtgggcaaacatgaaggctaccaagagagaagcgtgggagtaaggaaaagaggaacaataaatgcctgttccccctttcctggagccattaagcacttctcccttgcctcttgtatccttgagtgtaagacaccacagagatcacttaggaaagccgacttgcaccctgaaatcaacgctgaccttcttcagttttcccttggcttacatacaggtcacctcaagagtgtataga

SEQ ID NO: 46772 - DNA, 569 bp, Homo sapiens
  misc_feature 521, 522, 523, 524, 527, 528, 529, 530, 543: n = A,T,C or G
aaacactggccgtcgttttacaccccggaataagagtatacacatgatggctgccgcggccccccctcgagagtacttatagaattaattaaattgctatagaagctaaaccaatacttctgccaaaaattgtctggataaaaataaaaaaagaaaagggaaagttgtttgtacacttaccttcacctgttccagctgcattgatgaataagcccagaatgatatttgtaataaattgccatcccttatatttgtttatgaatatatgaacctttatcacatttctcaccaggctaatgcttggcattaaggccttcatagatttgatttttaggattttctgtgatatcttctttattagtcactaaggtcattctagaattggtgatttttaaacaattaagccttgtgcttctccactgtatgaggaaaatattttacagtgttataaaaatagagaaaattgctaaaaagcaataatatttatttttttccttaagaaaaatgactgtcaaaccaannnnaannnnaaaaaaaaaaaanaagggccccccccccgggggggaccc

SEQ ID NO: 46773 - DNA, 454 bp, Homo sapiens
cctactaaagggaacaaaagctgggtaccgggccccccctcgagagtacttctagaattaattaaggcgggtggcctacatgtttaaattgattttcgaaattattttcaaatccctcgggttgcgtgagcaagggtggatttctatttctaagtgtggtgaccttttctaaaactgttttatgcttttcactcttctgtgattggtgccacctaggactgcacactgcattcatttggtgtgtctgagtgagctgtttaatccagaacaaggaaactcatcccttcaaatctgaattaaagaagcatctctctgggtacgatgaggttttctgatgtaaaactctcatctaaaagttagccattcttattaagattgaaaccttaggccgggcgcggtgcttacgcctgtaatcccagaactttgggaggccaaggcgggcagatcacaaatc

SEQ ID NO: 46774 - DNA, 516 bp, Homo sapiens
  misc_feature 366: n = A,T,C or G
agcgcgcaattaaccctcactaaagggaacaaaagctgggtaccgggccccccctcgagagtacttctagaattaattaaggcggggcgagatcacaggaccataggaccgaggcgggatagcattaggagatatacctaatgctaaacgacgagttaatgggtgcagcacaccagcatggcacatgtatacatatgtaactaacctgcacattgtgcacatgtaccctaaaacttaaagtataataataataaaaataataataataataaaaggaaaatgaacaaaaaagtctctctggcctcaatgccactgaggcctattactggaaagtatacataaaagtttaaaaaaaaaaaaaaatgnaaaaaaaaaggcggccgccaccgcggtggagctccaattcgccctatagtgagtcgtattacgcgcgctcactggccgtcgttttacaacgtcgtgactgggaaaaccctggcgttacccaacttaatcgccttgcagcacatccccctt

SEQ ID NO: 46775 - DNA, 601 bp, Homo sapiens
gcgcgcaattaaccctcactaaagggaacaaaagctgggtaccgggccccccctcgagagtacttctagaattaattaaggcggggggagcacctgaggaagaccccagcataagaatcaatgacataactcaatgactgcaggacaggcatagtgccaatcagcgggattttaccaatggtattaagataacctttctgccctcatgttaccgccctactctgtattagaaaccgaaatgctactaagcagtaattcatttaaattcacaagctcctctgttaatatgcaactacccttgaaaacactggggtgggttaagaattagcctttatctctcagaatgaatcaccttaatcagtttccttccctcttcctctcccttcctcctttccctaatacccttcccttccctttcttttcaacgtctaaccaagataaattcagaatacaacttaaggggaacaggtctgagtaaaattctctacacagccaggaaacagtctaaaagcttggcagggaagaccaaggaaagaaaagaaaaatcaactctatgcctgttctggctacttcactctgcaatctctgcatggatcccatg

SEQ ID NO: 46776 - DNA, 460 bp, Homo sapiens
gggaacaaaagctgggtaccgggccccccctcgagagtacttctagaattaattaaggcgggcgcctgcagtcccagctactcgggaggctgaggcaggagaatggcgtgaacccgggaggcagagcttgcagtgagccaagatcgcgccaccgcactccagcctgggcgacagagcaagactccgtctaaaaaaaaaaaaaaaggatgatgtccacaaatcatacaaatcattctgtttatcttcctcccactgacacttcactttactaaagttatccattctcatactaccgttgttttgaacctcacccacacagctgtccaatattacctattactaattttttcccattaaaaaaatttaaaagttagctttacccactcaggaagcccatatattctgtaatgcaagcacctacatctaccacagattctcaggttgtaagagaccttcggac

SEQ ID NO: 46777 - DNA, 391 bp, Homo sapiens
aaagctgggtaccgggccccccctcgagagtacttctagaattaattaaggcggggtaattttacaaatcactttttttaaattatagcatagggttcagatggaattagtaacagacgcaagctgccaacttcggtttcttatgtgaaagccacttgttctcaaagggtctccactttctaggcttgcttggtttttgttttctgagtctggttcaaactttaccatatgttcttaaaaaaattaactgcttaagagttgatttatcttgtctgcattgaatagcttattatctttaaccatgcatctacctggagtattcttttgatgaagttttaccaaacaaaattctaactagactttcttttaaccttaacaaataattcatgtt

SEQ ID NO: 46778 - DNA, 498 bp, Homo sapiens
gcaattaaccctcactaaagggaacaaaagctgggtaccgggccccccctcgagagtacttctagaattaattaaaaaatatggtgggagaaaataatagcttgcaatgtggcaatcatttataatagtttgcaacgcggacaaattttttttttaacctcttcctcctagcactttctagggccctgagaagtcttcatttgtagggagacctctagtccttagaacctgaattctcattctggtttcacaaaagaacaaactattcatttgtgcaaactagcattgcgagtttctcagagccaggtaaggtactgtcaggtccactggccccagccctgcacacaccctaaataggtttgagtgtccagaggcagaaccgtgcaccaagagaagcccacagagagagctgcatcccccagggtcccaagcccgggccagtgccctttctctaaatgcactgcctggaagcaggtgcattcgtgatctgcactctcc

SEQ ID NO: 46779 - DNA, 663 bp, Homo sapiens
caagcgcgcaattaaccctcactaaagggaacaaaagctgggtaccgggccccccctcgagagtacttctagaattaattaaggcggggtattagagacagaggaccttttaatattcccttgttccactggtttcttaccccatccccaggactcctactatcctgaagtattagggtatcaggccctggccagggacagcttgggagatgacataattgtcttgcaagcttacttcaccttcagagtgatggtgacctcaacagagagctagacatgtgtggggggaggtagggcagcacctggaggggataagggggaatccctagacctacagggctggtcttggaaagagaagaggtcatgcccctttcacagcgaaagacatgtgcaggaaggctatgcaaaattaaataggcatggtagggctcagtggctcatccctgtaatcccagcactctgggaggctgagttgggtggatctcttgagcccaggagttcgagaccagcctaggcaacatgtcaaaaccctgtctctacaaaacaaaacaaaaaaagaaaacacatgctgggaggctgaggtgggcggatcacaaggtcaggagaccgagaccatcctggctaacatggtgaaaccccatctgtactaaaaatatgaaaaat

SEQ ID NO: 46780 - DNA, 688 bp, Homo sapiens
agcgcgcaattaaccctcactaaagggaacaaaagctgggtaccgggccccccctcgagagtacttctagaattaattaaggcggaatacttcataccctcaagatcagtgatcattaaaagtcactgaaggctgcctgcattaacaaagccaactggagaatggctactaaatggctagctgaagacttcatggacattaattatttttgttggaggtaaaagattgggcttcatttgaaaagctgccagatattccttttgttccatgattggtggcgcatagcacttcagttcaataactcagccatgccaccatctgcccagcactctcattctgttggttggcatgtcatttatttgcttttaacatgcaacccatataaaaatccctcataatctgccaaaattagaaatgcagctgttttaagtcttaaacagcaatagcactattcattatgccagtatggaggaataaaatagaaaaatgtatttggaaagagcaatgctacaccagaatgtatttgtaccttcacttttttaacattcaagacatctatagtctgctaccagtgctgacttcaggcttaaagttgacacataaatataccagatagcttctttagtacatacattttaatacaagaattgggatttgaatcagctctgaattatttttcatgttataa

SEQ ID NO: 46781 - DNA, 611 bp, Homo sapiens
  misc_feature 502, 574, 575, 599: n = A,T,C or G
agcgcgcaattaaccctcactaaagggaacaaaagctgggtaccgggccccccctcgagagtacttctagaattaattaaggcgggggacattcagtgcaatcgtaataggaccaaaataggtttcaaagtgttctgaaaggttttcctgtgtattttttaagtttatatttatgtggccaggcatggtggctcacgcctataatcttagcactttgggaggccgaggcgggcagatcgcttgtgctcaggagttcgagaccagcctgggcaacatggtgaaaccctgtctctactaaaaatacaaaaattagccgggcgtggtggcatgtgcctgtagtcccagctacgtgggggactaaggtgggaggattgcttgaggccaggagttccagaccagtctgggcaacatagcaagaccccatctcttcgaaaaaattaaaatattttttaaaaaagaaaacattcaagtcatggtttttgaatgttcatatgaatcattntattaaaatatttcaataaaatcaataaattcacaaaaaaactgtactttttaaatggaaaaggtttatctnnctggcaccctacactaaagcactntagtattttttc

SEQ ID NO: 46782 - DNA, 485 bp, Homo sapiens
gccaagcgcgcaattaaccctcactaaagggaacaaaagctgggtaccgggccccccctcgagagtacttctagaattaattaaggcgggggagagagagagaaagaaaaaagggaagatcatcgagaaaggaaagagagaaaagaatagggtgctagaacagtacaaactacactcccatagaattctagcattccatgaaataaacagtaaaagctgaacattcatgaaattttcccaattttctataaaatgttagtttaacttatacttctacccaatccaaaaaaaaatttttttaattgtatggaatttttttttaactgtaaaatgcactgtttcttgtctgctggtaagggctatcaaagacaaatattggtcgcacgtggtggctcatacctgtaatcccaacacctagagaggctgaggtaggcagatcacttgaagtcaggaactcaagaccagcctggccaacatggtgaaac

SEQ ID NO: 46783 - DNA, 513 bp, Homo sapiens
gcgcgcaattaaccctcactaaagggaacaaaagctgggtaccgggccccccctcgagagtacttctagaattaattaaggcgggggctcagatctgaaaagactggttttggggagctgtacttaccactttatataacacttgacggcttccaagagcttagagctgaaaaaactcttttgagatgtacgcgtgtacataaaataattataaagattctctaaaaagaagacacatgttactttagtgagttttaaatatgcgcttaaaatacagtcaacaaatgaagcagcccttttctgctctgttgaatatctgaaaacctttggagatctaaagattagcttaccaaatgccactgaaaatagtagatttgcaacataaaaccaacttgccatttttaagagatggagatgtgaatggaatttatttattagaaatcaaagtttagcccagctgatgtcattgttgaaaaaaaaaaaaaataaaagcaagaataaaatggttggaac

SEQ ID NO: 46784 - DNA, 360 bp, Homo sapiens
tggccgtcgttttacaccccggaacaagcaatacacatgatggttgccgggccctccctcgagagtacataatagaattaattaaggcgggaaatcaattatgtttcagcactggtaagtgctgttaacagtggtgaatgctattcgagtacagagaaataatatctaattcagcctgtggaggtgaaaactccactttaaacaggtaacccttgagcggacgagatctagaggtgtagctaagaagaaaagtagtgaaaaaaaaaaaaaaaaaaaaaaaaaaaggggggcccccccccggggggggcccccattccccccttaggggggggtttttcccccccccatggggccgtgttt

SEQ ID NO: 46785 - DNA, 496 bp, Homo sapiens
  misc_feature 476: n = A,T,C or G
cgcgcaattaaccctcactaaagggaacaaaagctgggtaccgggccccccctcgagagtacttctagaattaattaagggggcagataaaagaaaaatggatatttactgttaagaagtatgtacaacagcaatagagagggagttggtactgtttgagagaaaaatcaaaagtagatttgctctgctttattagaaataattaggggctgggtgtggtggctcacacctataaccccagcactttgggaggctgaggctggaggatcgctagcccaggggtttaagaccagcttgtacaacatggtgacacaggtgagaccctgtctttacaaatatatttttaaaaattagccagccatggtggtgtggacctttggttccagacacttgtgaggctgagatgggaggatctcttgagcccagcaggttgaggctacaatgagccatgattgtgccattgtactccaacctgngtaatagagtgagacattgt

SEQ ID NO: 46786 - DNA, 553 bp, Homo sapiens
  misc_feature 396, 400, 401, 425, 509, 510: n = A,T,C or G
ctggccgtctgtttacatcccgaaataaagggaaccaaagctgggtgccgggccccccctcgagagtacttctagaattaattaaggcgggagtactgcagttgtttatgaccaatgagaacaaagacgcaccgtacattggtttataggacacagattaagcagtgtttcgagggaaattcatggcgctaatgtgcccacatgagaaaatgggaaagatcctaaattgactccctcacatcacaatgaaaagaactagagaagcaagagcgcacaaattccaaagctagcacaaggcaagaaataactaagatcaaagcacaactgaaggagatagagacatgaaaaactcttcaaaaaatcaatgaatccaggagcttgttttttgaaaagatnaccnnaaaaaaaaaaaaaaaaaaaaaaanggggggccccccccgggggggaaccccaattcccccttaaggggggttttttcccccccccttttgggcggtttttaaacaagnncagagaaaaaagattttttttttttggccgggggggttttttt

SEQ ID NO: 46787 - DNA, 667 bp, Homo sapiens
actaaagggaacaaaagctgggtaccgggccccccctcgagagtacttctagaattaattaaggcggaaggagagggattttgtgctgaaggatctgtgtcattgtctgagctacatgatgaggcggcaatgatcctctggaccgcttatggtgcgactatgatggatttgtggctcaatgaatgtgacctcttcatttgcgcgtgcctggttaccataaatggtctatactctcctgactttatttttccccttaaagaaagaaactgggttttaattgaaagaatggactgaatggaaaaaaagagcagcggttctttgtaaaatggttgaccttggccagtaacttaacctcgccgagccttgatttcctcacccttgaagggcgggaagaagggtgtctgtcaggcacccagcatactgtgtactcttaactacaggcccttcctctccccccatcatcagggtggcccttcattggtgattgggcatcatcaagttattttcaccagaaagcaaacactatgggtagggatcaaaattgagcttcaccaaaaaccatcaagcactctgtacgcacccctccaccccatttgctcgcagtatcctagaatctttgtgctctcgctgcaattccctttgggttccatgttttccttgttccctc

SEQ ID NO: 46788 - DNA, 454 bp, Homo sapiens
ctaaagggaacaaaagctgggtaccgggccccccctcgagagtacttctagaattaattaaggcgggggatatttattttattctttgggaaaccaggtggcaatgagtcaaaacactacttccaagaactgtgtaagaattaaaataaatatccccccaaaagtggaataaatggctactttaccacaatgcaaacacatagcaatgttctcagtaacagtacaacagtttttaattcaactgtacagattttaaaggtaaatttgggacacaaaaatcacatagatatagttgtttaggcatttaagtaatctttgtatctatccctattatcacttggcaaatgtattacctgtcctagcccagtcaaaagtttactgaccatcacaatattcaacagtcttcaaaagcataggcatgatatcccggtaatttggggggaattctcctttt

SEQ ID NO: 46789 - DNA, 510 bp, Homo sapiens
agcgcgcattaccctcactaagggaacaaaagctgggtaccgggccccccctcgagagtacttctagaattaattaaggcgggaagacaaattttagttatatcatgtatttacagaattctctattattaagattaacaccaaaatataggttctctatgccaaccttatatcctcttgaccaaagaggagatttgaattccatttgaattccagcttttagggaagacaagccttttatttgagctcaggttgcaactgttttcattcccacatacagtaagaattatggagagcccactaaaagctaggcactattttcttcagcttgctgacatcctagtcattgctctataaattctgcctcttacttttagaatctcttaaactcttgtctttccctggcactcagcctaggaggaagtagagtacttcaaaaactcttttgactcaaaaactcaatttcccatgacaagaaaaatatgcatgagtgagacaacctaaatatgg

SEQ ID NO: 46790 - DNA, 470 bp, Homo sapiens
ctaaagggaacaaaagctgggtaccgggccccccctcgagagtacttctagaattaattaaggcgggaggattgctttgaaggtcaaggctgcagtgagctacaattgtaacactacactccagcctaggtgacagagtgagagcctgtctaaaaaaaaaaaacccaaacaaaagtttgttgttttttttaccccaaaaacaattaaaaaataatgtttttgaaaaattttgccattaaatgaaaggtactggccaggcataggggctcatgcctataatcctaacactttaaaaggctgaggggggtggatcacttgagcccaggaaaccagcctggacaacatagcaagattccatttgtaaaaaaaaaaaaaaaaaaaaaaaaaaaaggggggcccccccccgggggggacccaaattccccctttagggggggtttttaccccccccttttggggcgtttttaaaa

SEQ ID NO: 46791 - DNA, 345 bp, Homo sapiens
  misc_feature 265: n = A,T,C or G
acaaagctgggtaccgggccccccctcgagagtacttctagaattaattaagggggttcccagtgtgctggctcagtttacaccaatgctcacttcatgagaattcattcactaattcattcatctcagtttttttcacttttctatatgtactgtatgtcataataaaatagatttaaaaagcaaaatgcagaatatgtacagaatgtcaccatctgtgctttaaataactagatcccaaaaaaaaaaaaaaaaaaaaaaaaangggggggccccccccggggggggcccccaatcccccctaaggggaggttattccccccccccccggggccggtttttaaa

SEQ ID NO: 46792 - DNA, 478 bp, Homo sapiens
accctcactaaagggaacaaaagctgggtaccgggccccccctcgagagtacttctagaattaattaaggcggggtatcaggggatcacttttgaatgttgaaagaatttaagttcatcagcagtcaaggcagagaaaagagcagtcaagaaaaggggcacagtgcaggtaagggcagatcctttagagcacagcatgattgtgtcaaggacctaacaagaaatgtggtctggtcagagcttgggaagttgagtgcacaaaggtggaaacctaatgaatcccagcattgaaggggtagagaatggagacgtcaaatttgagactggcctgggcaacatagtgagatcccatctcttaaaacaaacaaaacccatggtggcacgcacctgtagtcccagctactagagtcctggctattaaagaggctgaggcaggaggattgcttgaggccagttcaaggctgtaatgagtgatgatt

SEQ ID NO: 46793 - DNA, 417 bp, Homo sapiens
  misc_feature 326, 327, 338, 339, 355: n = A,T,C or G
taaagggaacaaaagctgggtaccgggccccccctcgagagtacttctagaattaattaaggcgggtttcttccactctgcaaaaactgctgtatgggctgtgtgggcacacctttgagctcttagatggagacgagctcagggatagtgcctttggagaaaaggttggagagattgcactgtgagaggcttcaaatcaagttaccaagtaaataatgagtgcagcacaccaacatggcacatgtatacacatgtaacaaacctgcacgttgtgcacatgtaccctaaaacttaaagtatactaaaaaaaaaaaatttaaaatttnnggaaaaaaaannaaaaaaaaaaaaaaangggggggcccccccgggggggggcccccattcccccttaagggggggattttaccccccccc

SEQ ID NO: 46794 - DNA, 148 bp, Homo sapiens
tagaattaattaaggcgggtaatgatcattaacccctaaatggcaaaaagcaaattccctggatgcaggaaggtgggcacaaggagtcatgggacgggctttggaagcacaggggcctttgtcatctgaaagctcaggcctcttttcc

SEQ ID NO: 46795 - DNA, 426 bp, Homo sapiens
  misc_feature 415: n = A,T,C or G
ctaaagggaacaaaagctgggtaccgggccccccctcgagagtacttctagaattaattaaggcgggtgagagcctgcgctgaggctgagtggccggggtctgaacgtcgcccctcggctaagccactcacgtgacttcatctgggtcactctctgagcctcattcctcatatataaaaacagtctgggccaggcacgggggctcccgcctgtaatccagcactgtgggaggcggaggcaggtggatccactgaagccagaagttcaacatcagcctgcgcaacataacgaaacctcgtctttaccaaaaaaaagaaaaaaaaaaaaaaaaagggggcccccccccggggggggccccccctcccccccaaagggggggtttaaccccccccccagggggggttttttaaaaaanaccaatacaca

SEQ ID NO: 46796 - DNA, 429 bp, Homo sapiens
  misc_feature 365, 378: n = A,T,C or G
acaaaagctgggtaccgggccccccctcgagagtacttctagaattaattaaggcgggaggattgcttgaggccaggagcttaagacaagcctgggccctacaggcccaatctctacaaaaaagtttaaaaaattagcccagtgtgctggtgtgtgcctgtaataataccagctattcaggaagctgagacaagaggatcacttgagcccaggaggctgaggctgcagtgagctacaaatgtgccaccacactccagcctgggggacagggcgagaggccatctctttaaaaaaaataaaagaacacttaaaaacaagaagccagagttcagtgaggtaagaaactgccccatgccagacagaanaaaggcttaactntcaaacctttgctcctggcttcactgatctctgccaacaagtgaaaaaaat

SEQ ID NO: 46797 - DNA, 528 bp, Homo sapiens
tcactaaagggaacaaaagctgggtaccgggccccccctcgagagtacttctagaattaattaaggcgggctccctgaaggccaaggccaagtccctggccctggcccttatgctcaggatgggtctctgctcactaggcttcaaacacctaactccgggctctctgacaactggcccccccccgggacccactgtctgaactgcactttgcttcctaggtcttgctctgaagtccagctgcaaaaaatgaaagtgaaaatacaaagcacacaaacagttctggccttgagagcaataaccctgtttgcacaaaggataacaacttccatcctggaacaacctgatcattcacaacttaggtccttacccatttaatatgtcaagataatatccagtgtgggcagaaaaaaataaataatgcagccgttagaagaaccaatggaggtcataccatgcaattcattaagtagaatattatacagcagtgaaaatggatgaactatagcgacgtgcattatcatgactca

SEQ ID NO: 46798 - DNA, 516 bp, Homo sapiens
  misc_feature 415: n = A,T,C or G
taaagggaacaaaagctgggtaccgggccccccctcgagagtacttctagaattaattaaggcggggaaccgggaatatcagaggagatcaaagagagagagagacttggcagaagcttggggaagagagttttgaggagaaaacaagtaccaagggttgacctgctgcagcattacagaactaatcactgtctttcaaattaggagttcgagaccagccggaccaacaaggtgaaatcccgtctctactaaaaatacaaaaaaattatccggcgtggtggcatgtgcctgtagtcccagctactcgggagaccgagacaggagaattgcctgaacccgggaggcggaggttgcagtgagctgagatctcaccgctgcactccagcctgggtgacgaagcaagactccatctcanaaaaaaacaaaaagaaaaaaaaatccggccccccccccccgggggggcctccatttcccccttatgggggtttttttcccccccccttgtgggggtttttt

SEQ ID NO: 46799 - DNA, 458 bp, Homo sapiens
aaagggaacaaaagctgggtaccgggccccccctcgagagtacttctagaattaattaaggcgggatatttgcagggttattactgtaactcatttaccctcgcacaacaaagggagtgcaggaagggagggcccaaagatgcctgaaccaccattcagagtgcagacggaagtgtgatccttacaatggtctaactgtaagtatcttgtaaaagaccattaaagttgataagtgcttatataaaactttctacctgaaacctcccagagagttgaacgtttgtggagatttccgagttgaggaagtttgtgatcatctctgtgtttattgacccttttatagttttactagagcacatggatgaaaatactaatttcagaaactcaagtaagtatttggcatttctgatagtataagtacatgttctgttctttacctagtaatgaaggagaaatgt

SEQ ID NO: 46800 - DNA, 413 bp, Homo sapiens
  misc_feature 85, 362: n = A,T,C or G
gcgcgcaattaaccctcactaaagggaacaaaagctgggtaccgggccccccctcgagagtacttctagaattaattaaggcggnggagaggcttgggagtgggaactagcacccgctgtaaggtctgccataagacttaatgtttgtctccaatgggatggagtcctggcataagcaaaattaatattgataacgttattattatttaaaatttgtaaatattgtaaaatattttagaaaacatctactttgaaacatctactgggcgagaccaggagtgatggctcagcctgtaattctggaatttcgggaggccgaggcaggaagattccttgagcacaggagttccagaccagcctgngcaatgtagcaagacgctgtctctatttatacaataaaatttttttaaaaa

SEQ ID NO: 46801 - DNA, 280 bp, Homo sapiens
aaaagagagaaaaaacctttaatggtgtgggccgggctctccccaaaaaagaagaaaaaattaacctttttgcacttgtccacatccactaaaaaagaataagaaatgtcatttgtgtaattttgtgacttcaattgtaatggcattcatttttatatttttagaaattttgtgaaatatttgcccttttggctgaggaaggaatagttataaaaagtgctttcaacaagaactgaagggcacacagttgaataatgaacagtagtgtaattagtaggtc

SEQ ID NO: 46802 - DNA, 493 bp, Homo sapiens
aagctgggtaccgggccccccctcgaaatacttctagaattaattaaggcgggggacctgacaattctctaggcaaagggaatgacctggataaagatacagaggcaagcaaacattgctaaaaatagtatcctttgtaagctctattccttggtcctgagaaaataaaatgtatagctttatttatttctgtgagatgagttaccaatgggtactgctattcaaaaaagcaaaacagtgcaattcttttgacatttacggtgtcctacttatccagaaaatacctatgtttttaactaagctggctcttcattcatgttcctttataaactcccatttactctgtacttaaaagtacatgtcatataccacttataagaccaaatggcaattttagatatttatcaaagacagcttatttaaaaaaaacttaaaacaaaaaatgcttcatctcctggcaaaatctgaataaaaacagcatttgccagggtta

SEQ ID NO: 46803 - DNA, 572 bp, Homo sapiens
  misc_feature 551: n = A,T,C or G
actggccgtcgttttacaccaggaaacaagtggtaccacttgctggtgggcgggcccttcctcgagagaactaatagaattaattaaggcgggtggatcataaagtcaggagattgagaccatcctggctaacacggtgaaaccccgtctctactaaaaaatacaaaaaattagccgggcgtggtgatgagtgcctgcagtcccagctaatcgggaggctgaggcaagagaatggtgtgaaccagggaggtggagcttgcagtgagccgagatcgcaccattgcactccagcctggggacagagcgagactccatttcaaaaaaaataaataaataaaataaaataaaataaaaactgctacttatctacaagccagaacaaaaacataattttaaaatggttacaatctagcaccagaggcctcaagacaattctggaaactaaataaaaagggctaatggaactgcaacctacagctttccccattacggtctttgcattcctgagactgaaaaaaaaaagttacatcactatatgcgatttgtctgantgaaggaggaaagggaactca

SEQ ID NO: 46804 - DNA, 505 bp, Homo sapiens
  misc_feature 461: n = A,T,C or G
gcgcgcaattaaccctcactaaagggaacaaaagctgggtaccgggccccccctcgagagtacttctagaattaattaaggcgggcagatcacgaagtcaggagatcgagaccatcatggctaacacagtgaaaccccgtccctactaaaaatacaaaaaaattagccgggcgtggtggcgggctcctgtagtcccagctactgcggaggctgaggcacgagattggtgtgaacccagaaggcggagcttgcagtaagccgagatagtgccactgagcctgtgcgacagagcaagactccgtctcaaaaaaaaaaaagctttccgaatcatttttgaagaattcagaaacttgattgaaaagcttattccaactatgatctgacactcaagactgtcagatttaggttgctgttaattttgtcatgagaatgtaaaatactaaaatctctaagtgaaaaanttgcatactagtgcttgttataaaggataatgcaaaaataaact

SEQ ID NO: 46805 - DNA, 448 bp, Homo sapiens
taaagggaacaaaagctgggtaccgggccccccctcgagagtacttctagaattaattaaggcgggaaatacatgctaaacaatactgaagcattcggaagtggcatgacacctgcaacctactgtcaaatggtacaggaaagaaaattttacatatacagtatatccatgtacgtaaacaattagaatgacaacataagttgacaaaaagcagttcatgagtgtaagagaaggtcaagtgggagtttctgtattattcttgcaactttcttggaagtctgaaagggtttccaaatacatttttgttcatgttttaataaaaaaagaataaaaactacacagaaaaaagattatacatctgactgtattcttctcaaaaatctagtcaaagactatttttttaagaaaacacatgccacagactgggaggagatacttataaacaata

SEQ ID NO: 46806 - DNA, 625 bp, Homo sapiens; identical to SEQ ID NO: 46213
  misc_feature 433: n = A,T,C or G

SEQ ID NO: 46807 - DNA, 564 bp, Homo sapiens
actggccgcccgcttacaaccctgactaaagggaacacatgctgggtagccgggccccccctcgagagtacttctagaattaattaaggcggggtgtgcactttcttgggctgaagaatcaatcacttgatgaccaaaggcgtgacttatatttgccctggagactagactgagaaagatgacagtggcatgtttccagtagatatttgcacacttctttctgaccccatcattgagtaatctgattttaagattctcttcttagagaaatctttctgctaactccttgccacttgcctatgaacatattaccaaaaaaattatggctatgacttactggtgctttcagatatacaaaacatttctagtcagaacaaacagccagtgaaggatattaaaaacagatttttacagaatttgaaatagtatctgctttgtaatcattcttttaactgtactagtattagcatcctaaattatgtgaagtatttgctggtttccaccacagaagagtcagaattttaaaaaaaaaaaaataaccctatgggggcccccccccccggg

SEQ ID NO: 46808 - DNA, 481 bp, Homo sapiens
  misc_feature 453, 455, 456, 457, 458: n = A,T,C or G
gactggccgtcgttttacatcacggaaacagctatgaccatgattactggccgtcgttttacaacagggaacagcttttaccatgattgctggccggggttttacagcgggaagacctgcttatgcatgaagtcctggcggcacttttttttaggtaataaaccgtaaccggtctgtcgtgggggctcatgcctgtaatcccaacactttgggaggctgaggcgggcggatcacaagggcaggatatcaagaccatcctggctaacacggtgaaaccccatctcttctaaaaatacaaaaaattagctgggtgtggtggcgggcacctgtaggcccagctactcgggaggcttaggcccgagaatggcatgaaccctggagacagagcttgcagtgagcccagatggcgccactgcactccagcctgggcaacagagcgagactccatctcanannnngggagaaaaaaaaaaaaaaaaag

SEQ ID NO: 46809 - DNA, 394 bp, Homo sapiens
  misc_feature 21: n = A,T,C or G
tttcctgactacctacactgncctgggcaacattttagtctctgaaaatgaaactatactggggcatggcggacttggcactaaatcctatttctaaaaaaggtaacagctgactgcatatggcatattatgggtaattatttagccattacaatatgaatctgatggccgggcgcggtggctcacgcatgtaatcccagccccaagtatataacttttaaattaatgatattttaaattttttgaccaattccatagtttaactccttccaattgtgtacacactaaaacaatttcccaatgtaatttgtttttctaatacacataaccaagtctctaaaatttattaatatcactcctaaaggtcaaacacttaacttcttagtaaaaattt

SEQ ID NO: 46810 - DNA, 381 bp, Homo sapiens
  misc_feature 274, 275, 276, 277, 278, 300: n = A,T,C or G
ggccccccctcgagagtacttctagaattaattaaggcgggagggcagccagggttgaaaaactacagggtactaagcttcgtatctgcatgatgagatcagtcatacccgaaacctcagcatggcacaatatacccgggtaacaaacctgcctagacatttgtgtaaaatgagatgattgcaaggtagttttaaaagtcattccccttatgaaaatatggaatgttgtgtacattatttcatagactttgtgcttagttaaaggtcttaaccnnnnnaaaaaaaaaaaaaaaaaaaaangggggcccccccccggggggggccccaaatcccccttaagggggggtttttacccccccccctgggggggtttttaaaaaa

SEQ ID NO: 46811 - DNA, 398 bp, Homo sapiens
taccgggtccccccctcgtgtgtacttctagaattaattaaggcgggagttcgagaccagacttaccaacaaggagaaaaccgtctctataaaaatacaaaaaattagtcgggcatggtggcccatgcttgtaatccgagccacttgggaggctgcggcaggagaattgcttgaacccgggaggcagaggttgtggtgagccgagatcaagccattgcactccagcctgggcaaaaaagcgaaactccgtctcaaaaaaaaaaaaaaagcgtccaggcaagaggtagaaaagagactgctacaaaaagctatatataaaattcatcacagattttctgctgcactaataaatgaaaaaaaaagaatgttaattaaatataaagcggccgccaccgcgg

SEQ ID NO: 46812 - DNA, 656 bp, Homo sapiens
cgcaattaagccctgactaaagggaacaaaagctgggtaccgggccccccctcgagagtacttctagaattaattaaggcgggaagaaaccacagatctcttactacagtactttccaagtctagctgtacatcagaatcaccagatgagctttgaagaaccaatgatttactggccatgaaccagacttattaaatcatattcttggagggggtcagagctatcaatcattaattccagaagattcggccaggtttgacaacctgtcagtaccatggtttttatagtatgacagatgtaagtttgaaatctggttctgacacttactacctgtctgaattgcagcagtttatttagccacccttcatagaagtaaaggtaatacaggctgtaaagcttcattttattgaggtattttgagattaaatgaaataatatgccatgtaaatgcttgctacataacaatcactcagtaaatcattgtttatcgttttacatgattgtattatcattttctgacagatggtatttccttacgaaaaaagttagactaaatttaaattttaaatagaattctttaaaatagaacgtgaataaaagtttatttcatgacagtctcaaattaattatgctacatgtgcattatcagcatttta

SEQ ID NO: 46813 - DNA, 266 bp, Homo sapiens
aaactgggtaccgggtcccttcctcgtatatacttctagtaattaattaaggcgggggatactgtaattttggagcattcatctgcaaattaacttatttggcatataccaatgtaaaattggtatgaaacaacaggaaagtaaagcatattataatattttccttaaaaattatggaaaggggatataacaccttgaagtctgaaactgcgggcggtagtgtcaatgactattctgatttttaaaaatcttgacgggttcggggg

SEQ ID NO: 46814 - DNA, 360 bp, Homo sapiens
aagggaaacaaagctgggtaccgggccccccctcgagagtacttctagaattaattaaggcgggataagcaatataatagtgggtgaaaaatagaaaaattggcagtagaattgaacagtccttccactcccttatagaaatttagcatgtaggacattaatagttggtaacgggagaaagatggtcgcaggaaatagtaatataaagataacagtggtcttaggagtcttcggttttaattctgactcagccatgtaacttggagaaagttacctaatccaacctttagttttcttcatatgtgaaatcaggatagcaatatctcctagatgttggatgtacatacttgtgcatttctg

SEQ ID NO: 46815 - DNA, 287 bp, Homo sapiens
acttctagaattaattaaggcggggataaacattaaaatatttttagtactgcaatgctcttgctttggtcccaaacaaattcatctttcaaataattaaacatgccgtagttaggggacaccccaggtagtacatacacctagtcctctgaggaacagcattactacccattgccagtgatttctgtctggccttcagagctcactagtgaaatgttccccatcagatttttcatctcaattatattttgttaatactaaaataactttgctttcatgaaacaaat

SEQ ID NO: 46816 - DNA, 343 bp, Homo sapiens
  misc_feature 314: n = A,T,C or G
aaagctgggtaccgggccccccctcgagagtacttctagaattaattaaggcgggagatggaggttgcagtgagccaagatcacaccactgtactccagcctggacaacagaatgagactatgtctaaaacaaaacaaaacaaaacaaaaaaacctcagggataggacatgtttatagagaactataatacaaggtagaaagtggtgaattttccaagaaagttaccaacacaatgagataatggttcatgtttatggtctgagtatcaatttagaagaatatgtaattgaatgttttattttctcattctctnttcttggagttccatctactctcacattg

SEQ ID NO: 46817 - DNA, 556 bp, Homo sapiens
tcactaaagggaacaaaagctgggtaccgggccccccctcgagagtacttctagaattaattaaggcgggtgtggtggtgcacgcctgtagtcccagctactcgggaggctgaggcacgagaatcacttgaaccggggagggggaggttgcagtgagctgagatggcgccattgcactccagcttgggtgatagagcgagactccatttcaattaaaaagaaaagaaaagaaaagaaaaattctacaatgagacaataatggtctccagagggatctttgagaaagtccaaattcccagtcagtgttctagacagaaatggtcacattagcctaagtataacatgctataccaggccttccatgagttagttttaataagccctcataaggaaattccacatactgaaaagaccaatatatttccggctgggtgcggtggctcacgcctgtaatcccagcattttgagaggctgaggcgggtggatcacgaggtcaggagttcaagaccaacctggccaagatggtgaaaccccatctctactaaaaatacaaaaa

SEQ ID NO: 46818 - DNA, 255 bp, Homo sapiens
ggacagacgtaatacagattttacaaagaataattgcacgctcttggtatctttctgatgaagggaaagtgtgaggaagtagtcacatttattttgtttttgcagtttccagctcaggttaatgatagaacaaaatgaaaagtctaaaagcagtaaagcagaaggcatcccataaatcttcctctctaactaaataagagaaacccattctttccttctaacatcaccgaacctaaaaaaaaaaaaaaaaaaaaa

SEQ ID NO: 46819 - DNA, 615 bp, Homo sapiens
ataaagggaacaaaagctgggtaccgggccccccctcgagagtacttctagaattaattaaggcgggcaccctgcaatcccagccactcgagaggctgaggcaggagaaacacttgaatctaggaggcggaggccgcagtgagtcgaaatcgcaccactgcactccagcctgggcaacgagagcaagactccgtctcaaaaaaagtaaataaataaaaataaaataaaaaaataaataaatagaagtaaaaataaaaataatgcttaatggcaaacaattttaaaaattaagtcactaaattataagttattgtttggaaaacacaacacacctaatagttccagtaaaataaaataatttactttattctacacaattaatatacctttaaagtggccaatacagaaaaggggtttccaacgatacttgaaataatccagctacctatcttcagttccttggccttcagctggcagtgaaacagacacatcagctttaagactggcagccaaatagttaacgatctggaaacatacaattacgcaagtagagagttcctgttcaaacagactggatgaaagcccttccataaagaaccctttagggatgatgct

SEQ ID NO: 46820 - DNA, 382 bp, Homo sapiens
cgggcacgtcttttcacccctaaataaagggaacaaaagctgggtaccgggccccccctcgagagtacttctagaattaattaaggcgggggggaaatcaaaacaaaaacaagcaaacaaaaaaaaaagcaaaaccaaaccaaaaaataacccaaaaaaaccttgctagggttttttcctcaaaaataattaattaaataattaaatccgtccttacatacccccttacttacaaacatatagaaatccccaaagaggccaatagtgacaagagggtgaaaaaaaaaaaaaaaaaaaaaaaaagggcgcccccccccgggggggacccccaattcccccttaaggggggttttttacccccccctttgggggggtttttaaa

SEQ ID NO: 46821 - DNA, 611 bp, Homo sapiens
ctaaagggaacaaaagctgggtaccgggccccccctcgagagtacttctagaattaattaaggcgggagaaacacatatccctgaatgacttcccaaatctacctctgctgaggtctggctttaaatgtgggaattttattttctaataagcttgactaatgaaaaaatcaggtctgctttttatgcgaattctgtctcagggcgagaagagattcaaaacaacacctgggggaaaggacaggctggtcacggccatgctgccatccataccacttaccctgcgccgaggcgggttccagcccctcccagaaggccaggacttcaccccagcagcatcctcctctttcatagaaggtgttggccatctagaaggctccctgccaacactggcttcctcagatcgctccactgatactgttctgtgtctgcccctaagaggggcatacccttgtctgtttttgggtccatgaccctgaagcaatgactagttcagcaacagaaaggactggatgggcagatgactggatgaataaatcaagctacctatggggaaacagataatgtggaaaaacactgacttgtcacccttcagatttcaaatatagtcaac

SEQ ID NO: 46822 - DNA, 420 bp, Homo sapiens
tcactaaagggaacaaaagctgggtaccgggccccccctcgagagtacttctagaattaattaaggcgggagaatgaggataggcttctgtgagaggctggggctcagtggaggctgcaatgatgggctaagacagggagaatgaagcctagtatgtgtggagcatggtgtgtacccacagaagctaataacagcctagagaagaaagtggccttgctactggggaggatgaggcaggaggacccctgagctcaggtgtttgagaccaacctgggcaacatagtaagaccctgctaaagaaaagaaaaaagaaaaaaaaaaaatataaaaaaaaaaataggggggccccccccgggggggaccccaaattccccattgggggggtggttatcccccccctattgggggggtttttaaaaa

SEQ ID NO: 46823 - DNA, 633 bp, Homo sapiens
tacacccctcactaaagggaacaaaagctgggtaccgggccccccctcgagagtacttctagaattaattaaggcgggtacataacaaagccactgccaccgagtcacattcagcctctgtctctatttctttctctttgtttttaaaatagaaaggaaagaaatcctagctttcaaatcacctgtcttctttcagtcttttagaaagtttggaaaatttttagtatgtacttagttaaaaaaaaagtcattaaaataattttttaagctaaagttataaaattgaacatacttatattaaccttggaactgtctacctccagttgcgcctgtgtattctatcatgaggataggaaaagattttctaaatctaaataaaatacagcatgaactgcagaaggcagcattttgtagttgtaaaagctggaattttaaattaaatatgagttcaaatcttgcttaagtattttttctattttacatatctttcaattctcaaaacatcagttttatcatttgtaaaatgtaaagaataataccagtcagagttgctgtgattaacagatacagtatttgtaaataacctgacacacaataagcattagtaataaatgggcattattcatgattttg

SEQ ID NO: 46824 - DNA, 528 bp, Homo sapiens
  misc_feature 416, 417, 418, 419, 420, 422, 423, 424, 425, 427, 428, 447,448: n = A,T,C or G
ctggccgtcgttttacacccgggaacacagtgtgtacccttgctgctgggcgggcccttcctctagagaactaatagaattaattatggcgggaagggagaagctgcgataaggcctccagccaaggtgccttctcaggctgatcacttttaagaaaataagacttatggtggctgaggatgtgaaaatggattccttttaactcctcttgaaatgtcttatggtaatcgcgacagtacaaatattccagcctgaagactgctgttctatcaagaattagattactctatttctagagttgacagctattggaagaactccttaactagccataaacctgggaatcctgcactgttcttctacttagggtcagtgcagtcaatgtgaatccagagattgtttgctttctctcaccnnnnngnnnnannaaaaaaaaaaaaaaaaaannccccccccccccccggggggccccccccccccccaaaaaaggggtttttttccccccccctttgggctttttttttcccc

SEQ ID NO: 46825 - DNA, 483 bp, Homo sapiens
  misc_feature 82: n = A,T,C or G
cgcaattaaccctcactaaagggaacaaaagctgggtaccgggccccccctcgagagtacttctagaattaattaaggcggnggttataattgactgtaataacttgtaggtatcggatactatttaaagtttcatagatatagaaatctatgcctttggccaaagtagaaatgtgtgtccatctccaataatacttttcttaatatttcttcatttgacaaatcactttgctgcaagccttttgtgctattaagtacagctgtatttttttctttatttttcattctgttagttccaagtgttatttaactttacaggaggagaaaaggagtgcataaaagtcatagtacattttttagagcatatctcaaaagatcgaagttctcctttgctaattacccagctattttattcaaataatcaatttagaataattgtaagtattaataaaacctaaaaccatatgcttctaggacaaacaa

SEQ ID NO: 46826 - DNA, 395 bp, Homo sapiens
aagggtaacacagctgggtgccgggccccccctcgagagtacttctagaattaattaaggcggggggggaggtgacagagagaggcagatctgagtgaggggtggctagagttgggctttgtcctgcagacagcagtgagccaacagaatttttaggaagagaagagatgtgattggattttcggttttatagactagtggtatctcaaaaagttaaaggtaagaaatgtattagatggtcaaggtactgtgtttaaggatagatttaaaagaatcttcatgatcttaaaagaatcaaggggacagtgtcagaaaatacagcattgagtagaccacaggtattatttagtgtggcatttcttatgttcttttagtaatgacaaaaaaaaaaaaaa

SEQ ID NO: 46827 - DNA, 502 bp, Homo sapiens
gcgcaattaaccctcactaaagggaacaaaagctgggtaccgggccccccctcgagagtacttctagaattaattaaggggggggagagcattaggacaaatacctgatgcatatagggcttaaaacctagatgacaggttgataggtgcagcaaactaccatgacacatatatacctaggtaacagaccttcatgttctgctcatgtatcgcagaacttaaagtaaaataaaaaaaaaaaagaataaaaagagctacaaaaatgtagcaacaacaaatctcaaacatggacactcattattaatatatctgaataacctaacaacttctgtataattaccatataatttttgagcacagaattcccctaagtataataattcagatactgtgcatgttcctaaagaccaaaacacctggaactacgaacataaagcagttgcttgaacagtggtgccatgtacttctgtaggacaatccaaaaaatttggttcctagccat

SEQ ID NO: 46828 - DNA, 547 bp, Homo sapiens
gggaacaaaagctgggtaccgggccccccctcgagagtacttctagaattaattagggcgggaggaacttttcacaagtcgataaaaaccaaaaaaagctgggtcgtacataggaaaaattactaaagctcgaaacagatataggtatcatattctgcatatacaagtatattttcattgctgtcctagattagtggctgtcaacactctctgcacatttgaatcacttggggagcttttaaaaacaatactgatggctggctctatttccagcagatttgattcgataggtctggggtacatgggaccgaggtatcagtattggagacctctcttcaagtgaatctatttgcagtcagaagtgaaaggcactcccctagagctttgttagctttgaaattgccttgttagagccattacagaatcctgttcactgtcaaaaattcatatattacagtgaataaaaatataagcatttatgtatgcattatacgtaaataccactttctataatattttacacaacccttcttttccttgtaattaa

SEQ ID NO: 46829 - DNA, 475 bp, Homo sapiens
accctcactaaagggaacaaaagctgggtaccgggccccccctcgagagtacttctagaattaattaaaattaaataaattcccaaagtgcaaaaattgaagtggtaaatgagaaccagagctgtaaggggaagcatacttcaactgtcctgaggacatttttagaccttggtggggctttcgtttaaaatggcctaacagagatggatgataggttgtttaatgcatacagtttaggatttcttagccccctgtataaagccaggatcctgcaaggatcataacctcagtgaaagcatagatgagaaaataaaacctctccactgacaaaaggagaaaataaggaagcttgtgtttcttggcttgggttcctgggaacaggggagggatgtgtgtgcatgtgtaggatgcctctcctgagaatttttaatcaagtgcctcctctcaagcaggtttcagtttttaatctgtatta

SEQ ID NO: 46830 - DNA, 380 bp, Homo sapiens
gtgcgtttttcaccccggaaaaagggtaacacagctgggtgccgggccctctcctcgagatacttctaaaattaattaaggcgggtgaggagttgatttaggactgtagggacaaagtaagcacagggaacaggtaagagggccaactaagattccaagataagaccttcaatgtgcaaaagatatcaacacagcatttggctgagtaaacagtagtgataggagaaccacgtgaagtgagaaaggttattctgggtgatataaaaaaaaaggataaagtctagaagaagaaaaagaatggaagaatatagttcttcctcatctattctctctatgagggtagcaaaagatgaaatgaaaaggtattcggagctactgtc

SEQ ID NO: 46831 - DNA, 322 bp, Homo sapiens
  misc_feature 62, 75: n = A,T,C or G
gcgtgcgtcttttcaatcctgcacataaagggtacaaagctgggtgccgggccccccctcgngggtacttctagnattaattaaggcggggtaggatgaaacaatttggagaagatagaagtttgaagtggaaaactggaagacagaagtacgggaaggcgaagaaaagaatagagaagatagagaaattagaagataaaaacatacttttagaagaaaaaagataaatttaaacctgaaaaaaaaaaaaaaaaaaaaaaaaaagggggcccccccccgggggggcccccaattcccccttatggggggtgtttttcccccc

SEQ ID NO: 46832 - DNA, 486 bp, Homo sapiens
ggccctccctagagagtactaatagaattaattaaggcgggggtgaggaagggaggtgtcatatgatataaacattgtaaaacataatagcagaaatgtctatttatatgttgctctattttgtatatagtgctagggaatcatataattccaaaaattatgccatgtttttacaaaagtgaggtcctaaatattcacaaaagaatgactagactataactcaatgattagagtcaatggaatacaatgcattcttgactgtttctagaaatttcaagactcgcgagaaaaaaaaaaagtgcggggaaattatcgttcccaaaggatcacggggagttatgagccttgggcatgccctctttaacagccccttacaaatccagttaaaaatagtaactgtcgagagtgatacctcgccctatttatcatctaattgacctggtgatgggtaattctgatattcactaaacacttattctttggaaa

SEQ ID NO: 46833 - DNA, 426 bp, Homo sapiens
  misc_feature 395: n = A,T,C or G
ctaagggaacaaagctgggtaccgggccccccctcgagagtcttctagaattaattaaggcgggaagatcgctggatcccatgaggttgaggccatcttgggcaacataggctccatctctttaaaaacacactcgaaacaaaacaaaaaccggataggtttcaaaggcttttgaagaggccgatcacagaatctcatgcctgtaatcccagcactttgggaggccgaggaggacggatcacctgaggtcaagagttcaagaccagcgctggccaacatagtgaaaccccatgtctactaaagatacaaaaaaatagtcgggcgtggtggcacgtgcctgtgatcccagctactcgggaggctgaggcaggagaattgcttgaacccaggaggcngagattgcagtgagctgagatcgcaccactg

SEQ ID NO: 46834 - DNA, 499 bp, Homo sapiens
  misc_feature 385: n = A,T,C or G
cgcggcccttcctcgagagtacttctagaattaattgaggcgggccgaggtaaggagattgagaccatcctggctaacacggtgaaactccgtctctactaaaaatacaaaaacaaaattagccgggtgtggttgcgggtgcctgtggtcccaactactgaggctgaggcgggaaaatggtatgagcccaggaggcggatcttgcggtgagccgagatcgtgccaccgcactccagcctgggtgacagatcaagactccatcccaaaaaaatatttagaaagcacaaaataaccacgggcccgccccccgggggggtactaatttccccccaatggtgaaagatctgccccgccctgagagggccaatgttctttcccacacttnttaaatgccttcctcttcctgaaccccagaagaaaagggcacctgagcaggaaatctcaggtgacttattttgccagtgcctactctactgaagaactaggttttcattcttga

SEQ ID NO: 46835 - DNA, 500 bp, Homo sapiens; identical to SEQ ID NO: 46133

SEQ ID NO: 46836 - DNA, 352 bp, Homo sapiens
  misc_feature 333: n = A,T,C or G
acaaaagctgggtaccgggccccccctcgagagtacttctagaattaattaagggggaaaggtttggccaaatcgattgcttttggttatggtgatgaaaaaataaatggaatctgatgttttatgttgagaatgtgtaaaatgctagttgattttatgtcttagaatgctcatattcatatagattcactgcgaatagtgcttaacattggatttcggattgtaatattaaaccctgcagttatgcactaacgagtttaaattttaaaaaagtaaccattttcaaatattcttggcaagttgtgcattacttgatgtttgaatacatcttanaaatgaaaactagtgaagc

SEQ ID NO: 46837 - DNA, 517 bp, Homo sapiens
  misc_feature 371: n = A,T,C or G
cgcgcaattaaccctcactaaagggaacaaaagctgggtaccgggccccccctcgagagtacttctagaattaattaaggggggaaatttaaccattgaatttcttctttaaaaattcagataaaattttaagaactagaaatattactatgattcttataattctacctaagctgtcagttataaacagtttaagatacacattacctcttagtcaaaccatcatcttcatcttagggggaatgttcacctatccaaacgccccacaaccctctgcagtcccattcctgctcctcttcacaccatggcgttcaccagtcatttctaaacgcagcagccagcttttccctcatcctcattgctcttgactnttcctgcagcatctgatgctgttcatcatcgtcttttcgagatatttatgtatgctggcttcagggatataaatttattttattttatttttttgagacagagtctctctctgttgcccaggctggagtgcagtagcccgatcttg

SEQ ID NO: 46838 - DNA, 613 bp, Homo sapiens
acataaagggaacaaaagctgggtaccgggccccccctcgagagtacttctagaattaattaaggcgggcggatcatttgaggtcaggagttcaagaccagcctggctaacatggatataacaaaattttctatttcaaaagttcagtcgtgggcacaagtagattttgccttacagtcttgatagtgaaggtgcatactatttttaaagctgtattccttagatactaccatattatctaatgtttctaataatggaattagcaaaaaatgactacatcatccaaatttgactttgtactaacatacttggcgtactccatatccctgaaggttaacaagagataaatttggcctagactggtcttttcctgaattcatcacttaaaaaaggaaaaaaaagaatggggaggaaaagccacgttttacttttataatttttattccatcattaaaagtacaacttgctttatgatctgaagaaataccatctaagtctttctattaggaacaaaagtgagcctttcagggaaagataataaaataaaaaaggctaaaacatactgattctaagatttaagagatatttggagttgggaatattattcttatat

SEQ ID NO: 46839 - DNA, 369 bp, Homo sapiens
tgggtaccgggccccccctcgagagtacttctagaattaattaaggcggggtagagatgagtttgaggtactgccttctatagtttgtgcccaatcccctttggcaccttatctaatacttggcgatcgtctcccttcctattttatgttaatatagtctgtcagttttgtttgtttggtgctgacaaatacaaaatgtgccattaaaaataatttatttttttcacattttgaaagtgatacatgattgtgcataaaatttagaaaattcagaaaatcacaaaaaaaaaaaaaaaaaaaaaaaaaaagggggggcccccccggggggggatcccaatttccccttttgggggggttttttaccccccc

SEQ ID NO: 46840 - DNA, 267 bp, Homo sapiens
attaattaaggcgggaagacagtgaagaattatggggctaacatacaagagaaaaaggaaacccagagatgtgagcctgacatatgaggctacttttcccctagatatatcttctagttcaagatagtagaaaggctgataagttttcaacagtcttaaaagactaagagggcttcctggggaggggtgccctggaaaacctcccacattttaggttaggatctttaaggactgactacatcatgggagaaagggtgaactggaaat

SEQ ID NO: 46841 - DNA, 463 bp, Homo sapiens
aaccctcactaaagggaacaaaagctgggtaccgggccccccctcgagagtacttctagaattaattaaggcggggagatgccagatgaggctaccgatgaccataatatctcttgctccatacctttcagtcaagctccctgactctcaccacgccttctaataaagaaagtgagtcctcgctgataataaacaagctaaatctgtatcgtgcgaaataaacatattcacatattctcaaaaaaaattactacttgttggatgcctattgtgcattaaacattaggctagacactttattgcggcataatcatttaattgtcataataatccctttggaaaggtgtggtggttcagtttttgcagatgggggtgctgattgatattcagagagttaaataatttacttgaagtcagcagagtgtattagaacctattcattactttgggaccagagaggcag

SEQ ID NO: 46842 - DNA, 337 bp, Homo sapiens
  misc_feature 294, 295, 309, 310, 311: n = A,T,C or G
gctgggtgccgggccccccctcgagagtacttctagaattaattaaggcgggcgaatagacttaaaatacagaagctggagaccacctctacacaaacacggtagaatgcctgtattcttcttcttaatacaaaaattagctgggcgtgattgcacacacctgtaatcccagctactcgggaggctaaggcaggagaatccctggaacccatgaggtagaggttgcagtgagctgagatcacgccactgcactccagcctgggcaacagagcaacactcagtctcaaaaaaggnnaaaaaaaaaaaaannngggcggccccccccccgggggggccc

SEQ ID NO: 46843 - DNA, 500 bp, Homo sapiens
  misc_feature 377: n = A,T,C or G
gcgcgcaattaaccctcactaaagggaacaaaagctgggtaccgggccccccctcgagagtacttctagaattaattaaggcgggtatgagaaaatcttatgcaaacatatagaaatttagactgttcacatgtatgagtaatttttaaattaaaaagtacactatcattctattaccataattttttaaatgttttattatgctggcatgagtcactacacccagccctatcaccataaattttaacagtaaataaatattgaaaagaaagaaaggttaaaactagcctttaagtaaacgtgtcagaaatatatctaagaaaacaggctatttgatatcatgccactggattacaacccactgagaaacaggtggnggcatcataaattcaaaatgccaaaaagtcactataaaacactttttatataaatcatttaactattaagtaaacaattgcttatttaaaaatccagatgaaggcggtgcacaatggctcaca

SEQ ID NO: 46844 - DNA, 290 bp, Homo sapiens
cgtcgttttccaccccggaaaaagggtaaccagctgggtgccgggccccccctcgagagtacttctagaattaattaaggggggcgaaaatcaatcttgttcctttacagttgtacattattgaacagagtgatattcgttcaactcgggattttaaaaaagcaagaactcctttcttcataaaatcagaatattaagaagggccataaatagaattaaattaattcatttgacaaattttaccaagtctctattggctaataagtctttttctagggactttgaatacc

SEQ ID NO: 46845 - DNA, 436 bp, Homo sapiens
tcactaaagggaacaaaagctgggtaccgggccccccctcgagagtacttctagaattaattaaggcggggcggagtgcatatgtatttccatgcatcacacataattcaaaagctctagtaataacccccagacatatccagcagaaagaaacccgttaccatttgtgtcttggaaaggacagctacttaccatactagtcagcccctctgtacctcaacttctttcattattaacaatggctctgacctcctctaggaactggtgaaaattaagtaaaatttttctgaaattgtcaaattaaggtattatttgttggctggacacagtggctcacgcctgtaatcccagcactttgggaggctgaggtgggtggatacgttgagagcccaggagtccaagaccagcaggcaacatggcgaaaccccatctctac

SEQ ID NO: 46846 - DNA, 449 bp, Homo sapiens
aagggaacaaaagctgggtaccgggccccccctcgagagtacttctagaattaattaaggcggggaggaaaattacttcctattctaaatcactactaattagtgacagctagttagtagccatagacctgtaactgaagtttatgcaggtcaaagaaattttattcttttttaggcctttttattgagataaaaatttataattcattcaggtgttcaattcactggtttttagtatattcacaaggttgtgcaaccatcatcactatctaattccaaaacatttttatcaccccaaaaagaaaccctgtacccattagcagtcactccttatccctctcgttccccaggccctggcaactactaatctgctttctgtctctacagatttgtcttttctggttatttcatatagatggaattctatagtctgcagccttttgtgtctc

SEQ ID NO: 46847 - DNA, 273 bp, Homo sapiens
ccctcactaaagggaacaaaagctgggtaccgggccccccctcgagagtacttctagaattaattaaggcagggaaaattgaaggtgatgtgtttaataggaatgtaatgcaaatacttctgttttcaaagagagaaattattgcttatgaacattactggagcctgggctttttgtttttttacttaagtaaataggtaaggaaaaaatttcccattgattgggacccttactcaaatttcccagtggttacttctatttggtattattctt

SEQ ID NO: 46848 - DNA, 378 bp, Homo sapiens
ccccccctcgagagtacttctagaattaattaaggcgggtagctatcgttaagtggggacaaaaacgttcttcagttatagaaaatgcaaatcataccatttcatcatccttcaaataagaagaccctataatacataacaatttcactaatcaacaaagatttctccattacattacactagatccctgtgaagcattagatacactgctgctttaaacactggccttcctgcccaggcacagtggctcatggctataatcccagcactttgggaggctgagataggtggatcacctgagctcaggagttagagaccagcctgaccaacatggagaaaccccgtctctactacaaatacaaaattagctgggtgtgg

SEQ ID NO: 46849 - DNA, 461 bp, Homo sapiens
ggaacaaaagctgggtaccgggccccccctcgagagtacttctagaattaattaaggcgggggagaggggttgcaacatcttgaaaaatcaagcttcatcacctacttcggattcctagctctacccatttggctgtgatctggggtgacttttgtcacttgtcctacccctccttggtggggggggggtggatatcttgaaccaaggaagtgtaagttccaatgaggacttatttcgcctccgatctataatttcgcctacactatccatactcctggactgatgttatactttgaaacctgcactggccaagtgcaatggctcacacctttaatccctccattttgggaggccacggcgggcggatcacgaggccaacatttctacaccagtctgaccaatttggtgaaacaacgcctctactaaatataacaaaattaaccgggcggggtggcacatg

SEQ ID NO: 46850 - DNA, 463 bp, Homo sapiens
ctaaagggaacaaaagctgggtaccgggccccccctcgagagtacttctagaattaattaaggcgggagaggattgagaaaagaaggaaagtagagcaagtgcaaagagtcagaatttccatgtaagcggaaagatgaaatattacaaatgtaggcctgttgactaaaatttgatgatgtagatgaaaggaaaaaattaagagcaaatatgctgacatttacatttctcatagtaaggaaataccctttttaagccgatggaagattacttattctttcatagttaaaaagataagcagttctataaaattatagagcttccaaaatattaaagatctgtatggataaaactaagaacaatatatgtaatggaaccttaaaaaatctgtaaagatcagtaagcataacataaaatatgacatatctaagaccagtcatgctgtcataaaaaataaatgtagaa

SEQ ID NO: 46851 - DNA, 474 bp, Homo sapiens
  misc_feature 401: n = A,T,C or G
aaagggaacaaaagctgggtaccgggccccccctcgagagtacttctagaattaattaaggcggggtcaaaatcataatcttacatagatcacttcaaaatatttaaaggcatacattcttacatttaaagaaaaaaaggaacacactcttgacttaaagattaaaaaacagacacaagtctctacaaacctggaggagctaaggctgacttggtctgataagagattaggctgttttagatgtggtaacccctggctaactaagatcactgttttatcttttaaaaaaaatctcagttcatagttgtccgtcctttttattctccaataaagtgaaaaagtgggcatttgtttgttaacacatttggtcacagaaaaaaaaaaaaaaaaaaaaaaaaaancggggcccccccccgggggggaccccaaatcccccctaagggggggtttttacccccccctcatgggcggttt

SEQ ID NO: 46852 - DNA, 502 bp, Homo sapiens
cgcaattaaccctcactaaagggaacaaaagctgggtaccgggccccccctcgagagtacttctagaattaattaaggcgggggaactgactttactaaggtaagtaaaacttttactcaatttttgtatgatcagctgggatagattttatttccggaccaagactaagtggctaaaatttaaaatatgtgcattttgtaggtgggaacatattttagaaatttagacaattaaaaagatagagatattctacactttggttatggtgctttcattaattcgacaaatgtttagtgagcaccaaatgtctttccagtgccaagaatttaataatgagttacatgtttctgcacttcaaagaactcctagggggagagttagtcatatacgtaactataaaacacaaaatggaatgagtactatagcgaaatccatataaattgtttatctagttgacttaatttatatgcggagtaatttggtacctttgtgtacttgtta

SEQ ID NO: 46853 - DNA, 491 bp, Homo sapiens
ctggccgtcgttttacacacaggaaacagcgtatgaccatgattactggccgtccttttacacacaggaaacagatatgaccatgatgccgggacgtaggtttctgtcttgaataatgtctgagcgttacactgaaaacctatattaacttctgaaatgaaactatttttttctgtatcaatttaagcttttggtttaggtaagggatgtccaagggacacatataatgataacttctctgtttcactgccttttccatcccagcaagctcccaaatttcactttaaaaacctacaaaagtagtttaaaaaaattatagttagagccaggtgcagtggctcatgcctgtaatcccagcactttgggaggccgaggcaggcagatcacttcaggtcaggagttcctgaccagcctggccaacatggtaaaaccccatctctactacaaatataaaaattagccaggcatggtggtgggcacctgtaatccca

SEQ ID NO: 46854 - DNA, 546 bp, Homo sapiens
  misc_feature 462, 463, 464: n = A,T,C or G
ggaacaaaatgctgggtaccgggccccccctcgagagtacttctagaattaattaaggcgggagggtagcaggtaccacaggaagtctcacatctacaaactgcaggactagtatgttcacaggcaaacttggatatgggggaaataatctttataaggcttttaagcattgcatattttgccgaaaaagcatgtgatgcctttaaactggaaaacactgaattcccatgagctacaaaatatcggagagtttctacctttacatgatcagtgccacattatataggcagcattaacccaccgttctatgttctattctatattcaagactggggaaggaggcctggaagggctatgctttgatctactcttgtccacaaactcacagaatggcattttgatgtttattatttgtgctttcattcaactttggaattttacaaattaaacttctagtataannnaaaaaaaaaaaaaaaaaaaaaaagggggcccccccccgggggggacccccaatccccctattagggggttttttaacccccc

SEQ ID NO: 46855 - DNA, 442 bp, Homo sapiens
actgggccccccctcgagagtacttctagaattaattaaggcggggaaaagagaggctgcaaaagtaactgggacaaatggtaaagggcagttaataccaggctaagttacaggaagaacattttatattttatatgaaactgttgttgaagacattccatattatgctattcattattccttaatatgagtgactgcaataaatctcaaaacttactgttagggaaaaaaaatccccatcctagaggaatgccttttattctgcctttaatcagcaaggaaggactgtggaaactcattgtctttcccttcttgcccaggccaccaggaagcatgggcctaattagtgtctagttgcaataactgtcttatctctctggttcttggtaaaacatttcttcttttattccatttggttttcagccttcttgttttatttgtc

SEQ ID NO: 46856 - DNA, 425 bp, Homo sapiens
  misc_feature 318: n = A,T,C or G
accctgactaaagggaacaaaagctgggtgccgggccccccctcgagagtacttctagaattaattaaggcgggggagtagctaaatagtgttcaactgctctaaggtccttacattgttggagaagtggaaaaagtacgaacatacttcagaaatagtagtccacaatagttgagaataaatattatatcctctaggataactaaggtacttaaggtagtccacaatagtctagaataaatattctgtaggataactaaaagtactaaaaaggaattacaagtattttaataaaatgaaaaataaataattattccnaaaaaaaaaaaaaaaaaaaaaaaaaggggggccccccccggggggggcccccattcccccctttgggggggtttttaccccccccctttgggccgttttttaaaaaa

SEQ ID NO: 46857 - DNA, 499 bp, Homo sapiens
gatactggccgtcgttttacaccagggaacaagttttacccttgattctggccggtcttttaccatagagaaaaaaaaaaaaccttaaggcggggagttcggaccatcctggacaacgtaaagagactccgtctcaaaaacaaacaaataaaagattatttagtatttgcctttgtttctgtacctaaagactgctgggtttgtgactttagaaacgtacacaaataattgagagcctatccagtataaatttttaactttttattaccatttaatattataaagtaaatattcctcatagtcataaatttttcataatcatgttttgaattacatagtaatccactgaactaatcgtatttagtttactaacttaagctttctctattgtttaggctagaattctatagattatattatcactctgaaaaagaaaacacattacggaaaaaaaaaaaaaaaaaaaaaaaaaaaaaggcccccccccccggggggaacc

SEQ ID NO: 46858 - DNA, 598 bp, Homo sapiens
ccgggccccccctcgaaagtcttctagaattaattaacgcggggagcaatatggcaagatttcttaaaagttctcaaaatgggtcgtctaatcaaatttagtgtgatggggcaaattgtcttctgtttttttttttacagttttttttactgtaaaagttttaaaagtacaatgaaaacaatcaaaaaacagttcaagaaacttggctttgtataacaagaatgttaatgatttatcacttactgattctactctagtcaatgaaaatggaagggttttgtttaatttttatttgtttgttttttgagacaggctttccctctgtggcccatgctggagttcactggtacgatcatggttcactgcagcctcaacctccagaaatcaagtgatcctcccacctcactctcctgagtagctggaattacaggttcgtgccaccatgcctggctaattaaaaaaaaaaaaaaaagcggccgccaccgcggtggagctccaattcgccctatagtgagtcgtattacgcgcgctcactggccgtcgttttacaacgtcgtgactgggaaaaccctggcgttacccaacttaatcgccttgc

SEQ ID NO: 46859 - DNA, 559 bp, Homo sapiens
aaagggaacaaaagctgggtaccgggccccccctcgagagtacttctagaattaattaaggcggggaagtgataagtggtaaaatgagacatttcctaggggtagaggtacaaagctaaaaaagaaggaaacccagactgaattttacgtttcttatttccaactcctctcgatgtctacctggaaacctttccaatctttaagcattcaactgcagtgaaatatcctctggggaccttctgggacatcccaagacagagttcatcacccttttttaatagtgtcctgtacttttcttatctttctattgttgcttttaaaacatattttcttgcaattaccttcacatgcactgtgaacaccgacaatttaatgtgtttttgtgcatgtgtatgcatgcacgctgaataagttccttgcatgctaaaaaatgtttcaacctacaaaataaatagtaatgtcattgcctggttcgtgaaaatttggtgataatagatttcacagaaccaggagaaacttataaagatcaagctccagacatattactatggaggccaaa

SEQ ID NO: 46860 - DNA, 448 bp, Homo sapiens
ccccccctcgagagtacttgtagaattaattaaggcgggaggacaaatggtcagccattgagcaggagacctatctcagtaataggagaaggaagacagtgccaggaccgggggatgccaggatagatggtgagcagctgggctctgaatatactttgaaagtacagatgaacacataaccacatctcttcacgtgggtgtttcaatgtctacttatttatatcaattctgaattcctcctaaagccatgataacagaaggcattatacttcatattccctgaaaaaaaatagacaattaaaacagcattcataatctccctgacctttataataaaaacaaccttctataatccttaagactttgagtttttctattactaacaacaaataaagaaaaaaaaaaaaaaaaggcggccgccaccgcggtggagctccaatttgcccta

SEQ ID NO: 46861 - DNA, 509 bp, Homo sapiens
agggaacaaaagctgggtaccgggccccccctcgagagtacttctagaattaattaaggcgggtttacatacagatggcaaacttcatttcctttttctcttaatcaacaaggtcatcccaagatcaggcttccttcagtttctgtggtaagtagtgatggacacttacggagttttcagagacttatgcattgggtaacaaggcactgcaagaaaccccagatagcacagcatcatctcacatttacaccacatcacatcaacatcgatgctaggaggtctaaagctgatgccaccttcagagctgcaagtatccaaaagactccactcatgacaccagctcactcctgagtcacatcagcccctttcagagtcacagccccagaactaaggctatccatatgggttgattatacaatccaaaaagcagctccaaatattagaaacacttatttgtctggcagacacattccctaatttaaagcctcttatactgtgcttaaaaatat

SEQ ID NO: 46862 - DNA, 498 bp, Homo sapiens
agcgcgcaattaaccctcactcaaggaaccctactctagggaacaaaagctgggtaccgggccccccctcgagagtacttctagaattaattaaggcgggaaggaatagtaacaaattaaatactgcactaatgggttagttacagacatgaatttttccaaatataatctcacaggtctaatttaatccctctgcacgagacaagtgcctctgtctacaacacctgtaatgtctgtaccacgtcatgcagtcacattggaattactgcatgcactcttcactaaagcttaatgtacctgaattccaaatgaactgtatgactaatctggggaaaaaccatacacacagaatacatcaagttttctttcaaaagaaagtccagccataattccattatatccatggcaactatcacctgttaatgctaatgttagtgtgtaaaaatgtattcatcatatacagagagattatcaagtactggtcaataaagtgtacag

SEQ ID NO: 46863 - DNA, 495 bp, Homo sapiens
  misc_feature 408, 409, 410, 411: n = A,T,C or G
aaaactgggtaccgggccccccctcgagagtacttctagaattaattaaggcggggacagtggggtagatctttaattttcataatcaatgaaacaaaataatatgggtgaaaactggggaaaaagtctttatttgagtgctagccataattatacagaagattttggcagtatgctagtttgctagtttaacaataaatgataatcacttttattcaaaaaaaaatagatgttcttttatgcttttgaatgactgtgtcacttttttggtgacaatcaatgcaaaagactacatttatgtatcagcgacacttcaaaaaataaatctgtagctatggtttccaaagtattatggggtttgttttctttgaaataatgaacaaaaagaacagcacacacacacactgnnnnaaaaaaaaaaaaaaaaaaaaaaaaaagcgcccccccccgggggggaccccaatcccccctttaaggaggttttttccccccccc

SEQ ID NO: 46864 - DNA, 602 bp, Homo sapiens
cgcgcaattaactcctcactaaagggaacaaaagctgggtaccgggccccccctcgagagtacttctagaattaattaaggcgggggaatcacgtgattgtagcatacactggactgaacagtgtgaaattatctacgctctgcatcacggaagaattagaaattatggcagcaggtgtaagatagcgtataaccaagagggattggagttaggaagtcctgtgaaatttgcctagatcaggtcgctagcactggaatcaaacaggagcacatgcagaagaaaaatcagcataattttcagtaaggaaaaacaagcagttcgcatgcctaggagacttctagttaaatatgtcatagtttctccaaatttaagcaaatcataagccaacagtaaagtaaaacgtaaacttacagtaaagtaaaacatgtatattggatattatggatatccaattatggataacattttagaatacattttaatgcaaaaaataaatatttgatcaaataagggaaaacttcattactactaactgcttacatggagaaaataggatgacttttctatggataacattttaattatggataactttttaaaa

SEQ ID NO: 46865 - DNA, 436 bp, Homo sapiens
acaaaagctgggttccgggcccccctacgcgagtatctatagcattaattaaggtgggcaagcctgaatagggcttggaaggtcctgtatctgcccccttttctttgctttatgcttctcttccatgggctgttcctaagttgtatcttttatatagtcaaaaagagttttgatataggttgtatgagtgttataagataaataaaagaaaaaaaaaataaaaaaaaaaaaaaaaaaaagcggccgccaccgcggtggagctccaattcgccctatagtgagtcgtattacgcgcgctcactgtccgtcgtttatacaactgtcggactgggaaaaccctgtcgttacccaccttaatcgccttgcagcacattcccctttcgccagctggcgtattagcgaagaggcccgtaccgatcgcccttccaaacagttg

SEQ ID NO: 46866 - DNA, 458 bp, Homo sapiens
tgggtgccgggccccccctcgagagtacttctagaattaattaatttaaagtgataatttaaattcatttatttcctgagtacctacactgtactaggcaacattttagtcactgaaaatgaaaatatactgttaacaaaacagacttcagactaaattctatttctaaaaattttaacagtttactgcatatggcatattatggctaattatttagccattaaaatatgaatctgaaggccgggcgcggtggctcacgcctgtaatcccagcactttgggaggccaaggcaggcagatcacgaggtcagcaaatcgagaccatcctggcaaatacggtgaaaccccgtctctactaaaaaatacaaaaaattagccgggtgtggtggcgggcgcctgtggtcccagctactcaggaggctgaggcagaagaacggcgtgaacacgggaggcggagct

SEQ ID NO: 46867 - DNA, 441 bp, Homo sapiens
  misc_feature 422: n = A,T,C or G
taaagggaacaaaagctgggtaccgggccccccctcgagagtacttctagaattaattaaggcgggtggatgaccaaaggccaggaatttgaggctagtctggccaacattgaaaccccatctttattaaaaatacaaaaactatcccggtgtggtggcagacttatatctagccaatttttattaatttgtcaaggccaggttcaaacatcactttctctgacggagctttcctctctttcaatctatactgctgaacttgtctttcaaactaaattgagggcagctgtcccactccaatcaattctatcactggcttaaatctctgctttcaccaaaagctttaaaaaataaaaataggccgggcgcggtggcttggcctgtaaccccagcactttgggaggccgaggcgggcagatcanctgaagtcaggagtttgag

SEQ ID NO: 46868 - DNA, 434 bp, Homo sapiens
ctggccgtcgttttacacccgggaataaggggtacacatgctgggtgccgggccccccctcgagagtacttctagaattaattaaggcggggggaggggagggaaggaacaggctgagctggtgataagcacctcacatccagtggagaacccacatggcatgagggctgtcataaatctagaaatggccaattatttttgccaattgaaaaatcagttatcattcccaacagagctatgaaaacagtttttaaaaaatcgtattaggggccgggcacagtggctcatgtttgtaatcccagcactttgcaaggccaaggcgggcggatcacctgaggttaggagttcgagaccagcctggccaatgtggtgaaaccccgcctctactaaaaatacaaaaattacctgggcatgatggcaggcacctgtaatcc

SEQ ID NO: 46869 - DNA, 472 bp, Homo sapiens
gaacaaaagctgggtaccgggccccccctcgagagtacttctagaattaattaaggcgggaaatcaaagtattctgagtagtttataattgaaatacaaagtaattcacaatataagtaacatattagatgtcaattatatcatgttgacatgtaagagtcaaccatatacaaaacttttacttgtaaaaaacactttaatatttcatatctttttatttaaccaaattttgtagaaatgtttacattttatataatcctatttcttacatggttgagaaacaaaaaatgatactggttatggataaaacactagattggcaattggttagaatgataaattttcatttcactagattttcatttcactagattttcattatttatgtccatgattatttatctttttcatgcagttttaagcacttattgcaggtcaagtgtgatgaaagatactgaataaacaaaaaaaa

SEQ ID NO: 46870 - DNA, 342 bp, Homo sapiens
cgcgcaattaaccctcactcaagggaacaaaagctgggtaccgggccccccctcgagagtacttctagaattaattaaggcggggttgactaaatctattagttagtgattaacaatttaactagggatgaggagctgatagtaaactctattcttaactagcctgtaaactcttaggagcattaactcaaatccaggagattctctttgcaaaataggattgtggtggctatagatgctaatagcaaacctaaagaagagtgatgattattccattgtgtagtagccaaacgaaagtacccagctagttatgggaaatatataattgaaaagcccattatt

SEQ ID NO: 46871 - DNA, 84 bp, Homo sapiens
  misc_feature 31, 60, 79: n = A,T,C or G
acaaaagctgggtaccgggccccccctcganagtacttctagaattaattaaggcggggnaaaattaaaaacattaagnaaact

SEQ ID NO: 46872 - DNA, 514 bp, Homo sapiens
  misc_feature 447, 448, 468: n = A,T,C or G
ctaaagggaacaaaagctgggtaccgggccccccctcgagagtacttctagaattaattaagggggaatatataaaaaccctccaaggacccatagatttggaaactgaaactcatattttttcaaagaatttacagttcaaagaaaaaaatcacaacatagatttataagatatttagaactaaacaaaagtaaaaataccatataataattcacaggacaccaacacagaatttagaaggaaatgtcttatatgcatatactgaaaaacaaaaacaaagctataattccagcactttgggaggccgaagcaggagggtcagttgaggccaagagtttgagaccagcctaggcaacacagtgagaccctgtctctacaacaaaacaaaacaacaacaaaaaaactcacaaagataatgataatgagctaagcgatcaactccaaannaaaaaaaaaaaaaaaaaaanaaagggggccccccccggggggggcccccattcccccttatggggg

SEQ ID NO: 46873 - DNA, 298 bp, Homo sapiens
aagggaacaaagctgggtaccgggccccccctcgaaatacttctagaaattaattaaggcgggaggtttgtgtatttcttcctaacgtgtaaaaaaaaactaaaaactggcctttcctttttcctaaaaattttaacaaatatttttaaaaatgtatgtaaattgtgtaagttcatggaatttgatactaataatcaattccttaatattttcactaaacaatgcataagatagttttaaaaaagatattttaatgggaagggagacttttccaactagggtattcttttccgaaaaa

SEQ ID NO: 46874 - DNA, 568 bp, Homo sapiens; identical to SEQ ID NO: 46693

SEQ ID NO: 46875 - DNA, 495 bp, Homo sapiens
ataaagggaacaaaagctgggtaccgggccccccctcgagagtacttctagaattaattaaaaaaaaacttaattcaggaatattctagctcacttggcctaggttccagtaacctcagtccgggaatcccttctgcaacataccaccttaaagtggaatattcagctgtatcatggtggcagtagttctcaaagaagtacgttgttagaatcagggtaacactttaaagaaaatacaggccaggcacagtggctcacacctgtaaccccagcacttagggaggccaaggccggtggatcacttgaggcagcagttcaagaccagcctggccaacatggcaaaaccccatcactactgaaaagacaaaaaatagccaggtgaggtggcacacatctgtaatcccagctactcgggaggcatgagaattacttgaacccaggaagcatagggtgcaatgagctaagatcatgacactgcactccagactggacaac

SEQ ID NO: 46876 - DNA, 311 bp, Homo sapiens
ggccgtcgtctttacatccggaaaaagggaacactgctgggttccgggccccccctcgagatacttctagaattaattaatgcggtatgttactatgaagactactttcgtattaataaaataatgtatcttccaatgtactatagttgtgttataacaggtatcaaaagccacaagtcaacgaagatcgcttctcttgaaatcctaactatttaagaggctcaacggaaaaaatcacttgcgtctcccgacagggagggacaatacgctctcatggtgtgattgtactacagcctgcgcaatagagtgag

SEQ ID NO: 46877 - DNA, 403 bp, Homo sapiens
accctcactaaagggaacaaaagctgggtaccgggccccccctcgagagtacttctagaattaattaaggcgggagaatcgcctgaacctgagaggtggaggctgcagtaagccgagatcataccactgcacttcactgtacttcatcctgggcaacaaagcaagactctgtctcaaaaaaaaaaaaaagcccatataaagcccatattggggaaaaatctatgcctaaaatatttttacagataagagatgggcaagcagaaacatcagaaacatcaaaaaccactagacgacaggactatttcaactttcctaaacatgtcatgttatttcaaacctttctttccacctgctcttgtctctgtatggggcttctcccttcctgcactgcactcctagtaaa

SEQ ID NO: 46878 - DNA, 459 bp, Homo sapiens
  misc_feature 357, 385: n = A,T,C or G
ctaagggaacaaagctgggtaccgggccccccctcgagagtacttctagaattaattaaggcgggctaaacagttcttacactctaagaaaatgacaaaccaaaatgttttattttccatggaaaggtagctggatatcactccactgaaagtatattgcctagcgttgcttatttggcttagcacttacaggattagaatttgtgagacagatcctcttaaagaggtataaatgttaggccaggtgcggtggctcacgcctgtaatcccaacgcttcgggaggctgaggtgggtggatcacgtgttcatgagatcgagaccatcctggctaacacagtgaaacctcatctctaatnaaaaaaaaaaaaaaaaaaaaaaaaaaangggcgcccccccccgggggggacccccattcccccttttaggaggttttttaccccccccccttggcccgtttt

SEQ ID NO: 46879 - DNA, 604 bp, Homo sapiens
ctggccgtcgttttcaacccgaaataaagggaacaaaagctgggtaccgggccccccctcgagagtacttctagaattaattaaggcggggaagaaacaaattgtgttttgcaaggactgcctatttcaatttattttcttgtgaaaatgcaatacgatgaaactttcatgttttaatttttttagagacagtgtcaacctggtctgaacctctgaggttcattgtgccttttgtgaaaagaataatatagtatgtggtgcactgttcatttttattggaaatcgtttttggttcttattttttagaaacagctctcgcacttttgcccatgctggagtacagtggtgcagtcatagctcactgcagcctcgaattgctggccctaagtgatcttcccaccttagtcttctgagtagctgggactacaggtgcatgtcaccatgcctggctagtttttaaattgtttttgtagagatgaggtctcactgtcttgcccaggctggcctcaaactcctggcctcaaccaatccccctgccctggcctcccaaaatgctaggattacaggtgtgaaccacagcatctggtccctgaaatcattttta

SEQ ID NO: 46880 - DNA, 544 bp, Homo sapiens; identical to SEQ ID NO: 46143

SEQ ID NO: 46881 - DNA, 506 bp, Homo sapiens
cgcgcaattaaccctcactaaagggaacaaaagctgggtaccgggccccccctcgagagtacttctagaattaattaaggcgggctggcagtgttctttttttaaatctggcaccgattacacatatgtgttcacttgaggagcatgccacatacttcacaaaagtttactttaaaagtaatacacatgttcacttcagaactttttttctttttttagatggagtctctgtcgccccggctagagtagtggcgccatctcggctcactgcaacctctgttccccaggttcaagcgattctcctgcctcagcctcctgagtagatgggactacaggtgagtgccacgacacccagctaatttttgtatttttaatagagatgtggcttcatcatgttggccaggctggtgttgaactcctcacctcaggtgatccacctgcctcagcctcccaaagtactgggattacacgcgtgagccactgctcctggccagaaattttttaaa

SEQ ID NO: 46882 - DNA, 549 bp, Homo sapiens
taaagggaacaaaagctgggtaccgggccccccctcgagagtacttctagaattaattaaggcgggtcataaaaaacaagcaaagccacattttcaaatttgttcctcagattcattttcacacatcatcaaatctaagtcttcagtgaatatatgagtgttataaatatagtcagcatctcagcctgcaaagaatacactatgagaattaattaccaaagcacttaaaattcatcaaaatcacaacaaagctgacaactattatttacttccatatcagatcagttgaagattaatgtgaaacaagataaatgtatcatctgttctgaactacctacacagtaatcatctctggctcagtataatttccaaatttcactctaacatactcataaatacttaatattacatatagcctgtattttatctgaaacttttatggtgctttaccataaaaataatcgctttcaattatattttccaagccattcaaatgccacactaagaaatatcaacaaccttattttagataccaacgaaagacaagta

SEQ ID NO: 46883 - DNA, 606 bp, Homo sapiens
  misc_feature 502, 515, 579: n = A,T,C or G
cactaagggaaacaaagctgggtaccgggccccccctcgagagtacttctagaattaattaaggcggggtggctcacgcctgtaatcccagcactttgggaggccaaggcgggtggatcacaaggtcaagagttcaagaccagcctggccaacatggtgaaagcccatctctactaagaatacaaaaattagccaggcgtggtggcgcgtgcctgtaatcccagttacttgggaggctgacacaggagaatcacttgaacccgggaggcggaggctgcagtgagtcgagattgcgccactgcactccagcctgggtgacagagcaagactccatctcgggggtggcgggaacaataaaaaccaaaaaaaccaaagtgatggttataaaagcaatatataaatgtgaaaaatgcttctgatgtaatgtcaaagaaatcagaattttacaatgagtctgactgtagctatataaaaattcatacacataagaaaaacaaaatanatactaataattntcttttctctactttctatactgtcataatgcaataatacgcttattttattttaaaagatganagtgaattttaaaaaagtctgactctg

SEQ ID NO: 46884 - DNA, 551 bp, Homo sapiens
  misc_feature 468, 469, 471: n = A,T,C or G
aaagggaacaaaagctgggtaccgggccccccctcgagagtacttctagaattaattaaggcgggggaggtagatggtggtgatggctgcacaacaatgtgaattttttatttgatatatattttaccatatttttaaaaactctattacaaaaaaaagaattggtctagcctagataatcttagtagccatgttttattgctattcaacttgtcactcatcaatttatataaactcaccagccttttaccacttagctgtctatactccacatcagttcttctctcagtgtttcttccagttcactgcaatttgagactcagaagtttttctttgagaagtcagtatgctgtatccattaaggaacattctgttcaggaaagacatctaagtattccaaattgataagggaggtaaagacaaaacagataagtgatttttaaaatattattggcttaaattacaaannanaaaaaaaaaaaaaaaaaaaaaagggcccccccccggggggggccccaattcccccttttgggggggtttttacccccccc

SEQ ID NO: 46885 - DNA, 422 bp, Homo sapiens
tgggtgccgggcccccactagagagtacttgtagaattaattggggcgggggtggtggtatgcacctgtagtcccagctattcgggaggctgaggcaaaaaaatcacttaaacccgggaggcagaggttgcagtgagccgagatcacgccaccgcactctagcctgggtggcagagcgagactacttctcataaaaaaaaaaaaaaaaaaaaaatgggggggccgaccggggggggacccttatgctgactctaaaattatggacaggacgagagcaaaccgttcacttgatggacgcagctaagatgaacactcagctgctcacattgtgttcaggttctggggcattttgaacacttcgtaagagaaattactgaagctcttaataacaaacttgccttccagaacagaaaggttttatg

SEQ ID NO: 46886 - DNA, 477 bp, Homo sapiens
accctcactaaagggaacaaaagctgggtaccgggccccccctcgagagtacttctagaattaattaaggcgggggctgcaataatcacatgatagccctcctccttctaaatcgagctcctaaggacaccagattaatcaccactagcccattctcaagagtacccacagtgagtctagtgataggttacaacaacacattgcactatcaagacagatttttaaaaaattcttcaatgtaatgcaataacatctgagcagctggtatgcagcagacactgtgctaggtctttcacatacctagaaaagcaaccatcagtcctcatttcataaatgagaacactgaacctcaaagagtttcagcggtgcttatcagagctctaggaggctgaggcaggagtcgccccaaaggcccgcagatccacctccatggctggccaggctccaaccagcaaacaaggcacacggctgctggct

SEQ ID NO: 46887 - DNA, 457 bp, Homo sapiens
aaagctgggtaccgggccccccctcgagagtacttctagaattaattaaggcgggtgctatgataaactttttttttactatgattactcaaggaattccatacattaagccttataattgacatcgcacttcccacacttcaatttcaagtgatagcatacatggcctgtgtcactgcttgatcaaatgcaaagtgtgactgaaacaaaacttacttttataaaatgtaaaaatggcagaagttcatcccttccttgacagactaatctaatgagtccaaatttcaaaattagagtgggtcagtttgcaagactttatataaaatagaatccaactctcccctcaattctacacagctgatgttacatcaattccatatctaaagtgaaacactagactggagaaagtggagaaagaaaaaaacaagaatatctctgacctcagaagattataatg

SEQ ID NO: 46888 - DNA, 668 bp, Homo sapiens
taaagggaacaaaagctgggtaccgggccccccctcgagagtacttctagaattaattaaggcggggacagttctggagttaaccccccgtgtataccaagggacagctacgctttggaaaacaatttggcagcttgtgaaaaagttaaacatacacctatcaaataacccagccatttcacaactaggtgtttacccatgaaaagggaaagtatatgtctatacaaagctttgtacatgaatgttcatagcacctttatctgtaatagccaaaaccgaaaaacaacctaactgcctcttaaccagtaaataaacaaactagtatggccatacgatagtattctattctagaataccagcagtaaaaaggaacaaactattgatacataaaacaacatggatgaatttcaatataattatacagagtgaaagatgccaggccaaaaacagagtacctattgtacaattccatttatataaaactctagaaaatgcaaactacatttctactgtgggaaaaggacaggaggaaggaattacaaagggccaggagaaaactgtttttcattaccttttggtgaccagtctatacgtggatcaaaatgtaaattgaatactttaaatatgcacagccgggcacggtggctcacgcctgtaatcccaacact

SEQ ID NO: 46889 - DNA, 476 bp, Homo sapiens
  misc_feature 403: n = A,T,C or G
ctaaagggaacaaaagctgggtaccgggccccccctcgagagtacttctagaattaattaaggcgggaggaacggacgcaacaaggagaaaggaagcaacggaaggtcttcggctgctaaaaaatgtaactgacaaagagtccagggctgtttgtatttttcttcctctgtgtctcatattaaacacttcgggtctgatgactgagtttctccagccgacatagcattcatttatttttttctcattcattcagcaagtcctccttgagctcttattatatgccaagacctgtaccaagtccttttcatcatttaattcttatctagagccttaagcaaatgactcaagtactgtgattagcttgccttttgcagatgaaaaaaaaaaaaaaaaaaaaaaaangccgccccccccccgggggggaccccaattcccccttatagggagttttttacccccccctcttgggcggttt

SEQ ID NO: 46890 - DNA, 320 bp, Homo sapiens
cgtcgtctttcacccggaataagggaacacagctgggtgccgggccccccctcgagagtacttctagaattaattaaggcgggggggtaacttctggggccaggacatgtatatggtacctgagccacaacacgtagaattttcgtttatagttcaccatggaaaatgattagctgggcctggagatcttacctcttgaggtcttagactgtcgcgaggctgaggtgggaggatcacctgagcccgggaggtcaaggctgcagtgagctgtgattgcgccactgcttttcagcctgggcaacacagtgagaccctgtctc

SEQ ID NO: 46891 - DNA, 510 bp, Homo sapiens
accggcgctttgtctttacgacccggaataaggggaacactatgctgggtgccgggccccccctcgagagtacttctagaattaattaaggcgggtagagaagggttctcatgttgcccacggtagtctcaaactcctggcctcaagccatcctcctaccttgacctcccaaagtgttgggattaaaggcatgagccaccatgcccagcctgtgtttagtttttctgtgaactattcataacctcatgttacttctatgtagatttctttataatagtcacactactgtgttccatttgatttattaatggtaatatttctcagtacgtctatattgtcatattttagtatctggcaatcttctctttttattattttttaactgttccattgttgggcatttaatgtttgcttttttgtttgctgttttaggtaatcacctaataggggtttggtggaaattttttgttatgatgtctgtgtggaaagcggctgtgcagacattcaatt

SEQ ID NO: 46892 - DNA, 381 bp, Homo sapiens
agaattaattaaactgtaacttattttaagccagtatcagaaggcaagttaaaaaattagaggactgtaacttctaagtagtataacacgcacattagcattcacccacgtgcttccacttttgcagacatggagcaaaagcagccctcctgctagtgagactactccaagaaaacccctcccccggcacagtggaaaaacccacgacagtctcagaagaagagcgtctatcccaggattcaaggttaattcctttgctctcaccttctcagaaatatcacttcatcattaataacccttttgcccacttatctttaaatcttcatctttgctggctcacacattcaaatctcttcaaaaaaaaaaaaaaaaaaaaaaaaa

SEQ ID NO: 46893 - DNA, 385 bp, Homo sapiens
ctggccgtcgttttacacccggaaacacagtgttaccacttattgctggccggccctttactctagagaaaaagtaaaaaccttaatggcggggcgcgcgccgtgaaggaaactctgaataggggaatgatatcatcgcatttccctgttaggacaaataggagaagtttaatatcaagatgtgacaaagttaatggagggagacaattcaggtgttccagccaagggatgacgatccctattttgaaggcagggatagggagaaagtattaagggaaaatgtttcccaaaaaaaaaaaaaaaaaaaaaaagggggccccccccggggggggcccccattccccccttaagggggtttttttcccccccccttggggccgttttt

SEQ ID NO: 46894 - DNA, 338 bp, Homo sapiens
taaagggaacaaaagctgggtaccgggccccccctcgagagtacttctagaattaattaaggcgggggtggagtgaatgtgtgtatgtgtgtgaggaagacatagttccttgcagattttaataaaagaatggagaggagttcccaagattaataaagaatggttccagactgggcataactcatgccactaattccagcactttggaaggctaaagtgggaggatcactcgaggagcttgagactagcctggtcaacataatgagatcccatctttacaaaaaaaaaaaaaaaaaaggggccccccccgggggggacccccattcccccttttaggg

SEQ ID NO: 46895 - DNA, 487 bp, Homo sapiens
gcgcgcaattaaccctcactaaagggaacaaaagctgggtaccgggccccccctcgagagtacttctagaattaattaaggcggggtaaaatacatataacataaaattttccatcttaatcatttttaagtatacaatttgatggtatcaagtatatgcatgatgttgtgcaaccatcatcgccatccatctccagatctctttttcatcttataaaaccgagactcttaccattaaaaaaaaatgggactgggatttttaacaaactactaaaaaagaaaaagctataaccttcactttttttttttccacagaaagacaatgccttggcaaggagctaataagtagaagatcatcgctcaggtgtcaatttaccttagatacaaaataaatacgcagcccaggtgcggtggctcacgctgtaatcccagcactttgggaggctgaggcgggtggaacacgaggtcaggagttcgagaccagcct

SEQ ID NO: 46896 - DNA, 457 bp, Homo sapiens
ctgggtgccgggccccccctcgagagtacttctagaattaattaatcctttaggtaaatacagggaattgtgcaactcaagaaagcaagcccttagaacagttatctagctaatggagacgcagtgtagacatgcgtacaaactcactgagctatacactttagtattttactgtctgtatgttgtacctcaatcacaatttttttaaaacattaaaaagcacatcttcatatgaaactagaacatgtgtttgaaataatccacataccatgttattcttgaaggaaacaatgtaaatatcccatgcagacttctaaaaccatcacatactcatattatagaatactccgtacctgtagagtactgctacagaatcatctccaagatatgttaaatacaaaaagcaagctacataagagtatgcatagattattacaatttgtgtaaaaaatgagaa

SEQ ID NO: 46897 - DNA, 488 bp, Homo sapiens
aaccctcactaaagggaacaaaagctggatcccggcccccgcctcgggagtacttctgtacttaatcaacgctggtgcgcggacacagctgtcactgagtgtccaaactctactactcggctggcttggggccctcaggatagacctcagttactacagtgctataacctcgacgcaaaaaaccctccacatagatatccgggagcctggaaccgtatacacaggagggcagagccatgggcgtccaaagtaaccctctgtgcgtgagaggttacaaagttagaggcaaaacttggtcctgaggcaataaaggcctttctctccctatagtgggactcaggagtctctgtgtggctgtcttgagccgctgcaccaggggtacctgcccgggcggccgctctagaactagtggatcccccgggctgcaggaattcgatatcaagcttatcgataccgtcgacctcgagggggggcccggtacccaattc

SEQ ID NO: 46898 - DNA, 572 bp, Homo sapiens
tacctaaagggaacaaaagctgggtaccgggccccccctcgagagtacttctagaattaattaaggcggggccctgaatagtgtaagaatccaagttcatagtgattggttctggagacaatgagatatgaggaaatatatactgaaggctttggcaataggaagcttcctactcttaaggcagagcccaatgggaagacatttcaggctcccagagaatgagagtatatggaggcttaagtgctatgagcaacgattccattaccacaggaatgaagccaataaacttcattattgtttaggccgggcttagtgttacttgtggccagaagcatcctggttgatatatgatacatatgcaggatactccatgaaatttaaaaacctaagtaatttttaagcaattactacttataaggaaaaagagataaaacttaaatacattgtgggataaaaatgtgactttccatcctgtaataagtaaacataaatgcatagtaattacataagacacctatcaatatttcagaggaagatacaggaatatgctgtccttcatattcacaggaaat

SEQ ID NO: 46899 - DNA, 428 bp, Homo sapiens
  misc_feature 341, 342: n = A,T,C or G
aaccctcactaaagggaacaaaagctgggtaccgggccccccctcgagagtacttctagaattaattaaggcgggattcatccaatattaactataaatcagtaagattataatatgattcaaaaattacttatagatagaataatcttggtcccaaacatatctacacatactaggtaataatgtaaatattaagtagagtgaaaaatgtcattgtggatggttcaatattgttactcaaatgcaaaacaataagcctttttgttattgcagtagcatgtcttatctttccctttgccctccctctaaattgataaaaagctatatgtaaaatctcatannaaaaaacccaaaaaaaaaaaaaaaaagggggccccccccggggggggaccccaattccccctaatggggggtatattacccccccc

SEQ ID NO: 46900 - DNA, 464 bp, Homo sapiens
aaagggaacaaaagctgggtaccgggccccccctcgagagtacttctagaattaattaaattcatgtaaataattttctgaaagaactctccttttttatctcataggtttcaaacagtctaatggtaaaaaggtttagtctcagaagagattctctaattaaaactagaaatctggtataattaataagtgtcagcctgcaatctcaaccacttagtaaaggcagagaaatcaaatgctgatgttttgtaaaaaacctaataaaatctccaagaaaatgaaatttttatagggtctacttcccatcaatacaataggtgtcccagatgggactagaaacttcttaaagtagataaatattttaacacttacaattcctatatgccagttttatttgtttttcttttctctttggagttgtaactcaacccaaaagaaagctttcaatgatttaacttgggttt

SEQ ID NO: 46901 - DNA, 318 bp, Homo sapiens
taactaaagggaacaaaagctgggtaccgggccccccctcgagagtacttctagaattaattaaggcggggaaacgccatatcgggagtcattgacatctgggtggtatttaaagctgactctgaatgagaacatgagtgtagctgaaaaactgaaagcatgcctatgtttacagtcagaaagatgaagaagaaaagcaaaagagactaaggtacaaaaaaaaaaaaaaaaaaaaaaaggggggccccccccggggggggcccccaattcccccttaaggggggttttttccccccccctttggggcgttttttaaaa

SEQ ID NO: 46902 - DNA, 608 bp, Homo sapiens
  misc_feature 524, 525, 526, 528, 530, 531, 547: n = A,T,C or G
ggaacaaatgctgggtgccgggccccccctcgagagtacttctagaattaattgaggcggggtatagatctttctgaaggtaagttagcaggtcttgaaagactcagacaatagttgatcccttagaagagtgaagactgagttagtggataggacagcagagacaaaaacatccttgtagagttctggctcctgcaacaaggagagcatattgtagaggaggcgaaacaaagaaacaaggaaaaaagagaaacaaattgcaacttggtgaagaatcttcactaggagtcactccaaggactacttcagagatttgctcttctaggagagaaacattcatctagagcagaaggtacactggtgagagactatccatgctactctcaacttacttcctgcatgtgtgcttttattaatgcttaaactagggttagcacacaaaaagtcacacatagagaacttagcagggatcaaatatgccacctgcacatggttaccatggcatttcctggtctctcaccaannnanannaaaaaaaaaaaaaaangggggcccccccccggggggggcccccattcccccttttaggggggttgttcccccccccc

SEQ ID NO: 46903 - DNA, 427 bp, Homo sapiens
ctactaaagggaacaaaagctgggtaccgggccccccctcgagagtacttctagaattaattaaggcggggtgtcttaggagcaaatatgaaagagaaaaatttttctatgtatagtttaatgaccagtatataataacaaatatctaaatctttcatcaacagatgtctgaatctgtggcctgttataaagtaaggtttagacgaaaactttcagtttttaatacaacagcactaaatacttggtatagaacacatagtaaactcaagaaaaaggaaaaatacataaagaaattactagaactcaagcagaccaatagaataagaatatttattaaaagtaaattctagttaattgaaaaaaaaaattagccaaataaacttgtagcatattataatataaaaataaataaaaaaagcggccgcca

SEQ ID NO: 46904 - DNA, 553 bp, Homo sapiens
  misc_feature 494, 497: n = A,T,C or G
taactcctaaataaagggaacaaaagctgggtaccgggccccccctcgagagtacttctagaattaattaaggcggggatgtctaacagtatagaatagtttagttcatccatggatgcagtgagccaagatcacgccactgcactccagcctgggtgacagagtgagactctgtctcaaaaaaacaaacaaacaaacaaaaaacaaaccgaaaatattagtctgtaaagattgatcttgagcctaaacttttagatgttttctatcctttgaacaaatgcttctgtatcttaagcttggaaggacactgggaaactaaacacttttaaaaggcacttttctttcaatagcccacttataaagtttgctttatctaccagtacaggggaaaaaaagaataaagttggttttattccatttaaagtagttttggtatttctttgctccataccaaagtcttcctcccccaaaataaacaagtgaattagaatcanaanaaaaaaaaaaaaaaaaaaaaaaagggccccccccccgggggggaccccaaatcccc

SEQ ID NO: 46905 - DNA, 458 bp, Homo sapiens
tgctgggtgccgggccccccctcgagagtacttctagaattaattaaggcggggatgttctgaaatctgaatatgactctaaagaaaaaagcaatatgaatgttaaaagatagtctgttctcccaggaacagatgtaacattccaagtcttccagtttgtatctttagtgaactgaacaatttctgtgaaaaattattcactatgtacagattttcaggggaacaattttatataaaagttgtttctctgtatgactacattaaccaagtaaaatactgtatttgaaagtagaatactatttattgtacatcagcaccgagaagattgttttgtctaatcctaaatatttacatgacattctgcaattcaaaaatggccgacaggtacatgtgtccagaacaaactaatgattttgaagtgaaaacataataccattaccttgtctcctagtttagta

SEQ ID NO: 46906 - DNA, 369 bp, Homo sapiens
  misc_feature 336, 342: n = A,T,C or G
aagggtacacagctgggtgccgggccccccctcgagagtacttctagaattaattaaggctggatttaccactaggtaatgggagagggagagagaatgaaagaaagagctaactccagagaatctatttgtaccagaagctgaaggaggagtggagtcacaaatgtccaggcagatcttgtgtcacctttgccttggaaatacagatgagagaccttcacttaattcagacttcatcgttatttacttatttcctcatatctctctaaccttggtgttgttagattgggtagaacaagaagctggtctagctgggtcaaggaagaattataactntaaatntactcttttattaaatctgtttgggta

SEQ ID NO: 46907 - DNA, 282 bp, Homo sapiens
aagctgggtaccgggccccccctcgagagtcttctagaattaattaaggcaggcaaaactaataaatatttaaagaagtcatatactggttaccactgagagtgagtattgagtataaagacacaagaggaaacctcctacatattaaaaatgttctagatcttgatcttgagagtagttattcaggtgtgcacaatattttaagattagcacactttacacattttaatgttaaataaatgattaaagtgttttcttaagttagggtggcagggaaaaaac

SEQ ID NO: 46908 - DNA, 502 bp, Homo sapiens
gcgcgcaattaaccctcactaaagggaacaaaagctgggtaccgggccccccctcgagagtacttctagaattaattaaggcggggtacagaagaagagcaggtaccagcagagaattacaacagaaaaagacagtactgggcagaatggcattcttgccaaagttaccagcagcagtggcagtcataaagcaatacctcaagaggcgttcagggagtagactccaataaggaggctggagcagaacttggcttatttctgaacatgacagacaattcctgaaaactaaattcctacaacattaatactggttctctaagaagccgggactttttcagtaagtactcttcagagataaatagaagaaaatcgaaagatgagggtgctgagatatgtgaaggtagggctgggcacagaagctcatgcctataatcccagcactttgggaggccgaagcgggaggatcactcaaggctaagagttcaagacatgcctaggcaac

SEQ ID NO: 46909 - DNA, 392 bp, Homo sapiens
gggaacaaaagctgggtaccgggccccccctcgagagtacttctagaattaattaaggcggggtaagatttgccgagttccttaaactttatttaacctttccttatgagcatgcctgtggcagtttgaggagcttggagaagacttgaaatagttgtagaaaatgagagtaagtgttactggggaaatgtggaattatatattaagtaaaacaagctggttgtagcaataactagttattatttttacagattcgaaaaaaaaaaaataaaaaaaaagtaaatgcggtcgccaccgcggtggagctccaattcgccctatagtgagtcgtattacgcgcgctcactggccgtcgttttacaacgtcgtgactgggaaaaccctggcgttac

SEQ ID NO: 46910 - DNA, 557 bp, Homo sapiens
aaagggaacaaaagctgggtaccgggccccccctcgagagtacttctagaattaattaaggcgggaaggtataatatgttaaggccctcttcatgttcaagaggaagataaaaatattaagtaattcagactcttctagcaaaatgtataattaaatatatgtaatgaaaaaaactgaaaagatttaactaaaataatggaaatacaaaccattatagctctcaaagcagcagaagggcaaaagagaatattgaaaacttaatcagttcagtaaaaggatagtttaaaaaagttaaaaaaaaaaaaaaaaaaaaaaagcggccgccaccgcggtggagctccaattcgccctatagtgagtcgtattacgcgcgctcactggccgtcgttttacaacgtcgtgactgggaaaaccctggcgttacccaacttaatcgccttgcagcacatccccctttcgccagctggcgtaatagcgaagaggcccggaccgatcgcccttcccaacagttgcgcagcctgaatggcgaatggaaattgtaagcgttaatattttg

SEQ ID NO: 46911 - DNA, 356 bp, Homo sapiens
atgcatttgtgtgtatgtaccccttaattatcttccctttagcatttacagtttcaagattttataacataacttctccagcaggcctcatcaaggctgaggcacaagaatcacttgaatctgggaggcatttataaaatcatttataatacaaacaatatagtatgtcaaatttaaaataatgcacctaagactgcttatatgcttttcattaaaaacacatttaaaatctttgaaacatcacgaagcagttttagtatctctaatacaagtctaaacataagttcagatttgaaagtcatctctgagactgtgatccaatcaaaagttgtatctgaacaagttgtatctgaaaa

SEQ ID NO: 46912 - DNA, 272 bp, Homo sapiens
ctagaattaattaaggcggggggcggatgggttgttgtaaatggatgttttctagttttctgcttttcctacagtgttctcacagaaacaaccatttccatcatcattatcatactctttttaagtgagaaaagttacatccagtagaggaactatccccaatccagtaactgggaccatcacggcaatcacataacaagtttaggaaacggcttaaggaaatgagctaataacatgactgcacacaagcagattatctctgattgctacaa

SEQ ID NO: 46913 - DNA, 301 bp, Homo sapiens
tttacaacccggaataaggggaaccgatgctgggtgcccgggccccccctcgagagtacttctagaattaattaaggcgggtcttagaaatcgaatgtagtgattatctaggacatttttttttcttgtcatattcactagttagtaactccaaccataaagtagccctaaacttgtattcaaaactaaacatgatataaaacttcatttcagaagacttgaagtcaattactgaagaattaactacatggccatatgacattttcctatttattatccatcaactcattttaaaatgatc

SEQ ID NO: 46914 - DNA, 574 bp, Homo sapiens
  misc_feature 283, 313: n = A,T,C or G
taaagggaacaaaagctgggtaccgggccccccctcgagagtacttctagaattaattaaggcgggacatttttacgtaaataattggcccttctagaaataatgatatatttgtcagttcctttttaatctttttacctttttttccctgaaatttgtcttatgtaaatttgataagttttagtgctacttttctcatttctaccaagtttttgtacttgcaaagccagtatatttatttatttgagacagcctgggtaacaagagcgaaactccgcctcanaaaaaaaaaaaaaaaaaaaaaaaaaaaaanggccccgggaggggattggaaaatttttgggttgggaaaaatccaacccttaaggcccgtccattttttcccccagaaaaggaaaggttccggggggaattgaatgtaataaagaaatttttcgggcctttaagggaattgggggaaatctcccttagggttataaaatgggtcaaccccccaaaaaattaaaagggggggggcccattaaaaacttttcggggcatttgtaaaattgggggcaatttggaccccccaaaa

SEQ ID NO: 46915 - DNA, 419 bp, Homo sapiens
ctcactaaagggaacaaaagctgggtaccgggccccccctcgagagtacttctagaattaattaagcggggattgtgtgttgaaagataaaggttgtcgctataaaatagtaacataaggaatccttacggtgatggaaacgtcctgtttcttagctgaatcaaggtcagaatactgttgtgatgtcgcagcatttttcaaagatgcctccattggaggaaactgaaaaactgcatatgaagctataattaatccagaaaaatgtataacctaaaacacacacatgcgaagttattatccttgcacagagttaaaataatgtggataagtagtgagactaaaaatataacgtgtaagttagtggcaaaattctgtccaatttattactatatacctcattttccatagggtgctcaaaa

SEQ ID NO: 46916 - DNA, 560 bp, Homo sapiens
actggccgtcgttttacatccgggaacacagtatgacctttgtttctggccggcgcttttccttagagaaaaagaaaaaacctttatgccgggcggggggttccccattaaaaaaaaaggagaaactgagatccgagagatcagctgattaggccaagattacagaaaagagtaaggccagacatgaactcatatctgagtctatgtccagtggtctttaaaaagatcaactctattaaaaacacacaaaaaataagtattacatagacaggaggatgagtagctgtatcaggcaaataataataataatgatgaaagtttgatagtgattttaaaaactgaaaatagcatctctatacctttagtgactcagagtctcagaataaaaaaataatagaatggccaggcgcggtggctcacacctgtaatcccagcactttggaaggcgaaggtgggtggatcacgagatcaggagatcgagaccgtcctgactaacaccgtgaaaccccgtctctactaaaaaaatacaaaaattagctgggtatgggggcaggtgcctg

SEQ ID NO: 46917 - DNA, 403 bp, Homo sapiens
  misc_feature 298, 324: n = A,T,C or G
aaagggaacaaaagctgggtaccgggccccccctcgagagtacttctagaattaattaaggcgggagatacatggccccacatatgatagaaagcccgggggatttgctttctatttctaaaattgcttatttgactcaatcactgaacctaaattagcgaaagcagtggtagagactgtaaataatttttttcattaaaactatcattggaaacttctgagcaacatttaaagattgtattagttctaacttgcttgttgttacttaattcctactacaaagctaaataatataccnaaaaaaaaaaaaaaaaaaaaaaaaangggggccccccccggggggggcccccaattccccctttaggggggttttttacccccccccttggggccttttttaaaa

SEQ ID NO: 46918 - DNA, 480 bp, Homo sapiens
gcgcgcaattaaccctcactaaagggaacaaaagctgggtaccgggccccccctcgagagtacttctagaattaattaaggcgggaggatctcttgagcccaggagttcaacactaacctgggcaacaaagcgagagcctgtctctacaaaacattaaaaaaattagccatacatggtggagtgcgcctgtggtcctagctgaggtgagaggattgctcgagcccaggagtttgaggctgcagtgagctgtaattgcaccactgcattccagcctgggtgacagagtgagaccctatctcaaaaaaaaggaactatctggcttcatcctaagagtagttgcattttaaactctcagtcagcttcttttactgtaaaatgggaataataattaacagtctaaattcctaaagtgattatgaaggctgaacaggtgatgcctgttcctcaggcccctcccttggggccccttcagccccatg

SEQ ID NO: 46919 - DNA, 435 bp, Homo sapiens
aaagggaacaaaagctgggtaccgggccccccctcgagagtacttctagaattaattaaggcggggctttggatcaggtgaatctgaatttaagccctgggtcatttatttttaggagtgaccctaccaagccacataacctctctaagctatattatttcattatctgtataactgagataaaaatattatttttagagttctgaaagtggaaacgaaataagtattaaataagtgagtttttaaaagagacaaaatagctcttccaagaaagttggtttaaaagagaaagtgagaatgttaagaaataccaattcccagtaattttttttgtattatgtgtcacagcttttaataattgtagtttttttcactttaacattttgtaaaaatgctcctttataatttaagtttaattggagttttttttttttt

SEQ ID NO: 46920 - DNA, 458 bp, Homo sapiens
aaagggaacaaaagctgggtaccgggccccccctcgagagtacttctagaattaattaaggcgggtacgatttgtatgctttggttgttcttaaggtaatttaaagtttatactattttttaataacaaattactaaatttgttattaaagtgcaaagctcaaatgaagaaaatgaaaaacatttgttgacttttatgtatgtatcctgaattcatattactgtatgggaaaacctagtactataaatatttcaatccttaccttcaaatgtatattattgtgcacttcacggagttagagtgagaatgctatgttcagcagggtgtcttaagttaaacattcagacttagaaaaccgttagtccacatttggcatattcacttagaaaaatacaggataggatgcagcaagtagggcagtgccaggcattccacagggatccttgtgacaattcacg

SEQ ID NO: 46921 - DNA, 510 bp, Homo sapiens
  misc_feature 426: n = A,T,C or G
actggccgtccttttacaaccctaaataaagggaacaaaagctgggtgccgggccccccctcgagagtacttctagaattaattaaggcgggcatgacagatgaggcctgtactcttatatcagcatttctcatgtcggtctatatcctaagaactgtaaaggttcatagggaaaagaagagaaaagagtagctcccgtgtatcctgggattggaggtcattttgggttaaccttatttcactgccctcttctcagtgggtttttaaaaggtagagctagtggcctgcataaaagttgcgtttttcggctgggcatggtgacgcatgcttataatcccagccctttgggaggccaaggcaggcatattgcttgagctcaagagtttgaaaccagcctgggcaacatggcaaaaccccatctctaanaaaaaaaaaaaaaaaaaaaaaaaaaggggggccccccccggggggggccccaatttcccctaaaaaggggggttttaccccccc

SEQ ID NO: 46922 - DNA, 413 bp, Homo sapiens
cctcactaaagggaacaaaagctgggtaccgggccccccctcgagagtacttctagaattaattaagggggaaggtggttagttgtatttgagacgtgtgaggtactgatacttttccgtaattccagttttcctgccaataaaccaatgaagcaacatctcaatatatgagacagattttgtaagaatacgcaaaggattttattaacactttggaaagaatacattcatgtacgacaacttcctagaagtaaaatacggccaaagagatcagctttcacataggtttttataaaactgcctaacacaaaaatacacatatatggagaacttcagactgagaattacatcaggactgtttctttgagttcgccttttgtctcaaaattaataattaattaattgataaaaaa

SEQ ID NO: 46923 - DNA, 551 bp, Homo sapiens
ctggccgtcgttttacatccggaaataacgtggaaccattgctgggtgccgggccccccctcgagagtacttctagaattaattaaggcgggagggaggtataaccttggaagaagtggttcttttcagaaatgggcaattcctaaagaggaacttagtcaccaagcatttgaggaaatgagtgcttttgttccaaagatggtggggattggcataccacaacatgcactatggtgtgtgacattttctgagatttaaattctactatatgtcagtatcattcttatatttatatattgtatgattcatgtgggtaaatcatgtttaataagagaattattggaggatttgtacatagtctcaatctgtgtacttagggaatacatgtagaacaatatgattgggctattacaaaaacaagtggcctaaattcaattcctaagtctccatttttaaaagttatgtctctttcccttagcctgtcccttctaagggagtctgtgaggctcagcctaaacatttacaaatttccatttgaaaaaatctgtcat

SEQ ID NO: 46924 - DNA, 504 bp, Homo sapiens; identical to SEQ ID NO: 46603

SEQ ID NO: 46925 - DNA, 572 bp, Homo sapiens
aaagggaacaaaagctgggtaccgggccccccctcgagagtacttctagaattaattaaggcgggcacctgtaatcccagctacttgggaggctaaggcaggagaattgcctgaacccgggaggcggaggttgcagtgagccgagattgcaccatttgtactgaagcctgggcaacatagcgagacaccaattaaaaaaaaaatagtatctaaaaaacaaatccttcaagtgttataatcattttaaagacattttccatcattttagcccctctttatttaaggataaaagtatacaggttttgctcttaggttgacttgggaattctcttaatattgtgaaaatccaagctaggtctttgagaatgtgctaaaaaagggtttgaaattattttcccccaccaaatacttcgttatttcatttaaaatgtgatattacagggccgggcgcagtggctcacacctgtaatctcagcactttgggaggccaaggcaggtggatcataaggacaggagttcaagaccagcctggctaacatggcgaaatcctgtctttactaaaaaatacaaaa

SEQ ID NO: 46926 - DNA, 444 bp, Homo sapiens
  misc_feature 399, 400, 401, 402, 403: n = A,T,C or G
ataaagggaacacatgctgggtgccgggccccccctcgagagtacttctagaattaattaaggcggggtggaggaagtaaataagcagataacagactaacacactgctatttcagagagacaaataatttgggtcagaccacaaatagggtcataccacaaatcagacaaataagctacaaattagcttcacttaacagatacaaattagtaaggttaatgtccactcattaaacatttcaatctctcaagtcaagctacccatataaacacttggtatccagaagatgttgatcatagtagctataaaacaggtttagtcagaaaagctattaggatcaaaaattggcagtcacacatcttggcttgggtattccttacactattcctcatcacccnnnnnaaaaaaataaaaaaataaaaaaaagcggccccccccggggg

SEQ ID NO: 46927 - DNA, 485 bp, Homo sapiens
aattaaccctcactaaagggaacaaaagctgggtaccgggccccccctcgagagtacttctagaattaattaaggcgggtggatcacgaggtcaggagatcaagaccatcctggctaacatggtgaaaccccatctctactaaaagtacaaaaaattagccaggcatggtggcaggcacctgcagtcccagctactcgggaggctgaggcaggagaattgcttgaacctgagcttctcgggaggcagaggttacagcgagctgatattgtgccaccgcactccagcctgggtgacagagagagatctgtctcagaaaaaaaaaaaaaaaaaaaaaaaaaaaagcggccgccaccgcggtggagctccaattcgccctatagtgagtcgtattacgcgcgctcactggccgtcgttttacaacgtcgtgactgggaaaaccctggcgttaccccaacttaaatcgccttgcagcacatcccccttt

SEQ ID NO: 46928 - DNA, 504 bp, Homo sapiens
gcgcgcaattaaccctcactaaagggaacaaaagctgggtaccgggccccccctcgagagtacttctagaattaattaaggcgggatccgagaatatattatttattccagctgaagttactacttattgtaactgaaattccccaaaagatttgatcttaactatatccttaaactctaaattattataatgaaaaaataggacaataattattgcaaagtatagtgtttttccagcattcaaaagcccatttcgtttttttcaaatttctttttatttttcatcatttaacagaaatgaaggacatttaaagcacattaaaagacaaaggaaatggcagcttctgtagtaacatttatctaaatgatgaagtatcataatcaatcacagaaagatcatactttgtccttagattctgcattggagtctacagataatggagaattattacagttgtagcaaatcttaagatgtacttaattttacaagttaagaaaataaaa

SEQ ID NO: 46929 - DNA, 334 bp, Homo sapiens
taacacagctgggtgccgggccccccctcgagagtacttctagaattaattaaacactaagtagtctgagtccttagcggtttagtgcctagaatgagctaaaattgattgtgtttactaactgacaggctctcttatcataatcctctattagcttgttattattacgattatcgttcctttatccatgagggccatgagatacagggagtttaaataactaagattgtactgcttggaaatgagggtttgcatatgggacatgtccaaagcctagcctcttaccaggacatcaccttgccattcagtgaaacagaaagggcttcaatatagt

SEQ ID NO: 46930 - DNA, 443 bp, Homo sapiens
tgctgggtgccgggccccccctcgagagtacttctagaattaattaaggcgggaatgacaaaagagtcaagacctctcctgtagatgaaagacatttgatctttttactacttactgggaagcaaccctgacccactccgtgaagtaaaggaagatgtactttgagctccccctaggggtgaagtgtccctgatcacccatttagaactgaaatatacagacaacatatatttgttaaccatggtgttaaaggcttatagacaaccagtactgctgtattaggtacgttatattgaacattctactttaaccattcttaccttcagcaaaagaggtaaaaatacctgttttcatggaacttatgttccaattagagtatatattcaagtatttaaaacttactaattttccattctccgtaatccattcttaaacttttactt

SEQ ID NO: 46931 - DNA, 446 bp, Homo sapiens
aaagggaacaaaagctgggtaccgggccccccctcgagagtacttctagaattaattaaggcgggtgaattcacagaaaatataaagatgtgaaattccccctccttgtctgtcactctaggaaaagcccaagtatcctgaaatggtggtccagcttctggaaattttgttagaagaatacaagggggctagaagcatgaaataggctagggggttgagaagttatattgtagatgcagttggatattgccttcatagctatgattcaacttaataattattgaggtctactttgtgcaaggtactatgctcaaatatatgaagttataaaccaaaaatgaatacaaccaatacaaaaaatcttaagtaaagacccttagtttaaaaattacctcatccaaatgtgcttctaatacctgaatacacatattatacatcacattctt

SEQ ID NO: 46932 - DNA, 608 bp, Homo sapiens
taactaaagggaacaaaagctgggtaccgggccccccctcgagagtacttctagaattaattaagggggaagacaaaagaatctaattatcttttactatgcattagcaatgaaatcctacattagtgtgtcttcatgagagttcagtaatgatttaagttgtttttcatttttcaatgctttttacatataggctcctgttttatttgtttttaatatgaacatagttttatgagtctggccaaaagccatcttggctgtatatgggttacttctaatttctctagcagtactccagcaacctatgtatagtattagagaaagcagacatttgcattcatttataggagtttcataacctagtgagatagagagagttgatagtattgacaagtagtgttcaagataatggagatatatacatcatctcaaagtgcacatgtagatgtggaccatgaaataccagaagaaatttaagaatttgagataaatatgaaagatgcaaaatgttaacattgttggatcatcaaaaatagtttacaggctcagtaggatggctcatacctgtaatcccatcactttgggaagcctgtgtgctacaatcgctt

SEQ ID NO: 46933 - DNA, 472 bp, Homo sapiens
gggtagccgggcctggcttccggacccctcctagagagtacttctagaattgattatggcggggatgacaaaagagtcaagacctcttgtgttaatgaaacactttagacctttttactacttactgggaagcgcccctgacccactctgtgaagtaaaggaagatgtactttgagctccccctaggggtgaagtgtccctgatcacccatttagaactgaaatatacagacaacatatatttgttaaccatggtgttaaaggcttatagacaaccagtactgctgtattaggtacgttatattgaacatactactggatccattcttacctacggcaagagaggtaaaaattcctgttttcatggaacttatgttccaattagagtatatattcaagtatttaaaacttactaattatcccttcggcgtaagccattcttaaacttttacttggcaaaagtttattgagtc

SEQ ID NO: 46934 - DNA, 478 bp, Homo sapiens
accctcactaaagggaacaaaagctgggtaccgggccccccctcgagagtacttctagaattaattaaggcaggaaacatacacaagaccattcatcttgtcttacagcagcaatatagacagcaataaaaataaatacatagagctatgtagggcaaatcgaatatcatgaacattatatggagtgaaagaaacatatgtagtccatgaagcatatgtataaagttgcaaaataggcaacattaaatcatatattttagggctctgtataaggtgataaaactgtaaagaaaagtaacaggattattattttaaaaatcatacttctggataacttctttaagagggaaagtgggctttgggattatacagcagcagctggggagcttccaagatgctggtaatatcttattgttgacttcagtgatgattacaggggtgtttgctttatcattattcttccaaataaacatatata

SEQ ID NO: 46935 - DNA, 433 bp, Homo sapiens
  misc_feature 331: n = A,T,C or G
aaccctcactaaagggaacaaaagctgggtaccgggccccccctcgagagtacttctagaattaattaagggggaagaatattaaataaaaaatatttcatgaatcctaagggaggtatagaagaaggaaaaaggaaatcaaagcataagtgacaaatggtacagtgatagttttaaacccaaatatagcagtaatcatactacatgtaggccaagtgcggtggctcatgcctgtaatcccagcactttaggaggctgaggtggactgatcatgtggggccaggagttcgagaccagcctaaccaacgtaatgaaacctcgtctctattcngaaaaaaaaaaaaaaaaaaaaaagggggcccccccccgggggggcccccaattcccccttttggggggttttttaccccccccttttggccgttttttaaaa

SEQ ID NO: 46936 - DNA, 435 bp, Homo sapiens; identical to SEQ ID NO: 46919

SEQ ID NO: 46937 - DNA, 455 bp, Homo sapiens
  misc_feature 372, 373, 374, 375, 376: n = A,T,C or G
taaagggaacaaaagctgggtaccgggccccccctcgagagtacttctagaattaattaaggcgggaatggaactaaataaaactcattggtgtttagatctttgctctcacgtatccgaatatggattgggagctcaattaaaaccttgatttccaaaaacagagagggtttagtagagtatatgaaagtacctcaggggctcttcagacgaattactataataaactatttataagaaggaaagtaaggcctggtgtgatggctcatgcctgtaattccagaactttgggaggctgaagcgggtggatcccctgaggtcaggagttcgagaccagcctggccaacatggcaaaaccctgtctctactaannnnnaaaaaaaaaaaaaaaaaaggggggccccccccccgggggggcccccaattccccatttagggggttttatacccccccc

SEQ ID NO: 46938 - DNA, 467 bp, Homo sapiens
tgatgggtgccgggccccccctcgagagtacttctagaattaattaaggcggggaggagggaattcatgaagaaatcatttaaatattggatttttaaagatatgacactgctctcaattactaggtgctaataagacatacataacctaccatatagccaaggttttaattatcaaatttataatttgaaactgaaggaactttagttcataaaagtgaaaaagatcaaatgaagtccaatgaaagtaaaatattatctttgcttccttgattaaatctatagctatttttactaaagtatgacatatgttcccattattcagggacgtttagggaagcttctaacacgagagagagagagagaagctacaatagttcgatctaatgtacttgctaccaaatcaagattttacctatagattgaaactaaattgtaaatgtcccaaatacttttcccaaaaaaaaa

SEQ ID NO: 46939 - DNA, 637 bp, Homo sapiens
tggccgtcgttttacatccggaaaaaatggaaccattgctgggtgccgggccccccctcgagagaacttctagaattaattaaggcggggtggtctaattgatgtgagctaatatgccttaatttacattgatagtaaattactctattggactatgtcatcatcatttaaccatttataaaattgtatttgctctgccagcctcaattctatcaccgcatacttttggttatagaaaagaccagttctaaaaataatggtaaacttatttggattaagggaatctaatcatctttatacttatcatgtatcatggtactcaagcttacatatttttctatcttcctaggctgtatttacacaacacgatatataaataccaagcaatacacatgtttgggttatttaaaaactaataaaaaacaaggaatattttagatcttaaaaagccagtaagcaaatcaagaatttatttttagaaagctgatcaaagtttagataaagaaatgactgaggaatataaaatttggaaagtaaggaaaaatcattttaatctttatttgtacatatattagagtctaatactctaacaacaatacatagtaccacaataactcaaaaaataaagtttatttct

SEQ ID NO: 46940 - DNA, 502 bp, Homo sapiens
gcgcgcaattaaccctcactaaagggaacaaaagctgggtaccgggccccccctcgagagtacttctagaattaattaaggcgggtaggaaatgtctcaaaagatttagataaactagattagataatttctcttgaaaaatatattaagaaatgaaataaaaacaccactccaaaagcatcaaaagaaaatatagttcaaacacttacctatttttattgccaaaaccttaggcagtgaattctgcagctgaattgatcactttattgttttctgctttgcactgccctttaatagtttcatatgtgttcatgttgtctacacagtatactttcccatggtcctcacggtggccagaaaatgcttatttaatggagggatacttagtatttttaaaatgtgtactggctgggtgcggtggctaactcctatagtcccagctacttgggaggctgaggcaggagaatcgctggaacctgtgaggcagaggctgcagtgagcc

SEQ ID NO: 46941 - DNA, 450 bp, Homo sapiens
  misc_feature 425: n = A,T,C or G
cggccccccctcgagagtacttctagaattaattaaggcggggcggggcataagtctaggaccccagcatgactctcccaccctcctgcctgcacagtgaattccaatggcacagggttaagaaaagggagcagtggccaggtgcagggacttattcctgtaatctaatctcagcactttgggagactgaagctggcagatgaactgaggccaggggttcgaaaccagcatggtcaacatggcaagactcttgtctctacaaaagaaaaatttttaaattaggcatgataatgtatgcctgtagtcccagctactggggaggctgaggcaggaggatcacctgagcccaagactcagaggatacagtgagccatgatcaggccactgcactctagcctgggcaacagtgcgagaccctgtctcanaaaacaaacaaaaaaaaaaaaaaaa

SEQ ID NO: 46942 - DNA, 625 bp, Homo sapiens
ctggccgtcgttttacacccgggaacacagtggaaccaatgctgggtgccgggccctccctcgagagtaacttgtagaattaattaaggcgggagaatcgcttgaattagggaggtggagattgcagtgagccgagatcccgccactgcactccagcgtgggcaagagtgagactgtctcaaaaaaaaagtcattctttctttactttgtgctagttatcttcattgtgttacaaaaaatcaaattattttaggatttagaatagattacttttttgtaatgtgtaagtttccaccagagaaccactaagattagaggagtgtgaagtaagtgtcctctggacgtgagacaaggtattagtaagcaggacattgtaagtttcacattttatctttaaaaatgtgcctttatgcattttactccacaacatatctgtttattttaatgcaaaagtgttacaccctcatccacaaattaaaaaccgctaaaactttcaaaatcatgctttgtatattctgttacttctggaatgtccctggtgccctgtctccttaccccagggacatctcaactgctgtttgagaagtattaatacttgtttaatacactttttaaaataaatttt

SEQ ID NO: 46943 - DNA, 468 bp, Homo sapiens
ccctcactaaagggaacaaaagctgggtgccgggccccccctcgagagtacttctagaattaattaaggcgggcacaggagggaagcaaattgaggatgattatcacaaaaatcagttaagaaaacacaaactgcatcatccaaaaatacacctttggtccacggatgccactggaagacatctgaattttagacctccagagagaagatctgggtggctagctccagagtagaggcatgcttgctttttctttacacttgtgaagaggaatggatccggacatctgcaatctgggtagaggacggcaggcagcaagcttagccactcggccaggcttctcagcccttactctagacatgtgatccttcctccacgtgatatacttgacaactttcttacggctactcaaggcatcccaagttaaaaggaaggtcagatgtgattctcactttattatgataaaaaaa

SEQ ID NO: 46944 - DNA, 477 bp, Homo sapiens
gggggcatggctcggtatacctgaagcccagaagagtatcagagtcttatccttcactcagagatggggtagcagtaggtagctgcagtggcgatggagatcgtaatcaattaaattaatatgtatattaaagatattgggatccagaattctcgctgttgaagaaggttgttaaaaataaggaaaggtaataggccgggcacggtgcctcacgcctgtaaccccagcactttgggaggccaagacagatggatcacctgagctcaggagttcgagaccagcttggccaagatggtgaaaccctgtctctactaaaaatacaaaaattagccaggcatagtggcacatgcctataatcccagctactcaggagactgaggcaggagaactgcttgaacccaggaggaagaggttgcagtgagctgagattgtgccactgcactccagcctgcgtgacagagtgagactctgtctcaa

SEQ ID NO: 46945 - DNA, 464 bp, Homo sapiens
cctcactaaagggaacaaaagctgggtaccgggccccccctcgagagtacttctagaattaattaaggcgggtacataattctatttatattttatctatgatatattctgtgtgcattgaatatttaccttccattttgaattatgtgacaataaattacttcattttcctcgaatcatttccttatgtttacctttctccggtggctgtgtgatatgacagtgttaatatataacaagaaataattggaatttggagctagtataatatacaacttgatatatttagtttctgtgatgccaaatatattgactataatctcgatggtagcattctgtggtgtgaagctgaactcgatgaccaaactatattaagaggtgttttttccattgtcaacaaataaaaggaaaatgatattttaaggtaatacaaatatatttaaaattagacagttgaaatattt

SEQ ID NO: 46946 - DNA, 340 bp, Homo sapiens
aacaaagctgggtaccgggccccccctcgagatacttctagaattaattaaggcggggggagcatttgcttttaagaacgggaaacccatcctctccatcctccttgcgttctgagtttagctcctaggaaatgctctgaaactataggaccgggtcagattcacagcggttacttttgctggtctccttccttttaataagagtgacagctaacatgtactaagcacttaccatgttacgagccgtgcagttaacgctttgcatgcatgtcgccttttaatccttcccacatcagttttcagtttccgatttgataagcgagtattggatttgcagatt

SEQ ID NO: 46947 - DNA, 451 bp, Homo sapiens
agggaacaaaagctgggtaccgggccccccctcgagagtacttctagaattaattaaggcggggccactaccgcatctggctaatttttgtatttttagtagaggcagggtttcgccatgttggccagaccggtcccaaaccagcctggtcttgacctcaggtgatctgcccgccccggcctcccaaaatgctgggattacaggtgtgagccaccacgcccaaactcttcgttttcaattaaacaaacaaacaaacaaaatctgaggcttgggatagttaagcagaccttgtttaaatgtggcagattttaacacatgcatttctgctgcttcctaaaataccgttaaaatgaaagtaagagtctctctcttttggacatacctttttaatgccatactgttactccaagatgtgatgagtgatgagaggtcctcagatatttgaaccatg

SEQ ID NO: 46948 - DNA, 480 bp, Homo sapiens
ctaaagggaacaaaagctgggtaccgggccccccctcgagagtacttctagaattaattaaggcgggttttaggggtaacctgcagttttctctgatttttcagattttacggatgttgaataaaaatcagtgaccatttaaaaaatggtttagttgttggatcaaagtgctgtaacaaacaaaagctttttataagacatggcagctttagggagggtgagagtagtaagaaggaaatctgttagaaaatagaaaattttgctgagaaaagaatgatttttcaggactggaaatcctattactgtgctttactcagattttataaactaaaacataatttttagtaaaggattggggcagttgtaaagatagtcatacctcagcttaactttccccaaactcatgacttatttgactacatcattatgcagcattattgcaatatcaataatttacattgaaggaatttacaacccgtt

SEQ ID NO: 46949 - DNA, 487 bp, Homo sapiens
actggccgtctgttttacacccaggaacacagggtacccttgctggctgccgggccccccctcgagagtaacttctagaattaattaaggcgggggaggggttgggtaaagaagagaagacgagctttccacagaaactcatgcgagagtccaggggggttcacatttggttcaagagggccagcattgcacactagaaatagcccccatccctggactggccaggacatcacttacccacccccctgacttcaatcagagctgggacgcacaaccccactgatgtgaggcctgcttggtgcaccgaagttcctcctgctgactcacactgaagtaccgccgcaatatggagaaattccatgacaaaagagagtattcctgacatttttccaagcactcagattttccagtagattgcactgagcacagtatttctgtcatccaaactgcgtaggaatagctcaatgtttccaaagtgaagtggaaa

SEQ ID NO: 46950 - DNA, 302 bp, Homo sapiens
ccaagtgaagaccaacacagcgcaaaaaaagagaacaagaaagaagcactaagaatgcacggaaaagaaaaaccgcgtaagtcatgataatgctacctgtgcaatataaggttatttaatatttgtcacaatataacgccacccaaacattaaaaaaaaaaaaagagtctcactatgttgcccagccgggcctcaaacttcgggccaaaagcgagccaccccctcctacccttccccacctggcctcccaaagtggtgggataaaaggccggagtcaccgcacccggcccattttaacaaat

SEQ ID NO: 46951 - DNA, 199 bp, Homo sapiens
taaccctcactaaagggaacaaaagctgggtaccgggccccccctcgagagtacttctagaattaattaaggcgggggagaggtgagttgtaaaaggcaccgcgaagtaggtatcttttttgagaacaagtttgtgtaattgtgtggttgtggggattgaggggaatgacattgcgcagcctgactcaacacagcgcac

SEQ ID NO: 46952 - DNA, 480 bp, Homo sapiens
cgcgcaattaaccctcactaaagggaacaaaagctgggtaccgggccccccctcgagagtacttctagaattaattaaggcgggacaaatccagagtacaaaagtgatggtgactagaggaacaaggcaagatggtttgccctgatttttaaggtctgactcgggtctgtgtgtcaaagcaggctcccatggcacctgacgtgacagccagcaccacggccacaggagaaaactctcagccatggggagctccaggcaaagcaggaggggaggaaaaaaaaacacataaaaatagcctttatgaatctttctcaatcagtgaacataatggctcaggaactccaataagtaagaaactgccacaagcaaaacaaaaatggagtaagctatgaagagaaggcaaccaaacaatcacgattctcttcccgcaataaggtctagaaacaaaaataacaaaaagcctgtgaagagcatcccaaa

SEQ ID NO: 46953 - DNA, 274 bp, Homo sapiens
attcaattaaagatcagtagaacagaggatactagacactggaaagggcaagggcaagaagaggacaaggagagatttgttcaaggatccaaattacagctaataagttctagtgttccattgtactgcaggatggctatatttaacaatcatatgttatatagtttcatagagctagaagaaagatattgaatgttcccaacacaaagaaataatagatgtttgagatgatgctattgagatgtgctaattactatgatctgattactatata

SEQ ID NO: 46954 - DNA, 267 bp, Homo sapiens
acaaaagctgggtaccgggccccccctcgagagtacttctagaattaattaaggcgggcatttaataaatgctgtgtcaataagtgaaaatgagcataaaatattcaaatgtacatatcagttctatcataatgtacaaattttaaagtaatttcaaaatatctaattactaaaaaaaaaaaaaaaaaaaaaaaaaaaaggggggccccccccggggggggcccccattcccccctaagggggggttttttcccccccccccggggc

SEQ ID NO: 46955 - DNA, 579 bp, Homo sapiens
  misc_feature 528: n = A,T,C or G
aaagcggaacaaaagctgggttccgggccccccctcgagagtacttctagaattaattaaggcgggcgactatactacaccttgataaggacgttcaagcagggaaaccgatatagcacctttggcgccgcttgccctggaacacctgtagcccttagaacctccacccggtggacaaggatttgactcacacctccttgatctgttctgttctttaagatggactctcactctgtcacccaggccggagtgcagtggcgtgatctctgctcaccgcagcctccgtttcccggactcaagcaattctcctgcctaaccctcccgagtcgctgggactacaggtgcccgccaccatgcctggctaatttttgtattttttgtagagacagggttccgccgtgttggccaggctggtcttgaactcctgaccttaagtgatctgcccacctcagcctcccaaagtgctgggattacaggcatgagccaccgcgcccggcctgaactctcagttctaacgcaaggattcangaattgggctttcaaactccttctgcagtgtcacagtccagacttttttta

SEQ ID NO: 46956 - DNA, 468 bp, Homo sapiens
gaatacaagggaacaaatgctgggtgccgggccccccctcgagagtacttctagaattaattaaggcgggggagtatttataaatacaaatgccccattcacaggggactttttaaaggtgcaaactactgtctatgatactgtagtggatataggacactatgcatttgtcgaaacctacataacttttcaacagagtgaatcttaatatatgcaaattttcaaaaaaattcatgtaggaggtcagatcttaggatgtaaaacagaatatgacatataccagtttttgtgacactcaggtgtacccattaagcttttcatcaggagtccctcaaaggccccaaaagtctagaggtcctagcacagtatacaaattttagtatgtgtggacattcatgcctttttctagggaaagggcctaaggctttcacaaaaaaaggctgagaaccactgacatttctccttgcc

SEQ ID NO: 46957 - DNA, 546 bp, Homo sapiens
ctggccgtgcgttttacaacccgaaataaagggaacaaatgctgggtaccgggccccccctcgagagtacttctagaattaattaaggcggggtatgggtggtaaaggcaagggctcctggaagtaaatatagaagtgccagcggttggtgttggcattagctttttggctgtaacataaaccccgtcagcatgtctatgcatgcctatatgatgcaaacacatgtttgcaatagaggctagtttgagattttcacaacagtaagtctaaagttgtagttctcaggccgggcgcaatgcctcacatgtgtaataccagcactttgggagaccgaggcaggcggatcacctgaggtcaggagtttgagaccaacctagtcaatgtggtgaaaccccgtctctactaaaaatacaaaaattagtcaggcatggtggcgcacacctgtccagctacttgggagactgaggcaagagaatcacttgaacccaggaggcggaggttgcagtgagccgagattgcaccactgcattccagcttgggcgacag

SEQ ID NO: 46958 - DNA, 236 bp, Homo sapiens
  misc_feature 157: n = A,T,C or G
gggagcctgtgatcccagctacttgggaggctgaggcaggagaatcgctagaacccagaaggcagaggttgcagtgagccaaggttgcaccactgcactccagcctgggcgacagactgagactccatctcaaaaaaaaaaaaaaaaaaaaaaaaangggggcccccccccgggggggcccccaattccccccttgggggggttttttaccccccccctggggggggttttttaaa

SEQ ID NO: 46959 - DNA, 463 bp, Homo sapiens
taaagggaacaaaagctgggtaccgggccccccctcgagagtacttctagaattaattaaggcgggggggaagcttgagagggataaaagactatatattgggtacagtatacactggtcaggtgacaggtgcactaaaatctcagaaatcatcactaaaaaacatctatgtaaccaaaaacccacctgtaccccaaaactattgaaatattttaaaaaataataaattttaaaaataaagtaaaacttgaatggaaaatgacaggtatgctgcatatacttgtccctcctgaaccattctattaagtttcccacgactggaaggaaaacatgtattatttattttttaaaaaacagggcagtgggagggatatttctttgttataaagtactggaaattttgagagctatattatacccatattcatctcttcttgatgtaccctggctgaaactgtcaact

SEQ ID NO: 46960 - DNA, 308 bp, Homo sapiens
ggccgtcgtttttcaacctcactaagggaacaaagctgggtgccgggccccccctcgagagtacttctagaattaattaaggcggggtatgggtggtaaaggcaagggctcctggaagtaaatatagaagtgccagcggttggtgttggcattagctttttggctgtaacataaaccccgtcagcatgtctatgcatgcctatatgatgcaaacacatgtttgcaatagaggctagtttgagattttcacaacagtaagtctaaagttgtagttctcaggccgggcgcaatgcctcacatgtgtaata

SEQ ID NO: 46961 - DNA, 451 bp, Homo sapiens
ataaagggaacaaaagctgggtgccgggccccccctcgagagtacttctagaattaattaaggcgggggggaggccagtcattaggagatatacctaatgtaaatgacgagttaatgggtgcagcacaccaacatggcacatgtatacatatgtaacaaacctgcacgttgtgcacatgtaccctagaacttaaagtataataataataatacgaatttcatcattctgaatagctcaaaatgttcctctaagtctcgatagtagcaatagatcacagaactaaactgagttgcctgattgttgtgtatcaataatgagtatgctagtggggctttggatcattaaaaaaataattaaataaagcataaaaataaataaaataaaactggccttgggaaaaactataaattatcactttgtaatcaccagatgatgtgctttaatgagaac

SEQ ID NO: 46962 - DNA, 470 bp, Homo sapiens
acataaagggaacaaaagctgggtaccgggccccccctcgagagtacttctagaattaattaaggcggggggcattaaacagttggctgaatgtattcagcatttgttagattaatttagccatctttctttgaaaggaaatgctctccccagggcttttttgtcttctttttctttcttttttagttttagtttttagcaggttttttaaatgcctttataccaacactactaaattatgagagcgagatgtccaggcattgtttttccaaacagcacactaattgctttggaaacaatgataacgctagcatgttttgagttaacatcactcacatggcttacgtctgcataatgcaaaagtaataggttaactaaacaagtccctccctaaaactgagtcatttcaataaaccaactagttgaaattatcattgctatcttatagaggcaaaagaactagttaactg

SEQ ID NO: 46963 - DNA, 627 bp, Homo sapiens
tcactaaagggaacaaaagctgggtaccgggccccccctcgagagtacttctagaattaattaaggcgggttgaataggagaggaatagaggagggggtgctatttcaagaaattgactaggaatggtttcattcatgtggtaatatttgagcagatccctaaagacattagagcatgagacatgcagatatctgggggaaagcataccaggcagagagaacagcaagggcaaatgtgccgaggcaaaggtgttcttgatcagtttaagaaatagcaaggaaaggagtaagaagaagaaatgcattcatctcttgaggttgtagagggtggcttatgagctctgctgggaacttcagtttttagtgtgttacatgatttgatatagaaggatccatcaggcagctgtgtgtcgaatacactgcagggaaggcaagagtgagaaaaccaataagaaggctacaacgatatggctattgttgtgaaaaatcttaaataaattgctaccatataaaatccatcaggattaaacaataatgcatatccaagaggctttattttaggagtatagagatgagttaatatcagaaaaactattagagcagtataccatattaacaaattaaaag

SEQ ID NO: 46964 - DNA, 420 bp, Homo sapiens
ggaacaaaagctgggtaccgggccccacctcgagagtacttctagaattaattaaggcggggtatactaatttgtagtaagtcacaacttataattaaactaagcctatgagaaataactcaaaatatctcaacagatcaaaatatctactttaaaaatctggcagaaaataactatgatgattttcataacattttaattatagtttttattgttaacattactcagcttctactctgtgccaagctctgtgctgagcattttctcaaaacccttcagtttcctaatgcatacaagaaagcaaaaatcctaattcctcatggtctattatgatctgcctcctaactctctctttaaaaagaaaaatatgaacataattttattgttggacctattaaaactgtaaattcgatatgcttt

SEQ ID NO: 46965 - DNA, 597 bp, Homo sapiens
aattaaccctcactaaagggaacaaaagctgggtaccgggccccccctcgagagtacttctagaattaattaaacatttacttattgcccataagtttggcaagagttaaattatatacatacatacatacatatatctatattttaaaattttgcaaaatatagagacaaagtctcactatgttgcccaggctggtctcaaactcctgggctcaagcaatactcccaccttggcttcccagactgctgggactccaggcatgagccaccatacctggcaagagttataatgaaaagacacattagagaccattgagtcaaataccttatttcacagggaaaaaaaaaaagcccagagtggttaagtgacttgagctcaaagtagttaagtgacttgctctaaggtagcacataaacagcagacctaaaactaagtatttaattatttccattcacttaaacatctattgtgtacctataggtattgataatcatctaggagaatctcttataaagatgaacagaactaattattcataaatcagtaaacagtaacaaaacaatatcatggttcctgaagtccttcattctcatctt

SEQ ID NO: 46966 - DNA, 498 bp, Homo sapiens
gcgcgcaattaaccctcactaaagggaacaaaagctgggtaccgggccccccctcgagagtacttctagaattaattaaggcggggatcaaatgacaattctaagattgtctaggatatgaaagatatagttgcatctgcttgaaaggtagcacaatgttagttgggtaatgagaagaacttcctgtgaagaatgagagatgggaacttattgagggtaatctgcttagggcaaattactactcaacaaatcttataatagcaaaaagaatatcttatccaaaaagtgctttctagttctcattaactgcccttaattaaggcgggcggatcacgaggtcaggagatcaacaccatcctggctaacacggtgaaaccccctgtctactaaaaatacaaaaaatcagccgggcgtagtggcgggcgcctgtagtcccagctactcgggaggctgaggcaggagaatggcgtgaacccaggaggcggagcttgcagtgag

SEQ ID NO: 46967 - DNA, 295 bp, Homo sapiens
  misc_feature 275: n = A,T,C or G
ctggccgtcgtttttcaccccggaaaaagggttaacttgcttggttgccggccctctttctctagagtacttactagaattaattaaggtggggttgggtaaagtagattaggtgaagtagaacataaaattgaatagtacccaattaaagttcctcagtaagaaaaaaaatgtgtttttgtaggcaaaaagaacatttctaaagtctcaaggaatagcttcctaaagtgctgagtaaagaggctaaataaaatgagactagtttaatattgaanaaaaaaaaaaaaaaaaaaaa

SEQ ID NO: 46968 - DNA, 489 bp, Homo sapiens
  misc_feature 424: n = A,T,C or G
ctggccgtcgttttacacccaggaaacagcgtgtgaccatgatggctgccgcggccctccctcgagagtacttctagaattaattaaggcgggattacacataagaatttctgccaccatcggaaataggaccctagagtgagaattgactttcttccgtctgccacagctgtcagtctgtgaatggatttccactagggcaatgttgtctgcctgtatttctgcctgtttttgttgtgagtgataggatgaggacacaacaactgacaaaaatacggagagctgatgggcttcttcgaagctgcctgcaagcctgtttcacgtgacgtgttccgttgttgaaatgacaccttcccttatctgccagctctgttaacacacaagatgaccttggcttcagcctgtcttgaggggctggctgttntactttactaaatgatttggttaagtcagaagtggttatccctgatcaattctccgataagtgcc

SEQ ID NO: 46969 - DNA, 500 bp, Homo sapiens
cctcactaaagggaacaaaagctgggtaccgggccccccctcgagagtacttctagaattaattaaggcggggaatctagctcatgatcaagggctacatttatatggcaaaatgcttaaatgccacccgtatagaacctctcagtgtgtatagaaccatccataagttttgacgtatgtgatgtactatcactgcccatgctatgctgtgacccacttttcattcgatgacctgggtcttctgccatagaattcgtgcccacctagtggctgcattcactctatggaggcaaagcgtacatagcgctcaccctacgacgatgttcaccacagaacataccaaatggctgtccaaaattaaataaaattgtacacgctatatttgattaagtaatcaatatccgctgtattattgattcatagtaactggaacttcatttaacaaagtcacgtccttattgagtcttctagaataattctttagtaaacatccctgttta

SEQ ID NO: 46970 - DNA, 403 bp, Homo sapiens
gggaacaaaagctgggtaccgggccccccctcgagagtacttctagaattaattaaggcgggaaaattgttggaactcgggagacagaggttacagtgagctgagatcatgccactgcactccagcctgggcaacagagcgagactctgtctaaaaaaaaaaaaattactaattatgtttgtttcaggatatgcttctctttctcactaacacaaaaaaagaattgtcatcaaatacagatatatgaaattatatccatttcacaataacagaataaaatctatattttaaagaataggaacaacatatttctcctaaatataatcaatatatttcttcaaagccttatgaaaactattaactgacatattaatttaacattataaaagtttcaaacaggctg

SEQ ID NO: 46971 - DNA, 455 bp, Homo sapiens
gggaacacatgctgggtgccgggccccccctcgagagtacttctagaattaattaaggcgggcaaatcatttgaggccaggagttcgagaccagccggggcaacacggcaaaaccccctctctgctaaaaatacaaaaaatagccaggtgtcgtggcacatgcctgtaatcccagctacttgggaggccgagccacaggaattgcttgaacctgggaggtggaggttgcggtgagccaagatcgtgccactgcattccagcctgggcaacagagtaagactctgtctcaaaaaaaagaaacaaacaaacaaaaaacatgtaattaataaaagcagtagacttgaaagcaaaactttacacatattttttgaataggtaaagttcccatggttcaaacattgaagaggtaaaaagatacacagacataccttactttattacacttcactttactg

SEQ ID NO: 46972 - DNA, 401 bp, Homo sapiens
cgcgcaattaaccctcactaatgggaacaaaagctgggtaccgggccccccctcgagagtacttctagaattaattaaggcggggaaaagtggctgctgacaattaaggggagaagcattcacaaattcctgaaattgtgcctaaaaacaagcaatacattcactagttcctcatcaatcagtggtttagtcagaatagatgccaatgaactagtgaagggtgtatatttttttccttttcaccaaaataagttgaacaaaattcctgtgtgattgcatattctaaaatctaagtttcatgtttgccaacattgctaagctactatatcaattgtctggcttaagccaaataaaacctttcataactttggaagaaacttctacccaggaaactgtagatt

SEQ ID NO: 46973 - DNA, 463 bp, Homo sapiens
aaagggaacaaaagctgggtaccgggccccccctcgagagtacttctagaattagattgaatacacttttaaaaacacctgtgataatgacttacttgctttaatgcctttgaatcacttcctagctaaggtcttaacgtaagatttagcaatttaaattacgttattttatggacaaaatatataataatgacattaagggaaaataaactgtaaggcaacctttcctaatctaatgatggaattgagtgaacagttggttacctgtaagaagagcaaccaagttaaaagaataaaacgttcaaaggccataagccataaggtttttatgaaaacctcagaaaacctcattgaaatgccatgaaattaaaaagcacaccaaaaggaaaataaaagttataaaataagcattcaataaacatataaacttatacttcacttgcagttaaagaagtacacattt

SEQ ID NO: 46974 - DNA, 484 bp, Homo sapiens
aaccctcactaaagggaacaaaagctgggtaccgggccccccctcgagagtacttctagaattaattaaggtgggtggaggagggctgcaaaggctattcagttgcttaacctactctaggctctatcccaacagtaagtgcagatactctaaaataacagttgaaaatacagtgaggttttgagataacaaagccaccctagaacaatgattctccaagtgttttaagaggatcactggcacagaagcaactgggataatgttttaaattatccaggtttctgggccctgcctcatccttaatctgaacctctatcggtgtgatctaagaatctgcattttatagcaagtacttcaggtgattcctacaatgccaaagtgtaagaaccactgcactagagggtattaatatttttccttcaaggcccagaattctcaccttgaaatctgtcacatacatacataatatcatatttctcaatta

SEQ ID NO: 46975 - DNA, 270 bp, Homo sapiens
  misc_feature 199, 200: n = A,T,C or G
accgggccccccctcggagtcttctagaatttattaaggcggggggggaatggggggcatgtttcaggaactggctccccgggctccgccctcctgtgagcccaggagaggctgtgtgaggggtcttccctcttcatccaagctgctgcctgcctttcccttccctcaagaggcaaggcagtgggaggggctggaattnntttttgtttttttttcttttttttttgttaattttttttatcctgttctttttttttttttttttctttt

SEQ ID NO: 46976 - DNA, 355 bp, Homo sapiens
gaaaaagggtaacactgctgggtgccgggccccccctcgagagtactatctaaaattaattaaggctcattaaaagcagaaaagaaaaacgaaagggaaaacttggagacctggttacctcccgatcctgatactgatcccattctgtaagctattattaataacaaaatatgaagaagaaaaaaattatcaacaggaaagggagttaaattgtgcgttaaatatacatttaaattttctgaaaaaggaaaacaaggcttccctgagaaatgagctggctggaaggaaggctggagccctgcagtatcaagaagcagatctgtcccagaggagggagggcacagaaaattcctgc

SEQ ID NO: 46977 - DNA, 324 bp, Homo sapiens
accctcactaaagggaacaaaagctgggtaccgggccccccctcgagagtacttctagaattaattaaggcgggataggtagactgaccctaaaaatacgctttatattttaaggtaagggaagagtttttcttttgtcccatgcttgaagctttctcctacagagggacgtttttttctgaattgtggcggtagctactttcctgaggctggttaccaaaaaaaaaaaaaaaaaaaaaaaaaaggggccccccccccggggggggcccccaattccccctttaggggggttttttccccccccccttggggggttttttaaaa

SEQ ID NO: 46978 - DNA, 679 bp, Homo sapiens
  misc_feature 609: n = A,T,C or G
aaagggaacaaaagctgggtaccgggccccccctcgagagtacttctagaattaattaaggcgggcgaatgggctccacagggagtgttccctctcaggtgggcagggcagggtcctggttgttgattttaatgtcctcgataccgtacatgttacatacattctttggtgttgtacaatatttcacaagaaaaagatgatggaagacagtcgcccaccctcagccacagaaccgtcacccactggcccgggttctacacacgtactcccctcttccctccctcaaaccatgcctaccatctcagccttgacgaaaagcagctgtgaactaagtaaatgtcctttgctgaggggttccccaaggagggagtgagctaaggctgcttttgggggatgttaggattggaaagagcagttacaactgtccccaggttttgcccaccagtccagtaggttttcataaaaactaggtgtctatccaaatcttccaccaacatagctacttttagtttctttctactatttcaggtattgaatctattgtcccaaccagatttgggacaggtgggagcatctggggcacattcctgacagctgaaggccacgtanggtggccgccatttccttctctgggagcaaacagctgcttcagcaataacctggggggctagaatgccca

SEQ ID NO: 46979 - DNA, 617 bp, Homo sapiens
taaagggaacaaaagctgggtaccgggccccccctcgagagtacttctagaattaattaaggcgggccgatactaaaaatgaaccagacaaagcacaaatgaaaggaacttttcctaaaatgaatacatcctgttagattcgaaaatatactatcctcatggataatcattttgtcagcctatccataattacttttcattaaaatctgtaattgtctttagcaggaaaaaaaagaccgaactaagtacatacgtaatctgtaacatagattttatattaaaatctatttgaaacatttaagatttttcacactaaaaaaagagagatcacttgaaaaatatatgacttaatagtcatttacttttgtttacaaaacaggaaagaaaactgactacaattccagaactagtaaatcgcaaagttaacatctaatgtctaatcatctaattccaaacttcatgcaactgtaatcattcaactaatcaagaatctttaaaccattctgacatactattaaattagcaattccacaaacattagccgtttttaaaatccaaaaatccagatttctttgtaattcttcacgtccaggaacaaaaccatctttaaacaacgt

SEQ ID NO: 46980 - DNA, 485 bp, Homo sapiens
  misc_feature 382, 383, 386: n = A,T,C or G
aaagggaacaaaagctgggtaccgggccccccctcgagagtacttctagaattaattaaggcgggggacttcaaaataggagcggttagagcaggaaaatagtatgttccattatgaattttgtacgatttgattttttatcttctttttccccttctttcagtttgttatactatacacaagcatcgttttgatagtaaaaaataaacataaatgccttgaacaggatttggtacatagtatgtgctcaatgaatatttgatgctgatgtttttgctactgtgatctttattaaagctgcaacactaaagtgagaatcaattcatattctgcatgacaaccctaagataagttcttttatacctctctgtttctccattcnnaanaaaaaaaaaaaaaaaaaaaaaggggggcccccccccgggggggcccccaattccccctttagggggggtttttccccccccccttggggggttttttaa

SEQ ID NO: 46981 - DNA, 467 bp, Homo sapiens
tacataaagggaacaaaagctgggtaccgggccccccctcgagagtacttctagaattaattaaggcggggataatcggaggcagagcagaggctttacatgtggctcacagaatcgatctttttatgtctctgtagttacactgtatacatcatcctggatcacagcagagccaaagtgacaacatcccacagaaaggaaaggcaaaatccctccatatctgtgtacatttctgtttggaaagcctagaaacaaaatcttggaaccatataactcattctcactgcagtgttctcagaaatctgcccctcccaactacttgtcagcccacatagttaatacccagggagaaataatcagctcaaacaagatgattctggccatatgttacttttcaaagatgccaaaactatcaataatctctcattgaagtctctaaaccaaaaaaaaaaaaaaaaaaaaaaaaa

SEQ ID NO: 46982 - DNA, 503 bp, Homo sapiens
ttaaccctcactaaagggaacaaaagctgggtaccgggccccccctcgagagtacttctagaattaattaaggcgggggaattgaagcaatattttagtagatagtcactggaggttttccaaaactgacatcaagccacagatgtaaagaagagttatggacccaaatgtgataaacacaaagaaaacttatatatgctgtcatcaaactgctgggaaccaaagacaagagaaagtcttaaaagcagccagagaagaaagacattccaccttcaaaggagcaatataagactgaaagcagcctctcagcagaaataatggaagctacaagacagtggattgacatctgcaaggtacagaaaggaaatatccaccaacccagaattctacttctaatgaaggagaaataaaattatttttataccaacaacaatgaaaaaaaaaaaaaaaaaaaaaaaaaaagcggccgccaccgcggtggagctccaattcgccctatagtg

SEQ ID NO: 46983 - DNA, 259 bp, Homo sapiens
agggaaacaaagctgggtaccgggccccccctcgagagtacttctagaattaattaaggcgggggtggaggtttccctccaggctgatgggacatgctcaaccgtttatttacctttgaatttggggagcagaactagccagggtgacactagtttctcccaataagcagtgttacagttttctaaatctgtggggtcagttttgcttccacacttaaaagtggccgagccattacttagtcagtcctaaattacaccg

SEQ ID NO: 46984 - DNA, 471 bp, Homo sapiens
aaagggaacaaaagctgggtaccgggccccccctcgagagtacttctagaattaattaaggcgggctcaactactcgctctacgaggtcccttgccattctagcaccctagattatcctcccaggaagggcacactgtaatacagcagtacaccttcatgtctcaggaactaaactctgatttacttctgaacaccagcaaaattatttttgtagttgcaaaagttttcaaggacatgttgaagacctggagcctttggatagggaggctgcgagaaggaaaagagaaataattaacagaccaaatggggttccgcattcctttaagcaaactcagtacaagaaaatggagacttatagaaaagcaaaattaggagctaaatgtttattttgatcaaggaatcttttgttaggaaaaccttcacttataggatccttttaaatagtatgtttctctagagcattgaaaatg

SEQ ID NO: 46985 - DNA, 304 bp, Homo sapiens
aaagggaacaaaagctgggtaccgggccccccctcgagagtacttctagaattaattaagcggggactcaatcctaaagcattttattataattaaaatattaataccacgccgagcaaagaacaagaccttgtcttacaaaaaaaaataaaatctaattaatactacctgggctttccttttagtttcctaattgcccccaaaaaaaaaaaaaataaaaaaaaccgggccccccccccggggggacaccctattccacttttaaagaatttttttcccccccccttttgggcctttttaaaaa

SEQ ID NO: 46986 - DNA, 616 bp, Homo sapiens
ctaaagggaacaaaagctgggtaccgggccccccctcgagagtacttctagaattaattaaggcgggaatacagaatttggtttttttttcacagtgtgccttattttggtcctacatttctgagttctcaggacagagtgcatatacctggttaaatacaaaactgaaaaactgaatttaaaaataaacactatgaacatcagttactagcatttcaaaacacaataaatttacttttagagtgctacctgggttttaaacattttgtacagcttttcattttttagagattgtagatgtaaaaaaataaaactagagataaatgatgataaactggattttctccctacaaaacaaacatttggtttaaactttatttctggtaaacatgccaacatagaacataaaattccttttgaagtaggttcctatgcttcatggtgaatgaaaagaaagcaaaaatttcaaacaaaggcatatataagtaaaaacctttgagaactaataaaattaatccttacatgtgtgttccaatttctttgacttcatgatgtatgacatcatcaatacaacaatccggtttaagttcagccactgcagcattggaggctgaaa

SEQ ID NO: 46987 - DNA, 353 bp, Homo sapiens
ctcttcacataagggaaacaaaagctgggtaccgggccccccctcgagagtacttctagaattaattaaggcgggggtgtggggggatgggccaggcatggtggctcatgcctgggaagcctaggcagaatgattacttgagtccaggagttcaagaccaacctgggcaatacagcgagaccccgtctctccaaaaagtttttaaaaattagcctccctctcctctcctctcccgtctccacgtcctgataaatcgacgccattgtttttccttcataacatgaactaggaatgtctgcttatcaatataggttacttagcctggtttttcatctttagcccaacagttcatt

SEQ ID NO: 46988 - DNA, 495 bp, Homo sapiens
gcgcgcaattaaccctcactaaagggaacaaaagctgggtaccgggccccccctcgagagtacttctagaattaattaaggcgggcacaaaagtatttcccttattattgattatcccatagcaatagccctgtgagcataaacatgcaatcagtgttcaaaggacttatatgaataattgttaacacctattcggaatttgcatgccactgtggcttgatttctggattaccagagagtaagttgtcttcatataatgagttttattagagatagacaatttacttttaaattacatggtttcaaattttatttctattgaattttacattgttaattattaatattattaaatgttgacagcctattcttggatttttccaagtgtttaaaatttcatttaaacaattccaattttctttctttttaaagaaaccgtatcctctttcagtgcactttaatgagttacactcttttctgggttccgatttcatg

SEQ ID NO: 46989 - DNA, 577 bp, Homo sapiens
  misc_feature 417: n = A,T,C or G
accctaactaaagggaacaaaagctgggtaccgggccccccctcgagagtacttctagaattaattaacttaaatgaacctattcagactggagtgttgggagtagtgaagtcaaaattgctgtagggtcaaatgccaacatgaaacccttatgcccactgccagatgaggaagccaaagctgagacttcaggatcctagaaagcaccttggagttgttagctccccatagccactagcagaaacaggaaaatggaggtactcgggatttccatagatttatgtcaacatatgatgagcttataaacaaaaactaccacacacacatgcatctgcatggaaaaagccaccatagaagagattcagcacaaactgtaagtagcaggtttaggttaccccatcctcccacgctcacacnttggatactgacttcagatactggaaaatcatcagatacagaattataaaataagttaatgcttaacaaaataatatttaaaaggaaaaataagcaaccaaaaagtgaccgtcaaaaacaacaaggcatacttgaaaaataatcaaatataagtttaaaa

SEQ ID NO: 46990 - DNA, 489 bp, Homo sapiens
ctaaagggaacaaaagctgggtaccgggccccccctcgagagtacttctagaattaattaaggcggggttcaatcttagggaatagacatttgaaagaaaaggaaggaacatgaggaatgaagggaacaaatgagaaacatgtgcctgctatcaacttagagtcggtgaagcaaattggtaaacattggcgaattttatggggttattgatgacccaaactctaagcttctttgtaaattgggaatttttcaaaataaaatgttctgggagatggtaaaacaaatgtggagaaagcaagtccagagtgcagagctcaagctaaaaaaaaagcatttgattttgtgtttgagaagataacacttgatatttaagattttcatgcctttaaagtgaagttgcaggcattgcattgaaaaaggtttatgcagctatagcattgacgtatagagttagaagttaaattgaaaaataaagttagaagtgaaaat

SEQ ID NO: 46991 - DNA, 478 bp, Homo sapiens
aagggaacaaaagctgggtaccgggccccccctcgagagtacttctagaattaattaaggcgggatatctgtttcagtggaattttgaaaaaaaatagctgcctgagttgtaggtaaagtgttctttaaatgtataatatgacttggaaataagacatcatgtgaaatcatcaggtggactgaaattctgttcgaattctatcagtgttgcctgcctgaccctagctaattctgggaatctagatggctttttccccagtggatagaagtttgtggctaatacaggtttcattaacttttttgtttgatgttcaattctagttctcccagaggcgagctattgaagggtggcattcagtgtcgtgcattgcttcagaattagataccccattccaatccacttgagtcaaggatgctgtaggggaattttgtaacttcttagcttactgttgagtggatcatttataaatcaagaaac

SEQ ID NO: 46992 - DNA, 509 bp, Homo sapiens
cgcgcaattaaccctcactaaagggaacaaaagctgggtaccgggccccccctcgagagtacttctagaattaattaaggcggggaacatagtaagtgctgatgatttggtaataaataggacagacaaggcgcttaccctcatggagtttatagccggtgttgcagtacagatactaacacttaaacaaataatatcataatttccggtcatgattactactaggaagaaagtaaaccaaggtaatagctgcaaaatgacaatggagtgaatgagaaagacggtgatgtgaaattaggtcagagagttgggcaggaagaaaattattcagcaatttgtagattttagctgtaaactttggatttaatttgttaaagacaattatccaaacttgggtttaaatacagctacgtaaccattgggtagagtatccttatttgagtactgtcactcctgactaagacacaacatttttagaactctgtgaagttagagattaatttggggga

SEQ ID NO: 46993 - DNA, 482 bp, Homo sapiens
taactaaagggaacaaaagctgggtaccgggccccccctcgagagtacttctagaattaattgggggggggagagagttgctacgcttaatacaacatatttggatttccccttccttcctttgctttgagtcttacaacaagttgctttcattgatacatgagcaggccaggactagagaaattacgtttgtgcacattagtaaaaattcagaaatagctgttgatatttgggctggctctttccaaaacaattttttttgtaactgcctgtaagcacagaatatagtgctaagacttcttagaagcatcctaaaaatagatagaaaccttctcagctttctctacttcacaattcccactcaatgccacttttttcctcaaattaataaaacaaaaaaaaaaaaaaagggggccccccccgggggggaccccaattcccccctatagggagtcttttaaccccccctcattggccgtttt

SEQ ID NO: 46994 - DNA, 474 bp, Homo sapiens
ctaaagggaacaaaagctgggtaccgggccccccctcgagagtacttctagaattaattaaggcagggtacatgtagggaattcctggtgcatagctctgaattctgaattgaatttccatagaaaatgcagtacgataaataagcgaatgccaagtggtctggatataagaaaaaataatcattgcattggtcagtaaaataaaaactgagtcaaagtattattcttccttacggtgacaatatctgtgactaaacctaattaatcattttgattttcataggacgaactgcacagaagttaacagcaacggtttagagtcagacaacacacgattgaaatttttaggctgcaatttttaaagtggctgatttttggtcaaagtctcttagctttcccaagcttctattttcttaattataatataggaatatagctatatatgtaactgaattactgaacttatctggatgg

SEQ ID NO: 46995 - DNA, 470 bp, Homo sapiens
ctggccgtcgttttcaatcctgagaaacaggtacacatgctgggtgccgggccccccctccagagtacttctagaattaattaaggcgggggatgccaacagaacaacctgaacccccctctgggtgacagtgacctcttttcatctagatttttttaaattgagaggttgggtgattctttgtcatttcttttggaaattagctttttaattcaagaccaggaatttttctcttaaatatacaaatataaagggcattaactgcttttaatttcaaaaccatggagttcctgtaatcagctgaaaaataagaaagtgatttggaggtaggccacacaaatgattttttctttattttatatgtgaaatgcaatgttttaccaggatttaccatagaaaacaaggcccattgttttctctgcttctatagacattcaatgaataaataaaagttacagatgctataatgt

SEQ ID NO: 46996 - DNA, 467 bp, Homo sapiens
aaagggaacaaaagctgggtaccgggccccccctcgagagtacttctagaattaattaaggcggggggacaaccccaaactgactgatgcctcacaactgaagtcgttccttgcacctgcagtggatatacagagaaaaataccaaaggaaacgagcagtatttagaatgcaaagaattatttgtgcgtgaggttcttagttatcatttttattacttaaaaattattttgcaaaaaagttgaattagacatttatcacaatctaatatattattttataaatttagtatcttaatagataactttgtagattaatttctcactggcttgtggataggatttttgattcttaaaaatccaagtccttgtaggggccgggtgtggtgtctcacgcctgtaatcccagaactttgggaggctgaggcgagaggattgcttgagcccaggagttcaagacgagcccgagc

SEQ ID NO: 46997 - DNA, 467 bp, Homo sapiens
ctaaagggaacaaaagctgggtaccgggccccccctcgagagtacttctagaattaattaaggcggggaatttaccattgcttgcttcatttacaaaattacttaaaaatatgaacattatggccctttggggggtttctcagacatttggaaagcagcgtatacagaactgttcatgtatgtatgtattatacatattcaaaagtgatacaatttgaaattgctatcagcaaggcatttctagaaagaccaggcttttttcctaatcccctgtgaaacctgttattgattaattgtcgttatcctaagatatattatttgtctttgtacctagtaattggcatagtatttagatggtaaaataaattctttgtttagatgaaatatactggaaacaattctggaatgtgagttgtttttttttttttttttaaaaacccctcccctcccttggaatgggttttttt

SEQ ID NO: 46998 - DNA, 570 bp, Homo sapiens
aaagggaacaaaagctgggtaccgggccccccctcgagagtacttctagaattaattaagcgggataggccttatgctagaccatgaaacttcaatacgtttaaaaggatagaaataatgcaaagtgcattttgtgaacataatcacaggattaaattacaaataaaaaatgggaacatttgaagaactcacaattaggaaattgaacaacacactactaaatgaccaatagaccaaagaagaaaacaagaaggtaatcatcactttgaggctaatgaaaattaacacacaagtaaactgtacggatgcatctaaaaaagtgcttaaaggaaatttataggtgtaaatgcctgtattaaggaagaaataaagcaataacctttcttccaccttaagtcactgaagaaagaagaacaaactaaacctaaagcaagcagaaggaaggaaataataaaattagagcagttcgaaactctgtctcaaaaaaaaagggggccccccccgggggggccccccccccccccttatggggggtttttttcccccccccttgggggctttttgtaaaaa

SEQ ID NO: 46999 - DNA, 195 bp, Homo sapiens
cgagagtacttctagaaataattaaggcgcgcgttggcggatatgagactcctggactctgcagccaggagccctcatcccaacagcccaagggcatagacgtaagtactgaggagcacaggattagtccaagtcacattaatattctggaagctggccatctccaggatcccatatccgccaacccccattccc

SEQ ID NO: 47000 - DNA, 467 bp, Homo sapiens
cctcactaaagggaacaaaagctgggtaccgggccccccctcgagagtacttctagaattaattaaggcggggacaaatgcaaatgagaggcctcctggggtagctccttggatgtggcccttcatggtccagggacctgagaactgaatagccaagttatctgcctctcacaaacacaagttaaacagaagacacagggcaggaaattcccaacagacactcccattccaaaggcgcagaataaggagttacatagcaaccacactgctctacagtaattccaaacccagtcatcagctgtcgttggggtctcccattctgtaggaacacagatttgagcttcattctgctccatggaagtcattctctaatccgttgttctctatgcttagctccaccttctgagacatctttcaacaggaaatggaccatgtctgtagctaagtagctttcttagactactctc

SEQ ID NO: 47001 - DNA, 345 bp, Homo sapiens
accctaaataaagggaacaaaagctgggtaccgggccccccctcgagagtacttctagaattaattaaggtgggagatcacactgaatataattattcaatgccaggctgaagattgtcaatctatttttctccctataataacgttagggtaaacaaaataaaattatttcaagaaacatatacaatgaaataataaaacataaatgaaaactaccagacaaggggaaatacaaattaaaaaaaaaaaaaaaaaaaaaaaaaaccgggcccccccccgggggggacccccaatccccccttttgggagcctttttcccccccctcatgggccgttttttaaaaa

SEQ ID NO: 47002 - DNA, 639 bp, Homo sapiens
  misc_feature 48, 582, 583: n = A,T,C or G
cctcactagagggaacaaaagctgggtaccgggccccccctcgagagntacttctagaattaattaaggcggggaagcaaaatgccttgtatattataaggttatatttatgctgtacagtcaatgatattaactcactatgagatttctgcctgtggggttttcaacatctgaaagcaggaaaatatttctgctaagttttttcaatgtattctcattgtaagaatctacgtgattagatccttatgatcagtgcacggtttgctgttgatcttaagtcttttttcctgtatcactattcaggatacaccgtcattttatatttaggggaaggattaatccatcctacatgcactaccttgcatttgttcttactgaattttatcacatttaactcagacaatttcttaacatttttagcatcattatgaattcttctcaaataagtctctgaacatttttgttatgttttgtgaggataacatataaaatagaaattctgtatggaaacatccagttttttagatttaaaggatctgaaaaaattaattacataataaaagccattttaatccaacaatnnatttctatattatatactttgaacatttctttaatatcttaaattaaccaattaac

SEQ ID NO: 47003 - DNA, 390 bp, Homo sapiens
cctccttactggagggaacaaatgctgggtaccgggccccccctcaagagtacttctagaattaattaaggcggggggaaaaaacattttataatgaaagtatgtagggagtcaaatgcttactgtaaatgcataagagacgttaaaaataacactgcactttcaggaatgtttgcttatggtcctgattagaaagaaacagttgtctatgctctgcaatggtcaatgatgaattactaatgccttattttctaggcatataataatagtttagagaatgtagaccagataaatttgtttactgttttaagaaaactaccagtttacttacagaagattcttttttccaaacagtaggtttcatccaagaccatttgaagaactgcaaac

SEQ ID NO: 47004 - DNA, 287 bp, Homo sapiens
gctgggtgccgggccccccctcgagagtacttctagaattaattaagggcggggcctgatttacacgaaatatctcaaagtattgtgtagtcgcttttattctgcttttttttcgcctaagtatacagaaatcatcatccccatccataaagttagaagcatagtatttcaattgcaatcacagtaatacaatcatgaaagtgatatttgactggtaaatcataacttatacgtatactcacaaatcccagtgagttacacattcagtcctcctaaaacaaagtagc

SEQ ID NO: 47005 - DNA, 464 bp, Homo sapiens
aaccctgactaaagggaacaaaagctgggtaccgggccccccctcgagagtacttctagaattaattaaggcgggcgagcgccatgggttcgtgcttaaaagcagactgtcccctatgcataaacatttctcatattgggttctgtgaacataatacgtgggctgtgtagcgtgcactttaacaaatgtacaactgatgctgtgacagggcatccgcctgtcatcccacgtgtagagaggccaaggccggcatatcaccttaggtcacgagtttgacaacagactggccatcatggtgttacctagtatctactaaaaatacaaaaactagccaggcttggtggtgcctgcctgtaattccagctacttgggaggctgaggtgggaggattgcttgagcctgaaaggttgaggctggagtgagccaagatggcaccactgcactccagcctgggtgacaaagtg

SEQ ID NO: 47006 - DNA, 279 bp, Homo sapiens
ggccgtcgttttcacccggcaataagggaacacagctgggtgccgggccccccctcggggtacttctagaattaattaaggcggggtaaaggaataaagaacataggacaagttaccaagataaaaccatactttctaggaagcaagaaagatctatttaaacctgaaaaggaggaagcagtaataaaaaagacatgctaggaaacaaaaagctaagggcaaaatgtacaaacttagaagaaaggaaaaagaaaaaaaaagtggatggggggccccccc

SEQ ID NO: 47007 - DNA, 481 bp, Homo sapiens
  misc_feature 393: n = A,T,C or G
accctcactaaagggaacaaaagctgggtaccgggccccccctcgagagtacttctagaattaattaaggcggggacagatgagggggactggggctcaggaatagttggctaatggctccaaaaattacaagctagttaggaaaaataagttctaaatgttactatggcactgtcggtgactcctccccaacaagaatttattgtgtatcttcagatagcaagaatagaggatcctgaatattccaaataaaaatcaatgccaaatgtttgagggggtagatatgcaaataacccttatttcatcattacgtgttgtatgcatgtattaaaatatcactccattgcccataaatatggacaattattatgtgccatttaaaaataattattngaaaaaaaaaaaaaaaaaaaaaaaaaaaagggggccccccccggggggggccccaattcccccttttggggggggttttacccccccc

SEQ ID NO: 47008 - DNA, 489 bp, Homo sapiens
taaagggagacaaaagctgggtaccgggccccccctcgagagtacttctagaatcaattaacgcgggtggatcacgaggtcaggacatcgataccatcctggctaacacggtgaaacccagtctctactaaaaatacaaaaaaaaaattaccccggctcatcggcaggcacctgtaatcccaactactccgaaggctgaggcaggaaaatggcgtgaacccgggaggcagaccttgcattgagccaagatagcaccactgcagtctggcctgggtgaaagagcaagactctgtttccttacaaaatacaacaacaataattcccggcgggcccccccggggggggccccctaatcccctcagtgaggtgattttattccccccgtgtgtggggcgttttataataccgatatgtgtgcagaatagcaacagtaatggacaaagccgccacctcggccgctctagaactagtggatcccccgggctgcag

SEQ ID NO: 47009 - DNA, 239 bp, Homo sapiens
aaaagggtacacagctgggtgccgggccccccctcgagagtacttctagaattaattaaggcgggggattactgatttttaatgaagaccaaggaagttcattatagccacatgcctggcatctgaaacaagtattgacagacacttattttttcctactcctcttgtttctgatcttcctctttcacttccctacttattttattatattccttgccaaccatccttatttactcacc

SEQ ID NO: 47010 - DNA, 309 bp, Homo sapiens
aaactgggtaccgggccccccctcggggtacttctagaattaattaaggcggggcttatagtgagctgagatcacgccactgcactccagcctgggcaacagagcaagactctgtctcaaaaaaaaaacaaaaaaaaaaaacaaaaaaaaacttgttgaatagaaacagtattcctatattagtttcttattagtctgaaaatatggttattgctcatactttaaatatttcttggtaggaatcattacatcttacaataaggatttctcattataaagtgaaatattgtaatactaataaactatttt

SEQ ID NO: 47011 - DNA, 429 bp, Homo sapiens
aaagggaacaaaagctgggtaccgggccccccctcgagagtacttctagaattaattaaggcgggcgtggtggcaggcgcctgtaatatcagctactcgggaggctgaggcaggagaatggtgtgaacccgggaggtggagcttgcagtgagccgagatggtgccactgcactccagcctgggcaacagagcgagactcttaaaaaaaaaaaaaaaaaaaaagggcccggggttaaaagttaaactttaaaaaaagttgaaagcccaaaacccttttgggaaaaaaacctttaccttttgaaaaatttaagggtttattttcccctttttaaaaaaattcctcctttttttggggaggggccaaacccccattaaaatgttcttatttaaccaaatgggcttttttccaaaaaaaaaaaaaaaaaaaaa

SEQ ID NO: 47012 - DNA, 445 bp, Homo sapiens
ctgggtaccgggccccccctcgagagtacttctagaattaattaaggcgggctacagctacatgtatctgtatcatttataattgtgaccctgagcttataacagatcctgttttataaaataaattatggtcagaatattctgtgcccgtcgtgtctagattatatcattctattagcaatctcagtattttaaacttttcatatatttaactataaagggtgcattctttacgcataaactgtttatttccttgacataatattagcatttctatgtgctaatatatagttacctaacaaaagagccaagcccttacatgagtttgtagtcgaaaaagttgatcgactttgctaaaaggccatgaaattagcatacaaagccatctatttttaaatgtatccagaaaagtattagttacttattataatgaaacacagatgct

SEQ ID NO: 47013 - DNA, 353 bp, Homo sapiens
ctaactaaagggaacaaaagctgggtaccgggccccccctcgagagtacttctagaattaattaaggcggggggcatacaagtatatttggggaaggtgaattgatcattcataaaattttttggcacttaactaataactcatggatataaaccaaaacaattgcagtcaaaaatcaatgaagttcaggaacacttttcactagttaactatgcgtaaagctctgtgataagttttgagggggaaaaaaaaaaaaaaaaaaaaaaaaaaaagggggccccccccccgggggggcccccaattccccctaaaggggggttttttccccccccccatgggccgttttttaaaaa

SEQ ID NO: 47014 - DNA, 492 bp, Homo sapiens
gcgcgcaattaaccctcactaaagggaacaaaagctgggtaccgggccccccctcgagagtacttctagaattaattaagacgggatggctgagttcaagctaaatagtatttcaagtttcaaattgtttggatttctttttggttacatagtcctaatatataaatcagctgccttctgaaaattggagttttaagcagaatctcactaagacttctcttgttatctaaatctaaataaaaagggatttacatactgtcagtatatactgaacagaaaaccttgtaaaacagtagtaaactggagggatgcattagttttaacacaaagcaaaaccttgtaaactcaggagatagataaacctgccaatagaatcacaattctaaatgtgaatctttatcgaagtggtaactcagtgtaaagaagggttttaaatcagttcattagtctttatggtcgcttccgttgactagaagtaaaaccaccagcaga

SEQ ID NO: 47015 - DNA, 476 bp, Homo sapiens
ctaaagggaacaaaagctgggtaccgggccccccctcgagagtacttctagaattaattaaggcgggcgaatgaaacaaagacgggagcaggatatcttgattcacaacggtgctaattcacctcaagttattactgacaatgaacgctagtttgatggcatctcatatgcatataccaaacacagatgttcccgttcgactatctatggcattggcccacagagtcgaatgccaatggcctataacataaaagtatacgaatcctgcttgcgctacattcactgggatcagttctatgaaacagagacatttattaagaattcttcctcctgttcacaaaatagagtttttggatttgagaatttcctatgtgtcataggccacaaacatttatatataaaatataaaatatactgtttgttgctatttaaatactttacaattttctctatcatcttagtcgaatgttccatag

SEQ ID NO: 47016 - DNA, 505 bp, Homo sapiens
aaccctcactaaagggaacaaaagctgggtaccgggccccccctcgagagtacttctagaattaattaatttacagaaattctttttgaagaggggaagctaaaccatttcttaggaattttacatgaatttctgttatggtcttaccaccattatattttttttccaaatttcaagatttgatacacaaatgtaagtgtaagtccatgattttattaacttttaattataacttttttgagccttaaattttagaatatgaatttttaatttttttagtttgttctgttgaaggccctctattgatttacttattgtttatagatggattgatttacccattcactatataagcatttatcaagaattcatttggggccaggaatcctgtgaggcactggggattgaaagactaatccaaaaaatctgctctcaagaagttcatggtctagtcaataagactaactttaaaacaatgcacattttgaggatgacaattggtaat

SEQ ID NO: 47017 - DNA, 319 bp, Homo sapiens
  misc_feature 46: n = A,T,C or G
cgggccccccctcgaagtacttctagaatataattaaggggggganctgtgttaattctgctcaaaggcttgatgaaaatcacttattgttttgaaatgcaaatcatatcttaccttaaatctctcaaatgacccatgaacatttttagcccaccttcaaggcaatacagtatctggcagctacctgcactaccagcttcatatgtacttcgcactctttactctctaaactccagctatatcagcttaaaaatttttcaattgcaccaagcttattcctactccaagcctttgtacatattttcttactcttcctccc

SEQ ID NO: 47018 - DNA, 483 bp, Homo sapiens
ctaaagggaacaaaagctgggtaccgggccccccctcgagagtacttctagaattaattaaggcgggtacccagttaacctttaaaaatgatgtagtaagtttgaggaacccagaagcaaaggctttgctaggcagagaagtggaagagtacaagaaattaacacacctgtaaggttcgaagtgttatctcccttggctagcagagtgttcctttataaagaagctactctttgattaatagacttattgaatcaggtgaactaacatagttttagtaattaaagaattgcaaaatgttccaagaaaaaaaaaaacagacatttgtaattataacaactctagtagcattgcaggagtatttatcagttcttgtagtcagtatgttgacctcaaaacccctgaatgttacccaaatacctaaatacatggcttattttaggaaacttactgtactttattctgatggctctcattttgactaa

SEQ ID NO: 47019 - DNA, 271 bp, Homo sapiens
aagggaaacaaagctgggtaccgggccccccctcgagagtacttctagaattaattaaggcggggctgatttacagaaatatctcaaagtattttgtagtcgtttttattttgcttttttttcgcctaagtatacagaaatcatcatccccatccataaagttagaagcatagtatttcaattccaatcacagtaatacaatcatgaaagtgatatttgactggtaaatcataacttatacgtattttcacaaatcccagtgagttacaca

SEQ ID NO: 47020 - DNA, 454 bp, Homo sapiens
ctgggtgccgggccccccctcgagagtacttctagaattaattaaaaataaatttaaaaaataaataaaaattaaaaacatattaaaagaataattgtgggccaggcatagtggctcatgcctataaacccagcattttgggaggccgaggaaggtgtgagccgccgcacccggcccaacatttttttaatactaactttttttgcagccatttttacccccctcaactacaagcttttatcaaaattttgaaagagattttgaaaaaattccaaatactctctacttagattcaaaaattttaaatttcctaattatctttctatatacacaaagatttatacacacacacgtattttatgagccatctgaaaatgctgaggatatcatacctcaccctctaaactcttcagcttgcatctcccaagaataagcacattctcctttatgtata

SEQ ID NO: 47021 - DNA, 396 bp, Homo sapiens
ccctactaaagggaacaaaagctgggtaccgggccctccctacagagtacttctagaataaattaaggcggggacacagagccaaaccatatcagtaactttaatctgagccaggcctaacatacgtaagccctcatcactttttccaactatgtatcttttgaaagtgtggctagtatctcagttaccaggcagttcataaggcaaggccctgctacaatagtgattgataatttattagctggtaaagcacatgtgtgctgtgtgttattgtttacaaatctctttttcatacattatctctttctctcactgccccccaccccctttttttggcagcttcacaacaaccattacataattagaccttaagacttaaaaaaaaaaagcttgtca

SEQ ID NO: 47022 - DNA, 450 bp, Homo sapiens
agctgggtaccgggccccccctcgagagtacttctagaattaattaaggcgggcacctgcaattccagctacttgggaggctgaggcaggagaatcacttgaacctgggaggtggaggttgcactgagctgagatcgtgctattgcactgcagcctgggcgacaaaagcaagactccatctcaaaaaataaataaataaataagaataaaatataaaaacaaaaaaaccattctgagctcatggccagacaaaaacaggccacacgaaatccaactcactggccatagtttgccaaccgcgatcttatctactgctgctaattcatatttccctcactttatgtgctcatgaaatactgtctttgtcctctggtgacagacactacctaaaagatcatcaatacctaagagacatggactccaatttcttcaccgggggtgatgctgaat

SEQ ID NO: 47023 - DNA, 516 bp, Homo sapiens
aataaagggaacaaaagctgggtaccgggccccccctcgagagtacttctagaattaattaaggcgggagatggaggttgcagtgagccaagatcacaccactgtactccagcctggacaacagaatgagactatgtctaaaacaaaacaaaacaaaacaaaaaaacctcagggataggacatgtttatagagaactataatacaaggtagaaagtggtgaattttccaagaaagttaccaacacaatgagataatggttcatgtttatggtctgagtatcaatttagaagaatatgtaattgaatgttttattttctcattctcttttcttggagttccatctactctcacattgcattgttatagtaagaacagccacaatgtcaactgtgaccttgtctccacagccacagttggacggcagacccaaactgagatgacctgagtttctttcccaagaaatgaatctaaaatagccacacttcaaaaacccaggtgctgtggaaagtcacaag

SEQ ID NO: 47024 - DNA, 468 bp, Homo sapiens
taaagggaacagaagctgggtaccgggccccccctcgagagtacttctagaattaattaaggcgggaggcatacattcaactcataaaaaaatttaaaaggacactattaattggtgattttaaaaacaataaaaattaacttttaaaaaatgtaccataacataatctgacaactggtgacaataattgcatttaataattaagttcaaggaaataaaaatggatttaataattccggcaaaactctaagcaaactgacaaaactcatatgaagtaatcttgaacgtattaatagagaaaattcaccaagacaggagcatgccatcattttatcctgacttaatattctattacagtttcttcacatgcctagaccaagagtaggcaaactatagcctatgggccagtcacccaattttgtacgtaagttttattagtttgcatattgcctgtggctacttttgcac

SEQ ID NO: 47025 - DNA, 263 bp, Homo sapiens
cctcactaaagggaacaaaagctgggtaccgggccccccctcgagagtcttctagaattaattaaggcggggcggtttcttaggggtaacctgcagttttctctgatttttcagattttacggatgttgaataaaaatcagtgaccatttaaaaaatggtttagttgttggatcaaagtgctgtaacaaacaaaagctttttataagacatggcagctttagggagggtgagagtagtaagaaggaaatctgttagaaaaaaa

SEQ ID NO: 47026 - DNA, 480 bp, Homo sapiens
aaccctcactaaagggaacaaaagctgggtaccgggccccccctcgagagtacttctagaattaattaaggcgggagaatcatctgagctctggaggtcaaagctgtagtgaacccagatcatgccattgcactccagcctgggcaacagagcaagactgtgtctcaaaaaataaataaataaataaataaataaataaataaataaataaataaataaagagcgagagagagattttgattatctgttatgttgttatgtttacgaagtcagattttatagggagtactcaataactccatggatgctttctatttcttaaagtaccatctaaatatttatatgcacatgcatttgattcttttctcttttaccatgggagctagaattgggctattattattattgaactcaaagctttcatctccccactttcccttttagagtaagacctatttaaaatttgagagcaaccatgct

SEQ ID NO: 47027 - DNA, 470 bp, Homo sapiens
taccgggccccccctcgagagtacttctagaattaattaaggcgggtgcctgtaatcccagctactcgggagggtgaggcaggagaatcacttcaacctgcgagccggaggtcgcagtgagccaagaatgcatcattgtgctccagcctgggtgacaagagtgaaactctgtctcaaaaaaaagaaaaaaaaaatagagaaagaaacccttttgtccaccccaaacccctagtcttcttccccagtgacgagctgtctcaccaacttccatagactacagtctttactgtttacctaatatgcccctgtcggaatatcatacagccattaacacttgtgttttccagttttttttttttaaaaagcgggggtctcactttgttgcctaggcgggagggccacggcacacttataaaactccggggctcaaatgatcctcccacgtaagccccctgagtagccgaaaccac

SEQ ID NO: 47028 - DNA, 202 bp, Homo sapiens
gctgggtgaccgggccccccctcgaagtacttctagaattaattaaggcgggtgtctgtgagtcccacctactccaagctgaggcagggagaaatgctgcttgaccttgggcacgcggatggcgtccgatacccacaatagcgccatgactctccatcctatgcgttaagatcgaaactccctttccccaaaaaaaaaaaaa

SEQ ID NO: 47029 - DNA, 454 bp, Homo sapiens
agctgggtaccgggccccccctcgagagtacttctagaattaattaaccatagagttaaataaccatagagtcaccaatggtatgctgactggtttgtatccatttaagagttttccggccgggcgctgtggcttgtgcctatagcctgtaatcccagcactttgggaggctgaggtgggtggatcatgaggtcaggagtttgagaccagcctggccaacacggtgaaaccccgtctctactaaaaatacaaaaattagccgggcatggtggcatgtgcctgaagtcccagctacttgggaggctgagacaggagagttgctagaacccgggaggcagaggttgcagtgagccgagatcaccccactgcacttcatcctgggcaaaagagcaagactttttcttttttttgagacagttttccaagtcagtgattctccttcccctgcttaaat

SEQ ID NO: 47030 - DNA, 670 bp, Homo sapiens
cctcactaaagggaacaaaagctgggtaccgggccccccctcgagagtacttctagaattaattaaggcgggtacataacaaagccactgccaccgagtcacattcagcctctgtctctatttctttctctttgtttttaaaatagaaaggaaagaaatcctagctttcaaatcacctgtcttctttcagtcttttagaaagtttggaaaatttttagtatgtacttagttaaaaaaaaagtcattaaaataattttttaagctaaagttataaaattgaacatacttatattaaccttggaactgtctacctccagttgcgcctgtgtattctatcatgaggataggaaaagattttctaaatctaaataaaatacagcatgaactgcagaaggcagcattttgtagttgtaaaagctggaattttaaattaaatatgagttcaaatcttgcttaagtattttttctattttacatatctttcaattctcaaaacatcagttttatcatttgtaaaatgtaaagaataataccagtcagagttgctgtgattaacagatacagtatttgtaaataacctgacacacaataagcattaagtaataaatgggcattattcatgattttgttgtgtatatctgtaaaatttacaattaaacaactctgaatt

SEQ ID NO: 47031 - DNA, 436 bp, Homo sapiens
aacaaaagctgggtaccgggccccccctcgagagtacttctagaattaattaaggcgggtggggaggagagagctgggtgaagtgcggtctgcttgaaggtggaatcggcaggatttattgtgacagggaagggagcaacagggatcacgtgcaatgtccaggtttttggcccaaagccctgggaggatgtgaagttttcagaagagaatctggctcacagtggacatttgatcaatgcagatttctttctccagctttcaaactgcagctcagcctgggaatggaatttctcaaggtcactctgtaagtcccagaactgctcgaccagcctaggctggaggatgtgggcacagccctagggcttacttcagaggaggattttcttggcttgactctttctctgtatctttttttttttttttgagacagggtctc

SEQ ID NO: 47032 - DNA, 451 bp, Homo sapiens
atgggaacaaaagctgggtaccgggccccccctcgagagtacttctagaattaattaagggggtttttaaaaattgggaatttgtttctgctgctttctgtaacagtcatgtcattctgctaatgtgagaaaataattaccactttctagggtattttagattttttcatgccaacttaaaaaagttgataatcttgactaccgctccggaacaagaatgatttatttttaattactttatgagtcagaaaataatattttggtagaacaaaactattctatcatttaaactcaaatcttatgtcattaataagcaacagtgacctactggcttccccccgttcatccagcatttggactgggggagctggatagagttggcttcagagaatgcctaacaacatcccctagaaaatattgttttccctggcctggcaccaaagtctgaaat

SEQ ID NO: 47033 - DNA, 546 bp, Homo sapiens
  misc_feature 67: n = A,T,C or G
aacaaaactgggtaccgggccccccctcgagagtacttctagaattaattaaggcggggattcacanatggaaactcaaaataacatttcaagtttccttatgtgcaaagactatttacaaatctaaactgaaaacagacaatctttcaatgtgttatcaaaatgtttatagtttctttttctggagatgccaaatgataattattgaataaaattctaatctgttgagcatttctgtaaataaaaagtgaataaaactatgatttgttgttttttataaatgttttataatgaatgataatacatttacatataatttaacaaattgtcctatcctgttctgtaaaataactggcctgaattacttttatagacttttgatacatagaaataatgtttttacattcttaggtgaattatatagaatattctgcaactagagttgtccaacctgttggtgatctattaatgggtcatgaaatcaactttgttggttaaacttggcattaccaaaaaaaaaaaaaaaaaaaaaaaaaagggcccccc

SEQ ID NO: 47034 - DNA, 454 bp, Homo sapiens
tgctgggtgccgggccccccctcgagagtacttctagaattaattaaggcgggttttatgtaatcacacttcaccagtctgaaaagccacaaaccaaaaccaaaagaaagaaaagtcctgttggatgaaataatttcttgctgagcacaatcccttagtctagaactctgagtatatttttcagagaaaatgttccttttcggctgggcgtggtgactcaaccctctaatcccagcactttgggaagctgaggcgggcggatcacttgaggccaggaatttgagaccagcctgaccaacatggtgaaacctcatcactactaaaaatacaaaaattagccaggcatggtggtgcacacctgtaatcccagctacttgggaggctgaggcaggagaattgcttgaacctcggaggccgaggttgcagtgagcaaagatcacaccactgtactcca

SEQ ID NO: 47035 - DNA, 392 bp, Homo sapiens
aacaaagctgggtgccgggccccccctcgagagtacttctagaattaattaaagcggggtatctcgcttaacagtacaaaaggatggaagggtcgcggggcctctgggtgccgagctgcagatgcctccactgcgagcacagccctgagacaagggcccaggcgcccagcggggctggtttcactcagtccagccgcacctacccgtgccctcaccagatcttaagatacagacattaaaacctccaccgggtcgcggcacaggacagcagttttactttctgtttttggcatcgcattgcctccatttcctagagtgcacgtaataaataccgctggtgattccaaaaaaaaaaaaaaaaaaaaaaaaaaaagggggcccccccggggggg

SEQ ID NO: 47036 - DNA, 492 bp, Homo sapiens
cctcactaaagggaacaaaagctgggtaccgggccccccctcgagagtacttctagaattaattaaggcgggggggaggccagtcattaggagatatacctaatgtaaatgacgagttaatgggtgcagcacaccaacatggcacatgtatacatatgtaacaaacctgcacgttgtgcacatgtaccctagaacttaaagtataataataataatacgaatttcatcattctgaatagctcaaaatgttcctctaagtctcgatagtagcaatagatcacagaactaaactgagttgcctgattgttgtgtatcaataatgagtatgctagtggggctttggatcattaaaaaaataattaaataaagcataaaaataaataaaataaaaaaaaaaaaaaaaaaaaaaaaaaaaagggggccccccccgggggggaccccaaatcccccctatgggggggtttttaacccccccccctgggccctttttta

SEQ ID NO: 47037 - DNA, 517 bp, Homo sapiens
caagcgcgcaattaaccctcactaaagggaacaaaagctgggtaccgggccccccctcgagagtacttctagaattaattaaggcgggagtgaaaaaaaagcatcactgaattctacagacattaaagaaataaagtaagattattaactctattcccagaaattgacaatttagatgaaattaagagattccttgaaagacaaaactcaccaaatgtaacaccaaacacattggaaaatataagtaacccatatcattaacattttttaattcaaaattaaatacccacaacaaagaaaactacaagccacaggtggctgcacttgttaatgctatcaaacatttaaggaagaagtaacaccaatcttatgcaaattcttccaggaaataaaagaagaaggaaatctttccaactgtttgtctgaaaccagcacaatgttgataactaaaacttgacaaaggcagtacaataaaagtacaagtcagtctcatttatggaactagatgcaaaaatca

SEQ ID NO: 47038 - DNA, 457 bp, Homo sapiens
aaataaagggaacaaaagctgggtaccgggccccccctcgagagtacttctagaattaattaaggcgggaatactgcttgaagccaggagttcaagaccagcctgaggaacacagctgagatcctgtctctaataaataaacaaataaccaaaaaacttcacttatatccaggcatccatctacctatcagccatccttctagggtggaacatatgcagcaacatggaacaagaaacagtagttatctctgggtagtggatcaagaaaatcttttcttttaccgtattgctaatcttgattttcctctctttttttgagaaagggtctccctctgtggtcctagctacttgagaggttgaggtgggtgtatcacttgagcccaggaggtcgaggctgtagtgagctgtgatcataccactgcattccaacctgagtgacaaagcaagaccctgtcta

SEQ ID NO: 47039 - DNA, 323 bp, Homo sapiens
cctcactaaagggaacaaaagctgggtaccgggccccccctcggggtacttctagaattaattaaggcggggtatcaacatggatggatgactaaaaacaagactggggaatatggaaacagccatccattcttgattagagttcgcttccattaccaaaactatacatttactttactaatcaggataagaaaaatttggcttagcgcctctatttactttgcttttgtgaatgtgtacaatccacgtgactctaaatctcctaagatgggcactaattatgcttgatgaatatattctcatcttaaatgccagcaaatgta

SEQ ID NO: 47040 - DNA, 562 bp, Homo sapiens
ataaagggaacaaaagctgggtaccgggccccccctcgagagtacttctagaattaattaaggcgggtggatcacgtgaggtcaggagtttgagatcagccttgacaacatggtgaaaccccgcgtctactaaaaatatcaaattagctgggcatggtggcaggtgcctgtaatcccagctattagggaggctgaggcaggagcattgcttgaacccaggaggcggaggttgcagtgagccaagatggcaccatgcataggttttatgccaatactacaccattttatatcaaaggatgagtatacacctttccttactttcgaattttgaaccagacagatacgctgcaattcaacaaattaaaataactgaacctacaatcaaggagaaaaatatttatccctaataactaatggaccatcttacgccgtctataaaaatatcaattaagaaatcacggccgggcacagtggctcacgtctgtaatcccagcactttgggaggccgaggcgggcagatcgcttgaggtcaggagtttaagactagcctggcaaaccgtgg

SEQ ID NO: 47041 - DNA, 385 bp, Homo sapiens
  misc_feature 293, 295: n = A,T,C or G
ctaaagggaacaaaagctgggtaccgggccccccctcgagagtacttctagaattaattaaggccggggatcctgaaatgaaaccaattttatcctcactttcagagtactttagtgtagtagaggacgtatgcataaaaatgtactatggaaattcacaaaattaacggattctcaaagcagctattgaagattccacaactccagttagtccttgctggtcattaaaagggacaccagaaaaacaaataactaataaaaaatacgagttaaatggctataatgcccacctnanaaaaaaaaaaaaaaaaaaaaaaaaggggggccccccccggggggggccccaaattcccctttaggggggtgttttaccccccccccctgg

SEQ ID NO: 47042 - DNA, 431 bp, Homo sapiens
agggaaacaaagctgggtgccgggccccccctcgagatacttctagaattaattaaggcgggaggtgcaagttgaaccatcttccagtaaaggtgtaatgaaactatcataatgcccctcccaccagcatacgtccttttgccacctaggcctcccctgatcataaaatcatttacttgcattttgactcttaaatcttgtcctccattttattagccccttcccaacctttgaagtatgttattaaataaatggcataatagatgtgagtgaaacttgtagaaaagccagttgcaaacgaagccttttttgggcaagtggaggcaaggttgtgacttcctctcgctggggccttctccttccacagacctgctgtgccgtcagtattgtgcgggtttcgtttgctctagtgtagtgggtatgtatgtact

SEQ ID NO: 47043 - DNA, 452 bp, Homo sapiens
caaccctcactaaagggaacaaatgctgggtaccgggccccccctcgagagtacttctagaattaattaaggcggggaggaaaggagggggtcactaagagtgtaagacttgggtttggcgaggcggccaaagcgggaaacccaagagccttgaatcgcgaaggtatgcccaaagagttagcagcgagtcctatttgggaattaagacatctagcttctgttcagggtcagcgacctggtacaactcataccctttctggacctcacttttcccatgtatagaggactaagttgaaaggtgacttctaggccgggcgcagtggctcacgcctgtaactccagcactttgagaggccgaggcaggagggtcgcttgagcccgggaggtcgaggctgcggtagccgtgatcgcgccactgcactccaggtgggcaacggaacgcgactctgtac

SEQ ID NO: 47044 - DNA, 449 bp, Homo sapiens
  misc_feature 350: n = A,T,C or G
aaagggaacaaaagctgggtaccgggccccccctcgagagtacttctagaattaattaaggcggggaggttaggtaagactgaagtctgattcagattgcgaacaactctggaaatcatgccagtgattcacagacaattttagaaagtgtgggaagtatattaatgttttaaattgaatagtgatgtttgagacctccattggaagagtgcgatgtatcagaatgtggatgattgagcagagagagaacaaagggacagaaaaataagacgattaaaatacaattaaaaatgatgcaataagaaagtgttagaagcaatcttacagtagtgtctgtgacaatgtagcanaaaacaaaaaaaaaaaaaaaaaaaagggggcccccccccgggggggacccccattccccccttaagggggtttttttccccccccctttggggcgtttt

SEQ ID NO: 47045 - DNA, 411 bp, Homo sapiens
  misc_feature 62, 63, 66, 84: n = A,T,C or G
gggtaccgggccccccctcgagagtacttctagaattaattaaggcgggtggagaccgtcgnnganaagaaaaaatacttctantgactatccggggcatctgaatattcttaaaccgatatctacagttttccatattgttttatgcaattaaaaaataggtggcacaaataattcgtgtactttcttagtttattgttcaattatctctatgtcctttgttagatgacacagtaacatgtttctaatgctagccccttcaagattgaccttctacttcacaatagtatttcaaatcaaaacaaaagaaaatctctcttggcatctttagattagtcacatgtcagattctttttggacttaggaaaacataccaccacctgtaagaggagtgtgctgaagtaagctttg

SEQ ID NO: 47046 - DNA, 434 bp, Homo sapiens
  misc_feature 330, 331, 332, 333, 334, 335, 336, 337, 338, 339, 340, 341,342, 343, 346, 357: n = A,T,C or G
aaagggaacaaaagctgggtaccgggccccccctcgagagtacttctagaattaattaaggcggggtaccagttactgaaataaggaaggtaggagagaagcaaatttaagaatgaagattgagaatactgttttaaacatgtggaatttccagctcctctgagatatctaagttgaaatatcaactagacagttaaatacaagagtgtggggccaggcacggtggctcatgcctgtaatcccaacactttgggaggccgaggcgggcggatcacgaggtcaggagatggagaccatcgtggctaacacggtgaaaccccgtctctactnnnnnnnnnnnnnnaanaaaaaaaaaanggggggccccccccgggggggaccccaaatcccccttatagggggtgtttttccccccccccctggcccgtttttta

SEQ ID NO: 47047 - DNA, 525 bp, Homo sapiens
aataaagggaacatatgctgggtgccgggccccccctcgagagtacttctagaattaattgggggggggggaggactaggacaagaattacaataccttcctggccaacgtggtgaaaccctgtctgtactaaaaatacaaaagttagcttagcatggtggcgtgtgcctgtaatctcatctactcaggaggctgaggcaggagaatcgcttgaacccaggaagcggaggctgcagtgagctgagattgtgccactgcactccagcctgggagacagaacaagactcggtctcaaaaaaaaaaaaaccatttttttgtttaaatgttgggaaactttttttttggcccttccctttgccgaacccttttctggcccttgacccaattttataccattaaaattggggtaaataaagggctttcctcttaaaaaaattggtggcctttttaacgttgaaaaaaaaaaaaacacctgtttaaaaaaaaaaaaaaaaaaaaaaaaaaaaggggcccccccccgggggg

SEQ ID NO: 47048 - DNA, 496 bp, Homo sapiens
gcgcgcattaccctactaaagggaacaaaagctgggtaccgggccccccctcgagagtacttctagaattaattaaaccatgaggtgtttttatttcacaaaaatatttatgctgtgtactgtatatgtttatagtatttaaatttaactctttagtatacttatgtaactttctataaagaatgcacttccagtgaataatattagtacaatgtacaatcaccagttgttacaaagttttaatgtaaagttattttttaacagtaactatagaaatgtgcctttgcttttgccacagttaattgtttttccttgtttatacagtattaccacagagctatatatatcacaacctgaacaaaggtgcatcagaatactgtagataaagatataggctgggcatggtggctcactcctgtaatcccagcactttgggaggctgaggtgagtggatcacctgaggtcaggagttcgagaccagcctggccaacatggt

SEQ ID NO: 47049 - DNA, 506 bp, Homo sapiens
ccgtcgttttacataaagggaacaaaagctgggtaccgggccccccctcgagagtacttctagaattaattaaggcgggtggatcatgaggtctggagatcgagaccattctggccaacatggtgaaaccccatctctactaaaaattcaaaaattagctgggcgtggtggcaggcgtctgtagtcccagctactcaggaagctgaggcaggagaattgcttgaacccgggaggcaggggttgcagtgagccaagatcacgccactgcactccagcctgggtgacacagtgagactctgtctcacaaacaaacaaacaaacaaaaagtcccaaaaaagagaaggccaagatcagatgacttcacaggtaaattctaccaaacatttaaagaattaacaccaattcccacgcttccaaaaatcagaagatacaagatgtctcacccaccccattctataaggcctgcctgattttacccccacaattaaagttgaaggaatcctgaa

SEQ ID NO: 47050 - DNA, 410 bp, Homo sapiens
ataaagggaacaaaagctgggtgccgggccccccctcgagagtacttctagaattaattaaggcgggggaggaggaactgcttttcttctcgtggatcacagggcttccttcatagaggctggccaatacagagttgggcagctggaattgtactttcagaatatctatgctatcagcctagcacagagttttaaatactgttgcaatacccaccacatcccacccagaggagccctggaatcttcatgagagatagcagtgctcttcttgtggagtttattaaggcttactgactgcttttaccctcagactattgggaaccaaaaattaaaaaaaaaaaaaaaaaaaaagggggggcccccccgggggggacccccaattccccctaaagggggtgtttttacccccc

SEQ ID NO: 47051 - DNA, 436 bp, Homo sapiens
attaaggcgggcagagaggaagataaagtagggggagggcttaaactgttttggctgtttcatttcttaaactgggtgataagtacatgaatatacatatttcatataaaatcacttttttcaaaacaaaaaggacgcaattaccttgctgaaggtgacattgtatcctcttgcaagaaatggcagaaataacactttagtataatattattttagaagttgcctcacttaaggcaatcatgaaaaataattatgtgaaagaaatgtttcagctgtaatatttttaaacgtctgaatattttatctaattgcttcttttgaactggtaatttattctaagtagcaatttgggagacataataatctcattgtaagtttttctccgtacattacagacaagtacttataaataaacaaatagttctaacttaagtgg

SEQ ID NO: 47052 - DNA, 470 bp, Homo sapiens
aaccctcactaaagggaacaaaagctgggtaccgggccccccctcgagagtacttctagaattaattaaggcggggcatggaaataaggatagaaataagaaaagtaaccgaaatgaaatggaaagaataggtcaaaaaaaggatcagggagaaaatgacagatacagataaaaccaaggagaatcactaaacccataaatggagcctctgatgtagaaaattaaacaatggaacagagtaagtattttaacatgtaacctaggaaaacacatgaggaaaggatggtctttttaacaaatgttgcttgaacaactggatattcacatgcaaattaattcaaaatgaatcatacagataagtgtaagaggtaaaactgtaaaaactacaggtgtggccgggtgcggtggctcacgcctgtaatcccagcactttgggaggctgaagcgggtggatcacgaggtcacgagat

SEQ ID NO: 47053 - DNA, 543 bp, Homo sapiens
aatcacaggaaacaggtatgaccatgatgtactggccgcccttctacagagtactgatacaattaataacacgggatggctgagttcaagctaaatagtatttcaagtttcaaattgtttggatttctttttggttacatagtcctaatatataaatcagctgccttctgaaaattggagttttaagcagaatctcactaagacttctcttgttatctaaatctaaataaaaagggatttacatactgtcagtatatactgaacagaaaaccttgtaaaacagtagtaaactggagggatgcattagttttaacacaaagcaaaaccttgtaaactcaggagatagataaacctgccaatagaatcacaattctaaatgtgaatctttatcgaagtggtaactcagtgtaaagaagggttttaaatcagttcattagtctttatggtcgcttccgttgactagaagtaaaaccaccagcagaaaggaagataaattaaggagtacccccagaaaagaattgcaattcatggtaaataagaaaa

SEQ ID NO: 47054 - DNA, 435 bp, Homo sapiens
gggaacaaaagctgggtaccgggccccccctcgagagtacttctagaattaattaaggcgggggtggcaggctgctgtgaggacttggctccttctctgagttgggtgggattagcaggggatttaaacagaggaaccatgggatctcccttatgcatttctgccatggttggctcagctgaaggcacctgttgaataagacttggccttggacacccagaggcccttggttgcgggcttacctcctggcatggccactgacacatacacggtgggctcttcacacacgtggacggccccgagacttcctctgcctgggcgtgtaatccgtggcattacccaagttagtcccctatcaagacatgcccatttggaaaaccaaacacctttttctactacagggaaacccccatcatgacctccctctgactcaca

SEQ ID NO: 47055 - DNA, 534 bp, Homo sapiens
  misc_feature 449, 450, 451: n = A,T,C or G
caaccctcactaaagggaacaaaagctgggtaccgggccccccctcgagagtacttctagaattaattaaggcggggggcaaggatggatttgctgattgtttagatgtgtcatggatgaaagagatggagaaatcaaagaagactctcaggttgtaattttaggtaactgggtaggattcccatgtagtcagaaacccagaaagaagagaaggctttgggaagatgacagtgtattcaatgtggctttttgtggttcaagactttggaaaatattgattagactgttgaaaagtacttataggtcaggaacctggtcagaaagtattgtgctaaaataatattgttatgacccaagcagttgtaaaaataacttttattgtctaactctcacagtttatcttgaactcttaacaggttgtcaggcaaatatctgttcttgaaacccannnaaaaaaaaaaaaaaaaaaaaaaaaaggcgcccccccccggggggggcccccaatccccctttagggggggtttttaccccccc

SEQ ID NO: 47056 - DNA, 475 bp, Homo sapiens
  misc_feature 80, 81, 82, 108, 110, 470: n = A,T,C or G
ctaaagggaacaaaagctgggtaccgggccccccctcgagagtacttctagaattaattaaaatggggggaccagctttnnnctatgctaaattatgtattttttttncncattcttttctaaacacataaaactaacaccttagatactgtattttgtctagactcatattgccataagttagaatgggtttatgacttaaaatgaataaagattagtcatgttagagttaaaagtataatatgaattggatttcctcctaaatagtgaatttgaggataaagtccttaattatcttggattttttgaaatatctgaagattttacttgctgtttactgatgaaataactgaagtataaatttcagtcactgtacataagaaatgaaatatctgaagtatacatttcagtcactgtacataagaaaaaactaccatttagattgggtaaaagcatgtggaaataagatnttttt

SEQ ID NO: 47057 - DNA, 455 bp, Homo sapiens
ctaaagggaacaaaagctgggtaccgggccccccctcgagagtacttctagaattaattaaggcgggagggagagggagaaggcacacaggaagctgaggggaaaacaaggcagagaggaggtgagtggggaaaagagcccactagcaggccagggaaagaaacagtgggtaaaaggaatctgaagagccgaaaagaagggagaaatactagaaaaagctttcaggagtcttgagagaatatagagcaaaaaggcagaaggacacactactctctttggcagaagggctagatataactaaattgtgaagcagaggacggggaagttgaagttcattttcttagtccaaagggctcaaatgatacatcaaagggcacagaagctctggtctctcagccaggcctgcctttcattttatttttccagtgtgcaaagtcagtttaagagacaactca

SEQ ID NO: 47058 - DNA, 462 bp, Homo sapiens
aaagggaacaaaagctgggtaccgggccccccctcgagagtacttctagaattaattaaggcgggaggaaggagatacagctggtaaaattttgttctactcacagatagctaagaaacttcatgtgtctccataaaggagtaatataaaatttgtgcaaataagttgcaaattcaaaaggaactcatataaggaaacatatttgtgatggtatacactcctgaatatttaacattttgatcaccgtgaactataatatataatctgcattttatggttttctggatgcttggaaatttcaggagtatttaattttaaaaagattgtcaacatgcagataaaaaatcagattattttacatctataagtgaaaccttgttatccccttcatttgaggaaatccaaggagttttaaacagctctactttactggctatctctatacttaagccactagttggt

SEQ ID NO: 47059 - DNA, 373 bp, Homo sapiens
  misc_feature 61: n = A,T,C or G
gaacaaaagctgggttccgggcccccattctagagtatttatagcattaattaaggcgggngggttttttttaatagataaacaaacaaggaaacacgcaaaaagcaatgagaaaatttaaaacctaaacattaatctacaaacacatgaaaatattatttatgatagatagcattttatatttataggggaaaagggtaaattttacataaatagttctgaggcaatttgttacttacctgagaagaaatgtaagtaaacagatacataattcaccaaatttacaaatttaagttggattaaggaattatatgtgtgtatgtgaattgggaaatataaatatgtagagtatgtgattgaagttaagttgtta

SEQ ID NO: 47060 - DNA, 493 bp, Homo sapiens
  misc_feature 427: n = A,T,C or G
gccccccctcgagagtacttctagaattaattaaggcgggtgtggtaggtattacacaataggcactatcatcggtaaactccattttctctggtttgttagggttctctctataaactttctgttttccccatcttccattcagtgtactaaggggtaatcgattgttcctactcctgtcagttctactcagcaggacacaatatcaaacccaagatacagaaattggtctctgcctgcattggaaacatgggtgcctcactgtcttatcccatttagtgtcacaaaaagttccccccaaaaaaacatcattgatcgcatttcagaagtcgtatttcattggataaaacaacttgtgacctcccaaaataatgagaagaaaaataataggaaattagaggaaaaaaaaaaaaaaaaaaaaaaaaangggcgccccccccccggggggacccccaattcccccttaaagggggttttttacccccccccaatg

SEQ ID NO: 47061 - DNA, 470 bp, Homo sapiens
acaaaagctgggtatcgggccccccatagagagtacttctataactaattaaggggggacaagacaaaaatgaaataaaatatattattatgagcatgtaatgttttaatataaaatgtgaataccaagatcttggatagtgaagttgaattttaagaaaattatacttgggaggtcttataacaaacataaaagacttaaataagagagcatagctcattttgtgattatcgtagtcaaagatttatttaaagagaacctctgcagtacaaagaatgaatttagcttccaatataaaatgtgtaatgtctatattaatcatttcaaatcatagttttccctcctgaactcaaaagaaactaatgccaaaaaaaaaagatattaaaaaaaagcggccgccaccgcggtggagctccaattcgccctatagtgagtcgtattacgcgcgctcactggccgtcgttttacaa

SEQ ID NO: 47062 - DNA, 414 bp, Homo sapiens
ctggccgtcgttttacacacaggaaacagcgtgtgaccatgatggctgcgcgcggccttttctagagaggacttatagatttacattagggcggggaagagtcaaagtagatgatttgctagaaaagctacgagaaacatgtttttaaaccagtagtgagcttttagaataaattaatagtataaaagtcaactatcttttggctactgtgaagatcaatcatcacaaaatttcattagtacttttataaacagtgccatgaattataaaacatttataatgatacccacacattgaatagtgttgaaaggaaaaaaaaaaaaaaaaaaaaaaaaaaaggggggcccccccggggggggaccccaattcccccttttggggggttttttacccccccctttgggggggtttttt

SEQ ID NO: 47063 - DNA, 354 bp, Homo sapiens
  misc_feature 293: n = A,T,C or G
acaaaagctgggtaccgggccccccctcgagagtcttctagaattaattaaggcgggagagggaggatatggtaggttccatctcacgtggggatatatgtctcacaaatcaccatgtagggtcttgtgatctgcgtgagtttcctaagggagagaggggctctccttttgttcgtgttggctgcatcactgcatttcattacttctgaatggcaagtgagcaagaccctcgctgctgaaatctgatcagatgttattgatgaatcatggaattccagagttaggagctgganagaaggtcaagaggacatctgagtcagtgtctgactagtagcaagtgatggggtatgatgt

SEQ ID NO: 47064 - DNA, 439 bp, Homo sapiens
ctaaagggaacaaaagctgggtaccgggccccccctcgagagtacttctagaattaattaatgagtgtgtctatcacctacagctacataaaaagcctctgaaatctgagagaaagccaacttagaaaaatgggcatatcaactgagttaaatataactatcctaactatatgaaataatgtttaactttgctcaaaataagataaattcaaattaaaactatactgaggtgctatttcttacctattagattagcaaaaatctagaaatttaacaactgctggcgagactgagcaatcaggcattctcacattgatggtgaaaatgcaaaattatgcaactgcttatgcagaagtatttgtcaatgtctagcaaaattatatgcacatgctctttgacccagcaattccatgtctaagaatctatctcagggacacac

SEQ ID NO: 47065 - DNA, 459 bp, Homo sapiens
ataaagggaacaaaagctgggtaccgggccccccctcgagagtacttctagaattaattaaggcgggggaactctttaggccgtacaaaaacatgtatcaagtgatttgatatgtacaggggttataaatcttgtattccatttatttacagatcagtgatattagatgtaaatctatttaacagggaaagtttaagcaatatatctttaatggaacggatggtcgggaggccataatctcctatattactcacttataagatatgattaaaggaaagcaagttaacgatacatcttatttaaacataatcctttatgtcaaaattaatattgcatgaattttgaattctatatttacctgaaagaaacctgtaaaatctcggtgctgtgtggacgttacaaattttagtgcattgaggtgtgagacagtgagtacagatagagggagacaagatagag

SEQ ID NO: 47066 - DNA, 468 bp, Homo sapiens
ccctgaataaagggaacacatgctgggtaccgggccccccctcgagagtacttctagaattaattaaggatatcttttccacaagctctccccaaggggaagtgttcatattcccctaatgccacatttcccatcaaagcccacttctgggaccacatcacctcccttaaatccagcctccaccatctagacgtagggatttaaaacactaggttaattacgctacgcattaactgctcctcctaactactcacaacacagtacccaaattcctcagtgctatatccaaaggcttccatgacctatttgtctcatctcttgctaaactctgcatcacactgtctgtaccagctgtctgcacaaaactctccccacagttttcctccataattttgcttgtgtgagtcacttcactgaaacacctccccaacttactccagctcagtggctggctgtcacacttcttag

SEQ ID NO: 47067 - DNA, 585 bp, Homo sapiens
  misc_feature 135, 138, 141: n = A,T,C or G
ctggccgtcggtttacaccccggaataaagggaacacatgctgggtgccgggccccccctcgagagtacttctagaattaattaaggggggggggagaagagggaagtaagagcaatacttttttgcttgagaangangtnaactacttactgaaatgatcatttgtctgagtaactcaaatatctatcagatcctgtagtcaaaataattttccatgtatacaaagatttagtttttatcattaaagaaaataaataaataaatgtccacatagaaaataatcactgacaataattagcattaatggagttgtatttggatagacattagtgcagaaggaggaaagttcaacccctttctgaatagcagcagtcattggttctctagtcctcatctgtattttactggtttaaaaactattaaattttcatcagccaagttatatgtaaataacagcagtaggtaatatgctatattttctccatgactgggggaaaaacatgcaggagttcttgtgaacacaaagctgacacagaacagaaattctaatacgtgcgggtggtgtaagatgttagcatctccct

SEQ ID NO: 47068 - DNA, 233 bp, Homo sapiens
  misc_feature 134: n = A,T,C or G
ctcagatgatagatgcagcatagcagtcagtcagctaaagctacagctgctcatctcttcatagaaccacgtaagtcagcacaattcagggttctttaacctcagcactattaacatcttgtcttgactagttnctttaatataagggccgtcttcttcattgtaaaacatttagtggtatccctggcttctgttcatgagataacattagtacttttcttgtgtaacaacta

SEQ ID NO: 47069 - DNA, 556 bp, Homo sapiens
  misc_feature 541, 544: n = A,T,C or G
gcaatgtaaccctcactaaagggaacaaaagctgggtaccgggccccccctcgagagtacttctagaattaattaaggcgggaatggcagacgagtgcagacctctcctgtggatgaacgacatttggtctttttactacttactgggaagcaaccttgacccactccgtgaagtaaaggaagaggtgctgtgagctccccctatgggtgaagtgtccctgatcacccatttagaactgaaatataccgactacatatatttgttaaccatggtgttaaaggcttatagacaaccagagctgctgcattacgtacgttatatgcgaacattctgatttaaccattcttaccttcagcataagaggtgaaaatacctgttgtcatggaacttatgttccgattagagtatatattcaagtgttgaggacttactaatcttccattctccgtaatccattcttaaacttttacttggcaaatgtttattgagtccccacagtgtgctaatgcactaaggtctaaaaaaaacagtagtaagcanaanaaaaaaaaaaaa

SEQ ID NO: 47070 - DNA, 649 bp, Homo sapiens
ccggccgtcgctttacaccccggaataaggggaacccatgctgggtgccgggccccccctcgagagtacttctagaattaattaaggtggggatcttcaaaagcagtcatggaaacagcaagagaaacactcgaaacaactctagaaggtccacaggaaccatattagaaaatataaagaagaactatagcaagaatgagaagtgggtttcagattggttcctgaagaggagttgatgctgcacagtgaattgagggccaaatcagcaatacaacctgggtcgcctggatttcagcgcatggcctttccaagataacatgctactctctcgtccacagattttgaagaaaaaaaaagatcacctaaagagaaaatagagaaaaactgtaagtattaatgtactattataagtctctattacaaagacaggtttataggaaataaaaaagcacataaagcatgacacaggctcattacttaaaataaatttttatggcagaattggccagacagacttttatactatcagataattaagtagtgatattagagttttttaaacaactttttaaaattatgagaatattcaaacattaacgggggggaagaaaagaaaaaaaaaaaaggggcccccccccggggggggccc

SEQ ID NO: 47071 - DNA, 596 bp, Homo sapiens
accctcactaaagggaacaaaagctgggtaccgggccccccctcgagagtacttctagaattaattaaggcgggccgatactaaaaatgaaccagacaaagcacaaatgaaaggaacttttcctaaaatgaatacatcctgttagattcgaaaatatactatcctcatggataatcattttgtcagcctatccataattacttttcattaaaatctgtaattgtctttagcaggaaaaaaaagaccgaactaagtacatacgtaatctgtaacatagattttatattaaaatctatttgaaacatttaagatttttcacactaaaaaaagagagatcacttgaaaaatatatgacttaatagtcatttacttttgtttacaaaacaggaaagaaaactgactacaattccagaactagtaaatcgcaaagttaacatctaatgtctaatcatctaattccaaacttcatgcaactgtaatcattcaactaatcaagaatctttaaaccattctgacatactattaaattagcaattccacaaacattagccgtttttaaaatccaaaaatccagatttctttgtaattcttcacgt

SEQ ID NO: 47072 - DNA, 471 bp, Homo sapiens
gggaacaaaagctgggtaccgggccccccctcgagagtacttctagaattaattaaggcggggtagatttatttctctcattttatagaaagaatagaaggcttagtgagtttaagtaaaatcattgagatcttgacagttagagaggacttcctaaacaagacgtaaaaagcacagaccataaaaggaaaagttggtaaaaaaaaaaaaaaaaaaaaaaaaaaaaagcggccgccaccgcggtggagctccaattcgccctatagtgagtcgtattacgcgcgctcactggccgtcgttttacaacgtcgtgactgggaaaaccctggcgttacccaacttaatcgccttgcagcacatccccctttcgccagctggcgtaatagcgaagaggcccgcaccgatcgcccttcccaacagttgcgcagcctgaatggcgaatggaaattgtaagcgttaatattttgttaa

SEQ ID NO: 47073 - DNA, 444 bp, Homo sapiens
gggaacaaaagctgggtaccgggccccccctcgagagtacttctagaattaattaaggcgggcagatcacgaggtcaagagatcgagaccatcctggccaacatggcgaaaccccatctttactaaaaatataaaaattagccaagcgtggtggcacatgactgtaatcttagctattggggaggctgaggcaggagaactcacgagacagagattgcagtgagctgagatcgtcccactgcattccagcctgcgcaacagagcaagattgtgtctcaaaaaaaaatcacaaaataaaatatttaatttagccttctagattttacagttcacattttaaattttttagtcaaatcatagaataaccagggatggagtggattcaggttgggagtggataagctatgcgccctatctctgccgaaattaaaaaaaaaaaacggc

SEQ ID NO: 47074 - DNA, 308 bp, Homo sapiens
  misc_feature 278, 292: n = A,T,C or G
aattaattaaggagtacacatgagtcaacccataatgctggtaaaaccctgcaggtggtcactaaaggcctgaatgaggacagaaccaagactggccagcagctctttgcaggggcagaggagagctgggccaccaacagcctcgcatcattaggctgatctgcatccaacgaaatcaaatcagcaaacatattagacacctctaggtgcaaagccttggccaaatgctatgggagggctgggcacagtggctcatgccctgtatcccagcactttgngaagccaagctggnagggtcagtgaagcga

SEQ ID NO: 47075 - DNA, 490 bp, Homo sapiens
cgcgcaattaacccctcactaaagggaacaaaagctgggtaccgggccccccctcgagagtacttctagaattaattaaggcgggggaaatgaatagtggttgaatgggcatagaattgtccatgatgatttttacatctagaaatctgctacacagcaccgtaaatattcttaactctacaaaactgtatacctacaactggttacgatggtaaattttaaggtatgtgtttgttacgaaaattctaaataataaattatttataaaaaatgatctttgttgacacagggaaaaataaaataacaaaaattaaaaaaatggcggccgccaccgcggtggagctccaattcgccctatagtgagtcgtattacgcgcgctcactggccgtcgttttacaacgtagtgactgggaaaaccctggcgttacccaacttaatcgccttgcggcacatgcccctttcgccagctggcgttttatcaaaaaggcc

SEQ ID NO: 47076 - DNA, 497 bp, Homo sapiens
  misc_feature 458, 459, 461, 462, 464, 465, 466: n = A,T,C or G
aaccctcactaaagggaacaaaagctgggtaccgggccccccctcgagagtacttctagaattaattaaggcgggttcctccctgtcagggaaggcattgtaaactcaaacgcctgtcagctgtgaacctggctcttcctggaatcactccactcccctagtcttcagtgtccagaagtctcacagattctcgtaggcactcctccagtgtccaagggtgagaagggccctaaaatcttcactcacctggtggaggaacagggccctgctgctgactctccatgagttgcttccatggagacagtttcatgtcggataaaattatttttcccgggccaggcgcggtggctcacacctgtagtcccagtactttgggaggccaagacgggcagatcacatgaggtcaggagtttgagaccagcctgaccaacatggagaaaccccatctctacaaaaannannannnaaaaaaaaaaaacggggggccccccccgggg

SEQ ID NO: 47077 - DNA, 377 bp, Homo sapiens
ctagaaattaattaagggggaaacattattctacacacagtggggaaaatagtcataataaagaagccatggaagttcttggtataagaactgagttactgtattgccactgtaggaatcattcagttgtaagaaaaagtattcaacctaaattctctatttttctaatttaaaaactgaaattccaaaaaaaaaaaaaaaaagataaaaaacaggggcccccccccgggggggcaccacttttcccctttaaggggagagttttacccccccccagggggccgtttttaaaaaaagaagaccagcctgaccagcacagtgaaaccccgctgtacagaaaaattaaaaattaactgggtccaggagcatgtgcctta

SEQ ID NO: 47078 - DNA, 449 bp, Homo sapiens
aaagggaacaaaagctgggtaccgggccccccctcgagagtacttctagaattaattaatttaaattataatagattatttatattataataaattaatttaatttaaaaataaccaaaattcacctcttcaactttacagatgaaggagtcctagagatgtaaaattaaacttgccccaaaaatacaaatttagaagatgcaaagttaaaaacaaaaatgactcctaactcccaattcagcactctttccattataacacaccattttcagctgggcacagtggctcacgcctctaaccccagcactttgggaggccaaggcaggtggatcacctgaagccaggagtttgagaccagcctgagcaacatggtgaaaccccgtttctactaaaaatacaaaattagccaggcatggtggcacatgcctataatcacagctactcgggag

SEQ ID NO: 47079 - DNA, 516 bp, Homo sapiens
ggaacaaaagctgggtaccgggccccccctcgagagtacttctagaattaattaaggcgggaaactaatcttacaaaggaggcttcctctttccttttccagtggtattccaagcttcctttggagtgccctccctcctgatttacaaattggcctgacgttatcggagtacaggctttttcctggtggtttctggcctaacaggagacagattagtaagtaccaggatctctaataggtcaactttcatgatctctgctaaattctcagctgtttagacttacaatttttaacagctaaaaggaaagacaaatgctatctaaaactgtcccatcagcccatttacagggagcacctcccccataccgccctaaaatcctttaaaaaatggctttaatcattttatctgccttgcatttaagcgaattcagtttaagtggcttcagttctgaattcctggattatatccaaatgttgcaaatggcggtgtgtgggctttgaactcgtaaatttttt

SEQ ID NO: 47080 - DNA, 509 bp, Homo sapiens
ctggccgcgttttacaccccgaaataaagggaaccattgctgggtgccgggccccccctcgagagtacttctagaattaattaaggcgtgagccactgtgcccggccagaaaatatgtaatcttaaaaatggatccattcctcctcctctgctttttactttttcggagaggggtcacaatttttcggttcttttgttatgtcactcttaaaatattattgaaacattaatgcagtctttatgacaaaattcccatgggtacattgtcatcctaatagatccagaaagtattaagtgtatgtcttttctagcttttgtctggtgatactaaacattattgtgtcttattcttgctgctacaagtggttctggggactaagagtgacagtgttgcctgagagcttcttggaaatgaagtgtctcccacacaggacacagagtcctgcaagtcaaaaagtccgttttaactgtgaagattaagtcctgtgtactaatgaagacgtttcttt

SEQ ID NO: 47081 - DNA, 420 bp, Homo sapiens
cgccaagcgcgcaattaaccctcactaaagggaacaaaagctgggtaccgggccccccctcgagagtacttctagaattaattaaggcgggaggagtgtgagtttctggggctggagtggggaagaggctgaggggaaagagggggccagggtgtgacccaaaacaggtgcctgaacttgcaggggctaactgatccctaagtatggatcccagtatctttcttgaccgggcgcggtggctcatgcctgtaatcccagcactttgggaggccgaagcgggtggatcacctgagatcagaagtccgagaccagcctggccaacatagtgaaaccccgactctactaaaaaaaataaaaaaaaaaaaaaaaaaaaagcggccgccaccgcggtggagctccaattcgccctatagtgagtcg

SEQ ID NO: 47082 - DNA, 320 bp, Homo sapiens
  misc_feature 309: n = A,T,C or G
ctaaagggaacaaaagctgggtaccgggccccccctcgagagtcttctagaattaattaaggcgggtggatcacctgaggtcaggagtttgagaccagcctggctaacatggcaaaaccccgtctctactaaaaatacaaaaaaaattagccgggcttagtggcaggcgcctgtaatcccagctactcaggaggctgaggcaggggaattgcttgaaccagggaggtgaaggtcgaagtgagccaagatcgtgccactgcactccagcctgggcgacagagcgagactccgtctcaaaagagaaaaccnaacaacacacc

SEQ ID NO: 47083 - DNA, 491 bp, Homo sapiens
gcgcgcaattaaccctcactaaagggaacaaaagctgggtaccgggccccccctcgagagtacttctagaattaattaaggcgggcttgaaaattttcttcctgtaaatcttgtaagttttggtttcttaaatttatatatgaataaaatttatgttaaactagaaaagaaagtcaggttatatatactctgtgcccacatgaaaaccattaggtagacagactcaaaaagagaagctataattgtcaaccccatacttagaaaaaaaaaaaaaaaaaaaaaaaaaaaaaagcggccgccaccgcggtggagctccaattcgccctatagtgagtcgtattacgcgcgctcactggccgtcgttttacaacgtcgtgactgggaaaaccctggcgttacccaacttaatcgccttgcagcacatccccctttcgccagctggcgtaatagcgaagaggcccgcaccgatcgcccttcccaacagttgcgca

SEQ ID NO: 47084 - DNA, 512 bp, Homo sapiens
cgcgcaattaaccctcactaaagggaacaaaagctgggtaccgggccccccctcgagagtacttctagaattaattaaggcgggaagaggagaaatggaaatatacagctttaaggtcattgtgtgtgaaataggataattatacaaataaaccaggagagaagataaaaagaagtatcaacaaataatatcaaataatatagaaaaggaaaaaaagtaacaaaaaaaaaaaaaaaaaaaaaaaaaaaaagcggccgccaccgcggtggagctccaattcgccctatagtgagtcgtattacgcgcgctcactggccgtcgttttacaacgtcgtgactgggaaaaccctggcgttacccaacttaatcgccttgcagcacatccccctttcgccagctggcgtaatagcgaagaggcccgcaccgatcgcccttcccaacagttgcgcagcctgaatggcgaatggaaattgtaagcgttaatattttgttaaaattcgcgttaaattttt

SEQ ID NO: 47085 - DNA, 267 bp, Homo sapiens
aacaaagctgggtaccgggccccccctcgagagtcttctagaattaattaaaaacttctctgcaaccatagcaattttccacctttgctaatttaaagtttaaataccataacgggtttttcatacaggctttaatatactttaatgcattccctttcatttttcctgtcttctatttggggtcttgagatttaagatttttaatttatttgcttcacctattccagatgtgaagatacaaaagaagtactaaacactgtactacta

SEQ ID NO: 47086 - DNA, 467 bp, Homo sapiens
aagctgggtaccgggccccccctcgagagtacttctagaattaattaaggcgggcctgtttcttactgtaaaatgagagttggacctttgatactctcagtttcattccagctctaagagtataatgctataggcatccagtagagtgaaagcctctttgctccagagtagtttatttcctaacaaaacagagttctaaaaaaaattttatgttttttacttttttatttttatttttttgagacagagtttctgtcacccaggctggagtacaatggcgggatctcagctcactgcaacctcggcctcccaggttcaagtgattctcctgcctcagcctcccgagtagctgggattacaggcatatccaccacgcccagctaatttttatatttttagtagagacggcatttcgccatgttggccaggctggtctcgaactcctgacctcaggtgatccacccgcc

SEQ ID NO: 47087 - DNA, 584 bp, Homo sapiens
  misc_feature 554: n = A,T,C or G
aaagggaacaaaagctgggtaccgggccccccctcgagagtacttctagaattaattaaggcggggagcaatacaacatactgattactgttatacttacacttgccttagggatcattccaaaatatataaagttgtattagtagtaaacccttttttaagaaatactaataacccccggtaaaatggaatgactttctaggcttttgtttgaaagcttttgagaaatgctgttcctcaagacgcttgtatatacactgtgggagtaaggagtggtctgtctccaaacaaatgggcgaaatgctaactgcacacttttaagaagtttctttcacgaattttgagagggttttgtatgctaaattttgtgaatttttcaagagaggaaatagactctattaaaatattctgaaaggtcactcaaagcccagtttgggggtgaaaaaatcacaaaggaagtgacttttaaatttgatcttataaaaattatgtctgtttcaaaaacacaaaaattattaaaaggcaaatgaataaaaatatgacaaaactatcantatcatttatatagcttttttaaaatcagt

SEQ ID NO: 47088 - DNA, 297 bp, Homo sapiens
gaaacaaaagctgggtaccgggccccccctcgagagtacttctagaattaattaaggcgggatgaattttataaaaataatgatgatagttaataattgatgtggtgagattatgggtgacttaggttctttttacttcccatattgtcaacatagattactgttgccatcaagagtaaataaataaataaataaaaaaaaaaaaaaaaaaaaaaaaaaaaggcgggccccccccgggggggacccccattccccccttaagggggttttttaccccccccccctggcccggttttt

SEQ ID NO: 47089 - DNA, 304 bp, Homo sapiens
aacccttcactaaaggaaacaaaagctgggtaccgggccccccctcgagagtacttctagaattaattaaggcgggcagatcacactgaggtcaagagttcaagaccagcctggccaacatggtgaaactctctctaccaaaaaatacaaaaattagccagacatggtggtgggcacctgtagtcccagctactccagaggctaagccaggagaatcgcttgaacccaggaggtggaggccgcagtgggccgagattgcaccactgcactccagcctgggtgacagagtgagactctgtctcaa

SEQ ID NO: 47090 - DNA, 515 bp, Homo sapiens
  misc_feature 472, 473, 474, 475, 494, 495: n = A,T,C or G
ttacaacccgaaataaagggaacaaaagctgggtaccgggccccccctcgagagtacttctagaattaattaaggcgggcatatacttataggagctgaccagaaaaaacaattttaaaatgctacaattctctaaagaggtggatattcaacagtatcactttttctttaaaaaaaataacaaacttcaggctgggcctggtggctcatgcctgttaatcccagcactttgggaggccgaggtgggtggatcacgaagtcaagagatcgagaccatcctagccgacatggtgaaaccacgtctctactaaaaatacaaaaattggctgggtgtggtggtgcactcctgtagtcccagctactccagaggctgaggcaggagaatcgtttgaacccaggaggcagaggttgcagtgagttaagattgcatcactgtactccagcctggcaacagagcgagattccatctcannnnaaaaaaaaaaaaaaaaaannaggcccccccccccgggggg

SEQ ID NO: 47091 - DNA, 545 bp, Homo sapiens
actggccgtcgttttacaccccgaaacacaggtgtttaccatcattgctgcttgccgggccctttcctcgagagaacttatagaattaattaaggcgggcgcgtctccttatcccaggaattaaaggatgcgctcaactatcaccggaccactggactcaaacctgggtaaacacatcaaggcccacccttccctttgtcatctgcaacaaaagagagggaacaaacagttcctacattcccatcacttcctaacaagcgcatagctgactgtaggacctcattggaaccgatttcatgaacgtacagcgggttatttttaataatacattggttgcatttaaatatttttaagaagcattattagaaacttctgttttatttcaggaaaagttatctattccaccttttcccctttcaaatccatcttaagttaccaaaaccttagacttctttgtctgggatcactagggggccatatgtgaaaaatatgaaagaagcaggttggaaatgcctaatgaaggaaaaagaaaatgggaaagaaaa

SEQ ID NO: 47092 - DNA, 372 bp, Homo sapiens
  misc_feature 301: n = A,T,C or G
accctaaataaagggaacaaaagctgggtaccgggccccccctcgagagtacttctagaattaattaaggcgggcagatcacgaggtcaggagatcgagaccatcctggctgacacggcgaaaccccgtctctactaaaaatagaaaaaattagcccggcgtggtggcgggtgcctgtagtcccagctactctggaggctgacgcaggagaatggcgtgaacccgggaggcggagcttgcagtgagctgagatcgcgccactgcactccagcctgggggacagagcgagactctgcctcanaaaaaaaaaaaaaccttaaactgggtgcctcacccctataatcccaccttttggggaggttaacgggggcc

SEQ ID NO: 47093 - DNA, 522 bp, Homo sapiens
ctcactaaagggaacaaaagctgggtaccgggccccccctcgagagtacttctagaattaattaaggcgggaggcaataaaggcaatggagagctcatagtatttaaccattctgtgactcaatgtcttctataaatgggactaataatagtacccactcatcggtttttttgttaaaaaaaaaatctttgtacagtgcctagctcagttggtggtgcatagtaggtctttaataatggaatttttattatgactaatactttttggttcttcgtaagttttgcttgctgtgggcccccatagcttcaactctatatttttactcgatggctctcttgactccagggttttcaaacttctttcagttttacttcttgttgccccctgcctgatattcattttgtatctgaacaacattcttaacaaaatcccctaagtgtcttagctcatgtttttgggtgggaccatgccatatgcgactagtcattttattaacaggttttcagtgaatgtgtgctatct

SEQ ID NO: 47094 - DNA, 558 bp, Homo sapiens
ctcactaaagggaacaaaagctgggtaccgggccccccctcgagagtacttctagaattaattaaggcggggaaagaattgccgagtaacttatactttttttaaggtttcatgatcaacatgcctgtgtagggatgcaccgaagggttatactgacttgatggccgactgctcataatgggctgctggaaacctttccaatgttttaacattgacacaggcatgcttatcctgtggggaccttctgggacatcccaagacagagttcatcacccttttttaatactgtcctgtacttttcttatctttctattagcgctcttaaaacatattttcttgcaattaccttcacatgcactgtgaacaccggcaatttaatgtgtttttgtgcatgtgtatgcatgcacgctgaataagttccttgcatgctaaaaaatgtttcaacctacaaaataaatagtaatgtcattgcctggttcgtgaaaatttggggataatagatttcacagaaccaggagaaacttataaagatcaagctccagacatattactatggag

SEQ ID NO: 47095 - DNA, 439 bp, Homo sapiens
cccgcccttgagagtacttctagagtaaattaatgcgggggggggaatgaaggtgggctgaggaccgtgggggtatcacagaggagatgaatgccaaaaagtttggtggcagaattagtggaccagcagcttctcagtagctagagaatttgggatgctgttaaccaaagtgagggcccacgagaagtgcagtgttcattcctggaggaagaacgattaagtgttcagaggaggaaggctcagtcctgttcaaatgaaccgttactccactttccttagtccccacaattagtcctactcagagatcatcagaggacacaaccatctgcagaacaatcctgggttccatgagtcctcaaccagaagttttaatgccaaaccccaaagtattctgtgaggagaagctgctttttaggaaggtatgactgtggagtttctg

SEQ ID NO: 47096 - DNA, 491 bp, Homo sapiens
aaagggaacaaaagctgggtaccgggccccccctcgagagtacttctagaattaattaaggtgggagggaatggatttggcagtttgaggagcttggagaagacttgaaatagttgtagaaaatgagagtaagtgttactggggaaatgtggaattatatattaagtgaaacaagctggttgtagcaataactagttattatttttacagataagcaatgaaaaaaaccagaacaaaccaacaagcctttttaatacatctccttatgataccataaacttacaatgttgtttaaatggacatcagcagtgcataaataaaataaacctaaattgttgtttgcctttagtgaatagataaattgcttatctttaacatgtcatttattggaaataacaattcttataattcttttgtcaaggctgtcaaaattgtcatttaaaatgcatagcacaaacaatattatgccaacaataacagaaaaaaaaaaa

SEQ ID NO: 47097 - DNA, 351 bp, Homo sapiens
  misc_feature 307: n = A,T,C or G
ccctcactaaagggaacaaaagctgggtaccgggccccccctcgagagtcttctagaattaattaaggggggctcagaaaagggaaatgtactttatctaaagagatgaaattggactcaacttggagaaatggttctctgaccagatgtcatttaaaggcattggactttgggctccaggcgttgactgtttctcaagataaatatgcatctaggaaccaagaagggcattttcaaggattgctgtgagttggtattataatgtgctaagcacacccctgacgtctttggaggtctgagcatacanatcagacataaatgcttctcagttccttctcataatttctctga

SEQ ID NO: 47098 - DNA, 476 bp, Homo sapiens
agcgcgcaattaaccctcactaaagggaacaaaagctgggtaccgggccccccctcgagagtacttctagaattaattaaggagggctagaaattaggatagtgtttatcttgtgaagggctgattgggaggacgcatgaagatttttgaggctccttaaaatctttttttaaaaatctaggtggtagttaaattatatgtatttgctttatgaaaactgtcagttgtacatttgtgattagtgtacttttaaaaaatgttttcttaaagaggtggggagatgagtgaagtccattttaaaagttcttgaggtcttttcacccttatgaaaatgagcacggcctctggaggcagaacttatatggcttgatgaaaaatgtggctgtactaacatagaatacctttatgcaaaaaaaatttatgcggccgccaccgcggtggagctccaattcgccctatagtgagtcgtattacgc

SEQ ID NO: 47099 - DNA, 470 bp, Homo sapiens
actaaagggaacaaaagctgggtaccgggccccccctcgagagtacttctagaattaattaaggcgggaggaaaggactgcaaggcaattttatagatacattctaaaggccaccagcctggtaagtgtacactgccttaggtgcatttaaccaaaatacccctatctccaaccaccaccagcaccatcatctccacctctgcccaagtgctcttatcctcctgcttatcttaaaagttttcagccagttcctattttctatgacctgggatggaaatctacaaatattaatctacaaatatttatttgatacctactatgtgctcagtcgatgtataaaatacagtatcttcccttgacgagtttataatctagttaataagactaacaatttaaacactgaattatgccagagataatgtgattaagtgctaacttggatggcagagattaacaaagacatgagatgg

SEQ ID NO: 47100 - DNA, 348 bp, Homo sapiens
acaaaagctgggtaccgggccccccctcgagatacttctagaattaattaaggcggggagagcggtgaggacaaaggtggaagcaggggagcagataagcagattctgcagacgtatccacccttccgtgactagctctagccaatggagaaagggcaagacctttcatacatgaccagggtgtatgagaacatgggtgttaccatttaatttcagggtctgtgtgcctcctgcaattcccaccggagaagtgactcctaggtttcaagctgggcttgtccgtatcatatgagctggcagtttctgtttactcattggcagactgacatatacctttgagtagatgct

SEQ ID NO: 47101 - DNA, 494 bp, Homo sapiens
cctgaataaagggaacaaaagctgggtaccgggccccccctctagagtacttctagaattaattaaggggggagagagtcttccttgagaaattctaaacacaagcacatatttatatgagtttggggtcaaaatccatattatctctgtggcagaaacacccttcagtttattttaaaacagtttgggttattagtatacacaagtgcctggaagaactgacacaaatcttctttatagaagagtattttaaacacatacttcaaagaagtgtatatgagctcataatttaaaatcaataatacattaaaatgagatgccattgtgcacctgtaagaaagagtagcttaaaatctaaaataccgtcaccaccagatgctggcggggatgtgaaaaaaaaaaaaaaaaaaaaaaaaaaaaggggggccccccccgggggggacccccaatccccccttaaggggggtttttaccccccccccttggggggtttt

SEQ ID NO: 47102 - DNA, 447 bp, Homo sapiens
  misc_feature 35, 50: n = A,T,C or G
ctgggtgccgggccccccctcgagagtacttctanaggaggtaggcagcnctctggagctgtataattcctgatgctgtctcatgccagcaaggtaagccagcagatcagtgacaccatgtggaatctgccacaatgcctggcatcctacaccaaccttcagagtcaaaaaaatatgctgctgattcacttccagctcccaaatctcacacaaggtgtcttttgtaaaggtcgctaacccagaaccataccagaaagggtgaacgcagtacaatcccccacagagtctttggataaatttaaacatttgagacttgcatttgtttaaaggatatcacatagcatattagaagagcacagaagaggctgggcacagtggctcacacctgtaattccagcactttggggaggcagaggtgggtgaatcacttgaggtcaggagtttgag

SEQ ID NO: 47103 - DNA, 505 bp, Homo sapiens
cgccaagcgcgcaattaaccctcactaaagggaacaaaagctgggtaccgggccccccctcgagagtacttctagaattaattaagggggaaatacagagggattggttagtgggtacaaacatatagcatatagttgtaaaaaacaaaaatgccccaatattcaatagcagagtagagtcaccatagttagcaacaatgtattgtatatttcaaagtagctaaaagagaggacttgtaccaacacatagaaatgaaactcaagatgatggctatttcaaataccctgacctgatcattacacattttatccatgcaataaatattcacatgtacgccataatatgtaaaatattttgtttcaattaaaaaaattttttaagaaattcaactagtaatcaaaatgttcccaaaaggaaaacatcaggcctaggtagtttaactctcagatttatcaaacatttagaaaaaaataataatcttaaaacattcttccataaaaacag

SEQ ID NO: 47104 - DNA, 474 bp, Homo sapiens
  misc_feature 374, 375, 376, 377, 378: n = A,T,C or G
ggaacaaaagctgggtaccgggccccctttcgagagttcttctagaattaattaaggcggggtatgggtggtaaaggcaagggctcctggaagtaaatatagaagtgccagcggttggtgttggcattagctttttggctgtaacataaaccccgtcagcatgtctatgcatgcctatatgatgcaaacacatgtttgcaatagaggctagtttgagattttcacaacagtaagtctaaagttgtagttctcaggccgggcgcaatgcctcacatgtgtaataccagcactttgggagaccgaggcaggcggaccacccgaggtcaggagtttgagaccaacctagccaatgtggtgaaaccccgtctcttccnnnnnaaaaaaaaaaaaaaaaaaaaaaaggggcccccccccgggggggacccccaatcccccctatgggggggtttttacccccccccttgggggggtttt

SEQ ID NO: 47105 - DNA, 686 bp, Homo sapiens
ctaaagggaacaaaagctgggtaccgggccccccctcgagagtacttctagaattaattaaggcgggggggcgggggtagattcctagctctttcccgagtctacttcaaaagaactcgggtaaagcctgggcatgcataattaacgagtactccaggggattctgagcacgtggtctggagactacacttttttggaacactcttctgcaaagctttcatcctttatcaagggagtcacctaggctcaccaacttcttccagcaggattctttctcccttgtcttctatagtacactcactgtgaaagcagggtaggttttgctgctgttgtttattcagggaaaaggggatgaggaagaaacaatattaaaaggagaaaggaaaagtggacattttgaagagctccctccattatttatgttgcaattaaagtatgaaatcttaaccttctttttaaaggtgtggcctttaggactataagcactcaattctccactaaataaatgcctttctccactgaaacccaaagctcccttaagggtttcaaaacctaccatttagccccaaatgtgggcaataattggccgaaaagttcacagatctatcaaaccaatagtccttaccttgctgtttctcctttcattttttagcactcattaaaaaacaaaaatagggctgggcccg

SEQ ID NO: 47106 - DNA, 476 bp, Homo sapiens
cctcactaaagggaacaaaagctgggtaccgggccccccctcgagagtacttctagaattaattaatagatgccttcttttctcttgggtaaatgcttaggagacaaataacctggatcatggagaaactaccagattgttttccaaagtactacgattttacattcccatcagcagtattgtgaatattaacattcttccacattcttcccaactcatgctttccaagatggcactctttttaattttagtcactattaataggtttgtaatattatctcactgtagttttaattttcatttccctaataactaatgatgctgaccagctttttcccgccttaattaagcggggacttgatttaagaaaaattggctggatgtggtggctcatgcctgtaaatcctagtactttgggaggccgaggcgggtggatcacttgaggtcaggcgttcaagaccagcctgaccaacatg

SEQ ID NO: 47107 - DNA, 330 bp, Homo sapiens
  misc_feature 27, 95: n = A,T,C or G
gggaaaccgaggtgggtggataaccangtcaggagatcgagaccatcctggccaacatgatgaaaccccgtctctactgaaaatgcaaaaattanctgggcatggtggctggtgcttgtaatcccagctactcgggaggctgaggcagaacccgggaggcggagcttgcagtgagctgagatagtgccactgcactccatcctggagacggagctagactccgtctcaaaaaaaaagtggctggacttgccaaagttgggttggcaaagaaaacccatccaattttaaaatgatcaaggtcattgtaaactttgaaaaatctttatttct

SEQ ID NO: 47108 - DNA, 427 bp, Homo sapiens
aaggcaacaaaagctgggtaccgggccccccctctagagtacttctagaattaattaaggcggggtaagattagagaatcgaaacaaatctggggaatttccaataaatactacaaaattagactagaaaaatagctgttatgtaaataactttgttggaatatgctaattttagtgtcttgaaagtttacaatttatctgattgctctgcagtacagtagcaactgagctgatcaataaaggtgaaattactttttcaaaaataactaaaacaacaaaaaaaaaaaaacataaggataacaaaacaatcctattctaaaaaccataataaaaaaaaaaggtttacgaccccccccccgggagggggacatccctatggtgcaggcaaaaaataaacccccccccccccgggggttttttaaaaaaa

SEQ ID NO: 47109 - DNA, 478 bp, Homo sapiens
  misc_feature 73: n = A,T,C or G
ccctcactaaagggaacaaaagctgggtaccgggccccccctcgagagtacttctagaattaattaaggcggngacacaaatctaagtcatgtcagtgcccctaagttatccagccacaaacccacatatttattcctttctctttgggactggagacttttactcattcaagtatttcccacgacatagttttcaaagtttggtctccagattacctgcatcagatgattaaaactgtaggctcttgagcaaccctccttaactcccctaacatggaatcacaagacccattgattatagtctatgaaattgcattcttaactaagtccctgggtgattattatgcatgctgaaatttgagagtagtgcagtgtggtattcccaagctttggacagagaaggattcactgaaaaataattaaagcccaggaaggactaaaaggataacagagaagcatcccaaaaatgattgaaaag

SEQ ID NO: 47110 - DNA, 460 bp, Homo sapiens
gcgcaattaaccctcactaaagggaacaaaagctgggtaccgggccccccctcgagagtacttctagaattaattaaggcgggggttgcagtgagccaacgtcgtgccactgcactccaacctgagtgacagtgtgagaccccatctcaaaataattccaatgacatttttcaaatagtttattttagcggagctacagtgatttaatcttaaatatgaacctttatttatccaccatattatatttgatacatgttttccaacttactgggccatctactggtgtcctacattagttgaaaaagaaagttggtaatgctgcttcattttcatgttccctattggtctgtttagctttccttttattaattgcattcaaacttcacagttgcaagcacgtttattagtgaaagttgcatccatctttctgtcttccatgctctcagcatagtttgttgca

SEQ ID NO: 47111 - DNA, 496 bp, Homo sapiens
  misc_feature 95, 96: n = A,T,C or G
ctggccgtcgttttcaccccggaaacagcgtgtacacatgatgggtgccgcggccctccctcgagagtacttctataggggggaggaagcaatcnngactacacatttttttcttatatactgctcaggtgatgggtgcaccaaaatcacagaaatcaccactaaataacttttccatgcaaccaaacaccacctgttcccccaaaactagtgatataaaactacacacatataaaaacaaacacacacatatattcacctttatatcaatcatgtgggtggctataattattctagttcttcagacacagagaaaatcaagagtcagaaatcttactcaaggtcacgaagatatgcggcagggtcaaagttttgaaaaccaagttggtttgctctgagagctgtttacacagcaccaacacagaatttcagagacacattttgtgagaaagttatcaccagtgacagaaacacaacaggaggccctacaattcat

SEQ ID NO: 47112 - DNA, 574 bp, Homo sapiens
  misc_feature 555, 556: n = A,T,C or G
accctcactaaagggaacaaaagctgggtaccgggccccccctcgagagtacttctagaattaattaaggcggggagtagagtgttcattgtggaaaacagtacgcataagtgccctaccaagtataaagagactgcggtaggttagtgttgagtgctgacaatgttggcacatattgcgttaaaacctttgaatctcataaagacaacatggtaaaatctccatcaccaaggaagatgctattgctaataacttcacacctgcctgaacaaaacaaaaaaatcctactcataaagggaaataggtgtgtcacattgaaaactgcgaacagaacttactgaaggtattgattattataaagtacttctttgtacataatggaggctatcttgattcatactggtacctcacaatcactcccacagggctttttgtcctctaaagtcagaggtatcaaaatctgctaacttggtttagtttcagctaagggcataaatgacaactgactgcagtaattaattatctccccaaaaaaaaaaaaaaaaaaataaaaanngggcgggccccccccggg

SEQ ID NO: 47113 - DNA, 285 bp, Homo sapiens
  misc_feature 98: n = A,T,C or G
tgggtaccgggccccccctcgagatacttctagaattaattaaggcgggcaacaagtcatttgacaagaaataactcacactaatagttatttccttncttcacagggaaaacaaaaattaagaggtagtattacattaaattgctgatgctttagaaagaggaaaggtatcatgcatgaaagtagtatttctggctccatttccacgcaccaaggaaccacagctttttattttattttatcttattttgttttgagacagggtcttactctgttgctcaaggc

SEQ ID NO: 47114 - DNA, 444 bp, Homo sapiens
aattttacataaagggaacaaaagctgggtaccgggccccccctcgagagtacttctagaattaattaaggcgggtaggagcaaggactgggaaagtaacagtagggaaaaggaactaggagaaaactctgaagtagggtcaggttgcagagcagatttggtttttttacccactatggataaggttgttttgctggattcatgttaaccctttcttttgaatttccctaaataaactatattttcatcactccaaaatttcttcaaataaaaagctaacaactgttaggaatttccaggcagttttaacacaattacattataagatgtccaatgaatgaatagcacataggggttaaaaaccatcctgcatcttccccctccctaaagcattccctcctttaaaaggaagtaagcaagccaagtgagttgtaactatgcaat

SEQ ID NO: 47115 - DNA, 494 bp, Homo sapiens
gcgcaattaaccctcactaaagggaacaaaagctgggtaccgggccccccctcgagagtacttctagaattaattaaaattataaacttttggaaaattccattttatcgaggtaaacctgtttctatttagtattttgtacttgaaaccaagcgaagtacttggtgaacacaaaggagtgcattcctaggtactattaaagttagctacattaggccaggtgcaatggctaatgcctgtaatcccagcactttagaaggcccgggcaggtggaccacttaaggtcaggagtttgagaccagcctggccaacatggtgaaaccacatctctactgaaagagataaaaaattagctgagcgtggtggcctgtgcctgtaatcccagctactcagaaggctgaggcaggagaatcagttgaactcgagaggtagaggttgcagtgagctgagagaatagcgccactgcactccagcctgggctacagagcgagact

SEQ ID NO: 47116 - DNA, 511 bp, Homo sapiens
atacgccaagcgcgcaattaaccctcactaaagggaacaaaagctgggtaccgggccccccctcgagagtacttctagaattaattaaggcggggtaatgcctatagaggcagtgctgctcctgtatcatactggatggataaaagctcacgtctcatcctatctggagagaattttcagagaccatctatatgcttcttgggaggtttaagtagattgataccctgttatctttagggatgacattgatagttactactccttatattggcttttcttccatccccatcttaactcttcctgctcctgtaggtcattctctagacagactgcttttactcaggttcttacctcagccattgcttttgggagaacccaaactaagacagcagtcattagagtacttagtatttaaaaggtagataagagttcgggaattgaaactggatgatcaccaaaggtgtgagtatatatagaaaagaaagccaagatatatgttctttgtatcatt

SEQ ID NO: 47117 - DNA, 418 bp, Homo sapiens
gcgcgcaattaaccctcactaaagggaacaaaagctgggtaccgggccccccctcgagagtacttctagaattaattaaggcgggggagaggcttgggagtgggaactagcacccgctgtaaggtctgccataagacttaatgtttgtctccaatgggatggagtcctggcataagcaaaattaatattgataacgttattattatttaaaatttgtaaatattgtaaaatattttagaaaacatctactttgaaacatctactgggcgagaccaggagtgatggctcagcctgtaattctggaatttcgggaggccgaggcaggaagattccttgagcacaggagttccagaccagcctgggcaatgtagcaagacgctgtctctatttatacaataaaatttttttaaaaaaaaaa

SEQ ID NO: 47118 - DNA, 498 bp, Homo sapiens
actggccgtcgctttcaaccctgactagagaggaacaaatgctgggtaccgggccccccctcgagagtacttctagaattaattaaggcgggcagattacttgagcctaggagtttgaaaccagcctgggcaacatggtaaaaccctgtctctaccaaaaatagaaaaaatagccagtctcataacccagtctcagaataaatagatagattaaaaattttaaaaaaacctcaaaatggataaatttgtgtgaaagtaacataactacctcctagaaagcgcttaccactaaagagagacaacaaaattgagcactctgcaatgtgaaattcaccatgtctgagtatcaataaaaattattatacagaatagtttatattttatacagaaaataaaatttatacagaaattttatttacttatataaaatgttcttttatacaaaaaaattatacagagtaggaatctgaaaaatgcaatccatacctgggagaaaaa

SEQ ID NO: 47119 - DNA, 286 bp, Homo sapiens
aagggtaacaaagctgggtgccgggccccccctcgagagtacttctagaattaattaaggcgggcgtggtggtgcactcctataatcccagccacttgggaggctaaggtaggagaatcatttgaactcgggaggcggaggttgcagtgagccgagattgtgccactgcctgggcaacagagtgagactccgtctcaaaaaaaaaaaaaaagaagggaatttttgaaaatacttaagggtgaaaaaacaaaaccttaacacttcaaattgtttggaatgcaccaaa

SEQ ID NO: 47120 - DNA, 311 bp, Homo sapiens
accctcactaaagggaacaaaagctgggtaccgggccccccctcgagagtacttctagaattaattaaggcggggggaggcactctgggagctataagagaacaaaatccttatttgccatttgcagaaaatgtgtaatatcaaaaatagatgaatcaagcaattgcaagaaaagcttattatataggaaaaaaaatacaaatacccaaaaaaaaaaggggccccccccggggggggccccccattgccccttttgggggggttttttacccccccttttgggcggttttttaaaaggggttttttaaaaa

SEQ ID NO: 47121 - DNA, 572 bp, Homo sapiens
  misc_feature 446, 447, 448: n = A,T,C or G
taaccctcactaaagggaacaaaagctgggtaccgggccccccctcgagagtacttctagaattaattaaggcggggtaaattagtaacagcaagtttaggaaagagaaagaacttgtaggaactattggagggaatgagtctctttggggggtcctagtaaggagaatgtcaaattaaatccttcccagctggttgctcaggaaaagattctcctgtttagcagttaagcacacacaaaaaagtcatgcaatggccttccctatagtggtgagatcacattaaatagctacttcaagtgtcactaaagcattataactgctcttaagtgtatgtagaatgagattactttagaaaaacatttcaaaaaatcatatgcttttcccatatgttcagtatttaatgttgttggacaatgactgcctaaaacttcatacgcagcaaaannnaaaaaaaaaaaaaaaaagcggccgccaccgcggtggagctccaattcgccctatagtgagtcgtattacgcgcgctcactggccgtcgttttacaacgtcgtgactgggaaaaccctggcgtta

SEQ ID NO: 47122 - DNA, 417 bp, Homo sapiens
  misc_feature 332: n = A,T,C or G
ctaaagggaacaaaagctgggtaccgggccccccctcgagagtacttctagaattaattaaggcgggacaagatagtttgggctagagtgaaatgccttggaaggctgcatactgaacacattttaaaggtagagcagtataatttccagaaagacagaatgtgggatgtgcctcagagaaccatcgagattgaaaaaactacctattagatactatgtttattacctcagcgacaaaataatctatacagcaaacctctgcaacacataatttatctatgtaacaaacctgcacatgtactcccgaaaaaaaaaaaaaaaaaaaaaaaaanggggggcccccccggggggggaccccaattccccctttaggggggttttttaccccccccccctggcccgttttttaaaaaaaaa

SEQ ID NO: 47123 - DNA, 293 bp, Homo sapiens
tgggtaccgggccccccctcgagagtacttctagaattaattaaggcggggtgcttgtaatcccagctacttgggaggctgaggcaggagaatcgcttgaacccgggaagcagaggttgcagtaagtggagattgcgccattgaactccagcctgggcaacaagagcgaaactccatctcaaaaaaaaaaagatgtatgcttcattttgggacttacaaaaaattaactttggtttttgcctgctcatggttttgggctttgggcaaaaccatttcctgtgtggcttttcctg

SEQ ID NO: 47124 - DNA, 461 bp, Homo sapiens
taaccctcactaaagggaacaaaagctgggtaccgggccccccctcgagagtacttctagaattaattaaggcaatgtcttcccaccgaggggtaaagagagttttccctttcccatctccttcctatttccttttgaggttcaggtatccctgggagcttaatcccacattttctgggactaccacaggttttcatagatgtttactcctttaaggcagtcctctaaccttcaaatcacaaacaataaagaattaaatttttggctttgtcacttcagtaaaattggacatttttcacacctggacttattaaattttcccctgcagaatattttgccactggagtgagaagagggattaatagtatcagtttttagtggatagaggaggacaattaaaaaaaaaatatatgtaataaatagcggccgccaccgcggtggagctccaattcgccctatag

SEQ ID NO: 47125 - DNA, 339 bp, Homo sapiens
acaaaagctgggtaccgggccccccctcgagagtcttctagaattaattaaggcgggcacagaccattaagtacaggaagatctctccagctctgtggttgaagtgaatgagtgagacctgcttaaagaacaagacaccaattctgtggtcctcagcaggcacagacagcaaggctttgaaaggaaagaaatcaactctgcaccagttttgggcgatcaatggattaagataaaactttaacttctaagaattcaaattacctaatttgttcttacgtttttaaactaaaacacaaaaaaaaaaaaaaaaaaaaaaaaaaagggggccccccccggggg

SEQ ID NO: 47126 - DNA, 578 bp, Homo sapiens
agactggccgtctgtttacaccccgaaatacaggggaaccacatgctgggtgccgggccccccctcgagagtacttctagaattaattaaggcggggaaagctgttgtgagcattgggtggtggtgctggtggtgactctttacctgcttctctgattagaaagcaaacttccccaaaacaggcagaaatctattctatcaactttgatatctctccaggtttttaaaacagtgaccagcatctggttggtgctgaatgaatgttcctagaattaatggttaagtgagtaggaaatactgttccagttccattttctcctgtatttggagactctgtggttctctctctctctctttctctctctctctctctctctgtgtgtgtgtgtgtgtgtgtgtgtgtgtgcgcacatgtaagtgtgtgtaatgtttagtttttttatgggtataaatatatggtaaggtaagataagagtcgcggtatctgctaaattagggaaaatattttctgtgtaaaagctgaaaatatgcagggggcaaaagcctttagatttggctctgggagatccttccataaa

SEQ ID NO: 47127 - DNA, 557 bp, Homo sapiens
attaattaaggcggggggagtgttttaaaaagctatgtgcatatgattgccttgatgaaaatgaattatttaaaaataaagtcaggcagacgtaacacacacagaagtttctctggcaagatgttccctgctaccaacactaggtatttctgagtagtacaatttgggatggtttcttactttcatctctttcctaaataattggaacctttaaaattggttggaacacaaaaatagtcattattttacattaaagttaactataggtatctatgggtgccagagtttccatcttccttcttttgtcctgactttacctaattaatgccaaacctagaagtgtgggacagaaattagaaaaagtacatcttaaataagtccacttttctacttttcagatctgctaaaagatcagcttttatggccagatgtggtggcttacgcctgtaatcccaacactgggaggctaaagcaggaatgtggcttaaagtcaggagttcaagaccagcctgggaaacaaagcaagaccccatctctcaaaaagttaaaaaaaaaaa

SEQ ID NO: 47128 - DNA, 524 bp, Homo sapiens
  misc_feature 478, 479, 498: n = A,T,C or G
cctaaataaagggaacaaaagctgggtaccgggccccccctcgagagtacttctagaattaattaaggcgggggacctatcaggactagcttcaggttcatggtgaattttccagttaatacttcattttccagtggtgtcagataaatgaggtacagctatatttttgaaagattacctgtttggcatttaacatcattcctctgggattttaccctgttttgaatggaaggtagcctttttgaaagaagatgagccacttttgtaaatttagtatgaaacattttgagctcctcaagaaatttctttataatttctaaataaatgggacctaattaaactaaaaagcttctgtacaccaaaagaaataatcagcagagtaaacagacaacccaccgagagaaaatattcacaaactatgcatttgataaaggactaaaatccagaatccacaaggaatgcaaacaaatcagcaaannaaaaaaaaaaaaaaaaaangggcggcccccccccgggggggaccc

SEQ ID NO: 47129 - DNA, 496 bp, Homo sapiens
gcgcgcaattaaccctcactaaagggaacaaaagctgggtaccgggccccccctcgagagtacttctagaattaattaaagcagggagacttcttgtaaatatagttttaagaaggaatgctgtcaaagtattcaagaccagatgagataaaaacagcaaaaaaaaaaaatcttgcctttgggtggatcgcttgggcttaggagttcgggaccagcctgggcaacatggcgaaaccccatctctacaaaaaatacaaaacttagtggggcgtggtggtgtgagccggtaatcccagctactggagaggctgaagtgggaggattgcttgaacccacggagatcaagctgcagttagccgtgttcacgccactacattccagcctaggccacagaggaagaccctgtcccctcaaaaaaaaaactctcaaaaaacaaaatatagcggccgccaccgcggtggagctccaattctccctatagagagtcgtattacgc

SEQ ID NO: 47130 - DNA, 478 bp, Homo sapiens
accctcactaaagggaacaaaagctgggtaccgggccccccctcgagagtacttctagaattaattaaggcgggcggatcatgaggtcatgagatcgagaccatcttggctaccacggggaaaccccgtctctactccaaatacaaaaaattagcccggcacggtgaccagcgcctatagtcccagctactatggaggctgatgcaggagaatagtgcgagctccgggaggcggaccttgccatgagcccatatatcgccgctgttatccggcctgggtgacagagctagactccgctttgcaatgtgaaattcaccatgtctgagtgtccctccccccatgatgcacactagtttatattttatacagaaaataaaacccctacagaagttctatttacttatataaaatgttcttttatacaaaaaaattatacagagtaggaatctgaaaaatgcaatccatacctgggagaaaa

SEQ ID NO: 47131 - DNA, 292 bp, Homo sapiens
  misc_feature 282, 283: n = A,T,C or G
aaagctgggtaccgggccccccctcgagagtacttctagaattaattaaggcgggagtagagagtaaaaaaaacacttaggttatttatgtaaccttacacttattaatacagatgcaaaaattctaaataaagtattaataaaaatcaagttatataataataatatactgctatagagtattttaattatgccctattctatatatttcaggtgtacaggctggttcactatcaagacatctattaccgttagtaatgaattatgataatactatgactnnaaacaaaca

SEQ ID NO: 47132 - DNA, 563 bp, Homo sapiens
cctacctaaagggaacaaaagctgggtaccgggccccccctcgagagtacttctagaattaattaaggcggggctgttattgcatataaacatatcacctatgtcacggcccggagtcaacatttagggcagtaatatcacttgtcaaaaaatactgctgccaggatggcctggaaactcaataacgccctaatcaagaaagagtagaatcagagggaccaattagcagactctcgcactagtcaaaattaagtgtaataacggccagaggtggcatggtagaaaaaagactattggggttgacacaaagaagattcaggagaaaaaccctccttaaaaaaaaaaagttttaaagttaaaaccctttctttcgaaacaattgcatatgttaggcaattcctccaaaatttaagtgctaatcgatagattctgaagctgtctagcaaggaagttcttgtacccttagaaaaggcattctctcactgacctggtcgctgcattatcatctcaaatgccattttcttcttactgatacattacattgccaccttcaaaggacaaaa

SEQ ID NO: 47133 - DNA, 376 bp, Homo sapiens
ctggccgtcgttttacaacccggaataaggggaacacatgctgggtagccgggccccccctcgagagtacttctagaattaattaaggcgggcactggtttgagagaatgctgggattatataaaccatgagatttgacagaccgaattcaggtcttagtaaagggatcaaggacaataataatatttacacgttgatgtttcgatcgggctcagggtaaggtagttgtcagaccagtgttcatagaccctaggcaccagaggatttaaaacaaaaaaaaaaaaaaaaaaaaaaaaaaaagggggccccccccggggggggccccaaattcccccttaggggggtttttttccccccccctctgggccctttttta

SEQ ID NO: 47134 - DNA, 512 bp, Homo sapiens
gccgtcgttttacacacaggaaacagctatgaccatgattactggccgtcgttttacacacaggaaacagctatgaccatgatgactgggccgacgttttacactcaggagacacctctgaccctgattattcgcacttgcttgcccgcaggaagatgaagtctggcatatgtgcgcctgtcgacttatattggtgatgtagatgaaaggaaaaaattgggagcccatatgctgacatttacatttctcatagtaaggaaataccctttttaagccgatggaagattacttattctttcatagttaaaaagataagcagttctataaaattatagagcttccaaaatattaaagatctgtatggataaaactaagaacaatatttgtaatggaaccttaaaaaatctgtaaagatcagtaagcataacataaaatatgacatatctaagaccagtcatgctgtcataaaaaataaatgtagaagcttttataaatcacctgttaagaaaaat

SEQ ID NO: 47135 - DNA, 388 bp, Homo sapiens
taaataaagggaacatatgctgggtaccgggccccccctcgagagtacttctagaattaattaatgcgggtaggaagaaaggtctcttttaagaaccggaacgaaccctgggcctgcaacccacatagatttgggcttcaaaattatactttcaattataatatctgaatgttccaggcactccaaaccaaagaattaacataaaaattggcccaggcaagagcatctagaaaaagcaaattcatccccactttttaaaaccaggtcatataagatcacaccacagataaaacctcgctaaaaaaaaaaaaaaaaaaaaaaaaaaaaggggggcccccccccgggggggaccccaattccccctttaagggggttttttacccccccc

SEQ ID NO: 47136 - DNA, 540 bp, Homo sapiens
cctgactaaagggaacaaaagctgggtaccgggccccccctcgagagtacttctagaattaattaaggcggggcacatggggtctgaggagacattgaatatcacgtctatggcctcctgtatgagaactatgaacacaaaaccgttgcccccttccatctccttaactatcctcacggtgtcctacagacactcgacgcccctttcgttgcacctccccatagcccctcctcctcgccccagggaactcccatcctgtattctgtgtgtgattctgactaagctaagtatctcttacaactggaatcacacggtatttttctttttgtgaacggtttatttcatttggcataatgtcctcaagattcattcatatctttccatatgttagaatttccttctttttaaaggcagaataatactccattgtatggatatgtcacatttggtttacccattcatctgtttctgtaaactaggttgcttccaccttttggcaattgtgaataatgctgttatgaacatgaaatataaatatct

SEQ ID NO: 47137 - DNA, 482 bp, Homo sapiens
  misc_feature 62, 473: n = A,T,C or G
acaaagctgggtaccgggccccccctcgagagtacttctagaattaattaaggcgggtcatngaaaaactaaaacttaaactctttgtagcagagcctatctggcaggatgcgctgatttgagaaacagttgttgacaacaaactttcatggctctgcaccatttgagttatatttctctctgtgctctcagccaagagtctgtcttttcaataacagcaagtcttggcaaaccagtaatgattttgcttcccactagatacatttggatgttttcaagaagcctaatgttttgctttttttttttacttgttttcaaggggactgatttatttcctcttttaatttgcttttaagaacataaaacaaaacaaagtcggcccagtattgctctcttacactcctgaacaattttttctggtcgactcagcttttagcttcaggtcccatcctgtctgtccaggtgtggaaaanaaaaaaaaa

SEQ ID NO: 47138 - DNA, 357 bp, Homo sapiens
  misc_feature 282, 283, 296, 297: n = A,T,C or G
acaaagctgggtaccgggccccccctcgagagtacttctagaattaattaaggcgggtcagatagtggtataatgtatttccagccccagaagcaagtgattaaggttatcaattacattaaaacaaaaacaaaacataggctaaaatgaactgaccacttttggaatagaatcctatcatcctgtggtgatactttcagagttacctggctaggtgtggtgcctcacgcctataatcccagcactttgggaggccgagccaggaggatcacttgagcccanngagttgagactanngctggtgacatagtgagaccctgtccctacaaataaaaaaaaaaaaaaaaaaaaaaaaaa

SEQ ID NO: 47139 - DNA, 290 bp, Homo sapiens
  misc_feature 269: n = A,T,C or G
aaaagggtaacacagctgggtccgggccccccctcgagagtacttctagaattaattaaggcgggattataatgctttgtcaccccatgcaaaaaatatttaagttggaagagacactatcaataactacagtgatcatcacaggcatagcctgggactccctggggcagcctgagatatatggtcactctatctttctcaccttggatagtccaatcattgtttcagaccgtaacatcttcaattacattaaagtcaaattctctatnttaccacagacttaccttcag

SEQ ID NO: 47140 - DNA, 323 bp, Homo sapiens
aacaaaagctgggtaccgggccccccctcgagagtcttctagaattaattaagggcggggaaaagatacagacaagatttaagagctaaaactataaaactcgtagaataaaatatagtagatcttcatgactttgggttaggcagagtcttctcagatatgataccaaaagcacagttaacaagagaaaaaatagataaattggactttcagaaacttaaaagctcttgtgcttcaaatgtcaccatcaagaaagtgaaaaaataactcacagaatgggagaaaatatttgaaaatcatatatctgacgagacttgtatcta

SEQ ID NO: 47141 - DNA, 462 bp, Homo sapiens
ctaaagggaacaaaagctgggtaccgggccccccctcgagagtacttctagaattaattaaggcgggtggaacacctgatgtcaggagttcaactccagccttggcaacagagcaagactccatctcaaaaaaataaatagatagatagataagatacagagaagattggcatggcctctgcatcattatgaatactaacataacagtgctaacttgataggtatatttttgtcctgcagaatgctattttcaatgacatgacctctcaaattcagttttttaaattaaaccttttattttgagataattgtagattcaaatgcagttataagaaataatataggccaggcacggtggctcacgcctgtaatcccagcactttgggagactaaggtaggaggatcacttgagcccatggtgtttgagactagtctgtacaacatagcaagacctatctctaa

SEQ ID NO: 47142 - DNA, 465 bp, Homo sapiens
accctcactaaagggaacaaaagctgggtaccgggccccccctcgagagtacttctagaattaattaagggggttggaagataagtaatctgctggagatggggtgtggacagaggtcctgaatatatggagaagctctgaaatagcgattaggaaaaagggataaatcagacactgaagtgcttaaggtttgagatatgaattttctccagcagtcctcagcaaccagcaggtaggagtaaataactgaatgattccaggatggaaggtggagccccagtaatgaggaggtcctagatgtgagcctcacgcttaaatagaatgacacagtcaagtaactgagctatatgtattatctgacaaaacatttatagcttattttgtacaatttttatgtgatgaaaagttaatttgagagaaaagacctaattagctggaattagtgtaatacagaaactcttttca

SEQ ID NO: 47143 - DNA, 409 bp, Homo sapiens
  misc_feature 31, 33, 46, 47: n = A,T,C or G
acaaaagctgggtaccggtgccccccctcgngnagtaccttctagnnaattaattaaggggcggggaccaggaaacaatatagatgtagagctgcacaaattctcttctctagctggaaaagtaaccaaccatgtgtacctttccaagatgggttgaaaaaatagttctactgaacacatacttcaactctgtattttctgatttcttgccctctgaactggtatataacattaaaaaaggatttctaaaattcatatttaaccttcccttcaaactccaaacaggcacctgaggtcaggagttggagaccaacccggccaatgtggtgaaaccctgtctctattaaaaatacaaaaattagccgggtgtgttggcgggcacctgtaatcccaggtacttgggaggctg

SEQ ID NO: 47144 - DNA, 458 bp, Homo sapiens
aaagggaacaaaagctgggtaccgggccccccctcgagagtacttctagaattaattaaggcgggaaatgacactgatgatcttaaaactgcattggaagcaagaaagagaaataacaatgtaaaagcctatgaatggagaacaggcttgagaatatcataccattcaaagaatgtgactgaatagacgataatcaaaattatagaaagtaatagaaatccatcattgagataatagtcatgctggaataggaaaagaagaacacatgcaacagacaaatattcaaagataaaatagaataaaccattcctgaattgaatgaggacctgaaactatagatcagggtttatcatatagaaaaaactgtattaaagaacaaccaacattcagaaacatcctagtgaatttattgaactctaagaataaggaaagaacacttcaaatatctagacaacaag

SEQ ID NO: 47145 - DNA, 584 bp, Homo sapiens
ccgggccccccctcgagagtacttctagaataaattaaggcggggaataggattctaagtcaaatgggtttgagaaatgttgtgtaaaatacaagtgtaacatatatcatagcatgtgccactactgcccagagatgtacttgcattttagtatattgaagaccataacaagtactcttataaatttaaaatccattatattctatttaactcttgcttgtttaaacttattcaattacataatttcttttttcctatgtaatctctttatatctggctgaactcttatcactaggacagaatttgggaaatgctggcataaaactattttaaagtttgatatatcacgtgtacaattttcaatattgtttcctgcaattgttctactatcttagagattgtgtttactgatgtagtgggtatactgtactctgtgatctcacaatgcattatttaataatagtcaaaatggaaaattaaattaagactgctagactgtttcacctagtggtttctgtgtttcgtccattatcagtctttctccccccactcccaccacctgtggattggaagaacaactgcag

SEQ ID NO: 47146 - DNA, 458 bp, Homo sapiens
ccctgactaaagggaacaaatgctgggtaccgggccccccctcgagagtacttctagaattaattaaggcggggtgagggggattctgaggccccagccccgtcggggcagctggagcacttgcgccacatctgggcagaaggcactgcacacatgggacagcctcgttggtggcttcatctcagtcaggtgaaaggcgaagcatctgatctccttgtaaatctgtttagaccttgtgttgttaaccagacatggtttttcttgtgtgtggaactatgatccagtgaaaaaacaaagcaaatattctactgttgctatacttttttttttttggtaacaaaaaaggggggaagggggagttccatattttgagtttggggcatgttatctgaagtccccctttacttgccaaaaaactttgaaaaataggttttattattccagtttaataaatgagg

SEQ ID NO: 47147 - DNA, 444 bp, Homo sapiens
agagtacttctagaattaattaaggcgggttactcatcaggacactgcacaaagacttagtcacattcctcttaagtctacaaatttaccagtacatttccacatttttctaaaactatctttttctatataagtgaattgtgacacttatgaaatagtcatccaatgcctacattgattttattttcaaatttattttggtaaaatagtttagaaaacattatatattttgtaatatttccattccccctcgaacctaaaataaattgacaagcacacctctgcgaaacagtgaatacgcgggcgccaccgcggtggagctccaattcgccctatagtgagtcgtattacgcgcgctcactggccgtcgttttacaacgtcgtgactgggaaaaccctggcgttacccaacttaatcgccttgcagcacatccccctttcgcc

SEQ ID NO: 47148 - DNA, 580 bp, Homo sapiens
gcgcgcaattaaccctcactaaagggaacaaaagctgggtaccgggccccccctcgagagtacttctagaattaattaaggcgggtggatgacttaaggccaggagtttgaggctagcctggccaacagtgaaaccccatctctattaaaaatacaaaaactagccaggtgtggtggcagacttctatctggcaaatttctattaatttctcaaggccaggttcaaacatcacttcctctgagggagctttcctctctctcaatctatctgctgaacttgtctttcaaactaaattgtgggcagctgtcccactccaatcagttctagcactggcttaaatctctgctttcaccaaaagctttaaaaaataaaaataggccgggcgcggtggcttggcctgtaaccccagcactttgggaggccgaggcggtcagatcagctgaagtcaggagtttgagaccagcctaaccaacatggagaaacccgtctctattaaaaatacaaaattagccgggcgtgggggcacatgcctgtaatcccagctactctggaagctgaagcaggagaatcacttgaacc

SEQ ID NO: 47149 - DNA, 490 bp, Homo sapiens
  misc_feature 386: n = A,T,C or G
ctggccgtcgttttacaggaaacagctatgaccatgattactggctcgctcgttctctacaggaaacaagtattacataattactgaccttaaataaattccaaaagtgcaaaaattgaagtggtaaatgagaaccagagctgtaaggggaagcatacttcaactgccctgaggacatttttagaccttggtggggctttcgtttaaaatggcctaacagagatggatgataggttgtttaatgcatacagtttaggatttcttagccccctgtataaagccaggatcctgcaaggatcataacctcagtgaaagcatagatgagaaaataaaacctctccactgacaaaaggagaaaataaggaagcttgtgtttcttggcttgngttcctgggaacaggggagggatgtgtgtgcatgtgtaggatgcctctcctgagaatttttaatcaagtgcctcctctcaagcaggtttcagtttttaatctgt

SEQ ID NO: 47150 - DNA, 248 bp, Homo sapiens
aagggtaacaaagctgggtgccgggccccccctcgagagtacttctagaattaattaaggcgggaatactgaaaaaagagaaaaattaatgaaaactaaatctgattctctgagtaaataagtacaattaataaacctatattcagaatagttggaacaaaaaaagatgacacaaattaccaatgtctaaaatagaagagacctcacaggtattaaaaaatactaagagaatattataaacagctttt

SEQ ID NO: 47151 - DNA, 601 bp, Homo sapiens
  misc_feature 566, 569, 572: n = A,T,C or G
ctaactaaagggaacaaaagctgggtaccgggccccccctcgagagtacttctagaattaattaaaatcaactactagcatgattacattggaatggcaggaaatgacatctcagccatttgagggcttccctcacaagacatgactcaggattctaggatcttgcccaatgtgccaaagcatggagagtgcctgtcctgtcatctctcttccgtctgcatgagtatctgcgggatgcccagaaaagcttactctagatggggctgctccatggcttctgtctgacctacaatgccaaaaatatttgagaggttaggagaacacagtatctcaagctatacctcaacacatagccctcctgtctgagctttctcttctggccactataccaagggtattcaagatcacaggaatcctgtcatcctcacacaccccctttttagtgatagggaggtatttgtctcatccttcttgttgctctcaacgtgtctttctcctcttctgggaacacctaacagaatctagaagagtttgaaccattacataataaaagcttctccacgagnaanagnaaaagagaaaaaaaaaaaagggccccccc

SEQ ID NO: 47152 - DNA, 457 bp, Homo sapiens
  misc_feature 436: n = A,T,C or G
aaagggaacaaaagctgggtaccgggccccccctcgagagtacttctagaattaattaaggcgggttacgcttaaaccatacgacggctgtgcggcatcgttttcttttctgcctcaatttatctcactagcagtaaccccgagttcaagtcagccacacagggaaggtggatttccctgcagtcagggcaccacaggctccacttcagaagcaacggcacgcagaacccaaaacaaagaacacacagcatacacctgccctgggcatctctgacatggttggtgctcctgataatctgccttttaaaaaagtgaagactagctaggtgcagcagcacatgcctgtaagcccagctactcgggaggccgaggcaggaagatccagagcccagttcaaatccatcctgagtaacagcaagacctcgtctctcaaaanaaaaaaaaaaaaaaaaaaaaa

SEQ ID NO: 47153 - DNA, 429 bp, Homo sapiens
  misc_feature 325, 326, 327, 328, 329, 330: n = A,T,C or G
gccgtcgtttatacacaggagacagcgtatgaccatgattactggccgtcgttttacacacaggaaacagatatgaccttgagtagcgtgtgggaggcttctctatagaaagagaaagtgtgagttggtacaatcgctttggaaaagtatatggccgtatccagcaaagttggaaatacatagttacattgaatcagaaacttctgcagataagcctaaggagatgtgtgctaatatatccactgtagcattgtttgtttgtgaggaaagcaaaaacaacttaaataaataataatatggtatgttagtaggatagatataaccnnnnnnaaaaaaaaaaaaaaaaaaaaaaaggggccccccccggggggggcccccaattccccctaaaggagggttttttaacccccccttgggggcgttttttaa

SEQ ID NO: 47154 - DNA, 302 bp, Homo sapiens
ccctcactaaagggaacaaaagctgggtaccgggccccccctcgagagtcttctagaattaattaaggcgggctgaaggacagttctgcttattttaaggacaaccaagaagttgatggcattggctttatatgtgaacttcatcataaaatgtacttactgctttcctattccttaatagagatttgtctcttgtattttcttctgtttaccactcataaatggaatgtgaaggacaatgatcacagctcacttgcgtcacattcctccctcttgctgtgctaaagcccttttagatagta

SEQ ID NO: 47155 - DNA, 619 bp, Homo sapiens
taagggaacaaaagctgggtaccgggccccccctcgagagtacttctagaattaattaaggcgggggaagaaaagatactctcattgaagcattatctgcaaagtgaaagaattaccaaccaaatattaactgggctgaaagatgtgtatcattaacaggaagcttaccctgatttttaaatgctgtataaattttccttttcaacccaattctttactttctctaactgggacaaggcagaagcaaaagatagacagcaatggaatcagagataaggcaagaaggcaatatactcaactgtgttttcctatcacttctggcctattttgaaaacagtactatttatctttgttctatttattaacccagaaaacatctgagtgatgatgccagtaagcactgccctcattgagttaaaaatctaataaagacaaagtgtctttataatagctacaaggcagaagtgaaaaaccctacgaaagaggtaaaacatgatacggaagcacacaaggtactaaaaaagtatgtacaactgggaggatgaagctaaggttggtgggattatgatgtcaaagtattgagttaaaaagaactaaagtggattttgagtaaaatttg

SEQ ID NO: 47156 - DNA, 372 bp, Homo sapiens
ttctagaattaattaatgggtcaggacctataaggtgtacaattttaaaatttttcttcaagatcccttgtaaatttttaagttttattttcaatgatgcccagaagaataacttaccaaatattttttatcaaagattatttctgctgtgaatctgacctagctggaacaaacatatagtatagaaaagtttttatttctatattgctattaacataaaatcatgtgtgcacacaactcacaggaaggaggttgaaaggggttaaatattttgagagctgatttttcttctttccgaaaggactgcttaaaaaaccaggttttctagaaatatgtctttagacgtatgccctacagctaaagtctgaaata

SEQ ID NO: 47157 - DNA, 427 bp, Homo sapiens
accctcactaaagggaacaaaagctgggtaccgggccccccctcgagagtacttctagaattaattaaggcgggggagggaggacacaggaagctctaaaaaggcgacttaaaaaacccaaattgcattctggggtcacttagtttatgggacctctgttctttacattttaaaagccctcgagggatttcctatattatcatcccaaagacaatccaaaatttcccccaaagaaggtcaaattacatattctacgtaggcgccttagacagagaaatgtctaactttccatatgaaagggtaagctctaattatatggaaatgttctctctctggccgatgccagctaacggagcccttctatagctatttttatgtttcaaagacaaagcgcttgactatgtggcccgggtgctgggcttctgga

SEQ ID NO: 47158 - DNA, 281 bp, Homo sapiens
ccagtacttatagaactaattaaggcggggctgggtagcacaggatctgaggccaggagcttgaggccacagtgcagtgcactatgattatgcctgtgaatgtgtgaatagccactgcactccagcctgggcaacatagcaacatcccgtatctaaaaaacaaaagcaaaaaaaaaaattaaacccgggccgccccggggggggcccccaatgcccctttctgggtgcactttaacccgccccacagagggagattttatcctcaaaaaaaaaaaaaagaa

SEQ ID NO: 47159 - DNA, 339 bp, Homo sapiens
aagggaacaaagctgggtgccgggccccccctcgagagtacttctagaattaattaatggtgttttatcaagggtaatttcttagttttgataaatgtaccatgtctatataagatgttgatactaagaatcctctggactatttagcagttcttctagaaatatataattacttcaaaataaagtttttctaaacgacaactaatccagttatttaacttattgtgaaaaaggaatggctgaacattagctggaggaattacgtctgacagcagcactcatatcccaacattcaaccatttagtgttaacactttacttcacctccttcaattaccaa

SEQ ID NO: 47160 - DNA, 511 bp, Homo sapiens
gcgcgcaattaaccctcactaaagggaacaaaagctgggtaccgggccccccctcgagagtacttctagaattaattaaggcggggaagaaagaattcatgaggaaatcatttaaatattggatttttaaatatatgacactgctctcaattactaggtgctaataagacatacataacctaccatatagccaaggttttaattatcagatttataatttgaaactgaaggaactttagttcataaaagtgaaaaagataaaatgaagtccaatgaaagtaaaatattatctttgcttccttgattaaatctatagttaatttttactaaagtatgatatatgttcccattatttagttttgtttagggaagtatataagatgagagaaagaaaaaaaaacaagttgaaaaaaaaggcggccgccaccgcggtggagctccaattcgccctatagtgagtcgtattacgcgcgctcactggccgtcgttttacaacgtcttgactgggaaa

SEQ ID NO: 47161 - DNA, 473 bp, Homo sapiens
accctcactaaagggaacaaaagctgggtaccgggccccccctctagagtacttctagaattaattaaggcgggggttgcagtgagccggggtcgtgccattgcactccagcctgtgcagcaagagtgaagctctgtctcaaaaaaaaaaaaaaaaaaaaaaaaaaaaaaggggggttaattggcccaagggttttttaaaaaaaaaattttttaatcccggggggaattcaagggcttaaaccccgtttaatggaaaccccccccccggctttagggaaatttttctgcctaaaccttttaaaaaaggaaaaaaaaaggggggtaccaaccccccggggaaaattttggaaattttttttggggggggggggaaaacccgggggggggaattaaagggccccctggccaatgggggaaaaaccttttttttataaaaaaaatgggggaaaataacccgcccttggggggggc

SEQ ID NO: 47162 - DNA, 480 bp, Homo sapiens
accctcactaaagggaacaaaagctgggtaccgggccccccctcgagagtacttctagaattaattaaggcgggaggaggaaaactccaggcattctcaaaaaaggtattggcacaaaaaggtaagttcctcggatagcatttctctaaattcaaatctagatatggcttgttcagtctcagactggccttcactgatagagaccactgtgtaagaagttagtgtacttaggcagttttggcacctgtataatgcccttaattcattccttttgaaagataatttgttgagtgctttccgggtgccatgcactgtgcttaattgctcacatccgttacctcctttaatttaatcttcaaaatgatcctctattttgcattggaagaagcaggtacggagaggtcacttgatggaggtccccctaattaagtgtcaaaataatagttctaatatttatatctcattcttctaattggcagt

SEQ ID NO: 47163 - DNA, 288 bp, Homo sapiens
acaaaagctgggtaccgggccccccctcgagagtacttctagaattaattaaggcgggggaaagggttgagaacatgataagaggtagtggagcagaggcttgcagtaatgaagacggctgtagtggaaaagggatgaaagggtagttggttctgtcttcagttcacatctctcactgttccacggcctcagcatcctcaatcacttcctcagctttaaggtgtttccctctcaggcatctttctagtcctcttctttctcttgaattccagaaccatgtaatgattg

SEQ ID NO: 47164 - DNA, 494 bp, Homo sapiens
gcgcgcaattaaccctcactaaagggaacaaaagctgggtaccgggccccccctcgagagtacttctagaattaattaaaaaacacacacttgtaaagattttttgtaagagaagaaggtaaattctgttgcagacttactaaactgagtttcctgtgagccattaagaagtggagttatccagtaggcaatcagatacacagatctgaaagttcagggaggaaatcaggttggaggtctaagataacagactcttcgggccaggcctagtggttcacacctgtaatcccagcactttgggaggccgaggcgggcggatcacgaggtcaagagattgagaccatcctcgccaacatggtgaaaccccatctctaataaaaatacaaaaatttgctgggcatggtggcacacgcctatagtcccagctactctactcaggaggctgaggcaggagaattgcttgaacccgggaggcggaggttgcagtgagctga

SEQ ID NO: 47165 - DNA, 547 bp, Homo sapiens
aaataaagggaacaaaagctgggtaccgggccccccctcgagagtacttctagaattaattaaggcggggtgaaatgcaaaagtcacagaccagttttatttgttagcaagaggaatggcaacccaacaaggatttggagcccaccaaacctgggttggaatcctgcctctaccactgaactttgggtgaaataattaaggctctctgtactccatttgcctcatttagagttggaaatattttcaactctagacggcttttgtgagaattacaattacattaaataacatgtaaaagcccttgcctctgtgcctgccacatggtaggcacattgtaagtcttggttgccttaatcttttgtcttaccaaagcaaaaaaaacaaaaagcaaatgggggcgccccccccggggggggcccccaatgcccctttaagcattttttttaccccccccgcccaggaggttttttcaaaaacacgagactttaacaagcttgaacttataaaaaaaagcttctctgaaagaggaagccactatgaaggccaa

SEQ ID NO: 47166 - DNA, 354 bp, Homo sapiens
gcgcgcaattaaccctcactaaagggaacaaaagctgggtaccgggccccccctcgagagtacttctagaattaattaaggcgggattgtcttccttctaacataatcctctgatttttatttctttatttttttcagcaggtaaagagcttcaaatggcaacacagcagtctgagcttataattcagtggaaaatatgttagatcccctagtgaatgcattccttggaaaccattcttggtttccaaatttgtaggtgagccgaatgcagttgtgaggacggaatgtaaaaaatttgagattaggtaactgtattagtcccctacgactgccataataaagtaccacaaagta

SEQ ID NO: 47167 - DNA, 355 bp, Homo sapiens
ccctcactaaagggaacaaaagctgggtaccgggccccccctcgagagtacttctagaattaattaaggcggggagaggaggctctgtgtgcataatacgagtcacacttcacgagaaacatagggtacctagcatgtgcaaaccccagattcatctcacatcattcttatccttatggctgctctccaaacttccttttggctctgcgagggatttgcaggagcaccttattagaaatggaagattttattataaaagatccgccattattgatcattcacttttctcacctggaaaaacctggggtaaaaacaaaatgcggccgtcaccgcggtggagctccaattcgcccta

SEQ ID NO: 47168 - DNA, 329 bp, Homo sapiens
ctaagggaacaaagctgggtaccgggccccccctcgagagtacttctagaattaattaagcgggagatacagagtattttaatgaacagtagatggttataagagtcaagagatgtacagagaaaatgctagtgattagagtttttagattattttaattttggtaactaattataattcctcagttaagattttttggcttagtgggcccttagaattacttcttcctgttagaattaaaagtgaaaccagaaattaaagtgatttaatttttttattgtggcaaagatctagtccaaatatctttgatggactttttgaaaacagac

SEQ ID NO: 47169 - DNA, 689 bp, Homo sapiens
  misc_feature 608: n = A,T,C or G
tcactaaagggaacaaaagctgggtaccgggccccccctcgagagtacttctagaattaattaaggcgggaactggagtgctaggagaaggaaacaggaaaagggaattactgatggaggaagaggatgactcaagatgctcatcacagtaggatagagatataagccgttttcattaggttcctggttcagacacacatagctgacagctaacttaagttgttaacacattttgcttatttgaaatcacagcctgccaccactgtaaccacacattctggcaggcatgaaatttggctagatttttgtgggagataagctacactggaaagaaaggaaaaggggaaatttcagtggacccatttctctttattccaattctggggtgtaacaatcctttgcataactgagacgtgcaaacaagaataatcaatttggcatactgaaatcaatagtattcataatgtatactgacatgttattatttttcccattataaataacaaagctgtgattaagaaatcattattttagagcaaagggttttcagaggtagaagctaggggtatcaggagttctacctacgagacaaagtaaggcaagattangtggggtgcggcaacaacatgtgggttttataaacttcaggtaacatttagaataaagcaattttcacatatgattgtctt

SEQ ID NO: 47170 - DNA, 538 bp, Homo sapiens
attaaccctcactaaagggaacaaaagctgggtaccgggccccccctcgagagtacttctagaattaattaaggcgggatggggactcatctaaggctctgtgtcctgaaaagtcaagtcgggtggagggcaggggtaaaaaatcctcaacaccctggaagaaccttctcaacacccttggcttgtcttcaatttctggaatctcgtggccatgccagccctgaaagccaatggactgtgctccggacccagccgcttctccttgtgaacacaagcctccgtgtgcctgagagttcacctataaacatgggcactgctcattcaccagtcaccactggcaaagagcttgaagacattgactactttgggaaatctttaaaaaataaatttattcatttggaaaaattatcaaatgattgcacaagaagaggtgcctttcctgaacaggtctgtgatctgggcctctgggcacctggataattccgcagagaaggaggttggtccggtctggtcagtgtgtattcctttttgttttgag

SEQ ID NO: 47171 - DNA, 494 bp, Homo sapiens
gcgcgcaattaaccctcactaaagggaacaaaagctgggtaccgggccccccctcgagagtacttctagaattaattaaggcgggcgcctgtagtccaagctactcgggaggctgaggcaggagaatggcgtgaacctgggaagcagaggctgcagtgagccgagatcgcgccactgcactccagactgggcgacagagcgagactaccttccacaaaaaaaaaaaggcaacacattttcggacaaagaaaagcaaaaggaatcggtcactggtgagccacatttctaagacagtctttaggctacaggaacgtgacgcccgaggacagccagaatcggggggcgtaaacaaggcagaaagggtggatgtgtcggttgatattcaaaagaaaaattactgaaaaattccttgacagactcatgactaatagcttcttgtacgggtttctgcataatagacgtggaaaatcggcccgagggtgagaggagccacc

SEQ ID NO: 47172 - DNA, 514 bp, Homo sapiens
acgccaagcgcgcaattaaccctcactaaagggaacaaaagctgggtaccgggccccccctcgagagtacttctagaattaattaaggcgggagaggcaggttaaccagcacaggccattaaagagctggtgacacaggtgtgtgatctttacctaactccaccaccagctatgataactccaaaccaaaggcactagacccaacaatttctctttaacgatattattagtggccagacatggtggtggctcacacctgtaatcctagcactttgggaggccaaggcaggtggatcacttaaggtcaggagttcgagaccagcctggccaacatggcgaaacctcatctctactaaaattacaaatattagctgggcgtggtggcgcatccctgtagtcccagctactcaggaggctgatgcaggagaaccacttgaggtggaggttgcagtcaactgagatcgccccactgcactccagcctgtgtgacagtggaagactccatcttaaaaaa

SEQ ID NO: 47173 - DNA, 492 bp, Homo sapiens
gcgcgcaattaaccctcactaaagggaacaaaagctgggtaccgggccccccctcgagagtacttctagaattaattaaggcgggcggatcatgaggtcaggagatcgagaccatcctggctaacatggtgaaaccctgtctctactaaaaatacaaaaaaattacccgggcatggtggcgggcgcctgtagtcccagctactccgggctgaggcaggagaatggcgtgaacccgggaggcagagcttgcagtgagctgagatcgcaccactgcactccagcctgggcgacagagcgagactccgtctcaaaaataaataaataaataagaactacagaactaattttaagacccaaagttcttgagcattttttgcttttttaaagcaaaacaaacagtttcattccacaatgttctctctaaaaaaactggtgaatactgaaaatgtattttttcatttatttctatcagtggcttatttttagtaacag

SEQ ID NO: 47174 - DNA, 307 bp, Homo sapiens
  misc_feature 272: n = A,T,C or G
ccctcactaaagggaacaaaagctgggtaccgggccccccctcgagagtcttctagaattaattaaggcgggcaatgcaataagcagtttacacataaccctacaataaccttgagaggcggctactgtgggataccatttggtagatcacaaaactgagacattaaaaggttatgtgatttgaggcacggtagatctcgcctgtaatcccaccacttttggaggccttggcgggcggatcacttgagttcaagagttccagaccagcctgngcatcgtggcgaaacaccgtctctacttaaaatat

SEQ ID NO: 47175 - DNA, 557 bp, Homo sapiens
taaataaagggaacaaaagctgggtaccgggccccccctcgagagtacttctagaattaattaaggcgggatcgtctagtctgcaggcggaatctggaggacacagagccggggcctgaactggcttgggaaacaaaaccatctcacatcttgtctctgcagtcagcaaagcattttctttcaaaagttgttttaaatttacttttattttttagagacaagatctccctatattgctcaagggatcctcctgcctcagcatcctgatcagttgggactgtagggtgtatcaccactgcctgcaaagaattcaagtagtaactggcctcaggataaagataaaatcaaggttgtggccatatccattgttaaggccccagaaaagtttaccatgttggggctgggtgtggtggctcacacctgtaatccccgccctttgggaggccgaggtgggaggccaggagttcaaggctgctgtgaactgattgcaccactgcactctagcctgagtaacagagcaagagcctgtctctgaaaaaaaaaaaaaaaaaaaaaaa

SEQ ID NO: 47176 - DNA, 386 bp, Homo sapiens; identical to SEQ ID NO: 46046

SEQ ID NO: 47177 - DNA, 526 bp, Homo sapiens
  misc_feature 81, 473, 474, 476: n = A,T,C or G
aactaaagggaacaaaagctgggtaccgggccccccctcgagagtacttctagaattaattgggggggagagaagagggtntactgaaaattattattcttctatttaagaggttgaagacggaaataaacagaaagatatcttatcaatagtatcaaaaatgggatgcatactatccaaagcaatctacagagtcaatgcaatccctattaaaattccaattacagatttttcatagaagtagaaaaaacaatcctagaatttgtatggaatcccaaaagatcctgaatagctgaaacaatctggagcaagaagaacaaagctggaagtatcacacctcctgatttcaaattctattacaaagctataataattgaaacattatggtacaaatagacacatagaccaatggaacacaataaaaagtccagaaataaacttacacatatatggtaaactaatctttgacaaannanaaaaaaaaaaaaaaaaggggggcccccccccgggggggaccccaattccc

SEQ ID NO: 47178 - DNA, 483 bp, Homo sapiens
ctcactaaagggaacaaaagctgggtaccgggccccccctcgagagtacttctagaattaattaaggcgggagaaggctcagggacaccccacttgagatttgggattagactaagtgtctcatcacttagtagctgttatttacacttcctaaaccttactttccccatttgtaaaatcagtaataatcgagcctaactcgtagatttgatgtgtgaaatgaaagaggaaacatgtaaatacaatgctggcataatccatgttcggtaattagtagctcttgtcaccattattatgacacttacacatccctaaatattatgggactaaaaatccatcaggatgaataaaagataaaaacagtacactcttcttaaggtacctcattttgctagcaatatttttatagtcaataaactgttctctctctaggtaaagaaattctggcttaagcattttgcactatattaactactgtcttta

SEQ ID NO: 47179 - DNA, 563 bp, Homo sapiens
taaccctcactaaagggaacaaaagctggagctcggcccccgcggcgggagtggtactagaatttggtacagcggcagaattgctgatgcctgggatacataggttgtaatcagctaaaatctaaccaacatgcgactctaaatgggctgcccgagccttgggagtgagggccacaaccacatccgggtgccacctttctgtgcacactgggggggcccacattccggtcaacaggcttctgtccaaacgaccaaaacttgctggaaacaggtgaacaaacccagtaagtgacgtgcttccgcgagcgcctgctccctcccagctctgccgagacaaaagtgcaccgaggagcttctgagagtcaccagtcccacctcaccgactcctcgcggtcaccgggagctgcagtccttactcagtacctgcccgggcggccggtctagaactattggatcccccgggctgcaggaattcgatatcaagcttatcgataccgtcgacctcgagggggggcccggtacccaattcgccctatagtgagtcgtattacgcgcgctcactg

SEQ ID NO: 47180 - DNA, 399 bp, Homo sapiens
ccctcactaaagggaacagaagctgggtaccgggccccccctcgagagtacttctagaattaattaaagcgggggcagctagggagtcctccgggctctgccgagccccttccccagtgtgaagtccagcctgttctgaagtcgcacagggccagacacctgggctgccacctcccctctggaaacagtcctccttgcctcggtgggtcgacagctccaggctattttcttcccctgaggatctgaaagttggaggtaattggttggcccaatctgaatggccaatggaactgagtatggcggccgccaccgcggaggagctccaattcgccctataatgagtcgtattacgcgcgctcactggccgacgttttacaacgtcgtgactggtaaaaccct

SEQ ID NO: 47181 - DNA, 461 bp, Homo sapiens
ccctcactaaaggtaacaaaagctcggtaccgggccccccctcgagagtacttctagaattaattaaggcgggggaatgaaggccatcactctgattaggacaccaggtgaaggttccaaggaagtaacaccaaggagctgagtcttcgtacccagtactcagtgtgtagactaccatccattataccaagggaaacagggcagcactggttataaacaggcacaagaaacatttaagttatactcggcttaatttttttaaaatacaataaaaacactacagtaataatgctgttaccatttccattccttgtctttggaatagtacaatgggcttagcattctctctttactgtgatgagtgacatattctataacaggaaaatgcattgctattaataaggaacctagatcatggggccataagcttttgtggacaagccccacacccagtttgagct

SEQ ID NO: 47182 - DNA, 490 bp, Homo sapiens
  misc_feature 380: n = A,T,C or G
gcgcgcataaccctactaaagggaacaaaagctgggtaccgggccccccctcgagagtacttctagaattaattaaggcgggtggggaggactactgaggaaattgctcagtcaacaaaaatgatagtgaagatctcagaatctcaaaaatcatcttttgtgtgcgtattttaatgattaagatgtactataaattcatgtacaggatttgggattctgcattataggcatcgtatgattaatggctttttaggcttgatgaagcatgataattaacattgagaaggacaaaattaatgtgaagggacagaatgatttagataatatgtttcaaaagcttttgtcctaaaaaatgcattattaccattttaatttagttntggtagaataagagaccacatcttaaaggaaagcggccgccaccgcggaggagctccaattcgccctatagtgagtcgtattacgcgcgctcactggccgtcgttttaca

SEQ ID NO: 47183 - DNA, 488 bp, Homo sapiens
agcgcgcaattaaccctcactaaagggaacaaaagctgggtaccgggccccccctcgagagtacttctagaattaattaaggcggggaagaggagaatagagataagaataaggaagagcatatgggcattgataataacgactttataaccttcagatgcaatgaagtaatgatgttgcctagaagttattttatatgtaggtaaataggaatttggagaaaaagaaaaaaattactaagaaaatattaatgtgtttattcttgactctgatttctgatcagttttagcatcatattttatattttttccagtttacaattagacctataaaaatttctttggggcatctttttttcttttctagattagaaaacccataatattgtctatatttctataaaatacttactaattactaaatcatatttatcaaaatatcttatgttgtttagtaacataatctgcaattaagttggtatgtaggta

SEQ ID NO: 47184 - DNA, 337 bp, Homo sapiens
  misc_feature 277: n = A,T,C or G
ataaagggaacaaaagctgggtaccgggccccccctcgagagtacttctagaattaattaaggcggggaaaggccacagcacactggcgctccagcaaagccaaatcatgtctcctctggccactgcggtcctctccttggtacatgtcatcccccagaggagtatccaaagctattccactatgcactcatcaaccctggcttgtcagccttggggaaggtcactttattcataaaaatgcctctttgaaaacaaaaaaaaaacaaaaaaaaaaanggggggccccccccgggggggcccccaattcccccttataaaaaagaaaaaacccccccc

SEQ ID NO: 47185 - DNA, 266 bp, Homo sapiens
gctgggtgccgggccccccctcgagagtacttctagaattaattaaggcgggggtgtaggtaacttgccccttcctcttcctgagcacagcacaaggattaataatattgttggtattattataccaagatcctgaaggagtgctaatatagaaatgttaaaaaaaaaaaaaaaaaaaaaaaaaaaagggggccccccccggggggggcccccaattcccctttaaggggggttttttacccccccccatgggggggtttttaaaa

SEQ ID NO: 47186 - DNA, 230 bp, Homo sapiens
  misc_feature 26: n = A,T,C or G
gccccccctccgagagtactctctanaattaattaaggcggggaagcgtgagcttttaaagtgtgactttaacatttgaataaaaatcttcagaattttctctggatataaaataaagtagtcttttggatgccaaataaatttctaattgggttatcaaaaaaaaaaaaaaaaaaaaaaaaaaaaaaagaaaaaaaaaaaaaaaaaaaaaaaaaaaaaaagaaaaaaaa

SEQ ID NO: 47187 - DNA, 478 bp, Homo sapiens
ctaaagggaacaaaagctgggtaccgggccccccctcgagagtacttctagaattaattaaggcgggggagaacttggattaacagaaattcacattaagatgatactgatgttttaattgattatacattgcatgtagaaatattaaggactctgtgtataggagatgtcatttgtaaggcagggacatgtatacaatgtgtggcacatccagaaaaacacaatggtagtgtgattattgtcttcagagttgtcatgtggaaggtgtttttttttttctggtcccaaaaggcaagcttttttaataaatggggaggtaccaaaaaggtttatctggattcatttggaggaaagcttttactgtaacccagggactatgctatcccctgcaaaaaaggtatttttgttcatttttacaaaaaaaaaccctagggctcaaaatattttaaagatccacctttggaccccattttttttt

SEQ ID NO: 47188 - DNA, 510 bp, Homo sapiens
  misc_feature 7, 8: n = A,T,C or G
gcgcaannaaccctcattaaagggaacatttgctgggtatttggccccccctcgagagtacttctagaattaattaaggcgggtgaagttttctagacaataaggaacaagagccagtaaacaaatagttttcccattctgtcttgcggtcatggatccaaccaatagtcacccatagcagtgggtcaaattgaagatgcatcctttattgtattctctttcgttcttgcttctttcctccaattcttattcccacctctgggcccacagttgtcagtaaaaagacttgtaaacaaggctttgcctctgtactgctttccgttgagcccaggctaagaggttaaatgatttagtttgtccaggataaaaagattacttatctagattacttccctacatgaacagggaagatcaatatttctaaggaaattatgtccagattaaagagtattgctttatatagtaaatccttttaaacacatgccacctttagttagttacaaaaaaaat

SEQ ID NO: 47189 - DNA, 347 bp, Homo sapiens
  misc_feature 329: n = A,T,C or G
ccctcactaaagggaacaaaagctgggtaccgggccccccctcgagagtacttctagaattaattaaggcgggggtgtataaggtgagagatgaggatccagtttaattctcctacatgtggcttgccaattatcccaacaccatttgttgaagagggttcctttccctactttatgttttcgtttgctttgttgaagttcagttggctcaataaaagcttcttaaaacaccattttggcatttttttctgaaagagagagtgaaggaaaatctacaaaccgcattgtgatctaaacaagaccgtcgggactagagaagcatggccagnagaagggacaggggagaa

SEQ ID NO: 47190 - DNA, 351 bp, Homo sapiens
gggccccccttcgagagtatctatagaattaattaaggctgtagggaaatgatttctccaaggccaggacatggagtggagcggtaggatgcacagatccaaccacaaaccagattcagaaagtgtcagaccagcattggggcggccataggaagccaaagccacacccagcaccacctttctcctttctgagaaaggccatcaaagcaatatgagagcagctggcacaatggagtgatcctcattcaatagagagttctagcctgggcgcttcagggctacagttctgcttagagaagacactgtcgaccaggtggggtggctcacgcctataatcccagcactttggga

SEQ ID NO: 47191 - DNA, 546 bp, Homo sapiens
ctaaagggaacaaaagctgggtaccgggccccccctcgagagtacttctagaattaattaaggcggggcagaagaaatgctgttctgaattacagcaatagtatctgagattgacatgaacagtgtttgatttaatcgttaattgatggacatgatgtgtacttcaaaatatcctgcaaaatctaatcaaaacattgctaacttaccagtggttaccacctaaagataaagcctttgtggatgtagaaaaatagacataccttagcgagtacttcttagattacagagtcatggatttttgaaactgaaaacaatcaattcccttcttttatagttaggaaaagaatacccagagataatcagtgttttccctaaggcacacaaataatcagaatctctttctattgcagtacactgactttacaatgtaattagaaagaaacctataaaataaggcagaaattggatgattaaaattggagactggaaggtataaccagagtcacaggctcagatatttaaaagaggagccaaatatacctgaac

SEQ ID NO: 47192 - DNA, 504 bp, Homo sapiens
tacgccaagcgcgcaattaaccctcactaaagggaacaaaagctgggtaccgggccccccctcgagagtacttctagaattaattaagggggattggtcattgcaaggaggggagggaatttttcaccataatgaaccactccataaattagttacataaaaaacagcagttttattttctcatgattctgcactcaaggctaggctcacccgagtagttctacttgacttgacagtggtcacttgttggctacattaaggtagtacgttggctgcaggctagactcattagggatgttcagaactctctatttagtctaaaggccaacatttccagagtcagacttccaatttgtactcttgtctgtatgtgtcatacctcaattaaaagcccactttcagactaggtgcagtggctcacacctgtaatcccaatactttgggtggccaacgtagaagaattgtatgaggccagggattggagaccaacctgggcaacacagc

SEQ ID NO: 47193 - DNA, 520 bp, Homo sapiens
cgcaattaaccctcactaaagggaacaaaagctgggtaccgggccccccctcgagagtacttctagaattaattaaggcgggcagatcacctgaggtcaggagttcgagaacagcctgaccaatatggagaaacccagtctctactaaaaatacaaaattagtcaggcatggtggtgcacgcctgtaatcccaggtactcaggaggctgaggcaggagaatcgcttgaaaccaggaggcggaggctgcatgagctgaggttgcgccattgcactccagcctggacaacagagcgagattccgtctccaaaaaaaaaaaaagcacttcaatctgtggtgggcaatttgtggataatttgaacagatggcagaaagccgaacaagcagatgaggaaacccaccaataaaaaggagatggaaccaaagatggaaacaattttttgggaaaacaagtgctttgtttccatgtgacacagaaggcacccacaacgctgggagtgagggaccgtgtcacggccatg

SEQ ID NO: 47194 - DNA, 485 bp, Homo sapiens
accctcactaaatggaacaaaagctgggtaccgggccccccctcgagagtacttctagaattaattaaggcgggatagggattagagcaaaaaattagccattgggagaaaagaccaggatggacagagtttaggtccaatggtcacatgcaagccctaaaaggaataaagagaaatagatcaaaatggaaactgagaaggagtcagggctgctttccctcaggaatacagaattaaaacttagtcatgcatggtctttcaggaaatgccgcagctgctaagaaaagaggtaggcaacaagctggcagcagcaacaccttgagcacaaaagcaaaaagaagaaggcaccttttccacaccagtatcgttgagctttggaaatctcagacagagctgttgcagtccaagagtcacttctgtatcaggacattatagtgcctttaagccctaacctcataaccacagccagggctatgtttggtttc

SEQ ID NO: 47195 - DNA, 470 bp, Homo sapiens
  misc_feature 100, 104: n = A,T,C or G
aaagctcgggaccgggccccccctcgagagtacttctagaattaattaaggcgggagaaacaagccaacctgggaagaataaataactgagatttaacancgcncactccactccagcctgggcaacagagcgagactccgtcttaaaaaagaaaaaaaaaaatccttcaattcattaaaattctatggcctttatatgtatagctcctccatatcctcctaaatgtcttggggagtgaccttttcccttctctctcagcctttcaaaccaggacatcactggctcttatccagggggagcatcccaaatctgaaaatccaaaatccagaatgctccaaaatgcaactttctgagcactgacgtggcgctcaaaggaacttctcattggaacattttggactccaaattaatggattggggatgctcaaccggtatcctataatgcaaaaaaaaaaaaaaaaaaaaaaaa

SEQ ID NO: 47196 - DNA, 585 bp, Homo sapiens
taaagagaacaaaagctgggtaccgggccccccctcgagagtacttctagaattaattaaggcgggcgaaaagcagagaataaaatagttgaaaattcacttgctgttttcaatgtattatttatgcaagagaatgtgtaatttgggaaaaaagtaaatctgaaaactgaataatttaatatacatgtctttgttaaagttttaaaatattattttccatggtaaccattattaaatagagaactatggaatggactgacagggctggatggatgtagagtggaaacatgtacaaatgccctttctttacgatccttctcctatgaaaagtaatatctgttttgatgtttcagtgatgtttctataaaatcaaatttatagaatttgattgtataaattctaaatgtatgtaagtgttggtacttcatgttttcaggagtaactctattttgctacaacaaccttctgctgagctaagattatagatccaggagctaagtggctactcaagatacattctaatatccatctcttgtttaagacaagtaatataacattttgcagaagtgataactcaagtccata

SEQ ID NO: 47197 - DNA, 456 bp, Homo sapiens
agctgggtaccgggccccccctcgagagtacttctagaattaattaaggcgggggtgggaggactgcttgagcccaggggttcgagaccagcttgggcaacatggcaaaactccgtctctacaaaaaattaaaaaattagcccaatgtggtggcacatcgactatggtcccagctattcaggaggctaaggtgggaggattgcttaagcccaggttgaggctgcagggagcagctgtgtttgcaccactgtactccatccagcctgagtgccagagcaacactgtctcatttaaaaaaaaaaaattctatagtttaattttaagaacagaatttttaaaagaactgtaatataaaagtatggaacctattagaagcctttgctaagtaaaaatttccttaatccacatagcctctaggtggagtatacaggcatggcacctttttgaaagattcct

SEQ ID NO: 47198 - DNA, 486 bp, Homo sapiens
aattaaccctcactaaagggaacaaaagctgggtaccgggccccccctcgagagtacttctagaattaattaagcgggggttgcaatgtggtgagcagaagttgacactgtcccggctcctgtggctcttaagaatgtgactgaatgattaatgaagtctgtcagtaaccacaaagtaaacaaatcaggactctccctcaccagatagttcacagtactcctaatgagaagcatgattgcctggtttaccattgtgtttcacctctaaaataaataggtggatataaaaagaaaaataaaaaaaactaaaagcggccgccaccgcgggggagctccaattcgccctatagtgagtcgtattacgcgcgctcactggccgttgttttacaacgtcgtgactggtaaaaccctggcgttacccaacttaatcgccttgcagcacatcccccttttgccagctggcgtaatatcgaagaggcccgcacc

SEQ ID NO: 47199 - DNA, 504 bp, Homo sapiens
agcgcgcaattaaccctcactaaagggaacaaaagctgggtaccgggccccccctcgagagtacttctagaattaattaaggcgggaaggtgatggtggtaaatttataaaagttgctgtggatagttgatacgtaatattgtaaagggttttccctcgaggcctctcaaaggacttagccaagcagtgtcactaatatttgtgtcctgtgtgtgaggcagatgattcagattacctaccagtttaccagtgaagaaggagaaagttgttactttgccacagtctgtagagctgatagaaagttgttataatggaaatgttttcttaattgagaaatgaaggttcttttcacacagtgggcttcatttaagaatacatcatacatataaaaggttaatttcattctgtaagtctgccaaattaattcttttaaattatttttagcttagcttttaaaaccgtatcatatttagcaaacttaaggtggaaaataatcttcaccaa

SEQ ID NO: 47200 - DNA, 625 bp, Homo sapiens
  misc_feature 24, 26, 39, 44, 58: n = A,T,C or G
tgggtgaccgggcccccccctcgnanagtaccttctagnaattnaattaagggcgggnaggaagagcaaatggcgcccataccattatgacgcagaggatgtcagaatcttgctttgttcacatatgacatgatcctatttctacaaaatgcccatctgtctcatcccaaaagtttcttaagctgatgagcaactgacacacattctgaggatacataatcaatgtgtaaaatcactagcctttctatacaccaacatcaggcatgcagtgagccaaatcatgaatgaactcccattcacaattgctgcaaagagaacaaaacacctaggaattcagctaacaagggaattgaacgacctcttcaaggagaactactaaccactgctcatggaaattacagaggacacccacaaatggaaaaacattccatactcatggataagaacaattagtatgaaaatgaccatacttcccaaagtaatttatagattcaatgttattcccattaaactaccattgactttcttcacagaattaggaaaaactatgtttaaattcataaaagactaaaaaaagagcctgtatagccaagacaatcttaagaaaaaaaaaaaaaaaaaaaaa

SEQ ID NO: 47201 - DNA, 494 bp, Homo sapiens
agcgcgcaattaaccctcactaaagggaacaaaagctgggtaccgggccccccctcgagagtacttctagaattaattaaggcaggataatcgcttgaacccaggaggcagagcttgcagtgagcccagatcgcgccactgcactccagcctgggcgacagagtgagactccatctcaaaaaaaaaaaaaaaaaaaaaaacaacctgttttctcccccaataatttttggtctgtactaggtatggtggcacatgcctgtagtcccagctacttgagaggctgaagcaggagaattatttgagaccagcctgggaacatgacaagaccccatctctatgggaggggaaaaaaaaattggtttgttaacctcaattgggaaaaatataaaattctgttttatattgataagtaaaatatgtatgattcatataccttttctttattctcactgatttttaaagcatgcataaaatattgtagtgtaacatctata

SEQ ID NO: 47202 - DNA, 490 bp, Homo sapiens
gggaacaaaagctgggtaccgggccccccctcgagagtacttctagaattaattaaggcggggtaagatttgccgagttcctataaacttttctaaatctaaatttcttatgttgccaaatgtttccaagtttataattggttcaaaagaggcagttatatgtgtgtgtgtgtgtttgtatatgtaaaaaatacatccgtaaatatatgtgtatgtaaaaacacatgtaattatatataaaatatatatgtatgtcttcagtttcttggtatctttatttttacgataaatttaaattttctgaaagagcatattaaagctagactgtacaagcttaggctttattttcactttaaatgatggacttcctataccatcttcagtacccagccttaataaacatttaaatatagacaggcttttttcattaatcattttttgttcctcagttgtcacccctttatccctttctcctcagattattttaaag

SEQ ID NO: 47203 - DNA, 518 bp, Homo sapiens
  misc_feature 424: n = A,T,C or G
ttaaccctcactaaagggaacaaaagctgggtaccgggccccccctcgagagtacttctagaattaattaaggcgggggttggcagaggagctcgtttgggctcagacactgctgcctctttctgtctgaaggtgttatgaagtgtacctatcttttgggacatagattccttttactccttcctttgtatttgtcacaaaataaattatagaataaaataaagacatatcatgaaattactcataattgcattacttgggaaggtaaaacataggtatttaacaaacatcaaagttttgggaggaaaaggcatttcataaacctagacatacgcaatactgaaggccaggggacttgtaagtgaaggggccataccgtggagccaggtcttctaaatctaaatctcatatctttccatatttngaaaacaaaaataataaaaaaaaataaataaagcggccgccaccgcggtggagctccaatttgccctatagtgagtcgtattacgcgcgctcac

SEQ ID NO: 47204 - DNA, 573 bp, Homo sapiens
taactaaagggaacaaaagctgggtaccgggccccccctcgagagtacttctagaattaattaagacgggcgtccttgccttccttatttctcaatgtgtgtctatctattttgtcctgcaataaacactagactctgaattggtggctgggggatcgagaaactgacttcttccatgttacctaatcagttatcacagttgaagttcacagtagtacactgtctggccatgtcactacccggatgacaggcctcctcacatctcagtggccaccaaggcacactgtgccactcccaaaagacccagatggtgcctcctctctatgaccccacagccgatgctctgcctccaacctctcagcttttactgggatgtcttccccagcttctaactgcaatgcaaattgaaaccatcagaccagttatctctggccgggcatggtggctcacgcctgtaattccagcactttgggaggcaggggcgggtgaatcacgaggttaggaattcaagactagcctggccaagatggtgaaaccccatctctactaaaatacaaaaattaactgggcatg

SEQ ID NO: 47205 - DNA, 597 bp, Homo sapiens
cgcaattagaccctcactaaagggaacaaaagctgggtaccgggccccccctcgagagtacttctagaattaattaaggcggggggatcacctgaggttgggagttcgagaccagcctggctaacattgtgaaacccagtttctactaaaaattaaaaaaattagcctggcatggtggcacgcgcctgtaatcccagctactgggaagctgaggcgagagaatcgcttgaacctgggagacggaggttgcagtgagccaagatcgtgtcattgcactccagcttgggcaacaagagagaaagtcaaaaaaaaaaaaaagagagaaaagaaaataaagaaactcccccttttgttgtagtatgaagacttcaaactataataatactagggtgggacgagtactagtaaatttatttccttttatttttactacattttttgcaatgtacatttactttgtctgacaataaaaagctacttacgagatactttttagttcataagtgggatgattgtgtgttcacacttgcgtgagacgtccctccctcaaaccttgttgcgccatcatctgcacattacccatttgatgtggggaaa

SEQ ID NO: 47206 - DNA, 643 bp, Homo sapiens
aaagggaacaaaagctgggtcccgggccccccctcgagagtacttctagaattaattaaggcgggcggatcacgaggtcaggagatcgagaccatcctgaacaacatggtgaaaccctgtctctactaaactacaaaaaattatccgggcgtggtggtgtgcacctgtagtcgcagctactcgggaggctgaggtaggggaattgcttgaagccgggaggcggaggctgcagtgagcctagatcatgccactgcactccagcctgcaagactccatctcaaaaaaaagttttttgacccttgatccagagtagagatggtggaggacagtgggggtgcaaggaacagggatctgtctgcctggcagtaccagccccaaaagaagccagtctagatttgcaggtcatttaatcctggctatttcacgcttctcagcctctcagctacaggcagagctcaggacgatattttaaaatgtaattaattcaagcactggttgtcaacaatatatgcatctcttgttttggggcagcagtgagtggtaaaggctttctgaggtgatggtgctccctgtttctcttgaaagagcccaagttattaaaaacgtatctttggccgggtgcggtggctcacgcttgtaatcc

SEQ ID NO: 47207 - DNA, 480 bp, Homo sapiens
cgcgcaattatccctcactaaagggaacaaaagctgggtagccgggccccccctcgagagtacttctagaattaattaaggcgggtggatcacctgaggtcaagagttcgagaccagcctgggcaacatggcaaaatcccgtctctactaaaaatacaaaaattaaatgggcatggtagcacgcgcctgtagtcccagctactcgggaggctgaggcaggagaatcacttgaacctgggaggcagaggttgcagtgagccgagatcatgccactgcactccagcctggccaggtgacagagcgagactctgtctcaaaaaataaaaccaaagatattgttatgtttatcattgtggaacatgcacctgttccacatatacaaaccactagttggcttgtattcagctaaaaaaataaatattctgtattatactttgggagcaatttaagtaattttttcaatgtgattcttagtcttat

SEQ ID NO: 47208 - DNA, 356 bp, Homo sapiens
  misc_feature 308, 309, 313, 335: n = A,T,C or G
gaaaaatatcctgttatacctgagaggatttgtctggagtactctgtaaagacactttcattctttcaatcttttctcattgtttccagtggctgaactttcttaaaagtagtctaggccaaggcaggaggaactcctgactgcctgatccgcctgcctcggcctcctaaagtgctgggattacaggcatgagccactgcacccagcccaatgttaatttttaagaatggaaaaatgctttttaacttgaaataaaactacggggaaaattatagaattgaatgaaaaattaaacaatatctaaattnngaanaaaaaaaaaaaaaaaaaaaaanaaaacccccccccccccgggg

SEQ ID NO: 47209 - DNA, 380 bp, Homo sapiens
aaagggaacaaaagctgggtaccgggccccccctcgagagtacttctagaattaattaaggcgggcggatgacctgaggtcgggagtttgaggccagcctggccggcatggtgaggccccatctctactaagggtgcagaaattgggcaggcgaggtggcacgtgtctgtggtcccggctgctcgggaggctgaggctggagagtcgcttgggcccgggaggcggaggttgcagtggaccgagatcgtgccactgcactccagcctgggggatagagcgagcctctgtctccgaaaaaaaaaaaaaaaaaaaaaaaaaagggccgccccccccccgggggacccccaattccccctttagggatgttgtttacccccccc

SEQ ID NO: 47210 - DNA, 467 bp, Homo sapiens
  misc_feature 424, 426, 428, 429, 430, 431, 432, 433, 434, 435, 436, 437,438, 439: n = A,T,C or G
ctaaagggaacaaaagctgggtaccgggccccccctcgagagtacttctagaattaattaaggcgggggtgctgggagacagggacggagtctagggatcagtgttccaggactgggcggtcatagaatgggctgtgggagcccaattgtgaaaccctgaggatggggaggaggtgtggcccgggactatgtgtggggcttaaggttgccattccaggaggagggtagtcacagccctgtttgctgcgctcaccttgggctaggcgtggtgtcatgtggaccctcagctgtgttgtgcagtagaggtaggccagagaggtgcagtgacctacccacagtctcccaggcagtcagagacggacacatgggcagcatgggcggcaccagcttgtccagtaggcacagtgccaggggtccgtgaaananannnnnnnnnnnnaaaaaaaaaaggcgcccccccccggggg

SEQ ID NO: 47211 - DNA, 512 bp, Homo sapiens
accctcactaaagggaacaaaagctgggtaccgggccccccctcgagagtacttctagaattaattaaggcgggacaatcgcatgaacccaggagatggaggttgcagtgagctgagatcgtgcgactgcactctagcctgggcaacagagcaagactccatctcaaaaaaaaaaccaccaaaaaaaaggtaaataacctaagtcccctataaagtctttacctcacagtatattttcaatcaataattcttaatatcccctttaaaacaaaagtgtgtataaagccctataaaaatattcttgaaaaaatacctaaatctgcctgaggaaaacaggaaaaaattcccaaagggaaatgaaatctgaatgggatccaaaaaaataatccaaagcatgccaaataaaaggtaggaggcccggaaacaattttaaatatttaccaaaaacctaacatccctaatgcagtttgaggaaacggaggcaaaatgttcaccaaaggcttactaaacta

SEQ ID NO: 47212 - DNA, 444 bp, Homo sapiens
  misc_feature 356, 357, 358: n = A,T,C or G
gctgggtgccgggccccccctcgagagtacttctagaattaattaaggcggggacaggcgggggacagttgaagtgattgatttcaaggcagattcagactctaaattctgaggctattaaaaggaaatgataagcacttgtcttgtaatgctaaacagtatgatgaaaggccaggataaatatttagaagaactactctaaggccctggataaataacttcagctttttcaatctcagtttccttatccactgaatacaaaaaaggattgaattatatgattgttagggtatcttccagtactgacattctacggtttatgatttcatcaagactttaatctcagaagccaaaannnaaaaaaaaaaaaaaaaaaaggggggccccccccgggggggaccccaattccccctttaaagagggttttttccccccccccccggc

SEQ ID NO: 47213 - DNA, 368 bp, Homo sapiens
aagggtaacacaggctgggtgccgggccccccctcgagagtacttctagaattaattaaggcgggggcgaaaaatggaaagaggtgagaagacctccccttcctctatactaatatcccacacatagcttcaggaacgcacatggaaagaggctgaagctgaggaggaaacaaagctttttcagtcaaacaatccaatttcctcattctaactaagcatgtatacaattcaatcaaagtggcttttgacagccctgccacttgaatcgtactttgtcctttttaaacctcaaaggaattctgttaaaagaaccttcacaaaataaattctcttaatttgtaaatagagactcaaaaaaagtatgactg

SEQ ID NO: 47214 - DNA, 339 bp, Homo sapiens
aattaaccctcactaaagggaacaaaagctgggtaccgggccccccctcgagagtcttctagaattaattaaggctggttaacaaataaaacaggcttataatccaaaaaataatgaatcattcaaaattatgtgtattatgttcataacccggctttttgggtggtgcataataccagggctggaggggagaaggaattactccatttcaaactgtcatctttaccacttgctactttgactatgcccacacttctatgcttctaaatgaacaaactggacaatgtagggtctattactacccagaccttttcccaacccccagccccgtctgatgtc

SEQ ID NO: 47215 - DNA, 398 bp, Homo sapiens
gctgggtgccgggccccccctcgagagtacttctagaattaattaaggcgggttacttacaaatctaagttttcacatctgtatctagagacaataatctcgaccttacaagtctttggtgaagataaaggtaaataatgtacatgaaaacctctatgagtatccatccatcagtaaacctttaatacacagtagctgaatctgagagccaggccaaacctaaccaaagctgaatctgagggccaggttgccaccaaaccttctgcttctgtatttaaaagaatccttattagaaaaaaaaaaaaaaaaaaaaaaaggggggccccccccgggggggacccccattcccccctatggggggttttttaccccccccccctgggccgttttttaaaaaa

SEQ ID NO: 47216 - DNA, 487 bp, Homo sapiens
caattaaccctcactaaagggaacaaaagctgggtaccgggccccccctcgagagtacttctagaattaattaaatatttatgtagctaattttaatagtgatattttaatacaattcttaattttactcctggctttcaatcattcatatatgtttttaaaaattgctttttccattgctttacttcttaattacttttatcaaagtcttaattgtgtgtggttgattttaaaagttaaatatttctataagatttataaagacaaactgggtacagtgactcacacctgtaatcccagcactttgggaggccgagggggtagaccacttgaggtcaggagttcgagaccagcctggccaacatggtgaaagcagtttctactaaaaatacaaagatatgcctggtgtggtggttggcccctgtaattccagccacttgggaggctgaggcaggagaattgcttgaaccttggaagcggaggttgc

SEQ ID NO: 47217 - DNA, 490 bp, Homo sapiens
cctcacgaaagcggaacttaagcctgggtaccgggccccccctcgagagtacttctagaattaattaaggcgggatctcactgcctcatattcctcatgtctagctattagcttatgggggctcatgtccctcatggttcatggcctcataatagctgaacccgcccattgggcacatctaccctgaggagtatggcctgccaattttagtggctaaccctgaaacaacagtggggtggagtaacaatacacctgtggattattatacaattattgagccagagggtgaaaagcggttgatgttaaattctctcaccactctagaacgtaggtctcatgacacattcttgatttgtcagtcttcctcgactgctcatcaatataaaaggaaagactcaaaaatgttgtgtatatgcactgtccaaaaaggacatagaatgtgcaaaacagtgtagaaattgttttcccaaaagagaattacctcttaaag

SEQ ID NO: 47218 - DNA, 494 bp, Homo sapiens
ggaacacaggctgggtaccgggccccccctcgagagtacttctagaattaattaagggggtctgttaagtcagtgtaccacctattcagcgctcgctgggaataataaaccttgtaccttgagagataaacaaaccgcatcaaaggcagggggctttttccctatgtacacttgggctgctgagttaacatattattaatctctgaagtattaagtcttagttgttaaaggaagtgacttgtagaacttacagagccataggattgaaggtgaaaaatcttgtgagtgcaccccttgaattgcacagatgagaacattagagcttaattaaaggcgggtggattgcctgagttcaggagttcaagaccaccatgggcaacacagtgaaaccccatctccactaaaaatacaaatattagccagccatggtggcacacgcctgtaatcctagcttctggggaggctgaggtgggagaaatcacttgaccctggaa

SEQ ID NO: 47219 - DNA, 414 bp, Homo sapiens
  misc_feature 372, 389: n = A,T,C or G
gcgggctgaagaacttccatcttatgtgctagtttcttgaaagttaaaatagaatattttctattcagtcattcatttatttcttaattcttagttgcctattatagatgaactaaattctgtagaaaatatatggagcacataatagggaaatgagtaacataggattgaattaatgagtacacaaaaacttacttaaaaacactctaacccttacaatcacaagggctctggaaaatgctcttgtggttagtacacagtaagtatccaaacacaacaagtaatacaaaatgatgtgaatttattgtctagagggcctatatgaaataaggatgttaaaattacgttaaaaataacttctgtttttatgtnaccttttaagaaaaatnttaattgactgttttatttatgggg

SEQ ID NO: 47220 - DNA, 475 bp, Homo sapiens
  misc_feature 316: n = A,T,C or G
ccctcactaaagggaacaaaagctgggtaccgggccccccctcgagagtacttctagaattaattaaggcgggtaatggggaaaaagaatacaagttttcttcttctgtgactgagcaaaagatagcgtatagctcgtggaaagggagtaagtattttattattatatctcgtttaaaatctatacctataccttttaaagatatgtatgtcctttttctttgttttcaataaaaccagataatttgaaactgtgcttttttgtggaagagtagaccatggtatatggcacatgatacatgtgcaggacaaagaanaaatatgtctactgttgtctcttttccacattagcctacaagctttgaggtgactggaaccaattgccatcagttgccatggctaatcatctttcatggcatataaatactcagtataaatggatgaacaaatgttattatctagtgcttgattcctac

SEQ ID NO: 47221 - DNA, 388 bp, Homo sapiens
accctcactaaagggaacaaaagctgggtaccgggccccccctcgagagtacttctagaattaattaaggcggggattgcatggtacacctagctcttcggccacggggcgccggggagactcattggcttccagaggacaagctgactcgtcggtgcatccgcgcgagctgcggggagtcacaggggtgaaggccgcgtggcacagcctgtgtgcaaagccggtgaggtgctgacgcagcgagcctggcggaggcgcgggcggaggcagaggggcgctgcttaaaaaaaaaaaaaaaaaaaaaaaggggggccccccccggggggggcccccaattcccccttaaggggggttttttacccccccccctggggccgtttttaaaaaa

SEQ ID NO: 47222 - DNA, 530 bp, Homo sapiens
cactaaagggaacaaaagctgggtaccgggccccccctcgagagtacttctagaattaattaaggcgggtatcagataataatgatcttgtgttgtctactttttgggtaaacagtgtattgaagatattttctccttttatacagatgcacatttagatcagcatcaagaattctcaaagtgtattcaaagaattaatttcattagaaattaataggctaggcaccatggctcacgcctataatcccagcactttgggaggccgaggaaggtggatctcttgagcctaggagtttgagaccagcctaggcaacatagtgagacctcgtctctataaagaaaaaaaaaaaaagaaattaataggtatcttttcgggaaaaaaaaccaaaagaaaaaaaaataaaaaaagcggccgccaccgcggtggagctccaattcgccctatagtgagtcgtattacgcgcgctcactggccgtcgttttacaacgtcgtgactgggaaaaccctggcgttacccaacttaatcgcc

SEQ ID NO: 47223 - DNA, 429 bp, Homo sapiens
  misc_feature 310, 313, 419: n = A,T,C or G
ataaggggaacacatgctgggtgccgggccccccctcgagagtacttctagaattaattaaggcgggatggctgagttcaagctaaatagtatttcaagtttcaaattgtttggatttctttttggttacatagtcctaatatataaatcagctgccttctgaaaattggagttttaagcagaatctcactaagacttctcttgttatctaaatctaaataaaaagggatttacatactgtcagtatatactgaacagaaaaccttgtaaaacagtagtaaactggagggatgcattagttttaacacanaanaaaaaaaaaaaaaaaaaaaaaagggggcccccccccgggggggaccccccacccccccttagggggggttttttcccccccccttggggggggtttttaaaccccngggggggggg

SEQ ID NO: 47224 - DNA, 313 bp, Homo sapiens
  misc_feature 72, 303: n = A,T,C or G
aagggaacaaagctgggtaccgggccccccctcgagagtacttctagaattaattaaggcgggagtctgggngaaaatttttacttatctccattctggggacatctactgcaaattccataatagactctcattcctctattatctgagctatttgaattacctcaataaagctgtttcctcctctttcttcactcaggaaatacagagttctcatgactgaacagggaaagtaagaggtttagaaagaataagatggatctgagagttttcacaatcacttgataacccattattatccanagactaccta

SEQ ID NO: 47225 - DNA, 442 bp, Homo sapiens
ccgggccccccctcgagagtacttctagaattaattaagggggttttcatactcaagaaggttagaaactactggctcatgtcaatttaaagtttttttgaattgaaagtatatgccaatgaaataaatttatctcaaaagagatgtacagcttttcatattaattttcactttaaaaaagagaaggaaaggcaacttctgaaagggcctcttcatctgttaggagagttgaacaatgccactttggtgggtaacaacaaagacaataattacttctctctgtatttgttaagaacatagtcctcataataattctgcacattgtctgagttaaatctcacaataactttaaaaagtaatgaaaacaggccgggtgcagtggctcacgcctgtaatccaattatacacctcaaatctaacacaaagactatacaatagatgc

SEQ ID NO: 47226 - DNA, 527 bp, Homo sapiens
cactaaagggaacaaaagctgggtaccgggccccccctcgagagtacttctagaattaattaaggcggggtgtgtggactagattatttctaaggtggattgcagtgtttaaaattatgattattcactgtccaaaatttgcttcctagaatattttttctcccataaatattttgttaatctgcactttctatgtctgagatctaattataagtttactaaagtaagcatcaagttcactgaaatgacaggtatttcccttttaaactatggaaattatctgaactttttgcactacctggtattcacatctgtttagattttatgaagttactgcagactcaaccagtcttgtccactttaatatttttcctaaaatgggccccaagttatgtgttttctagattcataattagactaccatcccttttcctacattcaagtgtgaaaacaagagtaatatttgaatcattatttctccaacttttatcatagcacatttttcttcatgcatatacagttatcac

SEQ ID NO: 47227 - DNA, 531 bp, Homo sapiens
  misc_feature 486, 488, 489, 509: n = A,T,C or G
ctaaagggaacaaaagctgggtaccgggccccccctcgagagtacttctagaattaattaaggcgggcacccttaaaggctctgaatgttagaaacggtgctatgaatttgtgagtgtccaaaatcttttattgttgcagaattttctggtttaggacaacattgtttacaatccattaattagctggaactcaggaacctttttggtatgaagtaatttcctgtgccaaggaatttgacctgtttatcagtatttggggaagttcctggaatgtccgtccttccttctttgccctccctcactgctgtatctctttgtcacatttcttctcttccttcaaatcatagttcccacactgcctgtcatactgggttatcctgattggaattactcttcccaaaaagtatgcacagtgttttactttttctttattatcaggtacgtcatttgtccttttcccctgaattagtgggtatattgagccnannaaaaaaaaaataaaaaatanagggggcgccccccccgggggg

SEQ ID NO: 47228 - DNA, 450 bp, Homo sapiens
gaacaaaagctgggtaccgggccccccctcgagagtacttctagaattaattaaggcgggtacccaatttggtttaaatattctttccaccttgcttctcttcaacccttcttgtcttggcactcagactgtggaggaaatggaagctttttaaaaaactgaacactattaaactactaaggaaaatataaaaagcatacttttctttggagagataaaagatatttaactcatctgtgtttaaaattaagaatagaaaatataagccttactaaagcagttaaattataagggaaagaggtagggaaagaagagaaagagatgataaaagaaagcaggacaggaagagagagaaggagctcatgagaaaaaaaaaaaaaaaaaaaaaaaaaagggcccccccccgggggggacccccattcccccttatagggagtcttttaacccccc

SEQ ID NO: 47229 - DNA, 464 bp, Homo sapiens
taaagggaacaaaagctgggtaccgggccccccctcgagagtacttctagaattaattaaggcggggtactagaaaggtgcttttctttgatgtatttggaacttttgaactttagtacaatggacaacttacatagagacttctcttttcacgagttactggtagtatcttgctaatgaaaaggcagcagacatctccagctgtactagaggtctgaatttactagatatctgttagtcaagtactgtgccttgtaaaccttatcttcagataactcatcttagctagttggacacagggcgtcagttgttgcttgagtggtaaagcgaatcacgcatgcctagctttcctttaccaaattacgagtactcagaaataactgattaacttcagagcaacctttgtgacagatgttaatttcatctactaatgtggaatgtcaactaggatgtagatcttaaca

SEQ ID NO: 47230 - DNA, 550 bp, Homo sapiens
ccaagcgcgcaattaactcctcactaaagggaacaaaagctgggtaccgggccccccctcgagagtacttctagaattaattaaggcgggtgggagcttttaacaattcatgtgggaagctgaattatctctaaagatatttaaataagtcaactattaaggtgataaccaaactaagacacagactattaatatgtgggttcttgacacatataaaactgaacacagattttaatttcttcaaaagcatcaggtatcctaatagcttcactggtaaaaatctaccaaatgtttaaagaagaattaacatcaatccttcacaaactttaaaataaacttcaaaaaaattggaaaggagggaacacttctgaactcataagcccagtattactgtgattccaaatgccagatccaaaaaaaaaaaaaaaaagcggccgccaccgcggtggagctccaattcgccctatagtgagtcgtattacgcgcgctcactggccgtcgttttacaacgtcgtgactgggaaaaccctggggttacccaacttaatcg

SEQ ID NO: 47231 - DNA, 598 bp, Homo sapiens
ggaacaaaagctgggtaccgggccccccctcgagagtacttctagaattaattaaggcgggctgagattgagccactccagtctgagacagagcaagatcctgtctcacaaaacaaaaaaataccgttgaagcctagagatgctgtagttatttaataaaatctttgaaaaatagttttattcaggtaaatcactcacttcctttatagttacttttatctgaaatttttccactaattgatttgctaggttgtataatttggaaatttattagcattatttttcaaaggtagaaatgataacaggaacgggaagaataaaaacccctttcttctgcttatttctctttatctatgatgcagatatcacatacacaaggcctttgttttaaggtgtaatttcgtagataggggtgtatatctatgatatagtattacttgcatagaattttttctttacaaacatccataaaaacaaagaaaaatcttttaaagcaagagtcttcgaatagttaaacttgattaactggcgttctactaaccagggttatggttagttacctgaaaattcacttgcattctgctaaaaaaaaaaaaaa

SEQ ID NO: 47232 - DNA, 495 bp, Homo sapiens
gcgcgccgctccttaaccctcactaaagggaacaaaagctgggtaccgggccccccctcgagagtacttctagaattaattaaggcgggcactcacactgatctctatatcattgtggagagtcaatgtcaaggccctctgccctttaaagctatcacattgtatgtgccttagacgccacctgccagaagcaagccaggtttacctttggacaccaacagcattctttccattcattcgtcctcctgacttatcagaccctgctatgaatgacttgattgttcttcaacttccaatttaccctcaaaatttctagattttctacccgttcaaaataatggattttgcttttttggaaagcagctcacaaagagatttcttgaataaataaaaattgatccatttttaggaagcatgtatttggatgtgtctgttggacatacctatcatttgttgacatacctataacactgtctggaatcacacctcagtttt

SEQ ID NO: 47233 - DNA, 458 bp, Homo sapiens
taaagggaacaaaagctgggtaccgggccccccctcgagagtacttctagaattaattaaggcggggtaggtctgaaagtattctgaagagtacattgtaaactgaagaaacatatgtaggtcatgtgcaaattcttaggcaaacgtcattatgggatattctaaaagcttcatattgctaagcatgactgatgaacagggaagttagagaccactcttttttacttgtgactttgttttaagaaaactatacattttttatttttactttgtctatcaaagttatctaaactggctgctgttcgggtagttatagcctagtgcattaaaaaaggccaattctggccgggcgcaggggcttacacctgtaatcccactactttgggaggccaaggcgggcggattatcacgaagtcaggagatagagaccatcctggcctgcttggtgaaactccatc

SEQ ID NO: 47234 - DNA, 508 bp, Homo sapiens
caattaaccctcacttaagggaacaaaagctgggtaccgggccccccctcgagagtacttctagaattaattaaggcgggggtggaaattaaaattatacaattatgccactgaaataactgctattaacttttgttgcattttcccttacttattcatgcacatattttattttttactggaatttatagtatagacacttagggatgctgcttttaaaatttaatactgcagggcgcagcggctcatgcctataatcccagcactttgggaggccgaggcaggcagatcacgagatcaggagttcaagaccagcctgaccaacacggtgaaaccccgtctctactaaaaatacaaaattagccaggcatggaggcacatgcctgtaatctcagctgctcaggaggctgaggcaggagaatcacttgaacccgggaggcagaggttgcagtcagccgagatcgtgccactgcactccaacctgggcaacggagccagactccgtcac

SEQ ID NO: 47235 - DNA, 516 bp, Homo sapiens
  misc_feature 91: n = A,T,C or G
gccaagcgcgcaattaaaccctcactaaagggaacaaaagctgggtaccgggccccccctcgagagtacttctagaattaattaaggcggngacaggaaacaatatagatgtagagctgcacaaattctcttctctagctggaaaagtaaccaaccatgtgtacctttccaagatgggttgaaaaaatagttctactgaacacatacttcaactctgtattttctgatttcttgccctctgaactggtatataacattaaaaaaggatttctaaaattcatatttaaccttcccttcaaactccaaacaggcacctgaggtcaggagttggagaccaacccggccaatgtggtgaaaccctgtctctattaaaaatacaaaaattagccgggtgtgttggcgggcacctgtaatcccaggtacttgggaggctgaggcaggagaattgcttgaacccgggaggtggaggttgcagtgagctgagatcatgccaccgcactacagcctgggtgacac

SEQ ID NO: 47236 - DNA, 628 bp, Homo sapiens
taaagggaacaaaagctgggtgccgggccccccctcgagagtacttctagaattaattaaggcgggcagatcacaaggtcaggagatcgagaccatcctggctgacacagtgaaactctgtctctactaaaactacaaaaaaattagccaggtggccaaaaccaccccttggatgcccattttgttcagagtcaaagtcatcatcatggcctaaagaccccatgatctactgctacccttgccctggtgttttttttcttgtggctcctgttactcttcccttcttacatttgcttgctctgttccatgcatcctggcttcctggctgtacctcacacccgccgggcatgcatgacttgctttctcacctcagcgaggcctcctcacctgaccacccgacttcaaattttgaatataagtttaaattgcagttccttcaaccctgtactcatctttccctgctttgtttctgtttgcttttctgctcgtctctctctccatgagagggtagacaccatgaggacatacaatgttggctattttgtttattgggttcccatcacctgataccatgcccgacaaatgctgggcactcaataagtattttttaaataaatgtttgggtctc

SEQ ID NO: 47237 - DNA, 502 bp, Homo sapiens
gcgcattaccctactaaagggaacaaaagctgggtaccgggccccccctcgagagtacttctagaattaattaaattggatagaatgatgatggggatagagtgtaaatttgccaaatttacccacgcaacagacatgattttacctaatacatgtgaattatgaagaataaactgatgaaaatagtttgggaatataaaacttaagaatacttgcgccgggcacggcggctcacacctgtaatcccagcactttgggaggccgaggcaggtggatcacgaggtcaggagttcaagactagcctggccaagatggtgaaaccccatctctattaaaaatacaaaaattagccgggcgtggttgtgggcgcctgtaatcccagctactcaggaggctgaggcagagaatcgcatgagcccaggaagcggaggttgcagtgagccgagattgcgccaccgcactccagcctgggcgacagagtgagactccgtcccaaaaaaaa

SEQ ID NO: 47238 - DNA, 484 bp, Homo sapiens
gcgcgcaattaaccctcactaaagggaacaaaagctgggtaccgggccccccctcgagagtacttctagaattaattaaggcgggggtgaggtgagccaggaggtctgtgaggcttcattggctgttgtccacactgttctgactgataattgccctgaaggccaatctctgactgccatgttgggtgagagaaggagagtggaagcagggagctcaggcaggggccaacggcaatagcttgtgagagatggtgatggttaagccacagaggttagcaggagtgctgagaggtggtcagaccagatatacactgatgatggagcccattggttttgctgaggaagtgaaattggaatataagagaaaactagttattttgctaaggtaacagtttggtttacacccatgaaataattacatagcaattcaatttaagtgactcctggattggtctaggtactgtgttacctagatgaagttttt

SEQ ID NO: 47239 - DNA, 462 bp, Homo sapiens
cctcgataaagggaacaaaagctgggtaccgggccccccctcgagagtacttctagaattaattaaggcggggtcagtctttattatctaaggccatgtaacatatcacattccctagctattgtggtttatttaaaggtgagcaagtgaccagtccaataaaactctttgcttggaatgccagagaaatacattcactttatttttctatggtgtataaatgagatacctaaaattgcttttgtcatttttatatttcatagatagcaagtatacagagtgaggcagaacagataaaagggtcaagccttgggcttttcctattacgggtatcaataaaggatctttttaagacagtttaaattaggttttctgttacttagaacaaaatatctaaatgacacagaatctgaagtggtcattactatttgatttccactcttatatgcttctgtcattgct

SEQ ID NO: 47240 - DNA, 497 bp, Homo sapiens
cgcgcaattaacccttactaaagggaacataaagctgggtaccgggccccccctcgagagtacttctagaattaattaaggcgggtggattacttgaggtcaggagttcaagaccagcctggccaacatagagaaaccccatctccactaaaaatacaaaacctacctaggcatggtggcaggtgcctgtaatctcagctacttgggaggctgaggcaggagaatcgcttgaacccaggaggcggaggttgcagtgagccaagatcgtgccactgcactccagcctgggagacagtgcgagactctgtctcaaaaaaaaaaaaaagaaagaaagaaattatacatcaatccacaataatgaggcaaagacaagctaactgaaacagttccttttcttctgcttaaaatttatcaactaaggatagtaatggagtttatcatgctctgttcaattcctgattagcatattaaaatcttttattgaaaactccaggttc

SEQ ID NO: 47241 - DNA, 357 bp, Homo sapiens
aaagggaacaaaagctgggtaccgggccccccctcgagagtacttctagaattaattaatgtccaaacaattttcatcttgaattattctaaggtaagatattagaacccatccaggcaagatggctcatgcctataatcccagcactgtgggaggccaaggcaggagattacttgatgtcaggagtttgagaccagcctggccaacatagtgaaagcctgtctctactaaaaaaaaaaaaaaaaaaaaaaaaaaaaagggggcccccccccgggggggacccccattcccccttttagggggttttttaccccccccccaggggccgttttttaaaaaaaattattcttatcaact

SEQ ID NO: 47242 - DNA, 466 bp, Homo sapiens
ctaaagggaacaaaagctgggtaccgggccccccctcgagagtacttctagaattaattaaggcgggggtctggtttacctctatcttctatgcataattattgatagtggctacctttcattttcaaaagtgtctgattttgaaataaactacatgatcactctatcacaaactacacagagtagatttttctttttccagtctgagaatctgtctgttaatgaatggagttaggcaatttatactttttttctaataattgatatattggattttacttctgagtactcttttttgtttttattttctgtttcgtaacaatgtttcttgttaaatttttgcctcttttgttatgtagactatatttttctgtcttttcttcatcctctaaagatttccaaggttccagttttcctatcataattaccactgtgagttttaagacatactcaaatatatattttt

SEQ ID NO: 47243 - DNA, 487 bp, Homo sapiens
taaagggaacaaaagctgggtaccgggccccccctcgagagtacttctagaattaattaaggggggtggaaagacatagaagagatccctttacaatggaaatgttctataccttgatttggatggtggttacacaagtgtatgcaagtgtcgaaattcattaaaataccatacttaacaactatttcttactgactgactgtaagttataaaatgaagccaaaatcccatagtaaattacagaagattacatctagactttatcttaaaaatccaactaaatgtttatctaactaaatctttaaaaatccaactaaactgcacccataaaccagtccttaataacttaacaaagaataaaaaccaagacacttttacaatataaattttggacaaaattatatgaccaaatagattatctctcattttataaacataacattaatttcccaaaggcctaaaaatctttaatatgtaaattaactac

SEQ ID NO: 47244 - DNA, 504 bp, Homo sapiens
  misc_feature 356: n = A,T,C or G
aattaaccctcactaaagggaacaaaagctgggtaccgggccccccctcgagagtacttctagaattaattaaggcgggtatgaggtagtatcctgttgtgattttcatttgcatttccctcccttgcatgatcttatgaggtaaaaaccaatccgtattcctgtttggtatacaaggaaactggattggaaaggttcagtgactgattaaagataaaagtcatatgcagattctgcactctccagagcccatttcaatgcacaactacaaggtctcacaaattctgagaaggctgtacaagccagcccttcaagattcttccagctatgacattctgggaccatgaatttatacntgttaaaaatctcttcttagccaggtgcggtggctcacgcctgtaatcccagcactttgggaggccaaggcgggcagattatgaggtaaggagattgagaccttcctggctaacacggtgaaaccccgtctctactaaaaatacaaat

SEQ ID NO: 47245 - DNA, 457 bp, Homo sapiens
  misc_feature 371: n = A,T,C or G
taaccctcactaaagggaacaaaagctgggtaccgggccccccctcgagagtacttctagaattaattaaggcgggtaatgatatcaattggctcggtcattttagaaagtagtttgatactggctaccttaaaatgatcatgccatttgaaacatgatgttatagacttcctccaaagaagtgaatcctaaatattgaaatgtttttatttagaaatctgtcagttactggagttgaagtgttctttgatgagtgaattgtgaaatgatgatatgtttacccgatagaatattgaataattaaaaattgtttctttaatgattgcaataaaatgatacattaaatatttatattttattattactatgtnaaaaaaaaaaaaaaaaaaaaaaaaaaaagggggccccccccggggggggccccaatttccccttttaggggggttttttccccccc

SEQ ID NO: 47246 - DNA, 521 bp, Homo sapiens
actaaagggaacaaaagctgggtaccgggccccccctcgagagtacttctagaattaattaaggcggggaaaagtggctgctgacaattaaggagagaagcattcagaaattcctgaaattgtgcctaaaaacaagcaatacattcactagttcctcatcaatcagtggtttagtcagaatagatgccaatgaactagtgaagggtgtatatttttttccttttcaccaaaataagttgaacaaaattcctgtgtgattgcatattttaaaatctaagtttcatgtttgccaacattgctaagctactatatcaattgtctggcttaagccaaataaaacctttcataactttggaagaaacttctacacaggaaactgtagatttagacagccgaaatttgtctgaatatgcattgtttttgtaccagttcttaactatttaaattatatgatattccataacagccatagtggccatataattgaacactctgtatatttaatgatctgtttttctaga

SEQ ID NO: 47247 - DNA, 426 bp, Homo sapiens
caaccctcactaaagggaacaaaagctgggtaccgggccccccctcgagagtacttctagaattaattaataaattttatattgaacatatacactgaaataagattttgaatatattacattaaacaatgtaatgaaatcaattgcctactagaaatgtaaaactacatatatggcttacatttacggctctcaaggcatgtcttctgaacagcactgcactttagccaatgcaatgaaaaaacaaacgacagttatgaatactgaaaaagacagaatcattattgtgtgcagataagtgcctgtctgacaagaaaatctgaaggaatcatttgaaaaatatccaaccagagggagaattcacaaaaatacttcgataccaagtaaataataaaaatagacagggtttttttttggttttttttt

SEQ ID NO: 47248 - DNA, 327 bp, Homo sapiens
gggccccccctcgagatacttctagaattaattaaagcggggaagttgggagaatgaggatttgctttgtattaatggaagaggcaaagcataaaatggaaaaaatttgaaggcattgatgaaaccacacctgaattagtccattatagtgtctacaatagaaattaaaggcttgggccaggagcagtggctcatgcctgtaatcttagtactttgagaggccaaggcaagaggattgcttaaggccaggagtttgagaccaggctaggcaacatagcaagacctcatctctacaaaaattgaaaataaaaaaaatattaaccaggc

SEQ ID NO: 47249 - DNA, 556 bp, Homo sapiens
tactggccgtcgttttacacacacggaaacagcgtgtgcacatgatggctgccgcgccctccctcgagagtacattatagaattacattaaatgcggagggggtgtgtttcatacctccacacattccttggatatgatgagaggctattaaaactccccactatatagaactgttgtactgtgataattggcccattaaccataataaagatacttgtggggaaaggcaacttaatatatggaggctatagtaggtgtttccttttagatctatactgtttagaattgaactgcctgcttgtttcgaaagatcttttcggagtatctgttaccgggtttaggccttttcttggtaggagggggtcttccccactggttttacttgtttttagccaagtgatagccattgtagactcctatataccagatagcatgctaaaagaaaggacactggatttagagtccgaagtactaccttgtcgcctggtaaacatgagatttagggcaagtagcttcttcagaacctccaattttcatatgtggccccaaaatttc

SEQ ID NO: 47250 - DNA, 477 bp, Homo sapiens
gcgcgcaattaaccctcactaaaggaacaaaagctgggtaccgggccccccctcgagaggtcttgtagaattaattaaataaatgtgtatgtgttagatgaatattaaggagcaatactatcttagacacaaaatctgtacatgtttaaagtatttaccacctatgagcacactaccaatatgactattcacagactgattatggtatagaacatacttttaaaaatcgttgcaaaattacattttctgtattgaaggtcaacatttggaaaatacttacataaactctaagcgtaagacactgggatagaaataaatgtacaattccaaaaacacaagtgtgtggaagatggcatataatcttaatagtctgacttagataatctcacatcctgcatgctggcatatttggctaactcgatgaaactaatacaactaaaaaaaatcactaccacctaccttcctcaccaaagccca

SEQ ID NO: 47251 - DNA, 471 bp, Homo sapiens
aaagggaacaaaagctgggtaccgggccccccctcgagagtacttctagaattaattaaggcgggcatccaatatataagatctgagtagctgggcaccatcctataattatcatcactgtttacaactctataattcattaattccaattctgaatattaaagatacacatttttatatgtatataatagtgagagttaaagactatccaaggaataaaggaatttagttcatatttagtctcaaggtaaagcacgttaactctaggtttcttactggtgggaaaagctggggagaggtgcaaacagtgttgtggagtgctgcttcatttaaacaaaagtgaaaatcaatcatattttcatctggcccataatcaaacacaacagggaagatgataggagataggtggaatttgtggtattcactaaaataagcagcaaagaaattaatgacaaaatacactcaaagcat

SEQ ID NO: 47252 - DNA, 488 bp, Homo sapiens
gcgcgcaattaaccctcactaaagggaacaaaagctgggtaccgggccccccctcgagagtacttctagaattaattaaggcgggaagaactgaatgaggactacaggggaacaaaatactgcccttacactctaggtttcaaaaagaaaattaggctgcattttatagaatagctcacatttgtctctgacacatcttcccatgctaaaattataatttctatttctggaaccttccctacatgatcacttgactcagaatcctttgatgactctaagcatatcttctaatcctcccccaatctcttcacaactttaaaattatgaaacctaacaaataagttattgaatatgcaaaatgaccattatacacatgaaaatatgttcaattctactcataatacaagaaatgctcatcaaaactgctgtaaggtaccatttcttacacatcatattggtgaaaacttttaaagcctgtcaacacattc

SEQ ID NO: 47253 - DNA, 531 bp, Homo sapiens
aattaaccctcactaaagggaacaaaagctgggtaccgggccccccctcgagagtacttctagaattaattaattagagttaatgttatttaagagtttgagatcttttctactgcatacttcttccggagggagatttttctttcaggattttaactttgtgaattacaatcttctctaattagcatgaacttcctcttgtaccagaattctagcatattataattcttggagtcagaaaacttttcctgcttggatattaaattttcatcagttatgggtcattcttgttggggataatgtgaaatagagggaacttgtgttctggaatagttaatagaggtaaaggtggagtaaattatctgcaggaaaaagcactgggggctgggcgcagtgcctcacctctgtaatcccagcactgtgggaggctgaggcgggcagatcacttgaggtcaggagttcgagaccggcctggccaacatggtaaaaccccgtctctactaaaactacaaaaattagccgggcgtcatg

SEQ ID NO: 47254 - DNA, 477 bp, Homo sapiens
ctaaagggaacaaaagctgggtaccgggccccccctcgagagtacttctagaattaattaaagcgggtggatcacctaaagttaggagttcaagaccagcctggccaacacggtgaaaccctgtctctactaaaaatacaaaattagccaggtgtggtggcacatgtctgtaatcccagctacttgggaggctgaagcaggagaatcacttgaaccctgtggttggagatgacagtgagccaggattgtgccactgcactccagcctggacaacacagtgagactccatcttaaaaaaaaaaaaggaattttatcttcaggtctattctgaagccacagggaagaattaaggataacctcaccgagatgaaagctaatatcacaaatgcctaaggaaggttcacttactgttccagcaagagagttaggtgttctccccattacaattatcattaaaacaaaaaaaaaaaaaaaaaa

SEQ ID NO: 47255 - DNA, 485 bp, Homo sapiens
tcactaatgggaacaaaagctgggtaccgggccccccctcgagagtacttctagaattaattaaggcgggggaacactatgacccgtccctgaaaccgtattaggtgatctgatatgtcccggggttattaatcttgcattccctttatttaccgagcatggaggttggatgctgatctatcaaccagggaagaggttaacgctggatattggatggaacggatgaggcgggacgccgtaagatcctatattactacttggtaatacatcatgggcggaaagctggtactcgatcataattatttaaacataatcctttatgtcaaaattcatattgcgtgaattctgaattctatatttacctgaaagaaacctgtccaatctcggtgctgtgtggacgttacagattttagtgcattgaggtgtgagacagtgagtacagatagagggagacaagatagagaatccttgtctcccatcagtat

SEQ ID NO: 47256 - DNA, 613 bp, Homo sapiens
taactaaagggaacaaaagctgggtaccgggccccccctcgagagtacttctagaattaattaaggcgggcgaatcacgaggtcaggagatcgacaccgtcctggccaacacggtgaaaacccatctccactaaaaatacaaaaaattagccaggcgtggtggcgggcgcctgcagtcccagcttctcgagaggctgaggcaggagaatggcgtgaaccccagagatggaggttgcagtgagccgagatcgcgccactgcactccagcctgggcaacagagtgagactctgtctcaaaaaacaaaacaaaacaaaaatatttaattcacctgaactttaaaaaatatataaatagtctaaatttgtatttttacatggggtttttaatggagatgtactgaattaaaagctcattttgtcatatataaggctcttatgtgtacttggatgtaattctagattccgtgctctattctctagatttgcttattcatgtgccagtgctatactattctattttttttaaaggtttaaaacatttatcactaaagatactagaatgttctttgaaaacctattaagacatttaactattcttttatgctattctgat

SEQ ID NO: 47257 - DNA, 508 bp, Homo sapiens
aagcgcgcaattaaccctcactaaagggaacaaaagctgggtaccgggccccccctcgagagtacttctagaattaattaaggcgggatggctcagtaaacacagactcataatgacatgtggttaggatgacaattgagggagaagatatttttggatgaggagctgttatgtttatgaagatatttgtaccaaaaatacaattgttttgaagaagaaagtatgttatctcaataaagaaaacaaatatggctacttcatggacccataattgttaatctgtgtctaactacagagtactagctgggagtgtaattgctagtggttatgctttcagagctagctttgacatacatgttactttgttgattttggagtgtaagactggaatgtaatccttaccatcatgcagcttccattctgagagaaataatgaatattttaatgtaattattatttattttaaattttataatcagttgcctatttgcaaagcatacataagcca

SEQ ID NO: 47258 - DNA, 459 bp, Homo sapiens
  misc_feature 57, 59: n = A,T,C or G
ccgggccccccctcgagagtacttctagaattaattaaggcgggggggccagccaancngaaaggaaaaaaataatgaatatttggtgccgaatcagtatttcaaatattgaatgcaagtatctgaagcttgagttattgtaattcaaaaataagaaggtaaatggatccctttgaagaaattctgctagagaaaaattctgaaaaggaatttgtattttaaagggtcagtatgcatatttgtatttttaatcaacaagttttttagcctagagttggttggctgttttttccaatttttatatggaactaaaattaggagaaaaattatggcgggggggaaattttcctgagattaaattagacaggatttggaagaataaagtcagttgtttatggccagagtatagataaatatggggaaagtgcctggagaggaattaactatgcttatgaaagc

SEQ ID NO: 47259 - DNA, 642 bp, Homo sapiens
aaataaagggaacaaaagctgggtaccgggccccccctcgagagtacttctagaattaattaaggcgggctaatgtcagaactaaaactagaaccggattctgcatcccattttctagtctggtcacctaattactttaaagtaattactttaaaccagctggtgttcaaactgagaaactacatttgaaaaataatacagtttaacagtttaaaagagaaaagaggaacatattagaaagattacaggctactaattctggttcttataattacaagttgactagaaaatgtacttatcctctttgaatctgtttcttcatttgttaaataggggaaaataaagcttactaggagaagtaaatgaaataactgcctgggagcataacagttatcatcttccattaaaatatgtaattggtctctgagaataaggtaagataaggtcttttaaaaatgtaatgagaaatatggccgggtgcagtggctcatgcctgtaatcccagcaccttgggaggctgaggtgggcggatcatgaggtcaagagatcgagaccatcctggccaacatggtgaaaccccgtctctactaaaaatacaaaaattagccgggcgtggtggcacacgcctgtagtcccagctac

SEQ ID NO: 47260 - DNA, 532 bp, Homo sapiens
aaagggaacaaaagctgggtaccgggccccccctcgagagtacttctagaattaattaaggcgggagattttgtaggatttaccaaggaacaaataaatttcaagacaaaatagcgtgaattttataatgagccctatgagcagttaggaatttcattagcagtgtttggcagcgtgggctacctttgaaatgattattgttaatgcttttacttgaccatcttgttttatgttttatgtttatgtttttacaatttctttgaaaataactttgagactatacatacatgttttcacataaatggtagcaagagtactttttgtaaatgaagttgggaaggttgtttacagagtggtttagaagtcagaaagtttagttgggggtcagctaggtaaacggatacttttgggtttatcatcgtttatctccttgtagaatttagcaaaatctgaatgtatgtttattatatttgtattatctccctcctttcttccgctactaaagtaagcctcttgtaatttatagggacct

SEQ ID NO: 47261 - DNA, 582 bp, Homo sapiens
tcactaaagggaacaaaagctgggtaccgggccccccctcgagagtacttctagaattaattaacgcggggggataaccaagtctccagatcaataccgttgatgccttgatgtagccaccccggatgttggtgaggaccggctacttatcgggcgctcggtgacgtgcacttgtagaatcaccgcccaggattgcctgatgcctgagaaattgctaccatccagtggggcccagtatcagctggcataaataggatgtgccatctcctgcctcgcggtccagagagactacttctttacatattggtcatcttcactacctgacttcacgcccgtcactccagggtttgcctagttccctcctaacgccttttttttccacaagatccgctcctcctatgctgactgatttgttggccagatgcaatggctcacacctataatccttgcaatttgggaggccgaggcgggaggattgcttgagctcaagagttcacgaccagcctgggcaacatggtgaaaccctgtctctactaaaaatacaaaaattagccaggcatggtggcatatgactgtaatccc

SEQ ID NO: 47262 - DNA, 456 bp, Homo sapiens
  misc_feature 435: n = A,T,C or G
gatcaaaggaacggaagctgggtaccgggccccagctcgagagtacttatagaatgatgaaggcgggtcagctctactgctaaaaaatcagaatttgtagaattaaagatagtcatttagtgccaaagacagaaccactattttaactaatttacatcctgtgtgtctatcctgaacacaaatgatcctgaggtacaaatattcggaatatcttatttttcattattttaagattaaatcaatagattcaaacggtaactatttaaaaatttttaaaaaactggaagggagaacattattttttgttttcattttatattaaacatttagtatatctgtacaaataaaaaaattatgttcaactatcaaactagaaatggcataaaatacactttcctacctatgattacatttccctttcactgcaaataattnttactaccaccaggcacattc

SEQ ID NO: 47263 - DNA, 502 bp, Homo sapiens
ctggccgtcgttttacatcacgaaacaagaatgacctttgcttctggccgcgcccttcctctagagaacataataaaattaattaaggcgggggtctggtttacctctatcttctatgcataattattgatagtggctacctttcattttcaaaagtgtctgattttgaaataaactacatgatcactctatcacaaactacacagagtagatttttctttttccagtctgagaatctgtctgttaatgaatggagttaggcaatttatacttttttttctaataattgatatattggattttacttctgagtactcttttttgtttttattttctgtttcgtaacaatgtttcttgttaaatttttgcctcttttgttatgtagactatatttttctgtcttttcttcatcctctaaagatttccaaggttccagttttcctatcataattaccactgtgagttttaagacatactcaaatatatatttttcaactttaaa

SEQ ID NO: 47264 - DNA, 369 bp, Homo sapiens
accctcactaaagggaacaaaagctgggtaccgggccccccctcgagagtacttctagaattaattaaggcggggggaagaactctgaaagaaatcaaagcccagactgtgtcccacatagagttcaagtcatttaacagcatcatgggggaaacccagagatgtgaaattagtataaaaattggccgctggcaagtgctatctctcagacacctgagaacaacatacacaacctcattctggacttagggacattttagtttcccggctacgtagatgtctatagaaaaactgagctttgattggatgcgcttacagtgagaaatagtcaaaacgtagaaggaaaccttccgccaccagcaaatcagc

SEQ ID NO: 47265 - DNA, 460 bp, Homo sapiens
  misc_feature 452: n = A,T,C or G
aaagggaacaaacgctgggtaccgggccccccctcgagagtacttctagaattaattaaggcggggccaggaaggaaggaaaaaagcttcgttgattggggtggcaggatcacaaattatttcttttacattttggttgctaatgaccttgttataaaactattttggggccgggcacggtagctcacgcctgtaatcccagcattttgggaggtcaaggtgggcggatcacctgaggtcaggagttcgagactagcctggccaacatggcacaaccccatctctactgaaaatacaaaaattagctgggcgtgttggtgggcgcttataatcccagatagtcaggaggctgaggcaggagaatcgcttgaaccgggaggtggaggttgcagtaagccgagattgcaccactgcactccagcctgggcgacaagagcgaaactccatctcanaaaaaaaa

SEQ ID NO: 47266 - DNA, 608 bp, Homo sapiens
aaccttaaatgaagggaacataagctgggtaccgggccccccctcgagagtacttctagaattaattaaggcgggggagatactatatactgcagaaccagacttggcaggcggcctttaaaataacctacaaagccactcctaattatgatggcttggtataattggatgttgttaccacatttggaaatcttggtaagtatagatgcttttagacaggggcatcttggaggaagttagctgaggaagaaaaaggtcttatgtacctaacaggtaagaataatatgtactgaggagcagcccatgaaaaagggtaccttgcactaagcttcttccaaacaaagcagtcagaagcaccgtttgtagccattactttgttctcagactctacaatcatggctacaaataattagaccacaggttgttatctggcttgaaggcaattatgacaccctggacccaaggaaaacctaacagtctttaaggaaacctagtacaagaattctgctctgcaggtgtactctttattaaacagtaactaaataatcaaaagagatcctctccttaagaaatacatgggccaggcgcagtggctcacgcctgtaatc

SEQ ID NO: 47267 - DNA, 534 bp, Homo sapiens
tcactaaagggaacaaaagctgggtaccgggccccccctcgagagtacttctagaattaattaaggcgggagaagcaaactttttttttttaacttaaaaaacttatacaaagtatgaaacctaccaaagatctcatccatgggcactggaagcgctaggtgataaaaaaaacttaaacagaaaacgacagcaaatgttaaaatctttttccagtcccaccatgttatttcacataccgattataccattactaaatatggcctcctcttcccagcatggtaggtaccataaatgtcatagcttactccccatatcaaagcctgtaaaactggcgttggttttgatattgaaatttatttcacaacttttctagtagggcagctctaaattctagttaattttccctaaatatgtactcccttacacctcttcctgcttagtttccattgaggtctcaccacgttttataactgaaccctgcggggaaaaaaaaaaaaaaaaaaaaaaaaaaaaaggggcccccccccgggggg

SEQ ID NO: 47268 - DNA, 419 bp, Homo sapiens
  misc_feature 367, 386: n = A,T,C or G
cttcactaagggaaacaaaactgggtaccgggccccccctcgagagtacttctagaattaattaaggcgggagcttgtccctgcatagaaagtgtttcatgcatactaggaggctgtctttgcagcattaaggaaagctctggcagataataaaatgcaaattgaaatttctggtaattaatgcccaatcaattttcatggttttccctattttttgttctcaaaagtttattcctgacatcttattaccttggaggcttttcttctgaaaagcctgctactgactggctgccaaaaagagtccagttcacacctttccttttccagtgtgctcttctgctccatagagatagacaatactcagaanaaaaaaaaaaaaaaaaaanaaaaaaagcggcccccccccgggggggaccccc

SEQ ID NO: 47269 - DNA, 533 bp, Homo sapiens
taaagggaacaaaagctgggtaccgggccccccctcgagagtacttctagaattaattaaggctggggtgcagggagaggagatggagccaggaggtggtgaagtttgccaggatgcaggcagagcgctactttttgtgttcccgggtctgctccacccaacgggtctcctcttgcacgtttctggagatgggttgtaaagtatgctggagcttcttagcagcaagtgccaagagttcctaattattaggctcatacaattttattttgcttttttgtttttaaccaaccatttaaaaacaataacatctctagatttccagtttatctggaaaaatctgaaggtctggcaacacggggcctgctttcccagttggaattgggcagtggtcatcctcttatctagggcatatgagcccaaatttgttccacctctccctgttgtaatatttgccccgccaccttcagtcatgggtgttacctgctggccctgcaggcatttggctgagtaatcactgtgctggggtgtgggtg

SEQ ID NO: 47270 - DNA, 524 bp, Homo sapiens
cgcgcaattaactcctcactaaagggaacaaaagctgggtaccgggccccccctcgagagtacttctagaattaattaaggcgggtggatcacaatgtcgggagttcaagaccagcctggccaagatggtgaaaccccatctctactaaaaatacaaaaattagccaggcatggtggtgggtacctgtaacaccagctatttgggaggctgaggcagataattgcttgaacctgtgaggcagaggttgcaatgagccaagatcaggccactgcactccagcctgtgcaacagagtgagactccgtctcaaaaaaaaaagatgactactagacaaataaattttgatttgaaagatcactagaatttgtttctatctgttaaattttttaaagccagaaagttagatggggaagatatgtattaatcactaacacattttttcttggctttaaaagaaaatcctgtctcggattatctcctactagcactactgaatgggaaacataaaaaaagttcattctctg

SEQ ID NO: 47271 - DNA, 720 bp, Homo sapiens
taaagggaacaaaagctgggtaccgggccccccctcgagagtacttctagaattaattaaggcggggtttgcatataatacagcttaatttgttcaatgaaggaacagttctgtagttggagataaaaggttgtaaaatggaaagcctgatctagataatttataaaacagctttaaatttttattcttaaatagatttaagcttaccaaatcagaaaggaaaagaattatttatagtagctcgaaatgacattgcttccttttctagaacaaagaataataaagaccacctgttttaaaaatgatatgctttaagatcttccatattttcatagttaatatacactgcacattctttaggatctcttaaaggtaatcatctatctgacagactttcagagatgaagcaacacctgccaggacagactatttcacacttggaaaaatacaatgatgtacaaatttctttcatgtttgaataaaacctattcccatacattttcacctatggagacaaagtataactttaaattttaaaaaatcactcaaaaataaaagttactaaatatgtatcaataacatagtaactggagatcatgaccattttgtcttatctacagaacatgcacatcctacttaagcaagtaaaatacttagcctatagataatcaacttagaataaagcctcaattttatacaaaatactaacatatcataaaa

SEQ ID NO: 47272 - DNA, 517 bp, Homo sapiens
  misc_feature 474: n = A,T,C or G
aaagggaacaaaagctgggtaccgggccccccctcgagagtacttctagaattaattaaggcgggaggagagaggagaggcagaaatctactacgagttctttttttttttaacctaaaatcaaggtcaatggtattagcaacattttaaataaacaaaataaagggctgggcatgggggctcacagggtggcagtaaaaagggaaaagggaaatccggggggaggaaaaaggaaaaaccaagacaagacaagacgagatgagagaaacacccgaaaaggaaatatcagcttgccctacacacagtaaggttaaactgtctcttataaaacttctgactttgaaatatatattaattatgcacacttatgtgtttattagatcacaataaaaaatatatttcttaatgtaggctgtagtcaaaaagattataatcccaatgatctaatacattatttttttatccaagccaaangaggcccaaaagggaagaatataacctgtcctgggcatccttg

SEQ ID NO: 47273 - DNA, 491 bp, Homo sapiens
  misc_feature 400, 429, 430, 431, 432, 438, 439: n = A,T,C or G
ccctgaatcaagggaacaaatgctgggtgccgggccccccctcgagagtacttatagaattaattaatggccgcttcacctgcgacatgtgactcgaccctactgttacattgatacttaatctttaacatgtgacatctgagatatgggccccaaattaataatgttccattttaggccatagctataccatgactattgcctagaacgggagaagtgaacaaaagaggtaggggctgtgaatgctttcgcaaaactgacaagcaaggcgaaagggaaactctggaatatgaacttccaggctgcacttgcatcttgtttatctcacggatctcaggggccaccaccttacctggcacaccgaatgtgcctgaggaatgcttgatgcactaaaccacanatcagtgcaatggaattgccatcccccannnnaaaaannaaaataaaaaaaaaaaaggggccccccccggggggggcccccatttccccct

SEQ ID NO: 47274 - DNA, 493 bp, Homo sapiens
cgcaattaaccctcactaaagggaacaaaagctgggtaccgggccccccctcgagagtacttctagaattaattaaggcgggcacagacaatgaatgactgtatgagtcattcctaccctccaggccctctttgagtgaaggcagctttgaaaaccaatcaggcaggtgacttttttaaaatggggaaatgggacaggcaggcatggtggctcacacctgtaatcccagcacttcgggaggccgaggagggcagatcacctgagcccaggagtttgagaccagcctggccaacatggtgaaaccccatctctacaaaaaaaaaaattacaaaaattagctgggtgtgatggcgcacgcctgtactcccaggtactctggaggctgaggcaggaggatcacttgagctcaagacttcaaggctgcagcaaaccctgaccatgacactgcactccagcctgggtgacagagtgagaccctgtctctaaaaaaaaa

SEQ ID NO: 47275 - DNA, 482 bp, Homo sapiens
caaccctaactaaagggaacaaaagctgggtaccgggccccccctcgagagtacttctagaattaattaaggcgggctattcgaactggctatgctaccaaggtataaatgtcagtttctggtttctggaggtaaacgtgatcaaacaactatttttgtgggtgcactcaccatataagatattgctccaaaagacaaacaacatatagatgcactggcacctgtcatatcttttttaataataatctgtctgagacaaaaaaaaatggaaaaggggaattcttaacagctgagataaacaaagctaagaaaaaaaatttaatggtacaaaatctgacagtcttatttatgactggctccaggatagagtgtgaaaccaagagaggtactgctatcaaattttatttgtaataggctagccatgaattttttggcacctacctcaatggcttttaaacagaaaaactgaggcaacaaaacat

SEQ ID NO: 47276 - DNA, 474 bp, Homo sapiens
  misc_feature 109, 450, 451, 452, 453, 454, 457: n = A,T,C or G
aaagggaacaaaagctgggtaccgggccccccctcgagagtacttctagaattaattaaggcggggggtactaccaagctctctaggaaacatctatctttgaataatnatttggaatccaaaattatcatctctgttagaggttcctaatccatggtttcttcacagtgcagtatgttttggataaattgtgattgctaatatagtacctaagtttgtcagtgatttctttccgaaaaaaagattgacgcacatttaagattattcattaatataattactccttttcatttgcattccatcctgctttttcatttgggaaagaaatgtgcagagggacagctggtgcctctgtaattacacataacccccagcctgtcttatctgtgcactcctgggagcgggtcacaaatgtcatcctctgtcttgcgtgtttcaattttttaaaannnnnaanaaaaaaaaaaaaaaaaa

SEQ ID NO: 47277 - DNA, 326 bp, Homo sapiens
ctggccgtcgtttcaacccggaataaagggaacacatgctgggtagccgggccccccctcgagagtacttctagaattaattaaggcgggggaactgcttgagcccgggaggtggaggttgcagtgagctgaggtcgagccactgcactccagcctgggtgacagagcgagactgcatctcaaaaaaaatccttttattttccagttcttaaaataatgatttgttgccctagcatattccaatggtgaccttttaaaaatgttgaattaatattaaataaataaatataaataaaaataataaataatggattaaaaaaaaaaaa

SEQ ID NO: 47278 - DNA, 457 bp, Homo sapiens
  misc_feature 84: n = A,T,C or G
agctgggtaccgggccccccctcgagagtacttctagaattaattaaggcgggcacataacacctctcccaacctctttctcanaacctccactgggacagtgggaaccgactgtctctaaacgctgatgtgcaaatggatcacagtctttgtggaaggcaatatctgccaaaattacaaatgcacatacctggacccagcaggctcacctatggaaattcatcttccagatacaccagaatgtgtagaaaaaaaatgtatatcccaggttactgtctgaaatactgtctcctaaaagataggacactacccagtgtctatctatcagggactggctaaataacctatggtgcatccataccgcatagctataaaaagaaaataaaagaacgtaccccataaatatacacaccaactttgtacccacagaaattaaaattaaacatttttaaaatgg

SEQ ID NO: 47279 - DNA, 579 bp, Homo sapiens
tacataaagggaacaaaagctgggtaccgggccccccctcgagagtacttctagaattaattaaggcgggtatcacaaaatattttattttatatctactgttcttacacaatattttgctttggcaagtatttttatgtggaaaatgatttatatgtcatacctatcagaatcaaattgctaccaggcaatatatataacataagtgaaagtattaatagtttatacacacatatacatataaatatgtatatgtatgtatctatatgtgtgtgttaatgtaaactaatgttagtattcagattatcttgaagtattggactgttgagaaaatggaattattaacatgcatttaaggatatacaaatataaatatatttttcttgaattagcattaaagaatgaaatagctgcattacatgcttcatacattttagtttattttggaatatgtcaaaatattttgcaatgtgattatactgttttccataataccagcagtaatgaaagtcacagtagctctacatccttgcatgcacttggtacggttagtatagtctttttaaccataactcttct

SEQ ID NO: 47280 - DNA, 385 bp, Homo sapiens
aagggaaacaaagctgggtaccgggccccccctcgagagtcttctagaattaattaaggcgggggagggaaacacatttaagtgagcccaatgcactccaccacttttcccttgcgaccagggtcgagaggctggagagagagcaatgatgagggctttcaggggctggagaaacaaggactgtgagcaaggattccaaggcagagagagtagaggggctaagaccccggggaaagagaaccatacaacagtgagtctgactttctgtacactattaccctttagtatttgcatggggcaagagaccaagaatccaagcagaaagtgagactaagaggctaagctttcagtagcctcacattgctgaggagttcaagataccatg

SEQ ID NO: 47281 - DNA, 495 bp, Homo sapiens
agcgcgcaattaaccctcactaaagggaacaaaagctgggtaccgggccccccctcgagagtacttctagaattaattaaagcgggcataaccttcctactctctctctctcacacacacacacacacacacacactgtctctctctttcatttccatattataatgcaagttattgaagttcttctctttgtcttttattcccctgctcaaacgtttttaatgattttcagaattttgttgcaagttatagattacacattatcatgtggactaccatttaataattactgtcttgcctcttatgagacagcgaagggtgttcccaagttgtggtagacagggtgtgttcctctgtgcttgtgatactaccagtactagttttcattggtcctaaggtgcatattttatcattgccgaaatccagaagtgtcttaaaattgctggcgaccaggtgtcagctgtgacgtattatcattgcctgcacctgtgcaac

SEQ ID NO: 47282 - DNA, 528 bp, Homo sapiens
  misc_feature 442, 444, 445, 466, 467, 468: n = A,T,C or G
accctgaataaagggaacaaaagctgggtaccgggccccccctcgagagtacttctagaattaattaaacaaaagttgtctttcaaattctaatggagatgattagatttgtaggctttagtcttcctgctttgtcctaggcaacgtcccttcttgttaggaggcccctgaagatgattaatttcatccattatgcattaatttcaggaggttaactctcaaagggccaggtcctttctttttgtttgatactcactctagctctctactcagtatatgtgacatttaaaaattcttatttaaccacaaggtagaataaagcatttgctcattaaaataccttctccctaaatgggatttattactgaatgagaataatggacctattgttattatttctgctccattttcttgtaaagaatgtatttctttgtgttagccnannaaaaaaaaaaaaaaaaaaaannngggccccccccccgggggggccccccatccccccctttagggggttttttaccccccccc

SEQ ID NO: 47283 - DNA, 386 bp, Homo sapiens
  misc_feature 21: n = A,T,C or G
aattaaccctcacttaagggnaacaaaagctgggtaccgggccccccctcgagagtacttctagaattaattaaggcgggggacgatggccaggagcagtggctcacgcctgtaatcccagcactttgggcgcagatcactctgccacccacttggtggggtgacaagaacaagcttctacccatttggcaaataggagctttctttgattcgtcctgacaactttttttttccttcagacagagcaagactctgtctgaaggaaaaaaaaaaaaaaaaaaaaaaaaaaaaggcggccgccaccgcggtggagctccaattcgccctatagtgagtcgtattacgcgcgctcactggccgtcgttttacaacgtcgtgactgggaa

SEQ ID NO: 47284 - DNA, 465 bp, Homo sapiens
ctaaagggaacaaaagctgggtaccgggccccccctcgagagtacttctagaattaattaaggcgggggaggggtggactatttcccattcagtcagtgaagttagatttctctaatcccaaaattagacaaagacaatacaagaaatgtaaacaccaatattcctgatgaacactatcgccgaaatcctcaggaaaatgttggtaaatcttgtcaatatgcaaaaagaataatacctcatgcccaaatatgttatccaaggaagataagattggattgagatccgaaaatcaatttaatatatcgtattaatagattaagaaaaaatatgatcaggtcaatagatatagaagcgcacttgacaaaattccatatcctcttacgataaacactcttcatgaactaaaaataaaggggacttcttaaatctgatgaaatgcatctattgaaaaattacagataaca

SEQ ID NO: 47285 - DNA, 503 bp, Homo sapiens
ctcactaaagggaacaaaagctgggtaccgggccccccctcgagagtacttctagaattaattaagcctattgtgcaggattctgtcggtgaaaacatctaacacacgtgaaagatattgtgaacactcatgaactatatcaaaaagaaaaataattagggttaaaaagaaaaaaagccttggccaggcgtggtggctcaagcctgtaatcccagcactttgggaggccaaggcgggtggatcacctaaggtcagaagttcgagacctgcctggccaacacagcaaaacctcgtctctactaaaaacacaaaaattagctggacatggtggtgggtgcctgtaatcccagctactcatgaggctgaggcaggagagtcacttgaacctgggaggtggaggttgcagtgagctgagactgccactgcactccagcctgggcaacagagtgagaccgtctcaaataatctttgagatcccaagaaagggggcccgccccgggggg

SEQ ID NO: 47286 - DNA, 630 bp, Homo sapiens
ctggccgcgcgcatattaaccctcactaaagggaacaaaagctgggtaccgggccccccctcgagagtacttctagaattaattaaggtggggtactttaagaaccagaaaacatgtttggtttatttaaaatataaataatacatctgcgaaaggtataccttcacttactccagataacttagcaaccctgtgatatttctatgggagaacaactgtagaatgtaggtcccttgaaagaatactgtgccattttttaaactgaatgcaattttattttattctcagattggtatgattgtgtctatgtgaccatgtctctgaaaaaagctatctcagactatgtgcattatcccaaaacttcatggtggcttcccaagagatgcagggcttctcaactttccatttgaaatatggccttgagacatacagtttgtattgctatgagcgaggaaatagagacaaatggaatcaatgcccagcactttgggaggccaaggcgggcagatcacctgaggtcaggaattcaaggccagcctggccaacatagtgaaattccgtctctactaaaaatacagaaattagcccggcatggtggtgcgtgactgtaatcccagctactcaggaagc

SEQ ID NO: 47287 - DNA, 509 bp, Homo sapiens
  misc_feature 381, 383, 384, 386: n = A,T,C or G
aagggaacaaaagctgggtaccgggccccccctcgagagtacttctagaattaattaaggcgggtcttattcatatctcatattttagcacaattaaatattgcgaacatttagatgtgctagatctcaactctcttgatcttaatgactctgcttttggattgatattttaatccaatgagacatagattatttcttcataaagccaccaagtaatactatcactggattttacctgagcttttcagatataagctatggtttctgtagcatatattacattctaatacaaccctaaactacagattacagaatttaaatgttgatacattgttttgtaatgatatcagagtcagtgtggtgtctctcacacgttatcanannanaaaaaaaaaaaaaaaaaaaaaaggcggccgccaccgcggtggagctccaattcgccctatagtgagtcgtattacgcgcgctcactggccgtcgttttacaacgtctggactgggaaaaccct

SEQ ID NO: 47288 - DNA, 387 bp, Homo sapiens
gtaccgggccccccctcgagagtacttctaggaattaattaaggcgggggaagtgtcctggcctcagcctcctaaattcaacctttttttaaagtgttcctcattaactgaattgggcacttccccccctataatctcttacataatttgttttaattcttttgacgtatgcattacataccacccttgtattggaactatgtatgtatctctttttcattcactcccctttccttccctgtcccattccttaagagaactgttatcttccatgagggaagcactcctgcaacttttacgtgtatgtgtgtgtgtcaccatcttctaccatgttaattatctgaactgcacaatcacaattttgtgaaccttaatgtgttctgaaat

SEQ ID NO: 47289 - DNA, 319 bp, Homo sapiens
gcgggtcttgaatatttacttggagtacacttcaagacccgcgaatcatgcttttcctgatagagaatcctttaaattctcttttctaaaatgtacccatctctctacagcatctgccttcaatggtagcatcattttgcacgttaatctttaatttttttccaaagctaatcaaggcattaccccggaggccgggcgcagtggctcacgcctgtaatcccaacactttgggaggccaaggtgggtggatcatttgagatcaggagtttgcaaagaccagcctggccaacatggtgaaaccccatctctactaaaaaaa

SEQ ID NO: 47290 - DNA, 467 bp, Homo sapiens
gcgcgcaattaaccctcactaaagggaacaaaagctgggtaccgggccccccctcgagagtacttctagaattaattaaatggaaccactacttatatacagatttacatgcaatccagatctttaattttgccttcacaaaagcctaatgtctgtaattaacctttaatttttatttctgtatgagacaaaagttgaggacttggtgaaaggaaatagcagttacagcaaaacctcagtgattacaattgaggaaaaagtcaaaattataaaatacctttaaagacatgcactttccatattttcaagtcaattttaactaaaaactaagataatgtttcctagtagagttgcttgaagattagactagacagggttgatttattattagcatgtcatttgtacataaactagtagaaaatagcagttttaaaagttttctatttcagttttgtttacactcctaa

SEQ ID NO: 47291 - DNA, 486 bp, Homo sapiens
  misc_feature 421: n = A,T,C or G
tacgccaagcgcgcaattaaccctcactaaagggaacaaaagctgggtaccgggccccccctcgagagtacttctagaattaattaaggcgggaatttgccataagtgaggttttttcaaaccccaatttctggcattaaggtgtaattcagaagctctaaggaaaagggtgatatttgccattttttcagtaaatgaaattattactattattactatttgccaaagttagtaaataaaaccaatcagacatgaaaataactgactttaacagagcattttctaaacacttctaaagattctaagttttctaatcattcccaaatggatgacattggacacaatggtcgccaaacttctttgttgtttttctttgttgttgttgttgtttgtgtgtttttgagatggagtctcaaaaaanaaaaaaaatataaacaaaaaaaagcggccgccaccgcggtggagctccaattcgccctatagtga

SEQ ID NO: 47292 - DNA, 537 bp, Homo sapiens
  misc_feature 489, 490, 491: n = A,T,C or G
tacctaaagggaacaaaagctgggtaccgggccccccctcgagagtacttctagaattaattaaggcgggcactgcagctgcctgcgcataacacccagaaggcacgctggctccaacaggcgatgcctggctggtggcaggaacccatggaagacgtatttccaaaatcaagagtccatccaggacctcaaattctggcccagggctgggcatggtggctcacgcctgtaatcccagcactttgggaggctgaggcggtcggatcacctgaggtcaggagttcgagaccagcctggtcgacatggtgaaaccccatctctactaaaaatacaaaaattagccaggcatggtggcgggtgcctataatcccagctactagggaggctgaggcaggagaactgcttaaacccgggaggcggaagttgcagtgagaagagatcacgccattgcactccagcctgggctatgagagcgaaactctgcctaannnaaaaaaaaaaaaaaaaaagggggggccccccccggggggggccccc

SEQ ID NO: 47293 - DNA, 386 bp, Homo sapiens
gccaagcgcgcaattaaccctcactaaagggaacaaaagctgggtaccgggccccccctcgagagtacttctagaattaattaaggcgggagggaggaaaagaacaaggtagggtgggagacagcagggaaggaaagaaaaaaagggaagaaaggaaaaggaaaggaggaataaaagggaagagagtgattgtcaccaaagtttacttgacaaatatcctagctaacaatcaagggaaaaacagctgcccctacccaaattccgtctcaactttgaaaaccacctgtggggggaaagctatacactatgtaacttaacaagagttagtgaactgtcactgtcctgcctatgcagagcagctacaccaatcagaccttccactccaa

SEQ ID NO: 47294 - DNA, 442 bp, Homo sapiens
gagtaccgggcccccccttgagagtacttctagaattaattaaggcggggggtagcagggtaggcaggcagcatattcatcctcaggggagaacagcaaaagcccagaaggaattttaatttctcttataaaacaaaaatctcaagacaaaaactttactgccaaactttacatggaaagcaaaaataaactatttgctttatacctgctgccacaggtatgaaatattttattagatgactgtccactcaccattaggctgactctcaaattatggacaggaagagagcaaaccgttcacttgatggacgcagctaagatgaacactcagctgctcacattgtgttcaggttctggtgcattttgaacacttcgtaagagaaattactgaagctcttaataacaaacttgccttccagaacagaaaggttttatgaaaaaa

SEQ ID NO: 47295 - DNA, 507 bp, Homo sapiens
gcgcgcaattaaccctcactaaagggaacaaaagctgggtaccgggccccccctcgagagtacttctagaattaattaaggcgggtcatatggtatttttatgtttaaattttaaagaaactgccaaactattttctacatcatgtccaagtgggacttatttcagaaatgcaaagatggcctagtgttaatattcatacgttttgtgtctgtttacctcagcctagtcccagacctgatattgggaaatccatcacatgactcattatgctactagtaatcaggagaaatatcagatcattatctacatacatggctctaacaaaggtcaacaccaatcctgatttttaaaactgccaataaaataggagtcaatggatattcctctatctatctatctatctatctatctatctatctatctcatctatctatctcttcccatcctaaagtcagcatctttcttaataggggaagtattagaggactttttactaaggtcaggaa

SEQ ID NO: 47296 - DNA, 520 bp, Homo sapiens
  misc_feature 477, 500, 501: n = A,T,C or G
taaagggaacaaatgctgggtaccgggccccccctcgagagtacttctagaattaattaaggcgggggtctggtttacctctatcttctatgcataataattgatagtggctacctttcattttcaaaagtgtctgattttgaaataaactacatgatcactctatcacaaactacacagagtagatttttctttttccagtctgagaatctgtctgttaatgaatggagttaggcaatttatactttttttctaataattgatatattggattttacttctgagtactcttttttgtttttattttctgtttcgtaacaatgtttcttgttaaatttttgcctcttttgttatgtagactatatttttctgtcttttcttcatcctctaaagatttccaaggttccagttttcctatcataattaccactgtgagttttaagacatactcaaatatatatttttcaactttaaaanaaaaaaaaaaaaaaaaaaaaaannggggggcccccccccgggg

SEQ ID NO: 47297 - DNA, 483 bp, Homo sapiens
  misc_feature 405, 424: n = A,T,C or G
aaataaagggaacaaaagctgggtaccgggccccccctcgagagtacttctagaattaattaaggcggggtttctctgtgttgcctaagctggtcttgaactcctgagctcaggagttccacttgccttggccttgcaaagtgctgagaacacaggcatgagccaccatgcccagctaagtatctttttgaataaaatttcttcatgcaattgagattttcagtttacatatcagtctcctatttcaggtgctaatcctatctgccaagtatgagactatatacaataaaaatttaaagttctcttggtaaaataagaaaaaccccaattaataaaaatggtaaagaggtattaaaaatcctcaaaaaggctttggctagctaccatagaaatattaaaaaacanaaaaaaaaaaaaaaaaaangggggcccccccccggggggggccccaattccccctttaagggggggttttaccccccc

SEQ ID NO: 47298 - DNA, 365 bp, Homo sapiens
gccccccctcgagagtacttctagaattaattaaggcgggagggagcgaagggcctcactgagagatgtggttggaaaacagaagtcctcccaaactccctgaaaggctctcaggaatcccccatgttccatggatcacactttaagaactgctagtctaggtcattacctacattgtctcatttagtggcattatttctagcatctcagaacatctatttcatgattctggcacactgagaggtgccatagtgaaattatcagaaaaaaaaaaaaaaaaaaaaaaagggggcccccccccccgggggggccccccatcccccccttagggggggtttttccccccccccttggggggttttttt

SEQ ID NO: 47299 - DNA, 503 bp, Homo sapiens
gcgcgcaattaaccctcactaaagggaacaaaagctgggtaccgggccccccctcgagagtacttctagaattaattaaggcgggataaaccaaatttggctagctgaactgtataattttaaaatatttccttttatctcttattctggctttacctgacatgatggcagcatgtgagcaaggacaattccaacatggccctgaaaaagtcagtaagacaaacaagttagctttggtccccacagcttttcctcattctgaaaccacaatcttgccaaataaaaacatgaccttgaatgtaatatagaaaagtctcataatcttagaaagactaaaaaggatgaaaggagagataaaataccccaccgctgcagaaatccacaattctgtcaccaggtttggcctgatttgttaccacatagacaaggttgttcaactgttgctgcttcctcaaagctcgatcactggacattttacctgaaaaaaaaaaaaaaaaaaaaaa

SEQ ID NO: 47300 - DNA, 494 bp, Homo sapiens
  misc_feature 478: n = A,T,C or G
acaaaagctgggtaccgggccccccctcgagagtacttctagaattaattaaggcggggagaaatgtccagaatctaatacctgctggagataaaaacaatacattataaacctctctttctttttcttagtcttagaattaggggctaaattcacatgaatcattttgtgtatgaactaaaaataaatataatgagaacatcttattgctcttagtgctgatgaccaggcttaaaactatttctgcatgtcacttagtaaagttaacttccttaaaaaaaaaaacacaacagctgaaatgatgtcactgcttccagtgtgctaactaaaagaaaaaaaaaaaaagcggccgccaccgcggtggagctccaattcgccctatagtgagtcgtattacgcgcgctcactggccgtcgttttacaacgtcgtgactgggaaaaccctggcgttacccaacttaatcgccttgcagcacantccccctttcgccagc

SEQ ID NO: 47301 - DNA, 515 bp, Homo sapiens
  misc_feature 414, 415, 418, 419: n = A,T,C or G
accctcactaaagggaacaaaagctgggtaccgggccccccctcgagagtacttctagaattaattaagctagacatttgaaaagtcttttttttatattagcagcaactctgaaaggatgtttaatgcctactccttaaaaaaaaaatgatattgcaatctactcctgcaactcccgggttcaagcaattctcctgtatgatcctcccgaataattgggattacaggagccccccacctcgcccggataattttttatatttttagtatacacagggtttcaccatgttggccaggctcttatcgatctcctgacctcgtgatccgcccgccttaattaaggcgggggcggatcacctgaggtcaggagttcaagaccagcctgctcaatgtggtgaaatcccatctcttgcnnaannaaaaaaaaaaaaaaaaatttttgggggaaatttggcccccgccccccatgggggggtatttaaaaaaattttttaaaaaaaaaaaatttttttttt

SEQ ID NO: 47302 - DNA, 413 bp, Homo sapiens
  misc_feature 332: n = A,T,C or G
taaccctcactaaagggaacaaaagctgggtaccgggccccccctcgagagtacttctagaattaattaaggcgggagaggagaggaaaaagtaactattgggtactaggcttagtacctgggtggcaaaataatgtgtaacaaacctgcacatgtacccttgaacttaataaaataattgtttgtgtgcatgtttagaggaattcgaagcctctgaaggattttaagcaaggacctaacttggtcttttttccctctttaaaaaaacacaagagcacggactatctagagaatggatagggggaaaaaaaaaaaaaaaaaaaaaaaaaaangggggccccccccggggggggcccccaattcccccttaagggagtttttttacccccccttttggggcgttttttaaaaaa

SEQ ID NO: 47303 - DNA, 447 bp, Homo sapiens
taactaaagggaacaaaagctgggtaccgggccccccctcgagagtacttctagaattaattaaggcaggtatcaaacaatgtactgaacgttctcacctttgacaaaaatcttaaaagccattcttaaattaataccaacaaaatgttatatactttttatacatttcaaaaggcactctaacttgatgacttaatttgatcttcacaacaacctcgtgagttaggtgaacacatatttgcttatttgagacagacacaaaaagactggttgaaatatcttgcctcccatctagaaccctaaactattactttatttcagtacatacaggcaagcattactatcttgatttcaccaaagaagaaacaagtacagagaagaaacttgcctaacgtcacaatgctgctacacagcaaaacaagattcaggccaggaccaatccaagcc

SEQ ID NO: 47304 - DNA, 547 bp, Homo sapiens
aattaaccctcactaaagggaacaaaagctgggtaccgggccccccctcgagagtacttctagaattaattaaggcgggcggatcatgaggtcaggagatcgcgaccatcctggctaacagtgaaaccctgtctccactaaaaatacaaaaaattagccgggcgtggtggcgcacgcctgtagtctcagctactcgggaggctgaggcgggagaatggcgtgaacccgggaggcggagcttgcaaagagccaagattgcgccactgcactccagcctgggtgacagagcgagactccgtttcaaaataaataaataaataaataaataaataaataaaataaaattgcttttggaaagagaagagctatatatatatacattagtaaataaagtattaaaaactaaaatattgcactcataaagaatacaatgaaaacttgtactttttgatgaagtagatattagaataaaaggggctagttaagcatttgcataaatagtaaatactaatgctaaaatatgaacaccctaaataaaaaggcacca

SEQ ID NO: 47305 - DNA, 337 bp, Homo sapiens
ctaaagggaacaaaagctgggtaccgggccccccctcgagagtacttctagaattaattaaggcggggttgaggaaattatttcaaagtaattatgcagtgagtttttttaaaaccttataaactaagcatttagtagcactttggaaagtgtagtgaaactggcacatggagaaataaattcaatacagaaaatatgataccaggatcacatagcttagggtcttaaaaaaaaaaaaaaaaaaaaaaaaaaaaaaagggggccccccccgggggggaccccaattcccccttttggggggttttttaccccccccccctgggcggttttttaaaaa

SEQ ID NO: 47306 - DNA, 373 bp, Homo sapiens
  misc_feature 251, 252: n = A,T,C or G
cctcactaaagggaacaaaagctgggtaccgggccccccctcgagagtacttctagaattaattaaggcggggccctgtttatatctttcggtatcagttaggaaatactttgatataaaatttggatttatatgtcaatcagcttggcaattgaggttcttttgttgctgatcagaaatcttggctggcagttaaatatgtcctttttataaaaaaaaaaaagaaaaggaaagaaagaaaagaaaaggannaaaaaaaaaaaaaaaaaaaaaaaagcggccgccaccgcggtggagctccaattcgccctatagtgagtcgtattacgcgcgctcactggccgtcgttttacaacgtcgtgactgggaaaac

SEQ ID NO: 47307 - DNA, 340 bp, Homo sapiens
  misc_feature 285: n = A,T,C or G
taagggaacaaaagctgggtaccgggccccccctcgagagtacttctagaattaattaaggcggggtcaaaacaaactactcaatagttactttaattgcctatagtggagaaaaccttcaaagatttagacttatatatatgacccaaacagcttattcaggtgatattttaaaccttaagaattagatgtaagtgtaagtaaaacttaagatttcatttttatttactaacattgctcctctacagggacaatttctcactttctctgaaggcactgacacangatttggtgattattgctgtatgctgggccatatgttacacggcagagtacagca

SEQ ID NO: 47308 - DNA, 492 bp, Homo sapiens
gcgcgcaattaaccctcactaaagggaacaaaagctgggtaccgggccccccctcgagagtacttctagaattaattaaggcgggagaagggtaatagatttggaataaaccaaaatgcatacccttgtctagtccaacaaaagcttatgatataaaagaagctaacatttttcaaggtaaatatttttattgtttttacattcttttcaagagtatgtaggagaataacattttcaagtgtaaggaggcctaggaaaatattcatattgtttctggaagaggaagaattggttaaacaatagaaatggggctgggtgccatggctcacgcctgtaatcccagcactttgggaagccgagctgggcatatcactaggttaagagatctagaccatcctggccagcatggtgaaaacccgtctctactaaaaatacaaaaaattggctgggcgtggtggtacatgcctgttgtcccagctgcttgggaggctg

SEQ ID NO: 47309 - DNA, 517 bp, Homo sapiens
aaataaagggaacaaaagctgggtgccgggccccccctcgagagtacttctagaattaattaaggcgggtgttattctttattattaattattattaagtaagttctcttaagtcaaactcatataaagagtcatgagactttccggaaaaggaaagaaactaaaatttactgagcacctcctctgggatagaagcatttaaaaaactaatagagaagagagaatcaaggaatatttcctgagagatgttcctctgagttgacaatactctggggcacctggcagccaggctatggcttttggggccacgtccatttcttcagcggaatcctggtaatgcagtgctgctggatgggcccctgtattaaaccattcttgccctgctataaagaaatacccgagattgggtaatttaaaagaaaagaggttggccaggcgaggtggctcatgcctgtaatcccagcacgttgtgaagtggaggcgggtggatcacttgaggtcaggagttcgagaccag

SEQ ID NO: 47310 - DNA, 584 bp, Homo sapiens
gggaacaaaagctgggtaccgggccccccctcgagagtacttctagaattaattaaggcgggcggagggctcacaccctgaggctcggaaggcgggcggacggctcacacagacccacaaggaccaaagaggaacgtgcaggactccaacacaaacggaggacgatggcagaacagaagagctgattaagtttctgctgcttgtaccataaacttttcatcagccagactgtttgcctgaaagacctaatcaaggctgacaagaattcaaagccatttcaaagtgctcctcaggggtgaacgtggccccatgtccggcacatgctctgctctgaacgctctctcttccagcagggacggccccagacatcgagtatcacaaccaactcaaaaatagactgaaatgtcacagtatcgccaggatcaaaagaaggtctcttaaaaataaagggtgtcttccattaataagtaaaacaagaaaaaacccaaagatgctcacttgaaacttcatcttgttatgagcatccacccgtcgagggcaggtcttgtgttactgaacgcagcctgacaatcgcatctgcaccg

SEQ ID NO: 47311 - DNA, 400 bp, Homo sapiens
agtattgcgttttggttttggaaatcacttcagacctataaccaatattgagtgagttgaaaagaattaattacttccaaatacaaggcactttacattcttctaaggagaggatgcaacacaaagctatttggtcagcttgatacaaaagctcttaggtgtgctcatgaagtaagtcaaatgtatacattttacaaccacatattaaatagaattagttttttctttttccttcccatttctttgaacagtcttattcagaatcttcatcattagcaactttgtcatcattggagcccttttctctagaacacatcagcctgggtgacagaatgagaccctgttaaaagaatcttttttttttttttggtgaaaaatgacctaaaaccgggtttttttt

SEQ ID NO: 47312 - DNA, 545 bp, Homo sapiens
ctcactaaagggaacaaaagctgggtaccgggccccccctcgagagtacttctagaattaattaaggcggggacttcttgaaagaatgctgccctttcataatcaggaaaaagcaaattctgaacagtatcatattatcacatatatgacacataatagacatactatatcaactggcacatcccagtttttaaatacctggatcaagactgtggttgggaacagagctggtactcttattcacccagcagcagttttccatactaacctcctacgaaatgcattagattctactcattccacttcacttactgcaaaataaacttatcacttatagttggaatgaagttccccagatgattctgctatactcccatttcccacccctctttgagaaccactcatctaagtaagaagctgttaccggattttccagaatactcatacaagctagcttcaatttacatgatcaaaacactgtggtaagccacaggaatgtggccaacaaggtcactacaggggataaagtacaagtctttggtttt

SEQ ID NO: 47313 - DNA, 428 bp, Homo sapiens
cgggcccccgctcgagagtacttctagaattaactaaggcgggaggtttctaaaggcaaaaaaaactgtgcccttcctggctctgcaaccttcacctcttcccatccgtttcccagctgcatcaatctatagcctctttagaggactctcaactaactgcctcctttatcaaagggaggacttccagctccctgcctcctatctgcttggtgctctctgcctttctcttccttaaaaagggaaaaagagtgtgttgccgggcgtggtggctcacacctgtaaccccagcactttgggaggccagggcgggtggatcacgaggtcaggagatcgagaccatcctggccaacacggtgaaaccccgtctctactaaaaatacagaaaattagccgagcatgatggcgggcgcctgtagtcccagctactc

SEQ ID NO: 47314 - DNA, 466 bp, Homo sapiens
accctcactaaagggaacaaaagctgggtaccgggccccccctcgagagtacttctagaattaattaagacgggcgatagatagaaccaccctaatttctatgaagtgcacatccaggagctagcacttgctatggggaacgagacattaattcataggctgtactggaaccatgaaaagggaccatgacacctacgcactccgaacgaaaggcctgataattaaaaagagggcggtggcgtctgtaactttggactaccctcttactcatgaaaagaagctgttcagcaaaaccatgaagtttccagccacataccagaggaaaaacactattattaaatttcaaaacataaagaatgcaataaaaacagaataccaaatctgtctaggcaatttttgtagaaaagaataaaaatagacatatgatgcatgaaaagataatttttatgaataataaatcaagaag

SEQ ID NO: 47315 - DNA, 483 bp, Homo sapiens
ttactatagggaacaaaagctgggtaccgggccccccctagagagtacttatagaattaattaaggagggcagaaaatactgaatttaagatattaacaaagtgcccaagtgttatcattgagtagccagtcaaacctctgggattgaagcttaggaatgaagttatagttagacatgtagacataaatcattcttgaactgatagtcatttaaatctatatatttcaaactttatccatatgagtgcaactagtaagctttttgtcatatttgcatgatacttttacttaatatttataaatctattttaagttatctcactttttgaaagcgtagccccattctaaacaataatatcttgaatttgatgtgatggatataagttttaagatacccattagatgtataagtaccatattgcatgattgtaagatgtgtatctttttacaatttaacatttctgtaattagagtgttttacaa

SEQ ID NO: 47316 - DNA, 345 bp, Homo sapiens
aattaaccctcacttaaggggaacaaaagctgggtaccgggccccccctcgagagtacttctagaattaattaaggcgggcaggagaatggtgtgaacccgggaggcggaactggcagtgagccgagatcacgccactgcagtccagcctggtcaacagagcaagactccgtctcaaaaaaaagataaaataaataaattaaaacaaaacaaaacaaaactacccaggggagggattcagtaaattacagagcttccttggagtgaaatttcaggtaatcactaaagcaagtggaaccgtggaggtgtgggggagacaattttacctgagaagtaagcaaaaaaa

SEQ ID NO: 47317 - DNA, 446 bp, Homo sapiens
aaagggaacaaaagctgggtaccgggccccccctcgagagtacttctagaattaattaaggcgggggaggtaattggtaaagaatgttttcccaatcttaaacaagtagtaaattaggtgatattttctatttataaccggtaaaaaccagacaagaatttctttctgctacaacttgctgaacagagcatttaaaacctttaatgactagatgagttcattttctttaaatgctgtgcttaatatttaagctacatcttatttgaaatgttagtttaggattaataaataaaacattccagatgcaatcttccagcaacgacattccagcaatttccctgagaataaagtcagaaaatattccaggttttgaacgtcaagtgttttcagatgataactagtaagttttccaaaacatctaaaggttcaaaccaaaacctttaaaa

SEQ ID NO: 47318 - DNA, 412 bp, Homo sapiens
  misc_feature 314, 335: n = A,T,C or G
gggaacaaaagtctgggtaccgggccccccctcgagagtacttctagaattaattaaggcgggggtggtagaaataataataattatctgaagcttggacctgccactcattcattctcttgctgggtactctctgtacctcagtttcccccactgctctttgaacccccaggaccctctctcctactggctggtagctcagcccctcaactgcttgcattgtattcaaacggctttgggggtgctgcttccggtactgtctcctcactatctcaagggctctattatcagaaaatcaaaatctgttccaaaanaaaaaaaaaaaaaaaaaaaanagggcccccccccccgggggggaccccaaacccccccttaagggggttttaaaacccccccccccggcccctttttt

SEQ ID NO: 47319 - DNA, 111 bp, Homo sapiens
tgcagccgggcgcggttgctcacgcctataatcccagcactttgggaggccgaggtgggtagatcacgaggtcaggagatcgagaccatcctggctaacacagtaaaaccc

SEQ ID NO: 47320 - DNA, 439 bp, Homo sapiens
taaagggaacaaaagctgggtaccgggccccccctcgagagtacttctagaattaattaagggcggcggaggtggtcaaaataataatcattatctgaagcttggacctgccactcattcattctcttgctgggaactctatgtacctaagtttcccccactgctctttgaacccccaagaccctctctcctactggctggtagctcagcccctcaactgcttgcattgtattcaaacggctttgggggtgctgcttccggtactgtctcctcactatctcaagggctctattatcagaaaatcaaaatctgttccaaaaaaaataaaagaaaaaaatatagagggggcccccccccggggggggcccccatccccccttaaaaaaagattaataaacccccccccggggccgttttttacaacctccagaaaaaaaaa

SEQ ID NO: 47321 - DNA, 461 bp, Homo sapiens
ctaaagggaacaaaagctgggtaccgggccccccctcgagagtacttctagaattaattaagggggggagtgttttaaaaagctatgtgcatatgattgccttgatgaaaatgaattatttaaaaataaagtcaggcagacgtaacacacacagaagtttctctggcaagatgttccctgctaccaacactaggtatttctgagtagtacaatttgggatggtttcttactttcatctctttcctaaataattggaacctttaaaattggttggaacacaaaaatagtcattattttacattaaagttaactataggtatctatgggtgccagagtttccatcttccttcttttgtcctgactttacctaattaatgccaaacctagaagtgtgggacagaaattagaaaaagtacatcttaaataagtccacttttctacttttcagatctgctaaaaga

SEQ ID NO: 47322 - DNA, 502 bp, Homo sapiens
ccctcactacacggaacaaaagctgggtgccgggccccccctcgagagtacttctagaattaattaaatttaataaagtcattgaagaaaacactatatttgagtggattctctaaggtttcatcaagacagagatgaggctatgggaagaatgaaaagtaagttgcaattcaacccaaaattcccattgcatatcacctttatcattctcttctatcttacggaaaaacagaatttaggccagaaacaatctttcagatcatgggtccactgctcttattttaaaataagtaaaaccatgcctagagaagtcaaatccttttcctttttcactccctgccctcaacctgtaataatgagaaattttatggcttagtcttttgtctttcttaaatcaatctttgtaattttcctttttctttttgtattgattcttatctaggtgatatcttagacattctgttcttaaagtatgatttaggtatatagtcacaatattaga

SEQ ID NO: 47323 - DNA, 740 bp, Homo sapiens
actggccgtctgtttacacccctaaataaagggaacacatgctgggtgccgggccccccctcgagagtacttctagaattaattaaggcgggacagagccacatttacatggcccgtgcctttcggcaaaggtatcaaagcaattgagtgaggaaatgaaactttttaaaacaaataatgttggaaaaattggatccatatggggagaaaaaggaccttgactcctacttcacacactgtatacaagtttgaaatggatcatagtccaaatataaaagttaaaactatgaagattctagaagaaaacctaggagaatatcttttagacctggtaggcaaagatttcataaataggacacagaaacaatatcataaaataagatttacaaattcaacttcatcaaaattaaaaacttttgctcattgaaagacatccttaaggaaataaatacgcatagattgggagaaaatagtcacaaagcattctgacaagggactggtatccaggattaagaaattccacgattcagtaataaaatgagaacccagtttttttccccccaaggataaagatttgggcaggtacttcacaaataaggaaacatgaatggtggccagtggacacctgaaaatgtgctaacaccattaatgatcaggaaatgtatattaataccacaagacatctctgcatatccactataatggctacaagtaaaaacctgacagccaaatgttggtga

SEQ ID NO: 47324 - DNA, 263 bp, Homo sapiens
  misc_feature 222, 228: n = A,T,C or G
ctagaattaattaaggcggggggaaatatttattgagctcctattatatgaaaaaacttgagatatattcttaaaagttatttcatttttactttacataaatacaaagttgagaaagtagaagatattttggttagtctaattcatttttgaaaatcttacgtttaaattttatagtaaaatgtgcgacatacatcctatgtactgtggctttaataggtntttatntctattcatctctctatttatttctatcatctctc

SEQ ID NO: 47325 - DNA, 551 bp, Homo sapiens
ctggccgtcgttttacacccgggaacacaggtgtgtacccttgctggggggcgggcccttcctcgagagaacttctagaattaattaaggcggggaaatagtatattcttacataatagtaataaaatatgtgtttgatgatgtgtattaaaaaaacataaccactagtggagtgggaaagcatagtgtcattttgaaattataagaggaaacaaaggaataaattgtaacttgatcataccagtatatataaagaaaaggaaaaaagaaaattaatgaggtaagtttaatagtaaatataagcaagagagaaggaataaaatgaagaatatcagtgattatattaaatgtaaatgagcccaattttcctatcaacagacagagactatcagaatggattaaaaacaaacccagtgaatatgttgtttacaagaaacacacttagagtgataaagaagtatttaaagcaattggaaaagcaatactacagatatataaagagattaaaaattaggagaggcaatattaatatcagaaaaggtgggacaagc

SEQ ID NO: 47326 - DNA, 489 bp, Homo sapiens
gcgcgcaatgaaccctcactaaagggaacaaaagctgggtaccgggccccccctcgagagtacttctagaattaattaaggcgggaggattgcttgtgcctgggaggtcaaggctgcagtgagccatggttgcgccactgcacttcagcctaggtgacagagtgagactgtgtctcaaaaacaaaaacaaaaaaaggggaaatctttatttttttttttaaacctcatactaaaaacaggtatcaggttatatgtaaatagaaactgccaggttgatcaattttaatttctcttttaatcacttatggatatcatatgaatgtcattcagctttttaattttgtcattaatcaagctgagtagtaaactgtcattttagtattggttcaaatattcaggggataattgttaaaatttcagtacccactttgtaaattgaaaatcatgcggaaaaaaaaaaaaaaaaaaaaaaaaaaaaggggccccccc

SEQ ID NO: 47327 - DNA, 415 bp, Homo sapiens
atgtaaatgccaagttaatgggtgcagtacaccaacatggcacatgtatacatatgtaacaaacctgcatgttgtgcacacgtaccctagaacttaaagtatgataataaaaaaaataataaaagaaactttcaaaaacaactgagaggaatcactggtttttaatatatttttaatattttaaaaatatttcaaatttataataaagttgtaagaattgcacaataaaattccaaatacccttcacttacaaaaacaaaaaacaaaaagctagaaagatctcaagttaacaaggtaacatctcaactaaaagaactagagaaccaagtgcaaacaaaccccaaagctagcagaagacaagaaataaccaagatcagagagaagtgaaggagatagaggcataaaaaaaaattca

SEQ ID NO: 47328 - DNA, 430 bp, Homo sapiens
  misc_feature 322, 324, 325, 326, 327, 328, 330, 350: n = A,T,C or G
ctggccgtcgttttcaccccggaataaggggaacacatgctgggtgccgggccccccctcgagagtacttctagaattaattaaggcgggaggctgactgtcgtaccagccctcacagctatggagaggcaggaccaagacgagaacccagactttctggctccaagtctagtgtgttttcactgcaccacagttacctcctcaaatgctcatttgtggcagagattatcaagatgaactttggtgatttctgattgcctaatgaattgagcagtataaaaaccattttctaatgctggaaaatcagcgttcaccaaggtcntnnnnnanaaaaaaaaaaaaaaaaaaanggggggccccccccggggggggcccccattcccccctaagggggggttttttcccccccctcctgggccgttttttaaaa

SEQ ID NO: 47329 - DNA, 233 bp, Homo sapiens
aagctgggtaccgggccccccctcgagagtacttctagaattaattaaggcggggaatgttgcaaaaacagagcaagaaaaaggtgaaaaaaataatattatcattcacttagtcatcaagcctgaaaatgaagtcattttgaccaagttttccccattatgctctaaatatgtcaagttcacttatatatatataaactattttaattatatatattcagaagagagtatct

SEQ ID NO: 47330 - DNA, 522 bp, Homo sapiens
cgcgcaattaaccctcactaaagggaacaaaagctgggtaccgggccccccctcgagagtacttctagaattaattaaggcggggtcaaaatcataatcttacatagatcacttcaaaatatttaaaggcatacattcttacatttaaagaaaaaaggaacacactcttgacttaaagattaaaaaacagacacaagtctctacaaacctggaggagctaaggctgacttggtctgataagagattaggctgttttagatgtggtaacccctggctaactaagatcactgttttatcttttaaaaaaaatctcagttcatagttgtctgtcctttttattctccaataaagtgaaaaagtgggcatttgtttgttaacacatttggtcacagaaaagatggtaaaaataaaataaaatgtaaatttctagccaggcgcggtggctcacctataatcccagcattttgcgaggccaaggcaagcggatcagtgaggtcaggagttcgagaccagcctggccaa

SEQ ID NO: 47331 - DNA, 507 bp, Homo sapiens
tacgccaagcgcgcaattaaccctcactaaagggaacaaaagctgggtaccgggccccccctcgagagtacttctagaattaattaaggcgggagagaatagatgttacagcagaagaagagcaataccaagacctgcttctcattatggaacttcttactaacctgctgtcaaaagaattcatagatttcagtgatacagatgaagtgtttagaggacatgagccaggtcaagcagcaaacagatctgtgtcagcagcggatgttgtgttgtatggagtaaacctaattctgcccttgatgtcacaggatctcttgaagtttccaaccctttgtaatcagtactacaaattaatcacatttatctgtgagatttttcctgaaaaaataccacagcttcctgaggatctgtttaaaagtctgatgtactccctagaattaggaatgacatcaatgagttcggaggtttgccagctttgcctggaggccttgacaccgttagctgaac

SEQ ID NO: 47332 - DNA, 663 bp, Homo sapiens
aaccctcactaaagggaacaaaagctgggtaccgggccccccctcgagagtacttctagaattaattaaggcgggcttccttaggtgacatctatgttgctaacctattcaaaacgcaacacaggctgcagaaatatgttacatacatttagtgttattcaaagatgctaacatgacttcaatatagaagtggaagaaatagtttaatgttcttagcattaataaagaattaacattgaaatcacttagcagatcacaaacatacaaataacccactgccaaaatattttaaacatttttaaaactcaaaaaattttaaattaaatttgtggaactcataaatctaaactcacttttagcttttgggggaatatatgataataaattagctatttaaagatttcagttactttttctggtaactctgtgactgcatacattaggctcaagctataaaacaaattaaacaaatatttattgtatttgacaattccatcagaaatttcccaactttctgtactattgaattataaattaacctaagtgctattatctgtgtttttttaaaatgaaagctttatctttgtttaataaaggtgtgtatttggaggaaataaaataatggcactattttctggatacattcttcaggtaatgaactga

SEQ ID NO: 47333 - DNA, 422 bp, Homo sapiens
  misc_feature 361, 362, 365, 366, 387: n = A,T,C or G
caagggaacaaaagctgggtagccgggccccccctcgagagtacttctagaattaattaaggcggggcgttgggtatagcataattgcaagtgtgagattctacaacctatggaataaccaatcttttattgtgtctataagaacctttactacaatataaatgaagccaaatgacatgcttatactgaataatcgacttagttatgcaatctcaaacacaattagactcatagaatttagcacattaaatgtagacagcacccagatggcactctgatgggaactccacaaatcattaaataaacaaataacagattgttcctaaataaccaaacctcctgggacaagaggaaatattcnnaannaaaaaacaaaaaaaaaaaaanggcggcccccccccgggggggccccctaatccccc

SEQ ID NO: 47334 - DNA, 394 bp, Homo sapiens
  misc_feature 287, 364: n = A,T,C or G
cctcactaaagggaacaaaagctgggtaccgggccccccctcgagagtacttctagaattaattaaggcggggctgggagttgaagattaaatctagcatctcatcactttaacaagccagtagtctattcgaatcgtttttacctcctttgaaaccatattaagcaagtccattatttcttagcatttctcaaacagctcttactgtcccgtatatgaaatagtacaagaaagtggggaagaaaggccgggcggggtggctcacgcctgtaatcccagcaccttgngaggtcgaggcgggtggatcacctgaggtcgggagttcaagaccagcctggccaacatggtgaaaccctgtctctancaaaataaaaaaaaaaaaaaaaaaaaaaag

SEQ ID NO: 47335 - DNA, 456 bp, Homo sapiens
tcacttgagtacaatagttcaagaccagcctgagcaccaaaagaagtagattcctaaaaaccaaaactggtcatttttaaagtgtcctagctgagtcttacagtttttacctctgtaccatgtctagtaatagaaaaggaattaaatgatcagtatactaaaatgcctaatggtgaatcatttactctgagggcatgtgtcatatctccttaactcttaaatagttggtctgtcatctaattaagaacgatgactctcacaaaagtttatcgtatctggaattctttttaaatgaaaaaaggccggcaacagtggctcatgcctgttatcccagcactttgtgaggtagaggtgggcggattgcttgaggccaggggttgaaaccagcatggccaacatgacaaaataccaccttcactaaaaatacaaaaattagcctgtaatcccaactactga

SEQ ID NO: 47336 - DNA, 493 bp, Homo sapiens
taaccctcactaaagggaacaaaagctgggtaccgggccccccctcgagagtacttctagaattaattaaggcgggtggatgctgtaaaagaaaacagacataagtagagggaaataaaaaataattccaacagtgtttaaccttaaagactccactgtaaatgaaagctacgcacctgacaaaaagtagacttgctgttcaatctacttgccacacaaacagcctcatttatataccaagtatactacaaagatagatcagtcaactaccttttgctcatttctattaggtcctttcattttgtgatatacttctttaaaagaaaagattgcgtgaaatttttccaactttccattcactaaaaaagattttttttttctttgggagacggagtctcgcaatataaaaaatagaataataaataaaaaagcggccgccaccgcggaggagctccaattcgccctatagtgagtcgtattacgcgcgctcact

SEQ ID NO: 47337 - DNA, 487 bp, Homo sapiens
gcgcgcagcgcgcaattaaccctcactaaagggaacaaaagctgggtaccgggccccccctcgagagtacttctagaattaattaagactgtgcactaacagtaaaaagaacattgggataaaaatgtgcagagtgttttattcattatgtggaggcatctttcctatatccaagtttaactaatactggtcctctacctgcttagattaactggtgagaattttataagcatttcttactatctgttataaaccaaaaatggcaatctttccacattttgacgtaataattttgagcttattacaaactaacataaaaaattaacaacacatattaccttataaaaattcaaacggaatgtattgaatattaatttaaattactgttattaatattacatgaaatacgcatgttgtaaaattttaaattactatctgggtaaataaactatacatattctgtccaggttgcaattgaaaaaaaaaa

SEQ ID NO: 47338 - DNA, 470 bp, Homo sapiens
  misc_feature 178: n = A,T,C or G
ttaatcctcactaaagggaacaaaagctgggtaccgggccccccctcgagaagtaccttcttagaaataaattaaggcggggggaaagccttataatgcagtgagtgtgggaaaagccttcacccggagctcatatcttattgaacaccagagaatacacactagggcccagtggttntacgaatatgggaatgccctgtaagggtccacctttgtgagccgtaaaaaggttaatactataaagaaactgcatcaatgtgaagactgtgagaagatatttaggtggcgttcacacctaattatacaccagagaattcacaccggggagaagccttataaatgcaatgactgtggcaaagcttttaatcgtagctcaaggcttacccaacatcaaaaaattcacatgggatagaccacttacatataaatgtgtatatatgtgaataaacctatagccttaaaaaaaaaaa

SEQ ID NO: 47339 - DNA, 562 bp, Homo sapiens
ctggccgtcgttttacacccggaaacaagtgttgaccattgctgctgggcgggcctttcctcgagagaacttctagaattaattaaggggggctaggggtgatagaagtcaagctcccaccccagctcaagtggatcaccaaagttccaaccccaacttgttctgaaagaagtgcatagtttctaatcccagggcaatggtgaaagagatttgggcagaaggaaatattttttggagtggtagaggatgtacatttattcgtaaaacattaactaaacatccagtgtgtgcccagcactagcagtgacagttccagtgtactatcgtaagtaaatgcctccactatcttgtgtgtgttttcataaaggtgaaaacataggaaaagtcagtatttcttacctaagctgaactgttgggctaattgatagctctatactcacagaagaacattaactactcaactccaattatatagaacttataataaataccccgagatttaatccataagaacacctatcatgaactaaaatataggttttataaggattttttttttaat

SEQ ID NO: 47340 - DNA, 378 bp, Homo sapiens
ataaagggaacaaaagctgggtaccgggccccccctcgagagtacttctagaattaattaaggcgggtgggaagagttaagaccacaatggcacttgacggagccaattcaattagcccaaacataccatctgctcttaaaatagatacctctatatttaaaagttacttgatatatgaattgatgaaaaaaaattcgaagaactaacatggatctgcgaagtgaagttgtctcaggcacaggacagtagtttggggaacctgtctgtctctcacattctctattgttaaatttttacaaagaatgtgttttactactaaaaaaaaaaaaaaaaaaaaaaaaagggggggccccccccggggggggccccaatttccc

SEQ ID NO: 47341 - DNA, 467 bp, Homo sapiens
tacctaaagggaacaaaagctgggtaccgggccccccctcgagagtacttctagaattaattaaggcgggaagaacaattaataattcctaattcaaagcagaggaagtcacaactcagcatgttcacagataaggatccagaaaataggaaagtggattgttcattcacacactgtagaggctaagacttagacaccaaatgccacacagtaaggagaaggaaacaaggttgaacgcacaggaactattcaaaattctgtatctggcactgtactcctttgtataatactccttttaataaagacagaagacaccagagtatacataaatggtgtgttaggtattgtagactgtactacctctgtactcttgttcaactctcctcttctcttttgcttccactattggggcatgaaaaattattcacccttctagcctctaatgcagtttcaataaccatgcatga

SEQ ID NO: 47342 - DNA, 449 bp, Homo sapiens; identical to SEQ ID NO: 46095

SEQ ID NO: 47343 - DNA, 431 bp, Homo sapiens
ataaagggaacacatgctgggtgccgggccccccctcgagagtacttctagaattaattaaggcggggacaaagtaaagtggcctatatgataataagatgacctgaggaccacttgccaaagaacttaataactcttcatgttaggaagaagtcattaatattcaagatcaatgtttataatatatctcacttaccctttctaggattcaaggtagtgttgcaggttagattctaataatggagcccttcttgcactgtcaatagtcacttgggaactttgcatagcaagtaattttccacaacccttagtttctcataccatttcttagaaaaaaactaatcatagaaaaaaaaaaaaaaaaaaaaaaaagcgggccccccccgggggggacccccattcccccttttagagaggtattttcccccccc

SEQ ID NO: 47344 - DNA, 338 bp, Homo sapiens
gctgggtgccgggccccccctagagagtacttctagaattaattaaggcggtcgaggggatgagggataaaaaggtgaaggaaaaaagaagtggatggagaattaaagaatgaaggagaattaacactgaacacccacccccatggagccagatcctggctaggtgtttgccatctgtgtttagtttaatgctcagcataatcctgcgtggcaggtatgttacccccatctataggtcaagaacctgaaacccagaaaaaaaaaaaaaaaaaaaaattgggcggcccccccccggggggggccccattttccctttttggggatttttttaccccccc

SEQ ID NO: 47345 - DNA, 407 bp, Homo sapiens
taaagggaacaaaagctgggtaccgggccccccctcgagagtacttctagaattaattaaggcggggtcccaggaggtcatctctctctccttaccctggagcctttggaatttggtttccaaatgtcctgaattcctgttcattaatatgtggctcagtacagtgcttgtcccggcagcaggagcttggttggtgttagtctgctggggaatgggataaagcagagaaatgtcaagctttcccttaaaaacaaaaaacaaaagcaaaccctcacatctcccaccaataacacaccattgttatccctgtacttaagacatgttgttgccgggcatggtagctcacacttgtaatcccgacactttgggaggctgaggcgggtgggtcacctgaggttgggagtttg

SEQ ID NO: 47346 - DNA, 293 bp, Homo sapiens
aattttccctcactaaagggaacacaagctgggtaccgggccccccctttagagtacttctagaattaattaaggcgggggttgcaatcctggtctctgataaaacagactttaaaccaacaaagatcaaaaaagacaaagaaggccattacatactggtaaagggatcaatgcaacaagtagagctaactatcctaaatatatatggacccaatacaggagcacccagatttatacagcaagttcttagagacctagaaagagacttagactcccacacagtaatagtgggg

SEQ ID NO: 47347 - DNA, 504 bp, Homo sapiens; identical to SEQ ID NO: 46603

SEQ ID NO: 47348 - DNA, 588 bp, Homo sapiens
aaagggaacaaaagctgggtaccgggccccccctcgagagtacttctagaattaattaaggcggggtagatgtgttcagtttgagatgcctgtcatatacgttgggaggtcccataagtagtagtagttggacatgtgggtctggaacgaaaggaaaaagtctgagatgaagatagaatttggattaagcatttagtgattgaagttaaaatgtgatgattttctccagggatattatgtggaataagagggtaagagatagagccctgaagtatgcacattttaccttgtggggaggggctgattgtggaagaacccgtggagactaaagaccagtggtcagaaaagggagctgaaaatctgggaggattaatggaagagtacctactcctgaggagttcatgcattggcattccccaaaatgattatattttcctctagccaccctagaacgcacaacacagttcatctattattgttttattaaagttcatgtaaaatgactacccattactttgttaacaacagaaatcttgatatttatgttttaaaaatattttttaaaaacatttttaaacaaatttttta

SEQ ID NO: 47349 - DNA, 515 bp, Homo sapiens
aaataaagggaacaaaagctgggtaccgggccccccctcgagagtacttctagaattaattaaggggggacttacaaacaggtgacttctccattcaccagagatgggacattatacactgacctacttccatattcactttccctgcttgattggaggtgagggagaaaaattagtgtataaggccgggcgcggaggctcacgcctgtaatcccaggactttagaaggctgaggttacaggcatgagccacagtgcccagcccaagaaaacttcttaaagatgtaataataacgcaccttattattttccaagtacttccatagatagtggcccacttctgaatatgaattaaatttccctttgtggccctttgttttttaataaatcttcatttctggggggacttacaaacaggggaattttcctttcaccagagatgggacatttttcactgacctacttccatattgactttccctggttgattggaggggaaggaaaaaaatagtggat

SEQ ID NO: 47350 - DNA, 356 bp, Homo sapiens
tcactaaagggaacaaaagctgggtaccgggccccccctcgagagtacttctagaattaattaaggcgggaagaggagaaatggaaatatacagctttaaggtcattgtgtgtgaaataggataattatacaaataaaccaggagagaagataaaaagaagtatcaacaaataatatcaaataatatagaaaaggaaaaaaagtaacaaaaaaacagatgtaacaaacagaaaaaaattggtaagctagtatccttaattgcatatacattaaaatataaatgatagaaacaacttaaaaggtaaggattgttggtccagcgcagtgactcacgcctgtaatcccagcactttggg

SEQ ID NO: 47351 - DNA, 547 bp, Homo sapiens
  misc_feature 488, 512, 513: n = A,T,C or G
actggccgtcgttttacaccccgaaataagtggaacacatgctgggtgccgggccccccctcgagagtacttctagaattaattaaggcggggttgctgagaagataaaatttataccatatatgcacagtgtctgacatataacaagaatgttatcaataatatcatcaacactataattagtttgcatgaaagcttaaaatgcatatatatttttaaggcaggtcactgtggtaagggcacacacgatgaggatacaacaaaacttggtaaactgaagccagactttttgtttcaaccttcaaagattcatttagtctggatctctctctctcttctcagctaggagaaaacattctgtaagccttacaatgcaaagttaagttcataattaattcagtaaagtaagattaccttcagcggggaaaaacgtgaaaaactgcgtatcgacattatttccttctcaatttctataataagcagtaaanaaaaaaaaaaaaaaaaaaaaaaanngcgggcccccccccgggggggaccccaattcccc

SEQ ID NO: 47352 - DNA, 471 bp, Homo sapiens
taaagggaacaaaagctgggtaccgggccccccctcgagagtacttctagaattaattaaggcgggggctttaattgtgaggttaggatctgaataagaatcctggagagctgactttgacaccaatacacactttttttttctcttatcctcatgctcaactcaatctcctctgaaacttgatgtccaacagctaggttttaagggttgcagattatctaccttatcacagtggccacacgtgtcagcctggtgatgatggtgtttcacgttcctcaaggacccctcacggtgcctggatgtcagtttgcataaagctttaaataaagctgctccgtatacatcagcccaagtagcagccacccataaacggtgtgtgctgtgcttttatgtcactttgacactttggtgacaactcttggaccatttcactcttctctaaagagtcataaaaactgataccaacaaaaa

SEQ ID NO: 47353 - DNA, 318 bp, Homo sapiens
ctaaagggaacaaaagctgggtaccgggccccccctcgagagtacttctagaattaattaaggcgggcagatcatttgagcccaggagttcaagaccagactgggaaatgcagtgtgactctatctttacaaaaaagatttttaatttaaaaaatttgagagcaaatcattaagagaaaaggagcctcccaatcctgtccccaaagccagcattactgaatgattttaacctcccttatcacatacaagcctctaggctattgtcatttcagaggatcatctgaccaagacttcagctgaagggaccatatgattcct

SEQ ID NO: 47354 - DNA, 453 bp, Homo sapiens
gctgggtgccgggccccccctcgagagtacttctagaattaattaaggcgggttcagagcacgataatcagacaagtgtttttgattaataaacacttaataataagcagtgggtttttgattaataaaacaccacacaggtatcaaaggaaaagtaaaggggagggtaaagtaaaaagaaatgaaatttagtatcagacaacagatttcagagcaaaaaatattattagatattacccaggatcaataaaagtcatttcctaacaataaaggagccaattcttaacagccctacaatgctgctcattcacaggaaaaaaaatgggcaaatgaaaataataaatcatctgctttgagttatctttggtttatggaattaaaaataaatttttaataacggggaaaatacttcgttgggagagaatctatatgaatattttgatatttctgcat

SEQ ID NO: 47355 - DNA, 490 bp, Homo sapiens
ttaaccctcactaaagggaacaaaagctgggtaccgggccccccctcgagagtacttctagaattaattaaggcgggaactcaggctctgaagttaggatttctggtttgaaacccaactcaacaaaatgcgcttggggtatcacctgcaaagggcatcagaagtctttgtatggtgatggaaatgtgcttatgtagattgggatggtagttacatgagtatacatttgttaaaacataaaattggctggacagtggctcactccagcactttgggaggccgcggcaggtggatcacctgaggtcaggagtttgagagcagtctggccaacatagcgaaacctgtcttctactaaaaatataaaaattagccaggcatggtggcacacacctgtaggctgaaacaggagaattgcttgaacccagaaggcggaggttgcagtgagccgaaatcgcaccactgcactcctacctgggtgacagagcgagac

SEQ ID NO: 47356 - DNA, 471 bp, Homo sapiens
aagctgggtaccgggccccccctcgagagtacttctagaattaattaaggggggacttacaaacaggtgacttctccattcaccagagatgggacattatacactgacctacttccatattcactttccctgcttgattggaggtgagggagaaaaattagtgtataaggccgggcgcggaggctcacgcctgtaatcccaggactttagaaggctgaggttacaggcatgagccacagtgcccagcccaggaaaacttcttaaagatgtaataataacgcaccttattattttccaagtacttccatagatagtggcccacttctgagtatgaattaaatttccctttgtggcctttgtttttttaatagatcttcatttctggggggacttacaaacaggtgacttctccattcacccagagatgggacattttacactgacctacttccttattcacctttccctgct

SEQ ID NO: 47357 - DNA, 434 bp, Homo sapiens
aaagggaacaaaagctgggtaccgggccccccctcgagagtacttctagaattaattaaggcgggagaagatggttaagtataagggttgttaattcagtagaattgacatatttcattaccaaatgagaagaaaaaggcgatattttaagtaactctaccatgtgtcatgcatacattaatctaagaaggtaatatagaaaggaaaattaaagaagaaaaaaaattaaatattaggtattggaagtacctgttaaaagttcagaagttctcagtagacagatgtatttgtagaagttttaaagaaataagtagtaacaaaagtgatgtgtgataaccaaagaagaccaatttcagaacactggtaaaaataatgtttaatgagcgaatcaagcaactgaaatgtatatgttctgcaaagacttgtacaataat

SEQ ID NO: 47358 - DNA, 482 bp, Homo sapiens
aaccctcactaaagggaacaaaagctgggtaccgggccccccctcgagagtacttctagaattaattaaggcgggctttagctcacccaggaacatgattcccttcctcctctcccacattcactgtcaaagtcagcaggctgttttcttagcaggaagagtgtaaaatccagggcggcatttgatttttcttggatttttcattcaaatttaccctcaaggataagaagggaagcaaggagggagagaggccaagcttgggccacgcacagcgtgagcagtcctcagttccactcctgctcactgcatccagactgcagtcatcgtacgtggagctgggcttcacacaaccagatgaccaacctggttgagccaccgtgagatccacatgtgggagggcacagccccatgtgtaggggccagggagtcactggaggctggtgcctggagcacccacagttccctgtccttccccagcagcc

SEQ ID NO: 47359 - DNA, 407 bp, Homo sapiens
ggaacaaaagctgggttccgggcccccttctcggaggttttctagaattaattaaggcgggggaatgattagaatagcacaggaatgcctcaccctgccagaaatagacacacagccgctgcctacctgtcctgtcttgtcgttcccaggagcacagaacaactagaacccgtcatcttcgtaatgccaacagacatgttttataggttcatgtagataactaggttttatatagaggctgaggcatgagaatcgcttgaacccagaaggcagaggttgcagtgagccacgattgcaccgctgtgctccagtctaggtgacagaacaagactgtctccaaagcagacagacaaacaaaaaaactcgtttacaattcataatctcttgacaacttcatgatcctgctt

SEQ ID NO: 47360 - DNA, 394 bp, Homo sapiens
aattaaccctcactaaagggaacaaaagctgggtaccgggccccccctcgagagtacttctagaattaattaaggcggggtttgcagtaagccgagatcatgccattgcattcagtctgggtgacagcgtgagactgcatctcaaaaaaaaaaatttttttttttaaatatcaaaattgaaaactagtattgtggtcatctgcctcaaattgtgttaccacacgggagacttagcaactcagccagattcttctaaacacattttttataataaaagtggtaaaactacattaccaaaaagaaaatagtaaacttacctaaaatccactatgctaacccaccctttgtttttttttttttggagacagcctcactcttgcccggaggagtggtg

SEQ ID NO: 47361 - DNA, 442 bp, Homo sapiens
ctggccgtcgttttacatccggaaacaagtaatacctttgattcttgccggtggttttccctagagaaaaagaagaacccttaacgcggggcggggggggggaaaaaaaaaaaaaaattgtgttgaatgctggcctggagcttattaaatgaaatttgggctgtgatatggattttagtcactggagtgaaaaagattattaaatttatgtatgtggaagatatctagggaaaatatttgaagagaaacagctccaggaaagcatattaggaaaaaacacatgcataactactattgaaggaatgtaaatctatacagccaactttaaaaacacatccagaaaagctgaagaagagaagaatactttacagaaaaaagagaaagaatttcaagaaagtcaaagtcatttaagatatttgagaactacagagaagtaaattaa

SEQ ID NO: 47362 - DNA, 462 bp, Homo sapiens
ctcaagggaacaagagagctgggtaccgggccccccctcgagagtactagtacaattaaaaaaggcgggggcgggaggtgctgaaagggaatagtttgtgttatttttgtttctcgtttcttcagaagtagaagtgtgagttgtatcagcaacatattcactgtagcatattaattcctcatgtttgcaagacccttttcaaggtgcctactttcacagatgtgaaatctcaaatgcctacacaacagccctgtatgacatgtaatcctatttctggatgagaaaatagagacttaagaagataagtgagcaaccttgtagaggtaccgctgcttaaaaacagcagaacgttgaaactggggtgtgctgagttgggcatacttcttcactgcaatgcctctcggggttttgatatcattggctccaaaactttctagttctcttactgtgcggctgtttgga

SEQ ID NO: 47363 - DNA, 488 bp, Homo sapiens
gcgcgcaattaaccctcactaaagggaacaaaagctgggtaccgggccccccctcgagagtacttctagaattaattaaagcggggtggtatactcagcctatgtcatctgtgtcctggctagggcatttgatgagaaactctcaatttcaacaaccgtagaaggtcttgtctattaggctgaacatatactccacaactctacacaatttccttctgagaaaagtccgatggtgggcaatgaagagatagatgacaacactccatatgcattcattcccacactccctatcttcaacacagaaatgtggctctcgctaggcgtggtggcttacacctgtaatctcagcactctgggaggctgacttgggcagatcacctgaagtagggagtttgagaccagcctgaccaacatggagcaatcccgtctctactaaaaatacaaaatcagccgggcgaagtggcacatgcctgtaatcccagccactt

SEQ ID NO: 47364 - DNA, 366 bp, Homo sapiens
tcactaaagggaacaaaagctgggtaccgggccccccctcgagagtacttctagaattaattaagcgggctcagaaattaatcttggctttaggaagtctaccataaacccgcaaaaggaaataagtgaaaatctaaataaatgtgttgaatatatgcagtgagtgtttgcaatagtgttataagttggttccaaagatttcaatatagacggatgtttccttttgctgagctgcactccagcctgggcgatggagtaagaccctgtctcttaaaaaaaaaaaaaaaaaaaaaaaaaaggggggccccccccgggggggacccccaatcccccttaaagggggttttttaacccccccccctgggc

SEQ ID NO: 47365 - DNA, 527 bp, Homo sapiens
ttaactcctcactaaagggaacaaaagctgggtaccgggccccccctcgagagtacttctagaattaattaaggcgggagtgaaactggaagggggcacaaggctttctgaggtgtgctcacaattttctacttcttaagcaagatagtggaatgcagaggtattcatttgtgatcattcatcaagctgtacatttacaatttgtgcccctttctgtatgcatattacactttttttaaaaaaaatattaaaatatcaggtcacgcaagggagctcaatcctgtaatcttaacactttgggaggttgaggcaggagtatcacctgagcccaggagttcaagaccagcttagacaccatagcaagactctgtctctataaatttttttttaaaattagccaggtgtggtagtgcacacctgtggtcccagctactcgagaggctgaggtgggaggactgcctgagcccgggaggtcaaggttgtagcaagcttgaactcctgggctcaggcaatcacaccactgcact

SEQ ID NO: 47366 - DNA, 313 bp, Homo sapiens
  misc_feature 203: n = A,T,C or G
ctgggtgccgggccccccctcgagagtacttctagaattaattaaggcgggagggaatggatttggcagtttgaggagcttggagaagacttgaaatagttgtagaaaatgagagtaagtgttactggggaaatgtggaattatatattaagtaaaacaagctggttgtagcaataactagttattatttttacagataagcnaaaaaaaaaaaaaaaaaaaaaaaaagggggggccccccccggggggggccccaaatcccccattaagggggttttttaaccccccctcttgggccctttttttaaaaaga

SEQ ID NO: 47367 - DNA, 563 bp, Homo sapiens
cctaaataaagggaacaaaagctgggtaccgggccccccctcgagagtacttctagaattaattaaggcggggttagtgagggaacggagggcaggacatacggctgctctccagaatgggagcaaaacacacagatttggatactaacactgtttttaatatcattttgtcttattacaagtaacagctactgctggaggagacagttctgcccagtgggtaagagttagatggcctgagcctgctgcacacagctgtgtgttattgggacttgagtttcctcatctgtaagtggggacaactgacagtacctcccatgtagcattgtcatgaggattatatgagccggttcatctccacagcttaaatcagtgcctagcacattataggcacctgataaaataacatcttgcaattctatttttaatttttttttaatttatagagatgggtcttattatgttgcccagcttggtcccaaactcctgggctcaagggatcctcctgcctcagtcttccaaagtgctgggattacaagcatgagctaccacgcccagccaca

SEQ ID NO: 47368 - DNA, 447 bp, Homo sapiens
gggtgccgggccccccctcgagagtacttctagaattaattaaggcgggtggatcacctgaggtcaggatttcaagaccagcctggccaatgtggtgaaaccccgtctctactaaaaatacaaaaatcagccaggtgcggtggcacacgcctatataatcccagctactcaggaagctgaggcaggaaagtaaaagaaaaaattataaaaataaaaagaatttttttaaaagtttaaacaaacacatctttaagaactaaaatgatgacaacaacaaaggacaaaaagacaatgaaaataatgaagaaatacaactaccaaaaatgggaaaggttctactttgacaccaatccaaaaaaaccaattaaaacaagctaccattttagattactcaattagcaaagaattttttgcaaatgataataccaaatgctgaaagggttttag

SEQ ID NO: 47369 - DNA, 484 bp, Homo sapiens
  misc_feature 457, 458, 459, 463: n = A,T,C or G
gcgcgcaattaaccctcactaaagggaacaaaagctgggtaccgggccccccctcgagagtacttctagaattaattaaggggggaggttagagtcagcgacataaataccactagatggtatttaaaattaggagaatgaaagactaactgggagtaagtgtagagaaagaatataaggttatttcatatggcttcttgaggaatcccagcctttgcaaggtgggatgtgtaagccagctgcagtagtgtgcatctgtagtccagttactcaggaggctgaggtgggaggatcatttagcccaaggagtttgagcctggcctggacaacatagagggattacatctctgaaaaaaatatttaaattacatttaaaacaaataggattgactgtgagaggaagaccaggcaaataaaaacagaaattagcaaccagtgaaatgggagggaacaaatnnntatnttttttcaaccaaaaaaagcg

SEQ ID NO: 47370 - DNA, 337 bp, Homo sapiens
ctgggtaccgggccccccctcgagagtacttctagaattaattaaggcggggcaagaaagaattctgaggaaatcagttaaatattggatttttaaatatatgacactgctctcaattactaggtgctaataagacatacataacctaccatatagccaaggttttaattatcagatttataatttgaaactgaaggaactttagttcataaaagtgaaaaagataaaatgaagtccaatgaaagtaaaatattatctttgcttccttgattaaatctatagttatttttactaaagtatgatatatgttcccattatttaattttgtttagggaag

SEQ ID NO: 47371 - DNA, 332 bp, Homo sapiens
gaaacaaaagctgggtaccgggccccccctcgagagtacttctagaattaattaaggcgggtgatttgatatatcattaatgttttgatatactcactatacaaattttaatgtcttggtagactcatttttatgttttgatatacaaaattaatgtttgatatactcaactttctcttttagaggtcaaaaaaccattacaatatctcaattttttgtccttccttccccccaaccgaataatcaattttcaaccttttgaaataaatgattatttagaggaagaagtttcttacttggccccaccaaaactggtgaaagttactgaacta

SEQ ID NO: 47372 - DNA, 380 bp, Homo sapiens
  misc_feature 333: n = A,T,C or G
cgggccccccctcgagagtacttctagaattaattaaggcaggttactcttctaagggttttatttcatatcatcttctgaatgaatgatatcttattccaacggggcaacccagtattctactactgaaaattaaatgttgatatgagctatgtgtaatttaatcctttgtccacactaaaactacgtgaaatttcaaagacagattttggccaggcacagtaatcccagcacttttgggaggccgaggcgggcagatcacaaggtcaggaattcgagaccagcctggctaacatggtgaaaccctgtctctactaaaaatgtaaaaattanccgggcgtggtggcggatgcctgtaattccagctactcgggtggctg

SEQ ID NO: 47373 - DNA, 488 bp, Homo sapiens
  misc_feature 444, 445, 447, 468: n = A,T,C or G
ctggccgtcgttttacatcccgaaataaggtggaacacatgctgggtgccgggccccccctcgagagtacttctagaattaattaaggcgggagacagcaataaaggaaacaaggtactaaaagagactcattaaacggttaaaatggtaatggtagctatatcactatcaataattacttgaaatttcaatagactaaatactgcaatcaaaggacatatgtagctgaataaatctttttagaaagacccaaatacactgttcacaaaaaaactcactgtagatttaaaaccacacatagggtaaaagtgaagacatgggaaaatatattctatccaaatggtaacaaaaagagagcagggataaattttcaccatacacaaaaaattagctcaaaatagattagaaacttaagtgtaaaatctgacactgtaaacatattannanaaaaaaaaaaaaaaaaaaaanggggggccccccccccgggg

SEQ ID NO: 47374 - DNA, 440 bp, Homo sapiens
  misc_feature 384, 385, 386, 387, 389, 391, 423: n = A,T,C or G
taaagggaacaaaagctgggtaccgggccccccctcgagagtacttctagaattaattaaggcggggaagggtgtgaggggacagaggactaaatttactgctaacatgaatgttgtttaatatcaggctatgattaacatacatctgaaatttcaactgtgaattgttgttacgctacaaatatgtatacccacagaacagtacatgtcctggggcaaggtaaatggcaggaaatttcacaatccactccctgctccctcatcgaatctacagcagaggaaagtgttgaaacaagttttaggtgccaggcttagccttttgcttttcagttgaatatttatgttgacacgccaactttctcctattagttatttagtgttagnnnntntntttttttttttggcggggcaggggttggcggnggcagtcctttgaacta

SEQ ID NO: 47375 - DNA, 563 bp, Homo sapiens
tcactaaagggaacaaaagctgggtaccgggccccccctcgagagtacttctagaattaattaaggcgggacccagtgttcaggtgattgattctgatgcacactgaagcttgacatctaatagtgtcttccaaaagaggaatgttgccaatatttcattcagctttctcttctacttgtcactgacttcgtagctatctttttaaagtgtttcagtaaccatgtgaactgtaatcacttggctggcagcgagtgcaaatttgaacaactttctgttttgttctcttctccaacttcattgacaatatcactcaatataatacattggaaaccattatgttgcatttgttccaggaaaattcaattggtttaccacagagatcactttgatttgttaggaagtgacctaagagcttcatattacaatttaaccaagtttcacagcaaaaacaaacaaacaacaacaaaaaaaaacatggaaaattagcggtagactcttaggccactacaaattttttttctgatattcattatcatgcatacaatttgccctttacattttt

SEQ ID NO: 47376 - DNA, 459 bp, Homo sapiens
ccgggccccccctcgagagttcttctagaattatattaaggctttgactgctttgtagggtggggtgcaggtttggctcattttctagaaaaggcgtagcatcgttttcagatcagtaactttgggtcagacagagccagggttagacacttcctctgtgaccttgagcaatgtaacctcatcatgcctcatttatctcagtgaccaagtggggctaaaaatagtgcctaccttgtggggtccttaaagtataaaacaaaccaagcttatgcagcaaagtacctagtgaagttcccagcacaaataagtgctcaatgcatagtaggtagaagtagtaatagcagtagtggtggtggtgagagtattttgattagtgggaagaatatgaaacttttattttgacaacattctagcctaggcctggaatatgacggctagaattcgggtggtgacaacggt

SEQ ID NO: 47377 - DNA, 410 bp, Homo sapiens
gcgggttgatactcaggtttggataaaccacaccaagtgacatattaatttctctactggcttcttagaagaaagatttgaggtcagaaaataaaggaactataggtacccactcttttagtcatctgactatttgatttatttgatgagtgatctcagttgaccctcccaggcactgaaccatcagagagttatgctgctttgtgataagaaaccttgagagatacctaaatcttcttttaccactgggagtttcatctattctggaataaagaacatttttatgtatggtgtgtctatctagatagctgtagaaatattcagaaaagattcacagacttaaattcattctgacaaagatcttaaaattgtataatatttaccaagaatatattagataacaccttatt

SEQ ID NO: 47378 - DNA, 306 bp, Homo sapiens
gcacgtggttttacaccccgaaataaagcggaacaaaagctgggtagccgggccccccctcgagagtacttctagaattaattaaggcgggggaaaaagtaaaagctttgactgtggaaaatatcagtgtaaccaaaagataatataacttttataatcggggcacacactttactctgagtttccgggcagccacagcaaaaaaaaaaaaaaaaaaaaaaaaaaagggggcccccccccggggggggacccaaatcccccctaaaaggaaattttttccccccccccttgggggggttttttaaa

SEQ ID NO: 47379 - DNA, 479 bp, Homo sapiens
aagggaacaaaagctgggtaccgggccccccctcgagagtacttctagaattaattaaggcggggggatgtgtgaaatttaactaacttttgtatactttgcaattttatgtcagtatctttttttgtttttattgttatcactgtagggaatgtttatagtttgactagttagagtgtatttattagctctgatttggagtcagacaatagactattgtcatgggaaaatagatgttttaagtgtgtcgtaaatttcagataacgttacagtttgacccaatctgttgttatttttttcttgttttctgaattatctgcatttaatatataaccttggtttgagttctccttactgaaggcatagctttgttttttgttttttcaattgattttaagaagaaattcctattattgtcatgaacactggacatactagaaactttcttttcatggtaacaaaggtatttggaattcttt

SEQ ID NO: 47380 - DNA, 508 bp, Homo sapiens
  misc_feature 457, 458, 482, 483: n = A,T,C or G
gcaatataaccctaactaaagggaacaaaagctgggtaccgggccccccctcgagagtacttctagaattaattaaggcgggagaaaccccctaaattgtgacaattaacaatgatttcagggaatctctgagcctattctagttgcccatttaaaacaaaacgaaaaaaaaaaaaaaaaaagggtaaaattggcccgggcaaaggggttaaaaaaaaattttacctggaccagggatttctaaaccaccgggggaaaaatgggaaaaccccttttttcccaaaaaataaaattaaaaatttttttccccggggccagggggccaacccttggaattcccccctctttaaagggttaaaagggaaaaaccttttcacttaaaagggtgggggttgttttgacccttacttaacccatggttcccccccttgggcaaaaaaaaaaaaccccccctttnnaaaaaaaaaaaaaaaaaaaaaaanngggcgcccccccccgggggggaacc

SEQ ID NO: 47381 - DNA, 487 bp, Homo sapiens
aaagggaacaaaagctgggtaccgggccccccctcgagagtacttctagaattaattaaggcggggaggcagcagtatgttatgatagtggctataaatagcaaccgtactctagcctgggcaatgtaacaagaccccatctccaaataaaaccaaaaatttaaacaaaaaaataaaatttaaaaagaaagtgtgcttaaatttctaaatgtttccactcacattcgcatgctgccatttaaattatttgaaattctaaattaaaagctggatatgaatggtttttgagtactaaaataactgtagaagtattttaacttcataaaagatgactgaaaaccagcaacaacaataaaaaaataatggcatgccaggaggagcctagcaaaaatggtttgcaagcttagcctgagagtcatctaataccagtatatgaacttgtgatctacctcattctccaaaagtagtgtgcaaaaaaaaaaaaaaa

SEQ ID NO: 47382 - DNA, 568 bp, Homo sapiens; identical to SEQ ID NO: 46693

SEQ ID NO: 47383 - DNA, 455 bp, Homo sapiens
agggaacaaaagctgggtgccgggccccccctcgagagtacttctagaattaattaaggcggggtaatcaacgtaaatactagattttcaaaatcctgtttttattgttgaattatttgcttactagtcttctcactagaaataccataaatatagtaatatctaaaagaagaatgtcttggtacaagaagatgagatttataaataagaactagatataattaacatagatttttttcaattgaccagagcaatattttgtatatgcatgcatctgtgtgtgtgcgcgcgcctgtgtatatacatagctgtaaatccataatcccagcttcaaagatgaggaaactaaggcttaggctaaggctaaaagaaattaaataatttgtctgagactattcacctaaatcatgctgcctccctcttatctgggtgagattaatttctagtcgtaccct

SEQ ID NO: 47384 - DNA, 336 bp, Homo sapiens
accctgactaaagggaacaaaagctgggtaccgggccccccctcgagagtacttctagaattgattaaggggggtaagaatattctttttgcttccattttcttaagtttgaaactagatctttagcaatgatggagggaagacagtattaggattttgagaagagaaggtatgaaatagttgtgtcaagaacttaaatttactaaggaaacagtgggttaggatagtgttgagtacctgtttgaagtttgtgcttctcaatttaagtcaacctgattgtatgatttttttctccaatgtttagttgctcattttcaggctgagaacaagtgttat

SEQ ID NO: 47385 - DNA, 530 bp, Homo sapiens
aagggaaacaaagctgggtaccgggccccccctcgagatacttctagaattaattaaggcgggatgcggaggttgcagtgagccgagatcacgccactgcactccagcctggatgacagagcaagactctgtttcaaacaaacaaaaaaaaaattcaaattaaaaaatggacaaaagacatcaacagacattttactgaataaaatatacagatggcgaataagcacaagaataagcacaagaaaaggtgtccaacttcatccactattagagaagcacaattaaaatcacaatgaggcccagtactttgggaggctgaggcaagtaaatcgcctgaggtcaggagttcaagaccagcctggaccagcctgggcaacacggcgaaaccccacctctactaaaaacacaaaaattagccgggcatggtggtgcacacttgtaatcccagctactaggggaggctgaggcaggagaattgcttaaacccgggaggcagaggctgcagtgagccaagactgtgccactgaact

SEQ ID NO: 47386 - DNA, 469 bp, Homo sapiens
aaagggaacaaaagctgggtaccgggccccccctcgagagtacttctagaattaattaacgcggggggatgtgtgaaatttaactaacttttgtatactttgcaatattatgtccgtatctttttttgtttttattgttatcactgtagggaatgtttatagtttgactagttaaagagtatttattagctctgatttggagtcagacaatagactattgtcatgggaaaatactatgttttaagtgtgtcgtaaatttcagataacgttacagtttgacccaatctgttgttatttttaacacgttatctgaattatctgcatttaatatataaccttggtttgagttctccttactgaaagcatagctttgttttttgattattcaattgattttaagaagaaattcctattattgtcatgaacactgtacatactaaaaactttcttttcatggtaacaaaggtat

SEQ ID NO: 47387 - DNA, 460 bp, Homo sapiens
  misc_feature 444: n = A,T,C or G
ctaaagggaacaaaagctgggtaccgggccccccctcgagagtacttctagaattaattaaatcagtttcacagtattgtgttttggttttggaaatcacttcagacctataaccaatattgagtgagttgaaaagaattaattacttccaaatacaaggcactttacattcttctaaggagaggatgcaacacaaagctatttggtcagcttgatacaaaagctcttaggtgtgctcatgaagtaagtcaaatgtatacattttacaaccacatattaaatagaattagttttttctttttccttcccatttctttgaacagtcttattcagaatcttcatcattagcaactttgtcatcattggagcccttttctctagaacacatcagcctgggtgacagaatgagaccctgttaaaagaatcttttttttttttttgggnaaaaaggacctaaaac

SEQ ID NO: 47388 - DNA, 387 bp, Homo sapiens
ccccccatcgagagtacttctagaattagttgaagcgggaggagagagtcttccttgagaaattctaaacacaagcacatgtttatatgattttggggtcaaagaccatattatctgtgtggccgaaacacccttcactttagtttggaacagtttgggttattagtatacacaagtgcctggaagaactgacacaaatcttctttagagaagagtattttaaacacagacttcccagaagtgtatatgagctcataatttaaaatcaataaaaaattaaaatgagatgccattgtgcacctgtaagaaagagtagcttaaaatctaaaataccgtcaccaccagatgctggcggggatgtgaaaaaaaaatcatcaatacgtggga

SEQ ID NO: 47389 - DNA, 452 bp, Homo sapiens
taaagggaacaaaagctgggtaccgggccccccctcgagagtacttctagaattaattaaggcgggaaggtcaggaaggatttcttaggagagaagggtgtgaaatggcaggattttgaaaatgcagaatggagggaaggctaggagccaagacagagacaagaagttctgcctttgacagtaatttgtcaagccactttgcctggagcatattccagaaaatgatttatgctggacacttgggtaaatagacccagctgctggagggtgggaagcaacaggcctgcagagtgtccctccccaaccccacagcctccctagctcctgcccagcccctgcccatcccctctgcaggctgaggagaaaaaaaaaaaaaaaaaaaaaaaaaaaaaaaggggcccccccccggggggggccccaattcccccttttggggggttttttaccccccc

SEQ ID NO: 47390 - DNA, 473 bp, Homo sapiens
aaccctcactaaagggaacaaaagctgggtaccgggccccccctcgagagtacttctagaattaattaaagcggggtggggaagcagcccggtgggcgtggagctgagtttgaaagggaagggttttgaaaagcctgagggctggagccagtgatttagagcatctggaagccactgagcctgtggcctaagtggaagtatagatactaacagaattcagaaaacgttgtccactgcctctagtctgtgggaattccagtagatgaaagccaaggggtccattaaaatggattccacccatgtaagaaacctgcacatgtaccccccaaaccgaatagctggaaaacaacaacaaatcgaacaaacaaaaaaacataatacaccaacaaaaagctaacaataaaatggatccctagagcctgtaaagaagctctaagctgttcccaccggtggcctgggagagagagatctag

SEQ ID NO: 47391 - DNA, 474 bp, Homo sapiens
aaccctcactaaagggaacaaaagctgggtaccgggccccccctcgagagtacttctagaattaattaaggcgggggtcttattaaaatccagaaaattcatgtcttaaagtttgataattcaatgtgactttataaactaagtcttttaaaatgtaatttacataaatacatatttttagtggaaagggactataatttgaaagagtgttgatcactgctctttaaaaggagacaaaatacctttgctctgtagttggctataatatgtgatcattcacaaggttaccaatttacttgccagtttatttcttcttttcaataatcaagaccctgtcattttaagtctccaataaatccatcattctagagaagtacttccttttttaagtcaacaagacatcattttgaaactcatgccaatcattactaaaaatatttaatatttgttatcaaatatatgtactgtacaaaa

SEQ ID NO: 47392 - DNA, 538 bp, Homo sapiens
cctaactaaagggaacaaaagctgggtaccgggccccccctcgagagtacttctagaattaattaaaatcaactactagcatgattacattggaatggcaggaaatgacatctcagccatttgagggcttccctcacaagacatgactcaggattctaggatcttgcccaatgtgccaaagcatggagagtgcctgtcctgtcatctctcttccgtctgcatgagtatctgcgggatgcccagaaaagcttactctagatggggctgctccatggcttctgtctgacctacaatgccaaaaatatttgagaggttaggagaacacagtatctcaagctatacctcaacacatagccctcctgtctgagctttctcttctggccactataccaagggtattcaagatcacaggaatcctgtcatcctcacacaccccctttttagtgatagggaggtatttgtctcatccttcttgttgctctcaacgtgtctttctcctcttctgggaacacctaacagaatcttgaagagtttgaac

SEQ ID NO: 47393 - DNA, 347 bp, Homo sapiens
aaagggaacaaagctgggtgccgggccccccctcgagatacttctagaattaattaaggcgggcggaccacctgaggccgggtagttcgcaggccaaactgacacaccgtggatagaccccgtctctactgaaaaatacgaacttaactgagcttggcggtgcatgcctgtaattccacctactaacgtaggctgacgcaagacaatcgcttgaatccggtaggtggaggttgcagtgagccgagatcataccattgcactccagcccaggcaacaagagtgaaaccctgtctcaaaaacggaaaaaaaaaaaaaaaaaaaaaaaaaaccgggccccccccgggggg

SEQ ID NO: 47394 - DNA, 477 bp, Homo sapiens
taaagggaacaaaagctgggtaccgggccccccctcgagagtacttctagaattaattaaggcgggggttataaactgtagagacaccttgataagttattgtgcacatgtatggagagcacacgcacaatattgatcactgctagatacaaagttcagacttcaacagagatctgattctgatttttctccatcactcttcagtctatactcacagtttcataattaaagccttattatttcgtataaggaccataccttatgtttatcctttgttaaatgtgtgtgtgtgtttatgtatgtgtgtctggaaggatagaattttatcgttattactcatttaacacttagtacaaaaatattgcagacccttccctataaaaaggtgagaggagaaggtagggagaatagaagagaaggaaaagggggacactggtctcatgaaaatattaaaagacaagaaaaattatcatgaga

SEQ ID NO: 47395 - DNA, 513 bp, Homo sapiens
tcactaaagggaacaaaagctgggtaccgggccccccctcgagagtacttctagaattaattaagtggccagtatcatacataattaatattagctgtgtacacacgcaaggggcttactcacctgctacttagatgctgctctcttaggctgattaacaagctctttgcattggtgtgtgcatcactcatttgctacttgcagaagacatcttttgcctttacgtttcctacctgtatttctttttcttttctttctttcttttttttttttgagacaaaatctcactctgtcacccagggagtctagctctgtctccccggctggagtgcagtggcacgatctcagctcactgcaacctctgcctcctgggtttaagcaattctcctgcctcagcctcctgagtagctgggattacaggcacctgctaccacgctcacctttttttttttttgtatttttagtagagacggggtttcactatgttggccaggatggtcttgatctcctgac

SEQ ID NO: 47396 - DNA, 396 bp, Homo sapiens
tacatccctgaataagaggaacacatgctgggtaccgggccccccctctagagtacttctagaattaattaaggcggggcacccattcccccagtatccccatctcaccgatggtatccctgtccacctggtgtttcaccctcaggcctcaagaattattctatttcttttatcccccaacacacttcctaatttagtgttgcagcttctacctcgggaatgtatttccagtgggccctcctctttccatctccagagataccctctgacccggcctccctctccgggctggagagctgcaggagcccccttcctgggccctgctagtcctgggctcctgtaaataaatctgtcacttgtcagcgtggaaaaaaaaaaaaaaaaaaaaaaaaaaaa

SEQ ID NO: 47397 - DNA, 521 bp, Homo sapiens
  misc_feature 184, 185: n = A,T,C or G
agcgcgcaattaaaccctcactaaagggaacaaaagctgggtaccgggccccccctcgagagtacttctagaattaattaaggcgggggtagagcaggaattggttttccagcattgtgtccgtaaacctgagttagaataagatgtaacggaagccacgataaagactcggtcaaatcctgcnnaataaaaaaaaaaaaaaaaaaaaaaaaaaaaaaaaaaaaaaatccaaaaaaaaaaagcggccgccaccgcgggggagctccaattcgccctatagggagtcgtattacgcgcgctcactggccgtcgttttacaacgtcgtgactgggaaaaccctggcgttacccaacttaatcgccttgcagaacatccccctttcgccagctggcgtaatagcaaaaaggcccgcaccgatcgcccttccaaacagttgcgcaacctgaatggcaaatggaaattgtaagcgttaatattttgttaaaaatcgcgttaaatttttgttaaataagctcatttt

SEQ ID NO: 47398 - DNA, 462 bp, Homo sapiens
accctcactaaagggaacaaaagctgggtaccgggccccccctcgagagtacttctagaattaattaaggcgggaccatcccttgaggccaggaatttgagactagcctaggcaacataacaagacctttgtctcttggaaaaaaataaataaataaatattattagaagtgaaaatggggatgttgttacaaatgctgtggagattgatgagaaattatgaacaacttaataataaatgggaaaatataaatgaagtaggcagttccagaaaatgtaacttttcaaaagccatgtaatggaaaatataaatggtgggatgttgatgtaagaaatcatgatgcccagagacttttgccaaaccttcaaaggacagatcattacaattttacacaaaccattccacagtatattccacttatatactgtggaattggcccttactgcccttatcaaatttaac

SEQ ID NO: 47399 - DNA, 317 bp, Homo sapiens
acaaccctgaataaagggaacaaaagctgggtaccgggccccccctcgagagtacttctagaattaattaaagcgggtggatcacgaggttagaagatcgagaccatgctggcaacatggtgaaaccctaaaatacaataatactaaattattttttataaattatttcttataaattataattattataaataatactaaattattatttttgtatagtaaatactaaaaatacaaaaattatctgggcgtggtgacaggcgcctgtaatcccaactacttgagaggctgatgcaggaaaatagcttgaacctggg

SEQ ID NO: 47400 - DNA, 540 bp, Homo sapiens
  misc_feature 455, 456, 480: n = A,T,C or G
accctcactaaagggaacaaaagctgggtaccgggccccccctcgagagtacttctagaattaattaaggcggggaagtgataagtggtaaaaagagacatttcctaggggtagaggtacaaagctaatatagacggaaacccagactgaattttacgtctcttatttccaactcctctcgatgtctacctggaaaactttccaatctttaagcattcagctgcagtgaaatatcctctggggaccttctgtgacatcccaatgacagagttcatcacccttttttaatagagtcctgtacttttcttatctttctattgttgcttttaaaacatattttcttgcaattaccttcacatgcactgtgaacaccggcaatttaatgtgtttttgtgcatgtgtatgcatgcacgctgaataagttccttgcatgctaaaaaatgtttcaacctacnnaaaaaaaaaaaaaaaaaaaaaaangggcggccccccccggggggggcccccaaccccccttttagggggtgtttttcccccccc

SEQ ID NO: 47401 - DNA, 518 bp, Homo sapiens
aattaaccctcactaaagggaacaaaagctgggtaccgggccccccctcgagagtacttctagaattaattaaggcgggacggcagtgagacgcagtgggtcataaaaagtgagagctttggagcttaaaatacctacatgtgatatcagccatctatctaagtgatattgggcaagtgactattctgaggctccttagcttcttatcagaagaaatggaaacaccacctccattacaaaggaggtattatttccattatgagatagcacaactaaagtatctagttatagtaggcattcagtaaacagtgtatctttcagttctgttttctatatcatctaaatgaaatcacacgaacacaattctgtactaccactctacagtttctaagatagaaacaacacaggcataaagggttcttaatttacaaatgtacctcaatattagagttggattacagtgattttgttaaataaagccaatgtatattcaatggcctgaaggatctttattttaa

SEQ ID NO: 47402 - DNA, 460 bp, Homo sapiens
aaagggaacaaaagctgggtaccgggccccccctcgagagtacttctagaattaattaaggcgggcagattgagctcacgagttcaagaccagcctggcaaatatagcaaagccccatctctattaaaaatacaaaaattagccaggcatggtgatacatgcctgtaatcccagctactagagagactgaggcaggagaatcacttgaacccaggaggcggaggttgcagtgagctgagatcatgccactgcactccagcctgagtgactgtctcaaagcaaaaaaaaaaaggagagagtcctcaagtaaaaagatacataaaatgtgaatattacatattagaatttctttctttggccggccatatcgctggaattactgtctgcttaagacactctccaatgctgcccactaattttttttcaactggagcatataacataactttcctagtggaac

SEQ ID NO: 47403 - DNA, 397 bp, Homo sapiens
  misc_feature 371: n = A,T,C or G
ctcactaaagggaacaaaagctgggtaccgggccccccctcgagagtacttctagaattaattaaggcggggttgctttaatgtgtcagtcactactgcaaatttctttctactgctggcctcaaaaagatgaccatcccaatagtcacaggttcttaggataagctacccatattataactaaagggggaaaatcctgaaatttccacagcatctttgttgtaaggaactcaaaatggctcatctgcattattagactcatctttgaaagtatcttgtgaaaataaattgcaacttttcattatcagatgagaaaacagacagaagtccagcctgagcaacatgcaaaaccccggtctctacaaaaactnccaaaaaaaaaaaaaaaaaaaaaaaa

SEQ ID NO: 47404 - DNA, 305 bp, Homo sapiens
acaaaagctgggtaccgggccccccctcgagagtacttctagaattaattaaggcggggtgagagataaaagtctacaaatatggtgtggtgtatactgctcaggtgacgggtgcaccaaaatctcacaaatcaccactaaagaacttactcatgtaaccaaatactacctgtaccccaataacttatggaaaaataaaattaaaaaataaaaataaacatttcaaaaaatggtacttcaaaaacactaaaatattttaacctcataaccaccctatgggatggtattattatgattatccgcag

SEQ ID NO: 47405 - DNA, 710 bp, Homo sapiens
tttacacccgggaataaggggaaccacatgatgggtgccgggccccccctcgagagtactagtagaattaattaagaaatatgacctttatttaagttatggatagtatccttaactgtattttcaaaaaattaagtataaaattgtgataacagcctaacagtcattaattcaaaccaatccctaaattggcagaagttcagctggtatcagtaaaacaatcaaatattgctacccagctgctcctattcctatctgctccacaaatactgagacatacaagtcattctttcatttaacaaatatgtattaaacacctatgcacctaccatgtacaagactgcctactaaatgatgggaatacaggtgtgaataagagacaaggtttccggactcacaaaacttaaaatctagctgtagagacagacaataaacaaaagaaattacaaaatgtggtcaatgctatgaaggaaatacaggctgctcagacaaagaataacaagggacatctcatttaataaatgacagcaattaacattcactgagcactttggatagggtagtgagagaaaacctctctgaaaaaatgacggttaagttctataacaaaagaacaacaaggagacaccaatgtgatgactggggagaaaggctttttaagcagaaggaatttcgcataccagatcctaagtggtaatcaaaaacctaaa

SEQ ID NO: 47406 - DNA, 329 bp, Homo sapiens
cgcgcaataatcctactaatagcggaacaaaagctgggtaccgggccccctctcgagagtactactagaattaattaaggcggggggaaattacaaaaacaacacttacaaaatgatagccgcttagcaacttcaagtatatatacctttgtttgtactaactactaatgtctaccactctccaattgagatcactaagtttcatggtcaaactattattttaattacagtgataaacttttaaaacatctgaaaaactcctatatatttaggctacagtttaaaatatatactctgtttagttaaatacataacacacaaaaaaaaaa

SEQ ID NO: 47407 - DNA, 312 bp, Homo sapiens
gggccccccctcgagagtacttctagaattaattaaggcggggggggtgagttcatgggaaaatgcctgggactgtctttgctgtgtgccaaaatagccgtggacatatttatattttgaggaatgagggctgattttttggcttgtttcctcatgaactggcttgaacaattgtcaagatatcccctgccataaaaacatgttgaacttgagaaccaagagcaaacaaacccctgagctagcagacaagaaataaccaagctcagagctgaactgaaggagatagagacatgaaaaactcttcaaaaaatc

SEQ ID NO: 47408 - DNA, 460 bp, Homo sapiens
cgcaattaaccctcactaaagggaacaaaagctgggtaccgggccccccctcgagagtacttctagaattaattaaggcgggtgatattcttttggaataaggacttaaaaacacttgtgaggcaatctgagttcaagatcactccagatcgttgcaatttcccatccgcatgttttacaacagtttttcaatttttttaagtggtttgcttttatcatgtctttccaaggcatttcaaacttagttttcctataagcaatgtttttctttttattatcctattcaagaagtgtatataatattttatcaaattaaataattacaaataaaaatcagtaacacaactgactccagatggtcatacatgctaacttacaggaggagtaatgtacatgtgtattatcagagaaaagcctttaagctatgagcacttaatgtcttttgtagaggaaatggaaa

SEQ ID NO: 47409 - DNA, 283 bp, Homo sapiens
attaaggcgggggcgaaaggggtctctaacaaagttactttgcaaaataagaagttgagtcataaacctagtctttcaatgctgtgtatgtgtgtgtaatcagaataatgtgaaacagagctctatacccacagagaacccagtcaagctctgaatgatcaaataatattctagagagtttctcatacagagaagcataaagacagtatctgagtatgtttccaaaaatcagtattaatgaattttgtccataatcattgtgatggtcacaagtttgagcata

SEQ ID NO: 47410 - DNA, 457 bp, Homo sapiens
ctaaagggaacaaaagctgggtaccgggccccccctcgagagtacttctagaattaattaagggggaagggagggagaaagccgggaggggaagagagggaggggaaagaaagctgaagattggtttcatcaattttctggcttagtactattctcttgtgtggggatggaaggaactacttgaaatcagggaaagaaccctcctacatgctttccacacaaaacctaccttttagacatatatctgttaaaaataaaagaactaaaaaatggcagaaaagatagcaagagtggctgcctatattaatattagaaaaagcagattttagaacaaatgacgttgtcaggaataaagagaaacatttaataatgactaaggggtcaattcaccaaaatatcataatactcctaagaatagggcttcaaaatgtacaaattaggaactgactaagcggaa

SEQ ID NO: 47411 - DNA, 468 bp, Homo sapiens
aaagggaacaaaagctgggtaccgggccccccctcgagagtacttctagaattaattaaggcggggtaaaggcatttagtagtcattaaactttgatttcagttagcatgcaggtatttatctctgtttccctgtctcattaccagacaaatatagtagtcatctaataaatgtgaagaagagaagcagtgacagaatcaaaaggtggtaatattgacaatcaatggaaacagtagggaattggactaagcataagccttgccactgccactgttggtgttgagactttggatgagttattcaacctttgttaggcctcagtgtttttatatgtaaaatggaaatgttattccatttactctgtcagggcttgagcaaacaattgtcaagcagtagctaacgataatgcttgtattggctttctcatttcttgccttatttcccttgtttctcagtctttttgacatt

SEQ ID NO: 47412 - DNA, 431 bp, Homo sapiens
cgggccccccctcgagagtacttctagaattaattaaggcgggagaattgcttgaacatgaaaggcagaggttgcagtaagccagatagcgccactgcactctagcctgggcgacagagtgagactccttctccgcaccacccaaaaaaaaaaaaagtgctacattttccataaaacattaccttgaacagctttcacctttgtatcttagagtggaaactaccacataaaataactcgctaggacagaggttcacaagccttcctggtatatagtgcccttggtgtctgaggagttttgttgtgctcttaagccaaaaggagtaactagcagttgctttgatgacatagctgtatccaagcaacataactatattgtcttagcagcctagtagctattggaaaaacgaatttacattattggaaagaaaa

SEQ ID NO: 47413 - DNA, 456 bp, Homo sapiens
aaagggaacgaaagctgggtaccgggccccccctcgagagtacttctagaattaattaaggcgggctattggcaattcttcctctgtaaattactttgaatttttctaacagaaaactggtttggctaattatcaaatttgtatacttagctagaaaaatggaaactattcctatttattgccacaaaaaccatgtccctactttacttcatagaatgcacaagcaaaagccagctcaacccctgggattatttatacttaaaaattaataatggagagtattttgccagggcagcagtggtggataggaagaagagtaagaaaaagatctgctgttctagagctgggcccagtggctcaagtgaggtcctcctgtctgcccatcagtccacactcaggcctttctggggaaagaaaaacagtcagaagaaaagaaagttggatttaagtgttctc

SEQ ID NO: 47414 - DNA, 458 bp, Homo sapiens
  misc_feature 36, 37, 53, 56, 57, 92: n = A,T,C or G
agctgggtgccgggccccccctcgagagtacttctnnagggggtgggcaagcntcnncttgagagccataattaatgatctttttgtccccngtgctgggtctgggctgcctgccattgcagcgggtgggctaatggttagatcaggggagggacttcccatggaaataagtgcatggggtaatgaggagtgtgggcccctggccaaaggaagagcaggctgaagagataaaaatggagagaggcaggcagcagacagtctcagaagggcattctcttcctgggcagtgttcgtccccttttttaaagcagcaagatcctttcttctcacccacagcactgagacagggctgctctggctgaagcagatgaagggggtctgagccctgattgctgggaaagcttaaaagtcacttacatctctgagactcagtttcccaattcaaaaaaacagtttta

SEQ ID NO: 47415 - DNA, 449 bp, Homo sapiens
ctgggtaccgggccccccctcgagagtacttctagaattaattaaggcgggaggtagacattgcagtgagatcgcaccactgcactccagcctgggtgacgagtgaaacaggccaggctattttcacactcacacttctctggcctctgccttttcactctccctctcacgtgctgcggcacagacccacagaggctgctgggcgcatggtgtcgcaagagcaggagggcaggagaggagaatcctgctggaggaatctaaaacatcactcagcactaaattgtttttgtctgggacaaactagtttccgtaaagatgtgatttatgataacatgtaatgggattattattcttttaaaataaatttggctacagtggctcaggcctgtaagcccagcactttgggaggccaagatgggtggatcgcttgagaccaggagttcgagacc

SEQ ID NO: 47416 - DNA, 346 bp, Homo sapiens
ccgtcgttttacccccggaaaaagggtaacactgctgggtgccgggccccccctcgagagtacttctagaattaattaaggcggggggaaaaggaattagagaaggtagtctagagacagtgagaagacttacctgaaaaacaaggcttgcttcctgtaaatcattatttaccaggagactgcgcaggaagagaggaaacaacatgagcaaaggcatggcttcagttctcatttgtgtgtaaattaacaccacatggaaatgattgctgatgatgatgttcattctatcactttgtgacttagtgttctctttataaaatcctttacacatcattgctggcattgc

SEQ ID NO: 47417 - DNA, 493 bp, Homo sapiens
gcgcgcaattaaccctcactaaagggaacaaaagctgggtaccgggccccccctcgagagtacttctagaattaattaagggggcaaaagccaagtataaatcccagcatcattagtgatgatgatagaaatcttttatctccccccaaatcctccttgccacttttaaacaatctgaaaaacaggaagcagagttgttgacttaggaacccacagccttccattcccattattgggggaagcccttaaggaactcccccaccccagtgggattaaccaccaatgttgactacatgtcctgaaaacttttcttctgtaaaaagtttagaccaatttgtccatgttaaactctagtataatttcagaattcctccactgatatttcttgattacaatttaaatggtctgtttctcatgatgagacaactgcatttgaggagcagtttcacttacctgtgacatgttcttaagtcttcgagctgctctcatgctt

SEQ ID NO: 47418 - DNA, 534 bp, Homo sapiens
ctggccgtcgttttacatccggaaacacagtaatacccttaatgctggccgcgcctttcctcgagagaacaagtaaaaaacttaatgcggggaagtgtttttatttcagcaatgtacatgtagtaaagttctacaattttaattcattctagctctaaaaattctatgattttatccttttttctgttcttttaaacttgttcctgtacaatttatagactttttttctgagaaaaatcttcctggagaaaagattgttaggcccttcaataatagggagtttctcttaaaataagtttagccgttttgttatttaagaaatgatttggccgggcgtggtggctcacgcttgtaattgcagcactttgggaatccgaggcgggcggatcatgaggtcaggagtttgagaccagcctggccaacacagtgaaaccccatctctactaaaaaaaaaaaaaaaaaaaaaaaaaaaaagggggcccccccccgggggggaccccaaatccccccataagggggttttttacccccccc

SEQ ID NO: 47419 - DNA, 461 bp, Homo sapiens
cgcgcaattaaccctcactaaagggaacaaaagctgggtaccgggccccccctcgagagtacttctagaattaattaaggcgggcgccagtaatcccaactacttgggaggctgaggcaggagaattgcttgaacacagaaggcagaggttgcagtgagccaagatcaagctactgcactccagcctgggcaaaagagcaagactgcatctcaaaaaataaataaatgttctaattgtgtattagtttacttccttctttcattacatctattttaggaaacctaactagcaggattcattcacctaggtgttgcttctgccttactttccaatctaaatttgcttcttagggttttcctctttgagagaaactaaaaggttaggaataattcctgacaaaggaggctttcagatagctgggccatggctatggtgaataaaacaggggaagaggcctaaa

SEQ ID NO: 47420 - DNA, 482 bp, Homo sapiens
ctggccgtcgttttacactccggaataagagtgtaaccatgatgggtgcgcgggccccccctcgagagtacttgtagaattaattaaagagaagatgccatttataatagtctcagagaacatcaagtatctcaaaagaaatttgacaaataaaaattttaaacagtattaacagaattttgaaaatctacataaatggagagttagctagaagataatatcaaaaacttaccaattctccccaaattaagctatagagacaatattatgccagtgaaaacctgagtaaggactttcttaaagtacagtaagataattctaaaatttatatgaaactttaaaggaccaagatattgctgaagaagaagaccgggaggaggaaacttgcccttcaaggaatcggggcttattatgaagctattgtaattaaggaaaggcaaaatgagacaaacagacctatcggacagaacaggcagcccatg

SEQ ID NO: 47421 - DNA, 579 bp, Homo sapiens
accctcactaaagggaacaaaagctgggtaccgggccccccctcgagagtacttctagaattaattaaggcggggcccagtgttcaggtgatcgattctgatgcacactgaagctggagatctaatagtgtcttccaaaagaggaatgtcgccaatatttcattcagctttctcttctacttgtcactgacttcccagctatctttttaaagtgtttcagtaaccatgtgaactgtaatcacttggctggcaggagtgcagatttgaacaactttctgttttgatctcttctccaacttcattgacaatatcactgaatataatacattggaaaccattatgttgcatttgttccaggaaaattcaattggtttaccacagaaatcactttgatttggtaggaagtgacctaagagcttcatattacaatttaacctagtttcacagcaaagaccaacaaacatcaacaaaaaagaacctggaaaattaccggttgactcttaagccactacaaattttttttctgatattcattatcaggcctacaatttgccctttacatttttgactgttggatga

SEQ ID NO: 47422 - DNA, 580 bp, Homo sapiens
  misc_feature 536, 537, 538, 539, 540, 541, 544, 545, 546, 548: n = A,T,C or G
aactggccgcggtttcaccccggaataaggggaacacatgctgggtgccgggccccccctcgagagtacttctagaattaattaaggcgggaattgttcttcactgagccgtgacctaaatttagcggtgctgaagagtgagccccagccaacaggatttccctgagaacacgatgaagttcctgtatcaattcgattcattaactagaaagagggaacaagcagccagctttttttttctgcccccattcttcagtgaatcatttgttagtttgaccagaatttttgtgagatccagtctacaattctgtaagaaaaaaagacagcaaacctcattcaaatacttcttgcgacattaattccgaggcagaaaccaaattacattaagcagatctgattgtcttgctattaaagaccttgggtttactcactgagtattttcagcctgaagagaagaaatgctctcaatttgggtagggtgtttggtaactcgggataaaatgaataagagccaacttggctcacaagtggatttnnnnnnaannnanaaaaaaaaaaaaaagggggccccccccggggg

SEQ ID NO: 47423 - DNA, 165 bp, Homo sapiens
acaaaagctgggtaccgggccccccctcgagagtacttctagaattaattaagggcggggaagacaattacttaacaccatcctttttattgaacaaaaattaaataaagcaaatagctaagattgaacaggagctcatatacgggagcaattttagcccatgtg

SEQ ID NO: 47424 - DNA, 487 bp, Homo sapiens
  misc_feature 401, 403, 426: n = A,T,C or G
ggaacaaaagctgggtaccgggccccccctcgagagtacttctagaattaattaaggcgggggcatagatttaattgtttggttcaactgggaagccatatattaacttctacttcaacccatcctgatctctccacagatgctagttttatacaggcctatttttctctgaaattgagcctgagagacaaaaatccacacttgggctgtcatagattttggtaaattgagtcttgtgactgattggtgcctcctgcctgccccgtgatcctgtatgtagtaaccacgtcgtgatcacaggtcatggattggggaaagttgcctccaaagatgtgggtgtctgtttttcactccactttccatttggccaaaaattcaacacttcagtttctgtttcttananaaaaaaaaaaaaaaaaaaaaaangggggcccccccccggggggggccccaaatcccccctttggggggggttttaccccccccc

SEQ ID NO: 47425 - DNA, 412 bp, Homo sapiens
ctggccgtcgttttactcagggaacacagtattacctttatttctggccggtgtttttctttagagaaaaagaaaaaacttttatgtttggcgggggttttactgtaaagaaaaaaaaaaaaaatttttttgatgagcctgtttatgaaaattctaaaataaatgctaaaaaggccaccagtaaaaacagagattaagacatatttactccagatgaaattaaagtaatacaacagtctggaaattactttaaaacaactttcttccataagaaaaaggaagtaatatttttcttaaaaagaacagaaaattgttgaagaaaaaaaaaaaattatattgggggccccccccgggggggacctccaatcccccttatggggagtttttttacccccccccatgggcctttttt

SEQ ID NO: 47426 - DNA, 478 bp, Homo sapiens
ctggccgtctgtttaccgccctaaataaagggaacacatgctgggtgccgggccccccctcgagagtacttctagaattaattaaatttacttgttggttgggattcctgaatttgtttgtatttctttgtatgttaattttaattcatcagattgtaaactcacaaatatggaaggacaagttagttccgcagagaaaaaaaaacccaggtctcagcactatgcaactcaggtctctttagctgtgtaataggaggtaatcatggcatttaaaaacattgactatggagttctctgagtaaatgagaatattagctccaccacctttatccgtatgacttttggctaattacttaacatggatgagtcagtttcttcctttctaagatgggaataatagtatttttactttatgggatgtgtaagcacaaaatgagataattgttttaaaatacttaccgtagtgcctaacaggtaa

SEQ ID NO: 47427 - DNA, 481 bp, Homo sapiens
aagggaacaaaagctgggtaccgggccccccctcgagagtacttctagaattaattaaggcgggagggatagcattaggagacacacctaatgtacatgacaagttaatgggtgcagcacaccaacatggcacatgtatacatatgtaacaaatctgcacattgtgcacatgtaccctagaacttaaagtattaaaaaaaaaaatcttggtgatggctgacagaagccacactgtttttccgaactcattgactcccagctttatattgccttatccctgtttgactacaacaacagtattataaagggcagttatgatgtttgctcacgtttcatctctcctaacagattttaggtgatcaattccaagggagcattactaagtcctacataaacctgtttattccacagctactaacaaaatggtctgtacacagtacaaagtcagcaaataactcccaaaccaccctaattacacaaa

SEQ ID NO: 47428 - DNA, 489 bp, Homo sapiens
  misc_feature 423: n = A,T,C or G
agcgcgcaattaaccctcactaaagggaacaaaagctgggtaccgggccccccctcgagagtacttctagaattaattaaggcgggataatggtaggtggagaagccagcttatagttctgagcaagattatatctttagcttttattaggcatgtaaatgaaatacttttgagattttcagctggaaaaatgaaactaatgtgaaatgcattatattgccagagatgacttccattgcctggtggggaagagactggaggaaggatggataatggcagcacacagatgctgctgagaagctattttagtagttcatgtaagagacaattgtcaaatttgcaataaacttccaggtgaaatggaattgactttctaatggcttggaatggtgtatataaaacagctggtaatgactccatgtnttgaagctttagaaaatagattaataatggctcaaattactgagtgaaaaattactgggaaagaag

SEQ ID NO: 47429 - DNA, 606 bp, Homo sapiens
cactaaagggaacaaaagctgggtaccgggccccccctcgagagtacttctagaattaattaaggcgggaagaaaataaatatattgtgttgaatgctggcctggagcttattaaatgagatttgggctgtgatatggattttaaagtcactggagtgaaaaagattattaaatttatgtatgtggaagatatctagggaaaatatttgaagagaaacagctccaggaaagcatattaggaaaaaacacatgcataactactattgaaggaatgtaaatctatacagccaactttaaaaacacatccagaaaagctgaagaagagaagaatactttacagaaaagaaaaaaaaaaataaaaaaaaaaagcggccgccaccgcggtggagctccaattcgccctatagggagtcgtattacgcgcgctcactggccgtcgttttacaacgtcttgactgggaaaaccctggcgttacccaacttaatggccttgcagcacatcccccttttgccagctggcgtaatagcgaaaaggcccgcaccgatcgcccttcccaacaattgggcaacctgaatggcgaatggaaattgtaagcgttaatattt

SEQ ID NO: 47430 - DNA, 312 bp, Homo sapiens
aaagggtaacacagctgggtgccgggccccccctcgagagtacttctagaattaattaaggcggggggggtctcgcttttttgtccaggttggtcttgaactcctggcctcaagcagttctccagttctcccaccttagcctcccaaagtgctaggattataggtatgagccaccatacctggctataactgacataactatttcttatattccatgatactacaaacaagacataactgtatttcttatattctataatactacaaacaagacaaaaagttaaatcagcctggagaacaaatactaagata

SEQ ID NO: 47431 - DNA, 478 bp, Homo sapiens
accctcactaaagggaacaaaagctgggtaccgggccccccctcgagagtacttctagaattaattaaggcgggggatactgtaattttggagcagtcatctgcaaattaacttatttggcagataccaatgtcaaattggtatgaaacaacaggaaagtaaagcatattataatattttccttaaaaatcatggaaaggtgatataacaccctgaagcctgaaactgctgtcgttagtgccaatgactatactgatttttaaaaatctggccgggtgcggtggctcacacctgtaatcccagcactttgggaggccgaggtgggcagatcacaaggtcaggagatcgacaccatcctggccaacatggtgaaacccgtctccaccaaaacacaaaaaattagccaggcgtggtggcacacgcccgcagtcccagccactcgggaggctgaggcaggggaatcacccgaacccaggag

SEQ ID NO: 47432 - DNA, 618 bp, Homo sapiens
accccggaataagaggaacacatgctgggtgccgggccccccctcgagagtacttctagaattaattaaggcgggaggaatgcttgaacccaggagtttgagacctgtccagcttcctaaagtactgggattataggtgtgagccactgtgtctagccaagaataccttgttctattgcagaacatcttgtcatactgggattagatatactttaatgacttaaaacataaattggtgtacagaatgaagatagtttttattgataagcatatacacataaaatttgtatcaactcagtaattgtcaaggaagttttaattcctgaaagattttttttcatagaaaaatatttctcaagattcttagagagtgtctaagtcaatgccaagagaagtttggaaagactttgagagaaggctagcccagcatcttggaagtagaggtggatttagttttacatagttctgttggaggtgataaaagagaagaattccttaggaatcactgtagtgtaaaatactattaaaatctctcaaaagcctagaactgggctgggtgcagtggctcatgcctgtaaatcccagcactttgggaggccaaggcaggatgattgcttg

SEQ ID NO: 47433 - DNA, 460 bp, Homo sapiens
actaaagggaacaaaagctgggtaccgggccccccctcgagagtacttctagaattaattaaggcggggacgagggtgcacatcagtaactccatgtacagctggaaagactgaggcacatagcactcggatgacttccacggtcacacgactggtgagtgacaacattcacacggacacacaattaactcccagcccttataactttaattagatcttttgaaatactattctagttccaaaaggcaattctacatagacttccccactctttttcaggggaaggagatagagatggggtgagatagaggaatctacaaattatccttagtctttcaaaataaatttgtgtctggatttctaaagtgtgtggagatttaagggcagggcctctagtctcttctatgtcagacttaatgaaaacaaccatgatataggacacaaagtttgctacttacat

SEQ ID NO: 47434 - DNA, 364 bp, Homo sapiens
aaagctgggtaccgggccccccctcgagagtacttctagaattaattaaggggggatgtaagattgaagcgaatgattcagagcaaggatatgacaattttaagagactatatgctcccaaagtggagctcccacagtctttgggcgattattgctcacacctagtgagagagactgctcgcaatacaataatagtggaggaattcaacaccctactcacagtattaaaacagataatcagtacaaaaaaatgataaaggctggacttaaactggactttagaccaaatggacctaacagaatttacataacattctgcccaactgcagaatatacattcttttcatcaacacactgaacattc

SEQ ID NO: 47435 - DNA, 251 bp, Homo sapiens
aaataagcctgggcaacttggtgaaactccatctaaattttgttttttaataacaaaattcaggctgggattacagatgtgagccactgcatccggtcacatttgtttttttaattgctataaatttttactgttggtcctagatctggggcagatgagaggctgtttcttcacagtggagccagtaattacaggatccttaaggaatgaggacatcggtatacccacttgaaaaaatatcagtgtttcat

SEQ ID NO: 47436 - DNA, 520 bp, Homo sapiens
  misc_feature 479: n = A,T,C or G
aaataaagggaacaaaagctgggtaccgggccccccctcgagagtacttctagaattaattaaggcgggtggatcacctgagatcaggagttcgagaccagcctggccaacatggtgaaacgctgtctccactaaaaatgcaaaaaattacctgggcatggccgggcgcggtggctcacgcctgtaatcccagcactttgggaggccgaggcaggcggatcacgaggtcacgagaccgagaccatcctggctaacacagtgaaaccccgtctctactacgaatactcaaaataacaaaaaacaaaacacaaaaggccccccccccgcggggggcgatcgctcccccctgtgggggccagttactccccccgcttaggggggaggatttaaaagaacctgggacatcgaggttgcagtgagacatgatttgccgctgtactccagcctgggcaacagagtgagacccaatcttgaggganaaaaataataaaaaaaaaataaaggggcccccccccggggg

SEQ ID NO: 47437 - DNA, 628 bp, Homo sapiens
  misc_feature 546, 547, 548, 549, 550, 551, 558, 559, 567, 568, 569: n = A,T,C or G
ctaaagggaacaaaagctgggtaccgggccccccctcgagagtacttctagaattaattaaggcggggcaaaatacataattaaaataaagtgagaggaaaatttagactgagatttctacatggccaatttctaaaatcggcatttggaaatgcatttcactacttgttgcaaagacataataacagacatcatgtctttctcgaaaactcagaaaaatctcacttattttgcacatcttactgtcttcaagtaatatttacagcttttaatgcatacaaagaacattaatcaaaaacaccattatacctcaccagtgtttgttgagctcctactctatgctgagcactttataaacactttctgctttcctatggttctggggacctcttcccagttgggcacaccatactaattgcacttaagagaaccataggattgtagatgcagacacccatatcctaatacttagccaccatttccttcctcactcctcttccatctgcccctcatccaacaaacagctctgaagtgcaatacgcccannnnnnaaaaaannaaaaaaannncgcggcccccccccgggggggacccccaatcccccctaagggggggtttttaccccccc

SEQ ID NO: 47438 - DNA, 499 bp, Homo sapiens
  misc_feature 449, 450, 452, 453, 454, 455, 456: n = A,T,C or G
ctaaagggaacaaaagctgggtaccgggccccccctcgagagtacttctagaattaattaaggcggggggtgtctgctctcagcctgggctcccgcaagcgggagaagcagctccagctggggggaagcgaaaaagggacaggaccttcagagacagcccactgagggctgagtgtgcattgctgggcttctggaatctgtggtgagggtgctaataccatgaaatttcatatctgccaacagttgtccaaatgagtgatgttattactgtgagctcaccccacagacactgagaggggcatgggagtggtaacccaactggtatttctcctcttttcccatggtaatgtttttcaaattgcagatttgaccccacagttaggagataaattaagaaggttgatcagcattaaaaaccaaaaaagaaaaaatgaagtatattacatgtnntnnnnnaaaaaaaaaaaaaaaaaaaaaaaaagggccccccccccggggg

SEQ ID NO: 47439 - DNA, 347 bp, Homo sapiens
aacccttcactaagggaaacaaagctgggtaccgggccccccctcgagagtacttctagaattaattaaggcgggctatcaaaacaagttagctctaaagcatgtcaagttgaatgagtttatctaaaaaataatactatatttgttttagaaccatagataaaaatccagtattatgtctttataatcagctaacagatatggttacttcattggagtaatgctaatatgataataatatcatattcaatataggaaattcttcattgcaatgtgaccttgtcaagctatataacctctgtaaatatcaaatttagcacctccaaaatggacatataatgagcttc

SEQ ID NO: 47440 - DNA, 430 bp, Homo sapiens
  misc_feature 351, 358, 361: n = A,T,C or G
ctaaagggaacaaaagctgggtaccgggccccccctcgagagtacttctagaattaattaaggcgggagccaccgtgcctggcctgaaagcattgtttttaaattaactgcagtttactaaatgagtaaaccagtagtcaggacttactgataaatctcatagtctttaactaggacctcttataggcaattatgctactaagttcattttctctagtttactgaatgtttaatagagaatggaaatgtaatgggtaagttaaatgagcccttcccaaaacatgttcagaacttttggcttagagcaaaagtcagctttcaaatgttgaaaaggtgaaaaacacaaaaaanaaaaaanaanaaaaagggccccccccggggggggcccccaattccccctttaggggggttatttacccccccccctggg

SEQ ID NO: 47441 - DNA, 131 bp, Homo sapiens
  misc_feature 78: n = A,T,C or G
cccagcactttggaaggccaaggtgggcagaacacctgcggtcaggagtttgagaccagcctgaccaacatgatgaanacccctctctactaaaaatacaaaaaaattagccaggtgtagtggtcagtgcc

SEQ ID NO: 47442 - DNA, 287 bp, Homo sapiens
  misc_feature 210: n = A,T,C or G
acaaagctgggtaccgggccccccctcgagagtacttctagaattaattaaggcggggcttggtagcacaggatctgaggccaggagcttgaggccacagtgcagtgcactatgattatgcctgtgaatgtgtgaatagccactgcactccagcctgggcaacatagcaacatcccgtatctaaaaaaaaaaaaaaaaaaaaaaaaaaanggggggccccccccggggggggccccaaatccccccttaggggggggttttaccccccccccctgggcccgttttta

SEQ ID NO: 47443 - DNA, 414 bp, Homo sapiens
  misc_feature 281, 288, 289: n = A,T,C or G
acagggaccgggtgccgggccccccctcgagagtccttgtagaattaattaaggcggggtttgtgttctttcagtttctttattcttcagtaccacccctgcctcccacacacaaaccccacttaatccagccttgagaaaatcagactttacactgagcatgttctttcttataaattgggtcactcaacagtcagcttctgggctatcgtctcattttctttgcaaatgctttactctcctttaaagcttaaaaatttcccagagaagagtcctagagnttccgtnnaaaaaaaaaaaaaatggcggccgccaccgcggtggagctccaattcgccctatagtgagtcgtattacgcgcgctcactggccgtcgttttacaacgttgtgactgggaaaaccctggcgttacc

SEQ ID NO: 47444 - DNA, 489 bp, Homo sapiens
ccctcactaaagggaacaaaagctgggtaccgggccccccctcgagagtacttctagaattaattaaggcgggggctcatccaggacacctacctgcatttttccatcaaggttgaaacaaacactgcttgttcgcaaaggagtagacatttactccaaaaatatatttgccttccttgcctgaaatgcttctgccaaacccaccatctgtgaacttgaggaatgccttactcatgatcatgttattacatactcctgaccaaggaattcattttaccaaacataaagtgcagagatactcatgaaatgtattgctcttatcatgatcttcatcactctaaagcaactggcctgaaacaaaggtgaaatgagcttatgaagcgtcaactgagtgactaaattttgtgaagctaggataacattctccacaatgtggcatatggcctccatcagcaaccaatctatgaccctgtttctctcatagtcgag

SEQ ID NO: 47445 - DNA, 393 bp, Homo sapiens
ctcactaaagggaacaaaagctgggtaccgggcccaccctccagagtacttctagaattaattaaggcgggaggaagaatagaattagaatagcaaataaaaattgatatctgggcataatcattaatagctactaaaatcattaggaaagaagctgatatggattttcctaatgaatagacaaagctgacagtacctagattcacagaccaatattaacatcaccaaaaaggaaacaagcaggcgttaggtgtccaacctcaatttgatcaagtctcgattactgtgcagtctaatatggttgccacatgtggctgttgagcactctaaatgtggttagtcttaactgagatgtgccataagttgtaaaatgctcactggatttggattaat

SEQ ID NO: 47446 - DNA, 529 bp, Homo sapiens
gccaagcgcgcaattaaccctcactaaagggaacaaaagctgggtaccgggccccccctcgagagtacttctagaattaattaaggcgggaggatggtttgggcctgggagatggaggttgtagtgagccgggatcacgccattgtattccagcctggacggtagagtcacacccagtctcagaaaaataaaaatcaagaaattaatgtaatacagctactatgaacccacaaaaactttaaaaaaaatttttaattattaaaaaaatgtaatgctgctactgttatgcttatgtagattgtgggctagaataggaaatataactatcatttttaacacttttctggggggaaatattattcgaatttcataacacttagctcgatgaccttttaaaatatatatggtaaccattgtgatgttggggctgcctggtgcaaataggatttttgtgagcttgattgtacaaaattgaaatttgcctacatcttactgagtttgctgtttccttctgggtgttaggcctact

SEQ ID NO: 47447 - DNA, 442 bp, Homo sapiens
aaagggaacaaaagctgggtaccgggccccccctcgagagtacttctagaattaattaaggcgggctgcatctgggccaagaaaatgttctatttcttgatctaagtggtaataatgtgagtgttcacttgatagctatttgttaaattgcacatataagtttaatgcacattactatatactttatatttcagcataaatgcagaaaaaaatgtaaatactggatttgacattcatgaagtcaccagtgattttaacaagggtggtttcaattagtggtgtaatggcagctgaattgggttgcagaacaaacgaacaatgacaataaaggtgtcaaatgctctacccttgagctagtcaagtaatctatacaacaaaccccccaccgtgacaccagtttacctgtgtaacaaaccttcacatgtacccccgaacctaaatg

SEQ ID NO: 47448 - DNA, 483 bp, Homo sapiens
ctactaaagggaacaaaagctgggtaccgggccccccctcgagagtacttctagaattaattaaggcgggggaggggaagtgaaaatattcttcaaagatgaaggcaaaataaaaatattttcagaaaagcagcaacccaaaatattaattgccagtaggtctttactgtaggaaatactcaagggacttcttcaggcaaaagaaaatgaccccagaaggataactcaaaaggcaggagtgaaaaaaaaaaaaaaggaaaattcccaaaaaagatttgtttgggagtaaataaccaaattttttttttaaatttttttgggggtttgcaagtttatatgggcttgtaaaaaacagttataaggatgtttttggaagttcaaaatccttttccacctattttttttaaaataccaattaaaaaaaaagggcttcacctgagttaaaaaggtctaaaagtttttgggaaggggaaaagttaaaaa

SEQ ID NO: 47449 - DNA, 424 bp, Homo sapiens
ccctactaaagggaacaaaagctgggtaccgggccccccctcgagagtacttctagaattaattaaggcgggggggggacagatctccaattgagttgaataattcaaaactcctgtttgggtaactgacagaacaagcaaaccttaccatcactaccaaccaacttaacttggctgacatttacagaacattccacccaatgacagcagactacacattctactcaagtgaacatggaacatccactaaaagacaccattctgggacataaaacaagccttggtaaataaaaaaaaaaaatgaaataatgaaattaaattagaaatcaccacccgaaaaaaaaaaaaaaaaaaaaaaaaaagggggggccccccccgggggggacccccaatccccccttaaggaggggtttttccccccccc

SEQ ID NO: 47450 - DNA, 484 bp, Homo sapiens
taaccctcactaaagggaacaaaagctgggtaccgggccccccctcgagagtacttctagaattaattaaagcgggcggatcacgaggtcaggagatctagaccatcctggctaacacggtgaaaccctatctctactaaaaatacaaaaaaatcaaccgggcgtggcagtgggcacctgtagtcccagctgctggggaggctgaggcaggagaatggtatgaacctgggagatggagcttgcagtgagccgagattgtgccactgcactccagcctggggaacagagcgagactctgtctcaaaaaaatatatatatatataaataaatatatatgtaaatatatataatgtataaaaatatatgtaaatatattaatatataaatatacatgcaaatatatattaatatgtatgtaaacattaatgtatatgtaaatatatattaatatatgtaatatatataattatatatattaatcagt

SEQ ID NO: 47451 - DNA, 510 bp, Homo sapiens
  misc_feature 446: n = A,T,C or G
ctcactaaagggaacaaaagctgggtaccgggccccccctcgagagtacttctagaattaattaaggcggggtagaaaataattatactgtaataatctggaaaaaaaaatgttcacacagtattaatgtgtgataatcatctcatacattccagaaatgaggtttgagagccttcactgaccatgtgtcatatccatttattttgggatccctttcaccccatttttaacttcctcccagttgcccaatgtcctctggagttttccatccaagacccccatcttttttttccctttcccccctttttagcttcctcccagttgcccaatgtcctctggagttttccatccaagaactccagcttctttttttgggggtgggggaggacggggtttcactcttgttgctcaggctggagtgcaatggcgaaactccctctcaaaanaaaaaaaaaaaagaggggggccccccccccccggggggggacccccaagccccccttagggggg

SEQ ID NO: 47452 - DNA, 284 bp, Homo sapiens
aaagggaacaaaagctgggtaccgggccccccctcgagagtacttctagaattaattaaggcgggaggctgagcggcccccgacggaacgcacacctccaaggggccccattaccgcccccaacaaataaatgtagaatctacacggacaaaaaaaaaaaaaaaaaaaaaaaaaaaaaaaaaaaaaaaaaaaaaaaaaaaaaaaaaaaaaaaaaaaataaaaaaaaaatttaaaccccccccaaaaacaaaaataaaaaaaaaaattccccccctccccccccc

SEQ ID NO: 47453 - DNA, 501 bp, Homo sapiens
cgcgcaattaaccctcactaaagggaacaaaagctgggtaccgggccccccctcgagagtacttctagaattaattaatgctgagtagctaatgaagaaaaataagaaagaacaaaggaaaaattggagcagagaggaagcacaagataagatagtagacaataatccatttatattagtaattatataaatgtcaatgtggtaaataccctaatgaaaatgcaaatcttttcacagtggatttttaaaatgtccacaattttcactttagaaaagatagtgtcttgggctgtttatagggatccagaataattcaaagtagaacgatgaaaataaaaaaaaaacccgctcaatatgaagcggccgccaccgcggtggagctacaattcaccctatagtgagtcgtattacgcgcgctcactggccgacttttaaaacgtcgggactgggaaaaccctggcgttacccaacttaatcgccttgcgacacatccccctttcg

SEQ ID NO: 47454 - DNA, 439 bp, Homo sapiens
  misc_feature 103: n = A,T,C or G
tacgccaagcgcgcaattaaccctcactaaagggaacaaaagctgggtaccgggccccccctcgagagtacttctagaattaattaaggcgggagggagagcnttaggagggatacataatatttattgattagttaatgggtacagcacaccaacatggcacatgtatatatatgtaacaaacctgcacgttgtgcacatgtaccctaaaagtatagtaaaaagaaaatatatatatattaaaaaaagacaatcatataagtaagacttctcttaattcaacttcttacacagttttgactttggaattaaaaatatttaacacagtcaaaaataatattaattcaaaaagaaaagagcaatttctaaaaaccccgttacaaagatgaaactgaaaaaacacagcggccgccaccgcggtggagctccaattcgccct

SEQ ID NO: 47455 - DNA, 441 bp, Homo sapiens
  misc_feature 343, 344: n = A,T,C or G
caaccctgaataaagggaacaaaagctgggtaccgggccccccctcgagagtacttctagaattaattaaggcggggtgtatagtatgagcaaaggccctgaagtgggccagagtatggcaagtacaaatgactgaaagaaagccagggtagtgaaattgcagtgtgtggtctataagataaggctaaagaggtaggtatagccaaatggagcccattattgggctgggggtggtggcccatacctgtagtctcagcactttgggaggccaaggcaggacaatagcttgaggccagaagtttgagaccagcttggacaacatagtgggaccttgtctctaaannaaaaaaaaaaaaaaaaaaaaaaagggggccccccccgggggggacccccaatcccccctttagggggttttttaacccccccttttgggccgttttt

SEQ ID NO: 47456 - DNA, 444 bp, Homo sapiens
gggaacaaaagctgggtaccgggccccccctcgagagtacttctagaattaattaaggcgggaaactaaaaacccatataaatattggcaaagaagcagcaaattactttgtttgtagagtacagtattacgtgtttagaaaatccaagagactttgaaaaaacacaaaaacaaataacacccgcacacacacagaaaaaacaggttttaaagaacagtgtgacatatttggaaatcaagaatataaataaaaagcaggttcccaaaagataaatggaaacagaagacaaaaaagcggccgccaccgcggtggagcttcaattggccctatagtgagtcgtattacgcgcgctcactggccgtcgttttacaacgtagtgactgtgaaaaccctggcgttacccaacttaatcgccttgcagcacatccccctttcgccagctg

SEQ ID NO: 47457 - DNA, 537 bp, Homo sapiens
tgattacgccaagcgcgcaattataccctcactaaagggaacaaaagctgggtaccgggccccccctcgagagtacttctagaattaattaaggcgggttacatggcagagaggggtgtaaaggacgaaagacagggaagtagaagctaagcaaaagctttaatatacttctctaaataatatataattatatgtgtgagataacatatatgcatttatgcaaaaactatatatatgcttgtctatatgagaaattagaacaagattgaaaagctagtctaaaagcatgctcaaaccatgacatccaaggtggaactccaattcaccctataatgcggccgccaccgcggtggagctccaattcgccctatagtgagtcgtattacgcgcgctcactggccgtcgttttacaacgtcgtgactgggaaaaccctggcgttacccaacttaatcgccttgcagcacatccccctttcgcctgctggcgtaatagcaaacaggcccgcaccgatcgcccttcccaacagttgcgcagcc

SEQ ID NO: 47458 - DNA, 501 bp, Homo sapiens
taaccctcactaaagggaacaaaagctgggtaccgggccccccctcgagagtacttctagaattaattaaggcgggggaaggaacagaaaaaaatctaaagaaatagtggctgaaaaatatccaaatttgctgaaaatcatcatcccacagacccaaaatttcaataagctccagttagaagaaagtgaaaaaaactacaccaaggcacataataatcaaaagcagtcagagacaaaggacattatgcacagaacaaaggtgatattgagcgaactccttgttggaaacaatgcaagtcggaagacaatggagcagcacctttaaggcactgaaagaaaaaaaactctcacctagacttccaaattaaaaaaaaaataaaaaaaaaaaagcggccgccaccgcggtggagctccaattcgccctatagtgagtcgtattacgcgcgctcactggccgtcgttttacaacgtcgtgactgggaaaaccctggcgttacccaa

SEQ ID NO: 47459 - DNA, 509 bp, Homo sapiens
  misc_feature 11, 408: n = A,T,C or G
gagtcgacgcntcatataactcatcagtaacagaagctgggtaccgggccccccctcgagagtacttctagaattaattaaggcggggtaatgatggcaaaaagatagaaatatagatcacaggaatggaatagaccattctgaaatagaaccacacacattgccaactaattttcagcagaatgccaggtcaattcgataaagaaataaaaatctttccaacaaatggtgctagaataaccagaaatccataagaaaaattaaaaaaacctcatgccatatgcaaaacttaattttaaataagttataagcctaaatgtataaaattgtaaggcttttagaacaagacattgcagaaaatttttacaaacttgaataagcagttatttgttaggcaggacaccacanaaacacaataaaaaaaaaaaaaagcggccgccaccgcggtggagctccaattcgccctatagtgagtcgtattacgcgcgctcactggccgtcgttttaca

SEQ ID NO: 47460 - DNA, 495 bp, Homo sapiens
cgcgcaattaaccctcactaaagggaacaaaagctgggtaccgggccccccctcgagagtacttctagaattaattaagggggattattatataatttgtgcattgttcactagagaaaaatgttatccagtcttaaaaagtgatagtaacagaaaatatgtagatatattaaataatatttatgatatgtaaaatgaaaaaccaagatggcgatttgtatatacatcataactatttaaaatatatatttaaaagacaaaaaaaagatagtattcatttttatagaagaaaatgattgtgtatatttatttcctaaatcgtcataatatttataacatataatatattgaaaacaaataaataagcaaatcaaattcttggaaaacttttttttatataaagcggccgccaccgcggtggagctccaattcgccctatagtgagtcgcattacgcgcgctcactggccgtcgttttacaacgtcgtgactggga

SEQ ID NO: 47461 - DNA, 262 bp, Homo sapiens
  misc_feature 180, 182, 183, 187, 201, 203: n = A,T,C or G
tatttaaggcgggttagttgtttgtagggctcatggtaggggaaggcgaaaaaaagaatagagaagatagggaaattagaagataaaaacatacttttagaagaaaaaagataaatttaaacctgaaaagtaggaagcagaagaaaaaagacaagctaggaaacaaaaagctaagggccnannaaanaaaaaaaaaaaaananccccccccccccccgggggggacccccaatcccccttttagggagtttttttacccccc

SEQ ID NO: 47462 - DNA, 471 bp, Homo sapiens
agcgcgcaattaaccctcactaaagggaacaaaagctgggtaccgggccccccctcgagagtacttctagaattaattaaagcgggtaaatggaattaatgctccaagatcctagtattgtcgtggaagtggtaatagtaatcattgaaattagagagtaataattcatttctgtataatcactaaaaggattataaaatctaacaagatcaaatggcagaaaaatggaaaaataaatacttgattgagtcttaaagcagtaaagaaaaataaaaagaacaaagaacagatgggacaaaaaaaaaaacaaaaaacataaaaaaaagcggccgccaccgcggtggagctccaattcgccctatagtgagtcgtattacgcgcgctcactggccgtcgttttacaacgtcgtgactgggaaaaccctggcgttacccaacttaatcgccttgcagcacatccccctttcgcca

SEQ ID NO: 47463 - DNA, 481 bp, Homo sapiens
taaccctcactaaagggaacaaaagctgggtaccgggccccccctcgagagtacttctagaattaattaaggcgggaggggaaaaatactatttggatagctattcactaaagaacaactcggttaagctgcatggtactcttgcttgctatcaggatgggggtaatcttttagatattagttattttactctgttacattgctaacagggtaaaacaggttaaccataatttatgtagaaaatatagaatgtgagaaaataaataacacaatgagaaatacaaagactaaacaaacattaaataaaaaaataccaaacacatgcataagatacaaactcatacagtaatactcagccttgaaataatcttctaaacttatgaaaatagcaaaacataatacaaaagagaaaatctcaacactgttattgtaaagttgttttaaattttgtgtgctaaatcattgatattaatattataag

SEQ ID NO: 47464 - DNA, 442 bp, Homo sapiens
aaccctgaataaagggaacaaaagctgggtaccgggccccccctcgagagtacttctagaattaattaaggcgggaggattgctagagcccaggagttccagaccagcctgggcaacacggcgaaacgccatctcgactaaaaatacaaggtaaaaaaaaaaaaaaaaacccgggcgggggggttcgcgtttggggccccaacaactcccaatttgaggccgggggaggaacccttgacccccgggggggggggcttaagggaaaggaaatcgcccccttgccctccaccctgagggaccgaccaaaactcctttttaaaaccaaaccaaaccaaaaaaccaaaaaaaaaaaaaaaaaaaggggggccccccccggggggggcccccaatcccccctaaaggggggtttttacccccccccccggggccggtttttaaaaaa

SEQ ID NO: 47465 - DNA, 499 bp, Homo sapiens
ttacgccaagcgcgcaattaaccctcactaaagggaacaaaagctgggtaccgggccccccctcgagagtacttctagaattaattaaggcggggaaaggacagactattgaacaacagttatcctgagacataagttaactataagaaaataaaatcattatctcacatcatagagacacattttcaagctataggcttaaatgtaaaaataaaattttgacaatttttagaaaaaaaatgctctttaggtaatgatttttaaaataacatacaaaagtagaaattataaagtaaaagactgataaatgtgttactatgttgaagtttttaaaaattctaacaaaaggttcttcaaacaaaatgaaaaaccaaaccacagactacaagatattaacaaaatacataacaaaaaggtattaattttcaggatacattaagtcctaaaagtcagtaaataaatacaaacaactgtattgaaaaaaatgaggcaaaaaatt

SEQ ID NO: 47466 - DNA, 572 bp, Homo sapiens
agcgcgcaattaaccctcactaaagggaacaaaagctgggtaccgggccccccctcgagagtacttctagaattaattaaggcgggaggattgcttgagtctgggaggtcgaggctgcagtgagccactgcactccagcgagtgatggagtgagaccctgtctcagaaaaaaaaaaaaaaaagaagaaaaaatatattaattcacaaaattgtcaaccacatgttgagaaatacatttttatacttgctgtatatttttcaataggtaatggttcaaaaattttaaagtacaaagggtatacagtagatggtagatttctgccacaactgtgcccacccaaccttttgtatttttccagaaacattctatacatatataaggaaatgcatataaatatatacatatataaaaacatatgcattttacatatgtgttaataccattggcacaaccacagacattatgcatgccggtttttttcacttgatgtatctgggttcttttttcctatacattaatctttttgtttctttggagtcagaagaagttatgaaggggaaggaagacatgc

SEQ ID NO: 47467 - DNA, 401 bp, Homo sapiens
actggccgtcgttttcaccccggaaaaaggtttacaccatgatgtctggcccgcgcgcttttctacaaagaaaaaataaaatattttattgcggggagaagattattatccagaatacataaagaattacaagtcagtaagaaaaggacaacccaaaagaaaaacaaacaggatatttctgaacaattcacagaacaggaaacccaagtggattatagaatgattttctctgtgttagtagttacctaaaagatcattgaaattttatagctgtcagtttagaaaaaaaaaaaaaaaaaaaaaaaaaaagggggcccccccccgggggggaccccaattcccccttaaggggggtttttttcccccccctctggggccgttttttaaaaaaaaaaaaaaaa

SEQ ID NO: 47468 - DNA, 545 bp, Homo sapiens
aattaaccctcactaaagggaacaaaagctgggtaccgggccccccctcgagagtacttctagaattaattaaggcggaggactacagaagccataaaagttctgaaaggcagacatacaaaataaagactgtcaaatgaaaacttcaaaatatttttcaaagatgaatgcaggataaagacaattttccaagaaacaaacctgagataatctctagcagacttcactacaagacatgttgaaagaagttcttagtactaaaggaaaatggcagggaatggaatcctcgatcaaccacaagaaagaggagtctcagaacaggtaaacagacaggtaaatgcaagattactttcattttttactatctttaaaatatgcttaactactttaaacaaaaaatagtaatgcaccatatgtctgataatacgtagaagtaagatacacaacaaatacaaaggatgggaaggaagctgtggacatctactgtgcacgactttgacaccataagtgacacagaaaaaagattgtgataagtttaaaacata

SEQ ID NO: 47469 - DNA, 449 bp, Homo sapiens
aaagggaacacaagctgggtaccgggccccccctcgagagtacttctagaattaattaaggcgggagttatttaagaataatttccattacctaataccttgatactaatgtgaaaaaaattatgaaaatcagaggtcaaacacttaaaaagatccacgaaaaatctcctacaaagacacttaaataagtaaaatcatcaaattttcataatgtaacagggagaagattgaagaaaccaaacaaaaaaaaaaaaaaaaaaaaaaagggggcccccccccgggggggaactcctatgaccctttagggggggttaatacccccccccttggggggggtttaataaatgaatagcacataggggttaacaaccatcctgcatcttccccctccctaaagcattccctcctttaaaaggaagtaagcaagccaagtgagttgtaactatgca

SEQ ID NO: 47470 - DNA, 438 bp, Homo sapiens
  misc_feature 56, 75, 105: n = A,T,C or G
ccctcactaaagggaacaaaagctgggtaccgggccccccctcgagagtacttctnaggggggaggcagccgggntcacaaaaacaaatcactagtttttatccngggcaacacagcaacaccacctctccgcaaaatacgaaaaaattttccctgcgtgtgggcggtcgcccgcgcctccggctccttctgctgctgaggctggaaagtgacgctccccctggctgcggagctggcggccagaccgaactccgacagtgctcctgcactccagccacggcaccaggccccgaccctatctctaaaatttaaaaaataaaatatataccttccctccgccaagtgcctcccaaaatccccctctttaaaaaaaataattccccccccccccgggggccctctttatcccattttgggggcttttttctcccccccccc

SEQ ID NO: 47471 - DNA, 278 bp, Homo sapiens
acaaaagctgggtaccgggccccccctcgagagtacttctagaattaattaaggcggggccagcttgggcaacatagcaagacccagtctctaaaaacaatttaaaaagtttacaaaaaagaataataaggcataaaagggtttcttaaaaagcacaaacaataaagaaaatcctgataaattcagtaacattaaatttagaaactcacgtctaacaaaagacactaattttgaaaagtcaaagatgggccactgacctagagtaaacatttgcaaaa

SEQ ID NO: 47472 - DNA, 298 bp, Homo sapiens
aagggaaacaaagctgggtaccgggccccccctcgagagtacttctagaattaattaaggcgggtggtaatcagtcaaaagtgtatttgtaatctctagagcaacctctaaatgaaaaaagaatatataacgaaaagctaatagaggagaaaatggaatagtaaaaaaataactgattactccaaagaaaaaaaaaaaaaaaaaaaaaaaaaaaagggggcccccccccgggggggaccccaattcccccttaaggggggttttttacccccccccctggggcggttttttaaaaaaa

SEQ ID NO: 47473 - DNA, 541 bp, Homo sapiens
ctcactaaagggaacaaaagctgggtaccgggccccccctcgagagtacttctagaattaattaaggcgggcccttgaatgcctatcttctctatatgctaatgcgtgcaaatggcggaatcatatgacgcgtatcttgccataagccaatattttgcctctgctctaaaaactgggccacttatcgagactatgttgctaaataccagattaattattcgcagcggggcgcggaggttcacactggtttttgagttactatgagaagccatggcggacgaataatcttgttaagaaatccaaaccatgctggttaactctgagaaaccgcctatgatgctgaggtggttgctcggcctaatggccctttccactgttgtgtgtggctatgaaaagcttatgaatcttcccaggttttgccaatgccgggcttttttttaaaactctccctgattccaacgctctggaatctgtggtaatccatgacttcctccactgtgcttccacagcgattctgacttctaactacttgtatctgact

SEQ ID NO: 47474 - DNA, 510 bp, Homo sapiens
tatgtacgcatgatgtacgccaagcgcgcaattaaccctcactaaagggaacaaaagctgggtaccgggccccccctcgagagtacttctagaattaattaaggcgggggacgttgtgttttcaccacaaaattgataactatgtgatgtaacgcatttattaattagctagatttgaccattctatgatctacatatagttcaaaatatcatgttatacccaatgaatacatatagtttcatgacaatttttaacaaacaaataaatttgtaaaaagtttatggattcagtttatgaaataacctaggaaacaagatatttctaaaaaaaaaaaaaaaaaaaaaaaaaaaaagcggccgccaccgcggtggagctccaattcgccttatagtgagtcgtattacgcgcgctcactggccgtcgttttacaacgtcgtgactgggaaaaccctggcgttacccaacttaatcgccttgcagcacatccccctttcgccagctggcgtaat

SEQ ID NO: 47475 - DNA, 502 bp, Homo sapiens
actggccgtcgttttacacacaggaaacagcgtgtgaccatgatgggtgcccggccctcagtacacagtgcttatagaattaactgaggcgggggggtcaagtcatttcccaagggagtacaggacaattctgaaacctctcttcatgtataccaaagcacaacaggtaagtaagtagattgtcgacagtgggagccagcattttctctgctggacagacaagttacagataaactggaggggaaggctagaataatccctatagaaatggattatagttggagatataaacatgaactcatgtagagcttaatagggatgctgatgaatatatatcaaattacagacgtgtatatgcacgcatttgtatatacacacctgtttcccagctctgtcccttgagggggccaagaagccaggatatcccagtaatgatgaacacaccagtgcccagatcttgagatctaattccattctcccaaaaaagaaactagggatcctt

SEQ ID NO: 47476 - DNA, 450 bp, Homo sapiens
ataaagggaacaaaagctgggtaccgggccccccctcgagagtacttctagaattaattaaggcgggcagatcacgcggtcaggagttcgagtccagcctggccaacatagtgaaaccccatctctactaaaaatacaaaaaaattagctagacaattgtggcatgcgcctgtagtcccagctacttgggagactgaggcaggagaatcacttgaacccgtgaggtagaggttgcggtgagccgagatcacgccactgcactccagcctgggcaacagagagagactcctctgtctcaaaaaaaaaaaaagcttcatacctccttatgggaaccaaccccatttttgaaaaactgtttacttttatttccccccaaaaaattcttttcaaaaatttaaaccgggctggccccgggggctaacacctgtaatcccacccctttgggaggcc

SEQ ID NO: 47477 - DNA, 451 bp, Homo sapiens
ggaacaaaagctgggtaccgggccccccctcgagagtacttctagaattaattaaggcggagggaggtgatacataaaattcaaacatgtcgtacaaaattgatttttatcattttttcttaaccataaaggtatcttttagaaattagtatttcttgtagaaaaagcacctcaaggtcagcaattccttaagtttaacaatgatttgttacgtttaggtaaaacctggccgggcacagtcgctcacgcctgtaatcccaaaaatctgaaaggctgaggcgggtggatagcttaagctcaggagttcaagatcagcctgggcaacatggcgaaaccccgtctctaccaaaaaaaaaaaaaaaaaaaaaaaaaaaggggcccccccccgggggggacccaaaatcccccttttaggggggttttttccccccccttagggggggtttttaaa

SEQ ID NO: 47478 - DNA, 608 bp, Homo sapiens
tttcaaccggaaataaagggaacacatgctgggtgccgggccccccctcgagagtacttctagaattaattaaggcgggggaggaaaaacattaggagaaatacttaatataggtgacgggttgatgggtgcagcaaaccaccatggcacgcatatacctatgtaacaaaactgcacgttcttcacatgtaccccataacttaaagtataataaaaataaataaataaagatggatctttcacagagaagttttgaaaatgactgatctaaataacattatgtaaaatgataggaaaactctaagttaaataaaaagaaacaagtttatttcttgcaggactttacaaactccttaaaatggaaattcacagtgtgaatctccagataacagttaatagaatcatttattttcttttgggtatacacccagtaatgggatttctgggtcgaatagtaactttaagttccttgagaggtctccagactgctttccacagtggctggactggtttgcattcccaccaacagtataaaagcattcatttttgtccacagcctcatcagcatctgctgtttttttgagtttttgatggcagtcaacctggct

SEQ ID NO: 47479 - DNA, 461 bp, Homo sapiens
aaagggaacaaaagctgggtaccgggccccccctcgagagtacttctagaattaattaaggcggggaaaatgaggagatgttggtcgaagggtacaaagtttcagttatgctggatagataagttccagggatataatgtacaatatggtaactacagtcagtaatactgtattgtatacttgaaattgctgagagagtagacattaatagttctcaacacatagaaaataaatggtaactatgtgaggtgatggatatgttaattagcttgtgataattattttgccatgtatacatatatcaaaacatcatgttgtgcaccttaaatgtatacaatttttatatgccaattatgctttaaagaagctggaaaaaattagcagaaagcacaaaaataaattatgaaaaatttaaaaactaaaaccccacaacaagcaaaaaccaaaccaaaaaaaaaaac

SEQ ID NO: 47480 - DNA, 314 bp, Homo sapiens
  misc_feature 260, 295: n = A,T,C or G
aacaaaagctgggtaccgggccccccctcgagagtacttctagaattaattaaggcggggggcttttgtgtgataacggttgtaatgttaagttttgttgaaatgtctgtagattaagttaaatagtatctgacatttgctttgaaataatcaaggagggaaggggcagaaaaaggattatccatgagatgataactggtagaagctggtgatgggctcatggggttcattatgtaattttgtcttctctggtataagtntgaaatgtttcatcttaaaaaacattttaggctangtgccatagctcacacctg

SEQ ID NO: 47481 - DNA, 470 bp, Homo sapiens
aacaaaagctgggtaccgtgccccccctctagagtacttctagaattaattaacgcggagaggtgacgttatatctcttggagaatacagcaaaaaaagaaagatatgaaaaaactactagagcaaaatatttgaaaattagaggacagatttaaaagtctaggaggtacaacattcaaataattgagttccagaaaaagagaacagtgaaaatgaaggagagaaataattatcatacaatttggtaaaattttctggaatttagacacttgagtttccaggttgaaagaacctagagatgtcaagtataatggatgaaaatggacacacaataagtcacagtgaaaattcagatcatgaacaagaaacaaaacactgtattaagctttcagagagagggtagaaaattcacttacaaagcataacaaattgaaataggcttagatttttccaaaataacactgacaatt

SEQ ID NO: 47482 - DNA, 315 bp, Homo sapiens
agggaacaaagctgggtaccgggccccccctcgagagtacttctagaattaattaaggcggggagtcttcattctctaaccctgtagtcagtgagcattaagtatctttttgttattaggactaataaaataataatgttatatttatttgtatattgcttataattttcaaaggctttcatgtaggttatcccatttgatcttggcaataatactgtgggattaatattattaacatcttcatgatacagatgaagatgccaaggctcaaagtcaataatttcattgccaaggtctcaaaaagttatagtaagt

SEQ ID NO: 47483 - DNA, 468 bp, Homo sapiens
  misc_feature 368: n = A,T,C or G
aaataaagggaacaaaagctgggtaccgggccccccctcgagagtacttctagaattaattaaggcggggggcgggggatgatttttgagtcccagtttcaccacttgttgtctgtctgaagttgaggcagttacttaactctctgggactcagtttcctcatccataaaataagagtcatcatgagacctacttccaaggtgtgttgtgagaattaaataatttaaagcagaatcatttgatttagattcatttgtaaaaagtctggcccataaatatatacaaacattattactgtttttttttcctttgagactgtgtctcactctgtggctcaggctggaatgcagtgcgagactctgtctcanaaaaaaaaaaaaaaaaaaaaaggggggccccccccggggggggcccccaattcccccttatggggggttttttccccccccctttgggggggtttttaaa

SEQ ID NO: 47484 - DNA, 622 bp, Homo sapiens
tggccgtcgttttacaccccggaaacagcgtatgaccatgatgactggccgtccttttacacacaggaaacagatattaccatgatgccgtggtccgaggttgttcacacagcaaacagatttgctgctgaaaatggtggacttgctttggacctgaatcaaaagctcgtgtctgaaaaaaagcactgttttcggtaaaagcagtgaactcaataagaaatgaatgaagcacgcctgcaccttttctagtctaaggttgcagtcctggttgggatgaatggcaggcttacagaacaaccagaaatgtaatagggagatcctggaagtgagagagccataaaggggttgtatacattctccatgcatctctgactaactagggactctctgtacacccaaaaagactgtcaggaaaataaaatctgggcagatatggaaactatataaactttggatgtcatcttcaaatcacacacagatccaatggtagaaggtaggttttatgggcttaaggtgtttgaacacaatctttgaccagtcattggctgaccattaagttatgcagatgatgctagaaagccaaactaaaaagtaaaaatataagaattttaaaaattttaac

SEQ ID NO: 47485 - DNA, 517 bp, Homo sapiens
tttacgccaagcgcgcaattaaccctcactaaagggaacaaaagctgggtaccgggccccccctcgagagtacttctagaattaattaaggcgggagataatctttgataaatggtgtctggaatttttcttaggcagaagaaaatcatttagattcttacctaaatgattagagaaaaataggtcccaactggaaatagtaaaataaaaaatcaagccactggtaaattagaaaaaaaaattgatattaccaaatatatggaaagaaaaggaatttcaaagtctaaaagaaagggaaccggtcattaaggaaaagatgaactgacttgattaaataaaaataattctttacgtaaaataattaaaagtgacaaaaataaaacatagaaattaataaaaaagcggccgccaccgcggtggagctccaattcgccctatagtgagtcgtattacgcgcgctcactggccgtcgttttacaacgtcgtgactgggaaaaccctggcgttacccaactta

SEQ ID NO: 47486 - DNA, 315 bp, Homo sapiens
  misc_feature 237: n = A,T,C or G
cgggatttctcagttatgtgactgcattggtactgcagttcagggaaacttaattcttactggtttgttttgttttgttttgtttttagtttaataagagataatgtctgaaaggacatgagcaaaagtaaagaaacaaaaatctagtcctgctgcttgacaaaatagtatgagaaaaaagcagacaagcaccaaaccaaacaataatagcaaaaaaaaaaaaaaaaaaaaaaaaanggggggcccccccccggggggggcccccaatccccctttttggggttttttttcccccccccttgtggcccgtttttt

SEQ ID NO: 47487 - DNA, 258 bp, Homo sapiens
  misc_feature 70: n = A,T,C or G
gaaaaagggaaacaaagctgggtgccgggccccccctcgagagtacttctagaattaattaagggcgggnaaaaatgcaaaaaagaaaaccatacctaggcatatcttaaactatataaacaaagactgagagaacatttaaaagccaaaaaaaaaaaaaaaaaaaaaaaaaagggggggcccccccgggggggggcccccaatcccccctaagggggggggaaaaaccccccccccgggggggggttttaaaaaaag

SEQ ID NO: 47488 - DNA, 487 bp, Homo sapiens
agcgcgcaattaaccctcactaaagggaacaaaagctgggtaccgggccccccctcgagagtacttctagaattaattaaggcgggcagattacttgaggtcagtaaagtttgacaccagcctggccaacatagtgaaaccccatctctactaaaaatacaaaatttagccgagcatggtggcatgcatctgtaatctcagctactcaggaggctgagacatgagtatcacttgaacccaggaggcagagggtgcagtgagccaagatcatgccactgaactccagcttgggtgacagagtgagactccatctcaaaagaaaaaaaaagaagaaaagaaaacagaaaacacaggaaaatatctttgcaacttggggataggcaaaagtttagtagggcagcaaagcagtaacaatagaagaaaaaaatagatattcatcaaatttttaaaattctgctgactgaagacactattgcgtaaaaaaaaa

SEQ ID NO: 47489 - DNA, 488 bp, Homo sapiens
agggaacaaaagctgggtaccgggccccccctcgagagtacttctagaattaattaagcatagtaggataacaggaaagcctttaacctggttaaaaaaaaacaaaaaaacttatccacaaccctccatcattcagcatcatcagtcctgatgcctgaaaggactttaaaaatctttaatgatgcatctaaaaataaggcctaaaacacaaatacccaagaaatagaacaaaggactttcaattaggaaccgtgggattttctcttaattacaagtgggttggaattggctttacaggataaaagatgaaatgataacagaattgaaaagtctatggtagcagcgagcaaactacagcccgcaggccaaatctggcccatctcctatttttatatggcctgtgagataaggatgtgatatggtttggctgtgttcccacccaaatgtcatcttgaattgtagctcccataattcccatgtgttggggg

SEQ ID NO: 47490 - DNA, 482 bp, Homo sapiens
taaagggaacaaaagctgggtaccgggccccccctcgagagtacttctagaattaattaaggcgggcattctacaaaacttggagttgtataatttatagtcgggattttgatttgacctagcaaaagagaagatcaaaatcgtaacaaaaatcatgagtcctctcattaaataaaataagaatcagcaatgtcatagaatgctattaaaagattatatgactagcattaaacttggctgtttttactgtgataaatttagtgtgtaactaaaaaccacaatttgagactgtagatttgataaataacagaagcctagcataacaatgaaattaagaaataattgttaatttattacatataggtaatttaaatgaactagttaaacatggtctgcgtgccttaagagagacgcttcctgcagaacaggacctgactacaaagaatgtttccattggaattgttggtaaagacttggagttt

SEQ ID NO: 47491 - DNA, 229 bp, Homo sapiens
gggaacaaaatctgggtaccgggccccccctcgagagtacttctagaattaattaaggcgggtgagggataaaaaactacatattaagtacagtgtgcactgctcaggtgacaagtgcactgaaatctcaaaaaacacactaaagaacttatccatgtcatggaaaaccacctgtatttccaaaacaattgacacttaaaaaaaaaaaaaacctattgacgttttttaa

SEQ ID NO: 47492 - DNA, 505 bp, Homo sapiens
gcgcgcagctcactcctcactaaagggaacaaaagctgggtaccgggccccccctcgagagtacttctagaattaattaaggcggggagggcctgttgagagcagattcattttggaaatactgttgctgtgctcttcaaagtgaaggaaaaggcgctgtgcctcatttttaaaagacctacataaaagacaaggagacttgacacttgttacttttatgacactttgtcccagggtattgcagtagaaagtaatgtgggacagcttcacagggtgtctgccagaagataatgtgttggaactgtgggctggcctaagtaagacattttgtgaattgaaaaaaggtatagtgatcatttctagcaaattcatttaatcatttagataaatgaggcattattttcttcatgcttccatccaatcctggaggtgaattttttccgtcagatcattctataagtcaccaattcaaattttcgcttggtgataatggagtctaagatga

SEQ ID NO: 47493 - DNA, 292 bp, Homo sapiens
ctaaagggaacaaaagctgggtaccgggccccccctcgagagtacttctagaattaattaaggcggggtaagatttgccgagttccttttactttttttaacctttccttatgagcatgcctttcttcaagttaaatatgtcaaaattatgtcccctattgttcatatgtattacacacacacacacacagaggaatgtccatccctccagagtaaacaggtatcactattccaaaaagcaatggaatagtctttatctgctactgagatcatttttgttttgttttgtttt

SEQ ID NO: 47494 - DNA, 465 bp, Homo sapiens
ctaaagggaacaaaagctgggtaccgggccccccctcgagagtacttatagaattaattaagcgggggcgcacttgagaagtgaataaatggggcggtttcggaagcgtcagtgttaccatgttatggatcatctgctgcgtttgaataaagactatctctgctggagactgcgcaggaaaaaaaggaaacaaacatgagcaaaggcatggcttcagttctcatttgtgtgtaaattaacaccacatggaaatgattgctgatgatgatgttcattctatcactttgtgacttagtgttctctttataaaatcctttacaacatcattgctggcattgctgttcgtctttcatatttccttagcccaaataagaactgataacagtatattgcaagtcctaccacatttttaaggatacatagccatcacatttcaaggaatctatcttatagaaatagcagcat

SEQ ID NO: 47495 - DNA, 464 bp, Homo sapiens
tactaaagggaacaaaagctgggtaccgggccccccctcgagagtacttctagaattaattaaggcggggatggggtagggagaggagacaggcagggtggcttcccccagctcaggagtgaccacagcctgtgaagatgctgctcctgctccagcatcaaccctcctccaaatgcttggatgcctgtccagggtctcaactgacctccctgcagtcagaggttgctccaaaaagggaccatctccaagcctctcttgaactcccttctctactcagcaaggccttgggcatcaagctaagatcactgccaactactgatgccttgcccctgagtacaaatgcaggagcccacctaggggtcaaggagctatcgtcaaacaggattcctgggttcaaatcccaatctccacctcctactggctgtgtgaccttggtcaagttacttaacctctctgagtatcag

SEQ ID NO: 47496 - DNA, 443 bp, Homo sapiens
taaagggaacaaaagctgggtaccgggccccccctcgagagtacttctagaattaattaaggcggggttgaatgcctgctatgtgccatgtactcttctaggtgttagtgacattgtgctgaacaggacatggagcttatacatgttctcctgagtgtatgctcaagtcacctcattgatttggctgctctatttaatctttatagggagttctctgtttttcttcctaatattccaagataacttttttcttgaatttatgaagtcctgtttatatataaccctaccttatgatcatagcatttaaataattttctcctcccccaagtagtagtgtttctggttgctactttttaatggctgcatagttcaagcaagtgtaccgtaattttacttagcaagtatttgttaaacatttaggttgcttctagtcaccttttaaa

SEQ ID NO: 47497 - DNA, 452 bp, Homo sapiens
gggaacaaaagctgggtaccgggccccccctcgagagtacttctagaattaattaaggcggggatggctaatgggctcagagaaccaagactaatgaataagatctggtatctgatagcacaacagggtaactatagacaataatcattaaatcgtacagtctgaacacctctcacagagtataataggattgtcatatgataaatgattgacttgatagataccctcatttacctcgatgtaatgcttgtgcaacatatgcctgtatcaaatattccataaactccataaatatatgcacctactatgtacccacgaaaattaaaacctttatgtaaatccaacacatgctcaagttttctcctgtatgtataaaatttccaggctggtctcaaaaattataaaaagagtcttcttttaaaaaattatttcagtgttttgaacttaaatta

SEQ ID NO: 47498 - DNA, 474 bp, Homo sapiens
  misc_feature 447: n = A,T,C or G
accctcactaaagggaacaaaagctgggtaccgggccccccctcgagagtacttctagaattaattaaggagggaggcctctgtgagcccctcgaggacggctggccgagagatacacacgtgcatgtgtgggccggatcccaccctgactattggcatgaccttgccgtctgtatgcgcctgtctccgatgcttattcctgcactcccgcctctatgagagcatgcggggggctgatcacaatgtctggacatacacactcttgcgcctatatctacagtaaccctacctttactattgagtaatcagcctcccgccttaattagggcggcggactgcaaaggccaatgttggtgctggcaaaaagtgagctggacatcggatcacagccgaaggagtaaaggtgctgcaatgatgttagctgtggccactgtggatttttcgcangaacattaataaactaaaaacttcatg

SEQ ID NO: 47499 - DNA, 493 bp, Homo sapiens
  misc_feature 432, 433, 435, 457: n = A,T,C or G
ctaaagggaacaaaagctgggtaccgggccccccctcgagagtacttctagaattaattaaggggggtattagctatggctcctattgcagaggcatagggctgataactaatcctatccctgaagccaatgtgcaactgtgttaacaatgctaacatgccttggaccctgtggaaataaacctgactgatgctccaaaaaacaaaggaaaaaaaaaagctttaggaaattatgcactcagcaattaaaaaaaggggatgtgagggatgtcttcaagtatttaaaaatacctgcaattcacaaattccttattatgtgggataaaaaattattcttcatttgtccaatttctagcctgtttttattgacataagctaatttagttttttcttttttcagaaaatgagaaagaaactaaattagcttatgtcnnanaaaaaaaaaaaaaaaaaaaaancgggggcccccccccgggggggaccccaaatccccc

SEQ ID NO: 47500 - DNA, 523 bp, Homo sapiens
  misc_feature 438: n = A,T,C or G
ctaaagggaacaaaagctgggtaccgggccccccctcgagagtacttctagaattaattaaggcgggagtgatgtaccacttttagaagataccagatgcctctgtactcattttgtttcctatgatcatcctctagataccagatagaggcccattcctgcatttgagatagggtgggaatatagtactctagatgatgaatgtgtctgctttgtgtttggtattaagcatgtccgatttcctggacaacatttctagacacaccctaggccgccacgcaacgggggtgccttgaaagaccggacccagggctggcatgatcccccacctggtgactaaatatcctttgagccctgaataaccagcagcagtacccaggtagcatatcatgggccttgggtgaccctctacgatgtgctggtttaggtgtgacctancacgttcctagctgtggtggctatagtgagagattctttctgcttgagaaagcagagggagaagtaatggggactttgtcttgca

SEQ ID NO: 47501 - DNA, 505 bp, Homo sapiens
tacgccaagcgcgcaattaaccctcactaaagggaacaaaagctgggtaccgggccccccctcgagagtacttctagaattaattaaggcgggggtggagcgctgatcatttcaaggatcttcaggaactgaaatgatcagaacttgggaatgactgcatgtgcgaataagggggaaaagtcaaggaaatgcccaggtttggggcccaaggaacaggtttgggaggccgaggtgaggagttcagctttggacataatgagtttgagatgcccacaggacatccaaatacaaatgttaaaggggtaactgaatatatgtgactggagtttgcgtaaaaaaataaaaataataaattaaaaaaagcggccgtcaccgcggtggagctccaattcgccctatagtgagtcgtattacgcgcgctcactggccgtcgttttacaacgtcgtgactgggaaaaccctggcgttacccaacttaatcgccttgcagcacatccccctttcg

SEQ ID NO: 47502 - DNA, 622 bp, Homo sapiens
aattaaccctcactaaagggaacaaaagctgggtaccgggccccccctcgagagtacttctagaattaattaaggcgggtatgttcaccacattgatgtggtgatgatttatgtgtgtatgtatttgtcagacttataaaattgtactatgtcaattacatctcagtgaagctgtttttaaaaaacaaatatttgtgggctcggcatggtggctcacgcctgtaatcccagcactttgggaggctaaggtgggcagattgcttgagctcagtatgtcaagaacagcctgggcaacatggtgaaatccatttctacaaaaaaatacaaaaattagccaggtgtggtggtgggcacctgtagtcccagctattcaggaggccgagacaagacgattgcttgagcctggaaggtggaggctgcagtgaaccaagatcacaccactgtactccaacctgggtgacacaatgagactctgccttcaaaaataaaataaaaaacaagtatttgtgatttggaataagtaaagatttctcagcttgggacataaaaagagacaaaccaatatttgtgattaggaaatagtaaatttttctcagcttgaacaatgaaagaaaaaattggg

SEQ ID NO: 47503 - DNA, 475 bp, Homo sapiens
aagggaacaaaagctgggtaccgggccccccctcgagagtacttctagaattaattaaagcggggggtgtatgggaaattgtccccgcagaaagtaaaggctggccaggccgcccccagcacgtagagggaatgagtcaggctccggctccacactggcacgtagtgggcggatcgcgccggcgctgagtaagaaggagcttcagccgccagcccggaacgcatcataggttagcttttcaagacacttcctgcatctctgacctgttgcacctctgttatcttggcacctctgttatcttagcagcaagcacctgcctcaactgacccttgagccataaccccatagctcctgaaaagtacatcaagtctaaagtgaaccagctaactcattaagactggaatcatgagcaacaatggagcagacctaacctttggttacatctcctgttttgtagctatccttttgtttggct

SEQ ID NO: 47504 - DNA, 526 bp, Homo sapiens
taaagggaacaaaagctgggtaccgggccccccctcgagagtacttctagaattaattaaggcggggagtcaaaatccagcaactaaatgttttggcctggaaacatcacatgacacttggctattggccagactaatcacataaccccacctgaatgcagggaggcaaggaacttcagtctttcgtacgtgcaggaatcagaaaagatccagatactggtgaatactcgtgggtttcaataaaaataccattgaattattgggaagaaactagacaagctataaaactttatatgatcacgcctgtaatcctggcactttgggaggccaaggcgggatagagaccagttttctctggaagtttgtttaaatgacagaagcgtatatgaattcaagaaaatttaagctgcaaaaatgtatttgctataaaatgagaagtctcactgatagaggttctttattgctcattttttaaaaaatggactcttgaaatctgttaaaataaaattgtacatttggagatgtt

SEQ ID NO: 47505 - DNA, 526 bp, Homo sapiens
actaaagggaacaaaagctgggtaccgggccccccctcgagagtacttctagaattaattaaggcgggtaaccccaaacacttaacagttgtatctctgattcctgtttttggtaaaattatcacagatttttaaccctgcatacagccacacacaaaatctttagtgaatattgccattattataaaatatctatttactaagcctaaggtggaaataaaagtaactttttttttcagattattactagggagatagtactattttggtgaaaagcgttgtttgtgtccctgtccaagattttcatcttagttctaatacttatttgtggagtgacttggcatattgctagttttctcggtctcaatttcatcatctataacgtgggtataataatacccacctcgaacactttttgttagaaccgaatgaggtaatgcacgtaaaagcttaacatagtcccaagtatatagtgagcattcagtacatggtaccttatcaagtttaatagcattatgtcattggt

SEQ ID NO: 47506 - DNA, 460 bp, Homo sapiens
caaaagctgggtaccgggccccccctcgagagtacttctagaattaattaaggcggggcagctcgatcaagcaacatttctaccacctgctcgtggccactccttgctccacagtgcagtggtgtcagaccattctgttgaacaaaggaaacatcaccaattaaatttgacaataaattctatgagtgcagtgtacttcttcaagatccagcatggcacccaacatgctgtggtcaagcgggcttcaaacatttgctcatttatttcataaaataattccttattttaggtcgaaaactacattttttcatatgtttaagtagctgcaaagtatgtaatttcccacaagtatgaatattgacggttaaatatataactttttcactagtcttttgaatagccaataaaatctaagtactacaagttatttgatgctcaccagagaaaggactacataacc

SEQ ID NO: 47507 - DNA, 458 bp, Homo sapiens
aaagggaacaaaagctgggtaccgggccccccctcgagagtacttctagaattaattaaggcgggggttgcagtgagcctagattgtgccattgcattccagcctgggtgacagagcgagactccatctcaaacagcaacaacagcaaaaaaaccctctgtgtctctttctaatgtatatttcctgtcataagtgcaatcaatattcagattctccatgaaatgttaacatcatcactctatttcttaaagaagagtgaggtgatagagcattttattgccaaatggctcagaaaaaaagttccttgtattgtatttgtaatttctctgtaagtatgagattgtttcaatttttttttttttttttgaaatagggtcttgctgtctccaggttggagtgcaattttggttcactgaaacttccgcctcccgggttaaagcaattttcctgaactcaaa

SEQ ID NO: 47508 - DNA, 496 bp, Homo sapiens
cgcgcaattaaccctcactaaagggaacaaaagctgggtaccgggccccccctcgagagtacttctagaattaattaaggcggggggccaaccgctgcgtcgtccctgggcccgaataactgtcgcccgcttccctcagcgtgaggtaggagaagggcgctggggcctagtgcctcagggcccctggcagccgtgcccctgcggcgtcctgtgtggcgcatcccgccgaggacctcttcgcccgtctcctgcccgcccctgtcggccccggggcggtctgaggcggggccccagatggactcggcctgcccctgcttttcttcctcaggctcccgagttgtctactcagaaacgcgggcgttgtttctcacatcggtgtccccagctcacaggcttttcttgctcctctgaactgggacgggcgtcgctggccgcttggcgatgtcccaagtcccagtcacgcctgacggggaaacttaaaacccagttagattac

SEQ ID NO: 47509 - DNA, 489 bp, Homo sapiens
taaagggaacaaaagctgggtaccgggccccccctcgagagtacttctagaattaattaaggcgcgtaggcctaggattgtgggggcaatgaatgaagcgaacagattttcgttcattttggttctcagggtttgttataattttttatttttataggctttgctaggcagagaagtggaagagtacaagaaattaacaccacctgtaaggttcgaagtgttatctcccttggctagcagagtgttcctttataaagaagctactctttgattaatagacttattgaatcaggtgaactaacatagttttagtaattaaagaattgcaaaatgttccaagaaaaaaaaacagacatttgtaattataacaactctagtagcattgcaggagtatttatcagttcttgtagtcagtatgttgacctcagaacccctgaatgttacccaaataactaaatacatggcttattttaggaaacttactgtact

SEQ ID NO: 47510 - DNA, 572 bp, Homo sapiens
aaagggaacaaaagctgggtaccgggccccccctcgagagtacttctagaattaattaaggcgggaggatcgcttgagcccaggagttcgaggctgtggtgagctatgatttcgccactgtactccaggctgggtgacagagccagactctgcctctacaacaaacaaacaaacaaaaatttgattcctgtatatggcactttctatgtagctgtgcagctggtggaggagaattcctggaattcctaataactccactgaagatggtctggagtcttccctcagagctcagcgcagagaaggtttgctcagcagagcaggtatgcaaggcagaaggcctggctttgcaggccgaccaattcgcttctgtgactttcatgttgtttgatttggtttcttcatctaagcattgcagtgtttaagagcaaggacaggggatagagctagggttgggtcctgccttagcaactagccacatttcattaaatctaggacatcatggtttgcaagatgaaccattattttatgtatccccaaagaaaaaaatactgccaaactatgacaatgatctc

SEQ ID NO: 47511 - DNA, 484 bp, Homo sapiens
aaagggaacaaaagctgggtaccgggccccccctcgagagtacttctagaattaattaagggggaggggctacatatagtgcaattcatcggatgtaacctgtatacccgaagaggattggcagcgtgtgaatccgtaactcattaggtggtgaactctgacatggtcaagccagaggtaaagctgtttataatcattacttatctcacttaatatgttcatatgttttgctgccaaaatattaatgcccaaaatactactagagtgttaacatataatacatatattttattacttttacataatctgaaaaacttggaattctaatatatatatggccccaaaagcttcagaaaagacactgtgaagtgtattagggatctcacataaatcttttttttttgtatgatataaattcattaccctcactgggaaaatgagatcgtagtactttatgcttgaatcgttagctatttgtaatgct

SEQ ID NO: 47512 - DNA, 496 bp, Homo sapiens
cctactaaagggaacaaaagctgggtaccgggccccccctcgagagtacttctagaattaattaaggcgggcggatagctagagcccaggagtactatacctgtgtgggctttatgacgagaccctgttctacagattctggttactactaaagaaatagataagcaataatgtacaatttttattgaatattttgacatcacattcagtaaggatatctccaaatgatcagtaaaacagtgagctaaaactagagttttgagtggtgagcgtgtgtgaaatgcagagaccaaaccttagttcaagggcaaggtgagcaaattgaatctgaagctcccgcgttaaaatactgcacttggatgtggacaaaatgatacacatacatacacagctccctgcataagcaaatatatatcctctagaggaaacatactgcatttaggcacccagctattttcaccggtggctatcatgcaaatagaagtttaggagcaaa

SEQ ID NO: 47513 - DNA, 616 bp, Homo sapiens
accctcactaaagggaacaaaagctgggtaccgggccccccctcgagagtacttctagaattaattaaggcggtagggctacgtcgggccatgcgccatgctggataggcactgccggtgatggtgcatgagcttgctattctaacccacctgactgagtaacattcatacagcgacctggtagctgcttgcatgctctagtgttgattatatggaatattttcttacctagataatcttgttgcccttatcatgtactactattgatatccccgagggcaagcactctagtctgacctggtcccacttccttacgagttgcccgatggccaaagagtagctgatatctagaactactacatgatcactattgcgcatactgtattagctctgactcactcaatatcattcacctagcagtgaaacaccttgaccatgtgacagtcaaactatctcctgatattgtgcataccagtttccacggggttgggctgccggtcagagcttaagaggactagcaccctgcaatgcccctcttcactctaaaatgtacactgactgctttagagcccttgataatagtcttattcccaccacatactaagcactccataaa

SEQ ID NO: 47514 - DNA, 562 bp, Homo sapiens
  misc_feature 513, 537, 538, 539, 540: n = A,T,C or G
accctcactaaagggaacaaaagctgggtaccgggccccccctcgagagtacttctagaattaattaaggcgggcacgctggtggaagcgcgtgccaccgcatgggaggacatacgcccgtatataaagtgccgatggcctgaggcatcggtgcagagggtgggaaaaacccaggatgttgattcatagatacgcggcctcctttgtccctggagagcgccattctcacgagcgcccctccggatacggttggaggtcaaactggccttcctaagcgcagcaccttttcaggaattaccttaaactgtgctcttgagtgtatgccatgtaattccccttcgtcgctttaaatatctgccctattggcaacccggtctacttataaaacgggtacatatataatcctgggtctatatacctactactaaccggcaatcggaccaatctatcaccctatagaagaactaatgttagtataagtaacatgaaaacattctcctccgcataagcccnaggggaaaataaaaaaaatatatnnnnaagggggcccccccccgggggg

SEQ ID NO: 47515 - DNA, 511 bp, Homo sapiens
caagcgcgcaattaaccctcactaaagggaacaaaagctgggtaccgggccccccctcgagagtacttctagaattaattaaggcggggtggctgggatttgctggaagaggcataggtccagaaaagaatgtaaaaaaggtactagaaagaaagaataaggcctatagccatcaggctgctagaacctttggacaagtcactatctaaaagcaggtaaagacccagctttttgtccatctggtcaggcacctggtggcgtgagtctttcagaacatactggtcaggcggtggctcacgcctgtaatctcagcactttgggaggctgaggcaggaggatcacttgaggtaaggagttggagaccagcctggccaacatggtgaaaccctgtctctactaaaaatacaaaaattagccaggtgtggtggcgggcatatgtagtcccagctacttgggaggctgaggcaggagaatcgcttgaacccaggagtcggcagttgcagtgagccga

SEQ ID NO: 47516 - DNA, 525 bp, Homo sapiens
cagcgcgcaattaaccctcactaaagggaacaaaagctgggtaccgggccccccctcgagagtacttctagaattaattaaaaaaaggaagcagaaaaggaatttgtggctataggtccaaattaaatagctataaatggaccacagaattattttaggccctttgggaaactctcaagaagttcagtgatctacttcatctggtcatacatccaaggctgactcaccgagagaatctctttgctagccccccggaggagaatggtgcaggccttggggtctttgcagtcagtgatgaaagtaaagtattcatctccaattttcttgatttacaacaggcctgctcctgttccaacatcatcttctctcagttcctctggtcggctgactatccgggccccacaggctctaatggacggaagaggtggggagaatcagatgatttcagatacttgtacccatttccctaatctctagggtctgtagctagggataagggcaaaagtggattgtcggaaacatcac

SEQ ID NO: 47517 - DNA, 475 bp, Homo sapiens
aagggaacaaaagctgggtaccgggccccccctcgagagtacttctagaattaattaaggcgggggaatcacttgaacccaggaggcggagggtgcagtaagctatcatgccactgcactctagcctgggcaacagagagagactccgtctcaaaaaaaaatttcagagttttggcctcttgagtctgatgatgtaaacgagatcacttcttagcttcatttgattgtcctagacccctaacagttgccttctcttcctttttttcttctgcagtggataggtcatttacatcttttcttgttatttggctaggttctgaagccagacacaagatgaaaaagctaactccaaaacagaaattttctgaagatttagagtcatataagatatcagtggtaatgcaggaatcagctgagaaactttcagaaaagttacataagtgtaaagaatttgtggacagttgcaggcttactt

SEQ ID NO: 47518 - DNA, 563 bp, Homo sapiens
ctaaagggaacaaaagctgggtaccgggccccccctcgagagtacttctagaattaattaaggcgggaactgtgactgtgttaaatatggaatattttatatgtaataccatgtcatatatacttgcaatatcataccttgcgttcaatatacaatgcaattgactctttgcacacctgcatttttcagtgaacaataaaaagattgtctgagaaacatctattacaagtttaaaaaaggcgccccccccgggggggaaactcaaaactcctcacaaccgctgttttctggcccccatcaaagacttagtatcatgggggttgggaaatgaaaagtaggagaaaagtgagattttactaagacctgttttactttacctcactaacaatggggggagaaaggagtacaaataggatctttgaccagcactgtttatggctgctatggtttcaaaaaatgtttataccattatttctaccgaaaattaaaacttcagattggtcaacatgagagaaaggctcaacaacgtgaaataacgcaaatggcttcctctttcctttttt

SEQ ID NO: 47519 - DNA, 607 bp, Homo sapiens
tgattacgcctagcgcgcacatgtaactcctcactaaagggaacaaaagctgggtaccgggccccccctcgagagtacttctagaattaattaaggcggggtgctcgctcttgtcgagtctgttcaaacctgcacggactgatccggaaatatggcactcaatatgtgccgccaaagtttccgtcacttctcgaaggatattggtgacattggttgggactacatgctattactctcaaggattatcacggggcatactactcagtgaagaaccatgatgccttctttgtatataagataacgtacatggcataagagccacatgggacgtgtcctaacgtggtgacataatactatctctgtgtggatatgtactctatcctcctcgtatgagtaggttataaagagaagagaaacatttgacaaaatcaatattttagaaataccaaattagtatttttcaaaacttatgaatatcgatccccatgtttaaaaaactcagaacctcaagcaagagaaacacaagcaaaaccacaagcaggcaaatcctagtaaaactgttgaaaagtgaaaagaaaatcttaaaagcatccagaagcaaaaaaaa

SEQ ID NO: 47520 - DNA, 470 bp, Homo sapiens
accctcactaaagggaacaaaagctgggtaccgggccccccctcgagagtacttctagaattaattaaggcggggacaagagccacttcaagtggtctccgccttatctggagtgcgagaacgggagttacaagcccgggtggctggttactctttcctctgccatctacgggttgcagcctaacctggtcccggaattcaggggtgtcatgaaagttgacataaatcttcagaaagtggacattgaccaatgctcaagtgatggctggttttcaggaactcataaatgccacctcaacaattcagagataagaaacctgacaatgagaatccacagaagtgacactgcagcgggataattaaggaaccagagagaccgaggggttgaggaggaattatttaattatttaggtgcacagaccgagtccaatgaacatccaaaggactgagccctgaacaaagaatcaagc

SEQ ID NO: 47521 - DNA, 604 bp, Homo sapiens
  misc_feature 520, 579: n = A,T,C or G
aaagggaacaaaagctgggtaccgggccccccctcgagagtacttctagaattaattaaggcgggggaatcgcctgaacctggaaggcataggttgcaatggaccgagatcgcaccactgcactccaacctgggtgaagctttatcttcttcaaagcctttcctaatcatgtcaatgcaatctgatcttctaaatctctgatgatatctctttttaataactattatttatttccatgaagtataaatatcatgagcagccataattctaagggtacacgcaaattttgcataagacaaatgtactgtttgactgtcagttctaagaatcaggtctgagttgcaatcatccatttgctcaacatagtttttagacactatgcaaggcaatagagataggaatgatactcatactttaaaaggagaagaaaggaggaatgcaaaaggaggaaaaaaggaagaaaaaggaagggaggaggagaaagaaaggaagaatgaagattagcactactggaaaggtnaaagaaagaagaaagaggagaaaggaggggaaaaaaggggaaggaggaggaagcagtantagtgatagtggtagtgttgctgat

SEQ ID NO: 47522 - DNA, 428 bp, Homo sapiens
ccctcactaaagggaacaaaagctgggtaccgggccccccctcgagagtacttctagaattaattaagggggtaagaaaaggttgtggtcgaaggatgtgttaatattctgagcctccgaattctaggcttttgcattcttgtcaatatatcttcataccatagagtgaaaggcatcttataaaacaatcaaatatcttttagagtatggacaactattatatatcctcaaacaaaaaaaaaaaaaaattaaaagttgccggccccccacagggtggcacccccatctcccttaaaggagaccatcccccccgcccccaatagacctttaaatccatgacgcagggagaattgcgtcatttaaagcctagttaacgcatttactaaacgcagacgaaaatggaaagattaattgggagtggtaggatg

SEQ ID NO: 47523 - DNA, 537 bp, Homo sapiens
accctcactaaagggaacaaaagctgggtaccgggccccccctcgagagtacttctagaattaattaaggcggggttagaccattgccaagtcccagactggcaacagggtgggtggtgcatctgtgggacagatccaaaaagcactgcaaagactttgaaaacttaactgacattggagttctggctggggaacagtgcaaggatgtcctctctggcaatttctattggtattgaagttctggccagttaaataaaccaaagaaaaaaacattagaaaaaaaaaaaaggggcccccccccggggggggcccccaggtggccgatttggagattattttaaccgccctttttggccccgtttaaaaaggataaatatactgcccaggtggatgccgaaaaaaaagaagatgtgaaatcttgtgctgagtgggtgtctctttcaaaggccaggattgtagaatttgagaaagagatggagaagatgaaaaacttaattccatttgatcagatgaccattggagacttgaatgaagctt

SEQ ID NO: 47524 - DNA, 585 bp, Homo sapiens
accctcactaaagggaacaaaagctgggtaccgggccccccctcgagagtacttctagaattaattaaggcgggggctgtggcggggcagtctggatcggccggattgaggcaggggcggtccatgtaaccatgaccaacctcagccttattcagcatttcctcccagctgtccacttgatagtttattttctttaactcttccaggaattccaaagggtcgaagtttgtccaccgcaaaggaggtttacctctgcaaaagaaattaggagacgagaccatgaaaagagccttctaaacgcatcgtaaagtaacacggctgcgcccactgcatccaccttgtaggaggttcctggcaatgctgcaattctgggactctggcatcaaaacaaatgctcctttccagcatatctgcataaaaacttaggtcaggaaaataattcatgactgaagatgctaagcagagagaggactcataagttaatgagggcactgaataatctttaattgctgatattgtatatttaatatctacatacaaaattagccaaaaagacagatccaaaattcaattttttttttttta

SEQ ID NO: 47525 - DNA, 369 bp, Homo sapiens
accctcactaaagggaacaaaagctgggtaccgggccccccctcgagagtacttctagaattaattaaggcaggggaatcatttaggtaggagactgtgccaagcagtattgggaatgaagagaaatcggaagaagtattgacaaggacaaatcaaatatctgactggatatggaattgaaagaggaaatcaatgataacaaggttcgaggatcagttatgctgcaggtctaccttgtcttcagtattttattgaagtcattcctataacatctgtgctagtgcttgcttcagtagcacatatactaaaattggaatgatacagagaagatcagcaaataaaaatttaagtacaaatttaaaaaaaaaa

SEQ ID NO: 47526 - DNA, 474 bp, Homo sapiens
gaacaaaagtctgggtaccgggccccccctcgagagtacttctagaattaattaaggcggggtgagatttgccgagttccttttactatttttaacctttccttatgagtatgcctgattgggtgctggttgctgcgtcttgactgtaaataaactcctatcatgccttttgacataagacaaaaaaatcaaaagtatttgaattttatggagataaccaagaggcattccgacctggagccattgtgtctccatggaggctgaagagtgggacgcctcactgcggctgcctggaatccagctggaggaagcaggagagtaccgatgtgaggtggtggtcacccctctgaaggcacagggaacagtccagcttgaagttgtggcttccccagccagcagattgttgctggatcaagtgggcatgaaagagaattgcgtgaacccgggaagcagaagttgcagaaagccaagatt

SEQ ID NO: 47527 - DNA, 505 bp, Homo sapiens
agggaacaaaagctgggtaccgggccccccctcgagagtacttctagaattaattaaggcggggtagataatacatatcaatgtgacaacttcatgctctcgttttattaatataatgctaaaattatagctaacatttattttctttctcagtacgttatatagatatatttattctttattttcacaaagtagatatattctttctcattttaaggaagatgacttggagatatgacaaccggcacaagaacagagacagtaagtgattgacctaggatttgaaccaagaactgaaacaagagccacagcttttaactattacacaagagctatagaagcaaaaacaaaagagacattaacctgcgcttagtgtggctccaggttttacaggtggcaacaaaatatgatgattcaacacgcttaggagtggcatatataataatcaaggtactgtatttgacatcacaccttctgctactactacaaactctcatttagtaaa

SEQ ID NO: 47528 - DNA, 454 bp, Homo sapiens
ctaaagggaacaaaagctgggtaccgggccccccctcgagagtacttctagaattaattaaggcggggtatggaaaagtaccaagtattgggccaggcctacagtagctcctcaaaaatgccaggtccttctgccttccagtcaccacgaccttttatacttttgttcttttgcagttcccagtccttaaggtcagtggtggagccgaatttgctttgtactctatgactttcttggaaagggccctttattgattcccttatgaataggtctctggcctttctgcaatgctggggaatagttgggcataatttacatgtaaataatgccaggaaaaaacaaaacaaaaaggccccaaagaatcctagaaagacagagctgggcaaactctgagggttcctttaatgccaggacaaaatttaactggcttgtaatgaaaggaaaaaaaaaaaaa

SEQ ID NO: 47529 - DNA, 487 bp, Homo sapiens
ctaaagggaacaaaagctgggtaccgggccccccctcgagagtacttctagaattaattaagggggggttataaaataagaattatttgcagttgacacaactttctctttgaaaaaattcaagataactgaaaaatctaatctaaattaaaggtgcattcacagatgtaactgtacaaaagagcactggctttcttatatgccagccataaccagtcagaataagcctaacaataaaagttcaggaccttggtgaagaaatgcataaagcctcaatataaaagaaaatgaacaaacaaaatgcttgccatgcctttggatggtaaggctcaatggtgtgaatatggcaattctgtacaaattcatctacggaattaacacacaccgtaagaatttctttttctagaacttgacaaagttatttctgaagttcatttggaggaataaacatgcccaacttgccaagaaaattttgcggaagaacaaa

SEQ ID NO: 47530 - DNA, 680 bp, Homo sapiens
gccaagcgcgcaattaaccctcactaaagggaacaaaagctgggtaccgggccccccctcgagagtacttctagaattaattaaggcgggacatctctttgctccttcagtcctagcttgagactgagtctcaacctgatacaggttctaagattggggcaggcaaaggaggtaagagatgtcccgcattgtctaatgtagttaataccaaaaaaaaaaaaaaaaaaaaaaaaaaaaaagcggccgccaccgcggtggagctccaattcgccctatagtgagtcgtattacgcgcgctcactggccgtcgttttacaacgtcgtgactgggaaaaccctggcgttacccaacttaatcgccttgcagcacatccccctttcgccagctggcgtaatagcgaagaggcccgcaccgatcgcccttcccaacagttgcgcagcctgaatggcgaatggaaattgtaagcgttaatattttgttaaaattcgcgttaaatttttgttaaatcagctcattttttaaccaataggccgaaatcggcaaaatcccttataaatcaaaagaatagaccgagatagggttgagtgttgttccagtttggaacaagagtccactattaaagaacgtggactccaacgtcaaagggcgaaaaaccgtctatcagggcgatggcccacta

SEQ ID NO: 47531 - DNA, 472 bp, Homo sapiens
ttaaccctcactaaagggaacaaaagctgggtaccgggccccccctcgagagtacttctagaattaattaaggcgggcatggggacgggcgcctgtaaaaccatcttctcatgaggctgaggtaggagaatggtgtgaacccaggaggcggaggttgcagtgagccgagatagcgccactgcactccagcctgggtgacagagcaaggctccatctcaaaaaaaacaaaacaaaacaaaaaaaaaacagtcttctggctactcattagggaactctgagccaattacttaacctctctaagcctcattcacaaaatattcaaacatacctcggtataaaaatgaatgatcccctatcccacgatgtatacaattaagatctgtccatcaaaaaaaataatacactctgggccacccatgcagtggctcaaacctgtaatcccagcactttggaagtcgaagtgagaggactg

SEQ ID NO: 47532 - DNA, 581 bp, Homo sapiens
taaagggaacaaaagctgggtaccgggccccccctcgagagtacttctagaattaattaaggcgggggctgtggcggggcagtctggatcggccggattgaggcaggggcggtccatgtaaccatgaccaacctcagccttattcagcatttcctcccagctgtccacttgatagtttattttctttaactcttccaggaattccaaagggtcgaagtttgtccaccgcaaaggaggtttacctctgcaaaagaaattaggagacgagaccatgaaaagagccttctaaacgcatcgtaaagtaacacggctgcgcccactgcatccaccttgtaggaggttcctggcaatgctgcaattctgggactctggcatcaaaacaaatgctcctttccagcatatctgcataaaaacttaggtcaggaaaataattcatgactgaagatgctaagcagagagaggactcataagttaatgagggcactgaataatctttaattgctgatattgtatatttaatatctacatacaaaattagccaaaaagacagatccaaaattcaatttttttttttttaaaaa

SEQ ID NO: 47533 - DNA, 650 bp, Homo sapiens
taaagggaacaaaagctgggtaccgggccccccctcgagagtacttctagaattaattaaggcgggtatggcgaggttagcgaggcttgctacatgtcatcagaaagctattcttgggagttgagtgtgaagtgcttgaaatgtgaaatgcatgtgaacgttatttttaccgtgtactggaagaagatatagatgttgttgtcttcctttattcttcacaattaagtgcatctaactgtgaattgtatatggaattacgttatccaccttatacatatatttacctgctttgatgattctctgtatcccaaataatactgatgcatgctgataaccactcgaacgagtatatatatttacatacatggaagaataatatattattctgaatactgcttgagtttgaccagtactactggagtcagcaacttttttaatataagagaaggtagtaaatattttaggcattgtggaccatatgggctcagttgcaactacttaaactgtgctacaggagcacaaaaacagccatagataaattataaacaatgggcatgactgtgttcctattaaacttcatttacgaaactaggccgcaaaccagatttggcccacaggctttagtttgccaacctctgcaatggtgcatg

SEQ ID NO: 47534 - DNA, 497 bp, Homo sapiens
  misc_feature 459: n = A,T,C or G
agcgcgcaattaaccctcactaaagggaacaaaagctgggtaccgggccccccctcgagagtacttctagaattaattaaggcgggggcttagtgtcgacttcaataattggaaagactgggaagatgattcagatgaagacatgtctaattttgatcgtttctctgaggtaagttcctttaaatggacctctccccattcgaagcacacggtacctgtctatgtagtcaatttaatatggttttgggcacctaatggtattcatgatgcatgttattttatttttaagaccattttgcagtcatagtaaatagatgttaacaatggcaattttaatcctgaagttgaaccattttaatgattttaaaaggaattagtgttagctacaaaagttacaaaagttaatgcattaagacaaactaacacagctagtttgctaatttcatcattgggactttntttttttttttttaaagcatgattgcagtagttgactt

SEQ ID NO: 47535 - DNA, 518 bp, Homo sapiens
aaagggaacaaaagctgggtaccgggccccccctcgagagtacttctagaattaattaaggcgggagggtaacgagaatgcatctctacaaaaataaaaataaaaaagttagctggacgtggtggtgcatgcctgtggtcccagctactcgggaggctgaggcaggaggcttgcttaagcccaagagattgaggctgcagtaacctgggattgtgccacttaactccagcctgggcaacacagtgagatcctgtctctcaaaacaaaaacaaagaaaaaaaaaaacggggccccccccgggggggaccccaattctcccctataggggatattaacacccccccttacgggctggtttttaaaataaggacatcccgatggtgcagccgctattaaaggttcgtttgttcaacgattaaagtcctacgtgatctgagttcaaaccggagtaatccaagtcggtttctatctacttcaaattcctccctgtacgaaaggacaagaaaaataaggcctac

SEQ ID NO: 47536 - DNA, 502 bp, Homo sapiens
tactaaagggaacaaaagctgggtaccgggccccccctcgagagtacttctagaattaattaaggcgggggctgcagtaagccaagacctcaccactgcactccaacctgggcaacagagtgagaccctgtctcagaaacaaaaataagaaaagaaaagagatatggaagagttgcctgttttctacagtacatactagaggaaataactaaaacgttggttaaatattttttgaacttaaaaaaaaaacctgcagtacatgcaagaggtggcaagatactaaggaatgctcagatcaaaagctaagtcatagcaggaacccagaacaagtaagcaagggctccaaagacagctttcatttccaatgcatttgctcaaccccagtgaatttgaccttttctctgcgtgaagaaatgcaaggccgggcacagtggctcacacctgtaatcccagaactttgggaggccaaggtgggtggatcatgagtttaggaattcaggac

SEQ ID NO: 47537 - DNA, 527 bp, Homo sapiens
ccctactaaagggaacaaaagctgggtaccgggccccccctcgagagtacttctagaattaattaacgcggggggggggagggagaaattcatgggaaatacctggggctaatgtacaaattatacgttgcatagtaccaacctgccacatgtatacatcgattactaacctgaacaatgtgcacatgatccctagagcttctagcatgcttaaagatgtttttatttagtttttaaactaatgaactcattagggtgaaaatgattttttacattctgtgccagtctcaggtcgaacattgtttgtcctagagtctggaatcagccacttatgccaataaccctgattacttttggtcagaaatgatatttagagatcagaatatgatgccagtagtacaagggatgccgttgctttagttcagtggacattagtagaaaaatattatttcactgaatctaagatgtggtcaattatagttatatgtgttactaggaaagaaaaaaacagtgccaattaattttaa

SEQ ID NO: 47538 - DNA, 502 bp, Homo sapiens
ccctactaaagggaacaaaagctgggtaccgggccccccctcgagagtacttctagaattaattaaggcgggcttagagggccccgcctgggggtcaaggtccgcgtgaggctgtggcatgagaatgacatggacccatgatatgaaggtggtagggagccaagatcacgctgctgcgcttaacactaaactgcgtagctactactccatctcaggaaaacacaagcatggtggcgcacgtctgtcataccgaactgtcttgatgctgtagcacgaggacacactgaacatgcccaggttgaagccgcaaataacctaaatgctgccttggcgactgaatgagcctatgattcttaacaaaagaaaacaagatagaaatgaagaactactgatacacacatgactcacatgcatgatgttaaacacaagatgtcagacacaaagactatatattatatgagtccatttagatgtcattcaacagacagaccaagccatagtc

SEQ ID NO: 47539 - DNA, 444 bp, Homo sapiens
gccgggccccccctcgagagtacttctagaattaattaaggcgtgatcccactaccgatcagcacgggagttttgacctgctccgtttccgacctgggccggttcacccctccttaggcaacctggtggtccccaaaataccattaagacatttaaaaatgtcagttgtcccttacactgcctttctagtaacaaaagggaaacctaacagagtttgggagagtggggcaggagacagtagactgtctgatttaaagaaaattaatctagtaaaaaaaaaattagccgggcatggtggctcacacctataatcccagcactttcagaggccaaggcaagaggattacttgagtacaggagtttgagaccagcctgggtaacatagagagacccctgtttctacaaaaaataaaaaattagccaggtgtggtggcacatgctgtg

SEQ ID NO: 47540 - DNA, 463 bp, Homo sapiens
taaccctcactaaagggaacaaaagctgggtaccgggccccccctcgagagtacttctagaattaattaaggcgggaggatagcttgagcccaggagttcgagacctgcctgggcaatatagcgagacccccttcttcacaaaaaggaaaaacacagcaaaacaaaaaaacaaaggacaaagaccagtttggataggataacaaaaattctagttggtaattgagaaatactaatagtttagaaagatatgaataccacttttaatatttctctacctttattccaagataaatcatttgggtttcaatgggtaaggttattcataggtcacctatcatcatagccctacccatgagtgggatataggcaagaatactattaggttggtgcaagaattattgctgtttttgtatcacagttacttttgcaccatcctaatagtatgcacaaagtagttctctt

SEQ ID NO: 47541 - DNA, 492 bp, Homo sapiens
  misc_feature 368: n = A,T,C or G
ctaaagggaacaaaagctgggtaccgggccccccctcgagagtacttctagaattaattaaggcggggggaggtgatacataaaattcaaacatgtagtacaaaattgatttttatcattttttcttaaccataaaggtatcttttagaaattagtatttcttgtagaaaaagcacctcaaggtcagcaattccttaagtttaacaatttttgttacgtttaggtaaaacctggccgggcacagtcgctcacgcctgtaatcccagcactttgggaggccaaggcgggcaaatcacttgaggtcaggaattcgagacaagcccggccaacatggtgaaaccctgtctctactaaaatacaaaaattanctgggcgtggtggtgcgtgcctataatcccagctactcgggaggctggggcaggagaattgcttgaacccgggaggtggaggttgcagtaagtagagattgcaccactgcactccagcctgggc

SEQ ID NO: 47542 - DNA, 492 bp, Homo sapiens
taaagggaacaaaagctgggtaccgggccccccctcgagagtacttctagaattaattaaggcgggtgtgctcttttagctgttcttaggtagctcgtctggtttcgggggtcttagctttggctctccttgcaaagttatttctagttaattcattatgcagaaggtataggggttagtccttacctccgagggttattatgatggttaagcaagttcatacttctaaaatgtttagcatgctttccagcactaataagcacaatatgtttgtttagaaaagtaaaataaatagtcttaatttgtaaaaatgaggaaaactgtgtacctcatagagttgttgcaaccattaaataaggtaataattacaaactacttatgtagtattgttacctgataataggaagtgtaccaaagtattacttataaaaaagtaatgagaatataactccagaaatatatttttaaaattgaaaattatttttaaatttt

SEQ ID NO: 47543 - DNA, 448 bp, Homo sapiens
taacccttactaaagggaacaaaagctgggtaccgggccccccctcgagagtacttctagaattaattaaggcggggtagctagttcaacctaatttgaataatatcaatttagtttcaataatatacaaacgctctgctcctatatgtctctccctcccacttcattatggcatgagccaccgcatccaaccttatgatgcataattttagagattgcttttttagacaaatattgaactcatgtattaaacagtttaatgaaaactcagactctatctgaatatgatctcttttacttttattcttaagttatacgtgtttattataaaaatattcaaattagtagggaatttttaaaaatgtaaaattatcttgttcatcctaaatcccatttttcagtagtaactactgtgaacactctttgggaggggggaggggacagggtc

SEQ ID NO: 47544 - DNA, 494 bp, Homo sapiens
accctactaaagggaacaaaagctgggtaccgggccccccctcgagagtacttctagaattaattaaggcgggggggtcatggatatgagatatgactactttgcccactgccttaccattctaatggctgactgacacacctgtctggctggatcactggccccatatcacgaaacaagctctatgaacttcatgagatggtacaaaagcatttgagcacacgacctatacaaaagtcagttaccacgcccggcgcgggcctgtaaatcagcgtgatgggaaccatgatagacaatgccagtcgaggtcctgtggtccctgaagaatatgaatgaaatcactaaacacatactgcatagtggatggattagtttgtggttcctgggatcttctgtgtattctgttgaagctcaataatcacattactgcggacctccaaaattttacaaaggactgcacacttcctcaggtcctgggtcctacgccatcatct

SEQ ID NO: 47545 - DNA, 491 bp, Homo sapiens
accctactaaagggaacaaaagctgggtaccgggccccccctcgagagtacttctagaattaattaaagcgggcgtcctttcattgctgatattctcatttaggtgctcaggaatagacggaaaggaaggttgatctctatggtaacatatattgattctaaattccaaactaatggaaccaacctttccatagatacttccaaaataggtttcaatcaaatgtttttaagctaattaagagatgatccataaagaaacccagaccaagaaataactttagagcaggttcttatttcttcactttcgtatttttcttttctattcctttcttttgtgggggaagatggggattaaaaaaagtgaaaggttaaattaagcaagctaatagtatttttgggaaaaggaaagggggaggcaaaattccctgcaagagaggcacagccataaagtagttccataaatgtgccatttctacaatgtactttcaaat

SEQ ID NO: 47546 - DNA, 470 bp, Homo sapiens
ccctactaaagggaacaaaagctgggtaccgggccccccctcgagagtacttctagaattaattaaggcgggcatctataggaggctgaggcaggagaatcacttgaacccaggacatggaggttacagtgagctgagagcacgccactgcactccagtctgggtgacagagcaggaaaaaaaaaaaaacttatatattgatatttatattttttttgtataaaaaaaacagcaaagggttccccgtgaaaaggggaaatgctgggatctataatttactatatgaaaaaaaatggcaagctggcgttaataatacaaatgtaaaagatgtgtccccgcccccggacggggatgacacttgggcccctcaaaggatttaaaggacaccccccccctgtgtctaacaaacatgatggtgccttgaggaatacagaatatttcaatcaactaaaagacaatagtaacataat

SEQ ID NO: 47547 - DNA, 445 bp, Homo sapiens
taaagggaacaaaagctgggtaccgggccccccctcgagagtacttctagaattaattaagggggcattgaaacagagacaagctgcccgatgaagcaacaccatccagtgcagctggactgtggacacctgtgtccttaggttttcatacattgtgagagcttcgtttacaaagtgcatgggataagaggaggggcaccccaaaagaaggaaagcaggaaaaggcagggaccccagaggctcagtctctgcagagggtattactgcctcacagatgttggccaaagaaagttactcacagaagtggaaggtgatgggatgggctttggggatggaggagaagctggatgggaggggcttatgcccatgttcattgagtcaacgctgtggtgctgtaggtaccacgctgagcaccaggaactcagtggagaaaaagacagaagta

SEQ ID NO: 47548 - DNA, 498 bp, Homo sapiens
ccctactaaagggaacaaaagctgggtaccgggccccccctcgagagtacttctagaattaattaaggcgggagctataacgcagacctcagataacctaagagctgcagaaacaattttaaaatcttattataaccagtatcattcaccaggtaattaagagaatttaattttcacataagcctcaaagcaacactaagaagaaaatgaaacatctttaacatgtaagaattttttttattcttttggctttttttttcaaaattaacacaaagctaataagctgaatacacaatgcaaagcatcctaaatcttgggcaataacaaaatctaagatcctaagatcatgatatttaaggtaggaaaaaagtaatcagactagactgggcgcggtggctcacgcctgtaatcaatcccagcactttgggaggcagagatgggtggatcacctgacgtcgggagtttgagaccagcctgaccaacatggagaaaccccat

SEQ ID NO: 47549 - DNA, 536 bp, Homo sapiens
tgattacgccaagcgcgcaattaaccctcactaaagggaacaaaagctgggtaccgggccccccctcgagagtacttctagaattaattaaggcgggtgtcactccttgccaaagctttagaaagccttcctcttcaatgatccctagagctgtgcgcaccattcccctatagggggcagattctcttgcaccgtctcccaaccgagcaagagctgcttctccttgcatttggagtcgagtttttgtgagatccaggggaaaggttgctaacaaaaacacaaatgcagggaaaaacccacaacattcagagaaacaaacaaaaatctaaaatcataggagtaatattttcccaagactggttgttctcaaattttagaatatatcagaatcagctagggagattttaaaaattagaaatttcctagccccgtgcccatggattctaattcagtaggttgaagagggtttagaaacttgattctcacacagtcccaaatttaagaatcactacgcaagagcatcctggatcactagc

SEQ ID NO: 47550 - DNA, 557 bp, Homo sapiens
gccaagcgcgcaattaaccctcactaaagggaacaaaagctgggtaccgggccccccctcgagagtacttctagaattaattaaggcgggggggtgggattcttagacctagccatgcaactctaattcggtgtgccttgtttttctttctcccttaagttgattggctgcataatcgggcgtcaaggcgccaaaatcaatgagatccgtcagatgtctggggcgcagatcaaaattgcgaacccagtggaaggatctactgataggcaggttaccatcactggatctgctgccagcattagcctggctcaatatctaatcaatgtcaggtaagattgctctaccttttgtcttatttatgccaacacagtaatgtgtgtgttggggagagctgcagtgtgagaaaaatgggtgtttccagaataaatggtaattgctgcctcccagaaactgccttgctgtccttattactccaatgtccttattacaattaagggtgctttggacttcaaatcaaatcagtgaaagaaatagtaatctatatgctatgtagaaca

SEQ ID NO: 47551 - DNA, 530 bp, Homo sapiens
ctactaaagggaacaaaagctgggtaccgggccccccctcgagagtacttctagaattaattaaggcgggcattcttttgagatcaatttagtaaattaactaatttcataaattgcagaccaaaaataatttggaatactagggcaaaaatcttttcagttgttaactcttttaaaaatctgaattaaaagtcatattaatttattgagtagtgcttatttcacttcctacttttttatatagagaaatataatttgcgatcactgatttataacattcttttctcagacaggagacaatttatccagcatgttgctagaaaatctaactgataatgaaagtgaaaatactaatcttaagaagaaggtatttgaaaaggaggcccatatccaagaactttcttgtttgtttcagagtgaaaaggtaagcaaaatttgagcttttgagcttaattcattatattaatattgactcccttttttttcccatcctggccccaactcctcagaaataaacacagaaaagtgtt

SEQ ID NO: 47552 - DNA, 481 bp, Homo sapiens
ctaaagggaacaaaagctgggtaccgggccccccctcgagagtacttctagaattaattaaggcggggtgtgtgtatatatatatgtatatatatgagagaataagcatgcataattacctttattactgaatactttctgacagtgcaggagtttttcaaagaggagaaattgtgcttagtccagccaagctgtcatacttaaaagaggtttataatgaaatctgttgcatctaattgtcctttaaagtagacatgatttactggaatccaaaactggaaaagttaagatgatgctttgggcacacataaaaacttggttaaaatttcattttaaactagtatactgaagtggtaagtgatgaatgatttcatgacttgttaatggacattcttggtactaagtttttcctagaaatgattctaaatatgtaaatgctattggggtaacactttaataccccatttcaacaaggagtacc

SEQ ID NO: 47553 - DNA, 478 bp, Homo sapiens
ctaaagggaacaaaagctgggtaccgggccccccctcgagagtacttctagaattaattaaggcggggtatgaaagcaacgcaatcacaattataatctggccatatttttttaaaaggatacagacttcttattagtaaagccaaaatcactaatcacacatccatgaatagttatgctgactttttaaaaactgagcaaaattgtcaagggaggttagcaccaagcctaccagcattcagacacattaaaattcttaaatgagacaagattataatctttaaataaaagtgtgtgtgtgtgtgtgtatatatatatatatatatatatagagagagagagagagagagatatatacacatcaatgtgtatttttttgttgaaaaaagaagatcctacacagagttctcaagtgatgactatatagaatatatttgctatatctaacacttgacaagatagagatacatgggggggg

SEQ ID NO: 47554 - DNA, 498 bp, Homo sapiens
  misc_feature 452, 478: n = A,T,C or G
ctaaagggaacaaaagctgggtaccgggccccccctcgagagtacttctagaattaattaaggcgggtgctggtaataacggcgtcacgtttgcgatggacatcaagaatcgaaaggactactacggtatcttaatctgtcccaatctctaacttttgcatttgatgaatgaaaatattatacacaaaggactctaggtcatctgtcctgacttcgctcccgtatccatagaatctaaacctctcatggcgcgttaccaatgcctgcgaacgaacctctatattatggcctaaacctcgactaagttatgcctgcctttttttactccctgctttcttctacaagccacacaacattgcttataaaaggtacttttattactatttttagaatatatacaccccatatgtaaattaccctcacttttaaagtaataatagttccttcacggnaaaaaaaaaaaataaaaaaataaatncgggcgcccccccccggggg

SEQ ID NO: 47555 - DNA, 497 bp, Homo sapiens
agcgcgcaattaaccctcactaaagggaacaaaagctgggtaccgggccccccctcgagagtacttctagaattaattaaggcgggggctactgtgagtgacagcaacagagaccaaggagtagaaagagggaagtttgaggggcacaatggggcaactgaggggcaaggagatgggagactgaataagtatatagataatttgaacagtatgattaacatactctatttaatggtcatatatggaatgttgcacccagtatctgaaaaatatagaatcatttcaaaagacatacagctaccagaatggctaaaattgaaaagaataacagcatcaagtcttggttatatctacagcagctgtaactctcctacattgctgggggtagggggtaaaatgctacaaccattttggaaaacagcttggcagattcttagaaagacaggcatacatccacatgacggctagcaattctactcataggtatttaggtaata

SEQ ID NO: 47556 - DNA, 459 bp, Homo sapiens
  misc_feature 273: n = A,T,C or G
gcaatgtaaccctcactaaagggaacaaaagctgggtaccgggccccccctcgagagtacttctagaattaattaaggcgggaggatagcttgagcccaggagttcgagacctgcctgggcaatatagcgagaccccgttctccagaaaaaggaaaaaaaagaaaaaaaaaaaaaaaaaaaaaaaaaaagggggggccccccgggggggaaccccaaaacccccaaaaaagagggaatttaagcccccctcatgggcggggattaaaaaaaangagggagcggtaggagtactaacctacataaaacgagacaacgatcttctagtgaaaaaagatgcaatctgggctggtgctgctcctgggtaccagcagctctttctccccgcgccgtagctggaagttcactccactcaggaggctgaggcaggagaactgcctgaacccaaaaggcgaaagttg

SEQ ID NO: 47557 - DNA, 425 bp, Homo sapiens
  misc_feature 333, 334, 336, 343, 344, 358, 359: n = A,T,C or G
ctaaagggaacaaaagctgggtaccgggccccccctcgagagtacttctagaattaattaaataaaagcactgaatgaaatgatacaaaaaacattttatcacttcaagtggtaaaagcttttctaactaagagtttttaagatttctggacttcatattgacatatttaactatataataatcagaaactctatatgcaaaaaaaaaatcaaaaagtaaattaaacacttagaaaaatcatttgcaacccatatcactacataagcacaaatagcttcctgaaaaaaaatttttaaaagaaaatatatctgcttgtgggaactagggcgaannanaaaaaannaaaaaaaaaaaaannggggggccccccccggggggggcccccattccccccttttggggggttttttccccccccccccgg

SEQ ID NO: 47558 - DNA, 458 bp, Homo sapiens
agggaacataagctgggtaccgggccccccctcgagagtacttctagaattaattaaggcggggccgggctatgtggaatgattgtgcgcatcggcgacaaatatgtcgacctgtctgtctacaccaatattcaaaagctgtgcagggctatgcaggagatggctaacactgtctgttttctaccatacactgaaaatacttaaacttgtacaacactaaacatcttctgacacagacatttttaagaccaaattctttggaactaccagacatggaatctaaaataactgttcagtatgttaaaatctctagttgaaaaggcaggcaacttgtatggtcaggtaggatatttcagcagagagatagacactgtatgaaaataaaataaatgcgaagaaaagaaaataaatagtttattggcccggccccccccgggggggacccccattcccccttt

SEQ ID NO: 47559 - DNA, 401 bp, Homo sapiens
gcgcaattaaccctcactaaagggaacaaaagctgggtaccgggccccccctcgagagtacttctagaattaattaaggcgagtggcgttgcggttgtaaggaaaaaattctgttttttttctgcccctaataatacactttggaggtagacccctggtttaaatctaagtctagtttgaggaagtcacttaacctttattgaaaagactctggatttaataagctgtgtaactggtactcgatagttacccaaagttcagtctagatggcacaaaccacctctcagggaataaaccctaagacatcacttaaggaggactttcattatttaattttgaacttggtttgtcctctctggccataaaacttgacagtccatgaaaggtaaggcaaaattttt

SEQ ID NO: 47560 - DNA, 577 bp, Homo sapiens
ctaaagggaacaaaagctgggtaccgggccccccctcgagagtacttctagaattaattaatgcggggaaggggccgttggcctgccgagcacttgctatatctagagtataggacactgagccttgggcctctcgtatatgctagaccggtacatatccatcgtagacttataaccgtctttattccacagcccataacaattatcagccacgactatctggcatgaaaagcatatcccagatctgtcgatcatccaccaattaacctgccattaccctggttcaaaccaccattatctctcacctggattactatagtaacctcctatcttgtctctcagttacccttttacacatccttttgcagtcttttccaaacagcctgagtgatcccttcaaaaagtaagtgaaatattttactactttgctgaggactctccagtggctcttcatttcactcaatttaaaagccactggcctaaaagggcgtataggatctgaccacctgttagttttttctgtgttacctttctacttttattcttttctttaggctttccacttctattcttttct

SEQ ID NO: 47561 - DNA, 494 bp, Homo sapiens
accctcactaaagggaacaaaagctgggtaccgggccccccctcgagagtacttctagaattaattaaggcgggacacgtggacatcatggcctacactgcgaggcaccaggaggaactcctctgtatctttagcttaaaggctgagcccgagcctgatcagctataactgcacacgccactatttgggaagctggaggaagagacagccaaccactcgccactcccagcgcagtctctggagcatcactgtcagtgcccatgccccgtcctcacctccagatcagggcgtgagctcaaaaagaacccccagagatttgcagtcacagcgaaggtgtgctgagtccaacggcacctgaggacactttcaccacatctgggatgccggccgccaagagcaagggccccagggcctccaacaaattagtgggttaagaaagagacttgtgtggggaaggcagaccctataaataaaagagttttaacagtataaaa

SEQ ID NO: 47562 - DNA, 481 bp, Homo sapiens
ctaaagggaacaaaagctgggtaccgggccccccctcgagagtacttctagaattaattaaggggggggaaaaaaggaaatttaagaaattaaaatcttaatatcaaacacagcgaagaaagaattagcaaactggaaaatatatacaaagaggaaaatggaaaatataaaggacatattaaaagatattaagataataagaaggcctaatatatatatctaatctgagcccagaagcagaatgcaaagaatgaagaaaaagcaatatttaaaatgataattttaaaaattgctgtatatttttctgaactgatgataaacatgaatacagagatccaggaagcacaacatataccagtaggttaaataaaaagaaatccagctgggtgcagtggctcacgcttgtaatcccagcactctgggagtctgaggtgggtaaactgcttgagtccaggagttcgagaccagcctggtcaacaca

SEQ ID NO: 47563 - DNA, 509 bp, Homo sapiens
  misc_feature 456: n = A,T,C or G
aagggaacaaaagctgggtaccgggccccccctcgagagtacttctagaattaattaaggcggggcgtccacttggtgccctgggcggtgctgctcttttcatctgaaattaacatgtcatctgcctcttactcacaccctgcattacttgtcctatgccctgcgttcgcgacattgcacacctcctcgattatctgccttcagttcagagatttgtacgttttggtgtccgcgagtctcatctatactaatgtttgcacatggaatatcacctgaaaacttgtgttaaagttctacagcgcgcactgttaactgaacgtctttttcttcagcctatacgcggatccttgttttgagctctcaaaatcactcccaccacattttgtaactgctgctgttgctttctacatacaccttataaagtgacatttcaaaagaaataaggtgccacagttntaaaccagaaggtggcactctgtggctccttgtagtattatagctatactggg

SEQ ID NO: 47564 - DNA, 527 bp, Homo sapiens
tgattacgccaagcgcgcaattaaccctcactaaagggaacaaaagctgggtaccgggccccccctcgagagtacttctagaattaattaaggcggggaggacttcttaagtgtgccgctcgggagcctcccgctcgtcccgccccgaggggcgtgaggaggggaggggctgcggacttcggactcgggcctggagaccgcctcctacccagagccggagcccgcaacccgctcaggcggcgacggagccatgtcgccgctgctggggctccggtccgagctgcaggacacctgcacctcgctgggactgatgctgtcggtggtgctgctcatggggctggcccgcgtagtcgcccggcagcagctgcacaggccggtggcccacgccttcgtcctggagtttctagccaccttccagctctgctgctgcacccacgagctgcaactgctgagcgaacagcaccccgcgcaccccacctggacgctgacgctcgtctacttcttctcgcttgtgcatggcctgactc

SEQ ID NO: 47565 - DNA, 544 bp, Homo sapiens
taaataaagggaacaaaagctgggtaccgggccccccctcgagagtacttctagaattaattaaggggggaagacaaatatggaaacaaatactatgatgacaacatgcaattttttggccgtcaccgatgggttgtatatactactgatatgaatggcaaaaacacattctgggatgtggatggaatcatggagcctgctgaatggcatagacggcttgacaggatgactgatgatactgcaacaacaaaaccacttactgctcgtaaattcatttggacgaaccatacattcaacgtgactggcaccccagaacaatatgtaccttattctaccacttgaaagaagattcacgattggatcccaccttcaacaccttacatgtcaagacaatgaataacatttgacacatgctaaatatggagcttttcatgtaattactctttaactgtgtaccattcactataatttacagttaaaactgggtgacttctgctaccatcgcctttaaaaaatcaacattcccttaggaataaaaataaaa

SEQ ID NO: 47566 - DNA, 510 bp, Homo sapiens
actaaagggaacaaaagctgggtaccgggccccccctcgagagtacttctagaattaattaaggcggggtatttggagcttctataggagtggagaggggcagctcattgttgagagttgcatgctgcaacctaatggtcagcaatgaaataaatacttgtagaatgttcacttccatatagtaatctatacttttttctctcatttccttcattttttgagccgtaagtgtaaggcattttgctggtattattacaatggttatgaggagttactttgcttgcccaaggtcacatagctcgcaagttaaagtagattcaaatccaggcctgctagataccaaattattatttaagagtacttttcactactcctaaataatgacacagatatgtttgtcttacacatttcactttattgtcaagttattagtatgtttattttcaaaaggtattttttgcaatttctttttattattccgtactttttaaatttacttcattatcacgt

SEQ ID NO: 47567 - DNA, 584 bp, Homo sapiens
  misc_feature 454, 455, 457, 458, 460: n = A,T,C or G
accctcactaaagggaacaaaagctgggtaccgggccccccctcgagagtacttctagaattaattaaggcgggggtggtacgttgagactattcggatattatactcctctgctgtggtaatctgcctgactgaacctctgcatggcgattattcaaatatagatgataggtcccatggaagattcctacgttcttttcgatcagaggacataaattcaagcccgaagagtggactcaaagccgaatagacgggccatgcaacgttcttctgaaggcctgatgttcatccttcaaggccttaaagtcagaggtaaggtagcaacagagctcgaatggggcaatgcactcttaccctccttctgaacttttatttaagccgcgctaaatgttttctttaagggaaccagatttagttctttacagaattttccagtgaaataaaacatgttgtnntnnanaaaaaaaaaaaaaaaaaaaaaggggaaaaaaggagggttttttttgaataaaaatagaatattttgccccccccccccccggggggacccccccccccccctttaggggaattttttccccccc

SEQ ID NO: 47568 - DNA, 387 bp, Homo sapiens
agcgggggcaggagaatcacttgaacccaggaggaagaggttgcagtgagccgagatcatgccactgcactccagcccaagcgacaagagcaagactccatctcaaagaaaaaaacaaaacaaacgttaagtatcaggaagactcttacctaaacaattaatttatattatgtgtcttccttttccccttctggaatccaattttcttcccaaaagttgaggaagtgtaagtaatataaaggccacatcaattgtagaaaggaagagctgctatgcatgtgctaatagtaataatgattaacaattgccatatatagtaaaaacagtgtaaaattaaagaccaatctttttaaaaaaaaaaaaaaaaaaaaaaaaaaaagcggccgc

SEQ ID NO: 47569 - DNA, 577 bp, Homo sapiens
  misc_feature 268, 269, 271: n = A,T,C or G
accctcactaaagggaacaaaagctgggtaccgggccccccctcgagagtacttctagaattaattaagggcgggggtctatacattcctgagattctgggaaaggtgctcaaagatgtactgagaggaggggtaaatatatgttttgagaaaaatgaaaaaaaaaaaaaaaaaaaaaaaaaaagggggccccccccggggggggacaccaaatgcccttttaaggagattattaacccccccctcaggggaggtttttaaaagaaannanagaatggatggtatagtcaaaatgctgaaagaacaaaacctgtcagctaagaatactgtacccagcaaagctatccttcaaaaatgaacgtgaaataaactctttcccagacaaggaaaagctgagataattcatcaccactagattggcctaacaagaaatgattatgctgagtcctacagcaagaagtgaaaagcaggtaattactgtcatgaaaacatcagaaattataaaactcacagatagaaataaatttgtaatcaaactcgtaatactccaatactatgatgatgcttggtaaatctt

SEQ ID NO: 47570 - DNA, 422 bp, Homo sapiens
aaagggaacaaaagctgggtaccgggccccccctcgagagtacttctagaattaattaaggcggggggtgctaagggcattaaaaaaagtataagcaaaaggacaacagaaacataaaccttcctaaataccaaatttaagattttgtttttaaagaagagcacagtaaacacattataacgaaaaacagactaaatgtaataaatataataattacagcataaaataatctggcagggttgacagcaaacatattcatcttaacacatgtgaaagggcttacttcacttattaaatggaaaagatcttcatttgggttcataaagaaccaactatatgctctattcaagagaaacacctaaaacaattatttagaaaggctaaaaataggccgggcgcagtggttcacgcctttaatccca

SEQ ID NO: 47571 - DNA, 471 bp, Homo sapiens
gaacaaaagctgggtaccgggccccccctcgagagtacttctagaattaattaaggcggggtggggccaggctagaaaaaaagcaatacaacaaaaaaggaagtctgattttcccaattataattctcaattttcttaagaaaggacaaaggggctttctgagcttcctgtcattcacagcgctcacctgttcaaacaagggctgctatggctctccctccttccctatctccactgacttctacctcctttccatgtctgcattctccaatctgactggcctcaggtgcttattatcagcttctgattccatctctaagttctttctcactttcctctacactccctcaagtttctcttcagtctcatttcattcaagattgtcaggtaccatctgtctacatctctattatctactgagcatttactaggcatcatgctaggtgaggtgctttagataaattatctcac

SEQ ID NO: 47572 - DNA, 496 bp, Homo sapiens
taaccctcactaaagggaacaaaagctgggtaccgggccccccctcgagagtacttctagaattaattaaggcgggggttgcattcctagcggctgatgaagcacacgttggaccggcgctgatatagaccagacggctgatgccattgcatcatgttaagaggatgacgtccacagcacgagctaactttactctgtatgggtgcacccactacaggatcctccagattaatcaggtaggtccttaaggacctacagccatacttatactcgcacactctaacactggcagacttattcacccacctgtcaacatgcgacagatgaccgagacagaaagttaacaaggatacccagcggttgaattcagctgtgcaccaagcagacctaatagacatctacagaactctccaccccagatcaacagaacatacatttttctcagcaccacaccgcacctattccaaaactgaccacgtagttggaagtaaagcac

SEQ ID NO: 47573 - DNA, 494 bp, Homo sapiens
tactaaagggaacaaaagctgggtaccgggccccccctcgagagtacttctagaattaattaatgcttgtaggacataataataacaattgaatgtctgcacagccgctttccacacagacatcataacaaaaaatttccaccaaaccccccctccccccgccttaattaaggcgggcagagctcttgcgacttactcacctcccaattgctacaccttttaatactgttacattggggcttacgtttcaatgtgaattttggaggagatgacatgattcaaatcgcagcacatgctttcatttctttggggtcgatatcttggagtgaactggctgagttatattgtgggtatgtgtctaacttttaagaaactgacaaagtttttcccaccagcagtgtatatgagttttagttttttcatatgcttgccaacacttttatgatcactctagaattttagttattctagtaagcgtgcagtcgtatctcatt

SEQ ID NO: 47574 - DNA, 358 bp, Homo sapiens
aaccctcactaaagggaacaaaagctgggtaccgggccccccctcgagagtacttctagaattaattaaggcgggagaagaaacggcagaatagcatgtttacagacaataaaagcacactagaaagacacacctacagatcaaaaccttaactgtttcaaaatgtgatgaaagacattaagaaaatgataacagatatgaaactacataaatcagaagtagaaaaattcagaaatgaagtgacagaactcagaaatgtattagaaatgaaaggaaaaatcatttcagaatgaagattaaaggataataagcgattgaaaaatatgcaatgagcaaaaaaaggggcccccccccgggg

SEQ ID NO: 47575 - DNA, 463 bp, Homo sapiens
  misc_feature 396, 397: n = A,T,C or G
aaccctcactaaagggaacaaaagctgggtaccgggccccccctcgagagtacttctagaattaattaaggcgggtttaatagtattcttagctgaagaaaaaattagtaaactagaagatagatcagaagacaatatccataccaaagcacagagagacaaaaggatggaaaatgaaaagaaaaagaaaaatatgtaagagacaaatgggacactgttaaaagtctaaaatacttataattggaatctcggagaggagaaagaataggtcagaagcaatagtaaaagacataataacttgagaatcttccaaaactaatacagacttgcatatttgagaatcactgtagctctaagcagaatcaataccaaaaaaaaaaaaaaaaaaaaaaaaannggggggccccccccggggggggcccccaattccccctaaagggggggaattacccccccccccggg

SEQ ID NO: 47576 - DNA, 484 bp, Homo sapiens
tactaaagggaacaaaagctgggtaccgggccccccctcgagagtacttctagaattaattaaggcgggggaatgtgggataatgttaggaatgctgtattcaacgatgagccatatgtattaatacataatttcttaagaaaaataatttttttaaaaaatcaaaccttaacattaacagaaccaaattgcaaagatcagaaataccaaagtgaaactgaatgttagtactgaaatttaagctacatttaaaaaaaaaaggctgtcaaaccaatgaaaactagatttcagtgtctccttttagtgactagttctatatattatgtttctctatatctggaaaaatgttcttaatataatacacgtgcagtctgaagtaatttcagttctcaagtttatgaaaggattgggtttaaaaaaatactacaaaaatatgcacttatatttccaaaattatgtatttctaacctctgcagtgatataa

SEQ ID NO: 47577 - DNA, 441 bp, Homo sapiens
  misc_feature 368, 369, 370, 371, 372: n = A,T,C or G
ctaaagggaacaaaagctgggtaccgggccccccctcgagagtacttctagaattaattaaggcggggggaaccccggatagctcagtcggtagagcatcagacttttaatctgagggtccagggttcaagtccctgttcgggcgtttgtagttttcgttactttaacctgctaaattatcccatcaagtcccaagagcggacatcgtaaacccttacatttcaagttgaattcaaatcatttttcactggtttcagaatatgctagatagacgtgttttcagggaggaaaaaaaaaaaaaaaaaaaaaaaaaaaaaaaaaaaaaaaaaaaaaaaaaacccccccaaaaaaaaaaaaaaaaaaaaaannnnnccccccccccccgggggggaccccaccccccccctaagggggggggaatcccccccccccctgggggtt

SEQ ID NO: 47578 - DNA, 492 bp, Homo sapiens
tacataaagggaacaaaagctgggtaccgggccccccctcgagagtacttctagaattaattaatttactcttcatgaaaaccacataaggtagttactatattatgtccatttttacagacgaggaaacaaacgattgtgttgcctgccaaagatcagcacacaactgagaagctgcaaatccaggatttgaactcaggccatctcactctagaatgtcagctcctagctgccctgcatactatgtcctgaaggagagctcttaagaaggccaactgaagcctatggggaacagtatcctggtcattcatttcccaaattgttattgagtgtctactatataccaggtgcagggaatacccccaacagccatggtcactgttcctgtctagtcaacattcctgttgctttcctaattgccatttgttatagctcccagagagtaagcatgctgaatccattagaaaaggaaactcaagagtgagttcttct

SEQ ID NO: 47579 - DNA, 482 bp, Homo sapiens
ctaaagggaacaaaagctgggtaccgggccccccctcgagagtacttctagaattaattaagggggcttatgaggtaagtgataatgaaaagaggaatcaaacagactaaaagaatgctataaaaagaacgaaaactgatagagtgcatgaagcagaagcaggataatgtgcttgttaggagaaaacccacataggagtgtgaccttaggtgagtcattttacttctttacattacttttgcccatttgtgaaacagctataataaaagtacctttctcatagctgtagttgtgagagtcaaatgggctattacatgtaaagcgcttagaacagtccctgacagtgagcattctgctgatgttggctactactgtaattatattagatattctgttaggtagtctccattcaagcaaatctttaattcaagaaatactctgtaggtctctgtattacactgagctgactaatgcctatctta

SEQ ID NO: 47580 - DNA, 453 bp, Homo sapiens
cagggaacggaagctgggtaccgggccccccctcgagagtacttctagaattaattaaggctggcattgctgcaactgagtaatgttaaataaagtagtgcaagtagatgcttttaaaaaggaaacagcaatgattttacaaataattaaatgttttctctatgttaatggtttgccccattgagaaatggtttttagaggactataaggcattgtttgcattacagtaggaaatactatcaattttctcattgtctctcacttttttcttttaggtcatggaaaatggaagatttgcaaaatacaaatattttacccatgtcatgatcaataagacagatatgctaatgataaccagacgtggtgtattgtttgtaacaaagggaacatttggacaactcacgtgtgagtggcagtatagttttgatgaatttaccaaagagccattcattg

SEQ ID NO: 47581 - DNA, 404 bp, Homo sapiens
aaagggaacaaaagctgggtaccgggccccccctcgagagtacttctagaattaattaaggcgggtgccggtagtcccagctacctgggaggctgatgcaggagaatgacatgaacccaggaggcggagcttgcagtgaacgaagatcgggccactgcactccagcctgggcgacagagcaagactccgtctccaaaaaaaaaaaaaaaaccaaaagggtgggacccaattcgggaaaatttttaaaaccccataaaagttttttttatgcccgggattttttccatataaaaaaattttttttccctggctggtcaaaaaagggatacctaaaacttcccaggggaaaacaatttaagggattccggattttcccactttttggaaaaaaatcaggtttttaa

SEQ ID NO: 47582 - DNA, 492 bp, Homo sapiens
accctcactaaagggaacaaaagctgggtaccgggccccccctcgagagtacttctagaattaattaaggcgggggtttcaactacttgcctcatttcctcctggaagcctgttcatgtggaccatctgaccttgatcatccagtaccagttcactgtaagtcagcatgtcagaacgcagagggggagatggaataaatgcttgaatggacatagactcccagagtttgatcagggactagtggagaaaagaagtttgactaatcattcacaataatttcaatatagacaaaaataattattaagattcagtcaatctggttttgccttcttttccaagtgttctgcagagtgtaaacattacactaaattctccagctcccattctcagttaaaatagatttgtaattactttttacatgccaaaagtcaggcacttttccaaaaagtcaaactactgagtgattccaaatcagcaccagagcattaacaa

SEQ ID NO: 47583 - DNA, 506 bp, Homo sapiens
ctcactaaagggaacaaaagctgggtaccgggccccccctcgagagtacttctagaattaattaaggcgggggaacacgctggatgccaatgtaactgagataaagttgacgaaaatattataagatgttacgaaatgaaagttgaggaaaatgcctagaggtgaacaggagctaaaatatttagagccgtataattgaaattacagtacccacaagccacatgtgctttttgagcacttgaaatgtggctagtctacattgagatatgtgtcaaggataaaatatgcactggatttccaaagacttgtcccttgaaacgagggtgaataatcaaagaggccccccccccgggaggagccaccatcgccccgctgccttcccagtctgcgccccccaccgcacctttgtttccacatataaaacgtgtctcctttgtctctaccagaaaatgaaaggaattaaaattaagagaagggagagattgaagtgtggcgccaagattgaa

SEQ ID NO: 47584 - DNA, 486 bp, Homo sapiens
taaagggaacaaaagctgggttccgggccccccctcgagagtacttctagaattaattaaggcgggtcaagctatatacaaaaaattattccagattacatacttgaatggtaaaagcaaacatttgcaatttttagaaaacaacagaatacatcctttgaaagatgttgtaatgacataaaaagattaataaacttgacaacaataaaatgaacaactcctgttctttatgacacctgagaataaaaaatcaagaagaaactcagaatacatgtttaacacgtatgatgaataagcaatttatgtctacaatattaaattacttctagaattaatactaaaaagaaaaataatccagtagaaaaatttgcaaaacactttggaaggcagaggcaggcaaatcaggaggtcaggtgttccagaccagactgtccaatatggtgaaatcccatctctagtaaaacagtacaaaaattagccaggcgt

SEQ ID NO: 47585 - DNA, 500 bp, Homo sapiens
agggaacaaaagctgggtaccgggccccccctcgagagtacttctagaattaattaaggcgggagaatcatttgaacctgggaggcggaggttgcagtgagccaagattgcaccactgcactccagcctgggtgacagagtgagaccctgtctcaaaaggaaaaaaagagaaatcctactaagagtcgttgattcaatcattattttatttataaattcaacagctatatttataagtatcattttctcctactgtctgtcaaattttggaactgggttattctgatctggctaacatgaattaatgatgtcctaccattttcaatgtttggagataattttctacaggaactggcagttccttgaacgtttatgagacagaacttacccataaaatcatccagtactttttggggaaggagtggaatcttttactatattcaccatatttttctggttatgggtttactctatttttctacttcttcttgagggacaat

SEQ ID NO: 47586 - DNA, 444 bp, Homo sapiens
taaagggaacaaaagctgggtaccgggccccccctcgagagtacttctagaattaattaaggcggggtaagactgaaataataaaataactacttttcacatagatatttccaaggcaccctgtagtgctacagtacattgatttaaaagaagactatattgtatttagtagagtttttattactaactctatataaatcaggaactatatagagtatatgtgactaaatcaaatagtttatgaaattatttgtgtggaatgacctttctcccctagacataatcctagtgaaatcaaggaacctgttttatttgcttccttatactcagcacctagtgcagtgaccagcacgtagcacatatttaatgtgtttccatgtcaaaatactatttaagttaagacttgattgagtctgttaggtaccagagtcactcactcattac

SEQ ID NO: 47587 - DNA, 440 bp, Homo sapiens
gcgcaattaaccctcactaaagggaacaaaagctgggtaccgggccccccctcgagagtacttctagaattaattaaggcgggccattcataggatttttttccatccatgcccaaatatactgttccagcatggagtgaacagatttactttcactcctctggttggcaaaagatggaaaaaaagactatgaatggctcgcttctttttatgttttccaaagaaagcaacattggtttgcattctttgccacactgctttggtgctggaaaccggaagccagaggatgtctcatagtgtgatgagcctctgtcacctgttggatgtatactgtcaccatttcatgtaccttctgttcattggcatccagtgtgctaaccaggaaacatttgaatgtggcaagttatttaaattatcgtattcctggcatttattcaccc

SEQ ID NO: 47588 - DNA, 495 bp, Homo sapiens
ctaaagggaacaaaagctgggtaccgggccccccctcgagagtacttctagaattaattaaggcgggagaatcgcttgaacccgggaggcagaggttgcagtgagccgagaccgtgccactgcactgcagcctgggtgacagagcaagactccgtctcaaaaaaaaattatatatgtagtatatatgtaaatatatatgtagtatatatgtatatatatatagtatatatgtaaatatatataaattgaagagctaacaaaatgtagtcaaatagtggttttactggccatacttctaatgatttgtatgtaaattaattctggtaagtttttagattgttcaagaacagttgtttttcctgtttatttatattatccacaatgggtttttgtttatctgtattttattcagagttccttggtttgaacctggtgtcctgttccaggcatccatccaggatactacattatgtttagtcattgtgtgttcttagg

SEQ ID NO: 47589 - DNA, 468 bp, Homo sapiens
aaccctcactaaagggaacaaaagctgggtaccgggccctccatagagagtacttatagaattaattaaggcgggggaaggggcctctgggtggcagctctgggcttttgggtgttggacaaccataggcaaaactgaaatggaacaggggcagaaaatagcacacttttactctacgcaactgttgctttttcatgatcttcaggaattttactgggataattatccaaataaattgcaagcattctatccaaatgtgaacatgactcctagtaggaaaagcaaggaagaacactaataaaaatatgctaagatattattgatggttaactctagatgggaaatctgggaagaaagagaatagaatgaggtacatgttagaaatggaaatggcgaagagctctttctgagatgaagagaattctcaatgtcaagatttgaacaagaagagaatggaatacacaatat

SEQ ID NO: 47590 - DNA, 510 bp, Homo sapiens
gcgcgcaattaaccctcactaaagggaacaaaagctgggtaccgggccccccctcgagagtacttctagaattaattaaggcggggaagccgaagactggagaggtgaagcaatttgccccaggtcatttgaccactgggtggtagagctgggaatccaggccaggtctctcaggcctcagagtctctgcccacacctgtatttcaggtacctccaggtggtagccagtacactgtagtgggaagagccaggagacctaggtacaggcccagcaccgtggtccagccatgtgacttggaagggttgtttaacatccctggggctcatctgttaaatgaggagccaagattgaatgacctctctcccaaattctactcttaagattctactgggccaggcacggtggctcacgcctgtaaccccaacgctttgggaggccgaggcgggcggatcacgaggtcaggagattgagaccatcctggctaacacggtgaaaccccgtctctacta

SEQ ID NO: 47591 - DNA, 430 bp, Homo sapiens
gcgcgcaattaaccctcactaaagggaacaaaagctgggtaccgggccccccctcgagagtacttctagaattaattaaggggggagcaggaagataaaacacctgatagaaaaatgtcacccacagtccctttactttgaaggtgataaacaatgttaacattttgtttatcctttgagcctttattccctactaatgtttaaacaaaattaggataaccatgtacacgctgttttacaacctgctccccccttaatgttaaataaattttcccatttgattaacatcttcttacaaaatggaaaactgtgttcattaagaccttagagaggatgatgaactgtttcataccatagagtatgttatcaaagagagttaagtgcatgttatcacatcacttgccatttggactgattggaaaaaaaaaaa

SEQ ID NO: 47592 - DNA, 385 bp, Homo sapiens
  misc_feature 345, 346, 347, 348, 349, 350, 351, 352, 353, 354, 355, 356: n = A,T,C or G
gaacaaaagctgggtaccgggccccccctcgagagtacttctagaattaattaaagcggggctgggcggcggcggcggcggcggtcatggaacgccaagaggagtctctgtccgcgcggccggccctggagaccgaggggctgcgcttcctgcacaccagtgaggattactgatgtggacagttgatggggtttgtttctgtatatttatttttatgtacagaactttgtaaaaacgaaactatttaaaaaacaagaataacatttttagcatctttattcaaggagatttatggacttcaatttgtctatcaaacattaaatagctttttattacaagaaaaannnnnnnnnnnnaaaaaaaaaaaagggggccccccccgggg

SEQ ID NO: 47593 - DNA, 477 bp, Homo sapiens
ctaaagggaacaaaagctgggtaccgggccccccctcgagagtacttctagaattaattaagcggggattgtgtgttgaaggataaaggttgtacctataaaagagtaacataaggaatccttttggtgatggaaacgtcctgtttcttagctgtatcaaggtcagcatactgttgtgatgttgcagcagttttgaaagatgcctccattggaggaaactgaaaaactgcatatgaagctataattaattcaaaaaaatgttaaactaaaacacacacacgcaaagttattatccttgcaaagagttaaaataatgtttataagtagtgtgactaagaatatagcatgtaagtttgtggtaaaattttgtctaatttagtactatatacctcattttccatagagtgctcagaagccaagtttctactgctctttagggagatttggccagctaaaaaaaaaaaaaaaaaaaaaaaa

SEQ ID NO: 47594 - DNA, 493 bp, Homo sapiens
ggaacagaagctgggtaccgggccccccctcgagagtacttctagaattaattaaggcgggctcatgataggagttgtgacctcgaacctgggaccttatcctaagaatcataagatacctggaggtcctatcatgtacatttctcaccctatacacagcatgggaactgatgcctgatgattatggaccgccccgggcctaattttagcccgatggactctgcctttcttgacaccaactatctcttgctgccaggtcattagacacggagtagaatgttatcctgccctgttcatttgccctgttatcagctgaatatggttaaacacactcaatttttcatgctgttttgaaattgatattttgttgcatttaaaaaatttaaatgatggtcaaagggtacaaaatctccgacaggaagaatccattttataatttttttgaggtctgttgcacagtgtggtgaatatagttagtagagtattatacatt

SEQ ID NO: 47595 - DNA, 491 bp, Homo sapiens
ccctactaaagggaacaaaagctgggtaccgggccccccctcgagagtacttctagaattaattaaagcgggactccttaaaattaacatatgttgaaatatctacactaatgttgtcagtacaagtgttggatagtgtatcgcaaacatatttttgcaaatttctgattccttttagtttctggattgcctcccagttttaaacatagggtaggtgatgaaattgttgggcatcaaatgcatttgaaagttgcaaatgcgttctattttcttttaaaattatttgacagactctcattagtgtttgttttacaataacaattgtatcttctagtgtttgcccctcaaatgaagttctccttagaagagaagatcttttgggatcagttccccccattttcttatatgttcactaatcagctggggttaacatttaattattcctcatattcacaaccacttaaacatttaatagagtttttaaaaatcca

SEQ ID NO: 47596 - DNA, 482 bp, Homo sapiens
ctaaagggaacaaaagctgggtaccgggccccccctcgagagtacttctagaattaattaaggcgggtggatcgacgtacggtgtgttacacctgtcgggtcaacgttgctgaatgcagatgtttactcaatatacaacaattagtgacgtatggtggcgggcgcctgtacttaccgctactggggtggttgtagcatgaaaatttgtctaacttacacgcagacgctgcgataatgtcaagataagccactgtgctggattctagacaacagatcaaggactcatctttcattcactatttcatctaccatttagctatctgcaagagacaccagcacgagcttgaaaatcccaccattttaaatggtttctcgttctgctcatatttaatttagactcttcaaagtgaataatgatatcaaaatcacaaaaagttacagaggcataaaaattgtaattttgcaaactcaactaaagtttt

SEQ ID NO: 47597 - DNA, 490 bp, Homo sapiens
ctaaagggaacaaaagctgggtaccgggccccccctcgagagtacttctagaattaattaaggcggggactgggtatgaatgtatcaagggagagaccctgtttaggcagtcttagcacgggtaaaccgagctggcattttaccaactatctgaaattcagggactgggaatatttctgggcttcattacaccctccagatactgcacataactgtctagccatctgaagtccaggccaccattcattaacttagtagagaaaaagagactagcctactgagcacaacataaactcagctctagagtgcctgtggtaataaaaagcagtataacaattcaaaacgtatttgtatttgacttaattatcatttaaagtaagtttcaattccttggccacagcatcaagtgacaatgaaaaccattaaaacataattctgttaatgagaaaggcaaagttagctggggaggaaaagtttggcatgtcatgaa

SEQ ID NO: 47598 - DNA, 579 bp, Homo sapiens
ctaaagggaacaaaagctgggtaccgggccccccctcgagagtacttctagaattaattaaggcggggagaagcctgggtggctcaccatgctacactggctgcaccgtgtgctaacagctgatctggcagtatccattggcgagttctggttgaatagtgacaatgaaatctaaaaatcctaggaggcggtcactaccacctgaaccatccctggcagtaattacatatccaccgtgacgtacgccccaccactggcacattctatgaacaatatgaaatcaccacgcgaagcgataatcatgctctgacagcttactgctgccttgggctcggctaataagactttgttgtatatgtggactaaaatcagttatctctgctctggacatttcatatacctggtatcaccctttcccctggaaggcacttctttaccctgtatatattttcctctattgaacacataatgcatgcatgtttagcaaaatatacagggacacattaacagactagtaattacttagcgtaatgctttctgattccagattacttcttatcttaacttcatttttatttc

SEQ ID NO: 47599 - DNA, 450 bp, Homo sapiens
  misc_feature 416: n = A,T,C or G
ctaaagggaacaaaagctgggtaccgggccccccctcgagagtacttctagaattaattaaggcggggtaaatacgaatagaggcctctttactctgaaaagtgtctggttttttgaacagctggttcaataagtaaagctgaagaaatggtaaagcactccacagggttcatgggctctcaggtcttccacacattcaagaaaaagagaaaactatttctgttgaaaactttggccacactgggccaggcatggtcacacctgtaatcccagaactttgggaagccaagacgggtggatcacctgagatcaggagttcgagaccagcgtggccaacacggtgaaactctgtctcaaccaaaaatacaaaaattagccaggcatggtggcgggcgcctgtaatcccagctactcangaggctgaggcaggagaatcactggaactcggga

SEQ ID NO: 47600 - DNA, 460 bp, Homo sapiens
ctaaagggaacaaaagctgggtaccgggccccccctcgagagtacttctagaattaattaaggcgggtagggaaaatatttatagttttaaattcatttgttaataaaaaaagattaaaaaatcagtaaactatgctgtcaagttaggaaataaacctatttgaggtataagaagggattaatagagaaaaagtagaaactaatgtaataaaaatgaaagaatagagttaacaaaagaagaaaccttaacaataataaaataataataaataaactttctgttgttatgacaaaaaagagatatggaacaaataaacaatgttagaaataaaagtatggaataagtacagataccaagaagactaattgtaaaaaaaaaaaaaaaaaaaaaaaaaaaaagggggccccccccgggggggacccccaatccccctaaaagggggtttaatacccccccccc

SEQ ID NO: 47601 - DNA, 416 bp, Homo sapiens
ggaacaaaagctgggtaccgggccccccctcgagagtacttctagaattaattaaggcgggcctctttgacactgccatatcactccgtcagacttttaagcttcccttaacgccagtctttgaagggcttgccttcaagtatgtataaaattatttttttatagtcttttctaatgcaaatatattatcctcttgctcagtgtgaaacagtcgtcataagccaagtagcccatataccatttatgatttgaagaagtgttttgtttaatccatccaagcattcttaaaaagaatttcaggctgagcgcagtggctcacgcctgtaatcccagcactttgggaggccgaggcgggcggatcacgaggccaggagatcaagaccatcctggctaacaaggtgaaaccccgtctctac

SEQ ID NO: 47602 - DNA, 551 bp, Homo sapiens
ctaaagggaacaaaagctgggtaccgggccccccctcgagagtacttctagaattaattaaggcgggtatctcaattagcctttgctgtataacagactaccctaaaacttagtggcttaaaatagtgatgtttatttctcatgatttcatgagttgggctcagtcgggaccattcatgtggctataatcattgacagctcaactggagctggaggggctaagatggcctcattcatgtgtctggggccttgctgctttttgttggcttgggctctctttatcactcagtagtctagcctggacttccttgcatggtagcaggagcattccaagagggtgaatatggaagtctagatccctaaacttggacaacatcacagcctttacattaaattaatcaaagcatatcatcaatccagtccaaattcaagggatgaggcaacaggccccacctcttaggaggtgcagaatatcgtcatcatattttttccatctgtcatagataattacaaattataattttaatccttgaatttccttttttttttta

SEQ ID NO: 47603 - DNA, 599 bp, Homo sapiens
taaagggaacaaaagctgggtaccgggccccccctcgagagtacttctagaattaattaaggcgggaggattgcttgagcctgggagttggaggatgcagcaagccgtgattgccactgcactccagcctgggcgatagagcaagactccgtttccaaaaaaaggtaaaaaatagttcttcctgattcacattgatttttgttttcttgccaaagttttttaaatgagaatagtacaggcttgtaaacaagtaaacaaaaaatataacaagaattatttaaataatggataatagtttcctatttgtccccctcacccccgcccaatctactccctagaggtggtcattgctaataatttgtttttatctatgcagacatctctctgcatataaagatataacgtggtatatatatgaatatgtatacacttttttacataaaaggaataatactgtacatactgttctgtatttggtttttcacttatgtacatctttctgtgccaatatatgtaggtgtgcttcactttttaaatcgctgccgccaattctattgtgtggatctacaatattttaatgagtcctctattgatataca

SEQ ID NO: 47604 - DNA, 479 bp, Homo sapiens
taaccctcactaaagggaacaaaagctgggtaccgggccccccctcgagagtacttctagaattaattaaggcgggtacatggtctgttccaagtaccatcaattcaggggacaaagtagatttctctttatcctgaatttatctggtttggatgttagcaatattaactggagaaagatcattttctaaatttcttttgaggctgccgtgaactcagtttaatgttttggtttcaaatggaagagtttaaaatatatgcgtaaaatgttatcctgtttgagataggataaagacccacttcagaagttaggaaagtagccataaattcatgcccagtttcatctttcttggagtctttcattaatgttgatgggtttaccttcattttgcttgcctagaaggtgaaagtacaggtagagacagaattgtaatatagttttcatgtctaaactctattgactcaaaattcaaagagctc

SEQ ID NO: 47605 - DNA, 553 bp, Homo sapiens
  misc_feature 409, 411: n = A,T,C or G
tactaagggaacaaaagctgggtaccgggccccccctcgagagtacttctagaattaattaaggcgggcaggcagaagcttgatgatgaagtggccttgtcaaagaggcatctgcaagaaaaatattttgagtatgttacataggcaccatgcagttgaacatatattgctattatacattcctagtgtacttttaaacatattagtattttatttttatgaatactttatcaagtaaagtattcaagcaactgctcaagcaacttgctcccttcttacaataatcttggatatcttatgtcaatatatatattatagtttaacttcactcacagcttcacaacattctattatatgaacacaccaaaatgtactgacaaaatccccactacctaaaaaatcccaaagngnaaaaaaaaaaacaaaaaaaaaaagcggccgccaccgcggtggagctccaattcgccctatagtgagtcgtattacgcgcgctcactggccgtcgttttacaacgtcgtgactgggaaaaccctggcgttacccaacttaatc

SEQ ID NO: 47606 - DNA, 443 bp, Homo sapiens
gggaacgagaagctgggtaccgggccccccctcgagagtacttctagaattaattaaggcggggggagtagagtgagatcctgcctcacaaagaccccaccaattctttatgtcctgcgtcaactacagaccatgtaagcgaagagtgcattcctgggccctctgagtatctgccgactcgtgtctgagagatagatacaactgccgtgatcctattatgaagtgaatctgcctgcttgtatgtgatttaactctgtgtcaaactttttttgtacaaaagattcatacctctttcctgtttgaaattattttactgtgtttcatcaatctaatgtttatttttattacaccagtaatttcctcattgtgttgaatcttacagtggcttataaatctacatgtacctagaaatgtttagccagtccatgtatatttgatgtggc

SEQ ID NO: 47607 - DNA, 561 bp, Homo sapiens
caattaaccctcactaaagggaacaaaagctgggtaccgggccccccctcgagagtacttctagaattaattaaggcgggtggatcacgaggtcaggagttcgagaccagcctggccaacatggtgaaaccccatctctactaaaaagataacaattagcaggtgtggtggtgcacacctgtaatcccagggaggcagaggctgcagtgagccgagatcgcaccactgctctccagcctgggagacagagcgagactctgtctcaaaaacaaacaaacaaaaaaaccctaaaatccgagcactttggggctggacgcggtggctcacacctgtaatcccagcactctgggaggccgaggcgggtggatcacgaggtcaggagttcgagaccagcctggccaacatggtgaaaccccatctctactaaaaagataacaattagcaggtgtggtggtgcacacctgtaatcccagggaggcagaggctgcagtgagccgagatcgcaccactgctcttcagcctgggagacagagcgagaactctgtctcaaaaacaaacaaa

SEQ ID NO: 47608 - DNA, 459 bp, Homo sapiens
taaagggaacaaaagctgggtaccgggccccccctcgagagtacttctagaattaattaagggggtcctatcaataggaaacataatgctttatttagttcttaaaaatcatattttatctttgctttaataattttctcccattatttttttctactctttctgaaacatctgttagccacatattattgtttcttaattgactgtacacttttcttttctttttattgtccattttgctgtctttttgttctactttctgggagatttcctagatcctgtctttaaacattccattaaagactctatttcagctttcctatttttaatgttcagaagctcttttgactctctgatatttgtttttgttgcatttatttatttatttatttatttatttatttattttgagaccgtgttttgctcttgttgcctaggctggagtatgatggcgtgatt

SEQ ID NO: 47609 - DNA, 506 bp, Homo sapiens
cctactaaagggaacaaaagctgggtaccgggccccccctcgagagtacttctagaattaattaaggcgggggaattgctcgaacccacgacgtggaggtagctgacacccgctatcccatctctggccccgaacctgcgcgacaagagtgaaactcccatctcaaaaaaaaagacccccccggggggggacctaactttgctgacaaaaaaaagggtgcaaacgacggaaagatataaaatgtcccctaatatatgttagggagttaaatggaaaagtctaggaccatgtcagtaattgggtgtttttattaaagaggaaaaagtaagctcctgacccctaaaatatacccaaattagcatcctaattttgctcataaaattttttcctcaaagattaaagatttttagtacccttttaaaaacctattttgctgggattacaggtgtgaaccaccgcacccagctctacctgtttttaaaaaaaaaaaaaaaaaaaaaaaaaag

SEQ ID NO: 47610 - DNA, 535 bp, Homo sapiens
ctaaagggaacaaaagctgggtaccgggccccccctcgagagtacttctagaattaattaaggcggggtatgattgttggctaataaaatatgtccaaataccatggacatagtcccctaggaatagtctcaaaatattgtattttacaaaataactggtctgaaatctttaaaaacaaaaacaaaattaaaaaaaaacatcatgaaagctggaagaaaggaaaaagaaaagaggcagtgggactgtttcagatgaatggagtttaagcatgatagctaaatgcattccatgatccctgcttggatcttaaatttagggaaaaaaatactagaaaggatattactgagacaactagagaaatttgaagaagcggtgtatgctagataatattgtatcaatgctaaagatattttgagtgtaataatggcgttggggttatggaggagaatgtccttgtttttaggagatacatgctgacctttaggaagtgaacagttgtttgcaatttactctccagtgtttaggggaataacg

SEQ ID NO: 47611 - DNA, 527 bp, Homo sapiens
aaccctcactaaagggaacaaaagctgggtaccgggccccccctcgagagtacttctagaattaattaaagagcaaagcttttttattactttgtaatttaaaaaactgaaaaaaaaaaaactgaaaaactttggggggaattttgtacttttttcctgtgtaaatattggacttttttgagctttatcgcggttgttaatttgaagtaataacgtgcaaaggattaaagaataaaaaaaaaaaaaaaaaaaaaaacacaaaaaactttcaccatgttctttcacagcctgggcatattttgactggaataaccggtgtgttttcaccctttgagttaaggctgagggagtgagatgacaaaaacattaaatctgtgactttgaaagtaaatgagaaccgaatggctttaaggggggaaaattgacttccgccaccccctccagtcacacaaataagatggacttacttcagaaaatttggaaaatggctccatagtcactttcttgactgttgtactcccccttga

SEQ ID NO: 47612 - DNA, 601 bp, Homo sapiens
cgggccccccctcgaggtacttctagaattaattaacgcggggtcaacaaacggttaaatctgatgatacctagtgggctgatataagtaatctcataggaaacaagaagagtattgttgcataaagaactaaaggagttctattattaagtaaataatgagtgggatcttgtgaacaaacggagatgctggtgttatgtaagagcaaagaaactatgatgtcaggatcctttacactgttacgttactgaagccccccaaaaagcctctgtgtatccaagttatatctgtcagtatttgccatactgaaattaaaactaaaataattttaaatagtttaaaatgttacatgttaataacatgactttctttgaaaaataactcttcaaaacaaaaatttggtaagaatagtggcactgttttacatttttacaaatctcctaaatgtctgttagtagaagagaacaggattttcatattcactactctaccgtgttttcttttcattaaagtacaggaatatctgacttgatacagatatgtagttggaaacagaatatttaaacagtcctttcagataactggatattcttctgttacc

SEQ ID NO: 47613 - DNA, 554 bp, Homo sapiens
  misc_feature 425: n = A,T,C or G
aaccctcactaaagggaacaaaagctgggtaccgggccccccctcgagagtacttctagaattaattaaggcgggtggatcatctgaggtcaagagttcgagaccagcctgggtaacctggggaaaccctgtctctattaaaaatacaaaaaacttaactgggcgtggtggcaggtgcctgtaatcccaactactcaagaggctgatgcaggagaatcacttgaaccccggaggcacaggttgcagagagccgaaattgtgccattgcaacaagagtgaaactgtctcaataattagcattggttgactatttggaaaaatagtctaaaataatttattatctcctggcccccctcatggaggaatgttatgtatattattttgtttcagttggacacgccccagtgagcggatttttaccaatntgcaagcagttattaatgaagtttgtaggcacagaccgctgaatttgggtccctttgtggtacgtgctttccttcgtagttcaacaaatgaaggtttattactgaaaaatgatccattgttgccaaaaa

SEQ ID NO: 47614 - DNA, 314 bp, Homo sapiens
taaagggaacaaaagctgggtaccgggccccccctcgagagtacttctagaattaattaagggggttttatattgataattgttgtgatgaaattgatggcccctaagatagaggagacacctgctaggtgtaaggagaagatagggaaattagaagataaaaacatacttttagaagaaaaaagataaatttaaacctgaaaagtcggaaaaaaaaaaaaaaaaaaaaaaaaaaaacgggggcccccccccggggggggcccccattcccccttaaagggggttttttaccccccccccgggggccggtttta

SEQ ID NO: 47615 - DNA, 499 bp, Homo sapiens
ccctcactaaagggaacaaaagctgggtaccgggccccccctcgagagtacttctagaattaattaaggcggggcctaactggtagggtgggcactgcttacaaaagctgcaaagaaccacaggtgcatgggtgtaaacataaaatagaacaactaaggcccagaggagaatctggggtaagactttggggaattaagaacagttacatatacaggggggatttaaaatgcgacatgcatgcccagggaaaacacttgcccggaaagttctaagacccaagctttcaccttggtctggtccctaagcccaaaagcaggccaaagtaagtattgaaggattacctgggacaaagctgatttgtaaaatctaggattgctcctagcattcaagggaatttatgtcaaaatagctgaacgtgacataaaaggaagagagacttcagtgatcacacacagaaggaatagtcttttataaaaataatttggaaaactctcaaaa

SEQ ID NO: 47616 - DNA, 558 bp, Homo sapiens
ctaaagggaacaaaagctgggtaccgggccccccctcgagagtacttctagaattaattaatgcaagatttacaatagcacatcgctggatcacacagtaactacaataggttacatagatgtgaaaagatcggcaatgccattgcaagatgaatcacttgtcacttttcttctgcgctgggaaaaataaatcaacagtgtgggtctttcatgagcagtgacagatagtttatcttactatgtatcccccccaattcaatgatctatatcaacagaacaaagactatgctcatttgcctactggaatcattaagtaattgaataaagcagattgtaaaacatgatatcacaagtttgaaaattcggtgctggtgaaaaaaagaaactctaaatgatgataattttgtacagttttatataaagctctgagaactagaagaaattattaactttttttcttttttaattctaattcacttgtttattttgggggaagaagactttggtatggagcaaaaaaataccaaaactactttaaatggaatcaaaccaacttta

SEQ ID NO: 47617 - DNA, 382 bp, Homo sapiens
aagggaacaaaagctgggtaccgggccccccctcgagagtacttctagaattaattaaggcggggtaagatttgccgagttccttttactttttttaacctttccttatgagcatgcctgtgttgggttgacagtgagggtaataatgaggattatgtcgaaagacttcgggtgtttgacaaggaaggaaatggctccgtcatgggtgctgaaatccggcatgttcttgtcacactgggtgagaagatgacagaggaagaactttagatgctggtggcagggcatgaagacagcaatggttggatcaactatgaagagctcgtccgcatggtgctgaatggctgaagaccttgccagacttcccagagtccgcgcctttccc

SEQ ID NO: 47618 - DNA, 473 bp, Homo sapiens
accctcactaaagggaacaaaagctgggtaccgggccccccctcgagagtacttctagaattaattaaggcggtgatgtcacttgaacctcataggggtaaaaaaggctccttaacggagggatgggggtctctggagtctcgcctacaaagatgaaatccattttgtatgatctgaacatatggaatgggaggcttagttagaacatcatgtgtgcagccattatttacattaaaagcctcaaattcaccagtgtctcatatcaacctaacatcatgactgacatcttagctgaaaatgtacccgcccctcattgcgtctagtactgactcagattcatttattatagcacctcatttaaatgcaaactcaattggtatttctcccacaggtttttttcagtaccatatctgtgtgagcctttttacacacaatccccttagaaaaggaatgttgtctaaaaataggtgaat

SEQ ID NO: 47619 - DNA, 503 bp, Homo sapiens
ccctcactaaagggaacaaaagctgggtaccgggccccccctcgagagtacttctagaattaattaaggcgggaggatgattagagcccaagagttcaacacctggctggacaagctgacgagaccacgtgctaccacaaaggctgcaccacttctacaaagatagggactcctaatttattattgtgtttacttagagaatgaaaaaaacaccccataacaaaaaaaaaccttttacagaggtcaaagggctctgtaattcagggacaagggatatgaaaggcaaaagaaggatggttttggagctaaaagcagggactaggaatgatttctccccaaggtcacctggatccatcttatttctgcaccttcccctctttcatgatggatactggacccttgaaccattcaagaagaaacattccaccttattgtatcccctaaaagaaaacacaactgaaggttaattttgattctccaaggagaaaaagaataactattta

SEQ ID NO: 47620 - DNA, 487 bp, Homo sapiens
ctaaagggaacaaaagctgggtaccgggccccccctcgagagtacttctagaattaattaaggcggggaagccaagggcctcagggagcacagaattcagtccttggttcctgtagcttttcttttgatcctttgagctatcccagtatatcccagtagttgtttttagctacatgagccactaaattacctatttttgcttaggttagagctggatttttgttgcttctgaaatacttttattaacaactgagaaaagtaaacaaagtgctgtgaaatatcttttgtaaaatgaataattttgaaattttgtctcttctagattgttggaccttcagatggaagtagttacattatagattactatggaaccagacttacaagactgagtattactaatgaaacatttagaaaaacgcaattatatccataaatattttttaaaagaaacagatatgagcctccttgattttaatagagaacttct

SEQ ID NO: 47621 - DNA, 494 bp, Homo sapiens
actggccgtcgttttacacacaggaaacagcgtatgaccatgatgtactggccgtcgttttacacacaggaaacagatatgaccttaatgcgggcccgtggtttgctttgaagtgagaagagaagccattggggcttttgaacaggggagcaaccaaatctgatttaggttttaaatgtaaccatggtcactgaagaacagactgtgggttggagtgtttgtctgcacgaagcagccactgtccacagtttaatatttccttccacacatttcttgtgtgtgtgtccacaagcatacaactgcaaatagatattttaagagaattttttgcatgcatagaattatattgccttaaaaattgctttttacaaaagcagtatgtcatatatttacatattggtaccagtaaatcttcattttctaatagagcctataggtagggtcagcacactttttctgtaacagatcagatagtaagtttattacgcttcatg

SEQ ID NO: 47622 - DNA, 537 bp, Homo sapiens
cgcgcaattaaccctcactaaagggaacaaaagctgggtaccgggccccccctcgagagtacttctagaattaattaaggcgggtgcctgtaataccagctactctggaggctgatgtattataattgcttgaacctgggaagtggaggttgtagtgagtcgagatcacaccactgcactccagtttgggcgacaagagtaagactctttctcaaaagaaagtggaaattatatcatagtttttctaagagaatcaagaaatgtattttcatctctgtattttgtttacttgcatgcataacaggtaaagaagcttcttaataaagtagtgctccgtgaatcttgcttttaccggaaattaacagacacctcaaaagatgaagagaaccatgaagagtctgagtcattgcaggaagatatgctaggtctgagtaataataagattttgctttttaataaatatactagtaattaaagaagaaaaataacttactaaaatatggaatatgttatattataggaaacatattattactt

SEQ ID NO: 47623 - DNA, 514 bp, Homo sapiens
accctactaaagggaacaaaagctgggtaccgggccccccctcgagagtacttctagaattaattaaggcggggatgtctttacatattacagtacagaaactataacattcaatagtgtgctgtcaaagtgtgcttagctcacctggatatacctacattgttaaatgtctaaacagtaatcattaaaacatttttgattacaactcaaaggctcaaaaaggtgtgtaatgaaacgaaactacttcaatccaactatccaaacgttcattctctctgccatttggcacggggtatacccaggatattatctaacgtttctaacaggggtgttaatgacattagcagcaagagctatgagaaataactttagacattatttcattgaaccttcccaactgaaattattttatgatgttataacatggatagtaactcaagtagcaataagttacacagttgtgccatttgtgcttctttctataaaaccatcactcacgttttacagctcctgg

SEQ ID NO: 47624 - DNA, 323 bp, Homo sapiens
ctaaagggaacaaaagctgggtaccgggccccccctcgagagtacttctagaattaattaaggcgggtgggtccggccattaagcctcccacatgaagttgctcatgtggccggcagtgtggccgggcgtcaagaggcaacgcaacgtggatggccccgaactgcggcggaggataagaaagtggaagcaaagaaagaagaatccgaagagtctgatgatgacatgggctttggtctttttgactaaacctcttttataacatgttcaataaaaagctgaactttctcatgccaaaggagtgcccaataaaaaaaaaaaaata

SEQ ID NO: 47625 - DNA, 477 bp, Homo sapiens
tactaaagggaacaaaagctgggtaccgggccccccctcgagagtacttctagaattaattaaggcggggaaaatacaagattagtttgaaatattttgtcatgttaggaagtaaggaaatgctcacaaaatggggaaaatgtgaaagggaaacagatccactttgaataaacttccatagccaaatttgagaaaattggggcaataaaatagataacaatagtaatatattacaatctacagaagaaaattttcaattaatccaggccgggtgcggttgctcatgcctgtattcccagcactttgagaggcagaggcgggcaggtcacttgaggtcaggagttcgagaccagcctgaccaatgtggtgaatccctgcctctactaaaaatacaaaaattagccgggcatggtagcacatgcctgtagtcccagctactccggagactgaggcaggagaatgtcttgaatcccggaa

SEQ ID NO: 47626 - DNA, 471 bp, Homo sapiens
ctaaagggaacaaaagctgggtaccgggccccccctcgagagtacttctagaattaattaaggcggggatcctgcagtttggactgcttgccgggtttgtccagggttccgggtctgttcttggcactcatggggacaggcatcctgctcgtctgtggggccccgctggagcccttacgtgaaactgaaggtatcaacctaaggggctctaaggcaatgggaccattatccggaactagcaagggtctgtgagaggcctattgggctatgtgggatgaacttgcaacaaaatttctgttggaagaacatgacgtatctactatggctttgggactcattgcactgaatgtatattctagctgatgaatggtctgctgcacgctatccaatgaacggtaggtggtttttctaataacatcataccttgaaatcggagatatcctctcaatgctgggctgctcttgcctcctc

SEQ ID NO: 47627 - DNA, 505 bp, Homo sapiens
accctcactaaagggaacaaaagctgggtaccgggccccccctcgagagtacttctagaattaattaaggcgggtgagtatagtctaaattcacatatgtagctgtaccagcgcttagaatatccgatagcactgatggaatagcagatgtcagctatgacggtggatgtgtgcacacaaagcctttcagatgcttataaggtaatgcttacgtgcttgtagagtatgtcagattttcttttcatatgtgtcatcttcccagtaatcaatactggtttacctcataaggagatccttgggtagaaagcagttgtggcacctctggtttcccaggtagttatttcatgcatataaatttcataagtaaattctgttgttctcatttctagtactttcttggtgtactaggttatatatagacagttgtatttcacatgtatggttaattggtatgggtatgctctttaatgaagtcactctaatgcctcataaaatctagttagac

SEQ ID NO: 47628 - DNA, 487 bp, Homo sapiens
ctaaagggaacaaaagctgggtaccgggccccccctcgagagtacttctagaattaattaaagctgcaattggcagtaactaaattctccgaggtttctttcctctcctctttgctactgaaaggtgcagaaatgcttttgacagcatctttcctactgacagatgaattgttttgacaggagaatttgaaaccttcaactgaagacacattcagatgtcaggcctggtacagggcgatcgtgttcatagaaataagtgagatgctttagatgtgtgtgcatgtcagctgccacctgaaagaaaggcctcattaaagattttcactgattaactctttgattgttcttgggatctcagatgggaattcacgctgcttgctgcagagctcttgggctaagtgtattttcttaattactgagaaatgcgtgttatcagtaagcagtgaaaagtcttgaaaaaaaaaaaaaaaaaaaaaaaaaaggggcc

SEQ ID NO: 47629 - DNA, 456 bp, Homo sapiens
cctcactaaagggaacaaaagctgggtaccgggccccccctcgagagtacttctagaattaattaaggcgggagagtggaaagctgatggaagcactggattatgggtcctccggatggaaaaggtaagatggccgaggacagaattctagattttgtcaatatttaatggtaaaagaattagcaaaggagatggataaagagaagtctgagtgtagagcaaaaaggcttatgaaaaaaaaaaaaaaaaaaaaaaaaaaggcggccgccaccgcggtggagctccaattcgccctatagtgagtcgtattacgcgcgctcactggccgtcgttttacaacgtcgtgactgggaaaaccctggcgttacccaacttaatcgccttgcagcacatccccctttcgccagctggcgtaatagcgaagaggcccgcaccgatcgcccttcccaacagttg

SEQ ID NO: 47630 - DNA, 497 bp, Homo sapiens
ctaaagggaacaaaagctgggtaccgggccccccctcgagagtacttctagaattaattaatgcagctgtccatatcatggaacattatatacgtatgaaatacgatccaggttcatgcagaaaatctggaaggacggtaggcagcactcattttaaaattctccttaccaaatctgtctactctggcattacaggtttagcagcagaatttagaagaattctatatgatccaagtaaatacaacatttttttcaactcaggctttactagtgattggctcaactcacaaggtagaatgaagacactatgctggttacaacagagttaacttagaaatattcatacacacacacacagttgcacacacactgtcacacacacatactgttgctcacacaaacttatttctctaacttttacttgatctttctgaattcagctgaggtgttctttataccaaaagtcttttaagatcttcctggtctggttcagatgc

SEQ ID NO: 47631 - DNA, 469 bp, Homo sapiens
taaagggaacaaaagctgggtaccgggccccccctcgagagtacttctagaattaattaaggcgggtggggaagaggttaacaagaccacagatgctgcagatgggactcacacgaagatgtccttcccaccagccaggccatcgctggctttgtaagacgcagccaactgccaccaggtggcagaacaagatgagaaaaccgtgccccacggagtccctgagcccctgctgctgcagtttttgaggacatttgggtagcagggaggtctcttcttctctgcactgcatgcacccaggaaaggccatgtgacgtcttagcaagaaggaggcaaaccatgaggagagccttcagcagaaaccaaatcggccagcaccttgatcttggacttcccagctggcagaactgtgagaaaataaatgtctgttgtttaagtcaaaaaaaaaaaaaaaaaaaaaaaaaaaaaagcg

SEQ ID NO: 47632 - DNA, 674 bp, Homo sapiens
aaagggaacaaaagctgggtaccgggccccccctcgagagtacttctagaattaattaaggcgggtgtttctctttcttcaagtagacttaagttcgactttcctacaacatgtagctggtaaatacaggcttgatttttgccaaaagatagtttgacttcctgaaactaacagataactcttgtattcaaaaaataaatgtaatggatttaaagactggtaagaagtattttcttttcttttcatttttgagacacagtttcactctgtcgcccaggctggagtgcggtggtgcgaccttggctcacagcaacctccgcctcctgggttcaagtgattctcctgcctcagcctcctagctgggattaaggtgcccaccacccctggctaatttttgtgtttttagtagagacaagtttttgccatgttggccaggctggtctccaactcttgacctcaggtgagttgcccgcctcaggcctcccaaagtgttgggattagaggcgtgagcctctgcgcccagccagaagtcagaaatattttcatttttgcatttcagttcagatttgggccatttagatttattttgccatggtaaataaaaagttagagacttaagattcattaaatacccatgactaccttgtaagcatagtttttattttctgaaactt

SEQ ID NO: 47633 - DNA, 405 bp, Homo sapiens
aaccctcactaaagggaacaaaagctgggtaccgggccccccctcgagagttcttctagaattaattaaggcgggccattcatagtctttttttccatccatgcccaaagaactgctccagcatggagtgaacagatttactttcactcctctggttggcaaaagatggaaaaaaagactatgaatggctcgcttctttttatgttttccaaataaagcaacattggtttgcattctttgccacactgctttggtgctggaaaccggaagccagtggatgtctcatagtgtgatgagcctctgtcacctgttggatgtatactgtcagcatttatgtaccttctgttcattgtcatccagtgtgctacccaagaatcatttgagtgtggcaagttagttaaattt

SEQ ID NO: 47634 - DNA, 416 bp, Homo sapiens
  misc_feature 349: n = A,T,C or G
aaagggaacaaaagctgggtaccgggccccccctcgagagtacttctagaattaattaaggcggggagagaaggaaggaggagagggagggattccatgatctgttgaggactatccctggagtctttggttaagtaaaaactgatctgtgtgtgtaaaaaaggaaactactcaaagctaaggaaagaatccgaaaaacacagaactcagaatagtttgtattcccaccagtgagagtggaaagaccttctattgcataagacatctggtatagttctcaaaaggaaaccattcataagtaattattacctaagtaatgggaatatactataaccttacactaaaactntaaaaagcctgtgagtaagcctcaaaaaaaaaaaaaaaaaaaaaaaaaaggggcccccccccggggg

SEQ ID NO: 47635 - DNA, 457 bp, Homo sapiens
ctaaagggaacaaaagctgggtaccgggccccccctcgagagtacttctagaattaattaatggggcaggagagtggcaagaattgatccactttgactgcagaaaacacaacccacttctggcaggagcctgagaacagcgtgtggtattgtggcaaaaagattagcctcaaaggtagacagatctgacttttctgttctggctctgctgtttattaactgtttaacctcaggtcagttatatactatttcctagccttagctttcttatatttcacaatggagtaataattcctgtcttactgaattgtaaagattaaatgaaatgaaatttagtgaaaccatctagcacatatagtatgtactcattaaatactgtatctccagtgccactttttagtgatagtggggaaaaactttttgcttctctgaattttattttagtatttataagtgg

SEQ ID NO: 47636 - DNA, 516 bp, Homo sapiens
taaagggaacaaaagctgggtaccgggccccccctcgagagtacttctagaattaattaaggcgggctttggagttgaactgcctaggttcaaatcttagctctaccaattactagctgtgtgttctcagacatgatattttacatctcagattccttatctgtaaagtagacataagtgcacctataaagggttctgaaaaaagtaactgataaaatatgtaaagcccttaggaacagagtttgtgatattaaatgtgcaataaatgttagctactgtctgttgtgcactgtagttcttgggtgtcatttcaaaaatcctttaaaaacctgaataacatacatcccaacatttattacacaattcagttaacaacatttatatcttcaaagaattcattctctaaaatgctacccatttaacatactaaatggaaattagtcaccagatttgtcagagactggtgtcatgaaatattttttctattctcttttattattaaaaaaaatctgaatc

SEQ ID NO: 47637 - DNA, 542 bp, Homo sapiens
taaataaagggaacaaaagctgggtaccgggccccccctcgagagtacttctagaattaattaaggcgggggacatttcaaaaaaaaaagcattacaacagaaagatatccataaaaaaattaaacagaatgaaagtgccactgatgaaattaatcaccagagtctgatacagtctaagaaaaaagtccacaaaccaaagaaagatggagagaccaaagatgtagaacacagcagagagcaaattctcccacctcaggatctaagccattatattaaagataaaactcgccagacaattcccaggattagaaattattacttttgtagttggccccgaaaatataggcaaataaactcacaagttagacggaggccgcatctgggtaggcggtatgctattaatctggatgtccaaaaggaggcaattaatctcttaaagaattatcaaacgttgaatgaagccataatgcatcagtatccgaattttaaagaggaggcacagtgggtaagaaaatattttcgggaagaacaaaagagaatg

SEQ ID NO: 47638 - DNA, 438 bp, Homo sapiens
ccctcactaaagggaacaaaagctgggtaccgggccccccctcgagagtacttctagaattaattaaggcgggtgagctgagggaggcaagctgcctcgtgagcctccagaacacaatagaggctcggtgagtgttaacgccctgctgatcctctgcacaaggtggtttagaaaaatgtttttctcctcagattcattcactcaacaaatatatttattaggcctttactacagatgaagaactgctgtagatgctataaatatacctatggacagaacacacacagttcctgacctcaaagagcttctattctaatgagggagacaggtgttaaatttaaaaaaaaaagacgtcacctattaaaagcggccgctttttttttttttttttttttttttttcgcttcctacttttcaggtttaaatttatcttttttc

SEQ ID NO: 47639 - DNA, 465 bp, Homo sapiens
ctaaagggaacaaaagctgggtaccgggccccccctcgagagtacttctagaattaattaaggcggggaaaatacaagattagtttgaaatattttgtcatgttaggaagtacggaaatgctcacaaaatggggaaaatgtgaaagggaaacagatccactttgaataaacttccatagccaaatttgagaaaattggggcaataaaatagataacaatagtaatatattacaatctacagaagaaaattttcaattaatccaggccgggtgcggttgctcatgcctgtattcccagcactttgagaggcagaggcgggcaggtcacttgaggtcacgagttcgagaccagcctgaccaatgtggtgaatccctgcctctactaaaaatacaaaaattagccgggcatggtagcacatgcctgtagtcccagctactccggagactgaggcaggagaatgtcttg

SEQ ID NO: 47640 - DNA, 651 bp, Homo sapiens
accctcactaaagggaacaaaagctgggtaccgggccccccctcgagagtacttctagaattaattagcgggggaaatgaaccgaactacataaatgtctacgaccagtgatctctgaccataaagcctggtgtatcgaagaccacaggagacggtgaatgaacattgtcaggggattgaatatcccatctctacacatgtggataaggacctggatctttatgcccacgatgacgatgcggattaaggccatgacatggaccatgctgacgaacttgaagagactcagtcggatgacaggcctgaaatggctgatggaccctctgaccaggaagaggatcttaacgaaggtggcccgctcaaattaaggcatcgtgcggctggtcatcactggcattgctggttgcccccagggcggcacacaccagtgctcacagccggcacttgttaagaatggttgagctggaccaaatggtatacgtgtctttcatcaatataaacatggactgcattcatctggacacgggcctttccccccttaattaaggcggggttaaatggaaaaaaaacttgtttttattaaacattttgagatttagataaactacattttaactgaatgtctaaagtggttatctttttttcccccag

SEQ ID NO: 47641 - DNA, 383 bp, Homo sapiens
ccctcactaaagggaacaaaagctgggtaccgggccccccctcgagagtacttctagaattaattaaggcggggtaatagattttacttataagtgatactcagttggcttattttatagacacttctctggttactatcaaggattcactgccattgtaaattcccaacactcctcagaagtaagacaatcactggcgtggttcccaggctagtatttattcagtgccacagtccagaagacactgtataatgattaattgggctgtggatcacagtatagggatagaattagatatctggaagtcataattgatgcaataaagaagctgaaatataacaacattgtaagggagaagaaagaacattcctccaaagccatag

SEQ ID NO: 47642 - DNA, 509 bp, Homo sapiens
cagcgcgcaattaaccctcactaaagggaacaaaagctgggtaccgggccccccctcgagagtacttctagaattaattaaggcgggagtttgaagtagccacatttcaggtgcttaatagccatatgtagctagtgactgctgaattagcacagctaataaagctttcaggatgtgcttccacctgccttttctcctgttttcattgcatttcagccagtttgtattgtctcttcccctaccctcaaatatcactggctctttcttcccctttttgaacctttgcaaatgctgttaatgacaatgacataatggccaatatttattgcaggcatgatttataaggcatgatgcattatatttttttaaaatgtcacataactttatgatgaaagcactattattatcctttttttaaaaaaaaaaaataaaataaaaattaaaatgcggccgccaccgcggtggagctccaattcgccctatagtgagtcgtattacgcgcgctcact

SEQ ID NO: 47643 - DNA, 463 bp, Homo sapiens
taaagggaacaaaagctgggtaccgggccccccctcgagagtacttctagaattaattaaggcgggcgcctatagtctcagctactcaggaggctgagactggagaatggcgtgaacctgggaggcggagcttgcagtgagccgagattgcacactgcactccagcctgggcgagagagcgagaatctgtcaaaaataaataaataaataaataaataaataaataaataaataaataaataaataataaaatgttttaaaagacaagagcattgccagatatttggatcaatagcagattttatgcaaggctcatttatttaaagatatatagaaatctttaaatataacaatataatcatttttaaaataatattagaaaacatttaaaacttaccaagctgaatatttcttatccacactgattgttttgtttcttttaagattttctcaaagtaaaccc

SEQ ID NO: 47644 - DNA, 601 bp, Homo sapiens
  misc_feature 546, 547, 549, 551, 552, 553, 554: n = A,T,C or G
ccccccctcgagagtactgatagaattaattaaggcggggatcatcaaacatctgtagtctctcagaaacatcagatgatggattaagaagatcaaaaagctcttcattatagatctccaacagagacactttgactgaaaattcagtaccattatcagtaagtttctcaaaaatttgatgaagggtacgtggaattataccagccaagggatcctgaaattataataaggactaatataaaggaagaatgccatttactgtggcagttaaaatacatgggcctcctttataatatatttaaacataagtatggcaaagcatgttaaaacaaaacaagaaaagaaacaactaacctaatgttagagaagtcatttacaacagtctgttctacagtagtcttcacaccctccataaacctgtcacacttcttagccatcttcatccctgagcattacatagaaaccaatggaacctatctacttaaaaagccaagttcggccaggcacggtggctcacgcctataatcccagcactttaaaatttannanannnnaaaaaaaaaaaaggggggccccccccgggggggacccccattccccc

SEQ ID NO: 47645 - DNA, 516 bp, Homo sapiens
aattaaccctcactaaagggaacaaaagctgggtaccgggccccccctcgagagtacttctagaattaattaaggcggggcagcagaacatcgagtgttggataacttctctgacatagtagaagggtaagcattagtatttgttcttttaaaactctaacttgtgccgtgaaataactctagccttgactgaacccaatgggattcttaattgtaattatactcaaaagtgatagatccttagcaaaaataggaccagcagaaaggactccataaactgcataaaccacatgttgccataagatacatctgagggtgaaaatgaatgtcacttgtaaatggcttatttgatgttctatttggtttggtttacaacactcttctgtacagctacagtagctgaaaggataactggtctcttgaaagataacagccagcagctctcatacgttgcttctgtggaagagccttaagcgctttcagccctggtttatcatctcccaatggtacctgaca

SEQ ID NO: 47646 - DNA, 601 bp, Homo sapiens
gccaagcgcgcaattaaccctcactaaagggaacaaaagctgggtaccgggccccccctcgagagtacttctagaattaattaaggcggggggaaagtgatcccagtcaggctagtcagaatctctggaatgttctcaactctaaactattaagcttggggtttgttgatgttcctgctggtctacagcaagagaggctgaagccaaaaaaaaaaaaaaaaaaaaaaaaaaaaaagcggccgccaccgcggtggagctccaattcgccctatagtgagtcgtattacgcgcgctcactggccgtcgttttacaacgtcgtgactgggaaaaccctggcgttacccaacttaatcgccttgcagcacatccccctttcgccagctggcgtaatagcgaagaggcccgcaccgatcgcccttcccaacagttgcgcagcctgaatggcgaatggaaattgtaagcgttaatattttgttaaaattcgcgttaaatttttgttaaatcagctcattttttaaccaataggccgaaatcggcaaaatcccttataaatcaaaagaatagaccgagatagggttgagtgttgttccagtttggaac

SEQ ID NO: 47647 - DNA, 412 bp, Homo sapiens
  misc_feature 294, 297: n = A,T,C or G
tggccgtcgttttacacccgggaaaacagctataaccatgattatggccggtggttttccaaaaagaaaaaaaaaaaaactttattgggtggagacgtgagatcattctttacaaaacaaaacaaataattgaaacacagcgtgctaaaacctatggtatgcagttaaagcaatactaagaggaaagtttatagctataagggcctacataaaaaagcagaaaaactttaaacatcctaattatgcatcttaaaaagctagaaaagccatagctgaccaaacccaacattagtngtngaaaaaaaaaaaaaaaaaaaaaaaaaaagcggggcccccccccggggggggccccaattcccccttatggggggtgttttacccccccctttggggcgtttttttaaaaaaaaaa

SEQ ID NO: 47648 - DNA, 499 bp, Homo sapiens
ctggccgtcgttttacaccccggaacacagcgtgtacacatgatgggtgccgggcccctcctcgagagtacttgtagaattaattaaggcgggggagaagttattttggatatatggctttaatcaggatagactagtttatattactgcctgattacttttgaaattccagaagatgtgtaatcctaactgcatgatcacagtgaatcttatataaagtgaaaaataccactattactgaattataatatgctagaaaagctgttgatggtaatgtggtctatttttaatttacttcatttggaccatcaccatgaaaataaatctcaggatggtttgaacaaatgaataacccacttgcccagcctatcctccaagaaaatatattgtggcaaattccattcttcagcttttgctgaccctgttgtgttattctccccattccctccctcctgccagtcaaatatttgtgtacccgatgttacgtgccagactccgg

SEQ ID NO: 47649 - DNA, 385 bp, Homo sapiens
agaaagaaacctggacagatcataatgtttgcagtgattattcctcagtggtgggagcatggatgattttcagtttctttgtattttggttattttcaaatgttcagcaatgagctcaattacttttacataattacagaatatttggagtcaaacattcacctatttcccttttactaaaacttattggaattaacatcatttgatatagtgactatttctgagttaagaaaacataattaagaccgcaaaaaaaaaaactcgtaatattttaaaaaagcggccgccaccgcgggggagctccaattcgccctatagtgagtcgtattacgcgcgctcactggccgtcgttttacaacgtcgtgactgggaaaaccctggcgtt

SEQ ID NO: 47650 - DNA, 489 bp, Homo sapiens
cctcactaaagggaacaaaagctgggtaccgggccccccctcgagagtacttctagaattaattaaggcgggggccacttgaaatgtgaatgattagtgcggcactagagactcagaatgttccatgtataggatcgtatttgcgtaagtttaaagactatatcctatggtcacgaattcaatagatggccttcaaagtagaagacaggcttagtgaaataaaagacaggtgattttaaaaatttaaaattgtccaggtgtagtggctcatccctgtaatcccagcacttttggaggctaagatgggagaactgctagaggccaggagatcgagaccagcttgtgaaacctagcaagaccccgtatcttataaaacaaaaacaaaaacaaaaaaacaaaaatcaaaactgttgcacatagaactagaaaaaaagaatagaaaatatgggaacacaatgaaaagattaacatatatgtaattgaagtctc

SEQ ID NO: 47651 - DNA, 454 bp, Homo sapiens
accctcactaaagggaacaaaagctgggtaccgggccccccctcgagagtacttctagaattaattaaggcggggccaccagcacggccaggaagccagtctctagcagcagggagtcccactggaaataaaggaacaccagctaagtgaatatggtgatttgcatacacttacattgattcagaaattgtgtttaattccacacaagaaaaagaatgtggatctttttcactggaaaaaaaagtcgccatgtatcatcttaatcatgttttcctgggatataatctatacgtgacgcccatttaagccttcattgcatctatgcacgtagtttgctttcctcttgtgggaaataatgttggaccacacgggtttgggccacagcccacgaagacacaatcctgaacgtcataatcccaaatgttgaagtcccataagatctaaatctgtacag

SEQ ID NO: 47652 - DNA, 475 bp, Homo sapiens
caaccctcactaaagggaacaaaagctgggtaccgggccccccctcgagagtacttctagaattaattaaggcgggggcttgcgcacgggctgggggttaaacggccttggggaatgtctacgcagactgaaattttctaattgcatttaacgatacctgtctttatccttaaatgttggaatattctcaaaaaccgatgcctcgggcacttaaaatgactgtccttggtggtgcatgaaactgtgtctttataacaccttctcaaaaagaataaatgcagaggttcacacactgtttcccagcactttgggaagcaaaggagggccgatcacctgacatcaggagttcgagaccagcctgaccaacatggtgaaaccccatctcgactaaaaatacaaaagtagccgggcgtggtggcacatgcctgtaatcccagctagctgggaggccgaggcaggagaattgcttgaactc

SEQ ID NO: 47653 - DNA, 513 bp, Homo sapiens
cactaaagggaacaaaagctgggtaccgggccccccctcgagagtacttctagaattaattaaggcggggtaagatttgccgagttccttttactttttttaacctttccttgaaaatatttttaaattaataagcaaatgtaactcacagtgctcgtagtgttggggattgtgtgcgtgtgacttttttttacaaatactgtgtttttcctgtgtgaatctgcaaaagcccagatctggtcaactgaatgaaatttcatttgctaaagggatctcagatattcaaaacgatgatttaatgtctacaaactataagagtctcttttaaataggtttgaggatacttctgcctgtttgtccagcagaatctgaactacagtcattctctgcccatcattcctactccttaaactatagctgagagaatagcatagtccttagtttgggccattctggcattgccactatgatggcctgttgtcttacatttttagaaacttgcttgcatcttga

SEQ ID NO: 47654 - DNA, 443 bp, Homo sapiens
tggccgtcgttttacaccccggaacaagaaataacctatgattattgccggtggttttctttaaagaaaaaaaaaaaaactttattgctggaagggaggtttgtaaagaataaatatttttgttctgatttttatgagtttatacacatcttaagatgctgtattattcattattttgaagtatattgacaagaacagtgtgtttttggcatgcccttattttaagcatgtgatgccaggtaattaaggtgaagcagccaggtgtggtggctcacatgtgtaaccccagccctttggtaggctgaggcaggaggatcgcttgaggccaggagttcaaaatcagcctaggcaacatggcgaaaccccatctcaaaaaaaaaaaaaaaaaaataaccggggaccaggggggggcaattgtgttttaacctcctgggggggttaac

SEQ ID NO: 47655 - DNA, 448 bp, Homo sapiens
aacaaaagctgggtaccgggccccccctcgagagtacttctagaattaattaaggcggggtaagatttgccgagttccttttactttttttaacctttccttatgagcatgcctgtgttgggttgcattagggattaggttttaatgtgagttttggagggaacaaaaacattcaaagcatagcactgtccatctttgtattttcagtatttgtcacagcactctgcacagagtaggcactaactaattactgtataccttaactgactttcattctttctataccactcagaaaacatcaaagccatagaaacacaaagcctccctcccactaggtttttattttaatcagcagttctcaaaattttaagaaatgggatttcttggaaaaattcaaaatattttggggagaaaccacaactgggtttgctaataaatgctgatatct

SEQ ID NO: 47656 - DNA, 365 bp, Homo sapiens
ccctactaaagggaacaaaagctgggtaccgggccccccctcgagagtacttctagaattaattaaggcgggaggccatgtatgtaatttaggaagtgtaacacctgtggcatattattgaagcatgacaactgagtttaaatattaagctcattgtttaaattcacttgtttaaaaaaggcctatactacttctccccatattaaagattatttaatgtgtaattaatcttagctgctactttcagtcaatagcaacaatttcttagttcaaaaaaaaaaaaaaaaaaaaaaaaaaaaaaggcgcccccccccgggggggcccccaattccccctttaggggggttttatccccccccccccgg

SEQ ID NO: 47657 - DNA, 506 bp, Homo sapiens
cgcgcaattaaccctcactaaagggaacaaaagctgggtaccgggccccccctcgagagtacttctagaattaattaaggcggggaagaaagggtctgctagtgctctaaacagtggtttggccccccagggacatttggccatgtctgggccatttttgattgtcatggcttgggagacactactaacatctagtacgtagaggcctgggatgctgctgaacatcctataatgcactgacagccctcatcacaaagaattactcaaccccaaatgtcaatcaatactatctaggctaagaaatcctgatccagaaattttttttcaaaaacaggagctagagttgtcagaaaaggtttcaaagacaaagtgagccttggtttggacttggtttgggggcagatcatctgaaaggcatcttttgcctgacttttattttctctgacaagaattttaacctacaaagtttcccttactggccaggtgcggtggctcatgtgtgtaat

SEQ ID NO: 47658 - DNA, 526 bp, Homo sapiens
  misc_feature 413: n = A,T,C or G
taaccctcactaaagggaacaaaagctgggtaccgggccccccctcgagagtacttctagaattaattaaggcgggagaatataggagtagatatatatttgcttgtattttaaaaaactggaaatagtaaaactaacaaaatggtcacatagaaaaaggaagggaataggttgaaaagtataagaatgaaagtgagacttctattaatgtaccttattagtctagtttggactgtcaaagaatttaaaagttttacataattaaaaacaataaattggctgggcatggcggctagagcctgtaatcctgacacttcgggaggccaaggcaggaagatctcctgagccagggagttcaagacaaccccgggcaaaataatgaggcaatatatttaaaaaaaaaaaaaaaaaanaaaaaagcggccgccaccgcggtggaactccaattcgccctatagtgagtcgtattacgcgcgctcactggccgtcgttttacaacgtcgtgactgggaaaaccctggcgtta

SEQ ID NO: 47659 - DNA, 171 bp, Homo sapiens
ccctcactaaagggaacaaaagctgggtaccgggccccccctcgagagtacttctagaattaattaaggcgggaagttttagtagttgaaataatataatttcatttaggaaaaggaagaagaatatgaagagacaacagagggtgaaaattagtgatgatttctaaactt

SEQ ID NO: 47660 - DNA, 490 bp, Homo sapiens
cgcaattaaccctcactaaagggaacaaaagctgggtaccgggccccccctcgagagtacttctagaattaattaaggcggggggcaacctgtatcaaactctgggtccatataggggcacagaatattttcaccatagtgatttggttagacctacctttaggctctcaacctcaggttcataaagactgtcatttggtatctcataatttgatctaccaaatattctccaaattttatttctttctcctcttcccattcctccccacactcatcgcccttaccacgctactcctacctatctccccttttatactaataatcttataaaaaaaaaaaaaaaaaaaaaaaaaattaaaaaaaaaaaaaaaaaaaaaaaaaaaaggcggccgccaccgcggtggagctccaattcgccctatagtgagtcgtattacgcgcgctcactggccgtcgttttacaacgtcgtgactgggaaaaccctggcgt

SEQ ID NO: 47661 - DNA, 448 bp, Homo sapiens
agcgcgcaattaaccctcactaaagggaacaaaagctgggtaccgggccccccctcgagagtacttctagaattaattaaggcgggggataataacatggccaaagatgtgagggagagagagcttttttttttttaatatataacagatccattcttgttaaaattagcccattcccataataagaacattaatccattcatgagggcagagtgcttatagcttaattaaggcgggaaagtgaaaaaatctccatttgtttgaaaactaatgaatatgcttctaaataacccatgtgttaaagaagatataatactggaaatcagaaaacatgtaaataatgaaaatacaaatatcacaacttgcaggaagaggataaagtgatacttaatagtcttcaatggataaattagataagaaggctaaaaatcaataatctaagcttatc

SEQ ID NO: 47662 - DNA, 180 bp, Homo sapiens
ttaaattatgcagtttttcttgaaggaactaaaagcaactagctccctaatggtctataattttatttcttttgggttaaagcgaaaaagaagaaatagagaattgcagcagaattcagtggttgtctactatccatacttcttatcactttagtttttcatcagacaatcacaattaat

SEQ ID NO: 47663 - DNA, 639 bp, Homo sapiens
gcgcgcaattaaccctcactaaagggaacaaaagctgggtaccgggccccccctcgagagtacttctagaattaattaagggggtcatatctactggtctaaaattctagtttcctttctctatgcatttaatggcattgcttaccttttttgatatagatgatcttactttcttgaaagcttcttcaaaatgcttatgactaaccttgagttcacctatggagtaaatgcacaaatatacacatctcagtatcgtatggtaactgacttagaacttaacttcctttgaaagacttcaaaactttcaaggggtccactaaagagatcagtgatgagatgggctctgttctttttcagaacagtattctagccagatatattctgctcatcagattttaatccaaaaccacccaaagagatctgccactcataagttggtaattttttgtaggcctctttgcattgtttaacttaatggtgatgcctatgaacaagagccagaattattcagataattcaaataaatgtaactggaatagaaaggaggattccatagtattaatatttaagagtatggcacacacaatgagatcttatggagccataatatcatagaaatattttatatataatatatct

SEQ ID NO: 47664 - DNA, 482 bp, Homo sapiens
gcgcgcaattattcctactaacagggaaccatgctgggggaacaaacgctgggtaccgggccttctctcgagagtacttctagaattaattaaggtaatggaaaaattttataatcaagccactatgtaaccttaaagattagccactggagaacatttccaacaactgtgctgttgtgcattttttatttttgaggtgctttgattttccttagctgcatggtgcagaagcagcaaaccatatttctcagtacttccatctgggttcttcatcagctcttctgttggctcctcaggaagggcatgactccatcagtctgcctgcctgcctgcctgcctgcctgcctgcctgcctgcctgcctgcctgcctgcctgcctgcctgcctgcctgacttaattaactctgcgttgataccgtacatgcttacagagcttcactaacagatatgtgattcaggaagggatacatgttttgtagatg

SEQ ID NO: 47665 - DNA, 400 bp, Homo sapiens
gggtgccgggccccccctcgagagtaacttctagaattaattaaggcgggagaatcgcttggacctgggaggtggaggttgcagtgagccgggatcacgctattgcactccagcctggacgacagagcaagactctgtctcaaaaaagaaaaaaaaaaaccccttgaaaaaatacccaggcatgggggcatgtgcctgtattcctaccggaggctgggataaaaggattgctggaccccagccagggcaacagagggagaccctttctccttaaccatgtaaaaataaaaaaaaaacgcggccccccccccgggggggaccccccaccccccctttggggggctttaaccccccccccctggggcgattttttaaaaataaatgtcatttaagtgtagat

SEQ ID NO: 47666 - DNA, 501 bp, Homo sapiens
agcgcgcaattaaccctcactaaagggaacaaaagctgggtaccgggccccccctcgagagtacttctagaattaattaaggcgggtcatgggcctcaccagcaaactgttgtgtgacgtataacacattcaccagggtatcgtcattcattaatttgaatttatttgtagctaaattatgaagagtaagaaattgaggatggtctctgacatactcagcattttttaacaggctggtcttctgcttttgaagcttccaaagcatatcaaatgcacatcccacttgcttttctgaaagtatggctttgtttctttcaataaaaccaaacatttgctcctcatctgtacacttattcatctgaataattagtggttcacaactgatgggtcgaaattgaaacactctccaggagaatggacaaatagctcttagacgaagcgtatttgtaaccaatgactctaggaaaacagggtgttttttcatttatatcacaagttttc

SEQ ID NO: 47667 - DNA, 620 bp, Homo sapiens
  misc_feature 200, 201, 229, 237, 318: n = A,T,C or G
gcgcgcaattaaccctcactaaagggaacaaaagctgggtaccgggccccccctcgagagtacttctagaattaattaaggcgggtgtaatagcaagggagtcactgaaagagactttaaagaataagtgtaagtctacacccttcaaatgtcaggaacaaatatggggtgacgaatttggtctcatttattcaacctgnnactcagcgaagctttatgggaaataacnaccacacnagtgatgccggaagaataacaaatataaaacaataataaaagaaataaaggctggccggcccacccgcaggtggggagccntccatattccgcccctattaggtgatgtcggtatttaccgcgccgctcacgtggcctgtcgttttacaacgtcgtgactgggaaaaccctggcgttacccaacttaatcgccttgcagcacatccccctttcgccagctggcgtaatagcgaagaggcccgcaccgatcgcccttcccaacagttgcgcagcctgaatggcgaatggaaattgtaagcgttaattttttgttaaaattcgcgttaaattttcgctaaatcagctcattttttaaccaataagccgaaatcgggcaaatccct

SEQ ID NO: 47668 - DNA, 523 bp, Homo sapiens
  misc_feature 474, 479: n = A,T,C or G
tggccgtcgttttacaccccggaacaagggaaccatgatgggtgcgggccccccctgaagtctaataaataattacatattgggtagatgtttaaatgttcatagagaatgcataagctctagaaatatttttgctgatttcagattgcgatataaagtaatcaatgatataaaagaagtcacaatagtcatttaattcctcagcctgtgtcactgtttccctctgctttgagactcttatttcctttccacccagtaactgctgattgctgtgggtccatcccaggcctgtccagtcacggggaaaattactttgacaaacatatgcacagtaaggcattgcttacatactgagtaacttctcccaggattatttataaaaactcccgccttaattaaggcgggagaatgctcgctggggtatctcattggccaatatcttgatcttggactttccaacttccaaaactgganaaaanaaaaaaaaaaaaaaaaaagggggccccccccccgggggggaccc

SEQ ID NO: 47669 - DNA, 442 bp, Homo sapiens
gcgcgcaattaaccctcactaaagggaacaaaagctgggtaccgggccccccctcgagagtacttctagaattaattaaggcggggtagctctgacctgatatcccagcactctgggaggccgagatgggtaggatcatctcaggcagggagtactgacacgtagccttgacacaacactggagagaaccccaactctattaaaaatatccgggtgcggcaccgcatgcctgtcatctcacctactcagtacgccgaggcaggaaaactgactgaaccccataggcagatgttgcatgagcccagattgtgccactgcactctagcctgggcaacaagagcacaactccgcctcaccgtgggtgtgtccaagaagaaataagtctgtaagccttgtctggaaataatagtttatatacctaaaaaaaaaagcggccgccacc

SEQ ID NO: 47670 - DNA, 593 bp, Homo sapiens
ggaacaaaagctgggtaccgggccccccctcgagagtacttctagaattaattaaggcgggctgcgggcaaagagagagaggatcagggtgggcagaaagatcagggtaggcagagctagggacgcccctgacagacattgagatcacgactcccagaaccagcagtcatcccctccccaaaaaaaaaaaaaaaaaaaaaaaaaaaaaaagcggccgccaccgcggtggagctccaattcgccctatagtgagtcgtattacgcgcgctcactggccgtcgttttacaacgtcgtgactgggaaaaccctggcgttacccaacttaatcgccttgcagcacatccccctttcgccagctggcgtaatagcgaaaaggcccgcaccgatcgcccttcccaacagttgcgcagcctgaatggcgaatggaaattgtaagcgttaatattttgttaaaattcgcgttaaatttttgttaaatcagctcattttttaaccaataggccgaaatcggcaaaatcccttataaatcaaaagaatagaccgagattgggttgagtgttgttccagtttggaacaagagtccactattaaa

SEQ ID NO: 47671 - DNA, 490 bp, Homo sapiens
  misc_feature 374: n = A,T,C or G
atgattacgccaagcgcgcaagtatccctcactaaagggaacaaaagctgggtaccgggccccccctcgagagtacttctagaattaattaagcgggagtgattattgtaacctttgatttaggtttcctgtcctatccactaattaagttgccgtcttcctattatgttcaattttgaagtgtagaagtgagaaatgtggactatatatatggttttctactattacagtaagaattataagcatttctattttctacataagtactgctgttttttctttcacacagccaggaagaaagctcaggcccattagtgatgactctgaaagcattgaagaaagtgatacaaggagaaaagttaaatcagccgagnaaaaaaaaaaaaaataaaaaagaaaagcggccgccaccgcggtggagctccaattcgccctatagtgagtcgtattacgcgcgctcactggccgtcgttttacaacgtcgtgactg

SEQ ID NO: 47672 - DNA, 483 bp, Homo sapiens
aaagggaacaaaagctgggtaccgggccccccctcgagagtacttctagaattaattaaggcgggtgtcactccttgccaaagctttagaaagccttcctcttcaatgatccctagggctgtgcgcaccattcccctatagggggcagattctcttgcaccgtctcccaaccgagcaagagctgcttctccttgcatttggagtcgagtttttgtgagatccaggggaaaggttgctaacaaaaacacaaatgcagggaaaaacccacaacattcagagaaacaaacaaaaatctaaaatcataggagtaatattttcccaagactggttgttctcaaattttagaatatattagaatcagctcgggagattttaaaaattagaaattttctagccccgtgcccatggattctaattcagtaggttgaagagggtttagaaacttgattctcacacagtcccaaatttaagaatcactacgca

SEQ ID NO: 47673 - DNA, 577 bp, Homo sapiens
gccgtcgttttacaccccgaaacaagagaaaaccatggctggctgccgggccccccctcgagagtactaatagaattaattaaggcgggcgcctgcgttcccagctacttgggaggctgaggcaggagaatggcctcaaccctggaggcggagcttgcaacgaacggaaatcgctccactaccctccagcctgggccacggggcgagactccatctcaaaacaaaaccctgccacaaaagaatcaaagaaaaaatagcatgggcataggctctttatctagagaagagcaggccacagcccagaggctaaattcttcccactacatatttttggtaaataaagttttactggaacatagtcatgcccattcatttattcattgataatggctgcttttgtactacaaaggcacagtggagtacttgtgaccgaaactactagacctgtagattcaaaaatatttactctatgacacttttcaaaaaaaaaaaaaattaaaaaagtaaaccccccccccccccggggggacccccatattccccctattagggtctttttcccccccccttagggggg

SEQ ID NO: 47674 - DNA, 494 bp, Homo sapiens
gccagcgcgcaattaaccctcactaaagggaacaaaagctgggtaccgggccccccctcgagagtacttctagaattaattaaggcggggaggaagaaggtaaagagagaatttcaggatatagcacatctagcttagcactacttgactgaacttcctgtgatgatgtggaaatgtatatttgcagtgtcctgcatagtaggcactagctatacgtggctactgaacacttgaaatgtggccagtatgaccaagtaactgaactctttattttaattaaacagtatcaaaattgcttgcttaaaacctaagcaatatgcattttgcttgaactgcttactgtaactttaacctaagattatagtgaccttattcaggaaaaaaaaaaatttagtgtaacttcaaagacttgacattcttgtcagaggaaaaaaaatttctagatactgtttgcttgttttttgttgtttgtagaaagataaaatattttggta

SEQ ID NO: 47675 - DNA, 335 bp, Homo sapiens
ctggccgtcgttttacacccacggaataagagtgtacccatgctgccggccgggccctccctagagagtacttatagaattaatgaaggcgggggactttaatacaaaaaataattaaaacaattattacagagttcctcagcagaagggcataccgatgctgtccttgacctttcatggaataagctaatcaggaaaaaaaaaaaaaacaaaagaaaaaaagggcgcccccccccgggggggcccccaattcccccttttggggggttttttggggcgccccccggggccgttttttaaaaaggaaaaaaaccccccccctggggccgtttttt

SEQ ID NO: 47676 - DNA, 496 bp, Homo sapiens
tgattacgccaagcgcgcaattaaccctcactaaagggaacaaaagctgggtaccgggccccccctcgagagtacttctagaattaattaaggcggggggaaaggcattatcagggttaaagtgagaaacatattaacagcacatctggaccaatgaattaactcagaaataaggctgaaaaatcaggataaccacccacactcttccttctgaatggagatttgtcagatttgaagcaaagaaccttcctctcttcaagttttctggggaagaaagtctaagaaatgtaaaagcccaggctctgaggacccaatgctcctcacgccatccccatggcctgatgatgggggcactacaagaataataatttgaatgccttttgcttaaatactgcgttctacttgtatctcattatctatcccatgataacacagtaatccaggaaaggcaggaattaaccccactttagagatgaggaaactgagacccagaatg

SEQ ID NO: 47677 - DNA, 463 bp, Homo sapiens
agggaacaaaagctgggtaccgggccccccctcgagagtacttctagaattaattaaggcgggagggaactaggcaaaccctggattgacttgtgtgaagtcaggtagtgaagatgaccaatatgtaataaactggtgactctgggccacgtgccatgcaatggcacatcctcatcatcacagctgatcttgggcaccactacttggtagaaatctccagaaatctggaatcctggacctggattctcttagtatgctgtaggggctattatatgtagcctgtcctcaccatcatcctgaaggggtagaacaagaaatcaacagaatttacttggaattttggttccaaatggctgttaattaaagcggggtgtgtgtgtgcatggaagatgcctgggctgtctttgctatatgtaaatagagccattggatctttatttttgattaatttgttctgattttt

SEQ ID NO: 47678 - DNA, 444 bp, Homo sapiens
agggaacaaaagctgggtaccgggccccccctcgagagtacttctagaattaattaaggcgggggagattgggtgatcaactgccaaatggtacccagaaaaaaaaaaaaaaattaaatgggaaaaaaaaaaaaaaaaaaaaaatttaaaggcggccgccaccgcgggggagctccaattcgccctatagtgagtcgtattacgcgcgctcactggccgtcgttttacaacgtcgtgactgggaaaaccctggcgttacccaacttaatcgccttgcagcacatccccctttcgccagctggcgtaatagcgaaaaggcccgcaccgatcgcccttcccaacagttgcgcaccctgaatggcaaatggaaattgtaagcgttaatattttgttaaaaatcgcgttaaatttttgttaaatcagctcattttttaaccaataggc

SEQ ID NO: 47679 - DNA, 359 bp, Homo sapiens
actaaagggaacataagctgggtaccgggccccccctcgagagtacttctagaattaattaaggcggggtaagatgtgccgagtaccttttactttttttaaaaatccctcattagcatgtgccagtgcatcttttctaaatgtggacagcgaactaatactggtaaattggaaaaatcaaatttgtttgcctaacatacaataaaaaaaaaatataaaataaaaaaaaaaaaaataaaaaaaaaaaaagcggccgccaccgcgggggagctccaattcgccctatagtgagtcgtattacgcgcgctcactggccggttttttacaacgtcgtgactgggaaaaccctggcgttaccc

SEQ ID NO: 47680 - DNA, 566 bp, Homo sapiens
ggaacaaaagctgggtaccgggccccccctcgagagttcttctagaattaattaaggcaggagaatggcctgaacactggaggcggagcttgcagtgagctgagatcacaccactgcactctagcctgggcgacagagcgaaactgtctcaaaaaaaaaaaaagaattaaaaattaaaaaaaagaaaaagaaatgtcagttgagacatttctaagtttatgtgaaactgaggggaaacccattcttcacatgcattggtatatccgaagtattcctgtaatgtaaacaacagctacaataatgtcatgtacaatacatttggccaaatacctgactgtacactaaggcctgaactaaatagaacaaaatcttgaattcttacataaatgccaaagtacaatgaacattcaagaggcattaaccaggccacacaaatatctgaaaggaaaacctggggagatggcacagagaacagtcatgtggaataggatcctgggtggagagttcagagtaaacctgggactgtttcaaatagccaaggaatctagacaggaggggtgaattag

SEQ ID NO: 47681 - DNA, 571 bp, Homo sapiens
caattaaccctcactaaagggaacaaaagctgggtaccgggccccccctcgagagtacttctagaattaattaagggggccctaccaaaattgtaagggtgtaatagagttacagtaataaagaaagtatgcctgtgcaagagtagacaaagtaatagaacagaagagactattcatgcttagacttgtgtagaagtagaatttgatggttatgaccacaatggcgatgacatttcatatcagtagatggaagaaatggattatttaccaaatggtcttggaaaactggcaagctcctccagtaggggaaaaagcaaaacaaataaaactgggatttcctacttttttctgtagcccaaaataaactctacatgggcagtggaactataaaagtactggaaaaattcacaaggtcagtatatttattatcttatgtgtgaaagtaatttctaagcaatgcacaaaaactagaaaacataaagatatgaaggaatttgattatataaaattttaaattgcacatggcaaaaagcattctttagattaaattaatagatatagtctgggaaaa

SEQ ID NO: 47682 - DNA, 516 bp, Homo sapiens
ttacgcctagcgcgcaattaaccctcactaaagggaacaaaagctgggtaccgggccccccctcgagagtacttctagaattaattaaggcggggggggcttaatttagacccagttgaggaaatttgtaaaattcggttgaaatgcgtaatattgtgtagtggcagtttctcttatattttgtctgacgctgctgaaatcatctcatattttttcatctttcacacttcttccatattctctatcagttaacctttatttgaagaaagaagaaaaaaaattaagtaggtagttggtagttactgagacagttaataggatgaagggagagttggggctgtttgggcatctgtggagggtggtgctgacagggctaggcctgcacctctctggcctcctcaagagctgcttgttaaatgtttccgtgtaaatagaatgaatagagaccgccatttccacatggcaggcctaaaaaaaaaaaaaaaaaaaaaaaaaaaagggggccccccccggggg

SEQ ID NO: 47683 - DNA, 486 bp, Homo sapiens
tggccgtcgttttacaccccggaacaagcgtataaccatgatggttgccggtccttttctttagagaactagtaaaatactttaatgcggggccggccggaagcttaaacgaataaacaattgaccaatcatgcatcacccatcacattatcaacaacccacaggacaagtattagtatcagaattgctataatgttatctgaaatgtccagttttcaacaacaaaacaaaatatataagacaggcaaagaaataggaaagtgtgacccatatacagggcagaaagcgagccatagaaatatctttttgaaggggtgtcattggtggcctcaggagactaagacttcaaagcagctattataactcagttcaaataactaaaggaagccgtgaataaagaattcaaggaaggtgtgatagcagtgtctcttcaaatacataatattgttaaagatatggaaaatattacgaccaaatagaaattaa

SEQ ID NO: 47684 - DNA, 580 bp, Homo sapiens; identical to SEQ ID NO: 47148

SEQ ID NO: 47685 - DNA, 294 bp, Homo sapiens
tcactaaagggaacaaaagctgggtaccgggccccccctcgagagtacttctagaattaattaaggcgggtggggaaccttgttttcttgcaggaaccttgggtgcctgtagagcggctcaggccttgatgatttgagcttgtgttttctttctgtgtcagcacactgtggggttgaatagaagatgcttgccttttaaaaaatgcgataatttgacatacgaaaaaaaaaaaaaaaataaaataaaaaaaaaaaaaaaaaaaaaaaaaaaaaaaaaaaaaaataaaatataac

SEQ ID NO: 47686 - DNA, 437 bp, Homo sapiens
  misc_feature 417: n = A,T,C or G
ctaaagggaacaaaagctgggtaccgggccccccctcgagagtacttctagaattaattaaggcgggaggcaactgaagaaaaaacacgtccaacttcaggatgggtcctagatcagaaaaaggatattaaaaactagtgcatttaaaaattcattaattaaggcggggcagccggagctgttgacggaaaggagtagccccaaaggagggcatgtgaagtcgcacgcggagctcgaggggaacggcgagcacccagaagcccccgggtctggagagggaagcgaggcgctgttagagatctgtcagagaaggcatttcctaagtggaagcaagcagcagcttagccgggattctcttctgagtgggtgacagagcaagaccctgcttcagaaaaaaaaaaaaaaaaaaaaaaaaanaggggggcccccccccgggg

SEQ ID NO: 47687 - DNA, 531 bp, Homo sapiens
ggccgtccgtttacaccccggaataaagggaacacatgctgggtaccgggccccccctcgagagtacttctagaattaattaaggcgggaggattgcttgagcccaggagtttgagaccagcctggccaatatagtgagaccctgtctctacaaaaaataacaaattggctgggtgtggtggcacacgtcctgtggttccagctatggagaggctaatgtgagaggcttgcttgagcctgggaggtcaaggctgcagtcagcgatgattgcaccactgcacaccagcctgggcgacagagtgagaccttgtctctctaataaaaagcctttattatgatgcgcgcccccccgggggaatccccaattccccataagtgaaccctttttccccccccccacgggctatttttaatcagctttttcttttgctaccaagagtttcaaaaaataaatgcagtatttgatttcaggctgctaaatgggctcatttaacttcattcctttgagtagacatttaaaaaaaaactgaa

SEQ ID NO: 47688 - DNA, 528 bp, Homo sapiens
gcgcgcaattaaccctcactaaagggaacaaaagctgggtaccgggccccccctcgagagtacttctagaattaattaatgagaaaacttgaattgtgatgtttaaatattagtcagtgagtattcttaagtcagtatttctttcagttttctagtagtgtggatgaaatgcaaatacagagaaaatgatataggaaaaataaaatcttcataaagaggctattttgagttgtggatattgtagtatttattaagtgaaaaaacgaaaaagctttaagtgaaatacagatattgtctgtccatactgtcaatatgtaaaggcagaaagggcctccaatataacactacgatgctttaattttagtcgactttatgtactacaaggtggccttgcccagcaagaatggagagtgcctgaactattgcacagactactgaagtacttggaacccaaactcacccaggtttacaaaaatgtcagagaaagaataggaaggtaggtactgttttctctgtggtgtacctctc

SEQ ID NO: 47689 - DNA, 619 bp, Homo sapiens
cgcgcaattaaccctcactaaagggaacaaaagctgggtaccgggccccccctcgagagtacttctagaattaattaaggcgggggaaacagaagacaaagctgggttccacattcaagttcaatttcctgtccatcacgtccgatctttactggtttatgttcattccaaggattggtgagatgagccgacttagtgaagggtaattcacgcctaaatacaaagtaatatcaattacattcttctgcagaatcctttaaggaccttatactacttttagtagtgaattcctgtattaactgtgacttaaatgtgactaaattttaaaaaccacttacagtggttaattccctatagaaagcctcttcagagactttttccatattctccagttttctaaaaaagagcttaagagcaagggcttgagaaccaagataacttggggcttaaaccccagcctgctctcttctctgagcctgaatctatttctttgataaacaagaatatcaccatctactttatagttgttttacgcagtttgcaaatgaaatgacacaaaaaatatttagtatatccctttcttctatgaactcaaaaaacttaaaaactgaccaaaaag

SEQ ID NO: 47690 - DNA, 572 bp, Homo sapiens
agcgcgcaattaaccctcactaaagggaacaaaagctgggtaccgggccccccctcgagagtacttctagaattaattaagcttatagttcctaaataaaccaggaaacgggtttataatttttaagggactcgccccacccttacactcaggatcttccacatctagaaactccccatagtctcttgcccccatgcaaaactttatccacagaattgggagccggacctctagccttaaaccagcgtgaaaaggctcggccggaaccacaaggaccatgcctctgcggctttctctactgccggccaactcacggctgggctttgggttctgtaacgtcacccaccacgagtgcccctggcccctgaccgctgcgcaaggcagacgcacatcagatggagaaccggtacagctgctcttgatgaaaacggcagtggctctgaaaagagcctttagatcgaccacttaaaaatataccttaagcccgctccccgcggatgcggctgaccaactggatgtccttgggcatgatggtcaccgcgcttggcatggatggcgcacaggttcctgtc

SEQ ID NO: 47691 - DNA, 498 bp, Homo sapiens
aattaaccctcactaaagggaacaaaagctgggtaccgggccccccctcgagagtacttctagaattaattaaattgtaattacaggccaggcatgatagctcatgcctgtaatctcaacattttggtaggccaaggcaggagaatcacttgaggccagaagtttgagatcagtctggttaacatagtgagacctgtctctatttatatgttaaaataataataatagtaataataatcaattgtaattatagttattcctagagaagttgatttagatatattacttaaataaggttttaaaagtgataatttagctaaaatcattattttaaaaatgtacattttcagatgatacaacttttacagaattacattagaacgtacagttcgttatgtctatgaaggtgttttttttcccttttcatcttgttaggcacgtaccatgttattttagatgaaagccattacaaagagttgctcacacatcatgttagtc

SEQ ID NO: 47692 - DNA, 590 bp, Homo sapiens
cgcaattaaccctcactaaagggaacaaaagctgggtaccgggccccccctcgagagtacttctagaattaattaaggcgggggggaaattttatactataatgaactgttctccagtatgaagttcgttaactccaccaattacgtagccaacaattagaaacctaaaagcagtaattttgaaataatttagtgctttgcaacagtgcatttacctcacataggtgactgtttttctgctgtaggccattttctaggtgaggtttccgtagggcaaggaaaaaaaaaagaaaaaaaaaaaaaaaaggcggccgccaccgcggtggagctccaattcgccctatagtgagtcgtattacgggcgctcactggccgtcgttttacaacgtcgtgactgggaaaaccctggcgttacccaacttaatcgccttgcagcacatcccccttttgccagctggcgtaatagcgaaaaggcccgcaccgatcgcccttcccaacagttgcgcaacctgaatggcgaatggaaattgtaagcgttaatattttgttaaaattcgcgttaaatttttgttaaatcaactcattttttt

SEQ ID NO: 47693 - DNA, 484 bp, Homo sapiens
taaccctcactaaagggaacaaaagctgggtaccgggccccccctcgagagtacttctagaattaattaaggcggggtttggtattggaattggtcaagttcaataatggattgtttccttcaggcccgacaggagatgaactgcctttgctgcttttctgcccagttttatactcactcttctcgtaaaagtgttgcatcaggaaccttttaagaagtgcttaaattcagattcacttgtccctagtaattcattcataaagcacaggggttcatttaaacgtatgttgtaatccattcgcaaaaaaaaaaaattagaaaaaaaaaaaagcggccgccaccgcggtggagctccaattcgccctatagtgagtcgtattacgcgcgctcactggccgtcgttttacaacgtcgtgactgggaaaaccctggcgttacccaacttaatcgccttgcagcacatccccctttcgccagctggcgt

SEQ ID NO: 47694 - DNA, 534 bp, Homo sapiens
gattacgccaagcgcgcaattaaccctcactaaagggaacaaaagctgggtaccgggccccccctcgagagtacttctagaattaattaaggcggggtaagatttgccgagttccttttactttttttaacctttccttatgagcatgcctgtgccgtttctggaaggcaccgagcaaacacataagtcctgcagagcaggaatgacacagccctctgggcatgtgggtagactggcagcagtgttgctggtggtagagggtgtacagaaattggtggtatctccttaagacccttgaatggctgcaaactcaaaaaaggttcctagctggaaaactgtctgaaattggtggagtaaactccgagcatataacaatgctcagattataccataataaatgaatgtattctattttcaaaaaaaaaaaaaaaaaaaaaaaaaaaaaaaaaaaaaaaaaaaaaaaaggaaaaaaaaaaaaaaaaaaaaaaaaaaaaggcggccgccaccgggggggagctccaattcgccctatag

SEQ ID NO: 47695 - DNA, 304 bp, Homo sapiens
ggaacataagctgggtaccgggccccccctcgagagtacttctagaattaattaagtttgaggggtttcctttcctatatgctttaaaagatttattttgctttttaaataaagattgtttgtttattacctgaaagttgatactgatttaggaatatattttctgtgattggaatcctcaacaatatattttggaagcttgcagatggctaggtttgaaattgaaatttgtgtttttctccttcttttctcatacgacttctaagtcatcctttctgacataaggcaactttagtgtagtctg

SEQ ID NO: 47696 - DNA, 486 bp, Homo sapiens
cgcgcaattaaccctcactaaagggaacaaaagctgggtaccgggccccccctcgagagtacttctagaattaattaaggcggggaatctttgtaaaaattgatattctgtataacagagtgcctctctgttacttttggcctatgttgttagaaataagatgctatcttgcatagttagaattaagcatttatccaggttgcgttatccaaactgatttgttaaagctccaggtcacgttcttacactaagaaaatcattcagtaaacatgagacaagtttaggaaaaactaataaaataaacctgtcttaaaaaaaaaaaaaaaaaagaattttaagaaaagcggccgccaccgcggtggagctccaattcgccctatagtgagtcgtattacgcgcgctcactggccgtcgttttacaacgtcgtgactgggaaaaccctggcgttacccaacttaatcgccttgcagcacatccccctttcg

SEQ ID NO: 47697 - DNA, 448 bp, Homo sapiens
  misc_feature 406: n = A,T,C or G
attaaccctcactaaagggaacaaaagctgggtaccgggccccccctcgagagtacttctagaattaattaaggcgggtgaaactgtacagtctgtgagttagcacgatggcagcaaaggtgctgactgccgaaaggggcagagggtcagggtggggtgtcggtagggctgctgtcttggcagccgaaaactagaggccacaggttgggtctgaggtgagaaaaatgatagggacaacactgcacgactctccctagactgcttggtgtttgattttgatttttatagctccttgccctaatgaccagagagcagagtcataccccccttgcccatgcctccagctacaaaacaattcaattgcttttttttttggtccaaaataaaacctcagctagctctgccncaaaaaaaaaaaaaattacaaaaaaaaaaacaaacaaaatgg

SEQ ID NO: 47698 - DNA, 483 bp, Homo sapiens
agcgcgcaattaaccctcactaaagggaacaaaagctgggtaccgggccccccctcgagagtacttctagaattaattaaggcgggcgactgaagcgttgatccagtgccatatctacatcttcttcatcagtaagcaatgatgctttcatgatctaaaaaggcaatatctatagaatgaatgtgcttcccagaatcaaaaggccataccaaaaaaaaatgcagtttacaacaaccaaaaatattgttcctcctcaaggctgtgtacagagctagtatatttgtgtgatggatggaccccattacactgtgtgtgcctgaaaggcagaattcatataatacttctcttctttgtatctatagcgtctcaccagagcctggcacacagcagttgctatgtttgctgataaaataattttaaagtcaaacataagccaaaggttaaacacataacacaccaaaaggcactgggataaagggaagt

SEQ ID NO: 47699 - DNA, 505 bp, Homo sapiens
gcgcgcaattaaccctcactaaagggaacaaaagctgggtaccgggccccccctcgagagtacttctagaattaattaaggcggggtagaagcaaagagaggcgacggagccgctcaagaagtcgagatcgaagatttagaggccgctacagaagtccttagtatgtaactatagttatgattttggtttgagggttattctctgggtattcagatggcagtttaacttgagtgatttgaattgtgaatttttatttttttaatgattggttaaaaagtattgaattaaggatattggcattgaatactagtaaagtgaaaatacagtgcatagacaaataagtaaaaatttgcttttactaggcatactgactattttctgttaaactatcagagtttctaaattgtatgccagtcaacgcaaactggatgaaagcactagagtgcttgaaaaagatgacattgtagtgcccaaatacctaagaaagcttaacaagtgtctggg

SEQ ID NO: 47700 - DNA, 489 bp, Homo sapiens
  misc_feature 281: n = A,T,C or G
cgcgcaattattcctcactaaagggaacaaaagctgggtaccgggccccccctcgagagtacttctagaattaattaaggcgggctgttagtgttgtaaactacatgcgctttaaataccttttaccgagtgctagagccgttcatcaccaccccacgcagaatttcagctgcttacgttgaacaaattcaacaagtttatcctcaagtttatatgcagcaacaaaggtctatgaatttgggctcataaaactcaggcgaattaaagaggaaacagccgcncaaaaaaagaaaaaaaaaaaaaaaaaaggcggccgccaccgcggtggagctccaattcgccctatagtgagtcgtattacgcgcgctcactggccgtcgttttacaacgtcgtgactgggaaaaccctggcgttacccaacttaatcgccttgcagcacatccccctttcgccagctggcgtaatagcgaagaggcccgcaccgatcg

SEQ ID NO: 47701 - DNA, 270 bp, Homo sapiens
aagggaacaaaagctgggtaccgggccccccctcgagagtacttctagaattaattaatgcgggagaaacacttcaacccaggaggcagaggtcgcagtgagcagagattgcaccaaaactgcactccagcctgggtgacaaagcaacactctgtctcaaaaaaaaaaaaaaaaattaaaggtttgatttttgaaaaaatggatctgtctagttcaagtggctgtttaaaaatgctgaggcaggaaaaacatttaaccccaggaggcaaa

SEQ ID NO: 47702 - DNA, 439 bp, Homo sapiens
  misc_feature 341: n = A,T,C or G
cctactaaagggaacaaaagctgggtaccgggccccccctcgagagtacttctagaattaattaaggcggggtgagttcagtgactgctattaaaaaagtatagtacatagagcaaaaaactaaaacattgagaagatttaaaaaattgaaagcaacagactgttttctccacttctaagaatctctgaaacaccatacatactacctgaaaaggtaatgtagttgtaagtttctttctcataaattattgcattcagccataaaatctggtcctttgacttttacccctcacaatcatggcaagccaacgccacttatccagtgaaccactatcacgaanaaaaaaaaaaaaaaaaaaaaaaagggggggggccccccccggggggggccccaaatcccccttaggggggggggtttacccccccccatggggcgggg

SEQ ID NO: 47703 - DNA, 497 bp, Homo sapiens
gcgcgcaattaaccctcactaaagggaacaaaagctgggtaccgggccccccctcgagagtacttctagaattaattaaggcgggtcattttaatccttgaaaactgagtttacttcctacctaagcttccatccgcttaataccaaggtgatcaagtctgtgtgctaaatacaggaaaagccttgataggagaccctgctaccaatttgtaggaaataggacaaaaaaaaaacaaaccacaacactttgaacttccactgttgagtatgcaaacagcaaaatccagactatagggaagtcaacaagtcacaaggcccaagtttttcaacagataaagtagaagcaaaaaactgtaagaaaggaatgaagagagaacctacagattaagaaacttaaacgacttaccagtatagccacatgataaataccattaaaagaaaaaggaatgaactttcggctgggcgcggtggctcacgcctgtaatcccagcacttcg

SEQ ID NO: 47704 - DNA, 500 bp, Homo sapiens; identical to SEQ ID NO: 47585

SEQ ID NO: 47705 - DNA, 499 bp, Homo sapiens
gcgcgcaattaaccctcactaaagggaacaaaagctgggtaccgggccccccctcgagagtacttctagaattaattaaggcgggtcattttaatccttgaaaactgagtttacttcctacctaagcttccatccgcttaataccaaggtgatcaagtctgtgtgctaaatacaggaaaagccttgataggagaccctgctaccaatttgtaggaaataggacaaaaaaaaaacaaaccacaacactttgaacttccactgttgagtatgcaaacagcaaaatccagactatagggaagtcaacaagtcacaaggcccaagtttttcaacagataaagtagaagcaaaaaactgtaagaaaggaatgaagagagaacctacagattaagaaacttaaacgacttaccagtatagccacatgataaataccattaaaagaaaaaggaatgaactttcggctgggcgcggtggctcacgcctgtaatcccagcacttcggg

SEQ ID NO: 47706 - DNA, 414 bp, Homo sapiens
ctggccgtcgttttacacccgggaacacagcgtatacacatgatgtattgccgcgccttttctttagagaactagtagaattacttaatgcggggcagaagaagcgtctggtaagacaaccagcaagttaacaatggtcacctccagaaatgggctgggtaaaccaaagaatttttttgtttttgttttttttgagtcagggtctagctctgtcacccaggctggaacgcactggtgtgatcacggctcactgcagccttgacctccctggctcaagcaatcctcccagctcagcctcctgagtcgttgggactacaggcacgtgccaccacgcctgacacattttttaaatttttgtagagacagtgtttcaccatgttgcccaggcaggtctcaaactcctgggctcaagtg

SEQ ID NO: 47707 - DNA, 499 bp, Homo sapiens
  misc_feature 289: n = A,T,C or G
ctggccgcgttttacaccccggaacacagcgtgtacacatgatggttggcgcgccttttctcgagagaactagtagaattacttattgcgggggacaaagcctgggccgggcctgcgcttacgttcgcttgactggctgcgcttgttttcagggttttggtctgaaaacggatcttacctgcgcagagcaaaatcggttgtagattatatccacgaaaattccttctattaaaatgaatttcaagtcccacctaccctggaagcagaaagagagagaagagagagagtntagagaaagagaaaagaaagagaagttgaaaaagagaaagaaaaccaagaaagaaagagaaaaaaaccgaaaataaatggacaagaaagaaaagtcactgggatcctggactacggcactgctccaggcaggcctggttatcctgcttgaggcagcaatcctcttgagcctagtgaaatgcaactggctgtacctcaatgatgttgccct

SEQ ID NO: 47708 - DNA, 489 bp, Homo sapiens
  misc_feature 353: n = A,T,C or G
ccagcgcgcaattaccctactaagggaccaaaagctgggtcccgggccccccctcgagagtacttctagaattaattaaggcgggtaaactgtcatggaagtggtcccccatccccacagtgcaccctccccactgaagcctgactgaccttcgtggaagagtcatatcacagcactctgctgcttcacatctttgtgtgctgcccatctcaccagagcaagagccaaggtcttgccctctgcccgtaaggccactctgaccttcctgttcttcctaccactcaccctagcattacttatatgatatgtctccatacccattacaatctccagcattccccctcaaaccgaanaataaaaaaaaaaaatttaaaaaaagcggccgccaccgcggtggagctccaattcgccctatagtgagtcgtattacgcgcgctcactggccgtcgttttacaacgtcgtgactgggaaaaccctggcgttaccca

SEQ ID NO: 47709 - DNA, 653 bp, Homo sapiens
  misc_feature 530, 531, 532: n = A,T,C or G
attaaccctcactaaagggaacaaaagctgggtaccgggccccccctcgagagtacttctagaattaattaaggcgggtggatcatttgagcccaggagttcaagaccagactaggggccaggcacggtggcatatgcctgtaatcccagctactcaggtggctgaggtgggaggatagcttaggcccaggaggcagaggttgcagtgaactgaaataacaccactgcactccagcctgggcaacagagccagatcctgtctcaggaaaaaaaaagaaaacaataaatatacaaaggggtggaaattgtgagagaaaataagataaagaattagttcaacaggactaatattatgtgaaaaagagaaaacaaagttaatgaaggacagaaaattattgaaaaaataatgcaagacaatttcctagaactgaaagaatccactagtgcagaaccaaaagaaaaaaaaattcaaccatgtgaaatgtttgaactctaaatataaagaagattctaagtttccaaagaggaannnaaaaaaaaaaaaagaaaaaaaaaaagcggccgccaccgcggtggagctccaattcgccctatagtgagtcgtattacgcgcgctcactggccgtcgttttacaacgtcgtgactgggaaaa

SEQ ID NO: 47710 - DNA, 507 bp, Homo sapiens
cgcgcaattaaccctcactaaagggaacaaaagctgggtaccgggccccccctcgagagtacttctagaattaattaaggcggggaggggttgagtaggattttaaatttagtaaactattttgtgcaaataagacttggtttcctttgtcttaccttaaagtggtgtgagacttcttttcatttcaaggaagggttatatttttacatttgtgcaccggcgaagatagaattaaatctgtactccaatacaagagtatacagaaagtattgtcctgaatttagtgattttatcacaaaatattactcgagtgaatattagaaaagcaaattttgccttaataaaaatcaaggaatattatataaatgatgtctaagaagcaaataaaatcctaaagtgagactccctacgtcttagtacagcatataaaaaaagataggagaaagaaatgaaatgcggccgtcaccgcggtggagctccaattcgccctatagggagtcgtattac

SEQ ID NO: 47711 - DNA, 500 bp, Homo sapiens
tacgccaagcgcgcaattaaccctcactaaagggaacaaaagctgggtaccgggccccccctcgagagtacttctagaattaattaaggcgggcagatcacttgaggtcaggaattcgagaccagcctgtgcaacatggtgaaacctcatctctactaaaaatacaaaaattagctgggtgtggtggcatgcacctgtaatcccagctacttgggaggctgaggcaagagaatcgcttgaacctgggaggcggaggctgcagtgaactgagatcacgccactccagcgtaagcaacaaagcgagaccctctctcaaacacacacacacacacacacacacatacacacaaacacacacacccacaagagggtttagacctggtgcctgctggtttcagccactctaaaaccaatgggaggattttattattttatttctttgcaaaataattggttctgtggacaccatcgcccttcattaaggctgagattctgacttc

SEQ ID NO: 47712 - DNA, 457 bp, Homo sapiens
accctcactaaagggaacaaaagctgggtaccgggccccccctcgagagtacttctagaattaattaaggcgggatgccacacgcagactgacaacgtttctagcatgatcaggtgagctgtgtccagaaaaccaactagagggagtggaaggaggaatgaacgtgtcattctcgttaataaaggcattatgcgaaagaaagaatctaaaatggttaaagtgggggtcccaccgcctggggaacactctgatcctggtcggtgatgaagcttgccccccccctgaggtcctagatgaatgtggaggtttggagaaaattgaagttttacagcaacatgaaaatgaagacatatataaattagcatttgaaatcatagatcagtatttctctggtgatgatattgatgaagatccctgcctcattcctgaagcaacacaaggaggtacctacaatttt

SEQ ID NO: 47713 - DNA, 526 bp, Homo sapiens
cactaaagggaacaaaagctgggtaccgggccccccctcgagagtacttctagaattaattaaggcggggggagagagagagaaggcagcgagggaaggaggaccccggcaggcagcagcatgaaattcagcccagcgcactacctgctgcctctcctgcctgcgctggtcctcagcaccagccctgctttcctaattaatagtctcttgattgcaagatgactgcttctgctggaacctccatatccatattcaaggaagaaagactggttgagtttgtcaggtatcaatgattttcattcattcctctttaatcaagaaagcaaattatttcccacaactccccaaaagactgttgctgatgtctcattggccataactgtgtccagtagtttctccaaactgcaaggtaacttgaaatgcaaatatttcgctggataacatgcttctcatgtcactggtctgtgtcagcagaaaagaagtgggaaggaatgagtgtcagatgagctacttttagtgcatgcca

SEQ ID NO: 47714 - DNA, 391 bp, Homo sapiens
ccctcactaaagggaacaaaagctgggtaccgggccccccctcgagagtacttctagaattaattaaggcgggagaaagaacacagaagcaaacaagaacttttaagtgctgcaggtattaaaataaggcacaaaagtgggggaggtgtgctctgaaaagcttcagggtgaagataaatttgaaatgccaggaactcaaagagtgaactattctggaagtgatcactaggattcaaaatcttatactttctaattttatcgtattagcttttatatgttaatatttgattttattaatcacagaattttataaaaagaaaaaattatggaagaaaaaattttatccttctccattagatttatttattttaaatgtattaaaataaaatca

SEQ ID NO: 47715 - DNA, 589 bp, Homo sapiens
gccaagcgcgcaattaaccctcactaaagggaacaaaagctgggtaccgggccccccctcgagagtacttctagaattaattaaggcggggcttcgtgaactgtccaatcagaggcgccacgtggaaggtgggtggggcaatgcggcataaaagaggtgggcgtcgtacgtcgttacgcagcgcggttgctgggcacctcgactatcacctgaccgtagtaatatctcccgctacgcgcgttgtgaccaatgctgcatacaggagatgagggaggacggccagacacctggaagccgaaaaaaacacaaaaaaaaaaaaaaaaaaaagcggccgccaccgcggtggagctccaattcgccctatagtgagtcgtattacgcgcgctcactggccgtcgttttacaacgtcgtgactgggaaaaccctggcgttacccaacttaatcgccttgcagcacatccccctttcaccagctggcgtaatatcgaagaggcccgcaccgatcgcccttcccaacatttgcgcatcctgaatggctaatggaaattgttagcgtttatattttgtttaaaattcacgttacatttt

SEQ ID NO: 47716 - DNA, 453 bp, Homo sapiens
aaagggaacaaaagctgggtaccgggccccccctcgagagtacttctagaattaattaaggcgggagggatgggatattattgatgataggccttctgacgtctggcaatagattccagagtaacatcggtcatggataaatttttttttaactaagtgactgagaccaaagttaattgtcttttgagtgattttgcacaagatctcaaaatgaactgtactttttttcttgtgagaaccgaaattgaccactgcattcagcctgggagacagcaagacttcgcgtaaaaaaaataaataaataaaaagcaatttctggctgggcacagtggctcatacctgtaaccccatcactttgggaggacaaggtgggccaatcactttggcccagaatttcgagaccagcctgggcaacatggagaaacccgcagctactcgggaggctgagttggg

SEQ ID NO: 47717 - DNA, 489 bp, Homo sapiens
accctcactaaagggaacaaaagctgggtaccgggccccccctcgagagtacttctagaattaattaaggcgggctgcaaacctttataagaaatgaagctttcctttctaaatttgaatttcatctttcttcagttgacatgatagaagtttcaggccagcagatctctacattcctttccagtgctaagattctctgaaacctagacccatgtgtttttaaagaaggagaccccttctccttgactctccacctgcagatgcgtctgcatttaagtgatacatgacctgacaaccaaaggaaattttaggatccaaaagcaatcggaatctcaaagaaattattctaattatatataatatcaccttatgtaaactgactttaaatggaggttgttgtcattattaccctcactgtcaacccaacacaggcatgctcataaggaaaggttaaaaaaagtaaaaggaactcggcaaatcttaaaaaaa

SEQ ID NO: 47718 - DNA, 627 bp, Homo sapiens
ctggccgtcgttttacaccccggaaaaagaggtacacatgatgggtgccgggccccccctcgagagtacttgtagaattaattaaattcctataagaagcccctagccgccctccctgttcccactctcaccgccactctagtttctattcagcagccaagagtgatcctttacaaacctgaatcaggtttcatcactcctctcaaaatcctaaaccagctgaagtctcattcggagggaaaggtggagtcctgaagtgtcccgcgaggcccttgggagcaatctgactttcacctctcttatctcatctccccactcactccataccagcctggcagcctcgctgctgtcctgcaagcactttaggacttttgcactgactgttctttctgcctaaggcacactctccaccgacatgtccacacggctgctccttcacctcatttgagtctttactcaaatgtcacgttctcaaggaagccagccctgaccaccctatgtaacactgtaacctgctccccaactctaccctgccctatgcacagcagtacccgttttccttaaccatactttttacttttatagatagcactaattatatttaactttcttactcactatgcttac

SEQ ID NO: 47719 - DNA, 485 bp, Homo sapiens
taggaggaacacaatgctgggtaccgggccccccctcgagagtacttgtagaattaattaagggggcaggcggagcttgaggaaaccgcagataagtttttttctctttgaaagatagagattaatacaactacttaaaaaatatagtcaataggttactaagatattgcttagcgttaagtttttaacgtaattttaatagcttaagatttctgacatgaaaaaagagaaaaataaatgtgggcgccccccccggggggggcccaacatgcccctttatggggttatttacccccccctcattgggggatttttgaaaaattctcctttcccaaggttttctaattataattccctaaattccacttataaatatccattactttggatttagactttctgtctttggggcctttttgttaatatgaagattaatcttttggaacaatgggtaataactgggaggggcctctgtggagctggta

SEQ ID NO: 47720 - DNA, 481 bp, Homo sapiens
tacgccaagcgcgcaattaaccctcactaaagggaacaaaagctgggtaccgggccccccctcgagagtacttctagaattaattaaggcggggcagcccctggcccggcgccgggaagtacacagccacctgatctttttgtaagaagaaaaagaaaaacgaccctgatgagcttttcttctccaggaaggctacctgtgtcctagtctgtcgatgcagtcaaccaacagtcactgtgcacctactatgcgtcaggcactgggccaggcgctggggacgcagagatggaaacacacacacacacacacacacacacacacacacaccctacacaccctacccacacacaccctacctggaagtccttgccctcgaggtatctacattgtagagggaattgggggccgggacagacaataaacatgtaaatcaaatgaaaatagtaaaaatattaaaataaaaaaataaaaaaaataaata

SEQ ID NO: 47721 - DNA, 490 bp, Homo sapiens
caattaaccctcactaaagggaacaaaagctgggtaccgggccccccctcgagagtacttctagaattaattaaggcggggtttatactatatacactggagacagaatggcaaataaaattagtccacctccaagaggctataatctagaacacaatcctgattcttgacaatgtttaatactaaaaacttcaatgatttttttctctaattggtccccttcccattcttctctaatccaaaaaaaaaaaaaaaaaaaaaaaaaaaaaagcggccgccaccgcggtggagctccaattcgccctatagtgagtcgtattacgcgcgctcactggccgtcgttttacaacgtcgtgactgggaaaaccctggcgttacccaacttaatcgccttgcagcacatccccctttcgccagctggcgtaatagcgaagaggcccgcaccgatcgcccttcccaacagttgcgcagcctgaatggcgaatggaaa

SEQ ID NO: 47722 - DNA, 560 bp, Homo sapiens
tgattacgccaagcgcgcaattaaccctcactaaagggaacaaaagctgggtaccgggccccccctcgagagtacttctagaattaattaaggcgggcagttgaaagagtagaaataaggaaaaacatgaacttgagggtagagatgagagccaaattgataacaaatagattactaaatggggagactccctcagtctcagtctcaccaccctttagctcctaaaaaaaaaaaaaaaaaaaaaaaaaaaaagcggccgccaccgcggtggagctccaattcgccctatagtgagtcgtattacgcgcgctcactggccgtcgttttacaacgtcgtgactgggaaaaccctggcgttacccaacttaatcgccttgcagcacatccccctttcgccagctggcgtaatagcgaagaggcccgcaccgatcgcccttcccaacagttgcgcagcctgaatggcgaatggaaattgtaagcgttaatattttgttaaaattcgcgttaaatttttgttaaatcagctcattttttaaccaataggccgaaatcggcaaaat

SEQ ID NO: 47723 - DNA, 443 bp, Homo sapiens
taaagggaacaaaagctgggtaccgggccccccctcgagagtacttctagaattaattaaggcgggcggctgaggcgggaatggctgctgtactgcagcgcgtcgagcggctgtccaatcgagtcgagcgtgtgttgggctgtaacccgggtcccatgaccctccaaggcaccaacacctacctagtggggaccggccccaggtaaacgtccctctccaacctccccaacgttcgcagccggccccggagcccgggctttgactgatcgcggctgcgcgggcagtggagagcgccgcgtcctgtccctagctgggcagccccgcgcctagcatccccgtcaggactgcacgcagacactcggatctcgaagctagctaaaatacgaccaccccaggtgatagctctctaatttagggagaaatggaaaaaaaaaaaaaaaaaa

SEQ ID NO: 47724 - DNA, 620 bp, Homo sapiens
agcgcgcaattatccctcactaaagggaacaaaagctgggtaccgggccccccctcgagagtacttctagaattaattaaggcgggggttggaggatggcctgggcctgggagactgaggccgtggtgagctgaggtcacaccactttgctccagcctgggtgacagagtgaggccatgtctcaaaataataggagactatgatgaacaattttaggccagtaaatgtagcaatttcaatgcaatggataaactcttggaagaatataacttgtcaaaagcaatggaaatctgcatggtcctctttctgttcaggaaattgaattaattaccagagaacctacctaccaaaaaaaaaaaaaaaaaaaaaaaaaagcggccgccaccgcggtggagctccaattcgccctatagtgagtcgtattacgcgcgctcactggccgtcgttttacaacgtcgtgactgggaaaaccctggcgttacccaacttaatcgccttgcagcacatccccctttcgccagctggcgtaatagcgaagaggcccgcaccgatcgcccttcccaacagttgcgcagcctgaatggcgaatggaaattgtaagcgttaatattttgttaaaa

SEQ ID NO: 47725 - DNA, 522 bp, Homo sapiens
tgattacgccaagcgcgcaattaaccctcactaaagggaacaaaagctgggtaccgggccccccctcgagagtacttctagaattaattaaggcggggtatttcagtattataattttataaccacatatcaagtagatgctataatttcatgccttacatgtacctaatttaatcatttatattattaaggcctatatttgtctctaatattagtatattctaagagtatgctttatgaattttaatcataaaaaatacattatatatggcaaagaggagaaaaataaggttccttccatctggggcagggtttcaacctcagcattatttacactttgggcttgataattctgtgttgtggggggagttctatgcattgtaggatgtttggcagcatctctggcttttactcactagataccagcactctcttgctagttgtagcgatgaaaaataactacagacattgcgaaacccacccgcttcctgcaccagaaaccaaaaaaaaaaaaaaaaaaat

SEQ ID NO: 47726 - DNA, 516 bp, Homo sapiens
ttaaccctcactaaagggaacaaaagctgggtaccgggccccccctcgagagtacttctagaattaattaaggcgggtgtcactccttgccaaagctttagaaagccttcctcttcaatgatccctagagctgtgcgcaccattcccctatagggggcagattctcttgcaccgtctcccaaccgagcaagagctgcttctccttgcatttggagtcgagtttttgtgagatccaggggaaaggttgctaacaaaaacacaaatgcagggaaaaacccacaacattcagagaaacaaacaaaaatctaaaatcataggagtaatattttcccaagactggttgttctcaaattttagaatatatcagaatcagctagggagattttaaaaattagaaatttcctagccccgtgcccatggattctaattcagtaggttgaagagggtttaaaaactttgattctcacacagtcccaaatttaagaatcactacgcaagagcatcctggatcactag

SEQ ID NO: 47727 - DNA, 445 bp, Homo sapiens
ctaaagggaacaaaagctgggtaccgggccccccctcgagagtacttctagaattaattaaggcgggctgtgccacccaacatagaaaaatgattatataccatagacctactgggactcaccctaagaacaccagggtggttcaacatcattgcaatacaccttattaccttacccttcagatatggcatgggaataaagaatgggtcctcccaactgggagcatgatttccacgctccatatgttctacatggaaaatatgtcaagagagcatgatcaatgacttcacctgagaacatcccagcgggaggacaagagaaatcatgtttattcctcaggaatactgaagtgccctggagtaagctgccattcttctgtaacaatgttatcagtaatgctgtaaactccagcacctggttatgcatttgaaaccaagtctgtttc

SEQ ID NO: 47728 - DNA, 585 bp, Homo sapiens
gcgcaattaaccctcactaaagggaacaaaagctgggtaccgggccccccctcgagagtacttctagaattaattaaggcggggtagagacggggtttcaccattttggccaggatggtctcaatcccctgacctcgtgatccacctgcctcggcctcccaaagtgttgggattacaggcatgagccactgtgcttggcctgttattttattttcttataactacaacttttcttcttgaattttcaggtcagaggcaagaaaaactctttacaggtttttagtggggggcttatggagtatttcaggagttctttgcaattaaatcatcttttcacttgtattgtttttcaaaactttgttgatttataaaatgtgccaactgtgagtaaactatggtatttgcaagtggtttttacataatatttgagatgaggaagtgagattgtgcatgacatacttctcctttgtattctctcagtgccttacagcaggttactccattctgctatgacaacttgtttcaaatgttaatttacataggattttttataagccattaaggcatatgtataatatatcagta

SEQ ID NO: 47729 - DNA, 536 bp, Homo sapiens
cgcaattaacccctcactaaagggaacaaaagctgggtaccgggccccccctcgagagtacttctagaattaattaagtctattataaatcacaaataacaaagccctttaactttatatatatataatgttgttggtttctgtcctatattaagaataaagcaaagcaatgtaaatattttaaaagtcattttgtagaagataaaactgaaagctaatgttgactgaaagttctctgccgtgtacttaaaacccagtaataactgaaatgtcaggaaattgaaatattaatattttaccctcacaaaatattaactccttatgttcaatactttttttttgatgtttaactttggtatttcaaggaagaatgaatgtactaaaaaacacacacacacacgtctttccttttgcaatgggtgaaaatttctagcaatcttgttccaaggtaatttattgtattttttaatggatgctttaatataaggataaataataccaaaggcattgttttaaaaatattttatattttatga

SEQ ID NO: 47730 - DNA, 439 bp, Homo sapiens
taaccctcactaaagggaacaaaagctgggtaccgggccccccctcgagagtacttctagaattaattaaggcgggagagaagaggaacataattgaacttcgctgttaaaaaaatgcgagcatatattgcaactaataatttgtctgagacaggtggatgtatataatgagaagtttatggtggataatcaggaaagcaataatccacctatttcataccctaagaaaaatgaaataaccctataaaataaattgggggccgacccggggggagccttagttcacccttttaagagtttttttaagcgccttcggtgccgagattttttataggtgtgccaaaacagaaagactgttctgacatctcagtgtcattttgataggagcgttttgttatttttacaaggcagaatggggtgtaacagttgaattaaactt

SEQ ID NO: 47731 - DNA, 653 bp, Homo sapiens
aattaaccctcactaaagggaacaaaagctgggtaccgggccccccctcgagagtacttctagaattaattaaggcgggagagtgatatacatatcattataaaatagtgggttctcagccttctgagatttttgacaattcaataatgatcttgaagatctctaaaatgtaatcacaggttattctgcagagacactaattcaaaatatatgtattaaacttaactattggtgacggagcatctttgttattctctcctcacactcccatatgcatttaacagagaaataatactgtacacaaaagtggtatttaggacctcaaacttttcctcattaacacaagatctaatgacataatttagtgtcaaaataaaaatactgggggagggatgtataagtgaaataaacatccagttagaaaccacaagcataaagtttaataagaaaatgtaagtgaaatagactgggaaaagagcattccagttacagctatgattccgcttccaggctatttacatttataacatactcatcaataactctctctttacagtgatttacaaaaagctaagaggtggctatttcccaatggaaatgcattagaatctcaaaagaactctgtgctttcctactacaaaatcactgagttc

SEQ ID NO: 47732 - DNA, 504 bp, Homo sapiens
caattatccctcactaaagggaacaaaagctgggtaccgggccccccctcgagagtacttctagaattaattaaggcaggcagatcacaaggtcaggagttcagcctaaccaacatggtgaaaccgtgtctctactaaaaatacaaaaattagccaggcgtggtggtgcacacctgtaatcccagcactttgggaggccgaggcagacgggtcacttgaggccaggagttcgagaccagcctgggcaatatggcgagactccgtctctactacaaatccaaaaaaaaaaaaaaaaaaaaaaaaaaaaggcggccgccaccgcggtggagctccaattcgccctatagtgagtcgtattacgcgcgctcactggccgtcgttttacaacgtcgtgactgggaaaaccctggcgttacccaacttaatcgccttgcagcacatccccctttcaccagctggcgtaatagcaaaaaggcccgcaccgatcgcccttcccaacagttg

SEQ ID NO: 47733 - DNA, 401 bp, Homo sapiens
gccgtcgttttacaccccggaaataaggtgacacatgctgggtgccgggccccccctcgagagtacttctagaattaattaaggcgggggtctcaggcaccatcacatgcatacatacccaatggatgtgtcacccgctcacccatacataacattccttacagaacaatctgtgagtagacgctttctccagcaaactttctattttagaataactaaagagtagggttcatgtctaaaattttcccttggggtgggagtaggtgagtacagaaacaagtaaatacaactctgcattgccatgtgggggtgaaagctgggatacattgtaaagatcattttcgtaagcctgtacctttcttttgctatcaatgacgtgttcccatattcattctcagtgt

SEQ ID NO: 47734 - DNA, 514 bp, Homo sapiens
gcgcgcaattaaccctcactaaagggaacaaaagctgggtaccgggccccccctcgagagtacttctagaattaattaaggcgggatatgaattaacttacccaagatcgtgttgcttgtaagtatcagaattagtgttcaaacctaggcaatgtggctcagagtcaatgctcttaacaatcacactataagaacagatataataaatatctacttacctggaggatataaattctatttttattccgagttctgaatcaaaatggtaattcaaaggcaatgagaacattaacctcatcaccatcatttaggctcaaaagaaaatggtacatattctattgcaaccagtcaggattaattctcaaatgtttgaaacttgaagagggaggacaatgcaaaggaaaccgtacttagtagcagaatagttattactataagcagacttcaaagtatgttggacaaaccatcacttatgctgaaagtgacaataaaagacttgggaaaaaaaaaaaaa

SEQ ID NO: 47735 - DNA, 517 bp, Homo sapiens
tacgccaagcgcgcaattaaccctcactaaagggaacaaaagctgggtaccgggccccccctcgagagtacttctagaattaattaaggcgggagcgagctgagataactccactgcattctaacccggtgatagtgtgagactccatctgagaaaaatagaaatgaaaagaaaagaaaagttatccagttatggcggcatgcatttgtgatcccatctactctagaggctgagacaggaggactgcttgagcctaacaagtcaaggttgcagtaagccatgatcatgctactgcattccagcttaaacaactgagatgctatctcttaaaaacagaagtagaagcaaacaactataggggaaaatgagggatacatactttaagaatttttaaaaatttacatggaaaaacaccaggattctatagaaaataaaacagtattaaataactatttataaaatagatactagcaaattaccttacgtaaagattcaagtcagtaacttaaaggatctt

SEQ ID NO: 47736 - DNA, 412 bp, Homo sapiens
  misc_feature 308: n = A,T,C or G
agagtacttatagaattaattaaggcgggaggatgacttgaggccaggagttcgagaccagcccaggcatgtttacagttttgatgaaaaaggtaatatcaatttatactaccatcagcaacgtattaatacactgcatactcacaagcactaggtattataatatttaaatatgtttgctaatttagcagcacaaaatttttccctttattgatttgtacttttcttctctcttttttttttttttttaaaaggggttttttttttttcccaaggtttttgaattccaggggaaaactttttttaanaaaaaaaaaaaaaaaaaaaaaccacgcccccccccccggggggggaccccaaacccccttaaaggggggttttttaccccccccttggggggcttttttaaaaa

SEQ ID NO: 47737 - DNA, 311 bp, Homo sapiens
ggaacaaaagctgggtaccgggccccccctcgagagtacttctagaattaattaaggcgggtgatggttgctatgatggtggggatgatgaggctattgttttttgtgaattcttcgataatggcccatttgggcaaaaagccggttagcgggggcagggggaaggggcccttggccacaggtggaattaagaaatctggcaaaaagtaagctgttccttgtgcctgaggagatggtgaccctttatttcatctgtatttaaacctctctattccctgccataacatcttttgccacgtatagctggaatt

SEQ ID NO: 47738 - DNA, 487 bp, Homo sapiens
accctcactaaagggaacaaaagctgggtaccgggccccccctcgagagtacttctagaattaattaaggcggggacctcttgattcatagatttaaaatattctggcataaagggccttgtcccagatctcaagtgttagggaagcacttggtcattttcttccctttctggcatattagagaaaatgatgtgtacataaaatttcctcataattttcagcttcacaatttatactacggtaatgagcgccggtagcccagacaagtacatgactaggatcagaaacccgagtagaaagtaagtcagcagaagagcgagttcgcccgtgctgtgaaagatgattttttaaaaaatgaaattcttgaagagctgcaccttaaaaaataagacaaagtgaaagtattgtattatgttacaaacaatgcaggctccttcctcatttaactttacaaccttgcgaagtgggtccaggagatttggagttt

SEQ ID NO: 47739 - DNA, 570 bp, Homo sapiens
agcgcgcaattaaccctcactaaagggaacaaaagctgggtaccgggccccccctcgagagtacttctagaattaattaaggcgggtaggcaggaaagacaagctgataaaaaggagaaagagaataaggaaagagattataagtcccattactgatagaccagtctcgtttcttcccattaggggatctgctttacatggtaactagtatctaactgtatttgatcatataatttatggaaactaaatatagtcagattctctcaatggaagctaggtaatactactattactaacaacaaaaaccctaaacttgtaccgagtactcattttcaggaattgttccaagtgctttgtttacattaactgatttaatccttatacaagtcccaggagataggttgcaatattttcctgtttttacagatgaggaaccaaggcttagggaagttaagaaacttgtataagtccgaggtctggagattgagaccatcctggctaacacagtgaaaccccatctctactaaaaaaaaaaaaaaaaaaaaaaaaaaaaaaagcggccgccaccgc

SEQ ID NO: 47740 - DNA, 445 bp, Homo sapiens
  misc_feature 336: n = A,T,C or G
ctcactaaagggaacaaaagctgggtaccgggccccccctcgagagtacttctagaattaattaatgcgggaggggccttcgtgtgaaaatcccttgtggggtttggtgtttcactttttaaaggcatacaacttaggattcataactacatatatacggatagaagtgcatgaacagaaaatctgcccttctggaataccaaatgcaaaaattaagggacttcaggcaaatttggaaaaaaaaattaaaagatgcattatagtttttaaaatcattgttaaaatataatgagtctgtactttgcttaaacaataaaaaagtcttcgatttactcnagaggatttgaaataaaaaaaaaaaagcggccgccaccgcggtggagctccaattcgccctatagtgagtcgtattacgcgcgctcactggccgtcgttttacaacgtc

SEQ ID NO: 47741 - DNA, 484 bp, Homo sapiens
gccgacgcgttagacgtgttttgcgacccggctccggcaacaaaagctgggtaccggaccccctctcgagagtacttctagaattaattaaggcgggaaagacaaattttattcttcataaagtgatgagcatataataattccaggcacatggcaatagaggccctctaaataaggaataaataacctcttagacagcgccggcgcaggcgcagggaggcccacagcgccggagcaggtgcagaaagtcagaaggtccatgaggggaaggtgagacacctggggtaaagaaaaaaaaatgcgccacgaagcggtgtctgggtcatccacagaccaaagttttttgccatcagcccttgcgctgggccccagggaccctggcatccgtggttcgcgcccagggtgcgccttgggagactaggggtaccccaactccgacagaacccctatgagtggaagttgaagtttgtgggaggagaggtga

SEQ ID NO: 47742 - DNA, 468 bp, Homo sapiens
  misc_feature 446: n = A,T,C or G
attaaccctcactaaagggaacaaaagctgggtaccgggccccccctcgagagtacttctagaattaattaaggcgggacagtttgtgtagggctcttgtaagttaaggtaagggcttcagactttactatcgagtcctatagaagtctatatacagattcatttgattgttccatacaccgtcttgcctgtaaatattaatttggatgttgatttttatttaatataaaaacagaaaaggggtcaggcgcggtggctcacacttgtagtcccaacactttgggaggccgaggcaggcggatcacttgacgccagcagtttgagaccagcctggccaacatggtgaaaccccatctctgctaaaaatacaaaaattaaccaggcatggtggtgcctgtaatcccagctactcgggaggctgaggcaggagaatcacttgaacctgngaggcggaggttgcagtgagcc

SEQ ID NO: 47743 - DNA, 463 bp, Homo sapiens
gcgcaattaaccctcactaaagggaacaaaagctgggtaccgggccccccctcgagagtacttctagaattaattaaaactaaaaattcagttcctcagtaatattactcacacttcaagtgctgcaatagccacatgtggctagtgggtacaataatggaccatgaaggtttccatcaccacagaaatattagtagacaagtctgttctagagcctagaaaagtatgtgacactataattattgaatgaagaaatataaaaactattagcattcatggttcaagaagaataacacgaaaacatcaagaagaatgagtatcttcaattttggatctttgtaaaagatccaaaagaatcacaacacaagattatcttattaacttttataaaggcagtaaatttagggctaggaaaatgccaattaagaaatatttctgtagccaagtgtggtgacacgtgcct

SEQ ID NO: 47744 - DNA, 436 bp, Homo sapiens
cgggccccccctcgagagtacttctagaattaattaaggcgggggtggagcgcagcttctatagtcttaattgtccccgaccacatacggctgatcggtccatatgcacagaacgctagattgtgcccgtctatacaaggatgcgtgatgcgtggacattggacctacactatggctacctgacgccctctgatggatgcattataacatactctcgtacgacgaatccgtgctccaagtccccacccgacccagaggtccagctggcttcacctctcaatatgatgcgttgagtacactttacatatgtggtattcttccctaaaacacataaccacagtctaatcatcaaaaaaaaaaaaaaaaaaaaaaaaaaaggggcccccccccgggggggcccccaattccccctatgagggggttattaccccccccc

SEQ ID NO: 47745 - DNA, 521 bp, Homo sapiens
gcgcgcaattaaccctcactaaagggaacaaaagctgggtaccgggccccccctcgagagtacttctagaattaattaaggcgggtgtcactccttgccaaagctttagaaagccttcctcttcaatgatccctagggctgtgcgcaccattcccctatagggggcagattctcttgcaccgtctcccaaccgagcaagagctgcttctccttgcatttggagtcgagtttttgtgagatccaggggaaaggttgctaacaaaaacacaaatgcagggaaaaacccacaacattcagagaaacaaacaaaaatctaaaatcataggagtaatattttcccaagactggttgttctcaaattttagaatatatcagaatcagctagggagattttaaaaattagaaatttcctagccctgtgcccatggattctaattcagtaggttgaagagggtttagaaacttgattctcacacagtcccaaatttaagaatcactacgcaagagcatcctggatcact

SEQ ID NO: 47746 - DNA, 640 bp, Homo sapiens
ttaaccctcactaaagggaacaaaagctgggtaccgggccccccctcgagagtacttctagaattaattaaggcgggacaagaggggtagaaggcaagaagttgagagaactgatttctcaaaaatattaaaataactgacctaaagatccctagataatagacagggagtgaaatctgaaggaagctcataaactcaatagggtagggacaagatattgggggctttaaagagtggatttggtggaaaccaggaagagaggtagaagggtcaataaggtggaagaactggaaattatggtcagagtattattttagagttgaagtacatttccaggagagtcttcttgggtaggagacctaggtacggccaggaagagtagactgctgcagcaataagaaggcaggacctttttgaagaaattaatacaattgtgagaccacaattaacagcaagaattagctacaaatgtttttaacataagaacacttgtttcggtaaataatatcaagagcaaagaagagagtttttgaagaaaggttgatgaaacaagggtatagaaacaagaagttaagagtattaaacttcctgtactccctaccataaaaaataaggaggcatgtgaaaacaagtatttaac

SEQ ID NO: 47747 - DNA, 433 bp, Homo sapiens
  misc_feature 250, 251: n = A,T,C or G
ctcactaaagggaacaaaagctgggtaccgggccccccctcgagagtacttctagaattaattaaggcggggtgaaataagttggctaagtttgagacaaacttgattcatgtcctaattaatgtcctataaggaagtaaaacataacctttgggatgttcttttcttctggaaagatgtaatttgaatctgccatggacaaaagcatacaatttagcatgcaatttctatagttaagctctaaccaatnnaaaaaaaaaaaaaaaaaaaaaaaaaaaaagcggccgccaccgcggtggagctccaattcgccctatagtgagtcgtattacgcgcgctcactggccgtcgttttacaacgtcttgactgggaaaaccctggcgttacccaacttaatcgccttgcagcacatccccctttcgccagctggcg

SEQ ID NO: 47748 - DNA, 506 bp, Homo sapiens
cgcaatataaccctcactaaagggaacaaaagctgggtaccgggccccccctcgagagtacttctagaattaattaagggggactggtcacatagctacatgagaagcatggtgtggatgccagaccaggcaccagatgcacatcatgaatcttcatgtttaccttagacactgataagctggttcatcttgacccaccactttgggcctttataataagactatcattaagcagtaactatgtgaccattccaggagtttagttttcaggacttggccaaagatccttgtcctggctacagggatacgcaagaactgagtaaaataagcctattgcattgtttcctgcccatacctcaaactaatattcactggatagaatcagcagcagactacacagtgtttatgaatgaaaaatgttatgctgtataaaaaaaagcggccgccaccgcggtggagctccaattcgccctatagtgagtcgtattacgcgcgctcactggccg

SEQ ID NO: 47749 - DNA, 524 bp, Homo sapiens
gcgcgcaattaaccctcactaaagggaacaaaagctgggtaccgggccccccctcgagagtacttctagaattaattaaggcgggagacttcatcttttacatagcatttctcatacaagccacattttattgacaagttaaaaatggttttgcacagtatcctctttgattttagatgaacagacattctcgttctctaaaatagtggttctcaatgagggtgttttatcccacagaacacattagccaatgtctagagacatttttggttgccacactgcacatggatgttggggtgccaatagtatgtagcagatagagaccaaggaagctgctaaatatgctacagggaaagcacctccaccctcaacgaagtgcaaaatattaatagtgtccagacagagaaattctggtctagaagttaaagggctgtaatgttggagcaattatttgataatatgttagctccgatatggaaatgtctaaccctgtggatttagtatcattataattaatgatgtga

SEQ ID NO: 47750 - DNA, 536 bp, Homo sapiens
cgcgcaattaaccctcactaaagggaacaaaagctgggtaccgggccccccctcgagagtacttctagaattaattaaggcgggaaacaggatgaccaaactggcttgtgcccattgatgccaacttaagaacacagctagtcttctgattatttaagagatcatagaatatgtgaaaatgcccgttttttagtatatatatcatgacttttaaaaaatcaactttattgtggtagaacttacatgcagtaatacagtgcatacattttatgtgtacggttttgacaaatgtatactcccaaccacccaactgtttttttttctctaagagacagggtttcacagtgttgccaggctggagtgcagtggcgtgatcatggctcactgcagcctcgacatcctgggctcaagctggaggccagctaattttttaaattttttgtagagacagggtctcactctattgcccaccccaatttttaaattaaacttcaaaaaaatctctgggccaagactgcatcctctgtttgagaatg

SEQ ID NO: 47751 - DNA, 505 bp, Homo sapiens
gcgcgcaattaaccctcactaaagggaacaaaagctgggtaccgggccccccctcgagagtacttctagaattaattaaggcggggagctaagaattcctgcccagcaagttggtttgcagatcagaggcagtgtgtgagaagtacttaacccagcacctggcatatagtagatgttcaggacatcgtagcaggaataagggagacatctcacaaaacattttgtgagaaaggatcagtttctatctagtcaatgtcttaaacattcataggttgttcatggtgggagctgctcgaggaatcatcctagttttatggaggaggaatctgaagctggaggaaatgtctccttcaagattacttagttaaaggcaaacaggttcatagccagtggctcttcaccaacccacaaaaaggcctcagattataattttgaagattaagtatatgaaagtgctatttgagtgattaagtgtaagcatcagatcattttgaactggtgagat

SEQ ID NO: 47752 - DNA, 378 bp, Homo sapiens
gccaagcgcgcaattaaccctcactaaagggaacaaaagctgggtaccgggccccccctcgagagtacttctagaattaattaaggcggcatatttttgagtttgaggtaatcagttaaaataagtctttcatattttaatccatgtgatcaatttatttagatcccaaatgcgtttcacatctcaaagtaaatactaaaaagcaaggggtgtggtagtggagggggtgtaagggagatcattatgagtactaactcttaagtttagattttttttaaaaaaagaaaaaccaaaaagctgtgcacatcttaggtccatcacatccacgagtcagaattacatcatagccgacttggtagagcagtgtttgtggaacac

SEQ ID NO: 47753 - DNA, 326 bp, Homo sapiens
cctcactaaagggaacaaaagctgggtaccgggccccccctcgagagtacttctagaattaattaaggtgggggcgggcctctgtgtgagcgggagtggttctgggctcatgttacattttccactggaaaaacagccccattttgaatgttggctctgagcgttttaaaaattgcaaatatatccagtttcccaaacgagtgctcaccaggaaagaaaaaaaaaaacacctcacaaagataaagaacaaaaatataaaaacacaccactggtaaaaaaaaaaaaaaaaaaaaaaaaggcggccgccaccgcgggggacccccaat

SEQ ID NO: 47754 - DNA, 453 bp, Homo sapiens
aagctgggtaccgggccccccctcgagagtacttctagaattaattaaggcgggaggctactcaaactatagttacagactaaatcagcaacagcatcacttgcaagtttgcttgaaacagaaattcttgggccccaccccaatctaactgaatttgagacttgggaagggtgtggagagacaggaaactatgttttaatgagctcaccaggcaatttttctgctttggactataagagatcatgtaattgatttctaaaagttccttctggttatagggtctgtgactacagctctgcaaaaatctgagcaaagaacctcataatcaacagatgaaaactggtaattcaagtccttaaagagatatttaaccatttaacctaaacaggatatttaaacattctagcacaccctaatgaaattatggattaacaaatcttttcagcctggaag

SEQ ID NO: 47755 - DNA, 561 bp, Homo sapiens
  misc_feature 383, 481: n = A,T,C or G
ccctcactaaagggaacaaaagctgggtaccgggccccccctcgagagtacttctagaattaattaaggcgggggaaagaaaaacagaacaaaaagaaaattacaaacaaaatggaagacttaagccctaacatatcaataactacatttaataaagtgaactaaatacagcactttaacgatggggaatggcaaagtgaattaaaaagcatgacctaattgtgtgctatctatgacgcatgatttcaaatgtagcaatataggtatgttgaaagtaaaggatggaaaaatatatcttgtaaatgttaatcgaaagaagcaagagttgacatattaatgtcagatacagtaggaaaatctccaatgaattagaagcaaactanaaaaaaaaaaaaaaaaaaaaaaaaaaaaagcggccgccaccgcggtggagctccaattcgccctatagtgagtcgtattacgcgcgctcactggccgncgttttacaacgtcgtgactgggaaaaccctggcgttacccaacttaatcgccttgcagcacatccccctttcgccagct

SEQ ID NO: 47756 - DNA, 494 bp, Homo sapiens
gcgcgcaattaaccctcactaaagggaacaaaagctgggtaccgggccccccctcgagagtacttctagaattaattaaggcggggatcagggcttagagtctgggaacccggtttggctttttgccttcagcaaccacccagcacctgcaggtgacagcagcactgagttaagagttttcactgaagacgagagtgatgcgggtgtccactctgcccttggcactgtgagagcatgaggctgtttatggcactccctctgcccccagggagctagtttccttggagagacactgggaacagaaaaaaaacaaaaatggacgaaaaaaaaaagcggccgccaccgcggtggagctccaattcgccctatagtgagtcgtattacgcgcgctcactggccgtcgttttacaacgtcgtgactgggaaaaccctggcgttacccaacttaatcgccttgcagcacatccccctttcgccagctggcgtaatagcga

SEQ ID NO: 47757 - DNA, 504 bp, Homo sapiens
gcgcgcaattaaccctcactaaagggaacaaaagctgggtaccgggccccccctcgagagtacttctagaattaattaaggcgggtgcctgtgatcccagctacttccggaggctgaggcaggagaatcgcttgggcccgggaggcggaggttgcagtgagcagagatcacaccattgtactccagcctgcacaacaagagtgaaactctgtttaaaaaaaaaaaaaatcaagtctgtaattgttactgttgctgaatcctgctagcaaatcaccaggctagaggtgagggttgagtgacccctttagaacactttcagagggggcttgtcagcaggtggagctggctgtaggagcagggttggaaatacgtaagtagatttagagaaagaaaagctggtgaactggaatccctaggataactagactcggacatcctgtgtgataggggaggggagcatttggctttctcctgttggtcctaaattaaagggagtggggagcg

SEQ ID NO: 47758 - DNA, 599 bp, Homo sapiens
ctggccgtcgttttacacccacggaataagcgtgtacccatgatgggtgcgcgggccctccctcgagagtacttgtagaattaattaaggcggggggactgcaaaggccaatgttggtgctggcaaaaagaagtgagctggagattggatcacagccgaaggagtaaaggtgctgcaatgatgttagctgtggccactgtggatttttcgcaagaacattaataaactaaaatcttcagaccagccaaaagtggaggaaaaaaaatctgggggcccccccccgggggggatcctcgtccccccctaaaaggctgggattgaccgccccttttgggcgggattttaaacgtactcaaattgcaccaggctctcaaactgtcctagggattgggccaggaccagcagacctaattgacaaagtcactggtcacctaaaactttactaggtggactttgatatgacaacaacccctccatcacaagtgtttgaagcctgtcagattctaacaacaaaagctgaatttcttcacccaacttaaatgttcttgagatgaaaataaaacctatttccatgttctaaaaaaaaaaaaaaagagggg

SEQ ID NO: 47759 - DNA, 449 bp, Homo sapiens
aaagggaacaaaagctgggtaccgggccccccctcgagagtacttctagaattaattaaggcgggggttattaaagaggaaatttgagccagctgattacaaacacataatcaaagcttctgagcagtcacaaaatgagataaaggtttcagtgttttcacgaaaaactgatatactaattcctgtgagtaaatgagatcttcaagaaagagaatgtaaaaattgaagaacttaggacatgttgttcaatcttagggaatagacaaaaaaaaaaaaaaaaaaaaaaaaaaaaaaggcggccgccaccgcggtggagctccaattcgccctatagtgagtcgtattacgcgcgctcactggccgtcgttttacaacgtcgtgactgggaaaaccctggcgttacccaacttaatcgccttgcagcacatccccctttcgccagctggcgt

SEQ ID NO: 47760 - DNA, 461 bp, Homo sapiens
ggaacaaaagctgggtaccgggccccccctcgagagtacttctagaattaattaaggcgggagggaactaggcaaaccctggattgacttgtgtgaagtcaggtagtgaagatgaccaatatgtaataaactggtgactctgggccacgtgccatgcaatggcacatcctcatcatcacagctgatcttgggcaccactacttggtagaaatctccagaaatctggaatcctggacctggattctcttagtatgctgtaggggctattatatgtagcctgtcctcaccatcatcctgaaggggtagaacaagaaatcaacagaatttacttggaattttggttccaaatggctgttaattaaagcggggtgtgtgtgtgcatggaagatgcctgggctgtctttgctatatgtaaatagagccattggatctttatttttgattaatttgttctgattttt

SEQ ID NO: 47761 - DNA, 497 bp, Homo sapiens
aaagggaacaaaagctgggtaccgggccccccctcgagagtacttctagaattaattaaggcgggggacgaaaaaaaaaggagagattcagtcataatgtgatagaattcacaaaactttattgactaagtgcagtgaagtcagaaaaaaattctatcaagtctaagtattatccttaagtatgccttccctagttacacatacaaacatgccaacagggaaaacagagaaagtatataacatgattctctctaatatatttaaagtgtaacattaacatacataatccagagaagccagccatttctgatcaccacactcgaaataagcagaggattttttttagttgaaaaaatacttaatagtccatcaaaaaaaagaacaaggtttttctgaagtgatacactattcactcacatgaaacagacacatgcaacaagatggcagttaaaatttatttaatatataattgcattccagttttcttaaaacaaaaa

SEQ ID NO: 47762 - DNA, 490 bp, Homo sapiens
ctaaagggaacaaaagctgggtaccgggccccccctcgagagtacttctagaattaattaagggggagggggaagaaaaaagaaacctattggtattttattagaattactttagaactatgaatctatcgtgggtggtgattggctatctaggcaatgttgttttcttattgagaaacagcccaagttggctttttccctgaatcttccttcacgtaccctacacttttgttgctaggattatcttagttaatatttttgttattgcaagggtgcaagtatagtattttattctaattttatgatagctttttgatctcataaagaaaaaacattgatttttaaagtacacttatgtattcctatatgtatacttgtcactattcagcattataattattataaaaacagtaatgtttctattaagcttaagcaccaaactggcaaaaatactattaataaaaataattaatttgaggccgaaaaaaaa

SEQ ID NO: 47763 - DNA, 413 bp, Homo sapiens
  misc_feature 64: n = A,T,C or G
aagggaacaaaagctgggtaccgggccctccctcgagagtacttctagaattaattaaggcggngaggaatgtgggtccaggcccagaggaaaaggttgaagttatagccaggcctgtgggcgaggccgcagcagggcggccataggggaaggagccaatgtgttatgcatgtagaaaataggtaactacgtcttttgctctgttactattcaacatttgatgtaaaaaacattttctatgcagctaaaagaattgtttttaaaaataatttctaggttttctgccttgctttaaaacatcttttctttttttttgagacaaaatctcactctgtcaccaaggctggagttcagtggagccatctcagctcactgcaacctccaccgttcaggttcaagcgatttctcctgcc

SEQ ID NO: 47764 - DNA, 525 bp, Homo sapiens
ttaaccctcactaaagggaacaaaagctgggtaccgggccccccctcgagagtacttctagaattaattaaggcgggtgtgtgtgtgtgtgtttgtgtgggtgtgttgagagagacattttaaccctctcataacaagagtataaatacaaactggcctgtgttggccataaggtagctgaccttctgctgttccttttatatggcccagttacaagaaatcaaagagtatgcagatactctgttttccagggactaaatctataatctttatcatagtctaagactcttgacccttttcttttaggatagccattatacaaaagcaaagccaaatgtagccacaagatgaatagggtaatgtgctgtaactatgaagatagccaggagtaagaagtcagttcactacgtttgttcacttgtccccacctcaccattcttttctaaaattggcttggtctattaatgaaagcactaggaagggagaagaaaaaaagaagtgggactttctttttattttttccat

SEQ ID NO: 47765 - DNA, 595 bp, Homo sapiens
agcgcgcaattaaccctcactaaagggaacaaaagctgggtaccgggccccccctcgagagtacttctagaattaattaaggcggggggtttctcataaaatattttttacaggggttcaacagaaatatttggtggttacctgcaactatgaagctaggaaacttggagttaagaaacttatgaatgtcagagatgcaaaagaaaagtgtccacagttggtattagttaatggagaagacatgacccgctacagagaaatgtcttataaggttacaggtacaaatgataagcaatgtacttttagcattaatttttatgtaggatgcctgttcattacatgaattttttaataaatgtaaaataacataagtcaagatgctttttcctaataacttcttattttgggtcttgtcaactttaaaaattatgtgaaaggataactgtatgctatgaatagtatttttaagaagatgtatagttggaagtaattttaactcttattattgatgtttatataacagggaaaagtggaaaacaaagtttaaaagtgagaaaatgggaaactgtactgtaaaagatgccaggtctttaaa

SEQ ID NO: 47766 - DNA, 607 bp, Homo sapiens
actggccgtcgttttacaccccggaacaagagataaccatgatgctggccgcgcccctcctcgagagaactaataaaataaattaaggcggggtgatctttggatgacaggaaaaaggtgtgaacttacactgcgcggtttccattccatctccctctgagaatactgattccaaatgaactgagcactatcgtattggaggtgtgtatcataaaaggcaaactatcaaatgacaactaaacctccaatgggtcatgtggttaccattctcagacgtactcaactggaccataactgcctatatggaccatgatgcttgttttcatctgtcggcccaaaaggtttggggtgggtcaagaatcccatacccctaccagattttaaaagaaacacgtatcactcacaggaaaaatcccccccggaaatatataaggtcaaagctgcttttgtggccaaattcatcttttagagaacctgaaaggtaagtttggtattaggaacatctcttactcccaaggagtttacctacttcttaagttacagaaacaaatattcatttatagaaaaccgaggaaagacttctcaattcgccactcaataaacacag

SEQ ID NO: 47767 - DNA, 416 bp, Homo sapiens
  misc_feature 312, 313, 314, 315, 316: n = A,T,C or G
gccgtcgttttacacccgggaacaagcgtgtaaccatgatgggggccgggccccccctcgagagaactagtagaattaattaaggcgggagctgtcggggcggggcggcaccgccgagctccgagctttccagaagcaaaaacaaaaaaagttcgggtacagcggctcacacctgtaatcccagctcttagggagatggaaactggaggatcacttgaggccaggagttcaagaccagcctgggcaacatagcaagacccagtctcttaaaagaaaattaaaaagaaagagtaaataaagttccagaagccnnnnnaaaaaaaaaaaaaaaaaaaaaagggggccccccccgggggggaaccccaattccccccaagggggggttattaacccccccccctgggggggttttttaa

SEQ ID NO: 47768 - DNA, 495 bp, Homo sapiens
ccctcactaaagggaacaaaagctgggtaccgggccccccctcgagagtacttctagaattaattaaggcgggctgagagggcccctgttaggggtcatgggctgggttttactatatgataggcatgtgattggtgggtcatgccttacaattcaggtgggacagatacaaatgaaatagtttcttaatgaggtagaaagaggaagttattaattcctgttcttgttggattctaacatacaagctaatttgaattcatcagcctaagcaaggttgccttggattttgaagttttcttaaggaataaactgtagagaaaccatagggccaaccagatggatgatgaaatggaaaaaacagcaattaaatacttttagaaagtattacaaattaataccttaaaaaccctgtatcttgagctagtagcaaaactaactggaattcctgacctctgcagggccttcttgcaacattttagaaaaaacatctgggaa

SEQ ID NO: 47769 - DNA, 549 bp, Homo sapiens
tgatacgccaagcgcgcaattaaccctcactaaagggaacaaaagctgggtaccgggccccccctcgagagtacttctagaattaattaaggcgggttacatgagtcaaataaatcttattgggggacagaattcagcttgtggacttaacaatttccagtctttattctagagcccccgccttaggcattgattacagaggaatgcttttgaatttctaactctagaaattattagaaatctaaaagatctccagatggataaaatgatgccctgtacttttatcagaaagcaagggaaagtacccaatgatctccttttttgattacttttaactaaaaaaaaaaaaaaaaaaaaaaaaaaaggcggccgccaccgcggtggagctccaattcgccctatagtgagtcgtattacgcgcgctcactggccgtcgttttacaacgtcgtgactgggaaaaccctggcgttacccaacttaatcgccttgcagcacatccccctttcgccagctggcgtaatagcgaaaaggcccgcaccgatcgccct

SEQ ID NO: 47770 - DNA, 467 bp, Homo sapiens
taaagggaacaaaagctgggtaccgggccccccctcgagagtacttctagaattaattaaaattttaaaaaaaataattataaataaaaaacactggctctattggaactgagcctggctaatgacattgtcttttcccactcacccaaactaggcatttaaaaatcaaacttgactcccccactctgactctatgccaattctatcagtcgctgagtcactgtttgaccctactccaagctttccaatcttctcaggaaccatgctgatatcaagactgtgtcctgtggaatatctaatatatgtgacacccggaggagtcattttttaacacctcccttctctatacaacaaaattattctcaataatggccatgagtatgatgataattatgtctttataatacgtgtaattgacaatatcatacataattatggattatatatatacacaaataatgctcaga

SEQ ID NO: 47771 - DNA, 456 bp, Homo sapiens
aagctgggtaccgggccccccctcgagagtacttctagaattaattaaggcgggatagaaagtgatagaagtgggacctcacaaagacaatcacactaatgttaactgagaacatacccatttagtcctcacagcagccccttgaggtaggtgctgtcatcatccacattacacagccatttaaaatgagttaggggcctggcgtggtggctcatgcctataatcccagcacttcaggaggctgagactggagaactgcttgagccctgggagttcatgaccagcctggacaacagggagatctcttcctacaaaataaaaattaaaaaaaaataaaaagcggccgccaccgcggtggagctccaattcgccctatagtgagtcgtattacgcgcgctcactggccgtcgttttacaacgtcgtgactgggaaaaccctggcgttacccaacttaa

SEQ ID NO: 47772 - DNA, 632 bp, Homo sapiens
ctggccgtcgttttacaccccggaacaagcgtataaccatgatgacgggcgcgcgctttctagagagaaaaagaaaaaacctttatggcgggcgggcactttgctgcagcaaaaccatacatctgagcttcccttagcctccattatcccaacatgttgaataaaattattgggaggcaaagatttatagcgactatatggacagagaagccatccggaagccacaaaagctctgtctgagccaaagaaacattttcataaatggtaaggtgagaaacttaaaatgaaaactaaaaagactgatactttggaggtctgcaaatagctacagaatcagtttcaagatctccatctcaaagtgtcagtcacttcaaaaacgcatcctgctacgatggtggctcaggacacttgtgtgccagggcagtggccatgctgtgcaagtcagaggtcaccgcttccacattccgacatctgtctgtattttcttgccctgaaacaatagaaggggaactaggctcatttgctcccactttgtttaacctaattgttagacacaaaagataatttcccatacttagaattattttttccttttccccccattctcatttgtctccaaaaaaaaaaaaaaa

SEQ ID NO: 47773 - DNA, 492 bp, Homo sapiens
cgcgcaattaaccctcactaaagggaacaaaagctgggtaccgggccccccctcgagagtacttctagaattaattaaggcgggaagacgctgctgggggaataggcgggaaggtggagactggaagccagcgggtggagagaaggagatggaaggaaaagctgccgccacaggaacccgtgctgcgaggaatgggagagactgaggggaagaaaaaaaaaaaaaaaaaaaaaaaaaaaaaggcggccgccaccgcggtggagctccaattcgccctatagtgagtcgtattacgcgcgctcactggccgtcgttttacaacgtcgtgactgggaaaaccctggcgttacccaacttaatcgccttgcagcacatccccctttcgccagctggcgtaatagcgaagaggcccgcaccgatcgcccttcccaacagttgcgcagcctgaatggcgaatggaaattgtaagcgttaatattttgttaaaattcg

SEQ ID NO: 47774 - DNA, 471 bp, Homo sapiens
aaagggaatcaaaagctgggtaccgggccccccctcgagagtacttctagaattaattaaggcgggaggcagaggttgtagtgagccgagattgcgccacttcactccagcctgggcgaaagagcgaaactccgaataaataaataaataaataaacaaacaagcaaaccaaaaaaaaaaaaaaaaaaaaaaaaaaaaaaaaaaaaaaaaaaaaaaaaaaaaaaaaaaaaaaaaaaaaaaaaaaaaaaaaaaaaaaaaaaaaaaaaaaggaaaaaaaaaaaaaaaaaaaaaaaaaaaaaagggggccccccccggggggaaccccaattccccctaaaggggggtgtattaacgccccccatgggggggggtttaaaaaaggggggggggggaaaacccgggggtgacccaaataaaaacggttggaaaaaaacccctttttcccagtggggggaaaaaaaaaaaggcccc

SEQ ID NO: 47775 - DNA, 509 bp, Homo sapiens
gcgcgcaattaaccctcactaaagggaacaaaagctgggtaccgggccccccctcgagagtacttctagaattaattaaaaataaaatatctaacggagtattaagtaactattaacacccattaccctgttggactgaaaccattttgctaagtactaaccagtgtcacacaatctgaaaatccatgaggcgtcatccctcacctcccccgccttaattaaggcgggacaatgatcgggatataaaccaggcattcgaactggcagtggcaaccccctttgggtcccctcccgttgtatgggagctctgttttcactatattaaatcttgtaactgagaaaaaaaaaaaaaaaatataaataaaaagcggccgccaccgcggtggagctccaattcgccctatagtgagtcgtattacgcgcgctcactggccgtcgttttacaacgtcgtgactgggaaaaccctggcgttacccaacttaatcgccttgcagcacatccccctttc

SEQ ID NO: 47776 - DNA, 492 bp, Homo sapiens; identical to SEQ ID NO: 47541
  misc_feature 368: n = A,T,C or G

SEQ ID NO: 47777 - DNA, 462 bp, Homo sapiens
cgggccccccctcgagagtacttctagaattaattaaggcgggtggatcacctgaggtcaagaatttgagaccagcctggctaacatggcaaaaccccgtctttactaaaaatacaaaaaaaattagccgggcttagtggcaggcgcctgtaatcccagctactcaggaggctgaggcaggggaattgcttgaaccatggaggtgaaggtcgaagtgagccaagatcgtgccactgcactccagcctgggcgacagagcgagactccgtctcaaaaagagaaaacaaacaaacaacaacaacagcaaaacaaattacccgggagtggtggtgcacacctgtaatcccagctactcgggaggctgagacacgagaatagcttgaacccgggaggggaggctgcagtgagagccactgcactccagcctgggcgacagagcgagactctgtctcaaaaaaaaaa

SEQ ID NO: 47778 - DNA, 445 bp, Homo sapiens
  misc_feature 345, 347, 348, 349, 371: n = A,T,C or G
attaattaaggcgggagagagtcatggtcgggcagctggaccaggaattaaggcagtcgattgatgtcagagtgggattcaaagtagaactccagtgactccaaggagcaccaagtcaccaaaagttggccttctgtatccatgagttccatatgagtggattcaaccaactgtagattttttacagtccagagatgtctttctcaagtacctggaagccagctctttgaaatgtaacatcaagaatacagtgctccattatggaaaacagtatggaagttcctcaaaaatttaaacatagaactaccatctgactcagcaatcccatttctgggtacatatccnannnaaaaaaaaaaaaaaaaaaaaanggggggccccccccgggggggacccccatttccccctttagggggtttttttcccccccctttttgggcttttt

SEQ ID NO: 47779 - DNA, 478 bp, Homo sapiens
taaccctcactaaagggaacaaaagctgggtaccgggccccccctcgagagtacttctagaattaattaaggcggggatgctcgatgcccaccaatgagtactgcaccaagttcatttccactagcctgtgttacaatttgtgtttctgtatgtttcccttacttgttattctttgtcttccccattagactgaaagcaccgccacggggaccgtgtctaggacataggaggtccttaataaatatttcttgagtggataaatggtgaaccataggggtggcataagagcaaatagagggtagatgagcactaatccattcaccaccctgtttatgggtggtggaccttggatggcctttttcatagtcaaaacatactttttagatctgccttcttgggatgtattcaaggatgctagccgtgtttgagactgtaaatatgtctagtgaatagggcttcacgctgtgtgtgtttgcc

SEQ ID NO: 47780 - DNA, 467 bp, Homo sapiens
accctcactaaagggaacaaaagctgggtaccgggccccccctcgagagtacttctagaattaattaaaggcggggcatgttccacatttagatagtatctgcaaatagtaagggatccaccagtttaagttttagctattatctattaaatagaggcgtttggtttaccttgtagtttaagggtttaaatttagattttattagcccacttgtcctttgccactagggggtgctattgcctccctacactttaaagaggtcctcccaaggtcacaacaacctaaattctcagccttctctcccttgccccttcaagttcccaagcacttagttatacctggacctagagctcacttggctgctttattcatgccaatctttcttccttaacattctctccaacctccccaggtcccatcagtgttgagaaggaatctaggccagctcctgggagatgccagttagc

SEQ ID NO: 47781 - DNA, 495 bp, Homo sapiens
gccaagcgcgcaattaaccctcactaaagggaacaaaagctgggtaccgggccccccctcgagagtacttctagaattaattaaggcgggaacaatgttaaacagcagtcagagggtttgaaatcagaagggtgaagtgttgaataattagaagtgtcaattctgccaccagccccacaacattggcagttatttacactccaaaaaaaaaaaaaaaaaaaaaaaaaaaaaaagcggccgccaccgcggtggagctccaattcgccctatagtgagtcgtattacgcgcgctcactggccgtcgttttacaacgtcgtgactgggaaaaccctggcgttacccaacttaatcgccttgcagcacatccccctttcgccagctggcgtaatagcgaagaggcccgcaccgatcgcccttcccaacagttgcgcagcctgaatggcgaatggaaattgtaagcgttaatattttgttaaaattcgcgttaaattttt

SEQ ID NO: 47782 - DNA, 496 bp, Homo sapiens
attaaccctcactaaagggaacaaaagctgggtaccgggccccccctcgagagtacttctagaattaattaaggcgggggcaggaggaagtattttaagagccactatggggtacttatttattatttcaatttataaaactgtgcccactgccaagccttctgggtacacgtggaacaataaataatatatgcccatctctacttccaactttgtatttttcctttcttttattagttgcattccccatctcccatttcccattatcagctatcactcctaatcccctgccaggaagacagatgagtgactcccactagatccacaggatgctttctggacaacttggtcagcatttcacttctacacacattccacctcccccttgtaacaataaaatctatttaaaccaaaaaaaaaaaaaaaaaaaaaaaaaaaagcggccgccaccgcggtggagctccaattcgccctatagtgagtcgtattacgcgcg

SEQ ID NO: 47783 - DNA, 532 bp, Homo sapiens
agcgcgcaattaaccctcactaaagggaacaaaagctgggtaccgggccccccctcgagagtacttctagaattaattaaggcgggggttccttgggcagaaggaatatgagataaacctcaattggatacatataaaaatatgaagtgttgaaaataaaggtaaaatatctatttacaaatatttaattgctccaaaagataaatgatgctaaaccaaacatttaaaaaatgtattgtgtgtttttaacacatgtaaaagtgaaatatatgccatcaaaggcacaagagatgaaagggaggaattggaaatatataatttttaaattatgtatgtacatgtaataccatttgaaggtaatctcagcttacattacaatgtacattataaatccaatgtaacaactcatatttttaaaaaaaaaaaaaaataaataaaaaaaagcggccgccaccgcggtggagctccaattcgccctatagtgagtcgtattacgcgcgctcactggccgtcgttttacaacgtcttgact

SEQ ID NO: 47784 - DNA, 386 bp, Homo sapiens
actggccgtcgttttacacccaggaccaagaaataaccatgattattgccgcgtcgttttctagagagaaaaaaaaaaaaactttaagtgcgtgggttccagactagatgcttgggtacttagtaagtcctgagaaaagataataaagattaatttgtaacaaaaaaaaaaaaaaaaaaaaaaaaaaaaaaaaaaaaaaaaaaaaaaaaaaaaaaaaaaaaaaaaaaaaaaaaaaaaaaaaaaaaaaaaaaaagggggcctccccccgaggggaaaatcccccccttttattttgggatgggccacacccccagactcggggtgaaaaaaaaaaaaaaaaaaaaaatttttaaaacacccggggggggaaaaaaaattccccaaac

SEQ ID NO: 47785 - DNA, 549 bp, Homo sapiens
accctcactaaagggaacaaaagctgggtaccgggccccccctcgagagtacttctagaattaattaaggcgggggagcatcacaatgtgtgaaaaataaatatgctgactaaagaaagccacctgctatacacatatataagaataaacgttatagagcatattgaaagaaaaaagtgggaaaagatacctcatgcaaacactaatcaaagacagctgtggtgtatatataaaaaaatcacacaaagtaagatttgaaagcactagaaacttttcaggaataaagacggctgctaaataattatgatagtcaattttccaggggaatattgtcccaagcggctatgagaacatagagcttgaacactcataaacaaaattggattcgcaaggtaaaaacacaaaaatccaattaaagttgccttcactaacagctatctctacgttataggtcgacttactagaaaacaaataagttaacatattggaaaaataaaccataccatcctgtaatggacctattaacttcataatgcaaaataaaaaatt

SEQ ID NO: 47786 - DNA, 479 bp, Homo sapiens
agcgcgcaattaaccctcactaaagggaacaaaagctgggtaccgggccccccctcgagagtacttctagaattaattaaggcgggggtcaaacgacgagattgtgaagaatctaatatggatatatttgatgccgacagtgccaaagcacctcactatgtgctttctcagcttaccacggacaacaaaggcaactcaaaagcgggaaatgggttggtattcacattttttaaaattctatcatcattatgcaaaacaaacaaacaaaaaaaattcccaatttttcctaattgctgagctcaagtttgcatataaagcaacagtgctaattttatcattgaaatacatgaaaattttaacttaaaattaccaacttttactagatagaaaataaaataatcatagattctagcaatagatatcttattatcagtatagttaggtagtagaaaatgaaaataatctgttctgaaataaat

SEQ ID NO: 47787 - DNA, 467 bp, Homo sapiens
aagctgggtaccgggccccccctcgagagtacttctagaattaattaagggggtgaagggaacattttaaacactgcaggacacaatcagtaaagtatagaatgtgaataatccttcagaagaaatgagtcaatttctacaacaacaaaaaaatagtgcaaagaaaaataaaaacaggtggagggggatcctataagttaaatgagattcaagtgacatatcaattaatggctttatcaatcatccactaactattgatcaatcatcttatttgacttccaattcaagcaggtaagctgtagagtgtgtgtttgcgtgtgaccatcatggatgtgtaacactaattattaagaaattactgtcaagcgtggtggctcacgcctgtaatcccaacacttcaggaggccgaggcgggcggatcacaaagtcaggagttcaagaccagcctggccaatatagtgaaaccc

SEQ ID NO: 47788 - DNA, 426 bp, Homo sapiens
cgcgcaattaaccctcactaaagggaacaaaagctgggtaccgggccccccctcgagagtacttctagaattaattaaggcgggtgacacttggtgacacaaacatctgacaaaagagctgtaccctttatattttcaaagactttctacaaattaaggaaggcagaagacccatttaatgggcaatggacttgaagagacactttaccaagaatatccaaatggccacatacacacacacatacacacacaaatgggaatgtgttcaacttcattagtcattatggaaattaaaccacaaggaagcaccagaacactgcagcagaagaactaaaatggaaaagacgaacaaccaactatctgcaagaatatggggcaaatgaagcttcctcacattgctggcaggatgataaactggtaagctgc

SEQ ID NO: 47789 - DNA, 429 bp, Homo sapiens
agggaacaaaagctgggtaccgggccccccctcgagagtacttctagaattaattaaggcgggtcagaggactgtaatgatagaattaaattagtgtcactaaaaactgtcccaaagtgctgcttcctaataggaattcattaacctaaaacaagatgttactattatatcgatagactatgaatgctatttctagaaaaagtctagtgccaaatttgtcttattaaataaaaacaatgtaggagcaaaaaaaaaaaaaaaaaaaaaaaaaaaaaaaaaaaaatttcaaaaaaaaaaccaaaaaaaaaaaaaaaaaaaaaaagaaaaaaaaaagtaaataaaaaagcaaaaaaatccccccttggacataaaaaattaaaaaatatcggggcccccccccgggggggggcccaaattccccctttaggg

SEQ ID NO: 47790 - DNA, 489 bp, Homo sapiens
ttacgccaagcgcgcaattaaccctcactaaagggaacaaaagctgggtaccgggccccccctcgagagtacttctagaattaattaaggcgggttacaagtgacttttggaaagtacacattggggtgtacaaataaagtactttctctgaatttcattagctacattaaaaaaagaaaagatcaaatgcaatagatagcactgtaatagattttgctacattaaaaaaaatccatttgaatacacagtgaactaaaacaccagagtggctaaaaagtcccttcatgcatatttacttagcagagagctcttgagaaagacccaaccaataaaccccaaccaaagcaaatccagctacttctctagctgagagggtggaatgactccaaaatattgtttcaagctcaaaaagcctaaaacaactccacataaaaaaacaaaaatctatctaattggacatttacctttttggaaataaaaggcccagt

SEQ ID NO: 47791 - DNA, 614 bp, Homo sapiens
cgcaattaaccctcactaaagggaacaaaagctgggtaccgggccccccctcgagagtacttctagaattaattaaggcgggggacagggtcaaaccactgttgcggtttgtctgtgtgtgccaggaaaagcgtgggtggatacagtaacaagctctggaaatgatgttggatgaagagtgagggctcgagtcaggtcctagggagtaaccatgggactgagcagctgaggtaggaaggaagagaagactgttggcagaggttaagtccaagaattaaactttaatcattcaaatttaaaaaaaaaaaaaaaaaaaaaaaaaaaaaaaagcggccgccaccgcggtggagctccaattcgccctatagtgagtcgtattacgcgcgctcactggccgtcgttttacaacgtcgtgactgggaaaaccctggcgttacccaacttaatcgccttgcagcacatccccctttcgccagctggcgtaatagcgaagaggcccgcaccgatcgcccttcccaacagttgcgcagcctgaatggcgaatggaaattgtaagcgttaatattttgttaaaattcgcgttaaatttttgttaaatcagctcattttttaac

SEQ ID NO: 47792 - DNA, 476 bp, Homo sapiens
ccctcactaaagggaacaaaagctgggtaccgggccccccctcgagagtacttctagaattaattaaggcggggaaaaacaaaccctcaccagacaccaaacctgccagtgacttgatcttggacttctcagcctccagacctgtaagaaatatgcttctattagttataaatttcccagtctaaggtattttgttacagtagcacaagcggactgagatgccaattatacaaaagcatgcaaaacgtgctctggtgttcagtttcactgtcataaaggctgaactatttaacttaccattgtaggagagattcagtctgctactattgatgtattgcctttgaggcagcaaatatcttcacacactcttttacctctgcctaaaatttgttccctgcccctcttattaagatttaacacaaatgttaggtcttctaacaagtcttccctgaactgcagttctctttctcaagaga

SEQ ID NO: 47793 - DNA, 556 bp, Homo sapiens
aattaaccctcactaaagggaacaaaagctgggtaccgggccccccctcgagagtacttctagaattaattaattctgtatttgtttagttgactaatacttgccattttcccaggtttcttgttttggccaagattctggcaataatccatacttgaaatcatttgaagcacctggtatcaatccatacttgaaatcatttgaagtacctggtatcaatccatacttgaaatcatttgaaggaccaggcatcaaaccatacttgaaatcatgtgaagtacctagtacaagtaaaaattctgaattaataatggtaataaagatctgtctctcatcagagtcagaaaacagaaattatatttatatcctacaggcattatgatagaatttcatagtatgagttaaataaaactgtattttagtctaaaattgagatgtcttcctactttattatcacaattaaacaaaataccattcaactatagtagaagaaattcagttaaaaaaattaatcatgggccaagcacagtggctcatgcatataatcccagcactt

SEQ ID NO: 47794 - DNA, 282 bp, Homo sapiens
gcgcgcaattaaccctcactaaagggaacaaaagctgggtaccgggccccccctcgagagtacttctataataattaaggcggggtttctaaaataaaaaaaaaaaaaaaaaaaaaaaaaaaaaaaaaaaaaaaaaaaaaaaaaaattttaaaattttaaaaaaaaaaaaaaaaaaaaaaaaaaaagcggccgccaccccgggggagctcaaattccccctatattaagtggtattaccccccctcactggccgccgttttaaaacatcggaattggaaaaa

SEQ ID NO: 47795 - DNA, 365 bp, Homo sapiens
  misc_feature 84: n = A,T,C or G
gcgcgcattaaccctcactaaagggaacaaaagctgggtaccgggccccccctcgagagtacttctagaattaattaaggcggngggtgggaaatcaaacaacacagggatggggtagctgccacagtccccaccaatggggtctcctgggcagtgacccggcattctgcctccagtggctgcagtgggagtcctgatctcaggccagggaggggacgtgcaatggtggtccagacctggtcccattcctggccaggctcagtaaagttactggccagtttctgggcctcggtctcccccaggttattcagccttgagagttagtcaccatgcctgtgattctgcctcatcttcttgtgtcaaat

SEQ ID NO: 47796 - DNA, 485 bp, Homo sapiens
cctcactaaagggaacaaaagctgggtaccgggccccccctcgagagtacttctagaattaattaaggcggggggatagcaggaggagttatcttcttacaaggtcactgccctatctaattagacccctccaccctttgaccctcatttaaacttaacttctaaagaccctctctccagatagttacattgggggttgggcttcaacataggactttgggggaggtggaggacacaattcagttcttaagtatatattaaactttttaatgtggatagttggtcttccacaaaatagagaaccagagtacctactgaaaaattagaaggcagtggaggaaaaatctaataagctatcttaatttagaaaaagacaacttctggctggacatggtggcttatgtctgtaataccagcactttgggaggctgaggagggaggatgggttaagaccaggagtgctgacaccagcctgggcattattg

SEQ ID NO: 47797 - DNA, 479 bp, Homo sapiens
  misc_feature 382: n = A,T,C or G
cgcgcaattaaccctcactaaagggaacaaaagctgggtaccgggccccccctcgagagtacttctagaattaattaaggcgggagaatcgcttgaatcctggaggcagaggttgcagtaagccaagatcatgccactgcactccagcctgggcgacagagtgaaaccctgtctctaagaaaaaaaacaacacttttttggctaggtattgatgaatgctaaatctttacaattttacacatccaataattggaataatttcccacagattagcttcaggttcccaaaatttcaaccctgcttctcttctactattcacatagtttttgatgctagaacattggacacattaaaataacttcaagagttctggccctgcttnaaaaaaaaaaataaaaaaaaaaaaaaaaagcggccgccaccgcggtggagctccaattcgccctatagtgagtcgtattacgcgcgctcactggccg

SEQ ID NO: 47798 - DNA, 366 bp, Homo sapiens
  misc_feature 286: n = A,T,C or G
ctggccgtcgttttaccccgcggaacacagcgtatacacatgatgattggcgcgccttttctttagagaacatagtagaataatttaggcgggtctctatccagttagcacctgccttctttcgtgttacggattaatgctggaacgtggcacggaaacttttccaaaaaattgattaaaatcgattgaggattaaaaacctattgagtgctaggcaaaaaaaaaaaaaaaaaaaaaaaaaaaaaaaaaaaaaaaaaaataaaaaaaaaaaaaaaaaaaaaaaaanggggccccccccccgggggggaacccccccccccccttagggggggtttttccccccccccccgggggggtttttttaaa

SEQ ID NO: 47799 - DNA, 300 bp, Homo sapiens
  misc_feature 257: n = A,T,C or G
ctggccgtcgttttacaccccggaaaaaggttaactatcatgtggccggcccttctcgagagaacatagtagaattacttaatcattgactgcggaattaaagtaccttcaatggataagacaattgattgagtcgtgaattctacttggtgccctcatctcctgatttattttccgctgatacaagagatgcttatagattcctagtttttatgtgtttgggttgatttctgggtggtgggagcagagcacattgnggaggaatatatccgccagtctactcacactggatgtttacta

SEQ ID NO: 47800 - DNA, 473 bp, Homo sapiens
gccgtcgttttacaccccggaacaagcgtgtacccatgatggttggcggtccctttctagagagtactagtagaattacttaaggcgggaacagcacgaggcactgggagctgcaaacgcccgcgatactgtcagagacggagaaaggtatggccatggctgacacaaaatgttactcaacatttatcacaggcctaaatggagaacataacgctataaaacccttagataaaaacacaggaaaatttgtatggcctggggttgggcgaaaagttcttagacatgacaccaaaagcatgattcataaaagattgacaaattaaattgtcataaatttaaaattataatgctataaagcaatataaaaatctaaagagaatgaaacacaaaccatggtctagaaataaacatttgtgaatcacacgtctcacaacgtactggcacgcaggatatgtgaagaaccatcaaaactt

SEQ ID NO: 47801 - DNA, 575 bp, Homo sapiens
cactaaagggaacaaaagctgggtaccgggccccccctcgagagtacttctagaattaattaaggcggggatggaccaccacttataattttttatcatggagctattcctatagatttttactatttcatggctaaaatatttatacacaaaggcagaacttgccgagtagtagctgatcactttgtctttaaaattccagggtttagtttattactggatgtgttgtgtgctctacatggaccaagagaaaaatgtgttgaaattctgaggagtggccacttgttagctatctcaccaggtggagttcgagaagccctaattagtgatgaaacttataacatcgtatggggtcatcgcagaggctatgctcaggttgcaattgatgcaaaagtgcccattattcctatgtgtacacaaaatattcgagaaggatttagatcacttggaggaacaaggttatttaggtggctgtatgaaaaattccgctatccatttgctccaatgtatggaggttttccagtgaagttacggacctatttatgcgaccccattccgtttgacccacagataac

SEQ ID NO: 47802 - DNA, 492 bp, Homo sapiens
gcaattaaccctcactaaagggaacaaaagctgggtaccgggccccccctcgagagtacttctagaattaattaaggcgggcgcctataatcccagctacccgggaggctgaggcaggagaatctcttgaacctgggaggtggaggttgcagtgagccaagatcgcaccaccgcactccagtctgggtaacagagtgagactctgtctcaaaaaataataaataaataaataaagtcagcaaagggaaagttcacctccatctcaaaagaatttaatagactataatatctctgttatctactagccaaagagataactcaaaactggcagaggcttgttttctgaatcaccctgttaggagtgagttacccactactgctctgtaaggacagaggaacttttacctggcacggaggtcagccacttgatcagtcatctgccctagcattttgcaagttcccagaatctccctgcgttctttgcctgcacag

SEQ ID NO: 47803 - DNA, 594 bp, Homo sapiens
  misc_feature 379: n = A,T,C or G
cgcaattaaccctcactaaagggaacaaaagctgggtaccgggccccccctcgagagtacttctagaattaattaaggcggggtaagatttgccgagttccttttactttttttaacctttccttatgagcatgcctgtgttgggttgacagtgagggtaataatgacttgttggttgattgtaaggaataatcaaggaaattaacatgtggtcatttccttgaaaagaatggataattctatagcagccatggtcacaaataatacaaggtgaagaattagtcaactaaggaatgggaataggataacagggatagactatggactagccaagcaatatttttggtaatagatactctttccagtttggggagcagangaaaaaaaaaaaaaaaaaaataaaaaaaaaagcggccgccaccgcggtggagctccaattcgccctatagtgagtcgtattacgcgcgctcactggccgtcgttttacaacgtcgtgactgggaaaaccctggcgttacccaacttaatcgccttgcagcacatccccctttcgccagctggcgtaatagcgaagaggcccgcaccgatcgccct

SEQ ID NO: 47804 - DNA, 516 bp, Homo sapiens
caagcgcgcaattaaccctcactaaagggaacaaaagctgggtaccgggccccccctcgagagtacttctagaattaattaaggcgggacgggaaacagctgagctccatttctgtttgcactgaggtgagggagtgttttaggggagaacccgggctaggggagctcaagtgaaaaattacaaaggctggtcagtgtgagattaagctcgctgtgtctgctagctgataattacagtagttaggattctaccttaccagagagaccagaacagaggccatcctgtcctttctgatatcttttcaaagacactcctgaattgcagatttagagacatctcaaaaggacagagaaggattcataatttaagcccttttaaactctcttcagaaaggatgtcagggacctatccccaggtgttggctaaaacaaacagtaaattattctgacagccctgagctctttcagacaacactgagctgggttgtcccagaggtggccttacactgcgaggag

SEQ ID NO: 47805 - DNA, 417 bp, Homo sapiens
caattaaccctcactaaagggaacaaaagctgggtaccgggccccccctcgagagtacttctagaattaattaaggcggggtgggggcagtggaatctgcttatgcaataaaggggaagcccctggaagacctaagtgtccagcaggtcattgactgttcgtataataattatggctgcaatggaggctctactctcaatgctttgaactggttaaacaaggtgactagtctctcaacctcttaaactctttatttccttttttgcttgtttactgtgtgttcaaaattcaaacagtttgttcacatatattaaataatgtttccacgttcggaaatgtatatgatcaaagcatgaagtaattaatcagaatatttaaaaatgaatcacttctaggcaaagcagttgtcaagaaatc

SEQ ID NO: 47806 - DNA, 699 bp, Homo sapiens
cgcaattaaccctcactaaagggaacaaaagctgggtaccgggccccccctcgagagtacttctagaattaattaaggcgggggaagggaggggagtggagttttaaagcacattccaaggctgtatttagagacaaaagaaaacacatctgtagtttgtctcaaagctgtgtcttgagactgggatgaaaagaggaaaggaaaaaaaatttctaaaagcagtttgaagctaagctgcttggttacagtcatataatcactgaagtgatcaaccaattcttatagtaaactttttcacagagaaagcaccagacccagttttttgatgatagagatttacttttaagatgttttacccaatgcataaggaacagattcttacaatcttatacagacagttccacaggatagtaaagtgagagtttactcctaactcattatttcagactagtgtaatctttatacctaaatccgagagaaacaatggaagaaaggaataggaggagacagcctcacttgtgagcatacatgaaatccagcagattgtaacaaaagaccaaattgggctttcccaggaaggcaatggtggtttccactggaaaatattaaattttaactcatgatgttagccaatgaaaataaagtcatatgtgtatctcaatagattgaggaaaaagcatttgagaaatatcaacatgt

SEQ ID NO: 47807 - DNA, 431 bp, Homo sapiens
cgggccccccctcgagagtacttctagaattaattaagggggaaggatgtcagcagcagaaaagctgtgggaccaaaatcagattagtcaaactgaaaaataataaataaataaataaataaatacaccaattggagaatcttgtaaaatatcccacacaattgttcaatttggtgttaaagcttaagtgaatttttcagtgaaacactgattctaaccagtccaattcaatcaaattttatctttctgtctgtattagtctgttttcaccctactgataaagacatacccaagactgggcaatttacaaaagaaagaggtttaatggactcacagttccacgtgggtagggaggcctcacaatcatggcaaaaggtgaaaggtgtggcatcaggcaaaagaagagagcttgtgcagggaaacttcccttt

SEQ ID NO: 47808 - DNA, 484 bp, Homo sapiens
agctgggtaccgggccccccctcgagagtacttctagaattaattaaggcgggagaggaaccaggagagagcatgtggagaggtgccacgctctctatgacacccagcttttacaggaactactagagcaagaactggctgacccctgtcacctaagaaagggcattaacgtatacgtgaaggatccactcctgtgacccaaacacatgccataacgtcccacctgcaacaatggggatcatgatctcaacatgagattggaggacacaaacttgcctctataggatgtttaggctttctatttcttcctgactcagttttggtaggtggcatgtttctaaaaatttatgcatttcttctagattatcccatttgttggcatataattatacatgatagtcccttataatcttttttatttcagagacattcattttaatacctcttttaaaatttctgactttatttatttgagccttctctc

SEQ ID NO: 47809 - DNA, 481 bp, Homo sapiens
gcgcgcaattaaccctcactaaagggaacaaaagctgggtaccgggccccccctcgagagtacttctagaattaattaaggcggggtaagaagaggctagattggtgcctcttatagcactgttgaaactacctttgaaatttagttcacaatcattgacctccctcttctttttcccatgctacacgcatacttacctatacttagtttctgttgatcatttattcaaaaataaatgcctgctatgtacagataaaatacaaagatgaaaaaaaaaaaaaaaaaaaaaaaaaaaaaagcggccgccaccgcggtggagctccaattcgccctatagtgagtcgtattacgcgcgctcactggccgtcgttttacaacgtcgtgactgggaaaaccctggcgttacccaacttaatcgccttgcagcacatccccctttcgccagctggcgtaatagcgaagaggcccgcaccgatcgccc

SEQ ID NO: 47810 - DNA, 391 bp, Homo sapiens
atgatactggccgtcgttttacaccccggaacacagtgtgtaccacattgctgggtgccgggccctccctcgagagtacttctagaattaattaaggcggggcatcattggctatgatgtttgaagaccaatctttaacatctgattatatttgatttattatttgagtgttgttggaccatgtgtgatcagactgctatctgaataaaataagatttgtcaaaaaaaaaaaaaaaaaaaaaaaaaaaaaaaaaaaaaaaaaaaaaaaagggcccccccccccggggggggccccccccccccccttagggggaatttattccccccccccccggggggtttttataacaattttagtggtttctcttacatttttagtattcatctttaa

SEQ ID NO: 47811 - DNA, 437 bp, Homo sapiens
ctaaagggaacaaaagctgggtaccgggccccccctcgagagtacttctagaattaattaaggcgggcaggaaacaaatgtttgaatcacttaaatagaaggaaagacagagaagtggggctgcagccaaaccagagaacatagcactacctcaaactttccttggcactcagttcaatttgtggtccatgaatctaaagccgaacattaaaacaaaaaacagcagttctaaatggtgaaactgtcaatatggtattattcaaatccaagccatccccttctacccttcattgttaaagtccttgattatctccgtcatcttagggtattcagcttttcctgtgtttatgcagcaaacttatttccaaatgaacatatagctgaccacaatgtaggggctcactgctgtatcttgctctttctgaccaccaagtaaa

SEQ ID NO: 47812 - DNA, 502 bp, Homo sapiens
  misc_feature 313: n = A,T,C or G
accctcactaaagggaacaaaagctgggtaccgggccccccctcgagagtacttctagaattaattaaggcggggccgccagtgtttccgtcagtacgcgaaggatatcggtttcattaagttggactaaatgctcttccttcagaggattatccggggcatctactcaatgaaaaaccatgataattctttgtatataaaataaacatttgataaaaaaaaagagaaaccaataaatattgctaaaaccggaaataaatacagaaaaaaaagatacttggtgttttttggaaatgagaaacagacgtaccancgctggctggatccctagaacactctctgttgaaggcatctttcaagccctccctctggttctcagggcatcattttccaggcgggtttgttttgcatttcttggagcctctccgagcagcaaccagacgggagatttttattttaagctgttcatgctgggactgacagcctgcaaggtttccttggg

SEQ ID NO: 47813 - DNA, 468 bp, Homo sapiens
  misc_feature 352: n = A,T,C or G
accctcactaaagggaacaaaagctgggtaccgggccccccctcgagagtacttctagaattaattaaagcgggggagggccgcgaggggggtgcatgacagataccaaagctcaagtgctggtaacctcaagcagttacctgccatctccatgcctcagtttcccatcctcctttgtaaaggacccaagttcaccctaatgaacgtggttccccttcctctgtgtgaccttgggcaagtgactttgccactcagtgcctcagtttacccctggggtaaaatcaggataataatagtgcctacttcaaaagttgctgggagagcaggcgcagtgtctcacacctgtaatcangaggccaaggcgggaggatcgcttgaggccgggagttcaaggccagcctgggcaacataaggaaaccctgtctctgccaaattaaaaaattagccagtgtgttggtgcgtgcctgt

SEQ ID NO: 47814 - DNA, 460 bp, Homo sapiens
  misc_feature 374, 375, 376, 377: n = A,T,C or G
aagggaacaaatgctgggtaccgggccccccctcgagagtacttctagaattaattaaggcggggggagcgcccggatagctcagtcggtagagcatcagacttttaatctgagggtccagggttcaagtccctgttcgggcgtttgtagttttcgttactttaacctgctaaattatcccatcaagtcccaagagcggacatcgtaaacccttacatttcaagttgaattcaaatcatttttcactggtttcagaatatgctagatagacgtgttttcagggaggaaaaaaaaaaaaaaaaaaaaaaaaaaaaaaaaaaaaaaaaaaaaaaaaaaaaaaaaaaaaaaaaaaaaaaaaaaaaaaaaaaaaaaannnnccccccccccccccggggggggccccccccccccctttaggggggggtaccccccccccccccggggggtttttaaaaaaaaa

SEQ ID NO: 47815 - DNA, 644 bp, Homo sapiens
  misc_feature 632: n = A,T,C or G
cctcactaaagggaacaaaagctgggtaccgggccccccctcgagagtacttctagaattaattaaggcgggttattatggtacagttttgcttttagtttagactagctccttatttaatcaaagatactcctgttataaaagttcagtagttagaaattgcctctcagaatccattttaattcctaatctcctcttacatgttctaattgcagaccaattttaaatagaaaaaaagaaaaaacaaaccatttgtaaatggcactaagcagttgctgtttgactttctgtattatttttcagaataaaataggagtagaaggatcgtttaatgactaaagtttgatgaattgtacttgcttctgatttacaaagaaataatgttgatttttgctttcagagcatttcatgtggttatttacattttaaaaagatacaatttatgctcatgtaaacacaaaagtgttacatgttttgactaaaagtacatatgttctaaaagggatataaaataatttcaagataatttaaatttaaaccaatctctattttgttataatacctaagtaatacgaagagatgataatatttataactagaagtgggagtttgggtcgtaccaggacccttgncaactatcacat

SEQ ID NO: 47816 - DNA, 523 bp, Homo sapiens
acataaagggaacaaaagctgggtaccgggccccccctcgagagtacttctagaattaattaaggcggggagggtgggggcggggcttggagtaaatgagaccgtgcagggagaagaaaactaaaaattaaataaaaattcatcaataatatcctcaaagatataagaaactgtattatatccatgaaacaagagaatgctatcaaaaaggaaataaaagtgtcaacagaagggtcagaaaataaagatgaagacatctgctagggaggctgggcagggtggctcatgcctataatcccaggaccctgggaggccaaggtgggcagagaggtcaggggtttgagaccagcctggccaacatggtgaaaccccgtctctacaaaaatacaaaaattagccaggcgtggtggcacacacctgtaatcccagctactcgggaggctgaggcaggaggattgcttgaacccaggaggcagaggctgcagtgagctgagatcatgccagggcagcagagtgagactgt

SEQ ID NO: 47817 - DNA, 495 bp, Homo sapiens
gcgcgcaattaaccctcactaaagggaacaaaagctgggtaccgggccccccctcgagagtacttctagaattaattaaggcgggggttggtgtggctgaagacccagtgacaggtacgaagactaaaaatcaggatgaatccagaaaattaacacaaaaaagtatgtattaggctacttcctgtcatagtgaaattaaacactcaaagtaatgtaatctcagctgggcgtggcggctcatgcctgtaatcccagcgctttggcaggacaaggcaggaggatcacttgaacctaggagttcgagaccagcctgggcaacacggcgagaacttgtctctattaaaaaaaaaaaggaatgtaatttcaatctttttcttgatatatggcttgagaatgataatgtaaaaggaattcttctcttacttcaataaaatgggttttaacataactttaaattcaggtaaatatacaatattgaatacctatagttgactt

SEQ ID NO: 47818 - DNA, 510 bp, Homo sapiens
taaagggaacaaaagctgggtaccgggccccccctcgagagtacttctagaattaattaaggcggggagcgcagagggttcaccagggacatgcacttgcttggacgtgggataacgtgccgcatacctgagcaggcagtaggccctatgctgaggtacagctgcatccaatggtccttccattggggtcgtgccctacggcccgagcatgtggctgtggtacatggcccaggtctgagcactcgccttccaggaggtgccagagcaagggggtagtcttgcctataaatactgccctctgtggctcaagtaggtgtgtttgtttatagccctgtgagtgttcctttcatacttgcctcagcccattccagcagcttatgtccagctgagaacccctgggtgctcacgtgctgtcttttaaacaatctagatgaggacggggacttggttgccttttccagtgacgaggaattgacaatggccatgtcctacgtgaaggatgacatcttc

SEQ ID NO: 47819 - DNA, 494 bp, Homo sapiens
ccgtcgtttttcaccccggaaaaagggtaacacagctgggtgccgggccccccctcgagagtacttctagaattaattaaggcgggagatggtaaaacaaatgtggagaaagcaagtccagagtgcagagctcaagctaaaaaaaagcatttgattttgtgtttgagaagataacacttgatatttaagattttcatgcctttaaagtgaagttgcaggcattgcattgaaaaaggtttatgcagctatagcattgacgtatagagttagaagttaaattgaaaaataaagttagaagtgaaaataatttatgccatccgtcataatattaacttggttttaatatttttttcctctggtttttcaaaaagttgtggaaattgacgaagtataattattctaagatggaataattaaaatggcattttataagcaaatgttcaaaaaaaaaaaaaaaaaaaaaaaaaagggggccccccccgggggggggcccc

SEQ ID NO: 47820 - DNA, 478 bp, Homo sapiens
  misc_feature 396, 401, 402: n = A,T,C or G
ctaaagggaacaaaagctgggtaccgggccccccctcgagagtacttctagaattaattaaggcggggaagtcctgatctgcagaacttgccaatttctttggtgtgaatattcctgttataggtgattgcaagtgagtagctcacaaaattcctggagatttaataattggctctaacatgcagttacagaatagctccagcataccactaaaaataggtattaaatttgttttatatattatagggaagatccagtattctttaacataaattgaaactataatacaaattcaatggctattcttctaattatatgactacatgtatacacaaataaatgaacaggtgtgcagaaagaagttaatgtagcaggcctgagactgatatccagaanaaaannaaaaaaaggaaaaaaaaaggcggccccccccgggggggacccccattcccccctatggggggtctttttccccccc

SEQ ID NO: 47821 - DNA, 626 bp, Homo sapiens
taaagggaacaaaagctgggtaccgggccccccctcgagagtacttctagaattaattaaggcggggtcgaagaaggtggtgttgaggttgcggtctgttttgctgcagtaagctgggttgttcatgtcagttggcactagtataacaacaaataaaaagaatcagacaaaaatttcaacagattatgttttagaactaaaacataagatctatggtaaaatatttcagtgatacataggacaaactaaagctgaaagaatgtgtattctagtttaaatagaattgccccgttacatgctgaggtaatacaagactgtgaagatgaaagtgtactgtgcactctcagtggaaaatctgatgtgctctgcattactcaattgtgtcaacatagaatcttgacaaaagaaagttttaacacaagtaaagaaaatgataacatactaaacacaatggatagattgaaaacaaattgctttggcagctcttcatataatttcagagttttagtttattttgacacttcataagtggacaatataccttacaatagagttaaaaataaccattttctttgatttttgcctcttgtattaaagaatttaaaaccaaaataaaaattcatcat

SEQ ID NO: 47822 - DNA, 589 bp, Homo sapiens
  misc_feature 452, 453: n = A,T,C or G
cgccaatcgcgcaattaaccctcactaaagggaacaaaagctgggtaccgggccccccctcgagagttcttctagaattaattaagggggggacaggtggggtaagatcttttaaatttttcataaatcaatgaaaccaaaataatttgggtgaaaactggggaaaaagtctttatttgagtgctagccataattatacagaagattttggcagtatgctaatttgctagtttaacaataaatgataatcacttttattcaaaaaaaaatagatgttcttttatgcttttgaatgactgtgtcacttttttggtgacaatcaatgcaaaagactacatttatgtatcagcgacacttcagaaaataaatctgtagctatggtttccaaagtattatggggtttgttttctttgaaataatgaacaaaaagaacagcacacacacacactgtnnaaaaaaaaaaaaaattaaaaaaaaaagcggccgccaccgcggtggaactccaattcgccctatagtgagtcgtattacgcgcgctcactggccgtcgttttacaaacgtctgactgggaaaaccctggcgttaccc

SEQ ID NO: 47823 - DNA, 522 bp, Homo sapiens
cctcactaaagggaacaaaagctgggtaccgggccccccctcgagagtacttctagaattaattaaggcggggtgggggagaggtgttcttcccttcctctgtatgaaacgaggctttcctgaatcggaaataaagtaaaaatggaaatctgcgggtaccctggttacctggcaacccaaacccatgggctgcgtctattggcatcctaatgtcccccagcatgaaagatgctgtcggaagggattccttttatgtggagcctctttactctcgtccattcatttatccccaattatttggtttccaagtcagtaacccagatttctgagggctctaatgcttgtctctgtagggaaggaggcttccactagggaatttactataacaccttttaaaaggaatcagtgttttgcaaccccccgggaacatttgtgttaaaaggaaaaaacaaggagggggctggcctgatggaactgtgtatttatttaaaactctggtgataaaataaagctgtctgaact

SEQ ID NO: 47824 - DNA, 663 bp, Homo sapiens
cgcgcaattaaccctcactaaagggaacaaaagctgggtaccgggccccccctcgagagtacttctagaattaattaaagcgggcggggcttggggaaaccggcgattagttttttttctctttgaaagatagagattaatacaactacttaaaaaatatagtcaataggttactaagatattgcttagcgttaagtttttaacgtaattttaatagcttaagattttaagagaaaatatgaagacttagaagagtagcatgaggaaggaaaagataaaaggtttctaaaacatgacggaggttgagatgaagcttcttcatggagtaaaaaatgtgtttaaaagaaaattgagagaaaggactacagagccccgaattaataccaatagaagggcaatgcttttagattaaaatgaaggtgacttaaacagcttaaagtttagtttaaaagttgtaggtgattaaaataatttgaaggcgatcttttaaaaagagattaaaccgaaggtgattaaaagaccttgaaatccatgacgcaaggagaattgcgtcatttaaagccgagttaacgcatttactaaacgcagacgaaaatggaaagattaattgggagtggtaggatgaaacaatttggagaagatagaagtttgaagtggaaaact

SEQ ID NO: 47825 - DNA, 433 bp, Homo sapiens
agcgcgcaattaaccctcactaaagggaacaaaagctgggtaccgggccccccctcgagagtacttctagaattaattaaggcggggtaagatttgccgagttccttttactttttttaacctttccttaatccaagcctacgttttcacacttctagtaagcctctacctgcacgacaacacataaaaaaaggtaaaaaaaaaaaaaatgaatataaacaagcacaaaaaggaaaaaaaaaaaaaaaaaaaaaaaaaaaaaggcggccgccaccgcgggggagctccaattcggcttatagggagtcgaattacgcgcgctcactggccgccgtttaacaacgcattgactgggaaaaccctggcgtgacccaacttaatcgccttgcaggaaatcctctttttgccagctggcgaaaaagcgaaaaggccc

SEQ ID NO: 47826 - DNA, 596 bp, Homo sapiens
tcactaaagggaacaaaagctgggtaccgggccccccctcgagagtacttctagaattaattaaggcggggtaagatttgccgagttccttttactttttttaacctttccttatgagcatgcctgtgttgggttgacagtgagggtaataatgacttgttggtattgtatatatctccatctagataatttattctaagtatctacttctcttaatgatttattttttcaccagtacataccaatttaattatcttatctatttttaatgaatatcaatatttaaattatagttaattatataactggcatctttctaatttcatgtaaatttcaaatattccttagactgtatctgtttgtttccaaagattggtaagatccactggactcttatttcatttggaattacaaaatcctttgcagaggtaaggtaaaagaggaatttcatattgtcaatattgctgctttctgtgagctcttgcttttactgaataaattcggtttagagatctttttgtcatgtatgcttgctgaatgtttttccattgtgttgttccagatttgaaattcatcttcatttacaaaatctaccc

SEQ ID NO: 47827 - DNA, 457 bp, Homo sapiens
ctaaagggaacaaaagctgggtaccgggccccccctcgagagtacttctagaattaattaaggcggaggaatgtgtgggacaggagacactatcctattttctgacttaggtggtggttactttagaattaaaaatatatgtattttaaaataattataaattcacaggaagatgcaaacactgtgcataaatgtccagcatacctgtcactcaattcccccaatagttggatcatgcataatgatagcacaaattgacattggtccaatgtatggatctagttctgtgtcatttgattacacatacacaaagctcctcgtgtgcgtctccttcatagtttccttcctccagcccctccctgccatccctagaccctggcaacaaccactagactattttcctcttctgtaattttgtcattggaaatgttatataaatggaattgtgtaatgcatg

SEQ ID NO: 47828 - DNA, 432 bp, Homo sapiens
  misc_feature 412, 414, 415, 416: n = A,T,C or G
aaagggaacaaaagctgggtaccgggccccccctcgagagtacttctagaattaattaaggcggggtaagatttgccgagttccttttactttttttaaccttttgattgcacaagcctttgttttcagtcctagtgaataaagttgtgttttctggaaactgaaatgaataaaacatgaaaaaaaaaagaatgaaaaaaaaaaaaaaaaaaaaaaaacaaatggggcggcccccccggggggaagaactacgccccttaataatggatttgtcccccaccccgcacctgagtttaattaaaaaggaaggaagcatggtgtgtgacacagtgtctgttcttttgtgccagctctgtatgatgtttgtaaaaccatgtttgtaagacatgaataaattgctgcttttgctcanannnaaaaaaaaaaaaaaaa

SEQ ID NO: 47829 - DNA, 476 bp, Homo sapiens
  misc_feature 351, 352, 353, 361, 367, 369, 390: n = A,T,C or G
ctgggtaccgggccccccctcgagagtacttctagaattaattaaggcgggatgaaggagatggtgcggtcgttgtcaaagcgagagagccgcacgcactggtggaattttacatcctccagctctactgatttgttcttgctgcctgaaactcagagtggagagtgcagagtgaccctgggaaccaggaaaggatccctatccccacctttcctgccgaccactgtcacctatttcacatatggggaaactggggcccagagagaatgagcaaaaactggcacagtagagctggaatctgaacctagtatctgtacaggatctggcttggtttttttttttttttttttnnnggaaaaantgtttncnaaaaaaaaaaaaaaaaaatancccgggcccccccccggggggggacccaaggcccctttttgggggttttttccccccccccccgggggggttttttaaaaaaggat

SEQ ID NO: 47830 - DNA, 361 bp, Homo sapiens
aacaaaactgggtaccgggccccccctcgagagtacttctagaattaattaaggcgggggttcaagggcacggcaccagtgattgcagcaggctcccctaaggtccaataacgtatatgataagggggtcatctcttctctcccatctcccccaccacagagcactactgcaaaggtgctgaatcacaaaagaggtgctaggctaggagccaatcggccagccattactatttttttttttttttttggaaaccaaagtctccttgcgttccccaggctggagtgcgggggccccattccggctaattgaattttttgcctcctaagccctttttttttttcccccccccccttttttttt

SEQ ID NO: 47831 - DNA, 541 bp, Homo sapiens
accctcactaaagggaacaaaagctgggtaccgggccccccctcgagagtacttctagaattaattaaggcggggactcaagttatgaacaccctttggactccaacaagaaataaaaatctctagaagaaagcacacactttttgagctagcaatttttcaaccccatggcttaatattaaataaatataagctcaaaatcaaagaccatcaaacaaacaaataaataagagaacatacgtaaaagaagaaataagatgtatggctatcatgtatttcagatatgtgaattttcagatacgtaatataaaattattccacataagatgtttaagaaaatgaaattcaattaaaaacatgcacaaatattttttaaatgtaaacaaaacgaacaggtagatttttaataagaactaagtagtatcttttacattgaaaaatatatatattttaaaatgtaaaatgtgaaggatgggtgaaataccagattagacatagctaaagagagagccaaatatactaatttatattagtaaaatgg

SEQ ID NO: 47832 - DNA, 423 bp, Homo sapiens
cttctagaatgtacttaatctccccaaatagcaaaatggaatatgttactaaagggtggaaatttagcgtattggagtatgagatatgtttattattcatgaagtcaagagtttttaaatgaaaacatttgtgtattctcatgcttcgaaaattgcaaaatctgcaaaataaaatcttaaattacaaaaaaattaaaactattggtaatagggagctattaatattttttgattgggagcaaattgattaagactgagtgatctccagtagtctatacaataaaatggagacacaagaagaacattcattcaacagttgtactttatgtgctgggccctgcagatgcagaaaatttcaatgaactgtaataaataatatgctagtgttaggaaacttggactgtagtaacaagcaaggacaca

SEQ ID NO: 47833 - DNA, 305 bp, Homo sapiens
acaaaagctgggtaccgggccccccctcgagagtacttctagaattaattaagggcggaaagagagggctggcacccacgatcccatggttttataccccgtgtattagtccataactgcacgtggaatgaccagttctcctagtatgttgacgaaatagtctttttacggtaaaaattaagaaaaattctgataatagtgcagaataaatgaattaatgttttacttaatttatcttgcactgtcaatgacaaataaaaattctttttgattattttttgttttcatttaccagaataaaaact

SEQ ID NO: 47834 - DNA, 532 bp, Homo sapiens
aaagggaacacatgctgggtaccgggccccccctcgagagtacttctagaattaattaaggcgggtgcctgtagtcccagctacttgggaggctgaggcaggagaatggcatgaacctgggaggcggaggttgcagtgagccgagatcacaccactgcactccagcctgggtgatagagcgagactccgtctaaaaaaaaagaaaagaaaagaaaagaaaccaagtaaaatacttggtgaattactaatcctccaaagagccttctgacatacatactgttttacagatcaggaaacaggctcaactaggtcaggtcacttacacaaggccccccacctagtgccacaggtgacttggcatgtagctgggcccaggcacaagcctgactctaatgtcctctgcagtccacttccctagccctgtccctttccatttaaaatgaatatgtccagcctgggcaacataaggagaccctgtctctacaaaaaaaatttttttaattacccaggcatggtgtgcacctgtaatccc

SEQ ID NO: 47835 - DNA, 523 bp, Homo sapiens
  misc_feature 426: n = A,T,C or G
aaataaagggaacaaaagctgggtaccgggccccccctcgagagtacttctagaattaattaaggcgggagaatcgcagaggttgcagtgagccaagatcatgccattgtactccagcctgggtgacagagcaaaactcaaaaaaaaaaaaaaaattactgggggggacctgggcccgggggttcacttttgtaatcccaccattttgggaggttgaggcaaatccttcatttggggtcaggagttaaaaaccagcctgaccaacatggaaaaaccccgtttattaaaaatacaaaagttacccgggcttgatggcacatgcttgtaatcccagttactcgggaggctgaggcaggaaaatcccaaaggttgcagggacccaaaatcatgcctttgtactccaccctgggtgacagaccaaacccnaaaaaaaaaaaaaaaaaaaaaaaaaaagggggccccccccggggggggccccaaatccccctttagggggggtttttacccccccctttgggggggt

SEQ ID NO: 47836 - DNA, 360 bp, Homo sapiens
gaacaaaagctgggtcccgggccccccctcgagagtacttttaaaattaattaattcttgtgaatgtgttgatactgctacacctaatttataagaagtattgctacactgtatgcggacatgccactataggtcctggagcactaataattgcagtttttgctgttaactgtaattacttttgcaccaacctaatagatcacacatcggcttgttacttgagcatataaaacaaactatttatttttcatgagccctacatggaaggtgtcaatccattcatcaaaagcaacaaacatcgtatgatcatgtttttagatgaacttggggtatgtatatagctttcaggtacttttttta

SEQ ID NO: 47837 - DNA, 517 bp, Homo sapiens
ttaaccctcactaaagggaacaaaagctgggtaccgggccccccctcgagagtacttctagaattaattaaggcggggttccaaggctgcccaaaccccttataagtgatacctgtttagctcagttaattataacaacagtaggaggcatagctgtcactcattgagtacttcctgggggctagacatgctaagctctcttcttccgtcttctcaatcatcatgacagctctgatgttgagactgttattgagcccattttgttgatttgaccattgaggcactgagaggtggttgtagagctataaagtggctgagtggggattagaacaggttttccttgggctccagagcctggcttcttgatcacctcacgcctcggtctgaggaaggggctgtgagtctgcccacctgcgagctgctctctgtccaatgacttagtccctctgttctgactcaccctaaattgatgttcccgggagccctgtttcttttattcactgtttcacagggggca

SEQ ID NO: 47838 - DNA, 451 bp, Homo sapiens
aaccctgactaaagggaacaaaagctgggtaccgggccccccctcgagagtacttctagaattaattaaggcgggggagggaaagaaaacaaacagtttcagaattgaataggcaagtgactgttttaaagattaagtaataaagatgtcttatctagaaaaaaaaaaaaaataaaaaaataaagaaaaaaaaaaaaaaaaaaaggcccccccccccgaggggaggaacctactccccaaaaaaggaatttttacgccccccccccaggagagcttaaaaaaaaacttcatgtaatatggaagtttgaaagaagttaaccaaattttccagaaggccaacattataccatgtacatatccttgaatctaggaattttatgcctagaaatttaaccgaaaaaaaaaaaaaaaataaataaatagggcggcccccccccggggggggacccca

SEQ ID NO: 47839 - DNA, 477 bp, Homo sapiens
  misc_feature 317, 381, 383, 384, 385, 386, 387, 388, 389, 390, 391, 393,394, 395, 396, 397, 398, 399, 401, 402, 403, 404: n = A,T,C or G
tactaaagggaacaaaagctgggtaccgggccccccctcgagagtatcttctagtaatataattagagtcgccagtctgaccagataccgccacaccgggagtgaccagtagtgaaatagaagacacaggatcacaattcctcctaggagtggaagaaccaagaaaaacaaagaaaccgggccgcccacgggggggggaccggacacaccctttaccgggagagaacgcctcccccacctgcctaaagattataaaatatcccactccctgcaggtcgcagaaagagtggagaactggtgccactcggacaccttanctcaccgagagaaatggagacggcctccaggacatcttaggaccctggttgattccgagaatcncnnnnnnnnnannnnnnnannnnaaaaaaaaaggggcccccccccggggggaaccccaattcccccttaaggggggtttttaacccccccccccgg

SEQ ID NO: 47840 - DNA, 396 bp, Homo sapiens
  misc_feature 305: n = A,T,C or G
aaagggaacaaaagctgggtaccgggccccccctcgagagtacttctagaattaattaaggcgggggacgggcaggggctgcggaccgcccggccttggacccatccggagccacaggttggaggagataagtagctgtccccgtgctcatcgccctgtggagcagatcctgtctccttgctgacggtggagcccgggagttccagggcttgggaaggggaaggaaacctctctgaaatctgacacctgctctcccggcaaggaaacttcgcaggctgctggagtcctggcagaaaggatctaanaaaaaaaaaaaaaaaaaaaaaaaaggggggccccccccgggggggacccccatttccccttttggggggcggttttccccccccccttggg

SEQ ID NO: 47841 - DNA, 566 bp, Homo sapiens
ttcacccctcactaaagggaacaaaagctgggtaccgggccccccctcgagagtacttctagaattaattaaggcgggctggatgtcccgcaggcttatcgtcgaagctgctatgccgaccaaatcccagaggctcttggccgctgccggcgagaggggtgaatccagacaaagcctgaacactggactgaaagctgggcggtgtctggcttttccactgtctatcaagagtgccgaaacttcctctttgcccctggtgtgagattccttcctgctggtgtgcactcctttcacttgactatctctgatggtgtcttcctgtccatgtcccactacattcgtctgctggcatcagatgaggactgcccaagcgtggttgaccccctggaccacaccaatgtcactgcgccccaagcctccatgatgttccagtactttgtgaaggtggtgcccactgtgtacatgaaggtggacggagaggtactggggacaaatcagttctctgtgaccagacatgagaaggttgccaatgggctgttgggcgaaccaagccttcccggagtctt

SEQ ID NO: 47842 - DNA, 449 bp, Homo sapiens
aaccctcactaaagggaacaaaagctgggtaccgggccccccctcgagagtacttctagaattaattaaggcgggggttataaaaaatggttcagaattagacttttatttcattctacttataaaagaaaaaagataaatataaacctgaaaagaaagaagcaaaaagaaaaaagacaggctcggccccagggggctaagggcaaaatgtacaaacttagaagaaaatcggccgcactcgaaacgggatataaaatgaaaatattgtcaagagtttcagatagaaaatgaaaaacaagctaagacaagtattggagaagtatagaagatagaaaaatataaagcccaaaaaaagaaaaaaaaaaaaaaaatcgggggccccccccggggggggccccaaaaccccctttaggggggtatttaccccccccccccggggccttttttta

SEQ ID NO: 47843 - DNA, 381 bp, Homo sapiens
gcgctttcacccttactaagggaacaaaactgggtaccgggccccccctcgagagtacttctagaattaattaaggcgggtgaattgtatagtatgtgaattgtagctcaataaagctgttattaaaaaaaaaaaaactaaaagagaaaaagggcggcccccccccgggggggagacatataacccctttaaagggtcttttaacccccccccctctgccgttcttttaaaatcgggaaatctatccaggcagcaagatcacacactttgagaggttgcagcagaagactggaattcctttctcccagatgatcttctttgatgatgagaggcggaatattgtaaacgtcagcaaactgggtgttacctgcattcacatcc

SEQ ID NO: 47844 - DNA, 320 bp, Homo sapiens
tgatctgatggccatccttaggctgttcttatcatactgattgtaaggtgaaacccatgcatatactataataaccgctgttctgcatataaagacaccaatagcttaaaagtaaaaggaaggaagatgatatacaatgagaatactagtcaaaagaaaactggagtgactttttaaatatatcaaagtagatttcagagcaaagaacattaccagggataaagaaggtttcatgagggccagtctgccagaagaccataacactcgtaaatgtttatgcatctaataacatggttttgaaatatgtgaccccaaaactg

SEQ ID NO: 47845 - DNA, 573 bp, Homo sapiens
aaataaagggaacaaaagctgggtaccgggccccccctcgagagtacttctagaattaattggggggggggaggggctttaggaaatctatcatcctattcctcttcttaaatttacaagagacatcagaaaagcctgaatagttactttaacattaagtcctaaaataggttatatagaatttattttaagatatatggcataaaaagttacagcctgctaaattttattttttgatacttacttgcagagctgtaattctgacatagtaacaattgcactctggatagccggtgccttctatcatccagaactttctatatacaaaattagaagtaacgaaagctatctttggctatcaagcaatagctgaaaataatcaaagaaaaagtaactggctgatttatctattaaaaaagacaagttctcatcagctggtgatagctacagaagccaactagagcctccccaaatccaaaggaaaagaaataaaaaagaaaaaaaaagatgaaaatatcaagggacagaggtgatagacaacccaatgataaaggaagaagttaaaatgaaaaa

SEQ ID NO: 47846 - DNA, 446 bp, Homo sapiens
  misc_feature 359, 385: n = A,T,C or G
accctcactaaagggaacaaaagctgggtaccgggccccccctcgagagtacttctagaattaattaagggggatatgaagttgcaaggtttcaagattcttattatttggggagaggctagagatactaattttagcccttgttgagaatgaatgttaaaaatttaaagacaatctaggaaaaacaaagagtttttaacattcaaactaaactcttactcaaatagaagttattggcaatgttctagatcttggattaggtggtaggttcagcggtattcattacgatgtacattatactgtattaataattgttaaagaaaagagagaaaacaagaaaaaagaataggaggcaaganaaaaaaaaaaaaaaaaaaaaaaaaanggggggccccccccggggggggcccccaattccccctttaggggggttttttacccccccc

SEQ ID NO: 47847 - DNA, 421 bp, Homo sapiens
ctgggtaccgggccccccctcgagagtacttctagaattaattaaggcgggtatacgattcttcatgtaggctcctgggtcctgttgataaccaagtcatctctgataatttctttgacttttgttatgaaaagatgatcatggctaatcttatataaacatttcttctcctggacctgaaatcagccatttctccagtgggccactttagtggaaaatagtatttagaagtcataatctaggtctttttagtagacaaagctaggaaatgtttgtttttttgagaaaatacattgtgagttcattccgatatttacattcaaattaaaagctttaaggttttattatgtatcttcttttatatctgaatcccttttctcttatgctgaaaaactgtaattacattaacgtaactacttgg

SEQ ID NO: 47848 - DNA, 626 bp, Homo sapiens
gaacaaaagctgggtaccgggccccccctcgagagtacttctagaattaattaaggcgggaagctaaccactatgcttgcagaaaagcacagccttggtatttacctggagagttctatccttgtaacactacagaaggatatgttaggattagagaattttagcactggacaaaactttaaagttttaactgtaagaaaaactacagagaagtgacttgcacaagttcacagagtaagtgactattagagttgaacccaggtcttctgactcctaaaggcttcacacctatttcgcaggcacagagtagccacaagcatgtttttcttctttctagtagtttcaccacaatgtgaaagacctgctctgccctgagagtgccaatgtcctttcccacacttcttagatgccttcctcttcctgaaccccagaagaagagggcacctgagcaggaaatctcaggtgacttagtttgccagtgcctactctactgaagaactaggttttcattcttgagaagaaactcatggaaggatgtgtttcctatcacaggtatacatgctaatttttttgttgaattttcttgttgcgacttatgccaagtaattataaaggttttttttttt

SEQ ID NO: 47849 - DNA, 453 bp, Homo sapiens
ctgggtgccgggccccccctcgagagtacttctagaattaattaaggcgggggcagtggctcactgtaattccagtgctttgggagatcaaagcaggtggatcacttgaggccaggagtttgagaccagttaaagataacaaatatttgtagttttcctcaaaaataaagatttttaaaaattaagtaaaaattaggtcgggggcagtggctcactgtaattccagtgctttgggagatcaaagcaggtggatcacttgaggccaggagtttgagattagtaaaaattattgttattaagacaaaacggatagaagaatggaagaatggaataatggcagagtataatccagacataaagatctgggattcaacaatattgtgacctttttttttttaagaaacggggtcttactctgttgcccgggctagattcttaaaaaaaaaaaaaaaa

SEQ ID NO: 47850 - DNA, 397 bp, Homo sapiens
  misc_feature 265, 355: n = A,T,C or G
gcgggcgtatgacctgaagtctggagttcgagatcaacatggccaacatggtgaaaccccatctctagtaaaaataagataattaatgtattaaaattacccgggcctggtggtgcgcacctgtaatcccagataatcggaaggctgatgcaggacaatctcttgaacctggaggcagaggttgcattgagccgagatcgcgccactacatttcagcctgggcgacatatcaagattccctctcagaaaaaaaaagaacacccanagagggggcccccccccccggggggaatcccaatcccccgtcaatggtgttatattacccccaccgtggggccgttttttaaaaatttantttaaaagttggaagtgattaaaataatttgaaggcgatctt

SEQ ID NO: 47851 - DNA, 437 bp, Homo sapiens
cgcaatgtaaccctcactaaagggaacaaaagctgggtaccgggccccccctcgagagtacttctagaattaattaaggggggctgccaccccaggtcctccaagcaacccttttccccatagtgggaggtcagcatccctcagaagcatctcaggaaaaaatgataaagcatttagagaattgggaagaaaatagagggatactatcaaagagtaaaggacagtcctgggggatgaagggggattttcttttttctttttttttttgggaaacagagtctttcaatacttaccctatctgcggggccatactttggatgggtgaatcagatgattccattctccgattggccagggccgatggcatcgtctcaaagaacttttgactggagagaatcacagatgcggaatatttgtcataaataaataatgaaaac

SEQ ID NO: 47852 - DNA, 347 bp, Homo sapiens
  misc_feature 299: n = A,T,C or G
ctaagggaacaaagctgggtaccgggccccccctcgagagtacttctagaattaattaaggcgggaagaagtaagactggagagactaatgccattcttgtcgagtcctaaaagcagacttaggacttaattcaataagcaataggaagccattacatcttttgaactgcaatgtggcatagttacggacgtgctttaggaaggctgcttttagaacaagtgtaagaaaccactgagccaaagtgagaggtagggacataagttaggtaatgaggacccctgctagcgaagcagtggcngaaaaaaaaaaaaaaaaaaaaaaaaaaaaaaggggcccccccccgggg

SEQ ID NO: 47853 - DNA, 403 bp, Homo sapiens
aaagggaacaaaagctgggtaccgggccccccctcgagagtacttctagaattaattaagcaggtaagtgaatgaagtttcacagatttaggctggtaatatctgagattcattttacccaggtaaaatattttctgtaactaaaaaaaaaaaaaaaaaaaaaaaaaaaaggggggccccccccggggggggcccccattcccccctagggggagccttttaagcccccctcgcggggcgtttttaaaaaagccactggcactccagccttgagtgacagagcgaggctctgtaccttataaaaaaaaaaaaaaaaaaaaaaaggggggccccccccgggggggaacccaatttccccctaaaggggatgttaaaaaccccccccagggggagtttttaaaaa

SEQ ID NO: 47854 - DNA, 476 bp, Homo sapiens
  misc_feature 379, 396, 398, 399: n = A,T,C or G
aactctcttcactaagggaaacaaagctgggtaccgggccccccctcgagagtacttctagaattaattaagggggaacagcgtttccgtaaaattgactttgtactctgaaaacgtcaatttatattgaacttggaggagtttggcaaagtctgaataggtcaacctgcaggcgtaactatttttgacctagtcagtttttaaacaatgtgcatttgaaggagttaattaaggcgggtgcttaagcataaactataaaatgagaagaataaggtactttattcttctgtggcagggaacccaacacttgggtttacgttgcagggcaacacctgtgatgaacaaaacacatggtagcgatagcccattcatgaaaaanaaaaaaaaaaaaaaaanannggggggccccccccggggggggcccccaattcccccttaaaaggggtttattacccccccctttgggcccgtttttt

SEQ ID NO: 47855 - DNA, 434 bp, Homo sapiens
taaagggaacaaaagctgggtaccgggccccccctcgagagtacttctagaattaattaagggggaaaaacccttcctataaggaaaagtttcagcttgatggctttaccacagatacttaagtgagaaataattctgatctaacccaactcgtccagagaacaaagaagcttgttttatcaaactagcgtaactttgacacaaaaatctgactgagaacattataaaataggaagataacaggtcaatctcttcctctcccatcaacacttgcaaaatactaaacaaaatagtagcaaattaaatctagtgatacatgaaaagggtatgtatgacaagttactaagttgcagtgatttcagaatgcagggttggtttaacttaattcgaataaatttattcactatatcccaatagatgggaaattctgtttt

SEQ ID NO: 47856 - DNA, 557 bp, Homo sapiens
agctgggtaccgggccccccctcgagagtacttctagaattaattaaattgtaattacaggccaggcatgatagctcatgcctgtaatctcaacattttggtaggccaaggcaggagaatcacttgaggccagaagtttgagatcagtctggttaacatagtgagacctgtctctatttatatgttaaaataataataatagtaataataatcaattgtaattatagttattcctagagaagttgatttagatatattacttaaataaggttttaaaagtgataatttagctaaaatcattattttaaaaatgtacattttcagatgatacaacttttacagaattacatagaacgtacagttcgttatgtctatgaaggtgttttttttcccttttcatcttgttaggcacgtaccatgttattttagatgaaagccattacaaagagttgctcacacatcatgttagtcctcctcctgctagctcaagttctgaatgctcacttattcgtatgggtaagtgtttttatgtttttaaaaaatacatatctaggctc

SEQ ID NO: 47857 - DNA, 544 bp, Homo sapiens
tgggtgccgggccccccctcgtggatacttctagaattaattaacaaactttaccatgaatcttcttagccatggggacctgatgacaggacgaggtggataaagaactaaagaactaaaccaacagtgaagtattacagcatcaattatgattaacacaaaacaaattcctcaattcttccagtaattaaagtcagtcatacgatgtaaaaagatgggaaagaattcttgctcataagtagaactccaatcctgagctaggaacgtgaagttctcgtcccatgttctcactccttaaaatatttatatttacagtacactaggggtaggtgctgagaattcagcagaagtggatttgaagtctaaacaaatacacttgaacccactaaacattaagttatcaatttattagctgtgtaaccttgggcaaatttcttagtatctctgttcctcattttcttcatataaaaatgaggataacaacacaacctaattcatgttaattcacttataattaacttacaacagttcctgacacatacta

SEQ ID NO: 47858 - DNA, 412 bp, Homo sapiens
aaagggaacaaaagctgggtaccgggccccccctcgagagtacttctagaattaattaaggcgggcgggtacccttcgactgggcgttgccgctgttccctgcgcggcatggaggggacggccgtggccgtgttcgagttgcttctgcaggaagcctttttggtggcatggtcctcaagaagttcctaaaagagacagtctcaaactcctgggctcaagtgattctcctgcctcggcctcccaaattgctgggattacagacttgagccactgcacccagccttctccatgtctttagggacaaacttctaggatgaaatttaggatgaattaagtcattagcttgacaccatgatgtacaaatccctgaatttcagtttcattgttaaaatgccattgtttcaagatgctc

SEQ ID NO: 47859 - DNA, 468 bp, Homo sapiens
accctcactaaagggaacaaaagctgggtaccgggccccccctcgagagtacttctagaattaattaaggcgggggaaataagaaaatatgaatgaagcaacccaggtcttgagccaaagaattacctggggtccgttgagtttcaaatctgaaaatttctgtctttcaaggtcagcatcgcccacaaaccggccgttctgaaacacagcccacaagaggacaattcattttgtggccttcttttgctctatcaaatacaaacgatctttttttcaaacaggaaaagggctttcaagaagatatgtgtggcctggagtccttgtgtcagtactcataaaagaaccattcactctttagtcttagcactttcctcaaaattgaaaatcaggcctggaactctggcagacagggtctctggaacataagaacgtaaactccacgagggcagagggttttttgggataagt

SEQ ID NO: 47860 - DNA, 577 bp, Homo sapiens
  misc_feature 105, 496, 516, 517, 518: n = A,T,C or G
ctggccgtcgttttacacccggaaataaggggaaccaatgctgggtgccgggccccccctcgagagtacttctagaattaattaaggcgggaggatagggggatncaacagatatatttaaaaagtgaatgcccttcacccataatcccattccctgaagagaaacttgagaagatttattttcaaatatcataaaatttatatgatctattaaaacctaaagctataaaactttcagaagaaaacagatgggaaaaaaaagtttacaacctgggggtaggcaaaggtttcttatctagaatacaagcatgagacattaaagaaaatattgacaaattggatcatatcaaaattaaaacatgattttcaaaagacatcattaggaaaatgaaaaggcaagccacagactgaaataaaatttataacacatatatcaaagtacttgtattcaaaataatataaagaacacagcacaagaaaataaccaacccaaaanaaaaaaaaaaaaaaaaaaannnaggggcccccccccggggggggcccccaatccccccttagggggagttttttacccccc

SEQ ID NO: 47861 - DNA, 455 bp, Homo sapiens
tgatgggtgccgggccctccctcgagagtacttctagaattaattaaggcgggtacgtcttaatatatagtaacctaacagctacatatttagataaaagtaatatgtattaattataataaattcacactacccatgctgtatttggaattgagcccaatctctctcccccatggcaagaccctaccattgcagtggtctctatatctatagtgatgggcctgaataaagcctgccttacagtgctttaacaactgtcactgaataattttttcttgaacatctttttggactacccatggccacttcttgatcccaacctgaacataagaatcttctagaagttcttcaaaactcagtgcaaaacacacatcctgactccatcaagcagattttgagatcccttcataaggtgtatttcacacttcaaaagatattcattttcatgtttgcta

SEQ ID NO: 47862 - DNA, 447 bp, Homo sapiens
aaagggaacaaaagctgggtaccgggccccccctcgagagtacttctagaattaattaaggcgggaattaattagacaaaaatggaatcctggtcttcctgtttagctcatccttcccctctgatctaatttagacacactgagcctcaaagcttctttattcaattcattgaactatcttattctcttgaaaacagccagtagaatgaactatgaatctgtcatctctgagagttaatatgctattcatttaaagattctattccaagcctaaaaataaatcaaagaggcaaatattacactggtcaatggaatgtttcttggaatgaaatcaacaactaccaaaaaaaaaaaaaaaaaaaaaaaaaagggggcccccccccgggggggacccccattcccccctatgggggggtttttacccccccccctgggggggtttttaaa

SEQ ID NO: 47863 - DNA, 464 bp, Homo sapiens
ctgggtgccgggccccccctcgagagtacttctagaattaattaaggcggggggaacgtgcttcttaaactgcagtttcctgggccctaatttcagtctgggtgaagctcaagaatctgtactttcaacacccctcacacagttgccgtagctggcactcgcactgcattgagcactcgcctgaggtgggttaaaagtatctggcctgaggacacctcagtacataagtccttagggtaatgaactgcaacctatcttagtatggaactaactgaatgcccaatttaggcatacagtcatgcatggcataatgacattttagtcaatagcagacagcacatagacagtggtcccataagattctaatactaggccaggcacagtggctcacgcctgtaatcccagcactttcggaggccaaggcgggcgaatcacaaggtccggagttcaagaccagcctgacc

SEQ ID NO: 47864 - DNA, 482 bp, Homo sapiens
cctcactaaagggaacaaaagctggatctccaccgcggtggcggccgtcctggcaggttcacacctcgtgcttgcctagggatgctggaataagcctttgaatgaaaatttgtccttgaagcttgtatctgatatcagcactggatcgtaaaacttgttgctgatttttgaccttgtattcaagttaactgctcccttggtatatgtttaataccctgtgcatatcttgatttagtccttagttcatgtggctcggtcacttgggggctggggagagcacgctgtagatgagaaagccccagcctggtggatctctgtgagcaccactgagtgatctgtgcagggtattaaccaacagcagacttccaggatttcctgaggctggcaagggttcctgaaccagttaccactccttcttgccagtctaacagggtgggaaagtccgagccttaggacccagtttcagttctgggttcttccct

SEQ ID NO: 47865 - DNA, 473 bp, Homo sapiens
accctcactaaagggaacaaaagctgggtaccgggccccccctcgagagtacttctagaattaattaaggcgggggagaaaagcagaatgagatatgcgatgttccttttatgaccaaataccctactattgctagagatagcctaaaagtagttgaggcaaaccgacattattaggggtatttggagctgctttccactattttaacatgtgtttatgtgtgagcctgaaaggattacaaatgtgtgtgtgtgagtgtgtatatacatgtacatataactacacatatctttctttatctcataattatgtttttgaaaagttgagtataataaaatacttacaatctaaataccattttaataggacaagggaagctgactttctaaatacaatgtcacattctaagtgatgaacataattttgttaatgtaaaatttagaacagtatagataaagtgtgtcactcagcct

SEQ ID NO: 47866 - DNA, 491 bp, Homo sapiens
aaccctcactaaagggaacaaatgctgggtaccgggccccccctcgtgagtacttctagaattaattaaggcgggacatatcctcattcaacctcaagaacacatgtaacaggcaacttaaattttttgcctttctgcacatttctataaacagccatgaaatcactgtgagtattgatttgaaagttacaaataaccttttgtgagttggcagatctgcaaatacctcccccttgaataatgatcaactatgcaagtgaaactattaagtgcagaaattacattgaaatcaatgcagtaagagatgttacttggtggaatagcgaaagatgaaatcccaaaatggccatattcctctaatttctctgttaataatgcatagaatgctttctccaatttgaccacgaaaaaaaaaaaaaaaaaaaataaggggcccccccccgggaggacccaaaattcccctttaagaaagggttatccccccccccccc

SEQ ID NO: 47867 - DNA, 508 bp, Homo sapiens
  misc_feature 425: n = A,T,C or G
tcactaaagggaacaaaagctgggtaccgggccccccctcgagagtacttctagaattaattaaggcgggtgtcactccttgccaaagctttagaaagccttcctcttcaatgatccctagagctgtgcgcaccattcccctatagggggcagattctcttgcaccgtctcccaaccgagcaagagctgcttctccttgcatttggagtcgagtttttgtgagatccaggggaaaggttgctaacaaaaacacaaatgcagggaaaaacccacaacattcagagaaacaaacaaaaatctaaaatcataggagtaatattttcccaagactggttgttctcaaattttagaatatatcagaatcagctagggagattttaaaaattagaaatttcctagccccgtgcccatggattctaattcantaggttgaagagggtttagaaacttgattctcacacagtcccaaatttaagaatcactacgcaagagcatcctggatcactag

SEQ ID NO: 47868 - DNA, 470 bp, Homo sapiens
aaagggaacaaaagctgggtaccgggccccccctcgagagtacttctagaattaattaaggcgggaaaatcaagttttaactaagattaacccacagaagtagatattaatactaaggtttcgacctaataataactaacctgtattaattgtgtgcagtgtaccagacccatatgagatcctgcaccaacatttgctatgcactaactagtttaattgccattaccagggtcctcctggctctgctatttactagctgtttgaccttgggcaggtttcttaacctatgtctcattttcttcctcttcaaaatgagaacagaaatagtgcctacctcatggagttgttgtgaggattaaatgaattaatggaaagcatatagaatagcgcttagcacataataagctctcagtacttagaattaccattatcccagtttttcccggggggagaaaaaaaaaaaaaaaagg

SEQ ID NO: 47869 - DNA, 456 bp, Homo sapiens
  misc_feature 366, 367: n = A,T,C or G
taaagggaacaaaagctgggtaccgggccccacctcgagagtacttctagaatgaatgtaagggggcaaaagatttgaacacagaaaactacaaaacactgttaaaagaaattaaacacaaataaatgaaaagaaaagctgggtttgcaaattagatgatttcatcttgaaatgatgtcaacactactcgaagtgacctagattcaatacaatccttataaagattccaatgacatttttgataaacagaaaaacctatcctaaaactcatatggaatctccagggcccatgaataggcaaatcaatcttgaaacagaacaaaattaaaggtctcaaagcaattacaaaactgcaataagccaaannaaaaaaaaaaaaaaaaaaaaaaaaggggcccccccccgggggggaccccaaatccccctttagggggggtttttccccccccccccggg

SEQ ID NO: 47870 - DNA, 490 bp, Homo sapiens
aaccctcactaaagggaacaaaagctgggtaccgggccccccctcgagagtacttctagaattaattaatgcggggacttgctggaacttgctggaactaacaggtaccatagggacagacagagacagataggaatagataaagactagcaatataaggtcagtgccctgaagaggtactggtctgtgtcctaaagaggtacaaaagtatagactggcgaggagggcaaaaggaacctgaaaaaaaccttcgcccacccgggggggaaccactgttccgcccttaagagtgccaatcatgacgactcgggcgaagagccttttacacacacctctgaagcccagcctctgcaggacctgagacgcggtacctggccgggcggccgctctagaactagtggatcccccgggctgcaggaattcgatatcaagcttatcgataccgtcgacctcgagggggggcccggtacccaattcgccctatagtgag

SEQ ID NO: 47871 - DNA, 491 bp, Homo sapiens
ctggccgtcgttttacactccggaataagaggtacacatgatgggtgccgggccccccctcgagagtacttctagaattaattaaggcgggaggatcgcttgaacccaggaggttgtggctacagtgagctatgattgtaccactgtactctagcctgagcaacaaagcaagacgctgtcgcaaaaaaacaaaaaagatgtgtaattcctttaagcctccacagttgaatcaaatgtattttttcattttatttggctgccttttcctgaatcctcccagaattattcgaaatattcttgtttctgtcaagatgtagttataagtattatttcagagaatgcatttcaactgtatcttgtccaaaaggggttaaaatgatgctggcaggacagagctacttttccaggatgtggcccaaacacatatctgtcttcttaattcctatatgaaacgttggaaaagactttagaaaaaacagtaaatatgtcat

SEQ ID NO: 47872 - DNA, 642 bp, Homo sapiens
ataaagggaacaaaagctgggtaccgggccccccctcgagagtacttctagaattaattaaggcggggtggaatggtataattaaaaaaacaaaatcttttcccaaaaggcaaatatgagactattttaaaagaacaagaaacaggtgtcatctatagaatagtaaataacaaaacatagaaatatatacaaatatattgcagtgacagtaaatgtaaataaactgtttcaatttgaagacagtaattttcaggttaaaaaaataccacttctccttagagacatacatataagaattcagggagcataaaattaaaagatggaaatagatataccatattaacatgaaccctaatcaaaagagatctgttgtagttatatttattcacaacagaaaaggttgacttttaatttaaaaatcataatgattataaagtgtagtgattgatcataataaaattgaactaaaatcaaacaatataaatgtaacaataaaagtctcaatatatgtaacactaagccataggttatcttctaaacaatgtatggtttaaatagagataacagaaattagaaaagtttttgaactaaatgataattaaaatattgcttatcacactttttaagatattactaaaatta

SEQ ID NO: 47873 - DNA, 496 bp, Homo sapiens
aaagggaacaaaagctgggtaccgggccccccctcgagagtacttctagaattaattaaggcgggtgagcggtgacaacggtcattatgtcgcttgggggcataaatgggattaaccctatgattttccttggatataatatactctatataaaaaattttgctatatgactcagggggatacctctctatatgatactaaattaatgtctataatttttcccttgcggtaactatatctattgcgccaggtttcaatttataatcgcctatgctttatttgggtaaatggtttggctaacgttgtctggtagtaaggtggaatacgtttggtcctagcctttctattagctcttagtaagattacacatgcaagcatccccgttccagtgagttcaccctctaaatcaccacgatcaaaagggacaagcatcaagcacgcagcaaaaaaaaaaaaaaaaaaaaaaaaaaaaacggcccccccccggggggggacc

SEQ ID NO: 47874 - DNA, 434 bp, Homo sapiens
gccccccctcgagagtacttctagaattaattaacgcgggggtcacttgcttctttccgtaagtggtcaaatttaaaggaaattttgtttcttggatctaaaaatctgctattacacaggtcaccgtgctctgtaattaagaccttccaaagaatcattaaacatatgagtaactgtaaaaaagacaattcttactgccttttatgaaacacatcattaaaaattctgaggcagttaacttttcatttagtcagatttctttcatattaatttttcaaccaagtcccgtattattaagaatattgtatttatgaataagtcaactttaaactataaaatatcccccatactaataatatgcatttcttggtttctaatatatacttatacataactatatatgtactttatacataactgaaataacttttatg

SEQ ID NO: 47875 - DNA, 452 bp, Homo sapiens
aaccctcactaaagggaacaaaagctgggtcccgggccccccctcgagagtacttctagacttagttaacgcgggtggtgacgggtacatgctggtttttgcatgccctcgactggaatatggccgcaccctgtcagactacagcatccagacagatgttcaccctgcacacttggtctctctcctctcatatggtggtatgcgcatatatgtgaataccctgacagagcgcaaccgtcaccctggactgtagagcccagtgttaccaccaagacggtcaaacaggacgacagacgtacctgcccgggcggccgctctaaaactagtggatcccccgggctgcaggaattcgatatcaagcttatcgataccgtcgacctcgagggggggcccggtacccaattcgccctatagtgagtcgtattacgcgcgctcactggccgtcgttttac

SEQ ID NO: 47876 - DNA, 512 bp, Homo sapiens
agcgcgcaattaaccctcactaaagggaacaaaagctgggtaccgggccccccctcgagagtacttctagaattaattaaggcgggtgagatgaaattacaacttgaaaatgtcatcaaggaaaatgaaaggtcttttgaagccagtctttaaaatctgccttcacctatttaacggtaattcagtcatgtctcatgagtatgtttattcctagtacaataggaaagtgtaaaaaaatggattctaagtttattaaagacacttttggtaacttgaaagtgttaatcaggttttaaagtgaactctactaattatgtcattaagaaacatcctacttttaattatatattgtggctaaggactacaaaatcaaaagaatgtattatttttaaagaaaataccttatatatacatggacaggtttaaataatggaaggtagcaatggtgtggattatgtaaaagtatacaatttcagattactgaattttggaaaaattttaatacttacatt

SEQ ID NO: 47877 - DNA, 508 bp, Homo sapiens
agcgcgcaattaaccctcactaaagggaacaaaagctgggtaccgggccccccctcgagagtacttctagaattaattaaggcgggaggatgccattccaggctggttcattctgccagctgatgggctctggttgcatgctgagggcaggctgagtgtcctcctgacctggggctggtgtccgagagcaaatatccatgagggagcaggatagacactgtagtatcttttgtagctgagtcttggaagtcacctacggtcattctcacatatggtggtcacaccggtcaggccaggtcagcgtgggagagaccaggagtgaacaccaggaggtgggttcctggggatcccattgtctttatggtgtcgagctgaatccatgagcagagcctctcattgggtcaaggcttcttcatggtcttcacgaacctcttagagctttcttcacagagatgtggaatttttgaaagcttaattctaagtatatttagctcttcatgtccatggg

SEQ ID NO: 47878 - DNA, 340 bp, Homo sapiens
acaaagctgggtaccgggccccccctcgagagtacttctagaattaattaaggcgggtgactgaatgaagtaaaaccctagagagacccaatttaaaattgaagaaatgagatgccctgggtatagagagctatcacaattgacattttcttgagggaaaaattgggagaaaaacataaaataagtacctatatataaagccgcccccccccgggggggcccccaacccccctccttatggagttatgtactcgcccccttgaggacgagtttttatatgtgggacactaaatattaagctatttagaggaataaaaaaaaaaaaaaaaaaaaaaaaaaa

SEQ ID NO: 47879 - DNA, 476 bp, Homo sapiens
gcgcaattaaccctcactaaagggaacaaaagctgggtaccgggccccccctcgagagtacttctagaattaattaaggcgggggcctctctgggacccttcccttgttatctacctaaggcaagctaactaactcctttcagtatatgaggtaaggcatatattaattatcttgatctggccaccccacaatgtatacttatatcaaaacatcatgctgtacaccataaatatatacaaattttgtcagttaaaaaaattaaaaagacattgaaaagaagcattaaaaagttataattttatatgctggcaatgaataatctgcaaatgaaataaaggaaaacctttcatttacattattatcaaaaataataaaacatttataaatacatttaaccaaggatcactgaaacccacaaaacattaccgaaaggaattaaagaagacctacataatgaaaaggcatccactattca

SEQ ID NO: 47880 - DNA, 381 bp, Homo sapiens
accctcactaaagggaacaaaagctgggtaccgggccccccctcgagagtacttctagaattaattaaggcgggagcacgaaccttctatttcctgtccttggagttatgtgtgaatatagttgggggtaggagacaggaagtagagaaacagacactcaaattgcaaagaaggaaatagaaggttcgtgctcccccttcccgtgtgtgtgtgtgtgtttgtgtgtgtgtgtgtgtactatgtattttccttttcctatttggccacgaataaggtctggcccactacccaagttttaaaaatattccctcctgctacaacaaaattaccttaggaaaaaaaaaaaaaaataattaaaatgggggggcccccccccggggg

SEQ ID NO: 47881 - DNA, 495 bp, Homo sapiens
ctgggtaccgggccccccctcgagagtacttctagaattaattaatgtgggtaggcctaggattgtgggggcaatgaatgaagcgaacagattttcgttcattttggttctcagggtttgttataattttttatttttatgggctttggtgagggaggtaggtggtagttagcagtgtgtcaccttttaacatgtccagagtaaatacattagaacccaggaaatattgttagaaaactttgtaattagttgtgtgtattaaaatttttaaaggaactgtgcaaaaataaaacaaaaatattaatggacccagtgatttcaaaacaaccagaaaaaaaaacctaatgaaatatgaaatattactaatccacaaggaacaacatatataaaaaaaaaaaaaggcggccgccaccgcggtggagctccaattcgccctatagtgagtcgtattacgcgcgctcactggccgtcgttttacaacgtcgtgactgggaa

SEQ ID NO: 47882 - DNA, 474 bp, Homo sapiens
accctcactaaagggaacaaaagctgggtaccgggccccccctcgagagtacttctagaattaattaaggcgggctgttagtgttgtaaactacatgcgctttaaataccttttaccgagtgctagagccgttcatcaccaccccacgcagaatttcagctgcttacgttgaacaaattcaacaagtttatcctcaagtttatatgcagcaacaaaggtctatgaatttgggctcataaaactcaggcgaattaaagaggaaacagtcaaaaaaaaaaaaaaaaaaaaaaaaaaaaaaaaaggcggccgccaccgcggtggagctccaattcgccctatagtgagtcgtattacgcgcgctcactggccgtcgttttacaacgtcgtgactgggaaaaccctggcgttacccaacttaatcgccttgcagcacatccccctttcgccagctggcgtaatagcgaagaggcccgc

SEQ ID NO: 47883 - DNA, 639 bp, Homo sapiens
ctggccgtcgttttacacccgggaacaagtgttacctttgattctggccgggcctttcctttagagaacaagtagaataattaatgcgggctgtcacagacccctctttaaacactggtaagacctttgtataaatctaacataatcattctacttatattaattacatacaattgttttaaattcctatgaagaaagaaaaaagtagacttgcataaattattctaagaacatgagagaaaaaataaactggcagggccagatctatttctctgttgataaattagaatcagtatatgttttctttgcatatagttatataatcaagggaattatggaatatagcccattgacccttttatgtgggttataatagagatggatgatgtatattggggcagaggaattgggtcaggatacattaaaaaaactgaatttcttgtcttcttgtcttccaaaaagtgctatatttttaaagctcagtttcttgatgaaagaaataactttctgattgaggaacttggttttcatgtatggtaagtgttcatttaactttttgtgaaagatgtacataacccaataaggactaattaattatgtactactaaaataataactctttttctttttttttttttt

SEQ ID NO: 47884 - DNA, 367 bp, Homo sapiens
aacaaagctgggtaccgggccccccctcgagagtacttctagaattaattaaggcggggacttccagcctacagaactgttaaaaataaatgcttgttgtataagctacccattctatggtattttgttacagcagcccaaactaagacaataatgttttatgtatgaaacacaatatataattcaatatacattatacatgtttcacatatatatatatattttttcagatacatttaatttcaaaattttgagttgacatctaattgttcatatcaggctcagttgttgatatgagctgctgctgtcatttagtgagtggatgtcaagaaagttgctaaacatccctaaatgccccaggagagtc

SEQ ID NO: 47885 - DNA, 409 bp, Homo sapiens
acaaccctgactaaagggaacaaaagctgggtaccgggccccccctcgagagtacttctagaattaattaaggcgggggagggaaagaaaacaaacagtttcagaattgaataggcaagtgactgttttaaagattaagtaataaagatgtcttatctagaaaaaaagaaaaaataaaataataaagaaaaaaaaaaaaaaaaatgggccgccccccccgggggggggaacctcctccccctaaaggagttctttatgccccccccccaggggagcttaaaaaaaaacttcatgtaatatggaagtttgaaagaagttaaccaaattttccagaaggcgaagattataccatgtacatatccttgaatctaggaattttatgcctagaaatttaaccgaaaaaaaaaat

SEQ ID NO: 47886 - DNA, 447 bp, Homo sapiens
tgggtgccgggccccccctcgagagtacttctagaattaattaaggcgggggaaggacagagaaagaacagacaagagctagcattatatctcttctggtggcttccagacagactgccattcttctcaatcaacccttcccttctttcttctttttcttcttcaccaaattccaggatacctgggtaggtgatgaacatgaggagaaaggagaaacggtaaatccacccaagcaggaaggagtaatttccaactctatcccccattctcctcctatccctcaaccccgacatcattaccgggttttcctcttaaaaaaaaaaataaaaaagaaaaaataaaaaaaaaaattttttattagaaaaaaataaaaaaaaaaaaaagaccccccccccccgggggggccccacaccccccctataggggtgtgatatccccccccccccc

SEQ ID NO: 47887 - DNA, 474 bp, Homo sapiens
aaccctcactaaagggaacaaaagctgggtaccgggccccccctcgagagtacttctagaattaattaaggcgggagttagagaccagcctggccaacatagtgaaactccttctctacctaaaatacaaaaaaaaattagccacgcgtggtggcccatgcctgtaatcccacctactcgggaggccaaggcaggaaaatcacttgaacccaagaagtggaggttgcaatgagctgatatcttgccacagcacatccagcctgggcaaccgagcctgggtgacagaatgaaaactatgtctcgggccccccccctgggggaagcccacctccccccgtaatgggtaattataaccccccccgagctgctgtagattaacagaaatgccccaagatcaacacacaccgttagatagtacttttatattatcggaataagcaaaataagagttaaattaaaatttcattaatagta

SEQ ID NO: 47888 - DNA, 203 bp, Homo sapiens
gggtgccgggccccccctcgagagtacttctagaattaattaaggcggggtgatatgacagcataacactaataattgtatctacattaaaatgacaaacgtgatactgctgcttgtcatattagaaatgaatgatggattaaagtgagagacttagtttattcaggaataagagcaaaaccaaccacatcaaaaaatgtatt

SEQ ID NO: 47889 - DNA, 440 bp, Homo sapiens
ccgggccccccctcgagagtacttctagaattaattaaggcggggtttaagctcctattatttactctatcaaagtaactcttttatcagacatttcttaggtttgagggggaatgtatttcaaggtatgataacaaagatttggctacagcaaaactaaatactcaatgttaaaaataacagaaacaaaacaaaaaggcaaataaacagaaaaatacttgcaggatacatgagagacaaaggcttaatgtctttactgtataaagacttaaaaaaacagtggaaaggcagacaaataccttaagagaaaaacaggccaaggccaaaaatcagggaactcatgaaagaagaaaaacaaatttccattaaacatattttaaaatggcatacctggctaatattcaaacaaacacagttttaaacaggaagattcccctttt

SEQ ID NO: 47890 - DNA, 536 bp, Homo sapiens
ctggccgtcggtttcaatcacaggaaacagctatgaccatgatgtactggccgccgttctacagagtcaggaaacaattattaccgtgggagaatggcttgaacccgggaggcagaggctgcggtgagcggagattgcgccaccgcactccatcctgggccacagagcctgaacctgtctcataaataaatacagttgtacaaacaaatcaaactgaagtacagaaagaaaaaagcttgcagaaagtaagcagagcctcggtgagctgtgagaaaatctaagctaaggaacgcacagggagctggacagcaggaagaggagaaaggagagcacaaaaatactggaagaactgtctgaaaattttccaaattcgatgcaaagtataaaccaacagttcaaagatgctcaacaagttccacgcaaaatatacacaaaaaaatcacaccaatacacatcataaccaaactgttaagtgccagtgacaatgagaaatcttaaaagcataaaaaaaaaaaaaaccccccaaaaatattttt

SEQ ID NO: 47891 - DNA, 344 bp, Homo sapiens
aaccctcactaaagggaacaaaagctgggtaccgggccccccctcgagagtacttctagaattaattaagagcgggggggaattttttttaaaaaacaacaaaaaaaaaaaccttccaaagtggggtttctaaataaattttgtggggttaaaaaacaaaaaaaaaaaaaaaaaaaaaaacccccaaaaaaaaaaaaaaacaaaaaaaataaataataaataaaaccctcccccccccccccgggggaccccccccccccccataaataatcaattctcccccccccccccggccctttttaaatgctccttaagggtgaacgtggccccattttcggcacatg

SEQ ID NO: 47892 - DNA, 203 bp, Homo sapiens
aaagatgggtaccgggccccccctcgagagtacttctagaattaattaaggcgggggggaagtgatggtgtggccaggcagttatagattaaaggcctgtgagtactgctgaaaaaaaaaaaaaaaaaaaaaaaaaaaaaaaaaaaaaaaaaaaaaaaaaaaaaaaaaaaaaaaaaaaaaaaaaaaaaaaaaaaaaaaaaaaa

SEQ ID NO: 47893 - DNA, 397 bp, Homo sapiens
ctggccgtcgttttacacacaggaaacagcgtatgaccatgatgactggccgtccctttccacagaggaatcagaattacttgagcggggcgtctcttccctccaactagggcacctgaagggctaagtgttccaagacagcagtgtcagcaaaggctgcgcagatttgaggagtgggaccggcagagctggatgaaacctgactatgctgaaggggaaatggagaccccgggaggggcagggacctgctgagtgcctcccccaggcagtagctgacctggaccgcatcccggtactcctgctgagagatcctgactaatacgccaaggcccagggctgcatgcccaggactcaggaagagtctcgaagaatcctctgcacacaaaagcactggtat

SEQ ID NO: 47894 - DNA, 485 bp, Homo sapiens
accctcactaaagggaacaaaagctgggtaccgggccccccctcgagagtacttctagaattaattaaggcgggtattattatccccattttgcaaatggagaaactgagatccgagagatcagctgattaggccaagattacagaaaagagtaaggccagacatgaactcatatctgagtctatgtccagtggtctttaaaaagatcaactctattaaaaacacacaaaaaataagtattacatagacaggaggatgagtagctgtatcaggcaaataataataataatgatgaaagtttgatagtgattttaaaaactgaaaatagcatctctatacctttagtgactcagagtctcagaataaaaaaataatagaatggccaggcgcagtggctcacacctgtaatcccagcactttggaaggcgaaggtgggtggatcacgagatcaggagatcgagaccgtcctgactaacaccgtgaaa

SEQ ID NO: 47895 - DNA, 226 bp, Homo sapiens
acaaaagctgggtaccgggccccccctcgagatacttctagaattaattaaggcgggcagatcacctgaggttaggagttccagaccagcctggccaacatggtgaaaccccatctctacgaaaaatacaaaaattagccaggcgtggtggcaggcgcctgtaatcccagctactcgggaggctgaggcaggattgaacctgggaggcgcaagttgcagtgagccg

SEQ ID NO: 47896 - DNA, 519 bp, Homo sapiens
  misc_feature 310: n = A,T,C or G
cagcgcgcattaccctactaaagggaacaaaagctgggtaccgggccccccctcgagagtacttctagaattaattaaggcgggtcattcttcaggtaaaattataaagcttagaactgtgaactaaagaatgacccgctaaagttgagtttattttactgcttatcattactcatatttgtacccactaagatcaactacaggaggcttgtagtttatcattagaaacctagatagcccataatgaaatagtatccaaaatatcatatagcaagtggctacttttaaagtaaaagccatcttttctcanaaaaaaaaaaaaaaaaaaaaaaaaaaaaggcggccgccaccgcggtggagctccaattcgccctatagtgagtcgtattacgcgcgctcactggccgtcgttttacaacgtcgtgactgggaaaaccctggcgttacccaacttaatcgccttgcagcacatccccctttcgccagctggcgtaatagcgaagaggcccgcaccgatcg

SEQ ID NO: 47897 - DNA, 477 bp, Homo sapiens
aaaagctgggtaccgggccccccctcgagagtacttctagaattaattaaggcgggtgtgctcttttagctgttcttaggtagctcgtctggtttcggaagcgtcagtgtttccatgttatggatctctctgcgtttgaataaagactatctctgttgctcaaaaaaaaaaaaaaaaaaaaaaaaaaaaaaaaaaaaaaggaaaaaaaaaaaaaaaaaaaaaaaaaaaaaagcggccgccaccgcggtggagctccaattcgccctaatagggagtcgtattacgcgcgctaactggccgtcgttttacaacgacgtgactggaaaaaccctggcgtaacccaacttaatcgccttgcagcacatccccctttcgccagctggcgtaaaagcgaaaaggcccgaaccgatcgcccttcccaacagttgcgcaacctgaatggcaaatggaaattgtaagcgttaatattttgttaaa

SEQ ID NO: 47898 - DNA, 574 bp, Homo sapiens
acaagggaacaaaagctgggtaccgggccccccctcgagagtacttctagaattaattaaggcgggggagattttacttacacctggtctcctggtacacaataatatctaatattcttttcattgttgtcttctttttcttcattttgttgttgttattcctcacttatcttccctgcccctagaaaatccacatataaagtaaacccctcccaccaaatatatccaattttatgagcagcatagctattgctgctgacaaatattcgtaaagctcacgtatcgcataacgcaaaacttctctatttaaggaatagatactattggggtaggaacaagtacagcagaagatgagcaaatgtcttaaataaaagtttacagtttattattatttctcttttttaaaatatcttctattaaagcctatttaccaccatcagtgatgcttcccccacggcgtttacagactctcctgcggcaggcggtggaactacaaaaggatcggtgcctatatcacaataccaaacttgataataatctagattctgtgtctctgcttatagaccatgtttgt

SEQ ID NO: 47899 - DNA, 498 bp, Homo sapiens
acaaaagctgggtaccgggccccccctcgagagtacttgtagaattaattaaggcgggggaaagagagagctcctttcgccatgttttaccagtctgctgttataacctcttaggttgtatcctttaatttccagccttttaggttagtttctgtaacagaacaagtgagtctgggatgaagtcctcaaagtacttcaaatggtaattgttttgtttttgtaatagcttaacaaataaacctaggttttctataaaaaataaaggggcgttaacacctaattatacaccaaaaaaatttaaaaaaaaaaaaaaaggcggccgccaccggggtggagctccaattcgccctatagggagtcgtattacccgcgctcactggccgtcgttttacaacgccgggactgggaaaaccctggcgttacccaacttaatcgtcttgctgcacatcccccttttgccagttggcgtaatagcgaagaggcccgcaccgatcgccc

SEQ ID NO: 47900 - DNA, 587 bp, Homo sapiens
cctgaataaagggaacaaaagctgggtaccgggccccccctcgagagtacttctagaattaattaaggcgggtgtggccatctttatttttagaatctgagtcactgttgttgatataacttgttcagggctacaaataaatggctagtgggaccaggaatcactgtatattcaccccattcctaaaatttatttcttacctgacgctatatacaattataacagataggtgaaactgtttcaaatgaaacagctttttttttcagatatttaacagtttttcttctttttttgaaggcacgctatttcttagaagaataaataaaataaacattatgattgaatatacattataaagactgaatgcaaattattttacatatatattttaataaaagagacatctaaagtttataagaattccatcagaactcacaaatgcaaactgaatattagccttcaaagtagctatctttaagagattgcatatttattccaattaaaaactattttggaatctattttggaatggcctttagcatcagaaaatcacatgaaaacagaccttcaaacaagtaaatagcaaa

SEQ ID NO: 47901 - DNA, 468 bp, Homo sapiens
tcaataaagggaacaaaagctgggtaccgggccccccctcgagagtacttctagaattaattaagggggaacagcaatcacattgatcaatatttcaaaatctactcattcatactttgagacccataaagtactatttccttcttctcttcctacttgattggctgctgcttctcagtctcctttgttgggtcctccttacccttttttatgtcatccaaaggaccaccaggatggctagatagtataaaagaaagttggccggcacagtgactcacacctgtaatcctagcactttggaaggccgaggcgggtggattgcctgagctcaggagtttgagaccagcctgggcaacacggtgaaaccccatctctactaaaatacaaaaaattagccaggcatggtggcgtgcgcttgtaatcccagctactcaagaatctgagacaggagaatcatttgaaccctgg

SEQ ID NO: 47902 - DNA, 331 bp, Homo sapiens
aaccctcactaaagggaacaaaagctgggtaccgggccccccctcgagagtacttctagaattaattaaggcgggatggtctcgatctcctgacctcgtgatccgcccgcctcggcctcccaaagtgctgggattacaggcgtgagccaccgcgcccagcccaagtaatccatttttatctgccatctctctccattgatttgtgctgcctgcatttattgtatttttgtgtctaacttgtctcatagccctcaccgccccattccatcctgttgttcaacctctgtctctttatgttaactggatttctgcattaaatgactgccccctt

SEQ ID NO: 47903 - DNA, 548 bp, Homo sapiens
aaccctccctgaagggaacataagctgggtaccgggccccccctcgagagtacttctagaattaattaaggcgggctgttctgttctaattagcatttgcctggaagagcaccatgttcaccattagactaggacttgtttctctgggcattataatcattcctcaactctgacaatcgttcctaatctcacttgcattactttgaaattccaacctcaaagactccccgcaaactggtgtcaccatctctcttcctgctggtgccatcattagtacccagggaaggccctgcttgccttcagcttacttaagagtatatggctagggagttatggatccactgcacagttgttctgtgaccagaggaattaacccatctgtgcctagcattccattattggaacactaagcttgtgggagtttatattctactgttcaacctcatcgccaaggtctgatctttcacacacaagaaaaattggcaacctccggcataagtggatcaaaaaaggcctgaaagtcatcacagaagctttttactaaatgc

SEQ ID NO: 47904 - DNA, 515 bp, Homo sapiens
gcaattaaccctcactaaatggaacaaaagctgggtaccgggccccccctcgagagtacttctagaattaattaatgcgggggaatcagaggcaatgagcccgtatatacttcaactcaagaagactgcattaattcttgctgttcaacaaaaaacatatcatgtaaatagtggtttcttggcaatcctttgttccatgtgttttgtggcttcaggagctgggggatgtagctgaataacttataccagtgattctcgacagggtatgaatataagtgacaaaatcactggagaattttctacaagtgtgcccttccctctcctaagctgagtcaaagttattgatgaatgtatgtatatatccctcaggtgactgggtatacaagatgttgagaatcactggtgttatatcccaaccggtatctataatattgaaaacaaaaatcctattgaaatggttagctgccatcagcatggagtattggaatacagtgtgatattacaaagaaaatgta

SEQ ID NO: 47905 - DNA, 674 bp, Homo sapiens
taaagggaacaaaagctgggtaccgggccccccctcgagagtacttctagaattaattaaggcgggggaaggctgtgtgaccctggaaaagtcacttcactattctggcctttgtgtactcatgagttaagaaagggagaaaaggttgggcatggtggctcacgcctgtaatcccagcactttgggaggccgaggcaggcacttgaggtcaggagtttgataccagcctggccaacacagcgaaaccccatcttcatgaaaaatacaaaaattagctgggcgtacacctgtaatcccagctactcggaaggctgaggtaggaggatgacttgagcccaggagctgggggatggatgggatggatagcatggatggagagcaatattgcagtgagctgagattgtaccactacactccagcctggctgggcaacagagccagatcctaaaaagacaagatgacaagaccaaagacaaagaccaagacagaaaagaaaagaaaagaaaagaaaagaaaagaaaagaaaagaaaaagggagaggggccatggctagatgtttaaggccactaccagatgtatacacatttctcaagttcaacctgagagaactgattgaaaaagaaaaaaaattctaaaagacataagcaaattttctaaacatttctctgttctta

SEQ ID NO: 47906 - DNA, 453 bp, Homo sapiens
gggaacaaatgctgggtgccgggccccccctcgagagtacttctagaattaattaacctacatatatttgtgtctgcaacaaaaaaggaaaaagagaatgaagaaaacaagaaaaataaagagaaacgaaaaagcagaagacacaaagaccagaaagctagaacagaactaaaataagatcatgcatgtcacaaaaaacagaaggaaaagaccactgctcacaaaggaactgcaactttagcgatgtagtcctcctgctttgccccattttacacttgaggaaatggaagcttagaatggttagataactgctcaaggtcgcccagtttattagtggtcatcaggattagaatctaagcctcctgagtcatactttggtgctctttccataacagcatagttgtaccgattacattaatggtagtaaatgatactttaaaaaggattccatag

SEQ ID NO: 47907 - DNA, 567 bp, Homo sapiens
aaataaagggaacaaaagctgggtaccgggccccccctcgagagttcttcttaaaattaattaaggccggggaaaaaaattaaaaaatataaaaaaattataagatcaaaacattcttttataatatcaaagatgaatttaaacctgaaaagtatgaagcccattaaaaaagacaagctaggaaacaaaaagctaagggcaaaatgtccaaattttaccttgcaaacagaaatggcccgccccccccgtgggggggaatcaaatcccctttatttgctcatgtataacccccctatgatgccggttatttaacaagctgtggatgggtttccatagtcttcctttctgtacattgctatatcttcagtcctttggagcaagtggacctaacaagttgagcaaaatgaatatttggatccatgttcctcttgtgaccctgagtcttcatgcaaggagatctgaagctgaacaatgaaaatcttcagcagaaatagaaatggccgtggattgtaatagacactgaaattctgactttctgaatttaaatgtagaataaattttaccaac

SEQ ID NO: 47908 - DNA, 473 bp, Homo sapiens
ataaagggaacaaaagctgggtaccgggccccccctcgagagtacttctagaattaattaaggcgggcacataattttgcaattgtatttttatttatattacacagtaagaaaaacagaatgttctatatttatagtcttcctgttacaaatatgcgattagagcttaaagagtcatagtatcagaattagaatgttaatattcccactcaatatactgaggtctcattttcattatggtgggtttactaactgccccatatacttcgcagggctgctttgaagctaaaatgagatcattcatatgggatcacattaagctgctagaaattagaaaatgtacatgagatagtataaattttacagtcactaatttaagtttcttttcattagacgctgttggaagctctgactgtggcagttgttggtaagccgtaactgcatttctatatgttataataactttttaatgt

SEQ ID NO: 47909 - DNA, 464 bp, Homo sapiens
ccttcctaggaggaacatatgctgggtaccgcgccccccctcgagagtacttctagaattaattaaggcgggggaatcatttaggtaggagactgtgccaagcagtattgggaatgaagagaaatcagaagaagtattgacaaggacaaatcaaatatctgactggatatggaattgaaagaggaaatcaatgataacaaggttcgaggatcagttatgctgcaggtctaccttgtcttcagtattttattgaagtcattcctataacatctgtgctagtgcttgcttcagtagcacatatactaaaattggaatgatacagagaagatcagcaaataaaaatttaagtacaaatttaaaaaaagaaaaaaaaaaaaaaaaaaaaaagggcggccccccccggggggggcccccattcccccctttaggggggtattttacccccccccttgggcgggttttta

SEQ ID NO: 47910 - DNA, 494 bp, Homo sapiens
aagggaacaaaagctgggtaccgggccccccctcgagagtacttctagaattaattaaggcgggtgtctgtagacccaactactcgcgaggctgacgcatgaaaattgcttgaaccctggagcacaggttgcattgaacctatatcacccaattgtactccagcctggaacaggagcgaaactccgtctcaaaaagggcctggccaacaggggtcttaggcccctgcccaatgagagtttccttcccggcccccagggaaaccatcaacccccccagaggtgatagctgatgaagagcggggatttggacgagagacacaggatgagtaccggggggcagccccgtgatcaacaactgctgcaagaggggccgtttgttcgactcgctagtcttttgcggctctatgcggtactaaagagcataagacagaagatacaaaaaccacaaaaagtagccgggcgtggtgctgcccgttaataatcccagctactcg

SEQ ID NO: 47911 - DNA, 489 bp, Homo sapiens
gcgcgcaattaaccctcactaaagggaacaaaagctgggtaccgggccccccctcgagagtacttctagaattaattaaggcggggaggggttaactaaccacagtcaaagcatctagaaaattagagaagagaaccatatatgtgatcttggaggtatctgaggtcacattccttctctttaggtttctttactaagataaggaacattataaagattcagaaactatattacctttaattgttgctgcaattcgctattcaatctggccaaaacggtgttggtttccttattacgtctaattgatgcctgaatagctttcttatctttcccaacagatctgagaagataaagaaggcaaaaaaaacccataaccttcatttcttatcttaaatcctctctattccttcctgatctatttctaaacatgagaagcaaaaagagcatctttttccttactagcacagctcaacctcacttgctcagttg

SEQ ID NO: 47912 - DNA, 234 bp, Homo sapiens
acaaaagctgggtaccgggccccccctcgagagtcttctagaattaattaaggcgggagaattgcttgaacccagcaagcagaggttgcagtgagctgagatcatgccattgcactccaacctgagcgacaaagattccatctcaaaaaaaaaagacactgtgattccattttccactggagtaaaggtaaagattttataaagctaatgttcataaaatgattctaagataaa

SEQ ID NO: 47913 - DNA, 475 bp, Homo sapiens
acccctgactacaagggaacccatgctgggtgccgggccccccctcgagagtacttctagaattaattaaggcggggaggggggagggttaacattgcgcgagatacgttttgtagccgacaagctcttgggtgcgacacaccaacgcagaacatgtgaacctatgactctgtcctgccccttgtgctcatgtaccccaaagaggaaactatgccaaatgtgacttgtggaaatttatttagaaattcagtggatctctatatggaacagtgaataagacaagaacatgtatgtaaaaataaactctctcgcacatgtatggaatagttttgctgaagaaggtgggtgaaaagttgctcacctaagtaattttggaaattgctaaacttgtttcccatgggggtacacgttaataattctgaagccactgtaactgtataatggaattgaaaaaattgccgggcgtggtggctca

SEQ ID NO: 47914 - DNA, 506 bp, Homo sapiens
ctaaagggaacaaaagctgggtaccggcccccccctctagagtacttctagaattaattaaggcgggataagctgataaaggaaggaaagtacacccctccacctcaccacattggcaagggggagcctcggccctgaacagagcagctgctgatgtctggaggctgattttcctgttctctgttctccactggaaaggttgtttacaacaaacctccttgtcaaagtgtgtgaaaaaaaaaaaaaaaaaaaaaaaaaaaaaagcggccgccaccgcggtggagctccaattccccctatagtgagtcgtattacgcgcgctcactggccgtcgttttacaacgtcgtgactgggaaaaccctggcgttacccaacttaatcgccttgcagcacatcccccttttgccagctggcgtaataacgaaaaggccccgaccgatcgcccttcccaacagttgcccaccctgaatggcaaatggaaattgtaagccgtaatatttttgtt

SEQ ID NO: 47915 - DNA, 589 bp, Homo sapiens
ctaagggacaaagctgggtaccgggccccccctcgagagtacttctagaattaattaaggcggggttagaaacctatggcctaggcacccaacactcatcgtacagatacttctcaccagcctgccagcacataacggtcggctgtattgcttcacatcaatcatcgctaccaagtactattgttgactaggcgtgatctatatgctgaaatgttggcctatagacgtaagaggcctcagagaatcgccaggaacacttagcgaggagactcaaactctcctactctgcgagcttgaacgcttaaagctgaatccagtatttatcatacatgcttatgttaacgaacacatatgatcctactgcctatgaccataatacactgttggcgggtatataaatgggtctgacctccacacatgacagtatgacaatatctatcacaatttgaaatgtatgttccctttgattcagctattctacatggacatgctcacacatctacatagggatttacgacagcacattgttactgctcagggtctgaattcttaaaatactggacataacttagataacctatcactcagt

SEQ ID NO: 47916 - DNA, 458 bp, Homo sapiens
taaagggaacaaaagctgggtaccgggccccccctcgagagtacttctagaattaattaaggcggagattccattttgcctggccacctgtggggtattagcttgtggctgtcactcattcatccaaacaatcttgattgagcgcttactatgtgccaggtactggtaggacagcagtgaacaaaatgggatccccgcccatgtggaacttaaattctagctgttgctgcttgcccttgaagccctgagtttgtccaccaagccctttttctgcacccagctcctttcctctctctccgtcaagacctacacaggtctttgggcagcctgaccagcaagtgtctggaaattgagaacacggtattgctggcctaggcctttcctgcttatccctggctcttcgggataaacgtggcttactgtggctctccaggagctgacctctgacttcacttggc

SEQ ID NO: 47917 - DNA, 494 bp, Homo sapiens
  misc_feature 437, 438: n = A,T,C or G
taaccctcactaaagggaacaaaagctgggtaccgggccccccctcgagagtacttctagaattaattaagggggctccatttattcaacaaatatctattgcacatccactatgagctagtcatttaacaaaaattaacaaatatttatcatatgtataaatgaactaatactttttgataattggagcaaaacaatatgcattgatctaattaacatgtaatttgaatctaaactttatgtctagatcactgaaatataagcatattttaaattcagaatgtattcatttacttattcattttttcaacaaatatttattgagtgcctattttgcatcaaccattgttctagttgtgaagagtacaacactgaacaaagcagacaaggtcactttctatgtgtaagtgtacattctagtgaagaagactgaccgnnaaaaaaaatagcaaaaaaaaaagggggccccccccgggggggggccccatttcccc

SEQ ID NO: 47918 - DNA, 299 bp, Homo sapiens
  misc_feature 198: n = A,T,C or G
ccccccctcgagagtacttctagaattaattaaggcaggaatctataactatttatctatctgcatatgtgtatataacatcagagctttaaaatatataaagcaaatattgacaaaagtgaagcaagacatacatagcaacataataattgtagacatcaagaccccatttgcagtaataaatagaaaattaaggtnaaaaaaaaaaaaaaaaaaaaaaggggggccccccccggggggggccccaaatcccccttaaagggagggttttaacccccccccatgggccgggttttaaa

SEQ ID NO: 47919 - DNA, 316 bp, Homo sapiens
cgggccccccctcgagagtacttctagaattaattaaggcgggcaggatagttcagacggtttctatttcctgagcgtctgagatgttagtattagttagtttctgttttagcatgttttactggaaaaagcaatggccaatttgttttaataaatcttaaacatcctatatttatttttaaatattcttctaggttatttgcatgacaagaaggaaaatatgtattttctctgatctttactgtatttattgatagaaggcagagaatgctgaagaaattgaaaagggtgaggttaagagctagcacataaacct

SEQ ID NO: 47920 - DNA, 559 bp, Homo sapiens; identical to SEQ ID NO: 42661

SEQ ID NO: 47921 - DNA, 468 bp, Homo sapiens
  misc_feature 408, 409, 410, 411, 429: n = A,T,C or G
ctggccgtcgttttacaaccctgaataaagggaacaaaagctgggtgccgggccccccctcgagagtacttctagaattaattaaggcggggttatagaaatctagaaaaagttcccaagttacattgtcaacattcagttttgtaaccaacctggaaatggctaatagtttattttagctaccgtttactgaaagtctgtgtggtcagacactctactgacagctttaaatgattggtcttagttaatcctcacaataattcttcaaaatagatgatattatttctgatttttatcaattaaaaaaaaaaccatggactcagggttatgtggctttcatggggacaaagctagtaatgaagtattaatagatattaaaacctgagtctgaatatcctcaaagcaaannnnaaaaaaaagaacaaaaanaaaagggcccccccccggggggggccccaattccccctt

SEQ ID NO: 47922 - DNA, 472 bp, Homo sapiens
ctaaagggaacaaaagctgggtaccgggccccccctcgagagtacttctagaattaattaaggaggggcggaatggtctcttttcggacttttgaagattttgtcaggtaagacattgtggaactatgtctgtacaaggggagccatggacatctgtgttttggggtctcatctttctgcaaaatgaataaaggtctcccgaatagccatgagccagctaaaaagatgtaacccttgctgtatatgccgttggagaggtatatatccttgcatttctacctctcattcagattctacaagcctctacttgtagtatgggcctggtcagaaaaaaagaaacaaacaaaaaccatcttttcctgtggagctaacagaagaagctgtctgctctgtgatgagtgaaatgtcaggagaaattaaacataacactagagtgagccccacaagagacaatacatcttttgattaaatg

SEQ ID NO: 47923 - DNA, 497 bp, Homo sapiens
aaagggaacaaaagctgggtaccgggccccccctctagagtacttctagaattaattaaggcaggtcgatagaaaatatccaaacagagaaaaaaatttttttcaacatgtggaacatgataattaagtttaatatatgtgtaattaggatccaaaaagaaaaaaggggcagaatatatgaaaaggtggtaacagaactttccaaaactaaaaggcatccagctagattcaaaaaactctataaacataaagcaacaaagaaaaccacatctgaacacatcaaagtgctttaaaagtaacacagagagtcttaaaattagccaaggaaaaataaaagacacattatcctcagcaagaatatagctaatacattgccttcaataagactggtagctgacttcaacaaaaagaaaggaagacagaaagcaaccaaacattcttaatgtgttgaaagaaaataactaccaacttaaaacttaattcccagtgaaaacaca

SEQ ID NO: 47924 - DNA, 521 bp, Homo sapiens
taagggaacaaagctgggtaccgggccccccctcgagagtacttctagaattaattaaggggcgggggggctctagaaacattgtcctggacacattagtatggcctctcactaagatactgtgatttgcttgataaacactaataaaggaataagaataaaaaaaaaaaaggaggcgccggccaccgccttggctaaatctggacctaccctaatgagttaattttgagccccccacatacaaatcgagttattcacctcccaaagagaggcttcaagcatctgcaggaactgtggcagcagcaggagattagagcgttttgtgccataattccagaatgtgcgccgtagctgcttagttgagacaaggacagggttagattaaatacatagtataatctgtgctgagtgtggtggttcacacctgtattcccagcactttgggaggctgaggcaggtgaatcgcttgagcccaggagttcaagaccagcctgggcaacatggtgagatcccatctctac

SEQ ID NO: 47925 - DNA, 470 bp, Homo sapiens
  misc_feature 430: n = A,T,C or G
accctcactaaagggaacaaaagctgggtaccgggccccccctcgagagtacttctagaattaattaaggcggggaagggtgcatagctgttttagctgagggacgtggtgccgacgtccccaaacctagctaggctaagtcaagatcaacattccagggttggtaatgttggatgatgaaacattcatttttaccttgtggatgctagtgctgtagagttcactgttgtacacagtctgttttctatttgttaagaaaaactacagcatcattgcataattcttgatggtaataaatttgaataatcagatttcttagataaaacaataatatataaaaaaaaagccgcccccccccccgggggggccccagatcccccctttatggagtttttttacccccccctcggggggcttgtttaacaaaatnaacgttggatacagtttaaaataatgggtcatattccttt

SEQ ID NO: 47926 - DNA, 571 bp, Homo sapiens
ctaaagggaacaaaagctgggtaccgggccccccctcgagagtacttctagaattaattaaggcgggggccacttgataagtgaatcaatggggcggactccgaatcttcagtggatccatgttaaggctctttctgcgtacgaataaagactatctctgttgctcgcaaagcaaccaacactttacaacgaaatatgaataccttaccaatccttaataaaggaccaacactagtctaattggcctggtgcaaggaaaaagacagggtatctaaaccgtgacgaatgtctaaaaaaaacatattcgcggagaaaatatctgtaattgtgataaaaattggttttacatctactttaattatgtgtgagaatgttgacttttatcataaggccctctgcattaagttgatcaaataatttttctcctttaatttattaatgtagcaaattacactaattgatattttaatattaatccaactttaccttcctgggataaatagaacttggtcatcacatattaattgttattgcattataatccgttatacattatacattactatattta

SEQ ID NO: 47927 - DNA, 335 bp, Homo sapiens
aaaactgggtaccgggccccccctcgagatacttctagaattaattaaggcggggtaagaaaagctggtctggagttgctgaatgttgcattaattgtgctgtttgcttgtagttgaataaaaatagaaacctgaatgaagaaaaaaaaaaaaaaaaaaaaaaaaaaaaaaaaaaaaatataacaaaaaaaccaaaaaaaaataaaaaacaactccttctcgcccacggaggggctctgcttggggtctaccaaatgaggcctgactaccccccttccctcatcagtcaaaaccagaccatgagcctagagggatagatgacaccgttcagataa

SEQ ID NO: 47928 - DNA, 610 bp, Homo sapiens
taaagggaacaaaagctgggtaccgggccccccctcgagagtacttctagaattaattaaggcgggcggatcatgatgtcaagagatggagaccatcctggccaatgtggtgaaaccccgcctctactaaaaatacaaaaattacctgggtgtggtggcgcgtgcctgtagtcccagctactcaagaggctgaggcgggagaatcacttgaacccgggaggcacaggttgcagtgagccaagattgcgtcactgcactccagcctggtgacaaagcaagactccatctcaaaaataatcaaataaaataaaatattgataaaatttaatttctgaagaccagtgtagtgtcagttatggtgctaggctctggaaatatgaatataaaccaaaaataatattctaaggcccccccctaactatctgaatggactttcttctcagccagggctcttttaaaatgtaacctgagagactggttcaggccatgactgaaagtgggagtcagacatgcctcattatacctttctggcattgacatcaacatagactgtaagtctgataagaaacatttttacaacctgttctctctgaaacctactacctgaaag

SEQ ID NO: 47929 - DNA, 640 bp, Homo sapiens
accctaaataaagggaacaaaagctgggtaccgggccccccctcgagagtacttctagaattaattaaggcgggatggcactagaagaaatagctattgaaaatgatgagtcaatgggagcggcacaccaacatggcacatgtatacgtatgtgacagacctgcacattgtgcacatgttccatacaagttaacgtgtaataataagaaaaaatgaaccacctaacaacagatttgactgaacagctgaaaatatgagttggcacagattctctttagaaacttatggccaaatgtttaacacctatggccaatttggaacttgctccaggctcattaccattctctgcgtttaaccctaaatacctaactactcggggctcacacctgactagactgtgtcatggaaaattaggctgttatgaaacacgacacctgtgctctataatcttatgcaaaagaagaaattcatcaaaagggaccatgtctcttacacacacaggtacatacgcgtgtgcacacacacaaacacacagagaaagagagagggagagagagaaagaaacagggatattctaggacagcgcttacaatgtttacagtgtaagctctgaaaacaaatggactgtgttcacatccca

SEQ ID NO: 47930 - DNA, 480 bp, Homo sapiens
ctggccgtcgttttacacacacggaaacagcgtgtaaccatgatggctgccgcggccctttctcgagagtacttctagaattaattaaggcggggtaagatttgccgagttccttttactttttttaacctttccttatgagcatgcctatctaatgttgctgggaggttggatgtaaatccagttctttttcctatatatgtttgtctgtttctccctttggaagtgtctgtctatatacttggtgctctgaaagctctctctggtgtgtctaggggaggatcctttatctcttccatctggcaggcctcagtgtattcattcaactgcaaaatccgtatttctaagttgtgggaaattttcatttgttattcccttaagtatcttctctcttccatttttttcctttgggagctcctatttgatagattttgaaactttggggtcttttgtttcactttctttcatgttttttgcctc

SEQ ID NO: 47931 - DNA, 534 bp, Homo sapiens
  misc_feature 416: n = A,T,C or G
cctcactaaagggaacaaaagctgggtaccgggccccccctcgagagtacttctagaattaattaaggcgggcagcattatagctaaaataggcaagggatatttcttgaaaaggaagtaagatatatctactgatggcaatgcttgctttttttatcatcaagagttttgtttagatgtcactattcccagaaaataacaagaataaaactgtccatattcatattcactctttgacatgcagatttttaaaactaatgggcccctaggcctattgacattttcagtatgttttagtgttcccaatagaaaatgacctggtatcttgccagggggcccccccccccgggggaaccccccattccccttatgccattactgttgggcccccactgactggcagtttataaaactgnaccacaaggtaaccaaccattaaaaaactctaaatgatatttagttaaagggactcttggtatccagacttaaatttcaggatatgctgaaacaaaccagcattcttaaggaactgac

SEQ ID NO: 47932 - DNA, 458 bp, Homo sapiens
ggaacaaaagctgggttccgggccccctttcgagagtatttctagaattaattaaggcgggaggatcacttgagcccagggtttcgagaccagcttgggcaatatagtgagacctcatctctataaaagaaagtaaaaaatttttaataagaaaaaaagaaaagaaaaaaatgtattaaacaaaatttgaactttgtaacaagatagggtaaatcagggattttaaaattaggttaaaaattctgtctttctttttctctgttggcttcctgtatgtgtctttctcttttttcttatcttttaggagagtgaaatttagtttgttttgctatgagattctttttcatttccagttaaataatgcagctcatcctattgctcctgtaaccagtgggtagggaaacaaaaaaaacaaaaaaaaaacaaaaagcggccgccaccgcggtggagctccaatt

SEQ ID NO: 47933 - DNA, 412 bp, Homo sapiens
  misc_feature 321, 345: n = A,T,C or G
ataaagggaacaaaagctgggtgccgggccccccctcgagagtacttctagaattaattaaggcggggtggtttttttccttcttcctgatacatgttttagatactagaaatatatataactgacaaagcttgatcatgtgttttgtggtgaaaatataacatttattaagaataatgttttatcttttaatattgaaggtaaaacttgatcttcaatttttctctttatagatgttaccagacctaaaagcagacaaccagaggctaaaggatgaaaatggggccttgatcagagttataagcaaactttccaaattanaaaaaaaaaaaaaaaaaaaaaaanggggggccccccccggggggggcccccatttccccctatagagggtgtttttccccccccccccggg

SEQ ID NO: 47934 - DNA, 668 bp, Homo sapiens
ctggccgtcgttttacaccccggaataaagggaacacatgctgggtgccgggccccccctcgagagtacttctagaattaattaaggcgggtggggtcggttctgccctgcagtgagggccttgggggtcactggctgattggtcaccggagctgcaacagagtcacaactgattacccctccacccaagaccctgatttctacagattatggtctctccccaaagcctccttttctcaaaaaaatgccagacctcaattttctaaacaagttgcattttgtatttcaatcgataaaaggtctttgatggcttacaatgcccagccctgctggctaatcttggttgacgttccctttgacaacaatctgcccacaagcctcttaggtagaggtgggtggctgtggccacagtaactacgtaaaacagcatgctgaggagctacgcaggttacatgggctgctggttctcttttcagagaccttggataacaaaaaggaacaatgagctggggacattaagtgtgagcttaatcataacaagaggggattgaaaatggcaccttccactgctatgttgaaagggagtttttaaaaaaaatgccaacaagaaaaaagtgactttaaagaagaaatccaggccgggtgcggtggctcacacctgtaatccc

SEQ ID NO: 47935 - DNA, 537 bp, Homo sapiens
aataaagggaacaaaagctgggtgccgggccccccctcgagagtacttctagaattaattaaggcgggggtggaaattatttgatgcttgttgtagctcagtacagttaaaaactctctgacagttgttgctgctcaacagcccactgagcagcttggaaacagtagtgagctctcttcatggaggcgaaggatctgtcaccagagtgaaggatctatactgttgcaggagccaaagaacagaatcctgcactgggaaagaggttggtcaagatgactttgattataactaccaaattaaccaacatccgagtacttactaagaactaggcacgtaatagatagctaagtgctttatatacagtgtctcatttatttcctacatcatcttttttaatctttagaataagcctggcagctaagaactctggttctccccattttacagatgaagaaactgaggtttattggtaggaaacctcagtttctctaaggtcacacagctggtaagtgatagagccacattcagatcctggac

SEQ ID NO: 47936 - DNA, 178 bp, Homo sapiens
aaagggaacaaaagctgggtaccgggccccccctcgagagtacttatagaattaattaaggcgggagggaggggcggctgctgcatggtgacggcacacggaggcccaccatgacgcgccaccggtgaatgtgcctctggtggctgctgagaaaaatacactgtgcagctcagtgatt

SEQ ID NO: 47937 - DNA, 507 bp, Homo sapiens
gcgcgcaattaaccctcactaaagggaacaaaagctgggtaccgggccccccctcgagagtacttctagaattaattaaggcgggtaaccctttcattttataattaagactattgagtcacaaagaggtcaagcaacttatccaaagttaaaaagatatttattgagactttttaaaaattgaaattgccagactataggaagagatcaagcaacttatccgaggttaaaaaggtatttaatgagactttttaaaaattgaaactgccagagtataggcactttgcgattatttccttcttccactctgaatatttcctgctttctttctttcatggcattggcagtcctgcaaatcaggtctgtgcaaattttgtcatctactatttcatctctaatacctaatatatagccagccaacttcagtgtgtttttttttgctaaggaattactctaaatttgcagccctgtcccgtggcactaagatagtgaaagattttgcatcag

SEQ ID NO: 47938 - DNA, 509 bp, Homo sapiens
ataaagggaacaaatgctgggtaccgggccccccctcgagagtacttctagaattaattaagggggcatatttaaagaagtaccaggagtttaccaagtattgattcacattaaaatgattattaaagtgtgtgtttagcctgaggaaatgtaagtccagaggacagtcatgaggatataagaaacaatggagttggtaaaaatatgctggtaaattgaattacattgatcttaaaaaaaatgcttgtattttttttaagaagagaaaatgacaacaaaacaagatggatggggtacaaggacagttcagtgggttgttaaaacttgttaagggcctccttgtttaagagccaactaaacaaccactattggaaaattttggattgtatatacatgttaaaaaattaaggataaatacacacccacacagggagtgaattttcttgcttccatagcagcagacatttaaacgttaccattcaaactctgagggaaggaaaataggaaaa

SEQ ID NO: 47939 - DNA, 467 bp, Homo sapiens
ctaaagggaacaaaagctgggtaccgggccccccctcgagagtacttctagaattaattaaggcgggggtggagtttagttttaggttttattgtatataaaatcctgcactgaatctgtgtctcctctgttacctacttttgccagtgaaatttaagttttaaaatactttcagaatgtatttttactactgcaagtttttggtctttaaaatgtcaagtagcatctctctctttctctctgtctctttctgtttctctctccagtttttttttttttaatttccatttggactaaaaaatccaaattttttaaaaatctgcccctcttttcttctctcataaagggaattatcccttttttttgttttatgtaagggtatatattcttagtttttcttgaaatcattgtaatgttaactttgttgtttcaaatatctgggggatggcttcattatcttttcaaca

SEQ ID NO: 47940 - DNA, 590 bp, Homo sapiens
ctggccgtgcgttttacaacccggaataaagggaacacatgctgggtgccgggccccccctcgagagtacttctagaattaattaaggcgggcgaggataaccgtaaagataacaagaacgctatgggtaacaacagatatcccaatttatccaaacacattggaggctgggcctagctgcttgacagacgacctgttacagacctattctcatagtgtataggccagagaaaactggcagtgactcgtgttgaggtactaaggagtataacagcttatttaacgtcttgttctccagaacgggcaacgcgtatcaacctgggtcttaatgtaaattttttttttgaaccccatgctggccatcgccttaggtaacctctattattgccaccctgaaaaaaagtcttcctttaaaagagcggtgtaaatatataacaactcttaagccatcttggtaaatttccccaacagtgtgaagttagaattccttcagggtgatgccaggttctatttggaatttatatacaacctgcttgggtggaaaaaccattgtcttcggaaaccttggtgtagttgaactgatagttact

SEQ ID NO: 47941 - DNA, 464 bp, Homo sapiens
tgggtaccgggccccccctcgagagtacttctagaattaattaaggcgggggaaaaggatcaatatctgagtaccttgtttatataagaataacttcttttttttctgcttagggaagcattcagtggagatcttaataaggattgacttttcttggtaacagaattgatatcagtggtacatgacatctatgcagccagacacaaatctgaactcgttggaccctaaataagtgtttaaatatttgttatatttcccaaaatgattggtttgtaagatggttaatagtaacttatgcaaaagtccagaaattaggtgttcttattcactgagaaaagtctgccttaaaaattaaacttttttttttctgatcccaaaaaaaaaaaaaaaaaaaaaaaaaaagggggccccccccggggggggcccccaatccccctttaaggggggttatatccccccccccc

SEQ ID NO: 47942 - DNA, 636 bp, Homo sapiens
cctcactaaagggaacaaaagctgggtaccgggccccccctcgagagtacttctagaattaattaaggcgggggagcgaacgaaacaccattgttagactgactacttactgtccggcgtttgtcatggcgaagtataactattcggcgttggaaaacatctgatatgctctatgaatgagccttctcgcttttcgtcatgttctgcaatgaactatttttaaggtctaatctgaagattattctgcccgctccccgtttctttcacgaattatttcacacacggaccatttttatcaggctcctcaaagacggactatcatgactgtgagtcattatgcctctgacgtccattgaccaactaaacttacacatggtgaaaaaaaagaaaagaaagagaaaagatcccctctccccttcaatgctttgtttctttttttctacgcctgtcccacagtgggatgtacaataatgagtgacatcgtatcctagaactccccttctcaaaattaacaaagaggtattaaaaattaatccaaatttactccattttgagttaggagaactcatatttggaaaagcatcactgggcatgtttcatttcaggactgggatttgaaagcagtgcctggggacc

SEQ ID NO: 47943 - DNA, 649 bp, Homo sapiens
  misc_feature 106: n = A,T,C or G
ctggccgtcgttttacaccccgaaacaaaagaaaccaatactgctgggcgggcccttcctccaaagaacaaatagaattaattaaggcggggggaggcagcaggcnagaaaaaaaaaactttcttttttacacggtgctgccccgtctcccctaaaaatacaaaaaattatcatggcgtggtggcaggtgcctgtaatcccagctacctggaaggctgaggccggagaatgatgtgaacccgggaggtggagcttgcagtgagccgagattgcgcccctgcattccagcctgggcaacagagcgagactccgtctcagagaaaaggatcaaagtaagaattaaggcctacgccccccgggcggggctcccatgtcaccccttgaacaagagcttttcccgacccctattgcgtatttttttaaaaaatctaaagttcaaaagagaatgtatcactgctgacttttattccaatatttggatggagtaagttttaaggtagaattttgttcagtttggatttaatcctttgaaaaataaattccctgtttactggtttgactataaatctctggtatctttacgaagtaaaaactgcaagctgactagcatgttctgtgaatctgccattcctaaaaattttataaacac

SEQ ID NO: 47944 - DNA, 370 bp, Homo sapiens
cgttttacacacaggaaacagcgtgtaaccatgatgactggcgcgccttttctcgagagtacataatagaataacttaatgcgggaagcaaagagttattctagagagaagtatgttgaaaaatacctgtggcttattttcctaatttccaactatacttttgccgatagaaatcaatgagaaagtatagtgctttgccagcctcagacggagaagttacttgatcaagcacacttctaaatatattttaaagtatcattagcgtccaaaaaaaaaaaaaaaaaaaaaaaaaaggggggccccccccggggggggcccccaattccccctaaggggaggagttttccccccccccctgggcgggtttttt

SEQ ID NO: 47945 - DNA, 460 bp, Homo sapiens
ataaagggaacacatgctgggtgccgggccccccctcgagagtacttctagaattaattaaggcgggggcctctctgggacccttcccttgttatctacctaaggcaagctaactaactcctttcagtatatgaggtaaggcatatattaattatcttgatctggccactccacaatgtatacttatatcaaaacatcatgctgtacaccataaatatatacaaattttgtcagttaaaaaaattaaaaagacattgaaaagaagcattaaaaagttataattttatatgctggcaatgaataatctgcaaatgaaataaaggaaaacctttcatttacattattatcaaaaataataaaacatttataaatacatttaaccaaggatcactgaaacccacaaaacattaccgaaaggaattaaagaagacctacataatgaaaaggcatccactattca

SEQ ID NO: 47946 - DNA, 504 bp, Homo sapiens
cctcactaaagggaacaaaagctgggtaccgggccccccctcgagagtacttctagaattaattaaggcgggggagggaactggagcattactcttaaagtcttagggttaaacctcaaaggtcttatagagacatttcctgttcagttcagctattcacttattcaacaaatatttactgagcatgtacaatttgccatacactattataggtgaggacaacagtagtgtaaaaaccagtttgtaccctcatagagtttatgttctagtagggaagatggtcaatgaattatgaggtcagatggtgataggtgcttagaagaaaaccaaactgagatcaggggtgagtctaatcaggaagccctccccttaatttattcatttgttgatgtatctgttcatttatttgtttaatgaaataattgttgatcttaagcaagacagtttactttctgctttcagtgacttatgtaagtgagttgtatgaactcagaactagttttc

SEQ ID NO: 47947 - DNA, 577 bp, Homo sapiens
ctggccgtcgttttacatcccgaaataaggggaaccaatgctgggtgccgggccccccctcgagagtacttctagaattaattaaggcggggacgaggcaatagatcaaacaagagcagcaataaagctgacgtttgctaagtttgagtggtggttcagggagtccactgtgctagtctatatttgtgactaaaaatttccataacaagttcaaaaaagaaaatgtatttaaaaattagaagcagttatcagccaaatataggttaagaaacattagtaaaataaaaatcctttcacttgccgttaaaaataaaaaacagtaaaaacacattttataaatatatgaaatctgagagcctgccaagattgcagagatgtgattgtaaggcacagatgagattttaaacctgggtttttagagattaaaataaaatgtaggatggtttaagcacctacttttagctcttgagaaaacaggtacagtccaaagtgaagctgcctttagtctctagccttcatgttttttttctagtctctattctgaagtccaaatttgttggtttttttggggggtgaa

SEQ ID NO: 47948 - DNA, 489 bp, Homo sapiens
taaagggaacaaaagctgggtaccgggccccccctcgagagtacttctagaattaattaaggcgggctccaagaacacttaaatatatttggctatgaaatttctgttgcaaatttcatggtgcacggtgtgatttgtggctactttctcatattctcatcaaaatatatccagaattgacattctaaaattaattttctgtaccttccattttgttttatatcgatatctattttaagatctatcttagaaaacatcaagtaatgtttaaattctattctacagcccttggcattaccgcataataatcattttaactactggtggtgtactacacttcctaaagaaactgccttagggctccattaaccttccctctacacttatcatcttcacaattctaattctactgactatcctagaaatcgctgtcgccttaatccaagcctacgttttcacacttttagtaagcctttacctgcacgacaa

SEQ ID NO: 47949 - DNA, 533 bp, Homo sapiens
  misc_feature 478, 482, 483: n = A,T,C or G
ctggccgtcgttttacatccggaaatcaaggggaacacatgctggttgccgggcccttcctcgagagtacttatagaattaattaaggcggggacaggaccaggtgcaaggccaaggagagcatagtgaaaaaagtaccgaaaaagacatgagagaaaggatgagagagaaaggaaaaggggggaaatgcaagagaaggaagggaaaggaatggaaggaaacgtcctaggctgggacttttgtcggaaaaatcacctacagatgtgcatctatcggtatgcaaagcatgctctagtttcactcattaaatgcaacacatttcaactcagttactgcctcaagacacactcaattatccgataaaccacaggaaggttgtgtaaaaacatcaatgtggtaagcagtctaaattcgaattctagctaatgtcaacattagctcaaaaggctggctgggttaaatccagaaggaggaaaanaaannaaaaaaaaaaaaaaaaaaggggccccccccggggggggaccccaattccc

SEQ ID NO: 47950 - DNA, 331 bp, Homo sapiens
  misc_feature 304: n = A,T,C or G
cgtcgtttttcaccccggaaaaagggtaacactgcttggtgcccggccccccctcgagagtacttactagaattaattaaggcggggaggcattgtatgcgccaacgcaggggcttctgactgagggggcaggccgagcttgaggaaaccgctagaaattatgattgtgtttgaaagatagagattaatacaactacttaaaaaatatagtcaataggttactaagaattgcttagcgttaagtttttaacgtaattgtgataacttaagattctcagagaaaatatgaagacttagacgagtnttaaataaaaaaataccaaacacatgc

SEQ ID NO: 47951 - DNA, 340 bp, Homo sapiens
gactggccgtgtgtttacaacccgaaataaggggaaccatggctgggtgccgggccccccctcgagagtacttctagaattaattaaggcggggtaagatttgccgagttccttttactttttttaacctttccttatgagcatgcctgatactggcattttgtagatgtggtttgactatttctgtatgtctccatctattgatgagggtcaaaaaaaaaaaaaaaaaaaaaaaaaaatggggggccccccccggggggggcccaccactcccctttaaggggttcaataaccccccccccggggccggtttttctaaggataacagcgcaatcctatt

SEQ ID NO: 47952 - DNA, 215 bp, Homo sapiens
caaagctgggtaccgggccccccctcgagagtacttctagaattaattaaggcagggtagcctgaattgctttctgctctttacatttcttttaaaataagcatttagtgctcagtccctactgagtactctttctctcccctcctctgaatttaattctttcaacttgcaatttgcaaggattacacatttcactgtgatgtatattgtgttgc

SEQ ID NO: 47953 - DNA, 396 bp, Homo sapiens
  misc_feature 292: n = A,T,C or G
tacaaccctaaataaagggaacacaagctgggttaccgggccccccctcgagagtacttctagaattaattaaggcgggaaaatgatggagaaaaacaagggtttaaaaactacctagtgggtactatgttcactgccctagtgacaggttaaatcatgccacaaacctcagcatcatgtaatatacccatgtaaaaaatctgcatattataccccttgaatctaaaataaaagttgagaaaataatgtgtggataaaatgaaaatatcaataaagaggcagagaacctaanaaaaaaaaaaaaaaaaaaaaaaaaaaaggggcccccccccggggggacccccaattccccctatagggaggttttttacccccccccatgggccggtttttaaa

SEQ ID NO: 47954 - DNA, 541 bp, Homo sapiens
caattaaccctcacttaagggaacaaaagctgggtaccgggccccccctcgagagtacttctagaattaattaaggcgggcgcctgtaatcccagctactggggaggctgaggcaggagaatcacttgaacccaggaggcaaaggttgcagtgagccgagattgcgccactgcactccagcctgggcagcagagcaagactccatctcaaaataaataaatacataaaatcctgcattcctagttcactgcccaagagatcagcgttagatggaaaagagtcttttgaggaaaacacaaatacttgagacctgatgaaccacgctggttatcaacaattcagtgaataatagaaaacttttattagcagcatcttaaaaagtagggaaacaaacacccagtctcttgataaaaatgagtctcttgggccaggcgtggtggctcatgcttgtaatcccagcactttcggaggcccaggtgggcagatcacaaggtcaggagttcaagaccagcctggccaaatggtgagaccacgccccccc

SEQ ID NO: 47955 - DNA, 534 bp, Homo sapiens
ctgaagggaacaaaagctgggtaccgggccccccctcgagagtacttctagaattaattaaggcgggacgattgctacagcccacgagcgcgtgaccggcttggacatcatagcgataccttatgtcaagactatatctagaaattggctgtttcaggtggcacatgctagttcttctaggtcctggggaggtctttagtgaaacgatgcttcgcgcctcttaggttgaggctgttctcaaccatcaacatgcggctgaccttgccctttggctacacagccagagcttatctctctgctgacgcctcgagatccacagaagccacagcggtggactctgccaggacggggtgggagaggacctggcctaggaaaggcatctcccatgtgctgggctccataactaactcttttcactaagctgacaaccttttacttcacatccagcagaacttaaaaataatgtgttcttcagaaagagggagtcctggctggtccaaagggagtgaattatctcacctgactgttcacagc

SEQ ID NO: 47956 - DNA, 281 bp, Homo sapiens
  misc_feature 58, 66, 67, 96, 176, 177: n = A,T,C or G
aaagggaacaaaagctgggtaccgggccccccctcgagagtacttctagaggggtgcncagccggnngttaaaacaaaaaaacctaatatttttgngggcttttagtggtgagagaaagtccataagtcgccaaagaaaagtcagataaactagaatacatcaaaggaaatcagcnnaaaaaaaaaaaaaaaaaaaaaaaaaaggggcccccccccgggggggaccccaaatcccccaaaaaggggggtttaaccccccccccccgggcccggtttaaaaa

SEQ ID NO: 47957 - DNA, 375 bp, Homo sapiens
tactaagggaaacaaagctgggtaccgggccccccctcgagagtacttctagaattaattaaggcgggggagattgtacaggctttactgtctatcggatgattggaacaagatcgctaatgctaatattgtcatagagtatgcttatatattgatggaggacttgttcagactagttgcggagaactattgcatatttgcgtattctagcctaacattggataaattctgtgaccacagaatcaaggttttccgataataaatagggactctctggtgcttgaaattctgttcaagtgttttgactcatcatcttctactctttctattactgccttttgcctggcttgttttgtctctttgcaactgattttg

SEQ ID NO: 47958 - DNA, 457 bp, Homo sapiens
  misc_feature 412, 413: n = A,T,C or G
cctgactaaagggaacaaaagctgggtaccgggccccccctcgagagtacttctagaattaattaaggcgggcgggtttgtgtgaacaggcacgcagctgcaggtaagagacgcttagggtatccgcgaagaagaccgcggagtcaccttagtcctatgtttcccagctggctgtggaagtaggcacgatggaatggtttgctcatgcgcgcccttaacggtcgcgtgcccttaagaccaggtacgcggaggtggccctttgaaataggattcgcaacgcatttattcattagagaaatacttattggttgcttgcaatattctgtagttaacaccatccgcaaagctaggaccctgctctcatgaagcttgcgttccagtgagtgtggctattagcaacactaccccaaannaaaaaaaaaaaaaaaaaaaaaaagggggccccccccgggggggg

SEQ ID NO: 47959 - DNA, 324 bp, Homo sapiens
acaaagctgggtaccgggccccccctcgagagtacttctagaattaattaaggcggggaggtgttcaaagacatctccctcagtgcggatttatatatatatttttccttcactgtgtcaagtggaaacaaaaacaaaatctttcaaaaaaaaaatccggacaagtgaacacattaacatgattctgtttgggcagattaaaaactttatagggacttgcattatcggttctcaataaattactgagcagctttgtttggggagggaagtccctaccatccttgtttagtctatattaagaaaatctgtgtctttttaatattc

SEQ ID NO: 47960 - DNA, 454 bp, Homo sapiens
tcactaaagggaacaaaagctgggtaccgggccccccctcgagagtacttctagaattaattaaaccaagctcacccaagatattctcccttttgatgaactcaaaagcaactcaattcagttaagtacatctgccaaaccctttcatcttttccatattctattagctagaaggaagatagagttcaattcaaggaaagggggttacataggaggcagagaggctgggagccacccaagggtctgtcagccgcagtgaaatgactgggagaaagataatttgattttggtatggagagggagccatagataaatatgcctactgatctcaaggaagtcaaattaagacaaacataaaggaggccaggtgcactggctcacgcctgtaatcccaacactttgggaggccaaggtgggctgataacctgagatcaggagttcgagagcagcctgg

SEQ ID NO: 47961 - DNA, 493 bp, Homo sapiens
  misc_feature 87, 88, 98, 120: n = A,T,C or G
ccctcactaaagggaacaaaagctgggtaccgggccccccctcgagagtacttctagaattaattaaggcggggggaaccagtagcnntcaagtcaancaatattttttatccattgttnactattaatagaagcaaatgtaaactcagttgtcactgattttagaaagttcagatccactatctcttttttctaattcctaaatccataaagcactgaaaattcaaagttttttccacaacacaaaaaatgatgatgttcctgacagtcttcattattccctccatggtgaatattgaaatattttgctacagaaatataacgtttaattacagcatgctacttaaggccctaatggttacacatagtagagtatataaactataattatctttctaaaatccaaaaacttctgctttctaaaacatagctggctcctagggtttcagataaaaaacatgaatgtgtatctgcaatagccccacggaggaaa

SEQ ID NO: 47962 - DNA, 500 bp, Homo sapiens
caattaaccctcactaaagggaacaaaagctgggtaccgggccccccctcgagagtacttctagaattaattaaggcgggcttgagtgtggggcccatcaaagaatgacaaagcaactctattcattggttctccttcctgcaatgatggtcttttgatttatttgcaaatgacaagcttgccaggccccacttgagggctgccctcattttttttttttttaaagaattcagttgcattttccaagatgaagttgagtctgcaatgctgtttgtgtaaatttttcccccttcagttccgtctaattaatgacttaaatgttttgacccaactgttgccaagcagagcatttgggctttaatttgtcattttggtaaagatgcatctttgacaaaagcatcacagctgttttagttcctaaatagcacatttccattattcagaaacccttgttatggagttcagaaagagcctgttcacaggaaatggtattgacttgt

SEQ ID NO: 47963 - DNA, 493 bp, Homo sapiens
  misc_feature 446, 447, 451, 473: n = A,T,C or G
tcactaaagcggaacataaagctgggtaccgggccccccctcgagagtacttctagaattaattaaggcagggcacttgaaactgtgtcaaggatgactaaactctgcttctggtatgagaaagtgaaacctctattcaaaatagatgtgaaggcaacataaaattattgaaattcactgcacatatgtaccatcatcagtgtgaattaacttgatgaattaacttgatcccaaagagaagtcaattggccacagttaaggaggaaaattcaaaatgtcttgaattgtgttgttggacacatttatttccaaaaataaattgtttagctactacatatctttttaaagcacatatgaatttattattatttcatttcctccttaagagtctgactcagaaaattcctctatatgctcaaaagtttgcttatatgatactttaacanngganaaaaaaaaaaaaaaaaaaaaanggggggcccccccccggggg

SEQ ID NO: 47964 - DNA, 439 bp, Homo sapiens
ctgggtaccgggccccccctcgagagtacttctagaattaattaaggcggggtaggctgagttcttccatttataataaagcatgaggagcttacccctcagtaaaaatagattgctatcattgagttgtgtggtattccattgaattgatacactggaattgactttctctgtcccacttgtcaggccgtaagatagtcgttttttcatatactacctcatgaaatgctcctggcacctctgcaacataggttttaccagggcctccactcgtggctgtgcagactatgccctgcacaactccagcaggcactattcacacagcagtcctagcttttacagtgcctatcacagacgaggaccttgtagctgagaaagatgaagtggttcatccaagagcatgtagtccataagcagtgcagcctggatccggtctctt

SEQ ID NO: 47965 - DNA, 486 bp, Homo sapiens
agcgcgcaattaaccctcactaaagggaacaaaagctgggtaccgggccccccctcgagagtacttctagaattaattaaggcgggcgctgcacaaggtcgagataacattaattgactccatctcacagtgtggtcatggctgttcttagaccatggaggaggagaaggcattcatggggccaccgcgtagtgaccgagttgcaggcgaagatcgatcttattgcccacaacagattctgcccatgcaggggatttaataattgttatttttctctggacacattcttggactgtcacccaggctggagtacagtggtgtgatcatagctccatataaccttcaactcctggcctcaagcaatcctcctgcctctgcctcccaacagctggaattaacggtgtgaaccaacgagcccagcccataatggaattttatcaaaattaaaacttcatctcttctaacaacattgttaagaaaatacaa

SEQ ID NO: 47966 - DNA, 519 bp, Homo sapiens
  misc_feature 329, 449: n = A,T,C or G
acaaaagctgggtaccgggccccccctcgagagtcttctagaattaattaaggcggggaggggggagggctgcctgaaaaccatccatctgtggaaatgacagcggggaaggtttttatgtgcctttttgtttttgtaaaaaaggaacaccacggaaagactcgaaagaatacattttatatctggatttttacaaataaagatggctattatatttaatcaaaaaaaaagaatatgaaaaacagggggcccccccccgggggggacccccattcccccctttttagaatttttttcccgcccctctgggcacgttttttattatcganttagttataacctaccccacccccctttgccctctcttaatctgatcggtctgttcatcccagtgcccttagaaggtgaaggtttgggctgggcccagtggttcacgtctgtaatcccancacttagggagactgaggtgggcagatcacttgagcctaggcgttcgagaccaacctggggcacatggca

SEQ ID NO: 47967 - DNA, 570 bp, Homo sapiens
aaagggaacaaaagctgggtaccgggccccccctcgagagtacttctagaattaattaaggcgggcagctgttttgttttgaagtgtgatgagaagccattggggcttttgaacaggggagcaaccaaatctgatttaggttttaaatgtaaccatggacactgaagaacagactgtgggttggagtgtttgtctgcacgaagcagccactgtccacagtttaatatttccttccacacatttcttgtgtgtgtgtctacaagcatacaactgcaaatagatattttaagagaattttttgcatgcatagaattatattgccttaaaaattgctttttacaaaagcagtatgtcatatatttacatattggtaccagtaaatcttcattttctaatagagcctataggtagggtcagcacactttttctgtaacagatcagatagtaagtttattacgcttcatgggcaaagagaccaaatcgaggtatgtaggtactcatgagatgattacataatgagaaaaagacattttccacaaaatttttattgacactggaatacattttttt

SEQ ID NO: 47968 - DNA, 607 bp, Homo sapiens
ttgcctggccgtcgttttacataaagggaacaaaagctgggtaccgggccccccctcgagagtacttctagaattaattaagagccacagtaagtgaggattctgtttattctgccctgaatgtttgttactgggatttttttccccccatacacacatacaaatcttttgtttcacaatttataaaataacagtgttagggacctttatcctaacaaggagggacataagaatactttcagaaatattctcctcctctccctttcactggtttgcatgtttgttattagtaatgatataatgataccatttttaaattcttttgatagcctgctgtgacttaaagggcaaagccacaccatttaaagtgttcttctaaagctttggcagtaattctgaaacttaagctatgtgctagattatctgaaaaactttttcaaatatcgattgcaaaatgcagaactgttaaagttatttggcggtgggtttccaacatctgcaggttttttggatggtgtttgataatcattggcctaaataatagttgatcattggctttgtatgttactggtgaaatgaaaatgtttacctaatagcatatagtttt

SEQ ID NO: 47969 - DNA, 629 bp, Homo sapiens
taacacctcactaaagggaacaaaagctgggtaccgggccccccctcgagagtacttctagaattaattaaggcgggcggatcacaacgtcaggagattgagaccatcctggctgacacggtgaaacctcgtctttactaaaacgcaaaaagttagctaggcgtggtggcgggcacctgtagtcccagctactcggcaggctgaggcaggagaatggcatgaacccaggaggcagagcttgcagtgagccaagatcacgccactgccctccagtctgggcgacagagcaaggctctgtctcaaaaaaagaaaaaaaaaaataatacaagatagatgcattttccagttacacacacacacacacacacacacacacacacacacacaatgccctcttcacacacattcaccctttggatgagaatttgagaatttggcaggaggataaaagtctgagaagatgactttcaaagtgaatctcaccgatttcttttatatgctcaggtcacaatatgattaacagtgaatcgaatgtgtatttacagtgaagttagggtcttttggccatctctgcccattatttagaaataagcatatgtttacttccatattgaatctaaaatttcttt

SEQ ID NO: 47970 - DNA, 416 bp, Homo sapiens
  misc_feature 326: n = A,T,C or G
tccctaaagggaacaaaagctgggtaccgggccccccctcgagagtacttctagaattaattaaggcgggaagaagggagttagtttcctaagctgaaaattagaatcgtggctcctcgaagaaaacatctgctcttcctatgtgggtggattctatgtctgtgtctcagttctactggatccttctgtcttcatttctttttgtgtaaatagtggccatattttccagtggtcagatctttcaaatgaatagcaactgtttaatttgtacagtattttcagtacacaaggcaatttttacatattttgttttcttggattctaanaaaaaaaaaaaaaaaaaaaaaaaaggcgcccccccccggggggggcccccatttccccttttagggggtttttttacccccccccttggg

SEQ ID NO: 47971 - DNA, 416 bp, Homo sapiens
  misc_feature 371: n = A,T,C or G
ctaaagggaacaaaagctgggtaccgggccccccctcgagagtacttctagaattaattaaggcggggtaagatttgccgagttccttttactttttttaacctttccttatgggcgctgtgtctattgaggtgcttaacaataaataaaggtagtgagttgaaaaaaaaaaaaaaacaaaaaaaaaatccccaaaaagaaactaaaaaataaaataacggggccccccccaacggggggccaataccttcccattttaagagaaaatatcaccacttacaagagtagtattaaaaaagaaaagataaaaggtttctaaaacatgacggaagttgagatgaagcttcttcatggagtaaaaaatgtttttnacaaaaaataaaaaaaaaaaaaatttgggggccccccccgggggg

SEQ ID NO: 47972 - DNA, 667 bp, Homo sapiens
  misc_feature 503: n = A,T,C or G
cgcgcaattaagccctactaaagggaacaaaagctgggtaccgggccccccctcgagagtacttctagaattaattaaggcgggaggattgcttgagaccagcatgagcatcatagcacaaccccatctcaattaacttgaaaaatagaaaagacatcaaacagaaaagacatccacctccagacaatctaacagagagcctttaaccttaatgctgactgatgtttagggtcagataattctttgtaacacgggctgtccttcgtgttgtaaaatatataccaacatccctggcctctgccccagctgagaactactattataaccggcctggtgtggtgccaggcattgggattttaaaaagctcccggttggcgcggtggctcacgcctgtaatcccaacactttgggaggccgaggtgggtggatcacaaggtcaggagttcaagactggcctggccaagatcgtaaaaccccgtctctactaaaaatacaaaaattanccgggcgtggtgatgggcgcctgtaatcccataatcccagctattcgggaggctgaggcagagaactgcttgaacccaggaggcggaggttgcattgagccaagatcacgccactgcactccagcctgggctacagagcgagaccctgtctcaaaaaaaaaaaa

SEQ ID NO: 47973 - DNA, 407 bp, Homo sapiens
ataaagggaacaaaagctgggtgccgggccccccctcgagagtacttctagaattaattaagatggggttatgtcctgagaaactcatcctaagttgaaaataccataaaatgaaaattcacttaacacacctactctactgaacttaatagcttaagtagcttagcctctcttgccttaaacatgctaacaagactcaaattaccccacagttgcgcaaaatgctatggctgcacagtaccctgtagcgtattggttgtttaccctgatctgtggctgatcgtgtggctgactaggatggtgtggctgactgggagctgcggcttgctgccgctgcgcaacatcgtgagagaggatcacctggcgtattgctagctcgggaaaaaataaaaattcaaaatttgaag

SEQ ID NO: 47974 - DNA, 575 bp, Homo sapiens
accctcactaaagggaacaaaagctgggtaccgggccccccctcgagagtacttctagaattaattaaggcggggttgcttgtttaattattatttcagaagtaatatatgttcatttcagaaaatttagaaaatagaaaaagaacaagataaaagggtgtttcatagccatattttttgtattacatatattcttgatttggctttgtttacaaaacgtgcaatataaaccagcatatcacctagaactgtttttccactcagtgtattacagcatctttccacgatacagtgcatattcttgttgtgactttgtctttaataacaacgtaatggtcagcccattgtctggttctatcatgacttatgtaattgatacatattatcaaatatttaattgtgggatgttgaactattcaaaattaccacattaatgatacgtaatcttatgtatattctgtgataaccatcttttgtggtttaatttttgcacacattcatgacatttttcttggacaggattctttttttaagagacagagtcttggccgggcgcggtggctcacgcctgtaat

SEQ ID NO: 47975 - DNA, 498 bp, Homo sapiens
gcgcgcaattaaccctcactaaagggaacaaaagctgggtaccgggccccccctcgagagtacttctagaattaattaaggcgggggtgcagtaccaggacgactaaacaccacatgtctctgcgctactcgagcgggggatgactacggtctatgctctgaattgtggcgcgctcaccgctgtgagatgcggatggaacttaaatcaattccacgaagaatgtgtgagctatgggccgggtttaccccatgtcacaccctctaccccctctagagccaaaaaaaaaaaaaaaaaaaaaaaaaaaaaggcggccgccaccgcggtggagctccaattcgccctatagtgagtcgtattacgcgcgctcactggccgtcgttttacaacgtcgggactgggaaaaccctggcgttacccaacttaatcgccttgcagcacatccccctttcgccagctggcgtaatagcgaagaggcccgcaccgatcgcccttcccaa

SEQ ID NO: 47976 - DNA, 347 bp, Homo sapiens
aagggaacaaagctgggtgccgggccccccctcgagagtacttctagaattaattaaggcgggacatttatatttgtaaataaaaaggaaatattctttgggcagtgtttcagaatcacctgggatgatctgcatgaagattcctggcctccaccaaagacttactgaatcagaaaggaggcaagaggatgaggaatgcttaagaatctgcattaacaaactttacaaatgaatcttacaacatacagaagcatggaaactactgcctcaagggattatctcaacttgagtttaaacataggaattgctgactaccttttaaatgtaaaaatagtatctttatggga

SEQ ID NO: 47977 - DNA, 472 bp, Homo sapiens
  misc_feature 96: n = A,T,C or G
ccctcactaaagggaacaaaagctgggtaccgggccccccctcgagagtacttctagaattaattaaggcgggttttgctgatcagcagcccgtanatttcttgctcttatatgtcactccgaacagagttgttttaacattgagaacctatgtagctcaggtccccattctctgatgctgtctccatagtgctcaggatcagaggccaaaagagagcccatcaatccttaggctgctgatcagcaaaacctgcctacaattcatcttctacacaccagttctgagggttattccaccccggatcagcgccatcaagttctacagctggtctgatagtacttagtccagtatacctttggaacttaaaaatgacacacaatttagacatatttgtaaaagacccttaaatggtatgacttgcaatttatattgttgttgaaggacaaatctgaaatggtatgttaaaaggct

SEQ ID NO: 47978 - DNA, 539 bp, Homo sapiens
accctcactaaagggaacaaaagctgggtaccgggccccccctcgagagtacttctagaattaattaaggcggggagaggaagggaaaagcttaatagtacggtgcttatcacatcaagagatcggtaaatttctgaggaaagacaggctaatggggcactgaaatggaacacctgctttaaacgtgcatcctttggaatttttcctcaaaaccaagaagttgacctctgagctgtcaggtgaccactgtgtgcaaaggggatggattctcttgtcagaagacggtcttctccatgaagcgagagtaggaagtgtactggaatggccaagcgggactgcttcagctgaccaggttcttttaaaccgtagtcatgctttcccactaactcttaaatccttatgcttagaaaattgaggataaggctgggcacagtggctcaggcctgtaatcccagcactttgggagaccaaggcgggtggatcacaaggtcaggagatcgagaccatcctggctaacatggcgaaaccccgtctctacc

SEQ ID NO: 47979 - DNA, 318 bp, Homo sapiens
ctggccgtcgttttacacccacggaaaaagcgataaccatgattactgcgcgcgccttttctcgagagtacaaaatagaattagttgaagcgggggaagttgtctcgggtatgctggtgtgaaattgaaactgtaaaagtagatggttgaaagtactggtatgttagctctgtatggtaagaactaattctgttacctcatgtacataattactaatcacttatcttcccctttacagcacaaatgaagtttgagttctaaacccaaaagcataaaaaaatctaaaaaaattgtggcgcgcccccaggggggggcccc

SEQ ID NO: 47980 - DNA, 511 bp, Homo sapiens
gcgcgcaattaaccctcactaaagggaacaaaagctgggtaccgggccccccctcgagagtacttctagaattaattaaggcggggggtggtcccggtggtgatggactgcgagagcactgtgcaggagaaggccctggagttcctggaccagctgctgctgcagaacatccggcatcacagtcattttcactctggggacgacagccaggtcctcgcctgggcgcttcttactctcctcaccaccgaaagccaggaactgaggtaggttaactgtatgacctgtgttccctatagaagaaggccgtaggactttgtattaataaatttctcctattggtcctcgaaaaatcagctttccagattacttagtgtatgtgaagattaagtattggtctctctttccctgactgacttccaatctcttagatatttttatcgcctgtatgtttgtgacacctgtttggtcacttcctttgcatctgtctgacgctttccagtttcagattttg

SEQ ID NO: 47981 - DNA, 316 bp, Homo sapiens
ctaaagggaacaaaagctgggtaccgggccccccctcgagagtacttctagaattaattaaggcaggtgaaagtggacaggggagaaaatgtggaaggagaggaaggaaggataatcctgagactctcaaaagcaaataattggaaaaagtggaatagagaactggcttgagtttacaaatgaataaataaaacccagatttttctaaaaaaaaaaaaaaaaaaaaaaaaaaaagggggcccccccccgggggggacccccaatccccccttttgggggttttttaccccccccccccgggccgttttttaaaaaa

SEQ ID NO: 47982 - DNA, 468 bp, Homo sapiens
ctcactaaagggaacaaaagctgggtaccgggccccccctcgagagtacttctagaattaattaaggcgggctcgcagggcaggagccgcacacccaccttatgaggatgcttcacatggacgcagaaacccaactctttgagaactcgtctttccgcctttataatttggttctttaaattaacataatcttgatccagtagtagaggcacgggcttcctgccagagagagagcacagggtctgcaccacagtcaagcagagcaaggcttctgagatcccgtcgttacctccaactatgagcacctaacacaaaccccacaacacaacatcgctatgaagtccacatcctctgatgaacaaaactgcacaccgctccccacagcccagtgccaacctcctcatcccttcccaacgatccctccctgcttttccttatagatcaacagcttctggtgcacaagcatat

SEQ ID NO: 47983 - DNA, 341 bp, Homo sapiens
aacaaaagctgggtaccgggccccccctcgagagtacttctagaattaattaaggcgggaacagcagtcgttgggatccctgcgggcgggcgctgtgggcttggttggcgcggggcgaacgtaaggtccgagtctcgagtcccgccccccggcacgaggctgggaaactgaggccggagactgcaggtggctctatcacgttcgtgtctgggatttagggttgcacggacttgtatccacagtacagtggcctcgccttagttagttttcccagtttgcaggtggggaaacctgagtaaaaaaaaaaaaaaaaaaaaaaaagcgcgcccccccccgggggg

SEQ ID NO: 47984 - DNA, 480 bp, Homo sapiens
accctcactaaagggaacaaaagctgggtaccgggccccccctcgagagtacttctagaattaattaaagcgggtgtcactccttgccaaagctttagaaagccttcctcttcaatgatccctagggctgtgcgcaccattcccctatagggggcagattctcttgcaccgtctcccaaccgagcaagagctgcttctccttgcatttggagtcgagtttttgtgagatccaggggaaaggttgctaacaaaaacacaaatgcagggaaaaacccacaacattcagagaaacaaacaaaaatctaaaatcataggagtaatattttcccaagactggttgttctcaaattttagaatatatcagaatcagctagggagattttaaaaattagaaatttcctagccccgtgcccatggattctaattcagtaggttgaagagggtttagaaacttgattctcacacagtcccaaatttaag

SEQ ID NO: 47985 - DNA, 452 bp, Homo sapiens
agggaacaaaagctgggtaccgggccccccctcgagagtacttctagaattaattaaggcgggagttcattgacctgttgaagaagatgctgaccattgatgctgacaagagaatcactccaatcgaaaccctgaaccatccctttgtcaccatgacacacttactcgattttccccacagcacacagtaggtgtcctgcctgatgcttcgtaccagggatcggcaaactttaaaggcccagacactaaatattttaggttttgcggccataaggtcttggtaacaactactcagctgtcactgtagctgaaagcagccacagatgcaatacataaacagatgagtgaggctacattctaatgaaacatttatgaaagtgggcagggctgggcgtggtgtctcatgcctgtaatcctagcactttgggaggcccaggcaggtggatcacctg

SEQ ID NO: 47986 - DNA, 434 bp, Homo sapiens
  misc_feature 73, 329, 330: n = A,T,C or G
taaagggaacaaaagctgggtgccgggccccccctcgagagtacttctagaattaattggggggggggttgcngggagctgaaaaacaccacttttctccagtttggcaacagagtgagactccgtctcaaaaaaaaaaatcttaatattacctagcattattaaatggaaaaaattaaatgcaaaaaactttgaatttgaatggagactaagcactaaggatagtaattgcataatgaaagttagcaatttttatttttcattttgatacattttatgctgagttcatttattaaagtgccacttcacaaataactcagttacctgcnnaaaaaaaaaaaaaaaaaaaaaaaaaccggcccccccccccgggggggccccccattcccccttaaggggggttttttcccccccccctgggggggtttttttaa

SEQ ID NO: 47987 - DNA, 506 bp, Homo sapiens
  misc_feature 445: n = A,T,C or G
aaagggaacaaaagctgggtaccgggccccccctcgagagtacttctagaattaattaaggcgggagtagctatcagctacaaaacaaaccattgaagaaagcagccttatttggaatatcagtcaataacagtggatttgtcaattttacctttaaaatgtaacatctaagtgaagattttaaaagttaaaaaaaaaaagcatatacttttcccccaaaccctactcctcaaaaagacactaaacttgtaaaattgtacagatgaattttatcaaactaaggaacccctttcttaaattgtttcagagattagaaaaggaataattacatttcttttgagacttataaaatctcaatgtttaaaactttataaagatagtttaagagaaaaagttatagctttgtctcatttatcaacatagaaaaatcatatatatatatttnaaaagagatggggtctcactgtcacacaggctggagtgctgggctgtgatcacagctcact

SEQ ID NO: 47988 - DNA, 175 bp, Homo sapiens
ccccggaaaaagggtaacacagctgggtgcccggccccccctcgagatacttactaaaattaattaaggcgggggaatcacgtgatggcagcatacactgaactgaccagtgtgaatatgatctacgctctgcctcccggaagacttaaaaattatggcaccgcgtgtaagatag

SEQ ID NO: 47989 - DNA, 465 bp, Homo sapiens
gcgcgcaattaaccctcactaaagggaacaaaagctgggtaccgggccccccctcgagagtacttctagaattaattaaaataaataaataaataaaaacccccaaaagacaaatttggatagtctgcagatcatccacaacattttaattgagcaaaaaatgaagccactcatttatttgcccaggtatatatggagtttctgctgttggcataccccatattttatttgtgtttttcttttacagaatgggaaaccacccatcaatgatatgttcacagacctcaaagatggaaggaagctattggatcttctagaaggcctcacaggaacatcactggtgagcaagtcatctttgtaaacaacggagtctccggtcattgctgatacttgatgacccagtgtgggtacccattaaagtgaaagtatccattttactttacgttcaaatgtaaaggctgaaat

SEQ ID NO: 47990 - DNA, 197 bp, Homo sapiens
  misc_feature 25: n = A,T,C or G
ctggccgtacgtctcttcataaggngacaaaactgggtaccgggccccccctcgagagtacttctagaattaattaaggcgggtggatcacttgaggtcagaagttcaagaccagcctgaccaacatcgtgaaatgccgtctttacaaaaaaatacaaaaattaactggatgtgatagtgtgtgcatatattctcgg

SEQ ID NO: 47991 - DNA, 466 bp, Homo sapiens
ctaaagggaacaaaagctgggtaccgggccccccctcgagagtacttctagaattaattaaggcgggacccccacgccctcctggcgctctttgcagagatgttcctcagacccaatccgggatttgggatgtctgtgcgtgctgtggagcagagagtttgcaacatggtctcactttgtcacccaggctggaatgcattggcatgaacacgtctcactgcagcctcaacctcccaggctgaagtgaccctccaactctgctttcacagtagctgtgatatggtttggctgtgtccccacccacatctcatcttaaaacccagtgggaggagggatgttctcccttggaaccaggccaccattctatgaggaagccaagcagccacatgaaaaggccgtatgtagacattctaactgacaatactagctaaggttccagctactcaccagcatcaactatcagaca

SEQ ID NO: 47992 - DNA, 341 bp, Homo sapiens
aacaaaagctgggtaccgggccccccctcgagagtacttctagaattaattaaccaggagatgtgagacgaagaagggattgtgtttaaatggtggactaagggttaagtaggaggagaaatcacatgaacagttggatttatgaaacaggaaactttttggctatagagacccacaataagatggaaagggaagattagagcagtatcctttagtgtcatctgtccctgtctccaagtgactatgcctccccttccccacagtttctgtgagccagcagccagtctcggctccagtgtccatcgctgcccatgcttctgttgctgggcacctctctacat

SEQ ID NO: 47993 - DNA, 485 bp, Homo sapiens
agcgcgcaattaaccctcactaaagggaacaaaagctgggtaccgggccccccctcgagagtacttctagaattaattaaggcggggtagtgtaagttttagaaacctgaaaaaggagaataatttagcaaagaagactgttagaatggttagtgaaaataggggatgacattgggagagggagaagcagtaacacataattgacttttactggtctgtgatgctaagaactcactgaaccacaattagtagaacaaattcatactctttggatgtggaagaaaaaataaacaggcttttaaaagacctgagaagacctttagcttactcttcaggctgatcatgaacacagaggcaacttacaacaatcaaaaaataaaaataaaaaagtaggtgcagcacaccaacatggcacatgtatacatatgtaacaaacctgcacgttgtgcacatgtaccctataacttaaagtataataaaaatat

SEQ ID NO: 47994 - DNA, 641 bp, Homo sapiens
actggccgtggtcttacacccatgaatcaagggtacacatgatgggtgccgggccccccctcgagagtacttctagaattaattaaggcgggagaaaagtgatacaacaacaataaaaccccaagcataaacaaacaaagagttaatcaaaacaacaaatgcacaattgatatgattactgagtgttctaatggtgaggagaaattaaaagcataaattataccgcccaatatattatatacaaactaatatatgtggtgtccatctgtgggggagtatctttttccgtatatatatgtataattgcccccctaaaaggcgcttgatatgacccaattccactggattcctcatagccccaaatctatctgtaaattcattactgctagaattgccaactacagaattaacttctgtgaccattggcaagtccccagtttcctcatttacaaaatgactaaaagatcactaaggtaaaaaacacttcccactccagaatttgattctttctctctagtgagaagtcatatctttttgagaggtatcctattgtttgaacttagcacaagttttttccttgatgcaagaatcacaaatgaaattatttgtattctactaggggctggggacttgtacttgct

SEQ ID NO: 47995 - DNA, 513 bp, Homo sapiens
  misc_feature 360, 361, 362, 366: n = A,T,C or G
taaagggaacaaaagctgggtaccgggccccccctcgagagtacttctagaattaattaaggcgggggcagcgggagaagtgaataaatggttgctgtttctgaagcgtcagtgtttccatgttatggatctctctgcgtttgaataaagactatctctgttgctcacaaatgtcataaaaaaaaaaataaaaaaaaagaaccaaacaaaaaaaaagggccaaaaaaaataaaaaaaaagaaaaacttaaaaaaaactgaaaaaaaaaaaataaaaactgccgcccccccgaccaagtactgcctaacaccccaaatatgtttcatgaaacccccccctcgcctcagatacttgatgaannntatncagttatatccacaaatcttctgattaggtcctggctatgcttatctatatccagaattaaccttatttgccttaccaaaaagagcacattgaatcagaattcctagataacaattgaaatgagcttgaagaagttctgggagtggt

SEQ ID NO: 47996 - DNA, 670 bp, Homo sapiens
aaagggaacaaaagctgggtaccgggccccccctcgagagtacttctagaattaattaaggcggggtgggggtgggagaggcccaagaccctgtgtcaataggccacaagaggcccggctgtttgcagcctgggtagacagccaagctacgctccatttccagcacttccaatccggccctggagccaacaatagctcctggggcctcccacagcgccagagaccagaagacaatcagacccagaggcggccccggctcagcccagaaacacctaaaggtctttctttggagggcttggttaaaagaatcatagttcacgcaaacaatgaaacattacgcagcctctgaaaaggcggaggtccacctacgtacttgttacgggttgaatcatgtctacaccaccccctcctaaaaagcatgttggggatctaaaccccaggacctcagaatgtgacagtattggaaacagggtcattacggatgtaacgagttaagataaaatcataccagtgtaaggtaggaggccaggtgcggtggctcatgcctgtaatcccaacactttgggaggccaagtgaggaggacttcttgaggccaggagttggagaccagcctgggcaacagaatgaaatctcatctctattaaaaaaataaaataaaataaaaaaata

SEQ ID NO: 47997 - DNA, 415 bp, Homo sapiens
  misc_feature 285, 286, 287, 309, 396, 397: n = A,T,C or G
gctgggtgccgggccccccctcgagagtacttctagaattaattaaggcgggggaacagtctttggagattagcggcttagattaggtacttaaaaaacactattatagggtatcatcaaattacatttgttggccaatcttatttctctgagtgattcagtctaggaaagaaataacaccctaaagatggtcagatatgatgctaaaggaattaaaaagggttgattttttttttctttgctcaggaataaacaggaattctagaaggtcaaacttcccccccnnnaaaaaaaaaaaaaaaaaaaaanggcgggcccccccccggggggggacccaaaatcccctattaagagagtattttccccccccccccggggctttttttaaaaaaatgnnagaaagaatggctcactt

SEQ ID NO: 47998 - DNA, 354 bp, Homo sapiens
taaagggaacaaaagctgggtaccgggccccccctcgagagtacttctagaattaattaagcgggtctctctctcctctcttctctgaacctctcttctctttctcttttcttacatattctactagttgttttccccttcttcttctcctttctctcctttttctccctcctccttgtctcttttactccattcctgcagaagagagagggctaaacttaaagaaaaaaaaggaggaggaggaggagagaaaggagaagaagaaggggaaaacaaaaaaaaaaaaagcggccgccaccgcgggggagctccaattcgccctatagggagtcgtattacccgcgctcactggcc

SEQ ID NO: 47999 - DNA, 210 bp, Homo sapiens
ctaaagggaacaaaagctgggtaccgggccccccctcgagagtacttctagaattaattaaggcgggggggataaaaaaaaaacaaaccctgcaagttttgtggcttaaaaagagggtggacagtcctaatggggatctccagctccttcctgtgggctgccacagacagctacccccagaagggtcaatgttgggagtggttgtggctc

SEQ ID NO: 48000 - DNA, 482 bp, Homo sapiens
accctgactaaagggaacaaaagctgggtaccgggccccccctcgagagtacttctagaattaattaaggcggggtaataatggcaaaaagatagaaatatagatcacaggaatggaatagaccattctgaaatagaaccacacacattgccaactaattttcagcagaatgccaggtcaattcaataaagaaataaaaatctttccaacaaatggtgctagaataaccagaaatccataagaaaaattaaaaaaacctcatgccatatgcaaaacttaattttaaataagttataagcctaaatgtataaaattgtaaggcttttagaacaagacattgcagaaaatttttacaaacttgaataagcagttatttgttaggcaggacacaaaaaaaacaagccattaaaaaaattgacaaattagactttattaaaatttaaatctcatgctctttcaaagataccattaagaaaatgaaa

SEQ ID NO: 48001 - DNA, 472 bp, Homo sapiens
taaagggaacaaaagctgggtaccgggccccccctcgagagtacttctagaattaattaaggtttaattgactctaggccatgagtaacagtcttattttcttatacatcaacaaagaataaaggacttgaaaaataagcatgatctatcaatttttaaattctaattttacaaaattaaagagatggtttccatttctaatacaacttatacagagatatgagagttgatttaatgcaacaaatattcattgcaaaaccatgttcaaggtgtaatatgaaatgttgtggtcaataaagatgcagctttccatttccaggttttagaacagtgctgtttaatggaacttcatgagattatggaaatgttctgtgctctgtgtttatccagtatggtagccaatagtcatatgcagttactaagcacttgcaatgtttgtaatatgactgaggaattgaatttaaaattttat

SEQ ID NO: 48002 - DNA, 290 bp, Homo sapiens
  misc_feature 271: n = A,T,C or G
ggccgtcgttttcaccctgataagggaacacatgctgggtgccgggccccccctcgagagtacttctagaattaattaaggcaggtatgttagaatgaaccagaatgttcgatgagcaagaatgaacaaatagaccaatggaacgaaaataaagagccctgaagtagatctctctctatatatatatgtggttgtctaatttgtgataaagtttcctcggccatgtggttgggaaatggtggtcttttcaataaaaagcactggatcatanaacattataacattgctgg

SEQ ID NO: 48003 - DNA, 417 bp, Homo sapiens
ctaaagggaacaaaagctgggtaccgggccccccctcgagagtacttctagaattaattaatggaaataaaataaatgcctgggaccaatctttttattgatgagagagcaacaattctatacctgataaggcaaggagaattctgatgttctagtagcagcctgacccaggaatttacttaaggtgtgtgtaggcgaatgggagggtagaggaacttctgggaaatgatgactaatattctatttgaagctgttgctatgccatattcctaaatcttcagcaaaattccgctataaataacttccttgtgtttgtgtaatttgcgaaaaaaaaaaaaaaaaaaaaaaaaaaaaagggggccccccccgggggggaccccaattcccccttttggggggttttttaccccccccccc

SEQ ID NO: 48004 - DNA, 448 bp, Homo sapiens
ataaagggaacaaatgctgggtaccgggccccccctcgagagtacttctagaattaattaaggcgggggaagttattatgcttggaacttggtttgatggcttgtactatgtgtcagtcatttaacttaccatacttaatgtacacaacacttcttgaagtaagaattatcattccttattttctggataagaaaacagactctcagactcttcagggttcttccttcctgttaaatagtaaagttgcagtgtaactctagatttgtttaactctaaagcctgtttcttcacactaccctatcctgccttctgttttgatgctctgccatccataattactaaagaaaaatatgcttatttccccaatcttctagttatgggtactcaatggtggttatcccgtatctgcaatttgctatcttgtagttagaagtcaagccaatccca

SEQ ID NO: 48005 - DNA, 588 bp, Homo sapiens
cctcactaaagggaacaaaagctgggtaccgggccccccctcgagagtacttctagaattaattaaggcgggttgccagaatgagacaggtacttaataaaggatagtatcctttcttaaggtctttattagtgggaaaaactgggaaacaacctatgtctgatttttgcctgttgctaagcagtgaatcgcaaatgtttagctctcccctgtttcaatgaaaggttgggtgatggcagcggtgactcttttttgtctttttttgccagaagtaacctggagtggcctaagatagaaggtgtggagaaacaaaatctagccaaacatatacatgcatacatacataggtaaatatctcagttggtgaaggtgaatatagaaaatcgggatcacaggaaaaattaccatcaaccctaatgaggttactggcagtcaaaattaaaaaaaaaggaacttatactaccttcatctgatattaattctgaagaaataaaatgtttcttaggaatgaattcctttgtgtatgaaggggaccactgagtggtagtactggcatttttcagccaatgtgacaaatttcacagtgct

SEQ ID NO: 48006 - DNA, 469 bp, Homo sapiens
ctaaagggaacaaaagctgggtaccgggccccccctcgagagtacttctagaattaattaaggcgggcgaataacacggtagggaaagggaagccatcctggccaacttgatgaaaccccgtcactactgaaaataccataattatctggacatagtggctcgtgcctgtaatcccagatacccatgaggctgacgcatgagaattgctatgaatgcaggggagttggaggggtgcagtcgagaaacatgatcatccactgcactccatactggctacagggagactccatttcaaagcctccgtgctgctggatctttggggggggatacacgatccttgagcactgaagtgtttaagattggcaactatcaatgcccttttttctaaatatggggatatttacctttattaagaaattatactaaacattgatgtccttgatcattttatgttctcatattactttt

SEQ ID NO: 48007 - DNA, 322 bp, Homo sapiens
  misc_feature 293: n = A,T,C or G
cgtctttttacaaccctaaataaagggaacaaaagctgggtaccgggccccccctcgagagtacttctagaattaattaaggcggggtaggagccgggaaccggaatggaagaggcgtggattctcgtcccagccctggctctcatggcgttttgtgaccttgggttaaccactttcccgccgagtctcagtttcctcatctgtacaatggctctcatgagaatgatgcctgtttttcctattcccagggagggattcgatgcgaggacaccataaaataaggaatgataatngaaaaaaaaaaaaaaaataaaaaaaacaa

SEQ ID NO: 48008 - DNA, 558 bp, Homo sapiens
gaataaggggaacaaatgctgggtagccgggccccccctcgagagtacttctagaattaattaaggcgggggagaaatacataaaatatatgacaaagccctagtattttcaatgtataaaaagctctaaggatcaatatgaaaaaattactatctccataaaaaaataagctagggataaaataagcagttcatcaaagaataaagatgaccaacaatgtgaaaagaggacaaaaatgtaatttaaaaaatgcagtgagtctagacaacatggtgagacttcattacttcaaaaaaatttaaaaagttagctagatgtggtggcacacgcctgtggtctcagctacttgggaggcattgaggcagccagcgcaggggcttctgctgagggggcaggcggagcttgaggaaaccgcagataagtttttttctctttgaaagatagagattaatacaactacttaaaaaatatagtcaataggttactaagatattgcttagcgttaagtttttaacgtaattttaatagcttaagattttgagagaaaatatgaagac

SEQ ID NO: 48009 - DNA, 305 bp, Homo sapiens
tctagaaattaattaaggcggaagcttaggctaatagcctcgtggacggtggagctctagtctctgagaaactcattcattcctttagtcactaggaagaagcaaataagtaccaatggtgtcactggttgtggtgagctgagatcgtgccactgcactccagcctaggcgacagagcaagattctgtctcaaaaaatcaaacaaaaaacactaaaaaaccatacatatatgatataccaacaagattttcttggtggggtgcctaaaccacctgattctcaagttcatgtggaaaaattacaca

SEQ ID NO: 48010 - DNA, 488 bp, Homo sapiens
taaagggaacaaaagctgggtcccgggccccgcctcgagagtacttctagaattaattaaggcgggcagatcacgaggtcaggagatcgagaccatcctggctaacacggtgaaaccccgtctttactaaaaatactgaaaaaaaaaaaaagaaaaaaaaaagatggggccccccccggggggggatcccatatccccttattgaggggctttaccaccgccccactgggggaggtatgaaaaatggagaattgtgggagtgttctctttttcccttggatccggtgcctcctgggccaacaccttggcttccagttctttttgctacatcttaagcctctcaatctctaaggtcttttcctccactggctttaatgagcaccattcgttctcgctttggggtattcagtaggggggtcccttggcttgcctgggaacccagcatacgttccatactcatgaggttatccaacatggctggatccata

SEQ ID NO: 48011 - DNA, 525 bp, Homo sapiens
  misc_feature 328, 330, 332, 335: n = A,T,C or G
ctggccgtcgttttcaacccggaataaagggaacaaaagctgggtagccgggccccccctcgagagtacttctagaattaattaaggcgggtgcctgtaatcccagctactcgggaaagtgaggcaggagaatcacttgaacccgggaggcagaggttgcagtgagccgagatcgcacaactgcactccagcctggatgacaagagagaggctctgtcaaaaaaaaaaaaaaaaaaaaaaaaaaggggggcccccccccggggggggccccatttcccctttttgggggggtttaaaccccccccctggggggcgttttttaaaaaantntntantaactggtatgaaccctctgtctccttatttaaatgtggatccacgatacctcgtgcaggtaagattaagattttactagtttggtgcattattttaccattttaaaaaaaacgccaagtgctatgctgacttgaactatgacatacacttttggaggcagtaagtctctggtctccattcacccttttt

SEQ ID NO: 48012 - DNA, 565 bp, Homo sapiens
ctggccgtctttttcatcccaggaaacagggatcaacacatctgggtccgcgggccccccctcgagagtacttatagaattaattaaggcggggctcaggcagtaatgctctcccccacaacaccctgctgctcacctcctactgtgcggcccatttcctaacaggccacagaccagtatcacacaccatcctggggtcaggaactcctaaactatgaactatagtggaataattacctgagccaggcacccaagagaaatgtcctaactcagcaaagaagtgactgtcacccgggagacacactggaaaatatcttacacctgatccaggctaatccaagactgcaggtcagtacgacatattaaaacaagggatctcatgcctgtgtatgtgtgtatattctaaagactatgcacacattttttctactttgaactttctctatttctattatgcaatttgctgacctagcaattcccatattctatacaaatttattaagtgccatacctgaccatcaattccacttccaattatctaaaaatatgagcgtgaaatttaaaa

SEQ ID NO: 48013 - DNA, 601 bp, Homo sapiens
  misc_feature 587, 594: n = A,T,C or G
ctaaagggaacaaaagctgggtaccgggccccccctcgagagtacttctagaattaattaaggcgggggaagagtgtgtggaaacttctgtttacattgtcttttaaaatgtaccatgtacacacgatacctattcaaaaatgaaatgtattcttcacctcaggaagatctatgaaaaacatattctgtaaattatgaacaaatactttgacttctgtttacatttttttaatgtaccgtgtgcacatgatacctattcaaaaatgaaatgtattcaccttgggaagttctatgaaaaaattctgtaaaaaattatgaacaaaccctttgacacagcgattccttccccaggaatttatcttataaatacacttacactcgtgtgaaaataagtacagtgctatgtggaaggataagtaagaagcagataatattggttacctttggagaggggaatctgatgtcaagtcaagagtggaatgagtgagactttttcactacatattcttggtaccttttgaactttaaaccatgttattgttacctattgaatgaatgaataaataaatgttaatggcaaaaaaaanaaaaaanaaaaaaa

SEQ ID NO: 48014 - DNA, 460 bp, Homo sapiens; identical to SEQ ID NO: 46400

SEQ ID NO: 48015 - DNA, 567 bp, Homo sapiens
tgggaacaggaagctgggtaccgggccccccctcgagagtacttgtagaattaattaaggcgggttgaaagtgaaacaatggaaaataatatctcacagaaatattaaaagaaagcaggaagtggctttctacattagatgatattaaaatagagcaacttcagagcaaagaaaatgatcagaacagagaggataatcatattataataaaagggtcaatccatcagaaagacatagcaatcctaaacaattctaagcaatcctatacacgttaaacaatagagctgcaaaatgtgtgaagtaaaaactaaatgtgtgaagtagcactgaaaagagaaataaattcataattatagttggatatttcaccaccccttttccagcaattgatagaaacactagatagaattcaacgaacacagagaatttaacatcatcaaccaacaggatctagctgaacttagtagactactccattcgaagacaacagaatacacattcttttcaagtgcccacaaaacataaaacaagacagaccaatccggagacataaaccccttaacagag

SEQ ID NO: 48016 - DNA, 465 bp, Homo sapiens
gccgtcgttctacataaagggaacaaaagctgggtaccgggccccccctcgagagtacttctagaattaattaaggcgggattgtatcttatttttacattagaaatgcaaaaaatcattttataagattaaatctattgagaaacacattaaagttcttattgaacagttttatcctatatagttatctcttttatctgtgtaaatcctaattatgtgaccattctttcttaacctcaggatttttttttcctaacttaccagcatactttgccctccccctcctgccaaccagtcattaattagttcaataacattgaatcatttaatactgctctagtgtctgtgacaaaagatattatctggaaacattttaagtatgtgtctcgcgaattggacctctaagaaatattcttactttttggtaaatttttttcagtaaaactattatttatgaagataaat

SEQ ID NO: 48017 - DNA, 336 bp, Homo sapiens
acaaaagctgggtaccgggccccccctcgagagtacttctagaattaattaagcttcagattgagaaggagaggggctgggcagtggggtgaagagggaagaaaaaggcagggattatgaagatgtggtattcaaagagtagggtttggataggcgagcattccaaagtatgtctgctgcaatgggaaaggagaggtgccactgcccgcagaaattgatggggggcagggacgggtgttagaaaatggccctaattactggattctgaaacactgaatacactccccctaggaaaaggttttaaactattatcactcttttaagccttagaaaaac

SEQ ID NO: 48018 - DNA, 470 bp, Homo sapiens
accctcactaaagggaacaaaagctgggtaccgggccccccctcgagagtacttctagaattaattaaggcgggggatccacaggattttccatagaaaaatggcgcttccaggatcttggtcaaatgaattgtttattaggttggtctttatcatcagtctggttatatctgtaaggttaggaaaatagcatagtgtcggttgtgaattattttcagagtgcttagcctttccagtagatgaagagtaacagcttttactaaattattgagatgtggattagggaattacatctggattggagttctatatctgtttcttgccaggtatgtgaccttgggcaaattacttaatctttctaagcctcagtttttacatttgtaacataatataattgtacccattataaggttctgatgaggagtaaatgaaccaacatatataagttcttggtacagtgcttagcttat

SEQ ID NO: 48019 - DNA, 451 bp, Homo sapiens
tgggtaccgggccccccctcgagagtacttctagaattaattaaaaagttataattttagataaaaattctagtcaaatttttacagatattatctcactaattttcagacttttgccaaagtgtgcacaatggctttttgttaataaagaacagattagttttgaagaaggcaaaaatttcagttttctgaagacagcatgttattttaacaatcaagtatacgtattaaaaattgtgagcaatctcaaatgaaggtccatcgtttcattttaaatctctaaatgaattcatataagactcaaacgtttgtgctgttcactcatgtagcctcagtttttgcaattgtgatgcatatcactgaaattttacagttggtaatgtattaactatgtaacttaacacttggaattaagtagttctttggatatccaaaaaaaaaaaaaaaaaaa

SEQ ID NO: 48020 - DNA, 460 bp, Homo sapiens
aaataaagggaacaaaagctgggtgccgggccccccctcgagagtacttctagaattaattaaggcgggtgatttattcaaacatttgttctagcttaagctggaataagcagtggtcatttcagaagttttcatttgtaattccttcctctcccttgttcccaagtaggtagtagtaagtatgtgccacaggctgattatctgggtaatcttttacgggtgggaggtgagattgatagtgcaataatcagtgatctatagaccctcatgcacgattcaagtttcactcttgtggctgatgccattattgcacattggccattccaaacctgtggagaactttgttgtcaggccctgagcgctcacagcttcatttggcccaggttgaagacaaggaaaaaaaaaaaaaaaaaaaaaaaaaaaagggggcccccccccggggggggcccccattccccct

SEQ ID NO: 48021 - DNA, 476 bp, Homo sapiens
ctaaacggaacaaaagctgggttccgggccccctttcgagagttcttctagaattaattaaggcgggtggctggagctggtttgataattacatggtaatcaactctacttcacaaataaaatgagccactgcatccagctataatagctttaaaagactattttgaaaaggaaggaagaaaaatcaaaagaatctgtaagaaatgtagcatgaataaagcaatataagagcaaaaattaaaaacaaaatcaggtaaattagtgtatctaggagtttctttgaataagtttaataagataaacacttgaaataactaaggtatagggtaaggtagaaaaggaaaaaaaaaaaaaaaaaaaaaaaaaaaaaagcggccgccaccgcggtggagctccaattcgccctatagtgagtcgtattacgcgcgctcactggccgtcgttttacaacgtcgtgactgggaaaaccctggcgt

SEQ ID NO: 48022 - DNA, 516 bp, Homo sapiens
gcgcgcaattaaccctcactaaagggaacaaaagctgggtaccgggccccccctcgagagtacttctagaattaattaaggcgggaagacagtggaattcagctgtcacttgataatgtagactgaatgcaagaagtagacattatgacaggggaagaacaggagcgctatctgcaaattctgatactgaaaattaacaaacgcaaataatggaaagaaaaagtacatctgtgcatgtaaagctatttttaaaagattctattgccagtcttatgttaaagaaagcttacttgatcctcttcctcccgaattaagtgctacatattctcaaataggaattttattttaaatagcctttgagcagtacctgggtgctgtcttgcatttgcctatgatagatttgcctggaattaacaataggtgtttagggagtgaggctcctgaggtgtttgtcctggcatgtacattcattcctgtggaggggtcctgtagccttggagctctttgaggctgggg

SEQ ID NO: 48023 - DNA, 398 bp, Homo sapiens
aaccctaactaaagggaacaaaagctgggtaccgggccccccctcgagagtacttctagaattaattaaggcgggtcgtgggaataacgccgccacatcgacagtcggcatcgtttatggtcggaactacgactgtatctgatcttcttcaaacctccgactttcgttcttcgattaatgaaaacattcttggcaaatgcgtttcggtctggtacgtcttgcgcccgtccaagaatttgacctatagcggcgcaatactaatgcccccgtccgtccctcttaatcatggcctaatttccgaaaaaaaaaaaaaaaaaaaaaaaaggggggccccccccgggggggacccccattcccccctttggggggttttttaacccccccccttgggccgtttt

SEQ ID NO: 48024 - DNA, 459 bp, Homo sapiens
ggccccccctcgagagtacttctagaattaattaaggcggggtaaagagtgttttagatcaccccctccccaaataaaatctgggcagatatggaaactatataaactttggatgtcatcttcaaatcacacacagatccaatggtagaaggtaggttttatgggcttaaggtgtttgaacacaatctttgaccagtcattggctgaccattaagttatgcagatgatgctagaaagccaaactaaaaagtaaaaatataagaattttaaaaattttaacagagacattagtggtgacacatggcagaggacaaaacttctacgtataagtccaatcaattatagaaagaaagagaagaaagaagaagaaaagaaagagaaaaagagaagtgtaaggggtgggaggagaagaaaactcttaactggaaaagtcagaaaaaaagcagaatccagagttgc

SEQ ID NO: 48025 - DNA, 452 bp, Homo sapiens
agggaacaaaagctgggtaccgggccccccctacgagagtacttctagaattaattaaggcggggcgaatactactttgtaacttttaaagtcttaaacttttcaataaaattgagtgagacttataggccctaacaaaaaaaatatccacctaaatctaaaaagctgatgggagtacctaatttcagtattcaccaaatatttattaaacaactactatatgctattctaggcactagggatatagcagtggccacaataaacacaactttactgctcaatgaccttatatttttaatagataatcttggttggtgaatcgctgagtggcatggagaatattctagaattgtgagagtaggaaaagattttatggtctaggcaggcaaagggagagcgctccaaaaaaagaaaaaaaaaagaaaaaaaaaaaaatataggcgggccccccc

SEQ ID NO: 48026 - DNA, 573 bp, Homo sapiens
gggaacaaagctgggtaccgggccccccctcgagatacttctagaattaattaaggcgggagaatggtatttgcctcatttacaagtttgtgttcttctttactcctaaatcagtgtaactcaaagcatttctaaagtaaattgcactttgctttcagagctctaaaacactaaaatatttgtgctttattcgaatagatttaaaaattatagtatggtttattttcctttaaaagacatttcattgttataaacacacaaacaaaaacccaaggccaaaactggaatattattgtacatgtcataggttaagtaggaacagtttctggactttggtgtaataactctttactgacgaagaggtctatagtttgtttaagaactatcccacttaaaaaccaatccatacacttttcatgcagctgactccctcccccctttccaaagctcagaatggcagcagatgatacagcaaacacgtaactgcaaaaacagctacagcagctacctgggtgagatggctgccacctgcagcctcagtgaatctggcttcacaccacatgccttgaatgt

SEQ ID NO: 48027 - DNA, 466 bp, Homo sapiens
taaagggaacaaaagctgggtaccgggccccccctcgagagtacttctagaattaattaaccaacccaggagacaaactacctcgggtcttaggtactgggattataatatttgtagctgaaggcatcccgatactgataatgatgacatttagggttattttcaagtaagtatataactgtagctcctcttaactggtctaactctaatttgttctttaagataagaatctccttgagagccttccctgaactcccatgtgggccagagctatcaccacattccactgtatactataatattgcccatagttttctgtttatctcttcacactatagaaaacaatttcttgaggtcggagactgtggctttactccctattgtatccacagaaatctcctagcacaatgcctggcacatagtgggtgctcaaatattttctaaatagataataagggggaaagag

SEQ ID NO: 48028 - DNA, 284 bp, Homo sapiens
ctaaagggaacaaaagctgggtaccgggccccccctcgagagtacttctagaattaattaaggcgggggccatagtgataggtaaagggatcactggaatggggtcttgcggtggaggagggagattggactcaactccctgtgtaaagcaattgtgaagctttagcttacaaacgaggttgttttccttgtgaatgggttagaatgaccagttttatcaatacatatgttacaatcaactgtaagtgtcataagtcattaattactgatggtagacaaagtac

SEQ ID NO: 48029 - DNA, 499 bp, Homo sapiens
tacaaccctaaataaagggaacaaaagctgggtgccgggccccccctcgagagtacttctagaattaattaaggcggggagcctttggatcccagcatagaagcagagatcatagagactggattggctgcattcacaaaactctatgaaagccctttaccctttgctactggagaacacggatctatggaggtaaaaatataaaaacaaactagccaaagtttggtgttagaagtagaagatgaaagtcattattataatctgaagcttagctttcttggtgtacagttcacagggagtacaatatgagtaacataaagaatgtggttaatttattggaatatcctaagagctttcctccaaaagcttcaaggtacttgtctgatttttttttttttaaaacacaactgttttttcctatagcaaattaaaggaaaagtttaaggccgggtgtggggtcttacgtctgtaatcccaccactttgaaaggctgaggctg

SEQ ID NO: 48030 - DNA, 385 bp, Homo sapiens
ctccaggaggcgatccattcacagatccaaaaccatccttctgtaataatcactctgcaaatgaacgtgactttctctaacccgatctcggtccaagtctagatccaggtctgcttccagatgggcctcccgatctagatctaggtcccactcaaggtcctaactggctatggccacagctggaactacccgagaagtcttttgtacatgtttggtagccgtagcacaagtgattggagtagaacatgtcactgctgtacatttttaactcccctaatggcgtgtctataattgttaaatctaagtgcttcctctcagtaaagcctcctggcaccaagccttcctgctcgactgaaaaaaattttctctttgaaaatcccctttt

SEQ ID NO: 48031 - DNA, 309 bp, Homo sapiens
tgtttcatcaaggttggtgcggtgggtgatagtgtatcatcaaggttggtgcggtgggtgagagtgtagcatcaaggttggtgcggtgggtgagagtgtagcatcaaggttggtgcggtgggtgagagtgtagcatcaaggtcaacacagggggtagcgtgttgcatccctactgtggttctgcaggaggttttccttgtggcaggagatacctgctgtgcatcaggcgaagatgtacaatgcctgcaacacagtctcagaatggccgggctcacgcctgtaatcccaactttttgcgaggccgaggcc

SEQ ID NO: 48032 - DNA, 436 bp, Homo sapiens
aaccctcactaaagggaacaaaagctgggtatcgggccccgcctcgagagtacttgtagaattaattaatgcgggggcgggaccacggagaattaataaggttctggacttttaacaaggaaaagccaaaaggcacaaaagagacggggccccacgggggggggacgttgaatggccctagtgctgggccctttcctcccccctcgggctaggttattaaaaagctgttttaaagtctgggtcatcgtgcagtcttttccctgacacagagtaaaagctccacagattgcgctgtctacctggtagtcagtggcagcaacggtggctgctgcttctggaaaataaatggagtctcccaactggcagcatcttaggattgcttcaggcgtttgcgtgggggccccaggaaagggcactgtgctgaagccagagaacg

SEQ ID NO: 48033 - DNA, 469 bp, Homo sapiens
aaagggaacaaaagctgggtaccgggccccccctcgagagtacttctagaattaattaaggcgggggggttgcaccatgttgaccaggcactggtctcaaactgccgacctcagatgatttccttgcctcggcctcccaaaacgctgggattacaggtgcgagccaccacaccatgctgaaaatatatttttactctgaaaccttatgattaaaaagggctaataaaaagaaatgatcgcttacgtatataacaagaaaagtcaccccaggtaaatacacttacacatcattgatcttaaaaaataagttataatctaggagtagggcataaaaaaagaatgttgtaaaacattttctaagaattgctaaagcatttaaatatcctcttggtaggatccgtgatagatcaaaagttgtaacacgtactgcttatgagaagagaagcagaaagatcagaagcggtggagg

SEQ ID NO: 48034 - DNA, 573 bp, Homo sapiens
tgatgggtgccgggccccccctcgagagtacttctagaattaattaaggcgggggattagatgatccttaatgatcatttcaggccaatttctataatgtgcactacacagttgagtgaccacttgcaagatttttaatgtgagcagggatagtagagatgatgaatgtaggtaaggagaggaaatgagaatgaggactttcaggggcaagagatggtggtgtcattttgtgttgtgttcctgagtcaggtaccaacagatttcctctgagtagaatataaatgctaacaaattaaactgtatgttgtatacattcagcccttggtaacaaggaaaatgatagaattgaaatgttcttgtacctcactagaagcagagaaagggtgctggatatttctgtttccgataatgctgcatagatagtgccacttaaatgtagagcaaaattacagtctcctctaagtaattcctccagttaccatgtgtcctaaattccgatacctgtccaatacaatttctagaactttttcacctccccatcatgtctgccttctagtgccccaaaattatgtg

SEQ ID NO: 48035 - DNA, 499 bp, Homo sapiens
  misc_feature 53: n = A,T,C or G
aaccctcactaaagggaacaaaagctgggtaccgggccccccctcgagagtancttctagaattaattaaggcgggcaccaagtattgactatgtaggcatgttaaactccaataaaacatacagcattgcctcatatatactaaaaatacaaaaataaactggagagagaacacaatagcctgtaataaaagctcctccccgcaccctgagtgacgcacgagactcgcttgaacccatggggtgcgacgccgcattgagccgatattgcaccactgcactccagcctgggccacagaacgagactccatctcaagaaaaaaaaaaaatgtgttcttagcaaaatgtttcccaaagcagtttaccaaacagttagcttgatgcaggttttttccctaagggcttaatgtgggattattcttcatgatcagtaccccattatggtgtataattggaatttcccctgacattactcttttaccttatcttcaatatgtatc

SEQ ID NO: 48036 - DNA, 210 bp, Homo sapiens
attttactaaatagagttggagaaaatagtcgctagagacgtacagtcaaaattcatatacatcacaggctgccaccactcaattctactggccctcttttactagaggtgacactacttctaaagacacagatgtttagagatccctaaggattcacaatgtacaaatcctataactactgaatatagctttctgtgtagagggagata

SEQ ID NO: 48037 - DNA, 620 bp, Homo sapiens
ctggccgtctttttcaaccctaaataaagggaacaaaagctgggtaccgggccccccctcgagagtacttctagaattaattaaggcgggcaattatcttattggtgtaaaaggctgagccaccagtggaagacctggtttgggattgagggtctcagggtgagtcagcccccaaactgacagatagggaggataaaatgggaaaaaattttccgccttcagtgagcctataaaaattgcaaacacatgtaacaatcaggagctggattaactctaactggattaacttaaagaattttgttgcaatgtgacattttgttttctctctagtaactggtatgaaccctctgtctccttatttaaatgtggatccacgatacctcgtgcaggtaagattaagattttactagtttggtgcattattttaccattttaaaaaaaacgccaagtgctatgctgacttgaactatgacatacacttttggaggcagtaagtctctggtctccattcacccttttttcctcacaaacaccaggagcttggcctgcatctctctgaaaccagttaactcccttcaaaagcttattttttaaaaccagagcagaattaatttttgaaa

SEQ ID NO: 48038 - DNA, 490 bp, Homo sapiens
  misc_feature 483: n = A,T,C or G
ggccgtcgttttacacccacggaaaacagcgtataaccatgattactgcgcgcgccttttctacacagtacataaatatatttacattaatgcgggggccgcttgataagtgaataaatggggcggtttcggaagcgtcagtgtttccatgttatggatctctctgcgtttgaataaagactatctctgttgctcagcactaaaaaaaaaaaaaaaaaaaaacaataaaagaaatgggaactccaaatgtgcacataaacaaccaagctcaacaaaactgtctggcccccccccaatggggaatgccccatacccaattcgtgtgcggctgtcccccccccctaatgaggattaatattcaccaaataagctatatactttggttacctatgtacctgttaccactttcaaaaatctacagacagtcaatgtggatgagaactaatcgctgatcgtcagatcaaataaagttataaaatcggngaaaaaa

SEQ ID NO: 48039 - DNA, 429 bp, Homo sapiens
attaaggcgggatgctggcttctagattgcaatagttatattttatagtgttaagaaaatatctgttccattttataagtttttttcaagaatgaatatcattgggtaccttttctataaatacagatgatttttctcctcaggtctgttggtttatattagatttcatagtgtcagatcatctttgcattcctgaaacgagctctacttgattgtgatgtagtagtcttttgatgtgctgcttgtactatttctttgatacttttgcactgatattgagactgattataaaaggcagttagcagctttctctcttccagtgggctctggaacattttaaaatagtagcaatatttttgccataaatgtttagtagaattcctctaagagctttttggaagataacatagtttctttacttagaaaaaa

SEQ ID NO: 48040 - DNA, 504 bp, Homo sapiens
  misc_feature 43: n = A,T,C or G
aaagggaacaaatgctgggtaccgggccccccctcgagagtancttctagattaattaaggcggggcgtccactaggtttcctgtcccctgctgctccttccgtaagaaaatgaaatattctatgcctaatactcacacgcaacatttcttgtactttgtaagtcgtttgcgagaatgcagaccacctcactaaactgtaaacggtaaagagatttttacttttggtcaaaaaaaaaaaaaaaaaagaaaaaaaaaaaaaagggaaagatggataaaaaaagaaatgtcatccctggctaaaaaagtaaaggaagcgaaaaaaaggaagagttaaagaggcaaatgcagggtaacccgacgaggaggctattgccgtaattagttcacatggtgaaaagaatggaccggccgtattaatgattatggattcactctttgaacaaatttctggccgctttttagttttgaaagtgaaaagtttcagactctcactgaggtattct

SEQ ID NO: 48041 - DNA, 626 bp, Homo sapiens
actggccgtcgttttacaaccgggaataaagggaacacatgctgggtgccgggccccccctcgagagtacttctagaattaattaaggcgggtggatcatctgatgttaggagataaaaacgagcctagctaacatgatgaaactctgtctttactaatcaacacaaaatggaataaagacttaagtgtggcgacctgcgggggggaacctactagaggaaaagctgatgacactggcccccgtaacagggcctttggatataaccccgaaaacaaaggttaacaacagacaaatgagatggcatcaaactaaaaagcttctgcataacaaaggaaaaaattccaaagagacaaccctcagaatgggagaaaacatctgtaaatcatccatctgataaagagttaatatccaaaatatgtaaggaacacaagaaactcaacagcaagaaaacaaataacccaactgaaaaatgggtaaggcacttgtactgacttcaaaacttaccgaaaagctatagtaattaaaacaatatgatactgggtcaaggacagacatgtacactgatgaaacagaaacggaaccaggaaataagcccatacatataagatcaaacaatcttcaagat

SEQ ID NO: 48042 - DNA, 522 bp, Homo sapiens
cctcactaaagggaacaaaagctgggtaccgggccccccctcgagagtacttctagaattaattaaggcgggaggctcacgtcgagtcggtacaaagacaccagacgggcactaactattggctctcactgctcctgcggatacaaaaaccacgttggcatcattaaacgcacttgtaacctaagctactacaattggcttagcagggggaaaaaattgttccagaaaacaatatgctgatttgctttttcatgcccatctacttgggctattcttagggagagacaacaaaattgccacacacatatacacacaatgctctgaagaaaattaaggaggacacgtccaacaaaatttaccaactaaaaatttatcttggataatgaaaaggaaactaagatttctaagtattatacaggataaaactgaaagcagaagacatgaaactaacagttgtattacattgtgatattagcgaaaaaaaaaacccataaaaaaaaaaaagggggccccccccggggg

SEQ ID NO: 48043 - DNA, 278 bp, Homo sapiens
  misc_feature 230, 242, 243: n = A,T,C or G
aacaaaagctgggttccgggccccccttcgagagtacttctagaattaattaaggcgggggggtttcaagaagtgcagccagtgagtatacatgccactgaagtcacctggctacagagggaaggacagtgtgtcgtgcgagatgccagctctggagttctcggttgttgtaggaggttgggtgttttcaaatggtaaagatgttttgagcaaataaaattgctttattnagaaaaaaaaannataaaaaaatatattttttatttaaaaaaaaaaaa

SEQ ID NO: 48044 - DNA, 475 bp, Homo sapiens
  misc_feature 308: n = A,T,C or G
agcgcgcaattaaccctcactaaagggaacaaaagctgggtaccgggccccccctcgagagtacttctagaattaattaaggcggggcagtcagggtgggaaggtagcatatctaagggattcagaattttctgggaggtggagacttggaatatatttatcacataattctcacagtcagtgaaatggctgattcccagaagtgaatacatatcctagtggaattataaaaggtattggttatatgtattaaatggaaccttacattagaccagtaaaaaaaaatgaaagctattgtagaacagttnaaaaaaaaaaaaaaaaaaaaaaaatttagcggccgccaccgcggtggagctccaattcgccctatagtgagtcgtattacgcgcgctcactggccgtcgttttacaacgtcgtgactggaaaaacccctgtcgttacccaacttaatcgccttgcagaacattcccc

SEQ ID NO: 48045 - DNA, 490 bp, Homo sapiens
gcgcgcaattaaccctcactaaagggaacaaaagctgggtaccgggccccccctcgagagtacttctagaattaattaatacattagtgcagaaactggtgaaatctaaactaaactaactggagattagttaataaagctggagtggctatctgaataacagagaaagtatactttagaacaaaaaatattatcacagataaagagggtaatttcataaggggatcaattcacaaagaagacataatattaactgtgtgtgcactggtaacaacagagctttagaacacaaaatgatgtaactaaaaacttttgccaccaaatggaaaaatagaaaaatgcataattacagttgaagatatcatcacttctctctcaacagtctaaagcagcagtccccaacccttttggcaccagggactgatttcattgaagacaatttttccatggacaagagggcggaggagtgggaagggtagtgaggtgggtg

SEQ ID NO: 48046 - DNA, 439 bp, Homo sapiens
tgggtgccgggccccccctcgagagtacttctagaattaattaaggcggggtaccaactgaatctaaaatggaagttggaattttttaaaaagtgaaacaaagatgtgagaaaaagataaagggagaagaaaagagagagaagacaagaaaatacataaatatagaaatgatgcatagggccgggcatgatggtctctatctcttggcctcatgattcgccaaccttggcctccccaaagtgctgggattacaggtgtgagccaccgcgcccggcctggatgttggtattttagggagagtctagtttcgttcagaggataaggtagacctatatttaagactgttattcttttatttacttatttatttattttgagacggagtttcgctcttgttgcccaggctggagtgcaatggcacaatctcggctcattgcaa

SEQ ID NO: 48047 - DNA, 461 bp, Homo sapiens
tgctgggtgccgggccccccctcgagagtacttctagaattaattaaggcgggatcagaaccgtactgattacactcgccaacagaacagacaaacctgaagtatagacgactgcattctctgtaaagcctgtggaaatctacaagacagtaaaaatgcactgggtccccccccggcgggagggcctgtttttccctacagggggatgttatccccccccatgtggggaattttaaaaaaataaccctgatctttacttaaaggagttgctaaatcttgctgaaaacaataaagggaaagttgtggcaataggagaatgcggacttgattctgagagatcccctcataatttccccaaagcgtaaccatgtgtgaataaattttgagctagtagggttgcagccacgagtaagtcttcccttgttattgtgtagccagaatgccgcaaaacttccatgcct

SEQ ID NO: 48048 - DNA, 344 bp, Homo sapiens
  misc_feature 24: n = A,T,C or G
cgcaattaaccctcacttaagggnaacaaaagctgggtaccgggccccccctcgagagtacttctagaattaattaaggcggggggggatatgtacctgaggtccagtgagtcgtgggtagatttttgtagactcctaggtatttttactggacctggacagggtactgtcagttgcaaattttatgggatcacaaaataaaaaaaaacctcaataatcaacataaacattttagtgcaatatttttaaaaatcaaaattaatttaaaaaatccgtaatgaacaaaatataaaaaattttgattgagtatccactcctgacctcaggtgatccgcccgcgtcag

SEQ ID NO: 48049 - DNA, 559 bp, Homo sapiens
accctcactaaagggaacaaaagctggagctccgcccccgccgcgacagtactggaggaatgacagaacgcgggcgccggtgcgatgctgggactctgcatccacatgagaaacgtcgcagcatcgccgtaagcgtaccgtaagagaccgcctcgggcgatcacgaacctgctttatttaagagccataataaagaattagccggctggagcaactggaattctttcgggtactcccatcatcactttagaggctagggtatgccaagagcttattgaaaactacatggatcctattgccaccagcgaccatgatgggcggcccagctcccgatttgatctatttggagtgctataacacgcgcacgctgtccaggctgttaaagcacctgtaatggcaatgaaatactacacctcaaaaataaatagtcatgaagatcttgaaaatttgacaacttacggttttcgtggagaagccttggggtcaatttgttgtatagctgaggttttaattacaacaagaacggctgctgataattttagcacccagtatgttttag

SEQ ID NO: 48050 - DNA, 249 bp, Homo sapiens
attaattaaggcggggaaagaacaccctaatctagataaaggtctgtttcagaaaccaacagtgatggcattctaaagagtcagacgccacaggcattcccattaaagtcagaaactagccaagggcaagctattattcagcagtgtcccggcactactaacccctgcaacaagccagatgaggaacataaggaagaattataattgtcattatttgtagacaataaaactgcctacctgtaaaaccta

SEQ ID NO: 48051 - DNA, 448 bp, Homo sapiens
  misc_feature 410: n = A,T,C or G
aaagggaacaaaagctgggtaccgggccccccctcgagagtacttctagaattaattaaggcggggggagatgtcaatcatcagcttcaacaaacataaaagaatgcttcatgtaccagtcaacagctgctgcacgaaccctcccactccagaaacccagagattttccccctcgccaagcaaggtcccacagcaaaccaagaaaaacagacacactggctgcctgcctagcaagcataggccccttccagagaagcaaaataactcttaaggtccccggcaaccgctacagcaatcgcacagatcagcaacctccaactgcatcatctcggtgagcaagtgcgcaagcagtccagggcgctgacctgggcactcggcagctccaggcctggggacttctccctggagtnttaaaaagtgtgtcatcacacacacacagccacgagta

SEQ ID NO: 48052 - DNA, 567 bp, Homo sapiens
aaagggaacaaaagctgggtaccgggccccccctcgagagtacttctagaattaattaaggcgggacagtagaaattaagcagtgaatccttacaatggaatgagtctcatactctatcagctgcatgctaggtagatttaaaacatgaaataaatgcttactattggcattccttctagttaatacttcctatgagcctgttaaaaatagctgaagcattaaaatattctaagatgtgacgctccctgagaattcagtagagtcttttgtgagataggtaatagtattttattttggagcatccagaaactgaagtaattaattcatttaacaggctttatcacccagagagtctgtataggccttattattaggtctgtgatttaattacctgaacaaaaggaaagctatcatgttaatgtttatttctctgttacacaaaaacaggatgtttttcactcattctccacagaattctgtggtaaataaatcacttatctcaaaaaaaatgacatcactaacaatatgaccaaataatttttgcagatcagatttgctatactttt

SEQ ID NO: 48053 - DNA, 486 bp, Homo sapiens
  misc_feature 338: n = A,T,C or G
aattaaccctcactaaagggaacaaaagctgggtaccgggccccccctcgagagtacttctagaattaattaaggcgggggcttcaggcaatacctcttagtgttgacctttggatacattatataaacttcttaaaagaaacattggaccctggtgatcctgagacaaacaatacaataagagggtatgtggaacattgatactgaaatgttttttatgatataaataattattctgatgttgataatagagctcatgaaagctaagctggaagtttaacttctattccattgttaaaaaaatgatacatgtaataaacttaagctttatgatttgnaaaaaaaaaaaaaaaaaaaaaaaaaaaaaataaaaaaaaaaaaaaaaaaaaaaaaaaaaaaataataaaaaaaaaataaattaaagaaaatatattaaaaaaaaaatttttaaaaaaaaaaataaaaagggcccccccccgggggggg

SEQ ID NO: 48054 - DNA, 623 bp, Homo sapiens
ctgggtgccgggccccccctcgagagtacttctagaattaattaaggcgggcgcgggggctgccacttgctcacgaaactgatgcggaagattaagctggacactggcggcaacccttgccagtgacctgaaatgaccccatatcactccactgtgctcgaccatagcagacctcacgagactccaatctcgaaaactaaataggtgcctcccatgggtaaataaatgtataaaaacctttgcctccgccctgtcttatgcccaataacaaagagaaaatattcttcaaattcccttctgtactcatgctaaggagcacagaagatatgatttaataagagcctgggaactactcagctaaacctgggttcgaccttctacttctgtcattcactagtgtgactctgagtaagatactaatttctctaggcatcagtttcctcagttataaaatggggatttatcaacttcatgaagtgctaccatgaattaaaagaattcagctgggcgtggtggctcacactgtaatcccaacactttggaaggccgaggcaaacggactgcttgagctcacaagtttgagaccagtctgggcaaaatggtaaaaaaaaaaaaaaaaaaaa

SEQ ID NO: 48055 - DNA, 471 bp, Homo sapiens
  misc_feature 239: n = A,T,C or G
tgctgggtgccgggccccccctcgagagtacttctagaattaattaaggcggggagaagatagggaacactcatccctggtcgtctatcccagtgtgtgtttaacattcacagcccagaaccacagatgggtctgggagagcctggcaaggcattcctcatcaccatcgtgtttgcaaaggttaaaacaaaaacaaaaaaccacaaaaataaaaaacaaaaaaaaacaaaaaaccccangaaaatgaattctgaatcataaaagaaaaacggcggccttaacatgtttcaagatgaaacaacactgaagatcaaattgtgccccgcctcactggcgttgtttctaaaatctatcttaatcctgatccttccagaattctcccagtttatgggagatagatgggaaccttatttgaatgtgttttttttttccatgatgtccaattttgttgtgggaaaggatttggataaa

SEQ ID NO: 48056 - DNA, 313 bp, Homo sapiens
  misc_feature 299: n = A,T,C or G
ggccgtcgttttcacccgacaaagggaacacagctgggtgccgggccccccctcgagagtacttctagaattaattaaggcggggggttaggggctcaagtctgagatgctactggttatatctctagggaaacctagtcaccctgtatatcctccccgcatggaatcacctcgctacccacctaccccaagagcctgcaccatgttgccaggtgcgtgggctctcctgaggcccagcctggcctttccacatgaccacaagggagacagactcaccctgggccacccatcaacacatncgagctctcttttg

SEQ ID NO: 48057 - DNA, 495 bp, Homo sapiens
  misc_feature 368: n = A,T,C or G
gcgcgcaattaaccctcactaaagggaacaaaagctgggtaccgggccccccctcgagagtacttctagaattaattaagggggttttacgtgatgatgatgattccatcatcttgattccatcaagatccacaagatgattctgtatcttgattttggtaataggtgattacattaataatgtatacatgagataatgcatagaactatatatttacagaaatgaattcagcttttaaacatggtgaacatttaacaatgtttgtggttaacaataatgtaccaatgccacttctgtggttttgatgctgtacgtagttatataagatgtcaccatcggagaaaaatgaagtatatgtgagactttntgtgcaattttttacatcctgtgagtaataattaattcaaaaaaaaaaaaaaaaaaaaaaaaaaaaaggcggccgccaccgcggtggagctccaattcgccctatagtgagtcgtattacgcgcgct

SEQ ID NO: 48058 - DNA, 340 bp, Homo sapiens
  misc_feature 300: n = A,T,C or G
taaagggaacaaaagctgggtaccgggccccccctcgagagtacttctagaattaattaaggcggggtacagtaaggcagtgcttcccacactggacctctttcctggttctcttttgcaatacattaacagaccctttatcaacataaacaatatgtccctgaatccacaacatacattaagaaagcatgaaggcaaaggaaaaaaagctttgaaccacaagaaggggaacattgccctgaaactgatataataccaaatgactcaatcgtgggtgacagaacaaaacttcaacctccnaaaaaaaaaaaaacccaaaaaaaaaaaacccccccccccc

SEQ ID NO: 48059 - DNA, 422 bp, Homo sapiens
gccccccctcgagagtacttctagaattaattaaggcgggggatgtcctatcttatggttttcttataatcgctctatctatctggtcatggcttcttttatattgacctttgcctagatcttaagtacaacccctatgcttcgattcaacatttatgcatattacatgcaactagttttgaaattttgagtaaactgacaaaggccctcttttaaagtaaaaaaatcaacgaacacccaatgttaaaatataacatttgaaaaacatttcaaaaataatgaagctttaaattggcaaggtccgaaccatcaacttgcttcaatttgaacacttaacgcaaacaagaaatgcagcagctgtcagatgccgttagtgattcaactctgaaataaaaggttccaaccctaactcttaaaaaaaa

SEQ ID NO: 48060 - DNA, 468 bp, Homo sapiens
ccctaactaaagggaacaaaagctgggtaccgggccccccctcgagagtacttctagaattaattaaggcgggaacggaagcaatatttgttgcttaatgtttataagaggaagcagtgaaaacaccacacacatagtcttgaaactcaagagggtcccattaacgagataatttgggaaacattccctggtgttttggacaccaacatgtctgcttaaacaagtacttttatttttcatttagaaatcataattcaaataaatcaatgtttaaaaattgcttatgcattttgacaaattttattacgggctaagtattagatgataccaaaaaatgtactaggtgtcctaatggcattgtggttgtataagaaatgtcaatatattttagagaagctgattgaaatatgtgtgtaggagtgaagtgatgtgacatctggaacttgccatatattattttaacaaaaa

SEQ ID NO: 48061 - DNA, 488 bp, Homo sapiens
taaagggaacaaaagctgggtaccgggccccccctcgagagtacttctagaattaattaaggcggactgatcacatactgtctgcagtgtgcgacgcctcacgtctgtattgccaacccttgtggatgctgaggcacggggatcacaaggccgggataccggcctgtgcctcatgtcccaactacttctgtagttgaagttcagaaattaactggactttgtggtgggcacctgtaatcccacctactcaagacgctgaggctcgagaattgcttgcacccgggaggcccaggttgcaatgagcggacatcatgcctccagactgggcaacgagcaaaactccatcttcaaaaaaaaatatcctttttgcttgagactaaatgctcattattattactaagttaatgatagttaataaagtttactattcatttacacatcaaaaataagcactattagaatttactgaagactcactctacttgact

SEQ ID NO: 48062 - DNA, 535 bp, Homo sapiens
  misc_feature 470, 471, 472, 473, 474: n = A,T,C or G
ccctccctccagagtacttatagaattaattaagcgggaaatagctatgcctacactagagccattcacacttttgctggagctgcaataatcttctaagtcatgcttgctctcgtgagggcaatgagatggtcacaatccaaggagagttggggttttcacttttcatttctctattaagtgaaaaaagtatatgaaaattgaaaaatagatattacttatgtaatcttcacagtataatttgcttgccaagcagtcactgggatttaatcagtttctttgtctttcgtttttctcataagctgagagagtaattttgtgtgcacagaagtactgtcttcagctacatgctgcattaaacattcctagatgtgaaatgattaaatttccaagtttttaaaatgtgaaaaaaaaaaaaaaaaaaaaaaaaaaaaaaaaaaggtgtgataaaaaaaaaaaaaaaaaaaaannnnnccgccccccccccggggggggccccccccccccccttaggagaggttttcccccccccccc

SEQ ID NO: 48063 - DNA, 495 bp, Homo sapiens
tgattacgccaagcgcgcaattaaccctcactaaagggaacaaaagctgggtaccgggccccccctcgagagtacttctagaattaattaaggcgggttctaaacacctcagggtctgcaggacatcacatgaggggatccagtaacagtaatccagaggcaacggcagcactggcaggacttaatgggaaacaccaccaactccagaacactattctgggtttgggaggtgctttatctctttgaagatgccccatttggaagaaagcctgtgacccaggccccacacagcgcccaaaggatacactgaaggcagaacctccgcaggtgtgactggataaagtccaaatgctcatccctgtaatcgtgctccttctccaggacactcaccgcatcacactgcagggaagacagacagagtcacctttttgcttcattgcctgctgacgatgggaacacctcattcttcagaaatagagtattgtggctccaaag

SEQ ID NO: 48064 - DNA, 531 bp, Homo sapiens
accctcactaaagggaacaaaagctgggtaccgggccccccctcgagagtacttctagaattaattaaggcggggagaggaagggaaaagcttaatagtacggtgcttatcacatcaagaaattggtaaatttctgaggaaagacaggctaatggggcactgaaatggaacacctgctttaaacgtgcagccttttgaatttttcctcaaaaccaataagttgacctctgagctgtcaggtgaccactgtgtgcaaaggggatggattctcttgtcagtagacggtcttctccatgaagcgagagtaggaagtgtactggaatggccaagcgggactgcttcagctgaccaggttcttttaaaccgtagtcatgctttcccactaactcttaaatccttatgcttagaaaattgaggataaggctgggcacagtggctcaggcctgtaatcccagcactttgggagaccaaggcgggtggatcacaaggtcaggagatcgagaccatcctggctaacatggcgaaaccccg

SEQ ID NO: 48065 - DNA, 555 bp, Homo sapiens
tggccgtcgttttacaaccggaaataaggtggaaccaatgctgggtgccgggccccccctcgagagtacttctagaattaattaaggcgggcctggcggataccatctttgtgataatcaatgggtcacgatgaagtgggtcgatcacttaaccctaggaggcggacgctccctggacccgtgattcctccactacactagagactgattgattgattcctcaccctgtaacagcacgtttcttataataaaaaagcaaaaacgggacaagaaaaaacagcttttcctgagggatttctaaccatgtgtgtaatcctcccatttgggcaggataggtgtttgctcccttgttttctttttttaagaaaaaccttgaaacctttgacactgacagatgtgtttgcaaggatacggcttcaatattactaatttccatgtgtatctggaagtatttttaaatggcataccaaaatccagaaatttaaagatgcctataaaagtaaacaacatttatttaaaaaaaaactttgaatatgccttcttttttaattaaaa

SEQ ID NO: 48066 - DNA, 230 bp, Homo sapiens
taaggcgggtctgactgaagatgttggtgaagtccccgtgcccaaatgctgtgaaattcacaagttcatttcttctggaaatgtacccgatgcgttacagtgtcgtatatggattggcatgatgtgatgtgcctgaggaagggcagagctaccttccattctctgggtgccttccctcctcctgcacttttcagtgatggtttcaggttcctgaaagctaccgtgtgcca

SEQ ID NO: 48067 - DNA, 528 bp, Homo sapiens
ggccccccctcgagagtacttatagaattaattaaggcggggtcccgcatgcggtattcatactgtatatactctcgcataatcctcttcgcatactgagtagttctgatgtgaaacctaccgcatccatgaatccacatatagcgaccgtaaatgttaattacctggcccattcatttgtgttgtccctcttcaaacttcaaaaaatcaaaagtaaagaacccctctcgcaagaggccagggaggaaaaataccttacctatcgagaaactcacatcaaaattacatccaacttctcagaaatcatgcaagcaagaagagaatagtgaaatatttagtgttgagagaaagaagcccaccacctagaattttatatcctgccatgttgtgttacccttccaaagtaaaggaagaataaagacttactcaaagtgaaaattgagggaatatgttgcaaatccgatttgtaagaaatatgtataaaagacttaaagcaaaaattgagggaatttatttcaaatctgattt

SEQ ID NO: 48068 - DNA, 436 bp, Homo sapiens
  misc_feature 9: n = A,T,C or G
gatccctanagctgtgcgcaccattcccctatagggggcatattctcttgcaccgtctcccaaccgagcaagagctgcttctccttgcatttggagtcgagtttttgcgagatccaggggaaaggttgctaacaaaaacacaaatgcagggaaaaacccacaacattcagagaaacaaacaaaaatctaaaatcataggagtaatattttcccaagactggttgttctcaaattttagaatatatcagaatcagctagggagattttaaaaattagaaatttcctagccccgtgcccatggattctaattcagtaggttgaagagggtttagaaacttgattctcacacagtcccaaatttaagaatcactacgcaagagcatcctggatcactagcaaaaaaaaaaaaaaaaaaaaagggcccccccccgggggg

SEQ ID NO: 48069 - DNA, 483 bp, Homo sapiens
ctaaagggaacaaaagctgggtaccgggccccccctcgagagtacttctagaattaattaaggcgggtgctggagtcagagaactttctctgccaggttgataagggattagagagaagagagagacaggggtgaaatcttgggctctagaacaatttttgattcaagacaccggtaaagctcagtgagtaaaaggtgtggtggctcgtgcctgtaatcctagcacctgaggtcagtagttcaagaccagcctggccaacatgatgaaaccccgtctccacaaaagaaaaaaaataaagaaaaaaaggggcgggccccccccgggggggggcccccatcccccatttgggggggttttttcccccccctttggggggtttttttaaaaaattgatgaccccaactctaagcttctttgtaaattgggaatttttcaaaataaaatgttctgggagatggtaaaacaaatgtggaaaaagcaag

SEQ ID NO: 48070 - DNA, 404 bp, Homo sapiens
taaagggaacaaaagctgggtaccgggccccccctcgagagtacttctagaattaattaaggggggatagttttcacagtttgagtcaaaacaagttgacttcccactattaatagaacaacaaccaccacaaatccttaggaaaacaaaatagattcactacaataaagtatctgccattccatttttcaactaaaaaaaactagatgtttaaaaaaaaaaaaaaagggaaggggggactttaccttaggaaactaattccaagaaacccctagggcgggattttggcccctttggggaaaaaaaaaaaaaaaaaaaaaaagggggggccccccccggggggggcccccaatcccccttaaggggggggtttttcccccccccttgggggggtttttaaaaaa

SEQ ID NO: 48071 - DNA, 339 bp, Homo sapiens
  misc_feature 317: n = A,T,C or G
taagggaacaaagctgggtaccgggccccccctcgagagtacttctagaattaattaaggcggggggtgtttcaagagcctaattctagacattccagccaccctgtgcttaggcatccagattctctgcaaagaacgtaaatgtgtgtgccctacagggtggggaataccaatagattgcttgtggagattccacgtgtgacttagatgctctaatattggcacttaaagctgacattttggcgtaaaaatgcactgtgaaagtcatcaaatctataatgcaattggatcttagaataacattaatttgcctgctntcaaatctaccactgtatgagt

SEQ ID NO: 48072 - DNA, 546 bp, Homo sapiens
taaataaagggaacaaaagctgggtaccgggccccccctcgagagtacttctagaattaattaaggcgggcagattggagaagaagaaataaatctgttttcattcataggttatataattatctatatggaaatccctacatatttacccccaaaagctactggaaactaataaatgggtttagcaagactagaatataaagtcaatgtacaaaaggcaattgtattcctatgtaccagcaatgaataactaaataggaaactagaatttttaaataaaattaaatgtttaaaaaacatttacaatagcaacatatgaagcacttagatattaatttaataaaatatatgcaggatatgtcatgttcatgggttggaaaagattcttgttagtgcatcaattgtccccagttttatctataaattcaatgctattctaatcaatatcttagcaatcagatattgatcaaataattctaaaatctatgcagaaaggcaaaggaactagaatggtcaaaacaactatgaaaaagaacagagttgtag

SEQ ID NO: 48073 - DNA, 607 bp, Homo sapiens
tcaacccggaataaagggaacaaaagctgggtgccgggccccccctcgagagtacttgtagaattaattaaggcggggggtgacatcgtgggagactgtgtttcctgcttcaaagaaccagatcagagttcagaggcgctcactcaagcctggcgttctgagctgcagtcaggaagcataacgcaactctactgctggtgacccagctggtttaacaaatggggggaaatgttttctcaaaaatgcagcatggttaaacagcagtgtctgaggattcaagaagtctcccagagaataaaatctcatcagtgctgagttacctaaattactaaaaccagcctgaaacacttttggttattccaataatattttcctttggaaaatgaaagacactgatcacatgaaataacattcatacccgctcccaattgtgatctctctgtggatagatttcattttcattcattaataaatttatttcctggatttatacttatcaagtcttccagcaaatgtgaatattaaaatatatatttctaaatgcttaatacttaatattcttggagcttaccatgtcaaagtaaaatgctagctttttttttttaac

SEQ ID NO: 48074 - DNA, 453 bp, Homo sapiens
tcactaaagggaacaaaagctgggtaccgggccccccctcgagagtacttctagaattaattaaggcggggcggtgatgtaaagggtgatggtagatgtggccactgtggatttttcgcaagaacattaataaactaaaaacttcatgtgaaaaaacaaaaaaaaaaaaacaaactaaagaaaacaaaaaaactaaagacaaaatgtacaaacttagcccacccccggaagatagaaacaccatacaaaatgaaaatattgtcaagagccccccatagaaaatgaaaaacaagctaagacaagtattggagaagtatagaagatagaaaaatataaagccaaaaattggaaaaaaaaaaaaaaaaaaaaaaaaaaaagggggcccccccccgggggggacccccaatcccccttaaagggggttttttaccccccccccttggcccgtttttt

SEQ ID NO: 48075 - DNA, 428 bp, Homo sapiens
aattaattaaggcgggggcgccttgtacaagtaaataaatgagggcggtcctggaagcgtcttagcctccatgctatggatctctctgcgaatgaatacagactactctctgttgctcacagaacccaaccacccaaccccaaaatactggctccctccgcgtgaatgggggcagggacgaatggtgtgtgatgttccacccccccacgggatagaaggtcctccccaaggcagatgtcaggaaactcaagtgcctttaggcacagcaggcaacataaatgtcctggggggtaagatgatcaaaggcaggctgggtctgggggtaatcccagtgctctaggtggacattgcttgaggccagtggtaaaagaccagcctaggcaacatagcaagacctcatctctaaaaaaaataaaaaaaattaaaaa

SEQ ID NO: 48076 - DNA, 509 bp, Homo sapiens
gcgcaattatccctcactaaagggaacaaaagctgggtaccgggccccccctcgagagtacttctagaattaattaaggcggggtaagatttgccgagttccttttactttttttaacctttccttatgagcatgcctgggcaacatagtgagacccctatctctacaaaaaataaaaaaaaaattagccaggcatgattctgcttgtctatagtcctaactacttgggaagctaagctgggaggatgcttgagcccaggggtttgagactgcagtgagttataatcatgccactgcattggctctttggaaaaaaaaaaaaaaagagagagagagagaactgttatttacagtttggtcaggtccctcttttgtgcttcataactgctcaaacagtaagtttgaataagctcattcagatatgaggtgtggttgatttgggtaacatgaaacttttaagggagatacaggatttaaaatggctttttatgtaatataaacatttattt

SEQ ID NO: 48077 - DNA, 491 bp, Homo sapiens
  misc_feature 382, 385: n = A,T,C or G
aattaaccctcactaaagggaacaaaagctgggtaccgggccccccctcgagagtacttctagaattaattaaggcgggggggaggccagtcattaggagatatacctaatgtaaatgacgagttaatgggtgcagcacaccaacatggcacatgtatacatatgtaacaaacctgcacgttgtgcacatgtaccctagaacttaaagtataataataataatacgaatttcatcattctgaatagctcaaaatgttcctctaagtctcgatagtagcaatagatcacagaactaaactgagttgcctgattgttgtgtatcaataatgagtatgctagtggggctttggatcattaaaaaaaataattaaataaagcgaanaanaaaaaaaatataataaaaaaaaagcggccgccaccgcggtggagctccaattcgccctatagtgagtcgtattacgcgcgctcactggccgtcgttttacaacgtc

SEQ ID NO: 48078 - DNA, 523 bp, Homo sapiens
  misc_feature 412, 413: n = A,T,C or G
aaagggaacaaaagctgggtaccgggccccccctcgagagtacttctagaattaattaaggcgggggtagaaagtttattcaaaggaataataacagagaacttcccaaacctagggaaagatatcaatattcaagtacaagaaggttatagaacaccaaggagatataacccaaagcacacctgaaaataccagtaacaagtaagaagatcaaagctgtaataaaaaaaagtctctcagcaaagaaaaccttaggacctgatggcttcttctgaattttgcaaacatttaaggaagaactatagcaatcctactcaaactattctgacaaatagagtatttgggaatatttccagactcattgtatgaggacagtattaccctgataccaaaaccagacaaaggcttattnnaaaaaaaaaaaaaagggaaacctccgggccattttccctaaaaaaaaggtgccaaaattcctaaccaaggtccttccaacttaatttcaccgcctttttaaaagtttttt

SEQ ID NO: 48079 - DNA, 383 bp, Homo sapiens
ataaagggaacaaaagctgggtaccgggccccccctcgagagtacttctagaattaattaaggcggggacagccagggttgatctggccccgagggttttggatgtttttaggatgacataaaaggcaagtgttttccccaaaaaaaaaaaaaaaaaaaaaaaaaaaaaaaaaaaaaaaaaaaaaaaaaatgggggggcccccccaggggggaacaataattccacctaaaaaaaaggctttacccccccccctctgttgaacataaaaaaaaaaacttgcagtgagccaagatcgcaccactgcactccagcctgggcaacagagcaagtctccgtccaaaaaaaaaaaaaaaaaaataaaaaaggggccccccccccgggg

SEQ ID NO: 48080 - DNA, 481 bp, Homo sapiens
cctgaataaagggaacaaaagctgggtaccgggccccccctcgagagtacttctagaattaattaaggcgggagtgtatgaaaaatacatagtaaggatgcctaaggagagtgcagaagcccagcactgagcgtcctggaaagacttcaaataaatctgcacattcaacataaaaaataaaacaaaaatagacagcttttctccagttccatagtcacctgtgagagactgatgaaggctaggagacattcattaaagagtgagaatcattttctgggttccttcagtggttaatctttcactttttggcagtttctaagttcataacagtttttatgtctatgaaatcaattacctcagtctgcaagtccccgtgcacttattgtgaaatataatgaaagcgttgataaaggtgtgcagagaagatgaatacatctggtgaaatacaaatctagagaaataggttggtgaactcctccat

SEQ ID NO: 48081 - DNA, 591 bp, Homo sapiens
aaagggaacaaaagctgggtaccgggccccccctcgagagtacttctagaattaattaagctcatgaatacagatgtaaaactcttatattgttgacgtgatatagaacttaggctgcagctcagttttggcattttttcatgttgagaatttttgctctaaatttacttaacatttagattttaatttacttaaaatttacataaaattggatttcccttctagagggtctggttgcagtttacataggtcttttgcccctgttgtgcctgttgtctaaaatgttcttccctatctgtaaatcccaccttaattaaggcggggactgatgcctggcaatatggtgagagactggacttggagatgacggtataacttaggagtaaagagcctgaggtctagagccagattgcctggctcagccacttactagccatatgaatttggtaagttacttattctttgtatgctttattttcgttatttgtaaagtatggataatattgcctaccttgtagggcagtttgatgattaaattagttaatataggtaaaatgcttaggaatagtacctggcatgtgcaattaacta

SEQ ID NO: 48082 - DNA, 474 bp, Homo sapiens
  misc_feature 404: n = A,T,C or G
accctcactaaagggaacaaaagctgggtaccgggccccccctcgagagtacttctagaattaattaaggcgggcgcatcacaacgatatgaaattcttaccattaccattcctaacgaaaaaccctttatttgctacaaccacaatgtgttaaatcctcatatactctgtcctctgtattccgacatacgtggatagcgattgcctgataaatcttttaaactagaaagctgatcatgacttgagacaacagacactcacagcacttcattctgtgacacacaccaacacttccttgtctaagcctggattcaagttccaagtcttcgttccccagactatatttaccactacacaattagcctaaaagaaaggcagtcgcgcctgtctctctattaactatngattaggttgttaagcatataattaaggggagaattcctatatgcaggtccaaggagttgcttgttttct

SEQ ID NO: 48083 - DNA, 494 bp, Homo sapiens
  misc_feature 393, 395: n = A,T,C or G
acaaaagctgggtgccgggccccccctcgagagtacttctagaattaattaaggcgggcgcctgtagtcccagctactcgggaggctgaggcaggagaatggcgtgaaccctaaagaaatgtaaacaaggagataatggaaagctagactgctggtatctttctttagctgtgggcacagaagcccaagagggacacctaggcacctgaaatgagaattcctggggtgatgccagcctccctgtgtgggcctcaggtatggcagccacagggcatccaccctgacccaatgacgctgcacaagactgatgagctcacatcagacagattgaccctgtccacctgttcctggttcataaatccttctctctcccctctaccccctctagagcananaaaaaaaaaaaaaaaaaaaaaaaaaaaaaaaaaaaccccccccccccgggggggacccccccccccccctaaggagaggttttatccccccccccccgg

SEQ ID NO: 48084 - DNA, 482 bp, Homo sapiens
  misc_feature 85, 89, 119: n = A,T,C or G
ccctactaaagggaacaaaagctgggtaccgggccccccctcgagagtacttctagaattaattaaggcgggggggggcagcagngctncataataaaatgcctactacattatgagancggtaaatttctgaggaaagacaggctaatggggcactgaaatggaacaactcctttaaacgtgcagccttttgaatttttcctcaaaaccaagaagttgacctctgagctgtcaggtgaccactgtgtgcaaaggggatggattctcttgtcagtagacggtcttctccatgaagcgagagtaggaagtgtactggaatggccaagcgggactgcttcagctgaccaggttcttttaaaccgtagtcatgctttcccactaactcttaaatccttatacttagaaaattgaggataaggctgggcacagtggctcaggcctgtaatcccagcactttgggagaccaaggcgggtggatcaca

SEQ ID NO: 48085 - DNA, 477 bp, Homo sapiens
accctcactaaagggaacaaaagctgggtaccgggccccccctcgagagtacttctagaattaattaaggcgggggagaatgttttcatgttacttatactaacattagttcttctcaaaagggatgaaattttggacatggtgatatttcagagaacagacatgattatagagtccagtgtatcattttctcccatgtcactccactcagagatcttttagcatagcccagtactctgtttcaataaagtagaagaaatggaaagacagaaagggcaagatttaaaatgacagtaagttctccatactttcatagttaagatacaaagggaggtattatcaaagagaaacactgggccggcgtggtggctcatgcctgtaatcccaaaactttgggaggccgaagtgggtggatcacctgaggtcaggagttggagaccagcctggccaacatagttgaaaccccatctctactaa

SEQ ID NO: 48086 - DNA, 357 bp, Homo sapiens
  misc_feature 340: n = A,T,C or G
cctcactaaagggaacaaaagctgggtaccgggccccccctcgagagtacttctagaattaattaaggcgggcatgtttaaacctctcaataaactaggcatttaaggaataaaccttaaaataataagagccatctatgagaaacccattgccaacatcatgctgaatgggcaaaagctggaagcattccccttgagaactggaacaagacaggatgcccactctcaccactcctatttgatatagcactgcaagtcctagccagagcaatcaggcaggagaaagaaatgagaggcctccacataggaagagaggaagtcagactatctctgtttgcanacaatgtgattctacac

SEQ ID NO: 48087 - DNA, 560 bp, Homo sapiens
  misc_feature 495, 498, 499, 500, 502, 504: n = A,T,C or G
ctcactaaagggaacaaaagctgggtaccgggccccccctcgagagtacttctagaattaattaagggggatgagggtggaggtggggatcattcctaagcaataggatcaaaaggagataagctaagaaagtacatcaaggagatatggaataggaatggtaatgttggtctcatcacaaccctacatgtttctaggctggaatacatatacccgtagcaaagcaaaggcaaagatgtaggtagcccagcattatcaaatacagtaggcactagcttcatgtggcaatttaaatttaaaccaatccaaataaaattttaatttcttgtttgcattagcaatatttctgtgcttattagccacatgtggctactggacagcagaaatatagaacatttccatcactgcagaaggttctattggacagcaatgctttagtagaaaaccgttgaatctattaaaagcaacagtaggcactcaacaagtgtttagttngtnnnananaaaaaaaaaaaaaaaaaaaaaaagggccccccccccgggggggacccccattcccc

SEQ ID NO: 48088 - DNA, 447 bp, Homo sapiens
agggaacaaaagctgggtaccgggccccccctcgagagtacttctagaattaattaaggcgggggaaagttagtagaatgtgccaccatttttctagaagagacatgaatatttatgttgaatgcatgaaattgctgtttttttaggttaaaaggcagtgaaatatctaaaatttgatgtggttttgtctaatgtatatgtattagcctatatattttaaggaaaaagactaaatttgtaaataatattttcaagacagaatgacatatatgccagatttgcctggaaaagttccagtttattcttctcttcaaagtgcaattattaatagaaccccttttcacttttgaaaatgtctcaatgtagaccaaagttatatggtcatttggaggatagggagaaaaaggtggagaggaccggtggaaatgaagaaataaaagtgtgaag

SEQ ID NO: 48089 - DNA, 187 bp, Homo sapiens
aagggaacaaaagctgggtaccgggccccccctcgagagtacttctagatttaattaaggcgggaaccttgggttgagtaaatgctcgtctgtgtgttttagtttcatcacctgttatctgtgtttgctgaggagagtggaacagacagggtggagttttgtataaataaagtttctttgtctcttt

SEQ ID NO: 48090 - DNA, 372 bp, Homo sapiens
cctcactaaagggaacaaaagctgggtaccgggccccccctcgagagtacttctagaattaattaagggcggggctgagtaaatgccggcttaccatctctaccatcatccggtttaggcatcccaaaaaaaaaaaaaaaaaaaaaaaacagaggggggcccccccccgggggggaccccattacccccgcaggaaagcaccatggcccccccccacgggggtgacatacaaaggacatcctgcacatcctgcacatgtacccctgaacttaaaagatgaaaaaaaaaaaaaaaaaaaaaaaaaaaaggggggcccccccggggggggcccccaatccccccaaaaggggagtgtaatacccccccccctgg

SEQ ID NO: 48091 - DNA, 271 bp, Homo sapiens
ttgtgaattcttcgataatggcccatttgggctattatccggttagcgggggcaggcctcctagggagaggagggtggatggaattaagggtgttagtcatgttagcttgtctcgggtatgctgttgtgaaattgaaactgtaaaagtagatggttgaaagtactggtatgttgctctgtatggtaagaactaattctgttacgtcatgtacataattactaatcacttttcttcccctttacagcacaaataaagtttgagttctaaact

SEQ ID NO: 48092 - DNA, 469 bp, Homo sapiens
  misc_feature 450: n = A,T,C or G
gcgcgcaattaaccctcactaaagggaacaaaagctgggtaccgggccccccctcgagagtacttctagaattaattaaggcgggaagcatggtttaaataagtgtgggtgacgtactttctctacactgggtgtcggtggtgtgggtgaggagaggactaaggcttccattaaagctggcaactctcttatgtaagagaatctagtagagtgcaacgctcgtaggccattttacctttttgttcctttgcttttcagctttaatttttacaatttcagtttctctaatagtcaaaatgtaatttgataaaccaattttttaatgctgttaatgaagctccattttggttctgatgcttggtaattcagacaaatcaaacagtactgctatttgaggcagtattaaagaatgaggagtgtttgccattcttttttttttttttttttttnggagactgagtcttgccct

SEQ ID NO: 48093 - DNA, 454 bp, Homo sapiens
caagcgcgcaattaaaccctcactaaagggaacaaaagctgggtaccgggccccccctcgagagtacttctagaattaattaaggcggggaaacacgcctggccactgacctctgtcgtctctgtgaagggaaacacgcctggccactgacctctgtcatctccactctgggtgtccgttagaacagacagcacagccctacgaagggagtgtgagctgctttagggactggggcccagctcctctccgtacagtgatggacagacagtgtcatagactggagaggaaattcgattttctccttagtttaagaaaaaaaaggccgggtgtggtggcttacgcctgtaatctcagcacttttggaggccgaggtgggtggattgcttgaggtcaggatttcaagaccagcctggctaacatagtgaaaccccgtctctactaaaagtacaaacaa

SEQ ID NO: 48094 - DNA, 358 bp, Homo sapiens
aaagggaacaaaagctgggtaccgggccccccctcgagagtacttctagaattaattaaggcgggggttgaaagttgttatctttaaatacatgtacaaatcgtggtcaaaagtaacgttattaaaatagatttattatccctgagaaaaaaaaaaacaaaaaagaataaaaaaaaaaaaaaaggggggccccccccggggggggcaacctacgagccctacatggggagatttaacccccccccgcgggggcgtttactaaatatgatccaataacttgaccaacggaacaagttaccctagggataacagcgcaatcctattctagagtccatatcaacaatagggtttacgacct

SEQ ID NO: 48095 - DNA, 569 bp, Homo sapiens
ctaaagggaacaaaagctgggtaccgggccccccctcgagagtacttctagaattaattaaggcggggatacggttttaggaattaatgctttgaaaactgagcctcagccaatcaccttaatttcctgaagtgataatctgtggtacatttaaaatttgaaaagtaattctttcagggtgttacatgattattgctctggtttgatgggtttaggttcgaggtacctataaactttattaccttgacaatcagttagtgaaggcattaattggttggtagagcagctcatttaatttcttataccatattctcagaattatttagaattactagagtaataactgtaaatcaatttttagcagactgaataggtcatttagtgatgtgctttggtggtgaagtgttaaaatccttatccgacccccttaataatgattattgactgagttttattattaataacaattaggtcattgaacattctgattttccttttttcttacagatgaaccaactaaccctagcattgatcatgatattgcacatatccctgcctctgctgttata

SEQ ID NO: 48096 - DNA, 338 bp, Homo sapiens
  misc_feature 287: n = A,T,C or G
aaagggtaacaaagctgggtgccgggccccccctcgagaatacttctagaattaattaagggggtgggtaaaagaaactcttaaaaagcacaggaaatttgaaactggttaatgccagtgacaattgatgaaaatttaaagcatatggatgattcccttgcatcatcaaaaatagaggtgagattgcacaatttaagtagatcttgatcttgctctgaaagcagacagcactgccctgcatatcacaaatacactcccaatggacagaacatatatctgtccagtcngaaaaaaaaaaaaaaaaaaaaaaaaaaaagggggcgccccccccggggggg

SEQ ID NO: 48097 - DNA, 564 bp, Homo sapiens
  misc_feature 469, 470, 471, 472, 474, 476, 477, 494, 495, 496, 497: n = A,T,C or G
accctcactaaagggaacaaaagctgggtaccgggccccccctcgagagtacttctagaattaattaaggcgggagctgtctgcagtaaatggggcatccgtctcacatcaatgggaaaattaatccatgtagattttggatctaaatgtgactgtcataacagtagagctgtgtgaaaataatagaatagaatatctcagctcaggaagggattgctgcatttgactgaattaaaatcaagaacttctgtacatcagaagacatcagaagtgaaaagaacaagctaccgagggaaagttacttgcaacatatttaaatgcagaaaaacatatatctagaatacagaattatcccagaattgcacttttagcagtaagggaacgggagcagcgttccagcctcagtttctatttataatggtgacatggaaaaaatactgctggatgcccacaaataagagaaagaccnnnnanannaaaaaaaaaaaaaaaannnngggggcccccccccgggggggaccccaattccccctttaggggggttttttacccccccccttgggg

SEQ ID NO: 48098 - DNA, 302 bp, Homo sapiens
tagaattaattaaggcgggtagaccttgcatttctaatcttctgctcatttcacatgttcggtttcatgtttaactttaaacaattcaatgtttgcattattcctaacagatccagaaatgacgctgtctgggtcaacatttcagggaggagtctgccaccagtgtaatgtatcaataaacttcatgcaagcatactaaaaaaaaaaaaaaaaaaaaaaaaaaaaaaaggcccccccccccggggggggcccccattcccccctttagggggttttttacccccccccccggggccgttttt

SEQ ID NO: 48099 - DNA, 470 bp, Homo sapiens
  misc_feature 402: n = A,T,C or G
accctcactaaagggaacaaaagctgggtaccgggccccccctcgagagtacttctagaattaattaaggcgggtgcttaataaataacgttgaagaaatttcagttacaaagtatgtcttctgaacaaaactattgatttgtttcatttctttaactccattgccttaggaaatgtttgcgatgtggacgggagaaggtggagtgtttcatgggctaacttttctattttattacactgtgttctttcttaatggctcgactcactagataataaaagtagaactagattcataaaaaaaaaaaaaaaaaaaaaaaaaaaaaaaaaaaaaaaaaaaattaaaaaaaaaaaaaaaaaaaaaaaaaaaaaaaaaaaaaaaaaaaaaaaaaaaaaaaaaaatanggggggggccggcgcgccgcgggggggcttctttttttttattatttagagttccctccccccccccc

SEQ ID NO: 48100 - DNA, 469 bp, Homo sapiens
taaagggaacaaaagctgggtaccgggccccccctcgagagtacttctagaattaattaaggcgggtggaaggttgtgttgcttcatgaaatatcaaggtagccagtgtctctgagaaggatgtaacctctagtatcttagattttttataacattattctgtttgaaagtctttaaagcagaagttacgtcatcccctagggcccagctgttccacagatatgttggatttgactatacgatgttaagaattttaaaaatttattgccagcatttaaaagtcaatagaactcacttgaattccagatttctggcatctctgaaaaaaaaaaaataggaagatctggcaatatctgttatccactcctgcctgacactggctggagagagagataattattgtggtaatattaagggcctcctgtaaacgggcatgtgctctctgttttactccagtcccgattacttg

SEQ ID NO: 48101 - DNA, 520 bp, Homo sapiens
ataaagggaacaaaagctgggtaccgggccccccctcgagagtacttctagaattaattaaggcggggtaagctctacagcacatatataatctgtggctgtgcttgcactaataagcgagcattccaactctcaggccagggcctcttccacaataccaaacattaggggacctgtgtactaactagttctcttatatatacccatcatttaaccagtctgcacctcagctactgatcagcaactctgtgctaagtcacaatgacttctctatctcaaaaaggaaaataaaaaaactaataaacaaatgacggggccccccccgggggggaaaccaaattccccctttagggggcttttttaccccccccttatgggcggtatttaaaaaatatgctggattccgtttaaagaagacattattagagcaggaagtacaagcatttaaaatatgttgttcccatatatttcaaggtctctgtgtattaagctaactcaaaagttttgaaagctttttctt

SEQ ID NO: 48102 - DNA, 562 bp, Homo sapiens
ataaagggaacaaaagctgggtaccgggccccccctcgagagtacttctagaattaattaaggcgggggcatctcctgaagtcaataaatgaggacgctcctgacccgcgtggactaccacgatatctacttacaaggcgaaccatgaaggcgaggtttggcgctgcccgcctgtaatcccagctacatcatgaagctgttgcaagggaatcacttgaccccaagaggcacacgtggtggtcagccgaaataacccccttgcactccattctggacaagacgagcgagactttgtcttgagcctaacaaggcctaacagcaatttcatgggccgtgcgcccgcgtgagcgttccacttgcttcctataggggggaaattgaacctccccactcagagaatcttgaaattgctaaagaaggcctatgaagcctccctttcagaaattaagaacggccatgaaatagaaaagaaatcgcttgaagatttactttctgagaaaccggaatcgctagagaagcaaatcaatgatctgaaagagtgaaaatgatgctttaaatgaaa

SEQ ID NO: 48103 - DNA, 577 bp, Homo sapiens
aaagggaacaaaagctgggtaccgggccccccctcgagagtacttctagaattaattaaggcgggcacctacagccgcagctacttggagggctgagtggatctcttgagcctaggagttcacatccagggcttttcacaagaatattgaccaaatcttctggtagcacacttcaacaagatgtcccggttatcttattgtagcaaatacaatgaatgattagttactagtttttcccattgagtttctagtacttaacactgcacgaggcacatggacaactatttgttgagtgagtgaatgggagttcactgctgcagtaaagatctgcctttatacatgaaatgttaattccaggtagactttgctaagcgaaggatgcataacctaattccctagagcaaccactaaaaacaaaaatgtagctaaaaagccaatagcagatataaagtaggattctagatgctttcttaaattcatgaaacagcagaaaagggcaggtgggggaaagaaaaaatgggacaaataaaaacaagattgtagacttaaaaccatctgtaaaataattacattaaat

SEQ ID NO: 48104 - DNA, 231 bp, Homo sapiens
  misc_feature 152: n = A,T,C or G
aacaaaagctgggtaccgggccccccctcgagatacttctagaattaattaaggcgggagaatcgcttgaaccccgggaggtggaggttgcagtgagtcgagattgcaccactacactccagcctggacaacagagtgagaccctgtctcanaaaaaaaaaaaaaggaaaaaaaaattattttttaaaaaaaaaaaaataagggaccctttttaaaatacccctcaaaaat

SEQ ID NO: 48105 - DNA, 323 bp, Homo sapiens
  misc_feature 289, 299: n = A,T,C or G
agggacacagctgggtgccgggccccccctcgagagtacttctagaattaattaaggcggggcggtgaagctggagtgtggggagcagggaagacctgtagcaggaaaggagaagtgtcggcggtgagcagccagagatgtaaatgagcagctgcagagtttatttaataggccacagataagggctgggcacggtgggtcacacctgtaatcctaacactttgggaggctgaggtgggtggatcacccgcagtcaggagttcaagaccagcctggccaacatggtganacccatcttntaccaaaaaaacaaacaaaaaact

SEQ ID NO: 48106 - DNA, 623 bp, Homo sapiens
aaagggaacaaaagctgggtaccgggccccccctcgagagtacttctagaattaattaaggcgggaaaagatgcatgtggataaaatcagaatcatcccatcagataatatctgctatcatttctatagtatttaacattgaaatgtcaggtagtgttctcagtagtctaagtattccacacacattaaatcagttagccccatttaatcagtatttccaatctataattatcccaattttacagatgaggaaactgaggcacacagaagttaaggtgataacactgtaactagctgagctgggattcaaaagtaggtaatctagttccagagtctgtattaggagaacttcgtcctgaggttactctatatttttagattaaataatttcattcttagaggttgggaaaccgctaatatttgttagatttgtagctgataagagaatgtaaaaagagaagataattcacaaaaatcattatcccttaatattaaaaagactggaagccagacacagctgggacacatgcctatagtcccagcaactcaggaggctaaggcaggaggattgcttgagcccaggagtttgaggccagcctgggcaatatagtgagaccctgtct

SEQ ID NO: 48107 - DNA, 412 bp, Homo sapiens
ttaaccctcactaaagggaacaaaagctgggtaccgggccccccctcgagagtacttctagaattaattaaggcggggggcagagcccggggcggcggcgctgttcaacctcgggctgctccacgcaggtgactgccaacagccagcccaatgtcgaatccagaaatgcaccacggacttcgtgtccctgacttctcacctgaactctgccgttgacggctttgactctgagttttgcaaggccttgcgtgcctatgctggctgcacccagcgaacttcaaaagcctgccgtggcaacctggtataccattctgccgtgttgggtatcagtgacctcatgagccagaggaattgttccaaggatggacccacatcctctaccaaccccgaagtgacccatgatccttgcaac

SEQ ID NO: 48108 - DNA, 345 bp, Homo sapiens
aacaaagctgggtgccgggccccccctcgagagtacttctagaattaattaaggcggggggctttaaagaaacaaagaaatgcattgtaaaaatgtagttttagagcaaattaataatgatggtggggaaagtgttgctaatttgtttatttccctggaagaaatgggaagtgtgataagcagtttaatttttaaggagctggtctcaattttagtactttttaattatgcaaataaatcaatgtttccttaaattttgtcattgctttgtcacagttgtctagggttcatatccaaccttctgtggcaattcaattttatatagtcttttaagaggtaattgtc

SEQ ID NO: 48109 - DNA, 451 bp, Homo sapiens
  misc_feature 351, 352, 353, 377: n = A,T,C or G
taactcctcactaaagggaacaaaagctgggtaccgggccccccctcgagagtacttctagaattaattaaggcgggtaaccctaaagctgtagccagccaggcagaggtgagggtggctaggggacacatcaagacttgtggctggcatctgaggtgggagcagtagtatgggagggagccccttaacctagggggtctgtgctaagtgggtagtatcaaaacttgaactggggccaggcgcagtggctcacgcctgtaatcccagcactttgggaggctgaggcggtggatcacgaggtcaggagatggagagcatcctggctaacacggtgaaaccctgtctctattnnnaaaaaaaaaaaaaaaaaaaaaaangggggcccccccccgggggggaccccaattcccccttttagggggttttttacccccccctcttgggccgtttt

SEQ ID NO: 48110 - DNA, 507 bp, Homo sapiens
gcaattaaccctcactaaagggaacaaaagctgggtaccggcccccccctcgagagtacttctagaattaattaaggcggtgacatcaaacatttttaacaaaatgatgtacaaactaaggactatttattgataatgttttgctactcttgtcagacaatggctataaactgaattatgcactctaccaacagaagcacccctaaaactatatcgcctccccccccccaggggaaacccacaccctcccaaaatatggtgttttaatgcccccactgatgtatgttttaaaaaacaagagtctcaaaggctgtgggtaagctgaaggcttgcctccctgacagatgcttaaactacaggcttcttgggacaggtggccccttcctaagctcacaggagtggccaccactcttgaccttcactctgtctatagtcccgcctcatcctggatcttgtactgagcggcaactaaaagtgttctacccagtgccctgtcactctaaactg

SEQ ID NO: 48111 - DNA, 459 bp, Homo sapiens
ttacacccctgaatgaaaggaacataagctgggtgccgggccccccctcgagagtacttatagaattaattaaggcgggagtggagtggaacaagagggagaggtggagcaaagtgagggccgagtgagagcgtgctccagcctggctcccacaggcagctttaaccattaaaactgaagtctgacaaaaaaaaaaagcaaataaaaaaaaaaaaaaaaaacgggggccacccccgggggggaggccaaaccccccctttacgagagaaaatgtccccgcccatatgcacgattttgaaagaattcctcctgaaaagcagagactgatctttgctggcaagcagctggaagatggacgtactttgtctgactacaatattcaaaaggagtctactcttcatcttgtgttgagacttcgtggtggggctaagaaaaggaagaaaaagtcttacaccactc

SEQ ID NO: 48112 - DNA, 436 bp, Homo sapiens
  misc_feature 315, 364, 371: n = A,T,C or G
accctactaaagggaacaaaagctgggtaccgggccccccctcgagagtacttctagaattaattaaagcggggtaccctagggattcatctgttttcttcactctcctttgcatctgagatcctgctggaaaccacagcaacctgtatccactattatgaggtcaaaatcaataaaatggcccattcatttgtgttgtagctcaaaagagacatacaataaaaaaaaaaatatgaagaaagtaaacttagaagaattctaatgtactgaaatgcacacttttggagtgctccccctttgaaaacacgctaatanttctttctttttttgacaaaccctccctcctctttagagttatagaganatttttntggtttaaatttcccttatatttccacctgtaatgtcagtggcaacaacatcatacttcacttac

SEQ ID NO: 48113 - DNA, 314 bp, Homo sapiens
acaaaagctgggtaccgggccccccctcgaaagtacttctagaattaattaaggcggggaaaagaatagcagaagatagggaaattatgaagataaaaactttcttttagaagaaaaaagataaatttaaacctgaaaagtaggaagtcagaagaataaaagacaagctaggaaacaaaaagctaagggcattttaatagcattaagattttaaaagagggtgtgcccactggggggagtcccatgaggaccgaaaagataaaaggtttctcccccctgacgggggttgagtatgaaagcttcttcatggagta

SEQ ID NO: 48114 - DNA, 440 bp, Homo sapiens
taaccctcactaaagggaacaaaagctgggtaccgggccccccctcgagagtacttctagaattaattaaggcggggtgtggccatgtgcctatattctggacaaggatttgtgcaacgtctacattaaagggaaggagtgatcctttagcttccctacctagccccaaacccactccaccttactaccagacaaccttagccaaaccatttacccaaataaagtataggcgatagaaattgaaacctggcgcaatagatatagtaccgcaaaaaaaaaaaaaaaataaatataattaatgcggccgccaccgcggtggagctacaattcgccctatagtgagtcgtattacgcgcgctcactggccgtcgttttacaacgtcgtgactgggaaaaccctggcgttacccaacttaatcgccttgcagcacatccccctt

SEQ ID NO: 48115 - DNA, 445 bp, Homo sapiens
accctcactaaagggaacaaaagctgggtaccgggccccccctcgagagtacttctagaattaattaaagcattttcttggtgtttaaagaccttacatgtgtaaattaaaaaaaaaaaataaaactgggcccccctcccgggggtgccccttctactccctaatggcattattttcatcccccccctaggggtaagtttacataataattcattgaggatgagttcaaggtaatcctggaatttttgagaagatactccgaaaattagggaggaaaaatttataccgtatatgactgaaattagaagaagtaatcagaggagatttttatggatcctccataacctaaagtaaggaaaagacagaaagagaatctggaaccccattttgctatatgaccttggatatgttccttagcttctcttagtgctagttcattcgttca

SEQ ID NO: 48116 - DNA, 432 bp, Homo sapiens
ttaaggcgggcgggtcacgaggtcaagagttcgagaccagcttgaccaacatggtaaaaccctctctctactaaaaatacaacaattagccaggcatggaggagtgtgcctataatctcagctactcgggagactgaggcaggagaatagcttgaacccaggaggcggaggttggagtgagccaagatcacaccactgcactccagcctcggggacagagtgagacttcgtctcaaaacaaaaacaaaaacaaaaacaaccaaatgcttagcatgtcagggtggaataagacagatcaagactctgtctagaaaaaaaaattaaaaaacattgtttttatatgtttaaataacattatgttcgaatgctataaatatatctatgttttaagtgtgtatgtattaaaggttcgttgcaaaacatttggaaaat

SEQ ID NO: 48117 - DNA, 475 bp, Homo sapiens
aaagggaacaaaagctgggtaccgggccccccctcgagagtacttctagaattaattaaggcgggcagacaggaaccaatgggacatggttcagtggactcctggtttagaatccaagaatgctttttctttactgcctagtttaaggctcagaataaagaaatgtatttgggatgccaaccccagatctgctccctttgtggttcgggtggagtgtctgaaatcagcattactcatgtggaaacattttgctccttaatagtttcagagtcctggaacagcctgtggcaaaccatgaaagcaggcaagacagagcagctccattatttgctgaatccagtgattaattttcaaggcacactcaaggttttataaggattattcataaatttatacagctttattcctttaagatgtttatctctgtttctatatagaaatctggccttattttttcaaattcacctttggaaaa

SEQ ID NO: 48118 - DNA, 558 bp, Homo sapiens
tcactaaagggaacaaaagctgggtaccgggccccccctcgagagtacttctagaattaattaaggcgggcggatcatgccgccgggaataaaataccgcgctgccaaacctggttaaacgacgtgcttcctaggaactcgcaaatggtgctggactggtggcacgaggcttttgtcccacttgcccaagacgctgaagcgagaagagtacttgaactactgaggcagacgttgcactgagcttgatatgtgccagtggactcgggccggggcgacctctgtgtcacagtggtcccagatacttaacgcatctgtgtggccctgggatatggttttttcctggagttgacactggcataagctctcacgttcattgatcgtaagagctctctcctcacagagctcagcaacagcctcaccaaggactccatgaatatcaaagcccatatccacatgttgctagaggggcttagagaactacaaggcctgcagaatttcccagagaagcctcaccattgacttcttccccccatcctcagacattaaagagcctgaatg

SEQ ID NO: 48119 - DNA, 755 bp, Homo sapiens
  misc_feature 428, 600: n = A,T,C or G
accctcactaaagggaacaaaagctgggtaccgggccccccctcgagagtacttctagaattaattaaggcgggtattaactgtaaaacaaactagtgtagaaaaaattagtaacaaaaaataattaacagaataagccccagagtcaatagccataaacattctgggtttttattctgctaatgaagataaataaattaggcaattaaacaaattcagtcctggcctagtggctcacacctgtaatcccatcactttgaggggacgaggcaggaggattgcttgagacttggagttctagaccagcttgggcaacatagcaagacactgtctttacaaaaaaaaaaaattggttggttttttttgttggtttggtttggaaacaaagtcttgctccaccccggaaacagactgaaactttgtctccnaaacgaggaaaaaaaaaaattcaaaattttttccccttttaattgaaaacccaatgggaaaattttaaaagaattttccccaaaaaggttaccgggccccccccccggggaaaaaaacaaaaatttttttttaaaaaaatttaataaaaaatccccatttttaagggggaanaaaaaaaaaaatgggtatagaaagaaaaaaaaaccccccccccaaaaaaaaaaaaaaaaaaaaaaagccgccccccccggggggggccccccccccccccaagggggggtatacccccccccccggggggggggtgtttaaaaaagggggggggg

SEQ ID NO: 48120 - DNA, 462 bp, Homo sapiens
gaacaataagctgggtaccgggccccccctcgagagtacttctagaattaattaaggcgggggggagccctcagacaacctaaatgttcatcaataaatgaccacttaactgatggattccatatgataggcaaaaaatacataaaaagatacaaaagatcacctaaaaagtgataataaacataggcttatactaaaatggtaaaaaaaaatgttgaaacctcggccacattgtggatgtattttaaaaggtatcatataaatgctaaatgaccagttgatgggtgcagtacaccaacatggcaaatgtatacatgtgtaacaaacctgcgtgttgtgcacatgtaccctaaaacttaaagtataattaaaaaaaaaagatagtatgtggaatgagcccatcagctggctgcttatgaaagagtagctattagtgagtaaaaaaaaaaaaaaaaaaaaaaa

SEQ ID NO: 48121 - DNA, 671 bp, Homo sapiens
tcactaaagggaacaaaagctggtaccgggccccccctcgagagtacttttagaattaattaaggcgggggaagttactcagtatgtaagcaatgccttactgtgcatatgtttgtcaaagtaattttccccgtgactggacaggcctgggatggacccacagcaatcagcagttactgggtggaaaggaaataagagtctcaaagcagagggaaacagtgacacaggctgaggaattaaatgactattgtgacttcttttatatcattgattactttatatcgcaatctgaaatcagcaaaaatatttctagagcttatgcattctctatgaacatttaaacatttattacaatatgttaattaaggcggggagtgacgtgacacgcagcccacggtctgtactgacgcgccctcgcttcttcctctttctcgactccatcttcgcggtagctgggaccgccgttcagtcgccaatatgcagctctttgtccgcgcccaggagctacacaccttcgaggtgaccggccaggaaacggtcgcccagatcaaggctcatgtagcctcactggagggcattgccccggaagatcaagtcgtgctcctggcaagcgcgcccctggaggatgaggccactctgggccaatgcggggtggaagccctgactaccct

SEQ ID NO: 48122 - DNA, 492 bp, Homo sapiens
gcgcgcaattaaccctcactaaagggaacaaaagctgggtaccgggccccccctcgagagtacttctagaattaattaaatttacttgttggttgggattcctgaatttgtttgtatttctttgtatgttaattttaattcatcagattgtaaactcacaaatatggaaggacaagttagttccgcagagaaaaaaaaaaaacccaggtctcagcactatgcaactcaggtctctttagctgtgtaataggaggtaatcatggcatttaaaaacattgactatggagttctctgagtaaatgagaatattagctccaccacctttatccgtatgacttttggctaattacttaacatggatgagtcagtttcttcctttctaagatgggaataatagtatttttactttatgggatgtgtaagcacaaaatgagataattgttttaaaatacttaccgtagtgcctaacaggtaagaattgccccataagtt

SEQ ID NO: 48123 - DNA, 527 bp, Homo sapiens
tacataaagggaacaaaagctgggtaccgggccccccctcgagagtacttctagaattaattaaggcgggtactaagtgtggtgatgtcttttgtcatagtacatccttaattcgacatcagaaaactcatttcagaaaggaaaccttagcagagtaatgagtgtgggaaagcctgcagtcagtcgtaggttattgtttacacctgagcactcacagttcaagcaaccctaggattgttatgtgaggaaaatcttaggcaaaacactcatttacttaatatgctatttgtactgagaagaaggactatgcttataatctaaaaaaggtgttattgaaagagaaagttataatggaagtgttcatccaaaactgaggtttgttttttaaagacatttagaaagttactttcagagataatttattaaaatgtatatatttgcttataaaaaaatttttttttttttttttttaaaacggattttctttttgtcccccaggctggatggcaggggcccaatctgggtta

SEQ ID NO: 48124 - DNA, 505 bp, Homo sapiens
aaagggaacaaaagctgggtaccgggccccccctcgagagtacttctagaattaattaaggcggggtaaagagtgttttagatcaccccctccccaaataaaatctgggcagatatggaaactatataaactttggatgtcatcttcaaatcacacacagatccaatggtagaaggtaggttttatgggcttaaggtgtttgaacacaatctttgaccagtcattggctgaccattaagttatgcagatgatgctagaaagccaaactaaaaagtaaaaatataagaattttaaaaattttaacagagacattagtggtgacacatggcagaggacaaaacttctacgtataagtccaatcaattatagaaagaaagagaagaaagaagaagaaaagaaagagaaaaagagaagtgtaaggggtgggaggagaagaaaactcttaactggaaaagtcagaaaaaaagcagaatccagagttgctacagtatatcatctaaaatat

SEQ ID NO: 48125 - DNA, 623 bp, Homo sapiens
ggaacaaaagctgggtaccgggccccccctcgagagtacttctagaattaattaaggcggggtatgtttcttttcactgctttcatctctaagtcctacagcagtgtaggacctcaataaactattctacaaagtcggcaaatgccccacagataagagtttctcctaataaaatcctacctgtatcacccaataaatgactaagaactcctgaaggttccaaaaatctaaaatcacaaccacacctaccttatccatatttcttccttaacctacaatagcccccaactaatctacccactccactttctccttctctacttcgtctttcatactgatgccagaatgttgttctcaaacaaaaactttatctcattctcctacttatgtgtcccttagctccacaagaaaaagtccaagctccttaaaaaaggaaaataaagtcttctacaaagcaagccatctcttcagtcagctctccagccttaccaaagcacttcggttcacagcccactgcccactttcaaattcctactgccatactccacctggaatgacctttcccacttcgtacaccctctgctcattttgttttgatttttggtgtttttttttttttttgg

SEQ ID NO: 48126 - DNA, 471 bp, Homo sapiens
aaagggaacaaaagctgggtaccgggccccccctcgagagtacttctagaattaattaaggcgggatggtaatgaaatagtggaggagtctcaagaggaatcctggaggcttggtccccaggccttgaggtggaatcccagtggcaactctcccccacaatggacctcagagcagtgggagcgacgcagtcctgtgggaagcattcaggctcagaatcaggagatgtgattattgtcctggctctgttatgactaatttgggtctggaatggcctcatcgggggaaaaattggtgacaactttaagaaatactgtttatatcccgtcctcaaatattgcttgactcaaccctctactgaaccagtagtccagggtggctcacaaagaccactttgaggctcttgctctgctctttagccaaggagtctcccttcctgccttcagtaacaacattacaggaagagaggagag

SEQ ID NO: 48127 - DNA, 515 bp, Homo sapiens
  misc_feature 464: n = A,T,C or G
cgcaattaaccctcactaaagggaacaaaagctgggtaccgggccccccctcgagagtacttctagaattaattaagacggggtaataatggcaaaaagatagaaatatagatcacaggaatggaatagaccattctgaaatagaaccacacacattgccaactaattttcagcagaatgccaggtcaattcaataaagaaataaaaatctttccaacaaatggtgctagaataaccagaaatccataagaaaaattaaaaaaacctcatgccatatgcaaaacttaattttaaataagttataagcctaaatgtataaaattgtaaggcttttagaacaagacattgcagaaaatttttacaaacttgaataagcagttatttgttaggcaggacacaaaaaaaacaagccattaaaaaaattgacaaattagactttattaaaatttaaatctcatgctctntcaaagataccattaagaaaaaaggattatcgatattaataaaaaaagcgg

SEQ ID NO: 48128 - DNA, 318 bp, Homo sapiens
ggccgtcgttttacataagagggaacaaaagctgggtaccgggccccccctcgagagtacttctagaattaattaaggcgggtcagggcctggccttggtccccactctgcgatgatttctgtgaaattttgctgtagcgatgacattgttttcagaatttccaagagttctgtctgttctgttttttattcagaatgaaatgaaatattttttttagttctgaccaaaaagcaaccaccaattaaaaaaacgttaaaaatcaacacccactacctaaaaaaaccccaaacgtgtggctgaactcctcacacccaatt

SEQ ID NO: 48129 - DNA, 543 bp, Homo sapiens
ccggaataaagggaacacaagctgggtgccgggccccccctcgagagtacttctagaattaattaaggcgggtgtgcttctttatcagtaattatgattaagtaagggctcttagggcatactcagatgcatagttatgagacttttcggaaaaggaaagatactgcaatttgctgagcgcctactctgggatataagcatttaaaaaactaatagagaatagagaatcagggaatatatcctgagagatgctcctctgagttgacattactctggggcacctggcagccaggctatggcttttggggccacgtccatttcgttcagcggaatcctggtgatgcagggctgctggatgggcccctgtattaaaccattcttgccctgctataaagaaatacccgagattgggtgatttaaaagaaaagaggttggccaggcgaggtggctcatgcctgtaatcccagcacgttgttaggtggaggcgggtggatcacttgaggtcaggagttcgagaccagcctggccaaaggggcaaaaccc

SEQ ID NO: 48130 - DNA, 336 bp, Homo sapiens
gcgcgcaattaaccctcactaaagggaacaaaagctgggtaccgggccccccctcgagagtacttctagaattaattaaagcgggatggccaggttgacagcagaggaagtaactaacactgcggtgactctgtctactcggggaggagtgctttctggaggcaatgtgagacatctgaaatctgaccatgggtttaatgtggcttctgttcttttttagtacggcattctcttcaaacaagagcaaggtaagtagcctgcctgtttaagcaattcatctgtgaaaaaaactgtgttgtccctggtttaagacttttgtcatgctgaccagacatg

SEQ ID NO: 48131 - DNA, 340 bp, Homo sapiens
accctcactaaagggaacaaaagctgggtaccgggccccccctcgagagtacttctagaattaattaaggcgggtcactggcagtttctctgaccaatctgacccgtcaaaaggacggacatcaaaggttttgtaagaaaggagccccatagggagaccacagtcaacaagccctatgtgtgtgctcagagcttccaaactggcttccaggcacttttcttttctttttttttttggagtcagagtctcaaaaaaaaaaaaaaaaaaaaaaaaaaggggcccccccccggggggggcccacatttccccctaaggggggtttttttcccccccccccggg

SEQ ID NO: 48132 - DNA, 478 bp, Homo sapiens
  misc_feature 355, 386: n = A,T,C or G
aaagggaacaaaagctgggtaccgggccccccctcgagagtacttctagaattaattaaggcgggacaggtgcattacactgagggcctttctctcccaccattgttgactgttgccatgcaaattcctaggtgaccctctgaagactggttaccatagccaagctgttgttcatcaggggatttccagcaatgcttagaactccctagtatctgaaaaacaaaatcataagcaggaatcaccccaatgctacagctgatccgggccatcctgaaagtccctgaagatccaacccagtgctttctgctttttgccaaccagacagaaaaggatatcatcttgcgggaggacttanaggaactgcaggcccgctatcccaatcgctntaagctctggttcactctggatcatcccccaaaaggtatccttcccatttctggacatcccactatcccctcatcgtcaaaatcaaagcctt

SEQ ID NO: 48133 - DNA, 547 bp, Homo sapiens
gcgcaattaaccctcactaagtggaacaaaagctgggtaccgggccccccctcgagagtacttctagaattaattaaggcgggggttcgtgactaggggaaaagaacaaaaacaaaaacacacattagcaatagccctgacagctttaatggggacaatgtttgcggatgctgcgtggtgaaatttggcagtcctcgcctcagtagtaagaaaccctctattgctacaagccctccccgctctgatcatcaccgcacttaggtcatttttgggatggatttcaaacagaagacatggagctgaagtctcaccaggctctaggcagcccgacaatgcgcccatcgcccatcggcatcggacctgagtttgcaaaatggattaacacatttcagtttccagtgctatcagtctcttagcctagaagaataagaaatagtctgtgggtggaggtctctttgaaagaaagacccaagctagttaaatggtatatctgattaagcactttcaaagcaggacttaatgatgagggttgggggagggaacaaaa

SEQ ID NO: 48134 - DNA, 581 bp, Homo sapiens
ctcactaagtggaacaaaagctgggtaccgggccccccctcgagagtacttctagaattaattaagggggctttagatgtgaaacttttttttcccttttttttgtaatgacctctccttacgatagacatgcaactttctatgctaagccagttgttagttaatagccgaaggaatatctgattttttctgcaagctatttaggcatattttcacttaaatgactggaacactcaagaaaatgtcctgatttcattttactttaagttgtaactgccaaagtagataggttagtctggcttctagctccaatttgctaaatggccttgttcaagtgactcaatctctctagtccttagtttcttcatcagtaaagtgaaggagttatagaaggcatgatatgttactaaatagaataagtgtgctaacaaagtgaaacagagttactgcattaggtcctgtatctacatcaatactataactagatctatttatatgtactctatatttaaactatctcaaactatatgtcactttactatatatgtaaggcctaccattaaagaaatgataatcatttt

SEQ ID NO: 48135 - DNA, 494 bp, Homo sapiens
aaagggaacacatgctgggtgccgggccccccctcgatagtacttctagaattaattggggggggggagcggtgaattttagaactctaacctttcaagaaaattgagatcaggaagccatctttcagaatgttttactctttgaataatcaacaggatgtatatgtatcattgtagtgaaatcgctagtaattatcactggcatgtctgtttttcatattttcttctcccgtgttattgtgcagctttgaatggatgctgggattacaggcatgagccactgcaccaggcctggtacagtactattaattgagggagggaatgacacttccctaagtgtatcttcttgtattattttgacttctggtagcatatttgtgtcttacatatattaaaaaattcaattaggaaaaaaaaaaaaaaaaaaaaaaaaaagggggcccccccccgggggaacccccattcccccttatggggagtgttttacccccccc

SEQ ID NO: 48136 - DNA, 574 bp, Homo sapiens
ctggccgtcgttttacatcccgaaataaagtggaaccattgctgggtgccgggccccccctcgagagtacttctagaattaattaaggcggggggtcatctgcgatgcaatcaaataggactaggaatgtgacgccttagaaaacggtggattgaaaaaagaattttaatctcctccggacattatattttgggtgttcattgctctcaaaaacatgagaataacgagtattttatattgtgaatacaaatacaaagttccggaatgaagaactacaccatacatgtgcaactaaatgactccgccgcacactcgtgtggccgcactatgaagatcactctggggcataacgctcgccctggagcaggacatactgtacctggtggagcatgaggagtaccagctgtgccagccccagtccaaggaccaagtccgctggcagtgcaaccggcccagtgcccagcatggcccggagaagctgtctgaaaagttccagcgcttcacaccttttaccctgggcaaggaattcaaagaaggacccagctactactacattctccaaaacccatccccc

SEQ ID NO: 48137 - DNA, 547 bp, Homo sapiens
tcactaaagggaacaaaagctgggtaccgggccccccctcgagagtacttctagaattaattaaggcggggaaaatacaagattagtttgaaatattttgtcatgttaggaagtaaggaaatgctcacaaaatggagaagatgtgaaagggaaacagatccactttgaataaacttccatagcccaatttgagaaaattggggcaataaaatagataacaatagtaatatattacaatctacagaagaaaattttcaattaatccaggccgggtgcggtggctcatgcctgtattcccagcactttgggaggcataggcgggcaggtcacttgaggtcaggagttcgagaccagcctgaccaatgtggtgaatccctgccttcactaaaaatacaaaaattagccgagcatggtggcacatgtctgtagtcccagctactctggaggctgaagcacgagaatggcttgaatcccggaaagtggaagtgcagtgagtggaaatcgcaccattgcacaccagcctggatgacaaaacagactccaactc

SEQ ID NO: 48138 - DNA, 542 bp, Homo sapiens
  misc_feature 469: n = A,T,C or G
ctggccgtcgttttacatcccgaaataaggggaacaaaagctgggtgccgggccccccctcgagagtacttctagaattaattaaggcgggctaagagttaaaccctaaggaaatcaaataattttagggagcagcctaggatatgaatatgagctgtttgtttaacagcaagaatatccacctcaatctagaggctgctgggagtacctcatttcagtattcaccaaatatttattaaacaactactatatgctattctaggcactagggatatagcagtggccacaataaacacaactttactgctcaatgaccttatatttttaatagataatcttggttggtgaatcgctgagtggcatggagaatattctagaattgtgagagtaggaaaagattttatggtctaggcaggcaaagggagagcgctccaaaaaaagaaaaaaaaaaaaaaaaaaaaaaaaaaangggggcccccccccgggggggccccccattcccccttaagggggagtttttacccccccctctggggcgggtt

SEQ ID NO: 48139 - DNA, 579 bp, Homo sapiens
accctcactaaagggaacaaaagctgggtaccgggccccccctcgagagtacttctagaattaattaatacaaataaaaacccacaaaaatgagccaggtgtggtggcgtacacctgaagtcccagctactcgggaggctgaggcacaagaattgctttaagccgggaggtggaggtagcagtaagttgagatagagccactgtaccccagcctgggtgacagagactctgtacaaaaaaaaaataacacggaatcaaatcataattgcctggggaaggaccaaggaaaaggggaaaaaaggattataaaggggcatgaggaaatgttctagggtgataaatatgctcattacctggttacattcatgaaaaaacttatcaaattacatattttaagatgtaccctttatagtatgtcaacattacaggtactctcacaaagctatcaacaaaaataggaaagcagcagcagcaagcaacaacagccataactactgcctggagaatttcccccaaaacaaacaaaccaaaaaaagtgtgggctgcagctaaaagcaatacatttttaggattaaaatt

SEQ ID NO: 48140 - DNA, 372 bp, Homo sapiens
ctaaagggaacaaaagctgggtaccgggccccccctcgagagtacttctagaattaattaaggcgggcggatcaccggaggtcgggagtttgagaccagcctgaccaacatggagaaaccccatctctactaaaaatacaaaattagccgggcgtggtggcatgcgcctataatctcagctacttgggaggctgaggcaggagaattgcttgaacccaggaggcggaggttgcggtgagttgagatcgtgccattgcactccggcctgggcaacaacagcaaaactccgtctcaaaaaaaaaaaaaaaaaatgcccccctcggggttttttttgtgggcccttgggttggaaaacttccccctggaaaaaaa

SEQ ID NO: 48141 - DNA, 496 bp, Homo sapiens
ccctcactaaagggaacaaaagctgggtaccgggccccccctcgagagtacttctagaattaattaaggcggggactcatcatcgatccaagcacgttcgaagaggcagaacatttgacaccacaggctgggcagtgggagagctgatgaccttaaacaccttcagcatcctggggaacccagagccacaccactgagcaatgaacacagacaatcagctctgggagtggaactcgccatgccattagtggcctgctgagaaacagctctttgcaggtctcaaaattcaaaagacacctctgcacacagggcagaggaatgcttactaccctgagccactcaccagcattgggtgcaccatagatgccaggccacaccaaatcaggactcaaggcagcctctgttggtcagaagaattgaccatcttccttgccagcaagcggcagacctctcatgacaactgctgctgagaagtgtaaagaaatcaaatgcatgc

SEQ ID NO: 48142 - DNA, 650 bp, Homo sapiens
  misc_feature 44, 45: n = A,T,C or G
acaaaagctgggtaccgggccccccctcgagagtaccttctagnnaattaattaaggggcggggcggaattaattactacttgaatgttattattattgtgctgagattcatgggggagagggaagtgaaagcacgccccaacttgactgtatatctacttctccaggaaagggatttaaaatgggattatttcatttacgaaaaataagattagagttactttttgcacctgtttaaattattgaagaatgcccacgcacggaaaataaccagagacaataggacaataggcctccccccctggggggagcgccccacatctcttattaatccaataaacatcccccacttaaatccacagttaaaccagattataaatttgaatattttaaaaatagccaattaattataagttacatactcaaaacattaaaacatggaaagttggaagtaaaaggattttttaaaatgtgctatgcaaatatgaacgtataggaggctagggtcattgttaatatcaaacaaaaatgacttgaagagaaaaagcattattaaaactagagctaatagtttgtgtaccaagaaggtacaggttgagcacaccaattcaaaatctggaatctgaaatgctccaaaatttaaaactttt

SEQ ID NO: 48143 - DNA, 415 bp, Homo sapiens
  misc_feature 389: n = A,T,C or G
cctcactaaagggaacaaaagctgggtaccgggccccccctcgagagtcttctagaattaattaaggcggggaagaaagaattcatgaggaaatcatttaaatattggatttttaaatatatgacactgctctcaattactaggtgctaataagacatacataacctaccatatagccaaggttttaattatcagatttataatttgaaactgaaggaactttagttcataaaagtgaaaaagataaaatgaagtccaatgaaagtaaaatattatctttgcttccttgattaaatctatagttatttttactaaagtatgatatatgttcccattatttagttttgtttagggaagtatataagatgagagagagagagagaaacttntaaagtttgatctaatgtacttacta

SEQ ID NO: 48144 - DNA, 506 bp, Homo sapiens
ccctcactaaagggaacaaaagctgggtaccgggccccccctcgagagtacttctagaattaattaaggcgggttccagcaattctcctgcctcagcctcctgagtagctgagattacaggcacccgccaccatgcccagctaatttttgtatttttagtagagatggggtttcagcatgttggccaggctgatctcgaactcctgacctcaggtgatccacccacctcagccttccaaagtgctgggattacaggcgtgagccaccactcctggccccagttttgtacttctttgcctagtttgggactatgaacaagaggaaatgtagctttgtttgacttctgccacttcctctttccattcttccatttgggtgggtgttccggtagcttgtgttgagacattttaacttcttaatgttttgtattatcagcaggcttaaagtatttattgttggctttcctcacgctggattttgatgatgatggagaagggaacagtaaa

SEQ ID NO: 48145 - DNA, 486 bp, Homo sapiens
ctggccgtcgttttacaccagggaacaagtgtgaccattgctgggggccgcgcctttactagagagaactaataaaaacatttaaggcgggacgggatgggggaacagaaataaacctaaaccacttactttgtgcaataagctcgatccaaatgttataacacacttaaatgtggaacgttaaagtgtaaaacttttgagaaaaaactcagagaaaatcttcaggcattggcactaggtaaagagttgctacacttgaaaccaaaagcactatccgcgaaaggaagaactgctatactgaacctcatcaaaatgaaaaactttcactctgtgaataaccctacaaagaggatgaaaagacaagttaaaaccagggagaaaatactagcaaaccacatatttgacaaagaactagtatccagactgtataaagcactcaccaaaatttcacaaatcaccggttaagaacttaactaaataccacct

SEQ ID NO: 48146 - DNA, 397 bp, Homo sapiens
accctaactaaagggaacaaaagctgggtaccgggccccccctcgagagtacttctagaattaattaaggcgggaggattgcctgagcccaggagttcgagaccaggctgggcaacgtggcaaaaatccatctccaccagaatcctttgtcatgaggcatcatggagaccatatgcaaatagaacggcaaggaagaaaggatacatacctctgcttgcatattatgctctgctataccactggacttacaaaacagatagtcaaacataaaagtattacaattttcaagacagtgactacagagcattaaaccaagcactgggccctgtgtgactatacttgtcgcatgttcatgaagttgatggctctgagcgcttgggtttctcaaatgggggct

SEQ ID NO: 48147 - DNA, 483 bp, Homo sapiens
ggaacaaaagctgggtaccgggccccccctcgagagtacttctagaattaattaaggcgggcaattcaggtttcaacctttccctaggtgcaaatagaggaaagcatgtgccataccaggtaagtctttctcttcacatgttactgggatattggtgaataaagtaggcttagtcagccgcatcactgtgaagtaaaaaagtaaaagaaaacaaaacattaatactgcttagggttaatattctcaagtctagtgtatgacattcatccattttatactaacataaaatataacctaaatacttcctaaatataatactacatacttcctaaggttatcacacatcagtgatttattaagaattgtaatgttacaaaataagcaccatttatttacaacctatgaattataaaaattaaatgtaaatacaatatgcattcattatagaaaaactggaaaatataatttttaaagcttaaagag

SEQ ID NO: 48148 - DNA, 421 bp, Homo sapiens
ctaaagggaacaaaagctgggtaccgggccccccctcgagagtacttctagaattaattaaggcgggcaaaagatagatgacaagaaaaacctgctgtgtagcacagagagacaaaaggcaaaaaatatagaagagagagtaagagacgtacaacagactatctgatgtatgtttaatcacacttccaggaggaaaagaatggagcatgggcaatattggaagagataattggtgagaattttacaaaagtgatgaagaatagcaatctatagattcaagggacccagtgaattccaattcggcaaagccctagcaaaaaaaaaaaaaaaaaaaaaaaaaggggggggccccccccggggggggacccaaatccccctttaggggggttttttcccccccccttagggggggtttttaaaa

SEQ ID NO: 48149 - DNA, 316 bp, Homo sapiens
  misc_feature 249: n = A,T,C or G
gccccccctagagagtacttatagaattaattaaggcgggaggatgacttgaggccaggagttggagaccagcctggccaacatggtgaaaccctgtctctactaaaaatacaaaaattagcctgaaaaaaaaaaaaaaaaaaaaaaaaaaaaaggggccccccccgggggggaccccaaattcccccttaaggaaaaaaaaaaaccccccctcatgggccgttttttaaaaaaacagggacaaggccncccctctgtattgctactgaaaagtgccatttcacaaaacacaaacttctttttgctctttgacatc

SEQ ID NO: 48150 - DNA, 327 bp, Homo sapiens
aaagggaacaaagctgggtgccgggccccccctcgaggatacttctagaattaattaaggcgggaggtaagtactaccgattaccgaatccagaggtccagattagctactaatttgagttagaacaataataatcaactaccatttacagtgtatctctatgctattacataaagatatactggttcctgcccttaggcagcttagaagaggagacagcatttacaaaataacttactgaagtgacttagtgattgtttaggagatgggaagaacattcaaggaatatatttaacagacttgtagtgttttctttgggtaagaaat

SEQ ID NO: 48151 - DNA, 546 bp, Homo sapiens
  misc_feature 456, 458, 487: n = A,T,C or G
aaataaagggaacaaaagctgggtaccgggccccccctcgagagtacttctagaattaattaaggcgggagcaagatgtcatatcatcagaaaggacgttacagcctcaaagggttggaagcctcacttataagtgatgacttggaattgtagattcttatttcttggagtggaattagaattctataggtaaagcttttgactgattttggtaggcagagttgggccatcgttaccttctaaccttttagttttgttctgtcttagcaagccttagaaaaacagtgggctgtcttcaattccagctgcagcacatcctaatgactcctgccatgccaagacctctgcaccacacgctcaaaacccagatgtttccagcgtttcaaatgagcagacggaccccacagacgcagagcaagaaaaagaacaggaaagcccggagaaactggataaaanangaaaaaaaaaaaaaaaaaaaaaaaaaaanggggggccccccccgggggggaccccaattcccccttttaggggggttttttacccccc

SEQ ID NO: 48152 - DNA, 585 bp, Homo sapiens
ataaagggaacaaaagctgggtaccgggccccccctcgagagtacttctagaattaattaaactgattcttttgataactgcttataagaagataaaccagacagacaataaacgttcacaatagaaagagctaaaaacaaaactttggagaatatggacagccagtttgaaaggaggaatttcttgaatgctgatcacatgagacatgactcgtcagaagcaaccacaggtgttaactgatcaaactggctaaggatttaaaaagttccagtgagggcctagggaagtggcattgtccaacatgctggtaaatatgtatttgcacttcttctgaagaggaaatttgaaaataggtatgtaaagtttcaaaaaaatttattcttttaactaaataagttaaacctgggtactaattctaaggaagtcaagatgtatgcaaaattgtatgtacaaggctagtcattatattacttcaaaaatagatttatatatattctgattattaaaaacatgctacttataaaagagtcaagaagacacagcgatgtccatagaaataaaaacaaagaccttaggattttatc

SEQ ID NO: 48153 - DNA, 233 bp, Homo sapiens
tacttctagaattaattaaggcggggtgggggttggggggataacaatacagagggcgcgcgcttgtcgtgttggtctcttgggaggtagtggggctaggccgggcgggtatccgcctctcccagcttaggtgagcgtccccgggcgcctccggagcgccgcggccgccaccgcggtggagctccaattcgccctatagtgagtcgtattacgcgcgctcactggccgtcgtt

SEQ ID NO: 48154 - DNA, 597 bp, Homo sapiens
taaataaagggaacaaaagctgggtaccgggccccccctcgagagtacttctagaattaattaaggcgggagaatcatgacgtcaggacatgcacatcatgatgggtaacaccgtgaaaccccgactctactaaaaatacaaaaaattagccagacctggatgcacgagcatgtagtcccagctactcaggaggctgaagaacgagaatggcctgaaccccggaggtggagctcacattgagaggaaatggcacctctgcactcgaccctgggcgacagatcaagcctccatatctcaggctccaaacaggtgctgcagccacggaattgaaaaccctaacctacagaggcgccctcgttaacaggaagctcgtgaaagatttttacatttccctcttagccccaacagcaatattgctgccaacatcccactgggggtcctaagctcaaaggttcttcatggttggttgtataggagttcttcctgtcccctgaaaccccacccttcaacctcctgagagcctttaaagttggaaaaaatatcaggattttctttctggtcactggaaaaatatatccaataattttaaatacctg

SEQ ID NO: 48155 - DNA, 617 bp, Homo sapiens
gcgcaattaaccctcactaaagggaacaaaagctgggtaccgggccccccctcgagagtacttctagaaataattaaggcggggcgtaatgttgcacagcagcagcagtggcacaaacaccaaccgggccagcaccaagcttggcagccagcgggctgtccttcccaggctgtgggcaccaggcaggggcctcaacccaggccgccaccccagggcacagccaggcccccaaagatccatctggggcccctcaggatctgaactgaaacctcaaagcctggttctccttagggggttactcttgaaaggggcatggtggagccttctggagtgctggaaatattctacatctcgatctgggcaggtatgtgtatatacatatattcattaagttgaacacttaagacttgtacttaactctgcgttgataccgtacatgcttttaaggcggggatactgattcagaaatcctgtaacgtgtaataaaagaagaggaaatggcatggaatcactgcctcctgtggatttgaaagccattgtgaaggaaaacaatgcagtgaaagaaaagttcttcatattaggacagatatcattgcatcacatttatttatctttct

SEQ ID NO: 48156 - DNA, 476 bp, Homo sapiens
  misc_feature 340, 341, 342: n = A,T,C or G
aattaaccctcactaaagggagcaaaagctgggtaccgggccccccctcgagagtacttctagaattaattaaggcgggtatttttaaaatttttatttattttattttttgagacggtcttgctctgtcgcccaggctggagtgcagtggcatgatcttggctcgctgcaacctctgcctcccgggttcgagcagttctgcctcaacttctgagtagctgggattgcagacacccaccactacacccggctaatttttgtatttttattttatcttattcatttatttatttttgagatggagtctcactccagtctgggcaacagtgatcccatccgnnnaaaaaaaaaaaaaaaaaaaaaaaaaaggcggccgccaccgcggtggagctccaattcgccctatagtgaggcgtattacgcgcgctcactggccggcgttttacaaacgtcgtgactgggaaaaccctggcgtt

SEQ ID NO: 48157 - DNA, 626 bp, Homo sapiens
ctaaagggaacaaaagctgggtaccgggccccccctcgagagtacttctagaattaattaaggcgggtggatcacgatgcactgaaatcatgagcatactggctaacctagtgtaacaatgtctctagtacaactatatataattatctgggcatagtgctggtcacatgcacacatagatactctgcaagctgactctggagaatggtgtgatctcaagacgcaaagcttacttggaatccaatcatgccacagcttacccggctgaggaaaaacctagactatgattctgtgagttctccacttcagtctcttcagcggagaacatggctcattcactggtctctgtttgttttcttcaatcaccccaaaggtcgcgataatattattgacctcttcctttatcagccacaatatcttaatgcaattcagacaatgtgtccacacattcttcgctatttgactacagcagtcataacaaacaaggatgttcgaaaacgtcggcaggttctaaaagatctagttaaagttattcaacaggagtcttacacatataaagacccaattacagaatttgttgaatgtttatatgttaactttgactttgatggggctcagaaaaagct

SEQ ID NO: 48158 - DNA, 478 bp, Homo sapiens
gcgcacctaactcatgggtacaggagagctgggtgccgggccccccctcgagagtacttgtagaattaattaaggcgggtgggggtgctgctggtacgacagaatggcctgttagtattgcctaatatccttcagtctctttaaaacaaagaccttcgtgtatacactctggacactggtctaattctgctttcccagcgcatagtacaatgaatgtttgctaagaatccaaggaatataaggtgatcaccaggaaggaagaaaggaagatgtttacagtaagtgggagaccagcatgagtctgcagtctccctcagaccaagtgcacaacagtgtaaccctcagagggggcttacacagtcacactggagagaagtagaagcatgcttgaaggaatatgaacagctagtccttcagataagaaagattcaccaatatattctaattaccatatctgccccaggaattgagaacctaa

SEQ ID NO: 48159 - DNA, 350 bp, Homo sapiens
  misc_feature 200: n = A,T,C or G
taaagggaacaaaagctgggtaccgggccccccctcgagagtacttctagaattaattaaggcgggggaaatgttacttattggccgaaatcatctaatgtcttttttgtgaacaagaaattaatttgttaggacttttgtactataaattagaggtaatcttaagatttaaaaaaagaagaaaacacccttaaatgatnaaaaaaaaaaaaaaaaaaaaaaaaaaaaaaaaaaaaaaaaacccccaaaaaaaaaaaaaaaaaaaaaaaaaagggccccccccccggggggggcccccctcccccccttaggggggttttttccccccccccctggggcctttttaaaaa

SEQ ID NO: 48160 - DNA, 467 bp, Homo sapiens
taactaaagggaacaaaagctgggtaccgggccccccctcgagagtacttctagaattaattaaggcgggaacataagaaggctgagaaatatagaccatctactgttacagtgaggtgcctggtgcatgctaatgatactgacctttatccaggcttgctgttgcgcaagccttctgggacatgcttaggcatgagaatggaatgaactcttgacgttgtagcttgcacatgatccatgatctgtgccttgatcatcctctgtgtgtagggttcaactccttcttgggctcagctcacattctgggaggccagccagctttacctgctgttcctgagccttacgctggccactgtcaacgcccgctggctggaaccccgcaccacagctgccatgtgggccctgcaaaccgtggagaaggagcgaggcctgggtggggaggtaccaagcaggcaccagggtcccga

SEQ ID NO: 48161 - DNA, 624 bp, Homo sapiens
agcgcgcaattaaccctcactaaagggaacaaaagctgggtaccgggccccccctcgagagtacttctagaattaattaaggcggggtggtgcatgcatgtaatcccagctactcaggaggctgaggcaggggaatcatttgaacccaggaggcgggggttgccatgagcagagatcatgccactgcactccagcctgagcaacagagcgagacttcgtttcaaaaaaaaaaaaaggaagtttaatatttgttgcaggctaatagcatatgttggagtaacttgattatacaggaagaaataaaatactatttgtaactctgaaagttatggtttaatttttttaaatactgcaactagttttgatatgccagaaaactcagtaatgaggtatcatatatacccacagctaaaccattaactcaaactcaattgctatatattttaaatttaagattttactatacatatatttatcactgacaaatacataagttgtgaataacaatgagaagggtgaaacgttttcaattcgggtcaaaagtaattattgatgaaggattcaataagcaacaaagaagtataatgacaattttctatctacaggatagtttgagagctaaag

SEQ ID NO: 48162 - DNA, 307 bp, Homo sapiens
ctaaagggaacaaaagctgggtaccgggccccccctcgagagtacttctagaattaattaaggcggggtaagatttgccgagttccttttactttttttaacctttccttatgagcatgcctgtatttaatttgattaagtggaggctaaaaacaagtgggaagaatgacggtattctaataaagcgaattatgttaaaaaaaaaaaaaaaaaaaaaaaaaaaaaaaaaaaaaaaaaaaaaaaaaaaaaaaaaaaaaaaaaaaaaaaaaaaaaataaattatttattggggggccgccaccgggggg

SEQ ID NO: 48163 - DNA, 523 bp, Homo sapiens
tgatacgccaagcgcgcaattaaccctcactaaagggagcaaaagctgggtaccgggccccccctcgagagtacttctagaattaattaaggcgggcagatcaagaggtcaggagtttgagaccagcctggctaacatggtgaaaccccatctctactaaagatacaaaaaattacctcagtgtggtggtgcatgcctgtaatcacagctactcgggaggctgaggcaggagaatcgcttgaacccaggaggcagaggtttcagtgagctgagattgtgccactgcactccagcctgggcaacagggtgagactctgtctcaaaataaataaataagtaagtaagtaagtaaaaaaacaaaagtaaagagcaggtttggcgctctgagccctctccagttgagttcttaccccatctttttaagggccttcttgacaaatccattacatttctgaaaagagcccggtttctcaagggatcagaatcttctttcctagtctcctgctagagtgctgttattttt

SEQ ID NO: 48164 - DNA, 498 bp, Homo sapiens
aattaaccctcactaaagggaacaaaagctgggtaccgggccccccctcgagagtacttctagaattaattaaggcgggatcttggctcaccacaaccaccgcctcccaggttcaagcgattctcctgcctcaacctctcgagtagctgggattccaggcatgtgccatcacaccctgctaatttttttttatttttagtagagacggggtttctccatgttggtcagcctgggcaacaagtgaaactctgcctccaaaaaaaaaaaaagaaaataaatacccataaattgaaggaaactgtattttatttttaaatagccacaattactaatgggttgtacagcttctcaaacttcagaatcagattggactccgtcccaccccaccccttgtttcctgttccatgttgatttcatgcagagcttgcttttttatcacagcagccactgcaaacagggctttattaggatgtgacgtcatcgggaagggtgtagctc

SEQ ID NO: 48165 - DNA, 481 bp, Homo sapiens
caaccctcactaaagggaacaaaagctgggtaccgggccccccctcgagagtacttctagaattaattaaggcgggagaatcgcttgaacccgggaggtggaggttgcactgagccaggatcccgccactgcactccagcctggcgacagagcaagactcagtttaaaaaaaaaaaaaaagggaccagggagggaaaaaaaaaaaaaaaaaaaaaaaaaaaaaaaaaaaggacccaaaaaaacagccaaagcaaagttaacctaacccggaggggaaggggggcttttcccccgggaccaggcaaaccctttaaagctggccccaaaaatgggaacaggatggggttggccaaaaccaggttgcaaaaaaaatttgggccttttttccaaaaagttttaacggggggggctttgaaaagttttcccctcaggccttgttttacaaataaggaaaggtctaaagcccacctggggctgccct

SEQ ID NO: 48166 - DNA, 432 bp, Homo sapiens
ctaaagggaacaaaagctgggtaccgggccccccctcgagagtacttctagaattaattaaggcgggagaatcgctcgagcacaggaggcagacgttgcagtaagctgaaataacaccactgcactcccgcctggaagacacagtcagactgtctcaaaacaaaaagaaaaaaaaaaaaaaatgaggctggacacaggggtggatccctttggtcgcacctacttgaaaggctgaaacaaaaccacccctcgaccccaggatttgggggcctggcggttgcagtgacctataactgccccactgaactccagcctggacaacaaaccaagtaccctgtctccaaaaaaaaaaaaaaaaaaaaaaaaaagggcccccccccgggggggaccccaaatcccccctaaagggaggtttaaaccccccccccccgg

SEQ ID NO: 48167 - DNA, 484 bp, Homo sapiens
aaagggaacaaaagctgggtaccgggccccccctcgagagtacttctagaattaattaaggcgggcagatcacttgaggtcatgagttcaagaccagcctgaccaacatggtgaaaccccacttctaaaaatacaaaaaaaattagccgtggtggtgcgtgcctttagtcccagttactcgggaggttgaggcagacgaatcgcttgaacctgggaggtggaggttgctgtgggccaagatcacgccactgcactccagcctgggctacagagtgagactttgtctcaaaaaaaaatatatatatatatatatgattgtaatccatagcttgaaaaacaatgatttaatctctctctcggtcctttatctcatgctgctttccactttaaaaaaaccccctgtgggtaccaaaatctacagattcttaagtcccttttcataaaatggtagtagtgtttcagtgcacatccttttgtacccttt

SEQ ID NO: 48168 - DNA, 509 bp, Homo sapiens
tactaaagggaacaaaagctgggtaccgggccccccctcgagagtacttctagaattaattaaggcgggggagaggacaatcggctctgggagactgcgaagtgttctcatactctgtaaacgtggtgctggtagtgactagttgagtgtgaattctctctcatacacaagttataaatattctctaggaaaagaaaaaacataaaacgaaacgcctaatacaaaagtccaaattcttactctctcgatgtaaaatgtccacgttgctacaagatcaccacggttttcacccctgctcagacagtggttctttgtgtaagttgttcaacagtgttgtgccagcctacaggaggaaaggccagactcacagaagggtgttcatttagaagaaagcaacactaatgattcaaacagcttcctgaattttgtgttgtctcacagaaagccttatcataaattccataattctaattaatttaccaagataatgtaattacatttggttttgt

SEQ ID NO: 48169 - DNA, 515 bp, Homo sapiens
accctcactaaagggaacaaaagctgggtgccgggccccccctcgagagtacttctagaattaattaaggcgggaggagaaccagagacctgatttcaagtttggtcttagaatcatctgtagagctttgggaaacttctctgagcctcagtttataaatagacattcattaggctggtttttattgagagcctactgtgccatttaaaaaacttaatacagacttcactgaattaatacacattaacgcccgtttttatgacaactgatagaaaaacctggggccccccccgcgggggggtccccatgtcccctatgcggggtctggaaagaccccctatctgggccatattggtaaataggatcgccatttatttcctattgtagatatcctgacattcatccatatcaaaatatgcaggttattagcttactataattgacctttgacttaatggggcataaataaaactttcatagcccacatgaggtggatatttgatacacagaacatt

SEQ ID NO: 48170 - DNA, 494 bp, Homo sapiens
ggaacaaaagctgggtaccgggccccccctctagagtgctcctagaattaattaaggcgggtggatcactacgtcaggagttcaagaccagcctggccaacatggtgaaaccctgtctgtactaaaaatacaaaagttagctgaccatggtggcgtgtgcctgtaatctcaactactcaggaggctgaggcaggacaatcgcttgaacccaggacgcggaggctgcagtgagctgagattgtgccactgcactccagcctgggagacagagcgagactcagtctcaaaaaaaaaaaaagcatttttctgttttaatgtttggagactttttttttgttctctccctttcctgaaccctattctgatcctgaaccaaatttatagcaatataattagtgttaatctaaggcattactcatcaaaaaaattgctgcagtctttacagttgaataaataaaaacaactgcataaatattgcccacttttgtttcaaa

SEQ ID NO: 48171 - DNA, 376 bp, Homo sapiens
  misc_feature 302: n = A,T,C or G
ctaaagggaacaaaagctgggtaccgggccccccctcgagagtacttctagaattaattaaggcgggaggaataaaaaatacatttctacttgtgtgcacctgcataaagaaacactgaaagaatatataagaaactaataaaagcagttacctaaggggtgtgagatggaatagggtagataaggacaggaataggagtgagtcctcacaatgtagatcttgttatattgttttgataactgtgccatataaatgtaattacctattcaaaacaaaaaaaaaaaaaaaaaaaaaaaaaaangggggccccccccgggggggaccccaaattcccccttaaggggggttttttacccccccctatgggggggtttt

SEQ ID NO: 48172 - DNA, 518 bp, Homo sapiens
agggaacaaaagctgggtaccgggccccccctcgagagtacttctagaattaattaaggcgggagaatcacttgaacccaggagttggaggttgccataagccaagatcgtaccattgcaatccagcctgggcgccagagtgagattcggtctcaaaaaaaataaaaaaaaaaaaagtaaaaattgtcaaactgcacaaaaagatgagggagtcatatatacgtgtgtacaacaactttataaaaacacagggatttaaagaatgacaacatagtcccatggaaacattaattctaaaaagtttaaaatggttatatgttcatgaaggacaagaaataatgccagatttaaagagggacaccacatattatgaaacggataaattcttcaagaaaatgtaccaagtttcattgtttatacacctaacagcagagcttcagaatacttaaagcaaataatagaattgaagggaaaaaaaaaaaaaaaaaaaaaaaaaaaaaggggccccccccgggggg

SEQ ID NO: 48173 - DNA, 458 bp, Homo sapiens
  misc_feature 139, 392, 393, 394, 395, 396, 430, 443: n = A,T,C or G
aaagggaacaaaagctgggtaccgggccccccctcgagaagtacttctagaaattaattaaggcgggggacagaacgcagcaccttcttagcgatctaggcctggcaagagctctggccccaaggcctcctcttcccangggctgccaagtcctggccctggccctggcatatcaccccgcactgtggggccaggcaccactagcctggctcaaatattccccagggagactgctgtgtgctgcccgcctgcctgctggctctcccccagccccacatcccctctggaagagaatgtaaaataaacctggacacaaggaaaaaaaaaaaaaaaaaaaaaaaaaaaaaaaaaaaaaaaaaaaaaaaaaaaaaaaaaaaaaaaaaaaaaaaaannnnnagcccccccccccggggggggaaaaaaacccccnaaaaagggggggnccacccccccccccg

SEQ ID NO: 48174 - DNA, 325 bp, Homo sapiens
  misc_feature 265: n = A,T,C or G
taaagggaacaaaagctgggtaccgggccccccctcgagagtacttctagaattaattaaggcgggctctggagaagattgaccttaagttcattgacaccacctccaagtttggccatggccgcgtccaaaccatggaggagaagaaagcttccttggacccactgaaaaaagaccaatttgcaaaggagaagggacttaattgccaggaacaaatttgcaggtggtggggtctcaataaaagtatttttcacttgaaaagaanaaaaaaaaaaaaaaaacccccaaaaaaaaaaaaaaaaaaaaaaagggcccccccccgggg

SEQ ID NO: 48175 - DNA, 487 bp, Homo sapiens
ccctcactaaagggaacaaaagctgggtaccgggccccccctcgagagtacttctagaattaattaaggcggggtcacaagaagcctaggaaagacccaggagttccaaacagtgctccctttaaggaggctcttcttagggaagctgagctaaggaaacagagggtaagttatgttagccagaattttcattgagtggtgtagtgtgttatgtgtgatatttttcagagtaaggtaacaacactagtcactggttcacctatttcccttatggctctgacagcttgaagaactaaaacagcagcagaaacttgacaggcagaaggaaaaaaaaaaaacaaaaacaaaaaaaaacgcggccgccaccgcggtggagctccaattcgccctatagtgagtcgtattacgcgcgctcactggccgtcgttttacaacgtcgtgactgggaaaaccctggcgttacccaacttaatcgccttgcagcaca

SEQ ID NO: 48176 - DNA, 492 bp, Homo sapiens
ccctcactaaagggaacaaaagctgggtaccgggccccccctcgagagtacttctagaattaattaaggcgggtgatggtggctatgatggtggggatgatgaggctattgttttttgtgaattcttcgataatggcccatttgggcaaaaagccggttagcgggggcaggcctcctagagaacaggctgtctagtcagatgtagcttgatctgtggcaaaaccaagtgtggtctttcagcttcagtgtgttagcatcccagcacctgggatggggtttgtgggcaagttgattttgccacactgtagggcccaggtggtcccattgccaccgtgaagccaaattctagcccaagtctggtagagcagtcgggcagctagttttccggggaggatgatgtggtgggacagaggacctcagtggcctattacggagccctcttcccagactaaattcatagccgagagctcggggggatggtagagttaaaat

SEQ ID NO: 48177 - DNA, 478 bp, Homo sapiens
accctcactaaagggaacaaaagctgggtaccgggccccccctcgagagtacttctagaattaattaaggcggtacgattattgctaaccttgctcgcacacacaggttgagactctaacgggcagcatggtttctgacccttggtgatgatgcaaccgtcttctaacaaaaaaattgtactataataatagtactaatacgaagtgctctctcttgtgaatgttttttggactagataggggctcgcatttggcttttcgttggtttcatgttggcctttggatctctgattgcatctatgtggattctttttggaggttatgttgctaaagaaaaagacataatataccctggaatggctgtatgtttccagaatgccttcatcttttttggagggctgatttttaagtttggccgcactgaagacttatggcagtgaacacatctgatttcccacagcacaacagccctgcatgg

SEQ ID NO: 48178 - DNA, 471 bp, Homo sapiens
  misc_feature 380, 386, 390, 391, 447, 451: n = A,T,C or G
taaagggaacaaaagctgggtaccgggccccccctcgagagtacttctagaattaattaaggcgggtgtgctgtgagctgtaatcccagctacaaggtgggaggattgcttatgcctgggtgattgaggatgcaatgagctgtgattgtgccactgcactccagcctgggcgacagagtgagactccgtctcagaaacaaaaagattaactgacaagatacctgcgcaataccatctctcacagtgtgaataaataaaggcatgatggaattacagagcaatgtatgcttacctctacctgaagacaaaaggaaaagtttctacgagtgattcacttgatttgaaccctaaggaacatattgtagaaaaaactttaaaanaaaaangganngaaaaaaaaaaaaaaaaaaaaaattttgggctataaaggggggatttttcctaaantccngccccccccccccggggggg

SEQ ID NO: 48179 - DNA, 457 bp, Homo sapiens
ctaaagggaacaaaagctgggtaccgggccccccctcgagagtacttctagaattaattaaggcgggaggcaatggaaaagagactaaaggcttgaatggagaaaaaaagaaattaaatgtgtcttgtaagcctggcgtctgatcatgtcttagacgaagtaaggtataagctggccagagactcctttgtgacacaaaaggtgaagttacagatattccactaaatttaatttttattatgacttataacaactggtactatgcaccatgatggaaagaaaccttctcattcaattccatcgggctttgacgtaagaatagacataaagaagctaagaattgacaatctaaaaataagcttgcacttttacagtcaattgattttatacaaacttaacgaaagaacacaatgggaaaagaatagtcttttcaacaaatggtgctgggacaactggg

SEQ ID NO: 48180 - DNA, 450 bp, Homo sapiens
ccctcactaaagggaacaaaagctgggtaccgggccccccctcgagagtacttctagaattaattaactagaaatttttataatttttagttcaaccaaagtaaataattatgtggtgtatttatttctatttgtaggatatgggccctcacattttccaaacctgtccatctgctaactattttgactgcagagccatgtccattggagcccgttcccaatcagctcgtacttacttggagagacatatgtctgaatttatggagtgtaatttaaatgaactagttaaacatggtctgcgtgccttaagagagacgcttcctgcagaacaggacctgactacaaagaatgtttccattggaattgttggtaaagacttggagtttacaatctatgatgatgatgatgtgtctccattcctggaaggtcttgaagaaagaccacagagaa

SEQ ID NO: 48181 - DNA, 468 bp, Homo sapiens
  misc_feature 428, 447: n = A,T,C or G
actaaagggaacaaaagctgggtaccgggccccccctcgagagtacttctagaattaattaaggcgggtgcctgtattgccagctactcggaaggctgaggcaggagaatggcgtgaacctgggaggtggagcttgcagtgagcggacatcgcgccactgcactccagcctgggcgacagagcaagactccgtctcaaaaaagaaaaaaaaaaaaaaagctccctttctcaaagggtttttaaggggcccccccccgggttggggtattttggggaaaaaaattagagggtcttaaaaaccggactttccccccctttttgaaaaaaaaggggggccctgcagggttttcttggcggggaaaaaaaaaaacgacgacccctttggggcccgccccccctttttttttttccaaaaaatttggtacagnaaagaggcatgaaaaacangaaaaggcccccccccggggg

SEQ ID NO: 48182 - DNA, 394 bp, Homo sapiens
accctcactaaagggaacaaaagctgggtaccgggccccccctcgagagtacttctagaattaattaaggcgggcggatcacgaggtcaggagatcgagaccatcctggctaacacggtgaaactccgtctctactaaaaatacaaaaagaaatcagccgggcatggtggcgggcacctgtagtcccagctactcgggaggctgaggcaggagaatggcgtgaacccgggaggcagagcttgcagtgagccgagatcgtgccactgcactccagcctgggtgacagagcaagactctgtcttttaaaaaaaaaaaaaaaaaaaaaaaaaaaaagggggccccccccgggggggaccccaaatcccccttttagggggtttttttcccccccccc

SEQ ID NO: 48183 - DNA, 493 bp, Homo sapiens
cgcgcaattaaccctcactaaagggaacaaaagctgggtaccgggccccccctcgagagtacttctagaattaattaaggcgggaggattgcttcagtccaggaagttcaggctgcaggaagctatgatcatgccactgcactccaacttgggtgacagagcaaggccctgtctccaaaaaaaaaaaaaaaaaaaaccactttaatggatgaattttagctaatttgatctatattttattccacatcctctttgtaataacatttggcaaatatgtgttgatttatactgggtattaggcactgtggtgatgtggaagcttagggcaaaatgcatactggtttctgccttctataagcttacaatctgtctgtatgtgtgaagggaaataatgctagatgccatttattgagttctactctgtgccaggcaccatggctgactcattttacttcttatccttactgtcatcctgcaaggaaggtgcattatt

SEQ ID NO: 48184 - DNA, 482 bp, Homo sapiens
actggccgtcgttttcaacaggaaacagcgtgtgaccatgactgctggccgtgcgttctactagagagaactgctataatcaatgattgcgtctctctgatgccctatctagacccgttcttccttttcctacatttgaactttttctgagatagtttcagtttccataatctctgtgtgatgattttcatcaagaattccgactaaggagattttattcttttaagaagatttgttcaacatatacttacatgagattttgttctttttaaagactgtgtaaataaattatctgattaagaaaaatttttctactttgttttgactcttgaatagggaaatgcttgcctatatttaaatgcaacctgctaaaaatacttgttctgacctattagtgaagtatatcacactatctaaagcaatctgtagatttaatgcactcgctatgaaaatctcgctgatgttttttgcagaaatagaaa

SEQ ID NO: 48185 - DNA, 504 bp, Homo sapiens
gcgcgcaattaaccctcactaaagggaacaaaagctgggtaccgggccccccctcgagagtacttctagaattaattaaggcgggcaggccaggcgccagcggggggctgctgggctcctgcttgtaggggcgcacagcctgggagtccccaggcgccggcccctcagccccaggggcggtgcctgctaagggaatcatcccactgtcctcctttccacctgtggccccagggccctgcgtcacatcctgaggcaccctcgttgctgacgacccatcgggggaggctgctggcccctgaaatgagagcacagttttgaactcagaaacctgagcaagggcctctatttctccctctcccaatcaccgtcgaccagctgtgcaatcccatccctgctgggaggaagccacagtcatgctgggcgacactgaagctgccccacagagaggcccccaggtgaggaaccaaggcctcctgccaaccccctgccagggagccatcttga

SEQ ID NO: 48186 - DNA, 527 bp, Homo sapiens
taaccctcactaaagggaacaaaagctgggtaccgggccccccctcgagagtacttctagaattaattaaggcgggggcatgggacctctttcgactgtgcccttgtggtcgatcaatccctgaatggcctggacgtggaagctcacgtaaaggctgcagttgttcttcaaaactatatccacgaagttgaacaatcactttcagaaactgccgctaagaatccattctcactagtgttctctctaaacaaagacattggtaagttaatgtgactagaattccctgcccttactactttacatgcacattcgaaaccctacactccacagatgattatatagctacagattagctctatacgattgaaatccttgtttgcggattactccctgcgtatgagcaaactcctgtccctgcttgccctggttaagccagaagtctggactctcaaagagaaatgcattctggtgattacctggatccaacacctgatccccaagattgaagatggaaatgattttggggt

SEQ ID NO: 48187 - DNA, 496 bp, Homo sapiens
ttaaccctcactaaagggaacaaaagctgggtaccgggccccccctcgagagtacttctagaattaattaaggcgggtcagtaagttgttcttatttatttttccataaaattatgacctgattcattatcttggcattgatctataactacagttctttggaaaatatataaggtctgaagtcaggaaaacatctcagaagcattcactctaccatgtaaccattaatttaccctgatttggaaaaatagcctgaaaactagtgaatgcttccatctcaggagaaacttcagtgtcactagatatggtaaactgtagtatgctattttaacaaaatccagagcaaataatggatgaatccaggggaactacctatagcaccatctgaggcttaggatgttaaaaaaaaaaaaaaaaaacagaaacaaaacataacaaaaactcttctggtaaaataaaatgattcttaaattgataaaaactaatatttaacatt

SEQ ID NO: 48188 - DNA, 570 bp, Homo sapiens
taaagggaacaaaagctgggtaccgggccccccctcgagagtacttctagaattaattaaggcggggcatcctgagccaaactctgtctcctaaaaccaaatgacggcttctacaagggcatctcttccttggaggaagatggtccacttgggtgcgcccttttcaggggccccagctgctcccttccaaacaagggagtacgttattggaatcctttcacaagaatatttccaatttatcaagtgtgcctgtcccaaaatttgcggatcgcgatcctgccggcattgttcatgactttaacaagaaacttacagcctctctacatcttaacctggataagtgctatgtgatccctctgaacacttccattgttatgccacccagaaacctactggagttacttattaacatcaaggctggaacctatttgcctcagtcctatctgattcatgagcacatggttattactgatcgcattgaaaacattgatcacctgggtttctttatttatcgactgtgtcatgacaaggaaacttacaaactgcaacgcagagaaactattaaaggta

SEQ ID NO: 48189 - DNA, 626 bp, Homo sapiens
gccaagcgcgcaattaaccctcactaaagggaacaaaagctgggtaccgggccccccctcgagagtacttctagaattaattaaggcgggatgttagaaagaaaacagccgcccaccgcaacccctgctctgtgcagctgcatgcctgactaataccagcctgagcggggcagggcagagattagaacagagggagagtggagctgacaagcttactgggctacactgaggtttctgttaactaattgttattcaaggactttgtatttcttcacaaatgaccaaaaatgttgcacagcaaggttccctgtgaaatacatactttcctccattatatatacatatatatatatatataaaatccagaactcttcatgctaactctagaagcagcagtggaaaatcaagacagggactgaatatgctgtacccacagatgcccccaagcccacagcatccatatctcagctgcgccagctattcaaaaactggaggccgggcgcggtggctcacgcctgtaatcccagcactttgggaggcagaggcgggcggatcatgaggtcaggagatcgagaccatcctggctaacacagcgaaaccccgcctctactaaaaatacaaaaaat

SEQ ID NO: 48190 - DNA, 589 bp, Homo sapiens
aaccctcactaaagggaacaaaagctgggtaccgggccccccctcgagagtacttctagaattaattaaggcggggagcgatagagatgcatatgttgtcttcacttcccttggcatatgatatcctgctggaaaccacggcaacctgtatccactattacgaggtaaaaatcactaaaatggcccattcatttgtgttgtacctcaaatctaaaataaaaattaaaaaaatatataaagaaaaaaagtgggaggagggagaggatcaagaacaataactatcaggtactgtgcttagtacctgggtgaagaaatggtctgtacacgagacctccgtgacatgagtttgcctttgttaacctgcacatgagccccagacctaaaataaaaaaaaaattaaaaattttaactcaattaaatcatagacttaaatgtaaaatgtaaagtagtaagacttttaggagaaaaaggaggggaaaattttcagggggatatgaaaagaggttgattaatgggtccagatatacagtttgatagaaaaaaataagatctgtctgatagatcagtaaggtgactatagtttacaatc

SEQ ID NO: 48191 - DNA, 445 bp, Homo sapiens
ctaaagggaacaaaagctgggtaccgggccccccctcgagagtacttctagaattaattaaggcgggtcagactgcaaggcagccaggtagttctccagagccatccgacggcggtcattcagcatagcttccactcgggccaggtgggtctccaccagctgctgcttctcactggctgcttccttctctaaagctttaaccatggcttggaagtgctgaatcagagtctgcctctctgctttggggaggttcttagcttgaagctctgcctcttcccattccttctttaccctgtccattcggttgcggtgccgaatctccagctgctcctagccactgtcttctcctttccaggcatgactgaaatctaatcactggaaaccatgtgattctaaatatattatgtaaatgttaatgtattatgttttttaaaacattgcattc

SEQ ID NO: 48192 - DNA, 513 bp, Homo sapiens
  misc_feature 435, 436, 438: n = A,T,C or G
taaccctcactaaagggaacaaaagctgggtaccgggccccccctcgagagtacttctagaattaattaaggcgggaggtcaagaccagcctgggcaacacggtgaaaccccatgtctactaaaaatacaaaacttagctgggcgtggggccacatgcttttgtaatcccagctactaacacttgaatccaggaggcagaggttacagtaagctgagcttgcaccactgcactctagactctgcatctcaaacaaacaaaaaaacaattgtgggaaggttcctaggtttactgcactccagtttaatgcttgtatagtactcacacttatatctcaagacttttcaaaggctgacccacccgttttctgccacatgcagtcagccccaaggcctcatctgtacccaaaggcctgtggacaataactgcctcagcnnanaaaaaaaaaaaaaaaaggggcccccccccggggggaaccccaattcccccttataggaagggttttacccccccc

SEQ ID NO: 48193 - DNA, 538 bp, Homo sapiens
  misc_feature 498, 504: n = A,T,C or G
actaaagggaacaaaagctgggtaccgggccccccctcgagagtacttctagaattaattaaggcgggctgactctgaacgatcggcaattcttaaacctaagattggagataggttataactggtgttatctcaccgacttcttgccttcatctaaatttcacacatcaaacaggacaccgtgtcagccttgttacacattatgtgatgatcaatgtccaacatatcatcagcctaactcatgactggcagagactttactcaatcctaaggctcagcgattcccgaacattggtccacgtgcttagagaaataagatactgttgatcttctaaggtagcagcattatttattacacaaaaaaaacctgcaacataggtctccatcaaggaccacagaaggccaggatgcttggcctggcttgaggagtccagggaccataatggcagacctgaaagacaggcaaatacaccagctgaaaaaaaaaaaaaaaaaaanaaaaanaaaaacggccccccccccgggggggaccccattt

SEQ ID NO: 48194 - DNA, 458 bp, Homo sapiens
actaaagggaacaaaagctgggtaccgggccccccctcgagagtacttctagaattaattaaggcgggtggcaggggacagcttgcaagtatttgggcttatagtctcccagcccacagcctctctcccttgctagtgttagagagatgctgatcacgtttactcttctcttattttctctgcgtatccccttaccttaactttttgaccatgttcttgagcctagagttcagttagtctcatttctccaggagtcctggagacagtgtccttccacctaccatgtgtggagtttacctgccaccccaatgcaaagatagtaagcctgagcataattgattctcgatttcttttgaattaataactggtatatataaccattaattccaattataattcacatgaaaatgtcagagcttctattgagagcaaaagcaaactttagcattagcctggta

SEQ ID NO: 48195 - DNA, 159 bp, Homo sapiens
gcaattaaccctcactaaagggaacaaaagctgggtaccgggccccccctcgagagtacttctagaattaattaagcggccgccaccgcggtggagctccaattcgccctatagtgagtcgtattacgcgcgctcactggccgtcgttttacaaaaaat

SEQ ID NO: 48196 - DNA, 374 bp, Homo sapiens
tgattacgcctagcgcgcaatgtaactcctcactaaagggaacaaaagctgggtaccgggccccccctcgagagtacttctagaattaattaaggcgggtcccccaccatgaactttgctcaccatctatccttcaggactcaagcagtcaacatatgcccttaaattccctggtgggggacccgctactttaccacactcttaatgaacaattggaaattacaactctgtaaaggtacagttaaagtatctcaacaaacattaaattcttaatctaaaaaaacatggagaaagggtgtcttaagctataaaaatgttctctgcaaaaaaaaaaaaggggcctccgcgccggggggggggctttccccctttaa

SEQ ID NO: 48197 - DNA, 480 bp, Homo sapiens; identical to SEQ ID NO: 47984

SEQ ID NO: 48198 - DNA, 408 bp, Homo sapiens
  misc_feature 395: n = A,T,C or G
aaagggaacaaaagctgggtaccgggccccccctcgagagtacttctagaattaattaaggcggggtctcactatgttgcccaggctggtcttgaacgcctgcctcagtctcctgagttgctgagattgtaggtgtgagctaccgtgcctggctctgatcagattaatgttttaaaatcccactctctttatgttatctgcctggtctgaaatgtacagcaagtacttggttcttacattaagtctaatctattagctctaaaaatcctccacaattaggctgggcacggtggctcacgcctgtaatcccagcactttgggaggctgaggcaggtggatcacgaggtcaggagatcgagaccatcctaacacagtgaaaccctgcctctactaanaatacaaaatatt

SEQ ID NO: 48199 - DNA, 194 bp, Homo sapiens
aagggaacaaaagctgggtaccgggccccccctcgagagtacttctagaattaattaaggcgggggaagggagggaggggctggaagatactgaaggattcctttttgaaaggttttttttattgtaaaaaaaaaaaaaaaaaaaaaaaaaaaaaaaaaaaaaaaaaaaaaaaaaaaataaaaaaaaaaaagag

SEQ ID NO: 48200 - DNA, 468 bp, Homo sapiens
cctactaatagggaacaaaagctgggtaccgggccccccctcgagagtacttctagaattaattaaggcgggggtgtgagtattgtctatccgggaatttgaagatactatcattcttgtgggagaggatctattggttaaacctgacaggttgcaagcacagataggcagtgtaaacgggaaaattaaaactctcccgacagagaggaatgctgaagattcacataaaggaaaaatttaaccttccccacgtgaggaatgcccttaatgggcttatttgaagactagactgttggaagaaaacttccaagcttggggatatctctacagaaacctccatagctaaagaccaaatataagatggagtgaaaaaaagaacagaccgcttaaggactatggggcaaatacaaaagttgtaacatgtgtaatgagaatagcagacgaaaaaacaggaactaaaagttaaat

SEQ ID NO: 48201 - DNA, 359 bp, Homo sapiens
aagggaacaaaagctgggtaccgggccccccctcgagagtacttctagaattaattaaggcgggaggattgcttgagccccggtgttcaaggctgcagtgagctacgatggtgcccctgccactccagcctgggcaacagaatgagaccctgtctgggtttgggggagaagttatttacaatgttttgaaaatatcctatagccactgtgcccagcccccctgtctactttaaatcactactagattactttttatgtctactagcatgtaaatgctatatagttagactgtattatttgtatttttttttttactgaagcgttattattttaatttatttactcatttatttatcttt

SEQ ID NO: 48202 - DNA, 445 bp, Homo sapiens
ctaaagggaacaaaagctgggtaccgggccccccctcgagagtacttctagaattaattaaggcggggtagccttctgattgtgacttcacatggtagaaggaataaagcatctccctggggcctcatttataagggcagtaatcccattcatgaggtttctaccctcatgacctaattatctcccaaaagaccccagcttttaacaccatcaacttggcagttataatatcactatatgtattttgggagcataaaaacattcagacaatatcaagtggagtactgaaaatatcattttaataaaaaataaagcaggaaataagcaacagggaaataaaactaaaggtaaatggaaaatgaattcaaaagtaataaacaaatccaaacatagaaataatcacattaaatgtaaatggattaacattccaattaaaaagcagact

SEQ ID NO: 48203 - DNA, 508 bp, Homo sapiens
accctcactaaagggaacaaaagctgggtaccgggcccctcctcaacagtacttctagaattagatcaaggcggggccctgcatcccatgctactcagaaagcttaggcacggcaatggtgtcaaccttgccgggggagattacattgaccctagagatgtccacctcgctgactcccgaaaggcatgagctatactacctcccacagaggctatacaaccattttcttttcttgggagccactggattgttccaccagcgaagggacattctctacactcagatgactctaccagtggccttttaaccaagaagtagtacttgattggtcatttgaaaacactgcaacagtgaacttttgcatctcaagaaaacattgaaaaattctatgaattgttgtagccggtgaattgagtcgtattctgtcacataatattttgaagaaaacttggctgtcgaaacatttttctctctgactgctgcttgaatgttcttggaggctgtttct

SEQ ID NO: 48204 - DNA, 200 bp, Homo sapiens
tgggtaccgggccccccctcgagagtacttctagaattaattaaggcgggcagataacaaggtcaggagatcgagaccatcctggctaatatggtgaaaccctgtctctactaaaaatacaaaaaattagccgggcacagtggcaggcgcctgtagtcccagctactcgggaggttgaggcaggagaatggcgtgaaccc

SEQ ID NO: 48205 - DNA, 501 bp, Homo sapiens; identical to SEQ ID NO: 41330

SEQ ID NO: 48206 - DNA, 432 bp, Homo sapiens
actaaagggaacaaaagctgggtaccgggccccccctcgagagtacttctagaattaattaaggcgggaagatagtcaagaaaatagaatggtgagttttaaccaacactatacagtagtctccccttaaccacaatttactgtctacggtttcagttacctatggtcaaccatggtccaaaaatattaaagaaaaaactctagaaataaacagctcacaagctttaaccgcttatgaatgcctacacagtgcccatgtcattaacctcatttcgccattttatcatcattttccgtcatcacaagaaaggtgagtacaatattttgagagatgacattcacacaatttttattaaatatagttataaatttttttattagttattgctattaatgtcttactctgcccaatgtataaattaaactttataa

SEQ ID NO: 48207 - DNA, 339 bp, Homo sapiens
accctcactaaagggaacaaaagctgggtaccgggccccccctcgagagtacttctagaattaattaaggcgggagaatcacttgaactcgggaggcggaggttgcagtgagccgagatcatgccattgcactccagcctgggcaacagagcgataatccgtctgaaaaaaaaaaaaaaaaatccttcctccttgaggccaggcttgcctaccctttgggaaaactgagggggggggattgtttgaccccaggattttaagaccaccttaggcatggtctttccccaccccccccaaagaacaaaactaaaataatttacaccggcccccccccggggg

SEQ ID NO: 48208 - DNA, 243 bp, Homo sapiens
ctaactataagtaacagtaagctgggtaccgggcccgccctcgagagtacttttataattaattaaagcggggggttcataccataatctctttcttggcctaaaatgccacatcatcattttctatttccaccctactgacatacataaatatatatgtgtatgtgtgtgtgtgtgtgtatatatacatacacactaacttaattgtggtaatcatcttacctagttatttttttgtttttt

SEQ ID NO: 48209 - DNA, 393 bp, Homo sapiens
accctcactaaagggaacaaaagctgggtaccgggccccccctcgagagtacttctagaattaattaaaggggaattataaaatatttattatgaaaagattctactgagtcactgggttgagaactgttccactagcttagctatgtttttatatatatgtataatttatataaataggaaacctggggctctgagaaattaagtgacttatttaatgtcacagggctagggccagggcagtgataagaggaataactaagtcttttagaagaagaagaggtggacacaagagagaagctccccgctggaagctagaactccagaactgagagattccagagtgggaattactggcagcactaatgtgtctttaggaattgaaaaagcaagc

SEQ ID NO: 48210 - DNA, 473 bp, Homo sapiens
cactaaagggaacaaaagctgggtaccgggccccccctcgagagtacttctagaattaattaaggcggggacatgactgatcccctcagagcaggctcaggcctggagtcggcccccaaaagtttcacatagggccaggcagcctctgtgtttctttccctggtcctgaactgtggaaatgccattaaactctctctataatgtaactgaaactgctggctgggcgcagtggctcccacctgtaatctcagcctccaaaagtgctgggtttacaggtgtgagccaccatgccttgccaaagttggctgtttctttagattcagaggaattattatctggcttgatctgaagaatgttaaaagtactatgatctgataattgcctaatatgtatgttacaatcttcttaactagggacatttattaaaattgaataaaaagagataaagaaagataaagaaagcggccgccacc

SEQ ID NO: 48211 - DNA, 344 bp, Homo sapiens
accctcactaaagggaacaaaagctgggtaccgggccccccctcgagagtacttctagaattaattaaggcgggaatcaaatgagttaatgtttgtatcgtggtaatatttgcaagtgatactttgtcatggatttatcttaaactgcattagaaaatatttgtgatcagaactttttaaaaaattgaattagtgcctacataagtgatattcatagggcaaaaataaattaggatccaaaagcaaaaaaaaaaaaaaaaaaaaaaaaaaagggggccccccccggggggggccccaaatccccccttagggggggttttttcccccccccccggggccgtttt

SEQ ID NO: 48212 - DNA, 488 bp, Homo sapiens
gcaattaaccctcactaaagggaacaaaagctgggtaccgggccccccctcgagagtacttctagaattaattaaggcggggggcagtcttgtgactgagcacttaaatggatctgacactatctgacataatttccaggtagatagtgttagaattgatttggaggacacctagctgatacctactgcagaattaattggtcgcttggtggtggggagaaatctccacacatttggtcactagaagtcttctgtggtgatgattgttgttgtagtggtgtgagagcagaggaaaaacatggttttagagtttttccaaaagagagtgagagagcaagagagaatacatcatgtgattccatttatattaaaagtctagaaaaagaaataaagactcttaattgaacggcggccgccaccgcggtggagctccaattcgccctatagtgagtcgtattacgcgcgctcactggccgtcgttttacaac

SEQ ID NO: 48213 - DNA, 495 bp, Homo sapiens
taaagggaacaaaagctgggtaccgggccccccctcgagagtacttctagaattaattaaagacagagcatgggcaaggatgacacactggtatgcctagatttgacagtgcacactaatccataacccttgtgagaaactacttgaggaacatattgatggctatatgattcgaatactggaggatcaccacatcttagacacagctatcatcattccatacatacactgcgctatctgctgctcactgattgctgagagactaaattcaaatgtcatctgatcctccaaggtgatactacaaatcccttatattaacaggtagtttaaatgtggaaataaggcaaagcatacttgcgagtcacaattactttcagatataattgagactacactgctatacataattaggtacacagtatgtataacaatgcatactatggtgtggagttaattccaattaccatattttatatttattggtcacaacagcat

SEQ ID NO: 48214 - DNA, 471 bp, Homo sapiens
accctcactaaatggaacaaaagctgggtaccgggccccccctcgagagtacttctagaattaattaaagcggttgaactgatgcactaagattctttacaatttgatagtgtgacgttttcaggaatcttttggaccctatgctgaagcccgtccttcacctgaggtcttgttcatttgtttatttgtatctatcttgcgtctagagagattcatacaatatgaccagattttaaacaaacgaaatagatgagaaggaaaatctgtgtcctggctataggggctgaagggcgtatctgtcaagcaggaatgctgcatttcagaggttgcagttaattcctctaaatgagcaagacatgttcgttcattcaacaaatatttgttgaattctactgggtatcgggcattactgcagaccttggagaaagggtggtagataaatcatacatcacctttggtctatgcttacat

SEQ ID NO: 48215 - DNA, 467 bp, Homo sapiens
aaaagctgggtaccgggccccccctcgagagtacttctagaattaattaatgcttgtgggacataataataacaattgaatgtctgcacagccgctttccacacagacatcataacaaaaaatttccaccaaaccccccctccccccgccttaattaaggcgggggtgatatttaaacaaacataaatgattgtaactttgcagcttttttatttaggtagctttaatttatttatgaaagttaatccatttctgatacgtggtttttaaaaatatgaaatggatttatatatactatattcctcaaatccactgtatgtggacttatattcattttctcctttttttcggaattgaaacattttaatttcaaattcaaatagaacatttaaaatgatttcattattattacccatactgttgccactcatattgtaagtcagttttttcattgctggtacaatgac

SEQ ID NO: 48216 - DNA, 449 bp, Homo sapiens
ctaaagggaacaaaagctgggtaccgggccccccctcgagagtacttctagaattaattaaggcgggggagcggagccgtgcgccgcaggcgggctccgtgacgccgggtggggaacgccgggccggtggcgggacttccgccacgggactcggaaggggccgcgccgccgctgctgggagttgtagtccggccgtggttgggggagccgcggctcatgcgcggtgcacagaggcttgtttcacatctgtaacaacaggaggaggcccagcctcgtgatgaggaatagcaaggagagaattcagctccagttcaaaagcctacaaaatctgagactgtcattgcttttataaggattccagctttccctcctggccagaaatgttcagcctggactcattcagaaaagcatccctggatgtgaatgaggaccctccttaaacaggaatg

SEQ ID NO: 48217 - DNA, 508 bp, Homo sapiens
  misc_feature 463, 464, 465, 466, 467, 468: n = A,T,C or G
ctaaagggaacaaaagctgggtaccgggccccccctcgagagtacttctagaattaattaaggcgggcggatcacgatgtcaggagattgagaccatcctggcaaatatggtgaaaccccgtctgtactaaaaatacaaaaattagccgggcatggtggtgggcgcctgtagtcccagctactcgggaggctgaggcaggacaatcgcttgaaccctggaggcaaaggttgcagtgagctgatatctccccactgcactgcagcctggcaacagagtgagactctgtctcaaaaaaatatatatctatatctgactgtctatatatagatatagacacaccagatttcaaagacttcatgtaaaaaaaatatgaaatatctcagtttctttacattgggtacatgagacatgacaatattttaggtatattgagttaaataaaatattattggattaacaccnnnnnnaaaaaaaaaaaaaaaaaaaaaaggggccccccccgggggg

SEQ ID NO: 48218 - DNA, 490 bp, Homo sapiens
  misc_feature 465: n = A,T,C or G
taaagggaacaaaagctgggtaccgggccccccctcgagagtacttctagaattaattaaggcgggatttattggccaggcatgatggctcacgcctctaatcccagcactttgggaggccaaagacggaggatcactctagcataggagtaataaacatgccaactcaacattgggagaccaaatgactgctggaagtacttcgaggtaagggagtacgttgatgacttagtttactatatgggtttgtggtcgcataccagtcatcagctgctatcattttccttcttcatcccttatactgagatttgggttacagctttttattcttcgaaggatcacaaagcagtgtacagacacctgccttctttaaggatgaaaggaagataaagtggcctttatttgtatacttatttgtttcacctcttgcttgagtaacttctaaggtgctattctctccctctntatgctaccccatgagctcttgtca

SEQ ID NO: 48219 - DNA, 492 bp, Homo sapiens
ttaaccctcactaaagggaacaaaagctgggtaccgggccccccctcgagagtacttctagaattaattaaggcgggcaaatgctcacaaagacctacgaagctgttatctctcatgtctgctttacctccaagcactgcacaagcaggaagaaaagaaaacagcaaagttgtaatctttctggctaagtaaacccaactgcaagaactagtagatttatatttgatgtgagcaggcatttgagaaaatctctgtcaaatagctagctcacatgaagctaataaagcagagatttttattgctaaacacgacaaaaggatgatattttaaaaataattttgaaaactcaccaaacaaacaagtaaaatttacaataagcaacaaaaaaacccaacgggatgagagagaatattatttcagggttgttgtaatagaaaaagtctagttttcagcaacagcaatgaaatacaaagtgtgcaaataaattaatga

SEQ ID NO: 48220 - DNA, 630 bp, Homo sapiens
tggccgcgcgcattacaaccctcactaaagggaacaaaagctgggtaccgggccccccctcgagagtacttctagaattaattaaggcgggcaccaaacaagcagaaaacagctagctataaataggcatgttaaaaaaagtaactactgtacatagaaaactgccctagaaaaaaatcataaaagtagatatatcaaaatgttattagtaattaccaatggatagaaaggtcaaatgatttaaatatgtctcctttttttattcttgtgagatggagtctctctctgtcacccaggctggtgtgcaggggcacaatctcaccttattgcaacctctgccttctgggttcaaatgattgtcctggcctaagcctcccgagtaactgggattacaagcacccatcactgcctggctaatttttgcaattttagggtttcaccatgttggctatgctggtctgaaactcctgacctcaggtgatccgcctgcctcggcctaccaaagtgctgagattacaggcatgagcctatgcagctggccttatttgctctgtcactaaattattaaatttggattaaccggggtcagacttcctctgtccccataaacattactgcttcttgtgatga

SEQ ID NO: 48221 - DNA, 487 bp, Homo sapiens
aagggaacaaaagctgggtaccgggccccccctcgagagtacttctagaattaattaaggcggggactgcagttgctttgtactttgatgataatctcactgagatctactcatacaggaccttcgcaccttcgccagagtttgaccaggatgaggatgatggggaggtaactgaggactctgatgaagactttatgcagcctccgcagaatacgcctaaagtcagatgagagaccaggacatataaagtaaaatgacatggatttaaatcagttgtttagaggaataaagacgctgtcttaagtgcttgactctagcaccccccaaatcttttccaggatgtctgaacttgtggagcctgagaggtgccctgaatataaaacaggctcctatccctgggctttttaatcactatttggaggaacacactcttgtgttatatacaggggtgagctggttatctggcttactgaaaaaaaaaaaaaaa

SEQ ID NO: 48222 - DNA, 500 bp, Homo sapiens
aaagggaacaaaagctgggtaccgggccccccctcgagagtacttctagaattaattaaggcgggagcctataatcccagctactcgggaggctgaggcagaagaactgcttgaacccatgatgtggaggttgcagtgagcagagatcataccactgcactccagcctgggggacagagcgagaccctgtctcaaaaaaaaaaaaaagttttataaaggcattttgacgggggaaataaatgctttttaaaaccccttcatggccatattggctactttatgtccactctggattcaaaattaggtgggttcattcactggaagcacaaaagtttgtggaaaactttttggggagatgacatctaactctcatttcaccttgtctggaagttttaggggaaaaataaaatcagccaaggggtaaattaccccaattgacttttatatcccagtctttgttatcctgacctaacttttttcctttatcaaattgaaaaaaa

SEQ ID NO: 48223 - DNA, 438 bp, Homo sapiens
agctgggtaccgggccccccctcgagagtacttctagaattaattaaggcgggaatgagctccagacgcgggagtttcctctctacaaagttacactgcagcagctgtctaccctgccccttgtcttttgagaagttcaaaccttcagaaaagttgcaagaacacgaggctaaaggcagcagttcactatactgcgggttgtctttgcgaggaagttgcattggacaaagagatgcagttcagcaaacagaccattgcggccatttcggagctggctttccgacagtgtgaaaattttgccaaagaccttgaaatgtttgcaagacatgcgaaaagaaccacaattaacactgaagatgtgaagctcttagccaggaggagtaattcactgctaaaatacatcacagacaaaagtgaagagattgctcagattaacct

SEQ ID NO: 48224 - DNA, 604 bp, Homo sapiens
caagcgcgcaattaactcctcactaaagggaacaaaagctgggtaccgggccccccctcgagagtacttctagaattaattaaggcgggtggagcacctgaggtcaggagttaaagaccatcctgaccagcctggtgaaacacagtctctaataaagatacaaaaattaggccgggtgtggtggctcatgcctgtaatcccagcactttggggaggccaaggtgggcggatcacctgagtcaggagtttgagaccagcctgcctaaatggtgaaaacctgtttctactaaaaatacaaaaaagtagctgggcgtggtggtgggcgcctgtaatcccagctactctgggggctgaggcaggagaatcacttaaacccaggaggcagaggttgcagtgagccgagatcacaccactgtactccagcctgggtgacagagcgagactgtccaaaaaaaaattgataattaaatgttaaaagtcagcgactccagtaatacgtggtgggctgagtattagactactggcttacatcctctgatgtcattactttcttgttcgtttgtgacttgaggttggattttaagcaaatgtattttgggctttt

SEQ ID NO: 48225 - DNA, 483 bp, Homo sapiens
caattaaccctcactaaagggaacaaaagctgggtaccgggccccccctcgagagtacttctagaattaattaaggcgggtggatcatgaggtcaggagatcgagaccatcctggctaacatggtgaaaccccatctctgctaaaaaaaaaaaaaaaaaaaaaatgagccgggcgtggtggcaggtgcctgtagtcccagctattcaggaggctgaggcaggaggcggagcttgcagtgagccgagattgcgccactgcactctagcctgggcaacagagcaagactccatctcaaaaaaaaaaaaaaaaaataatggcaactaattataaaatttaaaaccagtcgtgtatcttctgcaacattggagaagatggatcaagtaaaacagtctatagagcaaaagaaggaaaacaaagcaactgtcaaggaagcttaaatcagaaagtacatgtataaagtgatgtaagtaaatagcaaattc

SEQ ID NO: 48226 - DNA, 619 bp, Homo sapiens
  misc_feature 268, 271: n = A,T,C or G
ctaaagggaacaaaagctgggtaccgggccccccctcgagagtacttctagaattaattaaggcgggcactgcagattgccttgatatcaaaatcctcctacctaacagtgtaaagacactgatttctgatcaaggcattgcatatgactggtcgcggaggcgaggcatcgtgataagctcacactacatcatggtatactcgtagtgcatggagacatgtggagttggaaccactcgctagagctgacaggcattagcgtgtatatnccncattataaggggtacctgcagaaacagcctgtgtgaaagagcatgactcggtgttattgtaaaggaggaacagcttaaggttcatgggttctaaaatgaacctaaatacgtggagaatttcttgaatagttttgttctctaaacccggtttggctgtcttgtgaaatgattccctgcagtaaacggacttttcatttatttaatcattcaaacttccattcacatctgcatgattacagaaaacatggggtatgtagactagtaacacataagaaaattgcagtaagatggtaacaaaacctcatattgtctttacatgtttccaatggaaaatgttttgagtgttta

SEQ ID NO: 48227 - DNA, 486 bp, Homo sapiens
  misc_feature 397, 400, 401, 458, 459, 460, 461, 462, 463: n = A,T,C or G
cgcaattaaccctcactaaagggaacaaaagctgggtaccgggccccccctcgagagtacttctagaattaattaaggcggggcggtgatgtagagggtgatggtggtggcagaaggagttgactaccaagggtcacatggaattctcagggtaatagaacagttatttaatttttatggcagttacacaactctgcttttgtgaaaatgcataaaattgtatatgtggggaattttactatgtaaattatatatcaataaacgtgactcgtctaaataaaaaatttgtaccaacaaaataaaggagaaaacaatcatctcaatagattcagaaaaatgcatttgaaaaacttgttaaaaatcataacaaaaataaataaaaataaaaataatatcnccnnaaaaaaaaaaaaaaaaaaaaaaaaaaaaaaaaaaaaaaaaaaaaaaaaaaaaaaaannnnnnggcccccccccgggggggccccc

SEQ ID NO: 48228 - DNA, 531 bp, Homo sapiens
gaacaaaagctgggtaccgggccccccctccagagtacttctagaattaattaaggcggggatgcgggaccacaaggcctgtctgcctgatgccaagacccaacgcctgttttttaagtggcagcagggacatcagctggcaattgtaaataggtttccaggatcaaaactaacctttcagcgtattctcagctatgacacagtggtgcaaacaactggagactcgtggcacataccatatgatgaagacttggtagaaagatgttcctgtgaagtaccaaccaaatggctttgcctccaccaaaagacatagagattcttacctctatgctaagtttgtgttttgggtaccctctaggttggcattcagaggctcttgagctggtgtttgtttagggcattgcctttgtcctgaagataaaaggattctattaacagcattgacatttgatttttttaaatgaaatgagatatatcttttcataaccagctgggtttttttcccctaacattttgttttttggaggctta

SEQ ID NO: 48229 - DNA, 551 bp, Homo sapiens
tgattacggctgccgcgcactgtaactcctcactaaagggaacaaaagctgggtaccgggccccccctcgagagtacttctagaattaattaaggcgggtggatcacaaggtcaggagttcgagaccagcctggccaatatggtgaaaccccttctctactaaaaattcaaaaattagcctggcatgatggcaggtgcctgtagtcccagctacttgggaggatgaggcaggagaatcgcttaaacccgggaggcggaggttgcagtgagctgagatcacgccactgcactccggccttggcgacagagcaagactctgtctccaaaaaaaaaaaaaaaaagaaacccctttttggcttgggccggggggttaatccttgtatccccccccttttagggggcaagggcggggggatcccctggggggggggtttaaaaaccaccttatttaaatgggaaaacctgggtttttaaaaaaatccaaaatttccccgggggggggggcagcccccggaaaccctacctccagggggggctggggcaaaaaaacc

SEQ ID NO: 48230 - DNA, 422 bp, Homo sapiens
taaagggaacaaaagctgggtaccgggccccccctcgagagtacttctagaattaattaaggcggggatagacaaatacaacagtggagggagtagagagcctagaaacagaatcaccaatttgtgtttgacaagggcacctgaaaaattcaataggaaaaattcaatgagaaatagtgctggaggctgctctgcctatggagtagccattcttttatttctttactttctcaataaacatgctttcagttaaaaaaaaaagaaagaaatagtgttagaataagtagatattacatgaaaaatattgaataaaccttgaaaaacctaccttagaccatacacaaacattattttgtgatgttttatagacctaaatattacatcttaacctagaaaattttggaagaaaatataaaagacta

SEQ ID NO: 48231 - DNA, 498 bp, Homo sapiens
gcgcgcaatcaaccctcactaaagggaacaaaagctgggtaccgggccccccctcgagagtacttctagaattaattaaggcgggagatgttgaaaatgctatcttatcgacattcaaggagaggacgcatgacatttctgtgtcatacatgtactatggaaaataaaaatgagaaaaatggaaatggaatacatgaaaaggttatgataaatttcatattattttaccacaatataacaattttaatatattaaaaaaacatataatgtgtaatacaaaaaaaaatttggattcaaacagtatttatagagtaaaattattaaccgcagtggtgctcattccagggccctgccgggtattttgtgctatggatgtgagtacggcaaagagactgaattaagctgttttgtatttggaatcggattgttcacgttgcaacgttgctgcaatgataaatggatggatactctttacactttgaagtggatttaatcttc

SEQ ID NO: 48232 - DNA, 546 bp, Homo sapiens
ggaacaaaagctgggtaccgggccccccctcgagagtacttctagaattaattaaggcggggggagggcaacatcctcccactaagcgatttttatttatttatttattttgagatggagtcccactctgtcacccaggctggagtacagtggcacgatcttggctcacttcaacctctgcctcccgggttcaagtgattctcctgcctcagcctcctaagtagctgggattacaggcgtgcgccaacatgcctggctaatttttgtatatttagtagagacggggtttcaccctgttgattagtcaggtctcgaactcccagcctcaagtgatccgcccacctctgcctcccaaagtactgggattacaggcctgagccaccacaccaggcccccactaaacattttaattgtactattgcaagtagtcctcacaactctgtaaggcagatactgtttttttgtttgtttgttttgttttgtttttgagacagaaatttcactctgtcacccagactggaatgcagtggcacaatctcagctgac

SEQ ID NO: 48233 - DNA, 481 bp, Homo sapiens
agcgcgcaattaactctcactaaagggaacaaaagctgggtaccgggccccccctcgagagtacttctagaattaattaaggcgggacgctccaacattgtaaaaattatagatatatattaggatttgtttattaaagttccacgagctgctttgtggtcagttgggctgagtagtagatatcttaaagacatgcagtgaaagtgaaccctgtcatatcatggtgcctctttcaaggttcctctgtaagtgcctgatcttgcagaattatttacaataccgaggtatggttgaaccagctgtccagccttaactctatttagtgccccattactaatgttcttttaactggtttgtatgtgttttaactgtccagtgtgtggatgctaccttttgatggctacatgtgtccctggtgctgcttttaaggatgtacggccatgtgatcaggtatcaagttgagtcggtacacagttggcct

SEQ ID NO: 48234 - DNA, 529 bp, Homo sapiens
  misc_feature 479: n = A,T,C or G
ctaaagggaacaaaagctgggtaccgggccccccctcgagagtacttctagaattaattaaggcgggtggatcacttgaggtcatgacttcgtgaccagcctggccaacatggtgaaaccccatctctactaaaagtacaaaaatcagccatgcatggtggtgggcgcctgtaatcccagctactcaggaggctgaggcaggagaatttcttgaacctggaagacagaggtttcagtgagctgagattgtgccactggactccagcctgggtgacagagcgagactccatctcaaaaataaataaataaataaataaataaataaatgaaattatttatctctaggttgctgaaacttgcacaaaatataataacaggtttcatataaatgtcacagggaaagggcaaatgttttagaagcttagccataatgttgtgaattttataggcctgaagctctatcaattgaacatacgaanaaaaaaaaaaaaaaaaaaaaaaaaagggcccccccccgggggggacccca

SEQ ID NO: 48235 - DNA, 475 bp, Homo sapiens
ctaaagggaacaaaagctgggtaccgggccccccctcgagagtacttctagaattaattaagatcatatacaaaaaaaaatcctaatggaactgcaaaacatggtagtagaactagtgaatgaatttagcaaggtctagatatgaaaatcaattgtattccataaactagcagcaaaataacagaaaattaaaaataatacatttataataagtcaagaatatgaaatgctaagggacaaactaacaaaatatgaagaaaaattagaatgactagacttctcaacaacaaaatcaagcctgtaagaaaattagtaactcttaacctatacctcaggaatgagggcaaaattgaattcattttaaggaaaacacagaatttgacccttatcaaaatgacataaagaaaaagcagagtagtttcttagttcatttgtgttgctataaaggaatacccgaagctggataatttataaa

SEQ ID NO: 48236 - DNA, 299 bp, Homo sapiens
taaagggaacaaaagctgggtaccgggccccccctcgagagtacttctagaattaattaaggcgggtggcccggcccacagctcagggccacgtcccccattctcctcctatccctcaaccccgacatcattaccgggttttcctcttaaaaaaaaaaaaaaaaaaaaaaaaaaaaaaaaaaaaaaaataaaaaaaaaaaaaaaaaaaaaaaaaaaagggggcccccccccggggggggccccaaaccccccttaaagaagattttttccccccccccccggggccctttataaaaaaa

SEQ ID NO: 48237 - DNA, 446 bp, Homo sapiens
  misc_feature 379: n = A,T,C or G
ctgggtcccgggccccccctcgagagtacttctagaattaattaaggcgggcaatgtaggtgggcggagcgacactgagccgtaccctgcttgttacacttatgcgacgagaaccgaagatgccgaactaacgtgttgtcctgctgatctcgaccttcgttctcatcacataatagtctatatgcgaagcgatggagcagaggattcctaatattttacattagagataatgccaaatgtttgagggggtagatatgcaaataacccttatttcatcattacgtgttgtatgcatgtattaaaatatcactccattgcccataaatatggacaattattatgtgccatttacaaaaaaaataaaaagaaaaaaaaaaanggggggccccccccggggggggcccccattcccccaaatgaggaagatattacccccccccccgggc

SEQ ID NO: 48238 - DNA, 499 bp, Homo sapiens
gcaacgcaaccctcactaaagggaacaaaagctgggtaccgggccccccctcgagagtacttctagaattaattaaggcggggaatagagctgcgagcaaaactgagcgagataaaaagcacatactataaaatatctagcaaagccaaaagctggttatgtgaaaagatgatgaagtatctaaagctttatctagactgatcaagaaaaactataacacaagtcaccatcaacaggaatgagaaaagggttattgtaaatgctacacacatctaaagaataattatgctatcataaacggctttatggcaatgaattcgacaactcagatgaaaaggacaatttctttgaaaaatacaactcaccatatcctacctactgagcctaaaaggagtggggccccccctggggaggatacctactctcactaaccgtgaacacccactccctcttagccgagattgtgcctatagacatactagtctttgccgcctgcgaa

SEQ ID NO: 48239 - DNA, 487 bp, Homo sapiens
ctaaagggaacaaaagctgggtaccgggccccccctcgagagtacttctagaattaattaaggcgggacgagaagaagaaactggaggataagaagaaatccctggatgatgaagtgaatgctttcaagcaaagaaagacggcggctgaactgctccagtcccagggctcccaggctggaggctcacagactctgaagagagaccaaaaaaaaaaaaaaaaaaaaaaaaaggggggccccccccggggggggcccccaattcccccttttgggggattttttccccccccccatgggcccgttttttaaaattcactagcttctggccctcgacccgaaatgctaacactttgtgtgtgtgagaaatttttattgaacacggggtttaataaatgcaaataccaagatcaggaatttcctatttttgaggagctcattatctaatgccttaaacggcttcataaagaaaccattaggataccttttg

SEQ ID NO: 48240 - DNA, 456 bp, Homo sapiens
accctcactaaagggaacaaaagctgggtaccgggccccccctcgagagtacttctagaattaattaaggcgggtggatcacaaggtcaggagttcaagaccagcctgaccaacatggtgaaacaccatctctactaaaattacaaaagttagctgggcgtggtggtgcacacctgtaatcccagctactcaggaggctgaggcaggaaaactgcttgaacccaagtggcagaggttgcggtgagccgagatcgcaccactgcactccagcctgagcgacagagcgagactccatcccaggaataaaacaatactaataacaaacctgtgcgccccccccgggggggccacaacacaccgccgtttagtgacctatcacaccccccacatgggcccctgattcacacgagaaaacaccctcatgttcatacacctatcccccattctcctcctatc

SEQ ID NO: 48241 - DNA, 277 bp, Homo sapiens
aagcgcgcaattaacacctcactcaagggaacaaaagctgggtaccgggccccccctcgagagtacttctagaattaattaaggcgggagcgactgtcatgggtgcagggcgttttggtgcagtgatgaaatgttctggagttagataacggtgatggttgcacaactctgtgaacatgcttaaaaaaccgaattgtacactttaaagggtgaatatttggggatgtgacttatatctcagtaaagctattattaaatacatccatccatgcattca

SEQ ID NO: 48242 - DNA, 477 bp, Homo sapiens
aaagggaacaaaagctgggtaccgggccccccctcgagagtacttctagaattaattaaggcggggactgttaagggctctaagggaatgtacacctagtctcgctgttgttctgaattgctgctagatgagcttgcagttcctgtttttgctattgattcctaaattggacctacatattacatgggtgtcatgagttcaggcttttcaaagaagggtctagtgagctaagtttcatcttctggtactcattgatcaaactgacctttctattctcataagcgtccctacccaaagttgtgtgtggaaggagtgtatagcatagaggaaatccctttcaacagagtcagctgctaactgatttcctataagcacactggattaagggcagccacagtggtttctactgtatgtatgaaccgaatggaggaatgttttcaaagattgatttggtgtggattgcaattgtaatggaag

SEQ ID NO: 48243 - DNA, 460 bp, Homo sapiens
ctaaagggaacaaaagctgggtaccgggccccccctcgagagtacttctagaattaattaaggcggggagtgggcttttccacctgacctcagcctcctgtcatatcagctgggacattagattctcataggagcactacccctattgtgaagtgcacatgcaaggatctacgttgcatattccttatgagactctcatgcctgatgatctaaggtggaacagtttcatcccgaaaccattccccccaacacccgtccgtggaaaaactgtcttccacaaaaccggtcccttggtgccaaaaaggctggagactgtcattgtagcccatttattttactctcctgactcccaccaggattaagactattgcaatactttaagtgttgagcagttgggtaccatacaagaaaaagatcagatgttagtaattaataccacatgtaaaatagctgattatat

SEQ ID NO: 48244 - DNA, 494 bp, Homo sapiens
aattaaccctcactaaagggaacaaaagctgggtaccgggccccccctcgagagtacttctagaattaattaaggcggggggcccgctgcactgtgggtaggcggcggcggcggctacgcggagcggcaggcggtggagcgaggccgcgcgcgccgaagatggctgagaagcagaagcacgacgggcgggtgaagatcggacactacgtgctgggcgacacgctgggcgtcggcaccttcggcaaagtgaagattggagaacatcaattaacaggccataaagtggcagttaaaatcttaaatagacagaagattcgcagtttagatgttgttggaaaaataaaacgagaaattcaaaatctaaaactctttcgtcatcctcatattatcaaactgtaagtatttttgtatctaataataccaaagagacacctatcttaaaatgtttttttaggaattttataataattgttaattgttaaccttttacaaag

SEQ ID NO: 48245 - DNA, 486 bp, Homo sapiens
  misc_feature 450: n = A,T,C or G
accctactaaagggaacaaaagctgggtaccgggccccccctcgagagtacttctagaattaattaaggggggtgggatccgcactgacagagtggagagtgacatgtgctggacactgtccatgaagcactgagctaaagctgggcgcacaacgcaccagacactatcaggaaggatggagctgaaaacataccccactatgacctggaagcactgggaagcctagagaaggctgcgagccaaggagggacggtcttcctttggcatggcatggggatgaatgtacgaaatggactgaaccccctggatgctgactcaatatggggggaggtgtttggcaagacttccagatacaccttgaatacatgcttagacaagtattgtacaagtattaaagagctgttatactgtgaaaaaaaaaaggggcccccccccgggggggccccccncccccctttaggggggttttttcccccccccccccg

SEQ ID NO: 48246 - DNA, 447 bp, Homo sapiens
taaagggaacaaaagctgggtaccgggccccccctcgagagtacttctagaattaattaaggcggggggatcacgaggtcaggagttcgaaaccagcctgaaaccccgtctctactaaaaatacaaaaaattagccgggcatggtggcgtgcctgtaatcccagctacttaggaggctgaggcaggagaatcgcttaaacccaagaggcggaggttgcagtgagcagagatcatgccattgcactctagcctgggcgacagagcaagactccatctcaaaaaaaaaaaaaaagggtgtattgcttaattttaacatacacttgaccaagggggaacttaaactaatttttaaataacttataatcccaaatacaatgaaactgctggggaaaaagtggctatatggggttgtttgggaatttcctaaattaaatatttgaaaatgta

SEQ ID NO: 48247 - DNA, 513 bp, Homo sapiens
agcgcgcaattaaccctcactaaagggaacaaaagctgggtaccgggccccccctcgagagtacttctagaattaattaaggcgggaggaatagatttatacaccattattgttttatttttaaattttcattcactcttctgtttggatacttttgctaattaacgtcctatgttaatttccaccaagctataagtccatagtcagtaaaacattccccttgggctgtcatgagctaaaagcagtgtcatctccgcatgttggagcagccaagaaatagtttggtactaccgacattgtctaatccatgtcacatcctcatacaatttaattgctcaaccatgcatttaaaactcctcaagaaaggattggtactgcaactgtaggtaaactgaaaaaaaataagaaagaaagagttggatgaaaatgtgaaagcccaagtttagatgtgcattaagtattaaatagcacagtatcttcttcatggagccttttttcctcccccatcccctg

SEQ ID NO: 48248 - DNA, 337 bp, Homo sapiens
aagggaacaaaagctgggtaccgggccccccctcgagagtacttctagaattaattaaggcgggcagatcacgaggtcaggagatcgagaccatcctggctaacacggtgaaaccccgtctctactaaaaatacaaaaaaaaaaaaaaaaaaaaaaaaaaaagggggggcccccccgggggggggccaaaactccccaaaagaggggttttaaaacccccccccagggggcgtttttaaacaagatcgcgccagtgcactccagactgggcgacagagcgagacaccgcctcaaaaaaaaaaaaaaaaaaaaaaaaaatggggcccccccccggggg

SEQ ID NO: 48249 - DNA, 601 bp, Homo sapiens
gggaacaaaagctgggtaccgggccccccctcgagagtacttctagaattaattaaggcgggtggaccacgaggtccatcaggagatcgagaccagccttgccaacatggcgaaaccctgtctctactaaaaatacaaaaattagccagccatggtggcaggtgcctgtagtcccagctactcaggaggctgaggcagaagaatcgcttgaaccagggcagcagaggttgcagtgagccgagatcatgccattgcactccagcctggcaacaagagcaagactctgtctcacaaaaaaaaaaaaaaaaaaaaaaaaaaaaaagcggccgccaccgcggtggagctccaattcgccctatagtgagtcgtattacgcgcgctcactggccgtcgttttacaacgtcgtgactgggaaaaccctggcgttacccaacttaatcgccttgcagcacatccccctttcgccagctggcgtaatagcgaagaggcccgcaccgatcgcccttcccaacagttgcgcagcctgaatggcgaatggaaaattgtaagcgttaaaattttgttaaaattcgcgttaaatttttgttaaatcagctcatt

SEQ ID NO: 48250 - DNA, 433 bp, Homo sapiens
ctaaagggaacaaaagctgggtaccgggccccccctcgagagtacttctagaattaattaaggcgggatattggcgtaaacctattactcatatcttgcattaagccaatattgtgccaatgctctacagactgctcaccttatctggactacaagttaaagataaccacccttaaactgtgatacatattactaccttcatgtgaacaaaatacaatataaaataagctgaacatgtccgtgcatgcctatttataaaaatacttcttaagtatatctacccttgataacagattttgaagaaatcctgttagatgataaagcatttgaatggtacagttgatgtaaaaaaaattcagtttaaaagaacatctggttttacattaaatgcttatttgacatcacagacacttggtaaataacttcttaacca

SEQ ID NO: 48251 - DNA, 137 bp, Homo sapiens
taaagggaacaaaagctgggtaccgggccccccctcgagagtacttctagaattaattaaggcggggaccctccacttctgacaaggattggtcgtgcacgacatgggtcccgttccgaaggcatgcctacatgtgg

SEQ ID NO: 48252 - DNA, 405 bp, Homo sapiens
accctcactaaagggaacaaaagctgggtaccgggccccccctcgagagtacttctagaattaattaaggcgggggggtggggagagtaaaagtcagtttgttgagaattggaagtttgatttaaggcaagtctttcaaacagagaaaatttgattagagttgggtaaggataaggatacaactaagaccatttgaagcatcaagataaggattttgtggtgagtgagtcaatgcctgttgatgtttgtcattgaggagatctttaatgaagttcctatagtgaacaatcaaaccattttgcttgggcaggagactcctgcaaaaaaaaaaaaaaaaaaaaaaagggggcgccccccccggggggggaccacaattcccccaaaagggggtttttttcccccccc

SEQ ID NO: 48253 - DNA, 492 bp, Homo sapiens
taaccctcactaatgggaacaaaagctgggtaccgggccccccctcgagagtacttctataattaattaaggcggggtaagatggccaatctcaaaaggttacatactatatgatttcattaatataacattcttgaagaaacagaatagtggatatgaagactatattattggttgccagtggtgagagatgatggaaaacggtgactggctatcaaagggtaaggatcctcatgatggaactgttctgtatcttgactgaggtggtggtcacatgagtctgattaaattgcatataactaagcatacaagtacatgtaaaggtggtgaaatcctaataaagtcaattgttaattttttttccatgaaaccttgtcaacaaattttcttattttaatgttaattttttgattgtgatacagatattcaaaatgttattgggaaaactaaagtttacaggatctctgttattttttaaaactgcctataaaa

SEQ ID NO: 48254 - DNA, 265 bp, Homo sapiens
aaagggaacaaaagctaggtaccgggccccccctcgagagtacttctagaattaattaaagcggggcagttgtatttttttaaataaatatttttaacaaaatgaaaaaaaaaaaaaaaaaaaaaaaaaaaaaaaaaaaaaaaaaaaaaaaaaaaaaaaaaaaaaaaaaaaaaaaaaaaaaaaaaataaaaaataaaaaaaaaatattaaaaaaaaaatttgtatataccggccaagacttctatgatagtgctcggtaagccaa

SEQ ID NO: 48255 - DNA, 456 bp, Homo sapiens
accctcactaaagggaacaaaagctgggtaccgggccccccctcgagagtacttctagaattaattaaggcggggggatcaaaacataattgttttaattctacagctgtaggagctttgtattgctgaactttcatctggaaaagtttcacagtgacatttttaaaagagaatttttttatctgccgaattctaccagtgtaaccttttttctaaataaacaatagttttctcaaaacaaaaaacagtatgatgtagaggcaaaaacatgatgaacaaaaatctaatatatgcctacgcgggcccaacatacatgtcacgagattgtgctcatcttggccatcataccccacccccgtggggtttaataaaccaccacattaacaacataaaaccctgcttcgcacgagaaaacaccctcatgttcatacacctatcccccattctcctcctatc

SEQ ID NO: 48256 - DNA, 447 bp, Homo sapiens
ctgggtactttgccccccctcgagagtacttctagaattaattaaagcgggtaggcctaagattgtgggggcaatgaatgaaacaaacagatattcgttcattttggttctcaaggtttgttataattctttatttttatgggctttaaaccgtcagagctgggtgggtcctcctacaacaaaatcgtttgctctctctttcctagttaacaggctttcaaatattagaagatcaatgttctgaccccattgaaatttctcttttgtggaatgaaaagctctgatttaacccatcttcaagcctggtttgcatattcctctctcttccggccatcttgtctagacacactacactgaggccgtgcccatcgtaaatgatgttgatacgttgtcaaaaaataggcaaaccaggcgcggtggctcatgcctgtaatcctaccactttaa

SEQ ID NO: 48257 - DNA, 669 bp, Homo sapiens
aaagggaacaaaagctgggtaccgggccccccctcgagagtacttctagaattaattaaggcggggataagagactgtgaacctgtatctacctcacagggttagtacgaagattaaatgagatgattgaattaaaacacatagtgtagttcctggcagatgataaacattgtgctcttgttaccattatctttttaaaaaataaatatcatcatcaacatactgattaaggagtttataaaaagtaattcaagtatagggggaaatatttgcaatttaatgggaagaatttcataattatagagaagaaaggatttgtctacattatagcatgctgtagaactttccgcagtgatagaaattttagttcctttttatccggtgtgatagccactagccatgtgtacctattgagtatattaaataagccaggcagctgagcaactgaattgtagattttatttaagtttagccataaacttagcaaacagctaccatattgggcagcacagaagaaatatagtaaatacaaattatttatagaatgcttcttttctgggttgcatctgttacatttttattgagatgggaaaaatacattttacatgttataacctggttttatatttgattttaacacggtcattgattacttttttcctgtctctc

SEQ ID NO: 48258 - DNA, 117 bp, Homo sapiens
ccctcactaaagggaacaaaagctgggtaccgggccccccctcgagagtacttctagaattaattaaggcggtgaatctgtcaatatctggattttaatccacacatctctgctaac

SEQ ID NO: 48259 - DNA, 436 bp, Homo sapiens
aaccctcactaaagggaacaaaagctgggtaccgggccccccctcgagagtacttctagaattaattaaggcgggatgaggcctgcagggcagccattgaggagatggcgattccatgtgccaccctaacatggagctcatggggcaggcactttgccagggcagacccgctccagactgacttctttgcccataacttgcctgtacagttcaggcaccaccatatctgctgcctagacccacaaagcaaaagcttgctccaaacacggtggctcacacctgtcatcccagaacttcgggaggtggaggtgggaggatcgcttgaacccaggagttcaagaccagcctggacaacatggcgaaaccccatctctacaaaaaatacaaaaattaaaaaaaaaaaaaaagcggccgccaccgcggtggagctccaatt

SEQ ID NO: 48260 - DNA, 430 bp, Homo sapiens
ccccccctctagagtacttttagaattaattaaggcgggcgtggtagctcatgcctgtgatatggtttggctgtgtctccacacaagtgtcaccttgaattgtgataacccccatgtgacaagggcagggccaggtggagatacttgagtcatgggaacgatttcccccatactattctcatggtagtgaataagtttcatgagctctggtggttttataaatgggagtttccctgcacaagctctcttgcctgccgccatgtaagacatggctatgcttctcatttgccttccaccatgattgtgaggcctccctggccacatggaaatgtgcgtcagttaagcctctatcctttgtgaattacccagtcttaggtatctttattagcagcatgagaattgactaatacactcctataatcccagcatt

SEQ ID NO: 48261 - DNA, 398 bp, Homo sapiens
ccctcactaagggaacaaaagctgggtaccgggccccccctcgagagtacttctagaattaattaaggcgggcgcctgtctacgtagttattctggatgctcaggcatgaaaatggggtgaatcctggaggcggatactcgcaaggagccgatatcgcgccagtgcacaccagccttgtctacatatggagactccctctgaaaagatacaatatgcaccatgaaatgtttacagtgagacggtgtccctttatattggaggaaattctacgccctggtagatatacctagatccaccccccaaacggcgatagtaaacaatatttaacagtgttcattcttctacacaatctctctgtatctggtacctagggcctagttaagtaactgaatactga

SEQ ID NO: 48262 - DNA, 485 bp, Homo sapiens
ccctactaaagggaacaaaagctgggtaccgggccccccctcgagagtacttctagaattaattaaggcgggcagatcacgaggtcaagagatcaagaccaccctggccaacatggtgaaacccagtctctactaaaaatacaaaaattggctgggcatggtcacgtgggcctgtagtcccagctacttgggaggctgagataggagaatctcttgaacccaggaggtggaggttgcagtgagccgagattgcaccactgcactcagcctggtgacagaatgagactctgtctgaaaaaaaaacaagaaaaaaaaaaaatgagggggccccccccgggggggcccccaattcccccttaaggggggttttttccccccccctcccggcccggattaaaaaatttaatgcagtgagtgtggcaaagctttctctcggaagtcacaccttataccacatcaaaggacacatacgggtgagaaaccct

SEQ ID NO: 48263 - DNA, 461 bp, Homo sapiens
ctaaaaggaacaaaagctgggtaccgggccccccctcgagagtacttctagaattaattaaggcgggaggattgaagaagaaagaaagaaagacagacagacagaaagaaagaaagaaagaaagaaagaaagaaagaaagaaagaaagaaagaaagagagaaaaagaaagaaagaatgggagaaaaagaaagaaagaattgcctctaagaagcatgactggcaaatggataggagtgaggcatgcattataaacaatattattttcagtattattaatcaatgtaatcacttgacttttaaactacatatatagttttatatacatgtatagtttatacacacatatatacatatacacacacttttaataaaaaattataaagattatataattgcggccgccaccgcggtggaactccaattcgccctatagtgagtcgtattacgcgcgcttactggc

SEQ ID NO: 48264 - DNA, 433 bp, Homo sapiens
  misc_feature 345, 372, 373: n = A,T,C or G
tactaaagggaacaaaagctgggtaccgggccccccctcgagagtacttctagaattaattaaggcgggaggagtgtatcaatctacttattgttccaagaagcctgcctattactaagttgaaaaagaaaatatgatcttatacttgtgtgaaacaaaaagcaatctgcaaaaggttcatcccaaacctctatgtgggtgactttcctgtcattcattttattatccagatagagaaggactagaaaaagaaacaacagaaatgtgagaaaggaattttaaaagaaaaaaaagaggtagaaaagtaatcttccaacaaatatgagatgaggaaacagacatcgngaaaaataaaaaaaaaaaaaataaaanngggggggccccccccgggggggacccccattcccccttttggggggttttttgacccccc

SEQ ID NO: 48265 - DNA, 492 bp, Homo sapiens
  misc_feature 421, 422: n = A,T,C or G
cgcgcataaccctactaaagggaacaaaagctgggtaccgggccccccctcgagagtacttctagaattaattaaggcgggcggattgcctgagctcaggagttcgagaccagcattgacaacacggtgaaaccccatttctactaaaaatacaaaaaattagcccggcgtggcggcgtgtacctgtagtcccagctactcgggaggctgaggcaggagaattgcttgatcccaggaggcggagcttgcagtgagccgagatcacaacactgcaccccagcctgggtgacagagccagactctgtctccgaaaaaaaaaaaaaaaaagaaaaaagagtgggggcccccccgggggggggcccccattccccctttagggagtttttttccccccccctctggggcgggttttaataagatnnttcatttgttcgagtggtgttacctgttctctcaagagggtatgtattgggtggaggagcattatgtatg

SEQ ID NO: 48266 - DNA, 503 bp, Homo sapiens
tactaaagggaacaaaagctgggtaccgggccccccctcgagagtacttctagaattaattaaggcggggtgaaccggcccaggtcggaaacggagcaggtcaaaactcccgtgctgatcagtagtaggatcgcttgagcccaggagttctgggctgtagtgcgctatgccgatcgggtgtccgcactaagttcggcatcaatatggtgacctcccgggagcgggggaccaccacgttgcctaaggaggggtgaaccggcccaggtcggaaacggagcaggtcaaaactcccatgctccaccacgccctgctaattttgtatttttagtagagacagggtttctccatgttggtcaggctggtcttgaacctcctgacctcaggtgatctgcctgcctcggtctcccaaaatgctgggattacaggcgtgagccactgtgcctggcctttctaacttctaataaatacaatttaagttaaaatattgaaccatttaacataac

SEQ ID NO: 48267 - DNA, 484 bp, Homo sapiens
ctaaagggaacaaaagctgggtaccgggccccccctcgagagtacttctagaattaattaaggcggggcctgatattcaccccttatgtgcctaaccctgttctcaaagtattaaacccttgaaaaggtcactattgctagaaagtcgtccctcggtgtccacggaggagataggttctgggaccactgcagaaagcaaagagcgaggatgctcaagtccctgatataaaatggcatcatacgagcacatcacctatgcacttcctctctcatgttttaaataatttctggattacttgtaatacctaacacaatgtaaatgctgtgtgaatagttgtactatgttgtttagtcactaatgataagaaaatctacaagttaggtatagatgcagattttttcatgaatatctttgattcatggttgaagccaggggtgaggaacccacagacacagagggctgtgtgtccttttgaaaagaata

SEQ ID NO: 48268 - DNA, 437 bp, Homo sapiens
  misc_feature 333, 334, 336, 387, 388, 410, 411: n = A,T,C or G
ctaaagggaacaaaagctgggtaccgggccccccctcgagagtacttctagaattaattaaagtataattgctaagagtagcagaattttgatttattttatttgaatggaagtttattaacactcatccacagatacacttatgtaattaagtttctgatgatgaaccagcacaatagacagccactactgctcattctcgcttcatttcctttttctatttgaaaagttgcaaaagaagctgaaaaaaaaagggggccccccctgcgggggccccccatcccccctttgtgtgaggattttacccccccctcgtgggcctttttttaaagnnanaaaaatttctcacaaagggtttgaaactttaaaaaataaatgggttaagcnnaaaaaaaaaaaaaaaaaaaaannggggggccccccccggggggggaccc

SEQ ID NO: 48269 - DNA, 524 bp, Homo sapiens
aaagggaacaaaagctgggtaccgggccccccctcgagagtacttctagaattaattaaggtggggggtttgggaaggaaagaatgtaatattatggatttagccttaggctttaagttttaggctggcaaaagaaatgttattcagtgggtttgaggtttggactactttcttcaaacttagagaattataacaggatggtgtttactttgttcacctggatgtccccaagactctagcttcttctatcagtggttggtctgatagaagaggtaaaaattgctcttgaaaatgtcctacaatttatgcagtttctttgataatatttttctgttcaaatccctgcttctgtttttggtctgttacctaaatatagttcaagtttaattctgtaagagcaaagaaatgaatttgatgaggaaattaagcatccaatggaggattggtcttgaagaccttaaaggtgctttccaacctgcactgctccagtgaaatgtggtacttttttctttttaaagcaacca

SEQ ID NO: 48270 - DNA, 661 bp, Homo sapiens
  misc_feature 371: n = A,T,C or G
gcgcgcaattaactttcactaaagggaacaaaagctgggtaccgggccccccctcgagagtacttctagaattaattaaggcggggggcaggcaacgtctctacacagagctgctgccacatggctgggaaggactcagatccggtacatccactgatctgccgccaagtgtgaaccctgaggtcagaacaactgaacttggatgaggagggggatacctgtgtactgtagtatcaggtttatgagtacctacaaattcaaatcattttgcatccttcaatacatttaatttcctcaataaacctgtgagaatcattggtagctcaattttacaggtgagaaaactgaggctcagagaaatagcttgcccnctaaataaaaaaaaaaaacaaaaataaggcggccgccaccgcggtggagctccaattcgccctatagtgagtcgtattacgcgcgctcactggccgtcgttttacaacgtcctgactgggaaaaccctggcgttacccaacttaatcgccttgcagcacatcccccttttcccagctggcgtaatagcgaaaaagcccgcaccgatcgccctttccaacagttgcgcaacctgaatggcgaatggaaattgtaagcgttaatattttgttaaaattcgcgttaaattttt

SEQ ID NO: 48271 - DNA, 476 bp, Homo sapiens
accctcactaaagggaacaaaagctgggtaccgggccccccctcgagagtacttctagaattaattaaggcgggggaaaatattgacgaactggtcatatgacataggaatgatatatagaatatacaataaactcagactaaatagtaaaaaaatacttgtaataaagactagaaataaatgccattagaaaatgggtaggcacggagcagtggctcacgcttgtaatccaagcactttgggaatatgaggcgggaggatcactggagcccatgaatctgagaccagcttgcgacatggcaaaactgcacctctataaaaaatacaaaaattatccaggtgtggtggcatgtgcctatagccccagctactcaggaagtgaagggatcgcttgagatcaggagaggtcgaggctgcagtgagccataatcttgtctatgcacttcagcctgggtgacatagtgagaccctgtctc

SEQ ID NO: 48272 - DNA, 465 bp, Homo sapiens
aaaagctgggtaccgggccccccctcgagagtacttctagaattaattaaggcggggagaggctgcctgctctctaacggatgattctcatttgtcccttaaacagctgcatttcttggttgttcttaaacagacttgtatattttgatacagttctttgtaataaaattgaccattgtaggtaaaaaaaaaaaaaaaaaaaaaaaaaaaaaaaaaaaaaaaaaaaaaaaaaaaaaaaggaaaaaaaaaaaaaaaaaaaaaaaaaaaaaggcggccgccaccgggggggagctccaattcgccctatagtgagtcgtattacgcccgctcactggccgtcgttttacaacgtcgggactggaaaaaccctggcgttaccaaacttaatcgccttgcagaaaatccccttttcgccagctggcgtaataccaaaaaggcccgcaccgatcgcccttccaaacaatt

SEQ ID NO: 48273 - DNA, 646 bp, Homo sapiens
tcactaaagggaacaaaagctgggtaccgggccccccctcgagagtacttctagaattaattaaggggggggctcgtagatgtgcttacacacaaacatgtcagtgctcctcaaagtaggggcgatggactaatgtaacaccttcatacctaatgccgtcctaacctatcttaatgaaaggagcatcctatccgggacctataccgacacattccatcgcccatgtacaggcaagagactgatgccatgctttggtgtcaactgcatgatgcattactttctatcttactaaggctcctaagcacagaccctttacgggtgtccggctggtggaacggtcagtgcctttcccttcccttatgccatatttaactactatctcatggagagaaacatcgcacaatacctggctttcctaggcacacgttcctgccgccttccacaatttttgtgtccctgggtacttgagattacggagtggtgatgactcttaaggagcatgctggcctcaagcatctgtttaacaaagcacatcttgcaccaccccttaatccattcaactctgaattgacacagcacatgtttcaaagagcacggggttgggggtaaggtcataaattaacagaatctcaaggcagaagaattt

SEQ ID NO: 48274 - DNA, 436 bp, Homo sapiens
aaagggaacaaaagctgggtaccgggccccccctcgagagtacttctagaattaattaaggcgggggttgcagtgagctgagatcacaccactgcactccagcctaggcgacagagtgagactccgtctcaaaaaaaaaaaaatttaggctggaatacttattggggatctttgttgttcaatacagtaaccactagtcatacactagtttgtattaaataaactactattaaataaactagttttaaatttcatagtaatgaaatttaaatttatatttattaggccgggcgcgggggctcaaacctgtaatcctagcgctttgggaggccgaggtgggaggattgcttgaggccaggatttcaagaccagcctgggcaacaaagtgagacccctgtctctacccccccaaaaatatatgaaaatgatcatttca

SEQ ID NO: 48275 - DNA, 458 bp, Homo sapiens
taaagggaacaaaagctgggtaccgggccccccctcgagagtacttctagaattaattaaggcggggatgttctgtagttgaaaatgttagttgtctgctggcacagaatttatctcgttcctttctctcccttctctcctccaaatcagtctcttcccttctccactagataactgtaaaaccttttcctggggtacatacattcgttaactcttgggcagtggtgagcacgagatgactttctgcagcgtttatcactgttgggtggagtcacgtcccttccctccaccgaagtcatcaaccagatagggaagggaaagatgaggcccagaaaacgagttcaaactctaggtcttgtacacgtatgtaagtaaatgtcaataacccaagcctttgtcatagcagtcacttggttgacttaggatctgggtctgttgaattttgtgcttgggaatgg

SEQ ID NO: 48276 - DNA, 488 bp, Homo sapiens
aaagggaacaaaagctgggtaccgggccccccctcgagagtacttctagaattaattaaggcggggggtggggctggcagggaattagaatttctctctctcttttaatagttttattttgtctgtcctgtttgttcatttggatgttttaatttttaaaaaaaaaaaaactttgctgatatttataattttgtatcataaaaatgttttcctctacagtatttgtcatgccagtttataacaaaaaaaaatgcagggattttatttttattggaaacattacagctatgttttacttttggacaaaatttttatttgtatagagggcttactaatgttaaatagttcaaagtttataacatttactttaaggactcatggtaggttttagggtaaggagtttaaaggaaataaattttcaaactgggtctcattgccaattttggtggaaatgagtttgtgtcatttcaattacaaaaataaaagtt

SEQ ID NO: 48277 - DNA, 446 bp, Homo sapiens
taaccctcactaaagggaacaaaagctgggtaccgggccccccctcgagagtacttctagaattaattaagcgggagggccgcaggaactgagactgccattcagtaagcgctcaatttattcttaccaaagtgtttgcttaatgagtaaatctcccaaaccatgtatacatttaatttagaaataaactgtacttttcctaagcccaaaaaaaaaaaaagataaaaaaaaaagatccgctagaacaaaagagaacaaaatcaccttgtgcaacatttggagaccctgcctctaccgaaaaaactttttaagccgggcgcagtggctgacgcctgttatcccagcactttgggaggtccaggcgggtggatcaccatgtcatgagatcaagaccatcctggttaacacggtgaaaccccgtctatactaaaaatacaaaaaaaatt

SEQ ID NO: 48278 - DNA, 306 bp, Homo sapiens
agcgcgcaattaaccctcactaaagggaacaaaagctgggtaccgggccccccctcgagagtacttctagaattaattaaggcgggctataaaagaattgcacgtatgagaaacctatatttcaatactgctgaaacagacatgaaataaagaatttaaagaatgaaaaaaaaaaaaaaaaaaaaaaaaaataaaaattaaaaaaaaataaaaaaaaaaaaaaaaaaaaaaaaataaaaaaaaaaaaggttaaaaaaaaaaaaaaaaaaaatataaattgggggccccccccgggggggaaccaaa

SEQ ID NO: 48279 - DNA, 438 bp, Homo sapiens
  misc_feature 346, 347, 348, 349, 350, 352, 354, 371: n = A,T,C or G
ctaaagggaacaaaagctgggtaccgggccccccctcgagagtacttctagaattaattaaggcgggagaatcacttgaacccgggaggtggagcttgcggtgagccgagatcgcgccattgcactccagcctgggcaacaagagtgaaactccatctcaaaaaaaaaaagaaaaaaaaaaaaattggcccatgggggaaaaataaaatcatatagtgaaaactacggccaagtacaggggctaatacctgtaatcccaccactttggggggccagggcgggcaaatcatttgaccacaggatttcaaaaccacccggggcaaaatggaaaaaccccgtttttccnnnnnananaaaaaaaaaaaaaaaanggggggccccccccggggggggccccaaatccccccttaaggggggtttttaccccccccccccggg

SEQ ID NO: 48280 - DNA, 629 bp, Homo sapiens
tgattacatgattacggatagagtgcaccgtaagctcctacctaaagggaacaaaagctgggtaccgggccccccctcgagagtacttctagaattaattaaggcgggtggatcataaagtcaggagattgagaccatcctggctaacacggtgaaaccccgtctctactaaaaaatacaaaaaattagccgggcgtggtgatgagtgcctgcagtcccagctaatcgggaggctgaggcaagagaatggtgtgaaccagggaggtggagcttgcagtgagccgagatcgcaccattgcactccagcctggggacagagcgagactccatttcaaaaaaaataaataaataaaataaaataaaataaaaactgctacttatctacaagccagaacagaaacataattttaaaatggttacaatctagcaccagaggcctcaagacaattctggaaactaaataaaaagggctaatggaactgcaacctacagctttccccattacggtctttgcattcctgagactgaaaaaaaaaagttacatcactatatgcgatttgtctgagtgaaggaggaaagggaactcatcaagcatttaagcaggtataaatagtagtaactaggttaat

SEQ ID NO: 48281 - DNA, 479 bp, Homo sapiens
aaagggaacaaaagctgggtaccgggccccccctcgagagtacttctagaattaattaaggcgggcacctgtcatcacagctatttgcgaggctgaggataaaaattgcttgaacctgggaggcggaagttgcattgggctgatatcacaccaatccacaagaatccgtctcaaaaagaaagaaagaaagaaaaagaggtcacaatgcctactcttttaagttcttacaatgttgttcacaggcgagacgtactcatgcaaccttcatccaagctcctggaacactgcttacgccttcatccatgcactggctagactctaccttataacataattgtagctgtacgccctgttacctgtgagttccttccttcctacacatgcatgaaaaccagaaaccctccaatctaaaagaggaaacccaccaaccaaccatgtggacaacctcaaaatgaaggccgtatttgagggcagtgact

SEQ ID NO: 48282 - DNA, 473 bp, Homo sapiens
accctcactaaagggaacaaaagctgggtaccgggccccccctcgagagtacttctagaattaattaaggcgggggaggtggtatgtggctggggacaggggtacatggtaactctttgtactttccactcagggtggatgcaaacctagaacagctctaaaaaataactgctatcaatctcaaacagccctccccaaaagggtcaatgatgggagatggaagaggatatgaaccgctctacaaagcttcagtgtgagaggatcgagccattgaaagctcattaccagtaggacataatttttggctctccctattcacaaccagtgcacagtttgacacaatggccctaagttcacagtgcaccatgtcactgtgctatcctacgaaatcatttgtttctaagttgtgtttattcctggagtgacatgccaccccgaatggctcactttcactgaagatgctgtcctctgat

SEQ ID NO: 48283 - DNA, 486 bp, Homo sapiens
aaccctcactaaagggaacaaaagctgggtaccgggccccccctcgagagtacttctagaattaattaaggcgggggagtcattcccaggaatttatgatgctatgtttgatattgaaagcatagtggacccttccaaggcctggggataagtgaaaacacacatttatgttgcagccttcacagcgcaggcagctgcagagactttgagtgaagtagcctatgaggattctttaaagaatccgtattgaatttgtgtggtatgtcactgataaagaatcgtaatgggtatattgataaattttaaaattggtatatttgaaataaagttgaatattatctttaacattacgccccaacccttttacatgggcgccccccccttgggtatggccatctaacctggacgtataatattttatcccgggaatgttgtcagtttttcaataaacttgatatggagcatttagattgcttctaatttttg

SEQ ID NO: 48284 - DNA, 354 bp, Homo sapiens
  misc_feature 292: n = A,T,C or G
ccctcactaaagggaacaaaagctgggtaccgggccccccctcgagagtacttctagaattaattaaggcgggaggagataaatggaagtatactgatgtaagactcttatactatacatgaagtggtataatatcactgtgataagtgataagactgtgagaaattgaagtgtatactttgaacctcaaagcaatgaagaaaatagcaaaacaaagaatttacagctgataagccaacaaaggcaataaaaattaatcattaaaaaatacgcaatccagaagaaggatgtnaataaaaaaaaaaaaaaaaaaaaaaaagcgggccccccccggggggggcccccaattccccc

SEQ ID NO: 48285 - DNA, 488 bp, Homo sapiens
ggacaaaagctgggtaccgggccccccctcgagagtacttctagaattaattaaggcggggggcaggcctgcggatgcatgaaataatgttggcattattttttaatttttttaaaaaataaatggtatcttattaaaaaaaaaaaaaaaaaaaaaaaaaaaaaaaaaaaaaaaaaaaaaaaaaaaaaaaaaatgaaaaaatagatagaacctgaaaaataaaaggctgaaagtgagctgagatcatgccatggcagtctaacctgggcaacagagcgagactctgtttcaaaaaaaaaaaaaaaaaaaaactaattagtcagtattctgctactcaaacaaatgagctatttggataacaaagcatacccagtggtctgctattaaaccagctctttgtgtgggaagggacaaataaaaaaattcccaaatttgtagcatttgttgacttccatggtgtaaatactcccacatggctgatttcaggc

SEQ ID NO: 48286 - DNA, 61 bp, Homo sapiens
ctaaagggaacaaaagctgggtaccgggccccccctcgagagtacttctagaattaattaa

SEQ ID NO: 48287 - DNA, 557 bp, Homo sapiens
aaaagggatcacaatctgggttcgcgggccccccctcgagagtacttctagaattaattaaggcggggtcgatatcttggagtgaactggctgagttatattgtgggtatgtgtctaacttttaagaaactgacaaagtttttcccaccagcagtgtatatgagttttagttttttcatatgcttgccaacacttttatgatcactctagaattttagttattctagtaagcgtgcagtcgtatctcattgtggatttaatttacatttctctaataactgatgatcttgatcatgttttcctgttctcttttgtcatccatgtatcttgtttattaaagtctatgttcaaatcttttgcccattaaaaatgtttattattgccgggcgcagtggcttacgcctgtaatcccagcactttgggaggctaaggcgggctgattgcctgagctcaggagtttgagaccagcctgggcaacaaggtgaaaccccgtctctactaaaatacaaaaaattagcctggcatggcggctgcgcctgtaatcccagctacttggg

SEQ ID NO: 48288 - DNA, 479 bp, Homo sapiens
  misc_feature 396, 397, 417: n = A,T,C or G
taaccctcactaaagggaacaaaagctgggtaccgggccccccctcgagagtacttctagaattaattaaggcggggtatagataaaatagtgctagctatgacttcataattttgaaagctgagtgaagagtccatggggattattataccattctctgtattttagtatatacatgaaaatttccatgggaaaaggttttttttaaaacgtagtttgaaattggcagaatttctgggttactggtagatgcagaaacaaatcctctttggaggaactcacatccatgcctcagagcatccccacaaacaaaaatcttcctatgatcatgagctcacaaccaaaacatcacaaagcacataaaaaataaggcactatgagtgaaagacagcaaannaaaaaaaaaaaaaaaaaaanggggggccccccccggggggggccccaatttccccctattggggggtttttccccccccccc

SEQ ID NO: 48289 - DNA, 454 bp, Homo sapiens
ctaaagggaacaaaagctgggtaccgggccccccctcgagagtacttctagaattaattaaggcgggctttcggccaatcagggattagtttagtcatagaagtctgtattttaatggttttgaaaagctgagtactgggcacttgcttttttgtgcttcgggactctagaagtttggagaacaatattcagcagttgcctagtagctatgtggcctgatgcagaggtcctctgagaacccatttcttccttactgcactagtctttggtcccctttctccagcactgagtgatgtggaagttactcagaggtctttccaggtattcttttaaacttttgaagtaggaacaaaattcatagtgcagttatactaacacgctattcattctattggagtgacactgtttttccttctcccattcggatcaaaatggcaattcctatgttttaccc

SEQ ID NO: 48290 - DNA, 362 bp, Homo sapiens
  misc_feature 303, 304, 305, 307, 308, 309, 312, 324: n = A,T,C or G
accctcactaaagggaacaaaagctgggtaccgggccccccctcgagagtacttctagaattaattaaggcggggattataagtcaaggaccaagttcagatacttgagacaaagtggaaagtctcagcatatggaaacaaggccttggaggagaccatggacatcaccaagttcatgtgctgggctggaaagaaaagcctgttgattttcacttgctgtgcatttattcatccattccattgcctcaatgctgagaacagtgcctgacacataaaagatgctcaataaatatgttaaaggtnnnannnaanaaaaaaaaaaantttttttaaaaaaaaaaaaaattaatataaaaaaaaaa

SEQ ID NO: 48291 - DNA, 531 bp, Homo sapiens
  misc_feature 295, 296: n = A,T,C or G
taaagggaacaaaagctgggtaccgggccccccctcgagagtacttctagaattaattaaggcgggcagatcacttgaggtcaggagttcaagaccagcctggccaatatggtgaaaccccatctctactaaaatacaaaaattagctgggcatggtggtgtacacctgtaatcccagctacttgggaggctgaggcaagagaatcgcttgaacctgggaggtggaggttgcagtgagctgagatcgcgccactgcatgctagcctgggcgacggagagagactctgtctcaaannaaaaaaaaaaaaaaggttttggaaaccaaaatcattggaattttggtttttaaaaattttggcccccccaaaagggcccttaagggccccggtgaaaaattttaaaacccccgggggaaatttaaaagggggcccaaaaacccaaaaacccttttgggggccctgggttttcttaggggcccttaagggttttagggaaattcccgccggggggaccccttttttttgggctttt

SEQ ID NO: 48292 - DNA, 487 bp, Homo sapiens
ctaaagggaacaaaagctgggtaccgggccccccctcgagagtacttctagaattaattaatagtttagagcaagaataatgccattgccttggtaagttatttagggaagtattttatacccaggccctataatctccaagtctgagaatcacaattttgagcccttttccttcaaaggaattaacaaataggtaattgtcttttttagtactcattattcaggtttattggtcttatggttttataaattgagagtattctctccacttgagaaatgattttgtaaagtctgtttttaatttcattaggttacacttgagacttctttgtgaagagcttaacatttagctgttaaaacttgaggaggtggccgggcgcggtggctcacgccttgtaatcccagcactttgggaggccgaggtgggcggatcacgaggtcaggaggtcgagaccatcctggctagcacggtgaaaccacgtctcta

SEQ ID NO: 48293 - DNA, 357 bp, Homo sapiens; identical to SEQ ID NO: 46138

SEQ ID NO: 48294 - DNA, 423 bp, Homo sapiens
agcgcgcaattaaccctcactaaagggaacaaaagctgggtaccgggccccccctcgagagtacttctagaattaattaaggcggcggtgggggtttgaactcatatgggtgatcaatcggactcttggagcgtgaaaactgtttatgaccttcttgcagaagagacacgaaggaaggatcatgacgagaactccaacatgaaccacttaacaaatactgttgaccgggattccaagcgggattcccttgaggagggggagctggtagatcaccgcgtgtacatcacaatatggaactccccgtgtagacgagaagactctatcggaagaccgaggagactgaagacgattctttggccatcaaaccaccccagtctatgtctcgatacaaaaacaaaattaaccgggcgtggtgcgggcgcc

SEQ ID NO: 48295 - DNA, 508 bp, Homo sapiens
agggaacaaaagctgggtaccgggccccccctcgagagtacttctagaattaattaaagcgggtgcctgtagtccgtagtgcccagctactcaggaggctgaggcaggagaatcgcttgaacctaggaggcagaggttgcactgagccgagatcgcaccactgcattccagcctgggcgacatagtgagaccccatctcaaaaaacaaaaaaaaaagaaacttgaaactgatggtttggaacgaataaaacttgtaaaacttaaaacaaaaatggagaagaaagtaatttacccatgtcagcagtaaaatagaataaaaggactgtcactacagaccctataggctttaaaaagataatgggagaatgtctttaacaactttatgtcaagaaagccaacaaatttgatctgaatatatagattccataaatatcacagctgactcaaaaagaaattaaaaacctaaatagccctgtttcaactagaaaaatttaattcataataaaaa

SEQ ID NO: 48296 - DNA, 450 bp, Homo sapiens
ctaaagggaacaaatagctgagtaccgggccccccctcgagagtacttctagaattaattaaagcgggggaggtggaggtagggcctggagtttcaagcttcagccatgcgtagactagtcatcttctggtgtgtgactagaacagggcttgttccctcaagcttcagctgtgcatagactggtcagactccgtagtgactagagcaggcagtcttctttagcagcagcttgatctcatctcaggatgagttggatgatctgggtcctgctggcttgtctacttgtcttgagctgccagtttcagctgactgtggtggatctaaggcacaacacctgcaactttaacagcagcgggactgaacaagattacagtatagggcttatattgtatgagtcttagagaagttggattctacatagctggtggccttgtagctgtgtcaaaaaaa

SEQ ID NO: 48297 - DNA, 467 bp, Homo sapiens
taaagggaacaaaagctgggtaccgggccccccctcgagagtacttctagaattaattaagttgacaaacctaagactcacagacatgaaaacacaaatcatcgtgtcaggaatgaaaacaaagagaacactacagattttgctaacattaaaagaataacatgggaataatactatgaacaattctgagttcataaattcaacttaaaagaaacagatcaactcctcaaaactacaaactaccaaaactcagtcaaaaagacaatctgaagagtcctataactactaccaaaattgattttctaatcaaaagctccaaaaagataaagctcaaatggttttaccaaacaattctaatgaacatttaaagatgaatttaaacctattttacacattctcatccagaaatagaagggaactcattttatggaggctggtattatcctgacaccaaaaccagatactgt

SEQ ID NO: 48298 - DNA, 485 bp, Homo sapiens
ctaaagggaacaaaagctgggtaccgggccccccctcgagagtacttctagaattaattaaggcgggggttgcatctagcttagatcacaccactgcactctagcctgggcgacaaaggacgacctgaaccaaatgagttatgagtcctatgggcgtagtccagattggtatatcaccttacatctttctatgactttgaggattttgtcttaaaaatgcataactggccacgcccagtgactcatgcctgttattccatcactttggggaggctaaggccagagaatcacttgaacctgggaggcagaggttgtaccgagccgagatcacgccattgcactccagcctgggcgacaagtgtgagactctgtcataaaaaataaataaataaaataaaaaataaaaatgcataataattttatattatttttcataaaaggaccttttaaattttgacacaaacatattttaaggtacttatcag

SEQ ID NO: 48299 - DNA, 411 bp, Homo sapiens
cgcgcaatgtaaccctcactaaagggaacaaaagctgggtaccgggccccccctcgagagtacttctagaattaattaaggcggggcttgcagtgagctgagatcaggccaccgcaccccagcctgggcaacagagcaagactccatctcaaaaaaaaaaaaaaaaaaaaaatttcccccggggggggggggcctccccgatattccaacctcccaggggggggaatcaggaaaaatcttttaacccggaaaggggggggtccggggaacccaaaataagcctttggcccccacccgggggaaaaaaaagaaaacccgggcctaaaaaaaaaaaaaaaaaaaaaagggcccccccccggggggggcccccaatccccccttaagggagggtttttccccccccccccgggg

SEQ ID NO: 48300 - DNA, 493 bp, Homo sapiens
  misc_feature 422, 424, 425: n = A,T,C or G
ccctcactaaagggaacaaaagctgggtaccgggccccccctcgagagtacttctagaattaattaaggcgggagaaagaattggtgagcttgaagacaagctatttgaaaatacacaatcagagtagacaaaagaaaaaagagtaaaaacaataaagcagacttacaggatctagaaagtagactcaaagagacaaatataatagttattggccttaaagaggaggtagagaaagatagaggtagaaagtttattcaaagaaataaaatggagaattttccaagcctagagaaagatatcaacatccaagttcaagaaggtttaacccaaagcagatttaatccaaacaagactaactcaaggcatttcataatcaaactcccaaaggtcaaggataaagaaaggatcctaaaagtggcanannaaaaaaaaaaaaaaaaaaaaaaagggggccccccccggggggggaccccaatccccccttaggggggg

SEQ ID NO: 48301 - DNA, 409 bp, Homo sapiens
ggaacaaaagctgggtaccgggccccccctcgagagtacttctagaattaattaaggcgggtatggtacatttgttataattgataaaccaatattgatacattattgttaactatagttcatagtgctatgaactatattattgtgttgtacgttctggtttacattctgtatctgttgtacattctgagttttgatgaatgtatgatgacatgtgtcaccatcatggtgtcatatagaatgttcactgccctaaaaaaaacattatcctggattacaaaaaagcggccgccaccgcggtggagctccaattcgccctatagtgagtcgtattacgcgcgctcactggccggcgttttacaacgtcgtgactgggaaaaccctggcgttacccaacttaatcgccttg

SEQ ID NO: 48302 - DNA, 648 bp, Homo sapiens
aaagggaacaaaagctgggtaccgggccccccctcgagagtacttctagaattaattaaggcgggaaaaacaaaccaaaaaggaaataagaaaaggcagacaaaatggatgaaagagaattgtaaaagacaattggaatctataaaaagaatcaaatggaagttctaaaatgtcacaatacaatactggatttaacagaagacacgattgataaacttgaagaaagttcaatagaacatatccaaagtaaagcacagagggaacaaagaaaggaaaacagcagaacagaatatgagacatgagttttataaagtccctagaggagaaagagaataagagagaagcagtatttgaggaaatcatggcagacaatttcccaaatttgatgaaaacaaatccactgattcaagaagctcagcaaaatctaagcaggataaatacaaagaaaactatagctgaaaacatcatagctggtcaggcacagcagttcacacctgtaatcctagcaatttgggaggccaaggcaggcaaagcgtttgagctcaggagtttgagactagcttggccaacatggtgaaattccatctccaaaaaaaatacaaaaattagccaggtgtggtggcacatgcccatagtcccagctacttg

SEQ ID NO: 48303 - DNA, 611 bp, Homo sapiens
  misc_feature 528: n = A,T,C or G
aaagggaacaaaagctgggtaccgggccccccctcgagagtacttctagaattaattaaggcggggaagggggcagttgtacatgcccctctaattctcacatcatctcacacaacccaagctccatttcctcagaaagccttctgctgctcaggtaagaaaaacccaaggccattgtgccatccagtacagtggccacgagccatgtgtggctattaaattagctaaaattagaagccagatcagcagttgcactagcctcatttcaagtgttcaacagccacctgtgactaggggctagaaacaggaacgcttttgggccaggctcggtggctcatgcctgtaatgccaacacttggggagggcgaggtgggtggatcacctaaggtcaggagttcgagaccagcctcgctaacatggtgaaaccttgtttctactaaaataacaaaaaattaaccaggcttggtggtgcgcgcctgtaatctcagctactcaggaggctgaggcaggagaatcgcttgaacccangaggcagaggttgcagtgagccaagatcgtgccattgcactccagcttgggcaacgagagcaaaactccatctaaaaaaaaaa

SEQ ID NO: 48304 - DNA, 443 bp, Homo sapiens
ctaaagggaacaaaagctgggtaccgggccccccctcgagagtacttctagaattaattaaggcggggaggtgagcttgtgccagaatgtaaaccaactgtgaaactaagcacactgtttagttcagctctttatttagacagaaagacctgctttaaacatattagttttaaaaagttgacaaaaattctatatatgtattgagtaaaacatgatgatctgaaatatgtataagctgtggaataatagctatgagttaataaacacagctgagtgcagtggctcatgcctgtaatcccagaactttgggaggctgaggcgggcagattgcttgagctcagaagttcaagaccagcctgggcaacatggcgaaatcccgtatctaccaaaaatacaaaaaattagctgagcaaactggtgagcacctgtggtctcagctaccc

SEQ ID NO: 48305 - DNA, 468 bp, Homo sapiens
accctcactaaagggaacaaaagctgggtaccgggccccccctcgagagtacttctagaattaattaaggcgggcacagtgaggctgccacctggtcagacctcggggctgaccctgcctgacagcatgtgtgaaatccctctttaagatgggcctcctccgaggagctgtgaggggtgagggtgaaatccctccttaagacgagcctcctctgaggggctgtgaggggtgagggtgaaatccctccttaagacgggcctccggccgggcgcggtggctcacgcctgtaatcctagcactttgggaggccgaggtgggcggatcacgaggtcaggagatcgagaccatcctgactaacacggtgaaaccacgtctctactaaaaatacaaaaaattagccgggcgtgttggcgggcacctgtagtcccagctacttgggaggctgaggcaggagaatggcatgaaccc

SEQ ID NO: 48306 - DNA, 486 bp, Homo sapiens
agggaacctatgctgggtaccgggccccccctcgagagtacttctagaattaattaagatatgggtggaaagatatattaatatacagtaaagttgatttcagaatacataacattaccggcgttaaaggtggtcacttcatactaatacatgggttaaattattaaaaaaacataaaaatcctaaattatccacctaattacagagcttaaaatacataatacaaaattgatagaaccacacagagaaacagatgaattcacaattatagttcgagtttttagcacccctttctcgataactaatataagacaaaatcagtaaaaatgaagaagacgtaagtaaaaggctatcaaccaacttgtcccaattggcatttataaaacacacaacccaaaaagagcagaataaatatacttttgaaatataaaagagacaattactaagagataaaatatttcgaactataaaacaagcatcaaagca

SEQ ID NO: 48307 - DNA, 480 bp, Homo sapiens
accctcactaaagggaacaaaagctgggtaccgggccccccctcgagagtacttctagaattaattaaggcgggtcagggcctggccttggtccccactctgcgatgatttctgtgaaattttgctgtagcgatgacattgttttcagaatttccaagagttctgtctgttctgtttttttattcagaatgaaatgaaatattttttttagttctgaaaaaaaagccaaaccctatatgctgataaatagaaacagaggggagaccaactacaaaaaaggagacaataatacgatgaaagctacagagtgcgcctgccagcagagaggagctacactctgctgcaagcttccgagacctgcagagacattggaatgacttgcctgcggagaggagccactctctccagggcctcctttttgttgagagctgaatgcttgagctcatgggacaatcttgctccatagaggagctacccact

SEQ ID NO: 48308 - DNA, 484 bp, Homo sapiens
accctactaaagggaacaaaagctgggtaccgggccccccctcgagagtacttctagaattaattaaggcgggatcaacggttctgccattacaggaccagtaacaaaggagtgtgcaaacttgtggccccggattgcatccaatgctggcaccattgcatgattctacactatatttgtaaaacataaaaaaaaactaaccccgaatacaagcatgtgctgataaaacaactactggccccccccggaggtgaccccaaaatcccccaccaattttgtacctgccccacccataagggggtaatatgtatagattgcatcgggtgtatcaattatagtaaatcaggctcactgggagagaactgaaccagagtaaaacgttcagcatctgtttcttttctattaaccaggatactgagagcccaaactcacagaactatatgcgtacaaatggcaacatataaaaaaaaaaactaatttacca

SEQ ID NO: 48309 - DNA, 426 bp, Homo sapiens
taaagggaacaaaagctgggtaccgggccccccctcgagagtacttctagaattaattaaggcggggtaagtagggaaatagaatatagtacttgaacaatataagaaaccaagtagatcttacagacatacacggggcattctactcaacaacagaatgcatcttcttcttaagtggacttaggaccttctttaggatagaccatacattaggccagaaattaagattcaagagatttttaaaaatacgataccaagtattttctttgacaaaatgggatgaagtgagaaatcagtaacagaaggaaaactggagactttatgtaaattaagtaacaccctcttcaagaaccagtggtcaaaggagaaatcacaagggcaatttgaaaaaaaaaaaaaaaaaaaaaaaagggggggccccccccg

SEQ ID NO: 48310 - DNA, 280 bp, Homo sapiens
cccccctcgagagtacttctagaattaattaaggcgggagcagtttaacgaattccgggatctgaacaaggacgggaagttagacaaacatgttccagttctccaatatttcctctttattttatttatactcaaagaccttgtctgattcatataccagatgcctggcctcagcctgtgcatgatcttttgcgtgaaacatgatgatctgaaatatctcatctttgtctaacttcccgtccttgttcatataccgggattagttcagcggctcatgcct

SEQ ID NO: 48311 - DNA, 429 bp, Homo sapiens
actaaagggaacaaaagctgggtaccgggccccccctcgagagtacttctagaattaattaaggcgggacggacaagaggctgttctgatcagatgacattgagatcaacagcgaggggctggtggagtggggccccaaggaagacctgccaggaagcctgaggcctgggatgaaacagagagagccagcctgggaaagcccccgagggcggcagataatttccacagagaaactgggatgtcaaagatccatgccattacagtggtgaccaggatctcaaggtgaaaggactgaacctgccagtgatctggggctcaaataccacatgaccccacgcacagtgacagtgatcaggctacagatacaaatgtttctgagtcataggtctggcccctagccccatgataatgcacaactaaatatcaaag

SEQ ID NO: 48312 - DNA, 456 bp, Homo sapiens
ctaaagggaacaaaagctgggtaccgggccccccctcgagagtacttctagaattaattaaggcgggttgaaatgatgcaggctgctcctatgttggaaatatgttcattaaaattctcccaataaagctttacagccttctgcaggaaaaaaaaaaaaaacaaaaaaaaccggggcccccccgcgggggggcataccctatggctcataggggacaaaaatgcccccccccctgggcgctgtttgcaaaagtaacacaatggtaagtatttgtgtatctaaacatatctagggccaggcacagtggctcatgcctgtatcccagcacttcgggaggctgaggcaggtggatcactggaagtcaagagttcaagaccagcccagccaacatggggaaaccctgtctctacttagaaataaaaaaattaatacaaaaaaagggggcgcccccggggg

SEQ ID NO: 48313 - DNA, 471 bp, Homo sapiens
accctcactaaagggaacaaaagctgggtaccgggccccccctcgagagtacttctagaattaattaaggcgggggctgaggcagaagaatcgcttgaacccaggaggcggaggttgcggtgagctgaaatcacaccattgcactcaagcctgggtaacaagggcaaaaactccatctcaaaaaaaaaaaaaaaaaaaaaaaaaaaggcggccccacgggggggggccctcaattccccctttatggggagataataacccccccctcttgtccatttttaaaaaaaaaaccataatccgattgtctggtgagtctgatagcaaccttcttagagcctttgaagaggctgagaaaaatgcttctgccatcatattcattgatgagctagatgccatcgctcccaaaagagagaaaactcatggcaaggtggagcggcgcattgtatcacagttgttgaccctcatggatgg

SEQ ID NO: 48314 - DNA, 420 bp, Homo sapiens
gcgcgcaattaaccctcactaaagggaacaaaagctgggtaccgggccccccctcgagagtacttctagaattaattaaggcgggggggaggtctcactatgaagaccaagctggtctcgaactcctggactcaagcaatcccttgcctcagtctcctaaagtgtggagactacaggcgtgagccactgtgtccagaccctctttcttcattactgtgcttccctccctaattctgtacatatctctcattctccccttctctctctagctcttgttttcttttctttttccctgggattctgctcttcattttgtacccctctcctctcctgctatttatccccttcttccctttattccttcccttaccacgctactcctacctatctccccttttatactaataatcttataaaaaa

SEQ ID NO: 48315 - DNA, 502 bp, Homo sapiens
aagggaacaaaagctgggtaccgggccccccctcgagagtacttctagaattaattaaggcgggataaaatttgcctcaaacaaaaactgctctggtactgcctaacaaagcttaaacataagacctgaaataatacaactgttttcaagtaaataaatctaggcgcaggctcacgtttgtaatcccagctctttgggaggctggtgcgggcagatcacctgaggccaaaagttcaagaccagcctggccaacatggtgaaaccccatctctactaaaaacacacacacacacacacacacaaaaattatctaggggtggtggtgcatgcctgtagtcccagctactcatgagggtgaggcaggagaatcgcttgaatcccagaggcggaagctacagtgagccaagatcacgccactgcactccagcctaggcaacacagtgaggctccaccccaaaaaaaaaaaaaaaaaaaaaaaaaaaaagggcccccccccgggggg

SEQ ID NO: 48316 - DNA, 482 bp, Homo sapiens
aaccctgactaaagggaacaaaagctgggtaccgggccccccctcgagagtacttctagaattaattaaggcgggggaatggcgtgaaccccattggcagagcttgcagtgagccgagatcacgccactgcactctggtctgggcgacagagcgagactccatctcaggaaaaaaaaaaaagaaagaacctatgtgttggcgggacttaatacctcagggttttaatccaacctcctcggaaggctaaggcagaaaagttgcttaaccccggggggggggggtgacaaacaactgaaaacattggactgcccttccggcccgtgggggaccgcgactgagcactcccacttatactgcttaaccataccacctcccgaaaccacacccccaaaaccaagcgttttttaaccccaaaaatcttttccagttttaaaataaatatttgccaggcccgggggctcacccctgtaatcccaggact

SEQ ID NO: 48317 - DNA, 496 bp, Homo sapiens
  misc_feature 386, 387, 389, 394: n = A,T,C or G
ctaaagggaacaaaagctgggtaccgggccccccctcgagagtacttctagaattaattaaggcggggggccttttataagccttacgaaaagaaaatgaaactatttcatctttggacttttcaatactattggagtgatttttttctttctaaacagggaaaataatgttacaaaagcatctttttttgttatttgtttgcatccctcccccacaccctggtgttttaaaatgaagaaaaaaaaccatcaccttttgtacaaaaactcttaatgatcagacataaaaaacataaaaaaaaaagagggggcccccccccgggggggccccattgacccccatatagggtccaatatagccccgatcgtgctgattttttataganntnctganatttcattaaggtaggtcagcgtcatttgtctctgtttaggtaaaatataaaaaccctgcccagtagcagtggcatcgcttggttcctgatgcccatgttcc

SEQ ID NO: 48318 - DNA, 322 bp, Homo sapiens
  misc_feature 229, 237: n = A,T,C or G
accctactaaagggaacaaaagctgggtaccgggccccccctcgagagtacttctagaattaattaaggcgggagaggttttcaaaaggcatttagcatgaagaatgttatgtatgaaattgacattcagaaacagtgactaaagatgcagttgtataatacatgccacgtacaacctctggcctaccactacgctcagtggtaatgatgactttgaggcattccatangttaaaanaaaaaaaaaaaaaaaaaaaaaaaggggggccccccccgggggggaccccaatttcccctaaaggggggttttttacccccccccc

SEQ ID NO: 48319 - DNA, 304 bp, Homo sapiens
accctcactaaagggaacaaaagctgggtaccgggccccccctcgagagtacttctagaattaattaaggcgggaagccactgacggactgactacgttactatcatgatcaagtgagctgtgtccagaatactcatcgagatggagtggaaggacgaatgaacgtttcattctccttaataaacgccttatcctgattctgaagcaagagacttgcttgaacccacgatgtatgggctgcagtgagctgagatcaccacactgcactccaccctgggcaacatagtgagactctgtttcctaa

SEQ ID NO: 48320 - DNA, 459 bp, Homo sapiens
ctaaagggaacaaaagctgggtaccgggccccccctcgagagtacttctagaattaattaaggcggggttgtgatgtaacttacacattatgatattaccaatacacaaaatatgttatcttatttttataccagggatgctgctaaaataatctcaaataaaaggaaatgcacgagttagttacaaatgccaaggagcctaaaacacacacaagcggtttcgcgagcgcgttggagcggcactcggagcttctacagaagatggagcccctactgaagggttctccaaaaaatgtggaatcctttgcatctatgctgagacattctcctcttacacagatgggacctgcaaaggataaactggtcattggacggatctttcatattgtggagaatgatctgtacataaattttggtggaaagtttcattgtgtatgtagaagaccagaagtggatgga

SEQ ID NO: 48321 - DNA, 447 bp, Homo sapiens
cgcaattaaccctcactaaagggaacaaaagctgggtaccgggccccccctcgagagtacttctagaattaattaaggcgggagcagaagctaaagccaaagcccaagagagtggcagtgccagcactggtgccagtaccagtaccaataacagtgccagtgccagtgccagcaccagtggtggcttcagtgctggtgccagcctgaccgccactctcacatttgggctcttcgctggccttggtggagctggtgccagcaccagtggcagctctggtgcctgtggtttctcctacaagtgagattttagatattgttaatcctgccagtctttctcttcaagccagggtggctcctcagaaacctactcaacacagcactctaggcaggcactatcaatcaattgaagttgacactttgcattaaatctatttgccattgcccaaa

SEQ ID NO: 48322 - DNA, 460 bp, Homo sapiens
ctaaagggaacaaaagctgggtaccgggccccccctcgagagtacttctagaattaattaaggcgggcgcctgtaatcccagctactcagaaggctgaggcaggagaattgcttgaacccgggtggcagaggttgcagtgagatgagatggtgccactgcactccagtttgggcaacagactgagactctctctcaaaaaaaaaaaagaaaagaaggaccaggaaaagattccaaattccaaattctgaaccacttttagtttaaagcttttgggataaaaaatattcatcctgtataaaatctgatttttaaaacaaaaaggggctccttggaaaaaagtttacggccccaattagcaaaatcttatttgctagtgcttgagaaacaccacaaatgggttgatcatatttcataatttcaattcccagattttcattttacatgtaactagagctagca

SEQ ID NO: 48323 - DNA, 389 bp, Homo sapiens
accctcactaaagggaacaaaagctgggtaccgggccccccctcgagagtacttctagaattaattaaggcaggagaaggaaatagagggtattcaattacgatacgaggaagtccaattgtccctgtttgctgatgacatgactgtatatctacagaacccctgacctgcccttactgtagtgtaacgccccctccctgtttcggctggagtaaaatatccacctgtgaggcgcggcgtgcttttacctgatgacgggcgggcagcctgcggccggctccacacagccagattttcttgatctgcccgcggcggcccgtgttgtgtttagagctgtgtccacgcgctaaggctaccccgtcccccgtgctgacttatcctataagcgc

SEQ ID NO: 48324 - DNA, 346 bp, Homo sapiens
  misc_feature 192: n = A,T,C or G
acgctgggtaccgggccccccctcgagagtacttctagaattaattaaggcgggtccccgggaggctttccggcagctgcgggagctgtcccgccagtggctgcggcctgacatccgcaccaaggagcagatcgtggagatgctggtgcaagagcagctgctcgccattctgcccaagcggtttcggccccngcgtattccccgccaccggattgtccccttatttgtttaaggggggaacctgcgggcggtcagggccggcctctctgtgcggactggggccatgatcgggcccgggggcctgagcctgggaccccaccccgtgttaatgaaaaatgagttttgg

SEQ ID NO: 48325 - DNA, 507 bp, Homo sapiens
agcgcgcaattaaccctcactaaagggaacaaaagctgggtaccgggccccccctcgagagtacttctagaattaattaaggcgggagaagaaggcggcagagttggccaaaggccagggacccggggaagtggaccccaaggtggccctgtagggggtgcacgactgggactactgcgagcaccgcgactatgtgatgcgcatgaaggagtttgagcgggagcggaggctgctccagcggaagaagcggcgggagaagaaggcggcagagttggccaaaggccagggacccggggaagtggaccccaaggtggccctgtagggggtgcaccccccaccctatggaccagtcaaataaaagccttcaggcccctcataaaaaaaaaaaaaaaaataataataccacctattataatataaaaataataaaaataataaaaaaaaataattaaaaaaaaaaataaaaaaagcggccgccaccgggggggagctccaattccccctata

SEQ ID NO: 48326 - DNA, 450 bp, Homo sapiens
ctaaagggaacaaaagctgggtaccgggccccccctcgagagtacttctagaattaattaaggcgggagggcatgtgcaggggaactcctcgttataaaaccatcagatctcatgagacttattgactatcgagaacagcaggggaaaaacccacccccatgattcaattttctcccgctgtgtcctcccatgacatgtgggaattatgggagctataattcaagatgagatttaggttgggacacagccaaaacttatcaggctccatctaatcagctgccactgtggctagaataaagcaggcaggagaaagtggaagagcagacttgctgagtcttccagtattcatttttctcctgtgctggatgcttcctcccctctaacatcagactccaagttcttcagcttttggactcttggacttacaccagtgatttaccatttcttgg

SEQ ID NO: 48327 - DNA, 483 bp, Homo sapiens
taaagggaacaaaagctgggtaccgggccccccctcgagagtacttctagaattaattaaggcgggccgtggtaagtcaaagaaaaagccctgtgttttataaaacttaaagcaaccactgaaatataacaacaaagagttatacctaataatccaatgaaggaaataaaatggaatcattagaaataatcaatacaaaagaaaatattaaaagaagaaaaagggaacaaaaacaaaagtacaaatagaaaatgaacagctagatgatagatttaaatccaacaatagcaataatcacattaaatataaatagtctaaacactccaattaaaaggcagagtttgtgcgattggataaaaacacaagaaccaacaatatagtgcttataagaaacacactttaggtaccatgtcgttaagcagatctctagagcttattcaccttgctggacttattgcctgttgattaccagctctctgtatg

SEQ ID NO: 48328 - DNA, 375 bp, Homo sapiens
ctaaagggaacaaaagctgggtaccgggccccccctcgagagtacttctagaattaattaaggcggggggttgagccgggtagggaaagcagcctaaagcccgggacaggcacacaggcccaggtgtgtaggccacagcagccgcagtcctgaaaggctgcaacacccagacctccaggagagaccaggcccaggatgcctcgcctgttcttgttccacctgctagaattctgtttactactgaaccaattttccagagcagtcgcggccaaatggaaggacgatgttattaaattatgcggccgccaccgcggtggagctccaattcgccctatagtgagtcgtattacgcgcgctcactggccgtcgttttac

SEQ ID NO: 48329 - DNA, 486 bp, Homo sapiens
ccctcactaaagggaacaaaagctgggtaccgggccccccctcgagagtacttctagaattaattaagtgaaaatattggccggacacagttgcttatgcttataatcctagcacttcgggaggctggtctcgaactcctgacctcatgatccacctgtctcggcctctcaaagtgctgagattacaggcatgagccaccgcgcccagccctgtgccaagtatttttataaggattatctcatcgtatcttaaaaacagagcaatgagataggtagtattaattgtcccaagtttacaaatgaagaaactagagctttaaaagtttgttacttgaccaagatccgaaggctagtatattgagtagttaacatttgaacccaggcattctgactctagagcctgtactcataactatcatgcaacttctgttttgtttttttgtttttttgttttgagctagggtcttgctctgccacccagactgg

SEQ ID NO: 48330 - DNA, 366 bp, Homo sapiens
  misc_feature 274: n = A,T,C or G
accctcactaaagggaacaaaagctgggtaccgggccccccctcgagagtacttctagaattaattaaggggcttcgctctattctccctaaccatactgtcttcctttcccccttgccacttagcagttatccccccagctatgccttctccctccctcccttgccctggcatatattgtgccttatttatgctgcaaatataacattaaactatcaagtgaaccactgttatgtctgatgcttcactcctctatccacagcccccgtcccanaaaaaaaaaaaaaaaaaaaaaaaaaaggggggccccccccggggggggccccaaatccccccttaaggggggtatttacccccccccccggg

SEQ ID NO: 48331 - DNA, 428 bp, Homo sapiens
taaagggaacaaaagctgggtaccgggccccccctcgagagtacttctagaattaattaaggcgggcaactgtaatcccagttactcgggaggctgaggcaggagaatcgcttgaacctgggaggtggaggttgcagtgagccaagatcgctgcactctagcctgggtgacagagtaagactccgtctcaaaaaaaaaaaaaaaaaacaccttgtaaaaaattcctcccccaaattcccccccaaaagtttagaaataaggggggggataaattcatttttgaaaatgggggaatagaaaaaaggggaataaaaagggctccagaaggaaattttttttcttaatttaaaggaggggtaaaattggggattaaatttcctgggaaccagggttttcctttcccccgaaccaaaaaaaaaaaaaaaccc

SEQ ID NO: 48332 - DNA, 486 bp, Homo sapiens
ccctcactaaagggaacaaaagctgggtaccgggccccccctcgagagtacttctagaattaattaaggcgggtggatcacttgagatcgggagtttgagacaagcctggtcaacatgctgaaaccccgactctactaaaaatacaaaaattagccgggcatagtggctcacacctgtaatcccagctgctccagaagctgagacagaagaatgtcttgaacccgggaggtggaggttgcagtgagctgagacagtgccactgcagtccagcttcggcaacagagtgagactccatctcaaaataaataaataaaagaaaaataaaattctaaaatgaatgcagtaagatctctctgtgtgtgtctccatgtgtgtatacacacacgtgtgcctagatatgtttaggagtgttttatacctatgtacatatattatgttgcgtattgtgtatacagccagaaattccttgaggaattctattcaga

SEQ ID NO: 48333 - DNA, 476 bp, Homo sapiens
  misc_feature 409: n = A,T,C or G
tacataaagggaacaaaagctgggtaccgggccccccctcgagagtacttctagaattaattaaggcggggaagacataacagatggaagcaaaggaatcctgcctgccttcagcagagaattcaccgaatcctagaactgtggctccctccaggcagagcctaagatgctggtgaagaatagctgtgtgattgaataggctcaaaggagagttcagaattcccatttacatattactagtttggtttgtaagttttagttccttgtattattgagattcagagcttcattttatgttggtcattaggtgaatattactcattttccctcaagagaagctcataaatgtgtgtgggtgtgagagcacgatggtgcctgtgttctgtgaatgtgtccatatgtgtctgtnagagagacagagaccaagaacttgcccaattttagaaatacactaatgtgcagttgttgccttttgt

SEQ ID NO: 48334 - DNA, 443 bp, Homo sapiens
  misc_feature 381: n = A,T,C or G
taaagggaacaaaagctgggtaccgggccccccctcgagagtacttctagaattaattaaggcgggcacctgtagtcccagctgctcaagaggctgaggcaggagaatggcatgaacctggggggcggagcttgcagtgagcagagatcacgccattgcactccagcctgggtaacagagctggactccatctcaaaaaaaaaaaaaaaagaaagaaaaaaggggttatttctttgggggggggccccctatttcccaagaagggcttttttaaaaagggcttgtttttttaaaaacttttattgcccctaaaatttttttcccctaatggggcccccaaaaaaattttaaaagggccaaaaaaaaaaaaaaaaaaaaaangggggggccccccccggggggggcctttatatttccttataaaaaaaaaataaacccccccc

SEQ ID NO: 48335 - DNA, 473 bp, Homo sapiens
aaagggaacaaaagctgggtaccgggccccccctcgagagtacttctagaattaattaaggcggggtcggatttcagcttttatccaccgggtttatcctgttgcaaagcagagtacacagttttagacacaaaataattgcagttgaaatggatacacattctggtggtaagatttggaaacgtggtatttgatggaaccctgttgtaacatctaaaactctttggattttttaaaaacgtattctgtgtaatccagtaaaaatttggattcgtccagtatttatagagtagattattaaccgcagtggtgctcattccagggccctgccgggtattttgtgctatggatgtgagtacggcaaagagactgaattaagctgttttgtatttggaatcggattgttcacgttgcaacgttgctgcaatgataaatggatggatactctttacactttgaagtggatttaatct

SEQ ID NO: 48336 - DNA, 440 bp, Homo sapiens
aaagggaacaaaagctgggtaccgggccccccctcgagagtacttctagaattaatgaaggcgggggagctttaatgtattaatgcaaacagcacctaacacacccacaggtactaaactaccaaacctgcattaaaaaattcggttggggcgacctaggatccgaacccaacctccgagcactacatgctaagacttgaccagtcttagcgaacctgacaatgattctgcaataaagatataatcccgcccctctactggggggccttaaaaaaccgctaacagctggtttaaacccgcccctaccgtaaaggaagagtcaactggccccttcaaggagttaataaaatttgtttacttggtcccaacccttgcgagataaatcccttatgaatccctggtctaaaatactttcctacagctgcgtaaaatactggtca

SEQ ID NO: 48337 - DNA, 475 bp, Homo sapiens
aaagggaacaaaagctgggtaccgggccccccctcgagagtacttctagaattaattaaagcgctgaatacctttttaacattaaaaatccgaagttgagtatgtccagtatttggaaccgaaccaaattggattttttgctatacagcttactgtacaagtgacctggaacagttgcttaaaacctcccacagccacagtttggcagcctgtaaaaggtgcatggtaatatctactttattaagtacatatgaaatttagattggacgaacaagataaaagcgcctggcagttagttaacactcaacaatagttgatgttccactgcccacctttattaaataagttaggcttttccagtttatcttccacatatataccaaagatacgtccataattatgtaagaccaaagggctttttaccttttacagccctgagttcctgagataccccattaagtctgtgtacttattt

SEQ ID NO: 48338 - DNA, 330 bp, Homo sapiens
agcgcgcaattaaccctcactaaagggaacaaaagctgggtaccgggccccccctcgagagtacttctagaattaattaaggcgggggaccggctatccgaggccaaccgaggctccgcggcgctgtagtatcgttccgcctgggcgggattctgacttagaggcgttcagtcataatcccacagatggtagcttcgccccattggctcactcacccaccacattaacaacataaaaccctgattcacacgagaaaacaccctcatgttcatacacctatcccccattctcctcctatccattaaccccgacatcattaccgggttttcc

SEQ ID NO: 48339 - DNA, 520 bp, Homo sapiens
agcgcgcaattaaccctcactaaagggaacaaaagctgggtaccgggccccccctcgagagtacttctagaattaattaaggcgggcagatcacgaggtcaggagatcgagaccatcccggctaaaatggtgaaaccccgtctctactaaaaatacaaaaaattagccgggcgtagtggcgggcgcctgtagtcccagctactctggaggctgatgcaggagaatggcgtgaacccgggaggcggagcttgcaatgagccgagatcccgccactgtactccatcctgggcgacagagcgagactccgtctcaaaaaaaaaaataaaaataaaaaataaaaatggaaataaaaattaaactcacttcctaacttaaaaacctaaaacacaggccaggcacggtggctcatgcctgtaatcccagcactttgggaggccaaggcgggtggatcacgaagtcaggagttcgagaccaacctggtcaacgcagtgaaaccccatttttacttaaaatacaaaaa

SEQ ID NO: 48340 - DNA, 67 bp, Homo sapiens
taaagggaacaaaagctgggtaccgggccccccctcgagagtacttctagaattaattaaggcgggg

SEQ ID NO: 48341 - DNA, 495 bp, Homo sapiens
aaagggaacaaaagctgggtaccgggccccccctcgagagtacttctagaattaattaaggcagggtttctatgttacaatcttgaaaattccttcttccttaggaaaactctgcctcttttctaaaagctttcaattgattgaatgaggctcacccatattatggtgggtaatttgctttactcaaagtctacttatctaaatgttaatctcaactcaagcccactgatttaaatggttaatctcatctaaaaatatcttcacggcaacgtctggacttctgtttgaccaaacaactaggcaccactacctggccaagtggacacaaattaaccatcataaggataagaaaatagtacctacacttcattggttagttgggtggcttgagttaacgcccatagatgcttagcataatgccaggcaatgaaaaaatgatcaaagcatgttagttattatcggggtgacaaccattttgcccagaacagccctggc

SEQ ID NO: 48342 - DNA, 483 bp, Homo sapiens
taaagggaacaaaagctgggtaccgggccccccctcgagagtacttctagaattaattaaggcgggggttgcggtgagttgagatcgcgccactgcactctagcctgacaacagagcaagacttcgtctcaaaaaaacaaacaaaaaaaagaaattacattagttgaggacctgctgtatgtgatatgaacaatgaggatcaactctttttgtaatagtttttttacatatgttatttcatttgtttatttcctctgtgagggtaagtattgatagtccagtcatagactggtaacacaggcacaccattaaaaataatagacatacagtatgcagtattttgttttacttatgaaactccgtattttatgtatgatgtattgagtatgaagaatagtacatactgtttccttttaactttatgtttcttgcctttgtatattttatatgaatagcacttgtcactaacatagaaagcagtag

SEQ ID NO: 48343 - DNA, 483 bp, Homo sapiens
ggaacaaaagctgggtaccgggccccccctcgagagtacttctagaattaattaaggcgggggaggcctcacattcatggtggaaggtgaaagacatgtcttacatgctggcagacgagataaatgagagccaagtgaaagtggtttccccttataagccatcagatctcatgagacttattcactgccacaagaacagtatgggggaaaccaccgccatgattctattatctcccaccagtccccaccacaacacgtgggaattataggagctacaattcaagatgagatttgggtggggacacagccaaaccatatcaaagactaaaaaaataacaaataatatataaataataagcggccgccaccgcggtggagctccaattcgccctatagtgagtcgtattacgcgcgctcactggccgtcgttttacaacgtctgtgactgggaaaaaccctggcgttacccaacttaatcgcctt

SEQ ID NO: 48344 - DNA, 529 bp, Homo sapiens
  misc_feature 456: n = A,T,C or G
attactggccgcgcgcaatcaaccctaactaaagggaacaaaagctgggtaccgggccccccctcgagagtacttctagaattaattaaggcgggtggatcacttgagatcaggagttcaagatcagtctggacaacatggcaaaaccctgtctctacaaaaaattagctgggtgtggtggcacgcacctgtaatcccagctgctctggaggctgaggcatgcgacgcttgaacccaggaggcggaggttgcagtgatccaagatcgcaccactgcactccagcctggaagaccaaacgagactctgtatcaaaaaataataataattaataaagttttactggaaaaacaagctataaagaacatagatagtgggcgccccacccgggggggaccccaattccccctgaatgtaatgctttttccccccttctaaggaatgagttttaaaaaaanctttccgcccaatttttctaaggtccaaggagaatgtacagaacttcaggagttttggggtggtagaaagggg

SEQ ID NO: 48345 - DNA, 460 bp, Homo sapiens
ctaaagggaacaaaagctgggtaccgggccccccctcgagagtacttctagaattaattaaggcggggaactgcaagggttgtttcttttcttcttttctttttcctcttctcttctcttttctcttattttctttttttgaggaggagtttcactcttgtcgcccagactagagcgcaatggtacgatcttggctcactgcaacttccacctcccgagttcaagcaattctcctgacagaagtccactcaagccagccattgtagctagcatcggggctccagccgtcagctgggattacaggcgtgagccaccacgcctggccgaaaaacccactctcataacagaagtgcagactcattgctagattcagtgcccttgagtgtgccagaggtcctctgtgtttgagacaatcctgtgtgtgccaggaggctccgtgtgcaccaggggctctcagaat

SEQ ID NO: 48346 - DNA, 491 bp, Homo sapiens
cgcgcaattaaccctcactaaagggaacaaaagctgggtaccgggccccccctcgagagtacttctagaattaattaaggcggggggccatgagccaagaaatgtgagcagcctagaagctggaaaaggcaaggaaactgattctttcctagagcctcaagaaagaaacagagccctgctgacgtctggattttagcccagtgaaacccacatcagacttctgacatcaagaactataatataataaatttttattgttttaagacactaagtttgtggtaatttgttagagaagtaataggaaactatattaatcagggttctccagagaggccgagaaatccaaagatctgcagtcggcaagttaaagaaagacccaggagagccaatgatgtagttaagtctgagtccaacggccagagaaccaggagaactgataatataagttccagttcaaaagctggcaggcttgagactcataaagaaccagt

SEQ ID NO: 48347 - DNA, 493 bp, Homo sapiens
gcgcgcaattaaccctcactaaagggaacaaaagctgggtaccgggccccccctcgagagtacttctagaattaattaaggcgggtcagcatgaaagtggggacctcagttctactattccagcatactgaaacattccaacaacttgaacaaacttagaagaggcctccacatttttcatgagaacccaatccagacagactcttgattttagccttcagagacccaaaggaaagaacccaattgagccctgcctggacttctgacatacagaactgtgagatcataaaaagatattgttttaagctggtgggtaaatttgtgataatttgtgactcagcagtagaaaataatgcatagtattcctattgcaatgatgtgggttttttcaatgtaatggatgatccaaatatcaattttaacatattacttaaaaacatttttaatatattgctatttattaatatagtactagtcctactttcggtagttc

SEQ ID NO: 48348 - DNA, 391 bp, Homo sapiens
  misc_feature 305, 306, 307: n = A,T,C or G
taaagggaacaaaagctgggtaccgggccccccctcgagagtacttctagaattaattaaggcgggcaggatagttcagacggtttctatttcctgagcgtctgagatgttagtattagttggttgcagttgtgtagtagttaaggactatggcaaggagtctcaggccaaggatgtcattgaagagtatttcaaatgcaagaaatgaagaaataaatctttggctcaccaaagacagaaaaagagaaaattacaaaggaacaaaaaaaaaaaaaaaaaaaaaaaaaaaaaaaaaaaaaaaaaannngggccccccccccccccgggggggaaccccctccccccccagagggggagcccccccccccccccccgggggggaaaaaaaaaa

SEQ ID NO: 48349 - DNA, 444 bp, Homo sapiens
actaaagggaacaaaagctgggtaccgggccccccctcgagagtacttctagaattaattaagtgagcaaatttacttaagcaattagagatctgtgggtacatattgttgttgtcatctctagtggtttgatttgtgtctttttaaaatatctttcacgtccacctaactttttggacacaatactgtattcatgtccttgtctgccaattctaacatttgtgtcatttcagtttagttcagttgactggtttttcttctcattataaatccttctcctgcttctttgcgtgtctggtaatttttaattggatgtctgacattgtgaattttgctttgttgagtgctatatctctattcatgttcttgagatttgtttggggatgcaattaagttacttggaaatagtttgatcctttcagatcttgctttttcagatgtttt

SEQ ID NO: 48350 - DNA, 459 bp, Homo sapiens
tcactaaagggaacaaaagctgggtaccgggccccccctcgagagtacttctagaattaattaaggcgggagaatcgcttgaatctgggaggcggagattgcagtgagccgagatcccgccactgcactccagcccaggtgacagagcgagactccatctcaaaaaaaaaaaaacgcaaaaacccgggcccccaggccccacggggaaaaaccttgtcctacaccaaaggcccccttttctttcattaagggggggcccccaaaaaatttgatggacccttaccttcaaggtccgggggcccaggggcaaacactggaaatccaaaacctttgggaggctgaggaaggagaatggcttaaccccgggattaaagtttcgcagggccctttaatggccccattaccctttaccctgaccaacaaaccaaaaccgttttgccaaattcccaaaaaaaaagt

SEQ ID NO: 48351 - DNA, 288 bp, Homo sapiens
  misc_feature 156, 157: n = A,T,C or G
cggggctgcaggaggagagtctttcaaatgatttccttcctttggctaccttgcgatgaactgttctgtcttgcgcaattttaaaacaaaataaggttttaatggaaaatgtaaaactgtagattgtataatataaagataaatcttgtttcctcnnaaaaaaaaaaaaaaaaaaaaaaaaaaaaaaaaaaaaaaaaaaaaaaaaaaaaaaacggccccccccccggggggggccccccccccccccaaaaaagagaaataaacccccccccccggggggtttttttt

SEQ ID NO: 48352 - DNA, 427 bp, Homo sapiens
ctaaagggaacaaaagctgggtaccgggccccccctcgagagtacttctagaattaattaaggcggggggatcacaaggtcaagagttcagaaccagcctgaccaacatggtgaaaccccgtctctacgaaacatacaaaaattagatgggcatggtagcgcatgcctgtgatgccagctactcaaggggctgaggcaagagaatcccttgaacctgggatgtgaatgttgcaatgagccgagatcgcgccattgcacttcaacctggcgacagatcgagactccatctcttgggccatgtggatagacctgggtgtgtcctaccgcaaatccgtgaggggttataagctgcccctaactcacctgtgtgccccctgtaaaggccccatggtgatcttccctctgggagcctttcctggacctctct

SEQ ID NO: 48353 - DNA, 509 bp, Homo sapiens
gcgcgcaattaaccctcactaaagggaacaaaagctgggtaccgggccccccctcgagagtacttctagaattaattaaggcggggtcttagctttggctctccttgcaaagttatttctagttaattcattatgcagaaggtataggggttagtccttgctatattatgcttggttataatttttcatctttcccttgcggtactatatctattgcaccactgttggaatttggtacaaaatatgttttgtctattgaaaacatacacggtaaatggtgttgttaggtaggttctgtccagttcttagggacttttttcacattatagcatttttaccctaaacatgatgttgagattattatatactgtattttcttctaaattaaccctaatgtttaaaaactcactttccccctttaattgaaggcattgttttgttagatgcagtaatgatgtttaccagagattattgtttcctatgcaaaataaattttcatattttgaatt

SEQ ID NO: 48354 - DNA, 389 bp, Homo sapiens
  misc_feature 282: n = A,T,C or G
accctcactaaagggaacaaaagctgggtaccgggccccccctcgagagtacttctagaattaattaaggcggggatagtatgtagagacaaagtgtggaacattttaaggcaggaatagtcaatattgaattccacagagactatggaatctaattttgatttgaggcattggttggtgagtgcacagtttctaaatatacaataatatggtttctctgaattgagcatgatagcaactagattaagatgagtaagatttgaatagagaaagtaaactcanaaaaaaaaaaaaaaaaataaaaaaaagggcgccccccccccgggggggcccccccttccccctttaagggggtttttttcccccccctttggggcctttttttaaaa

SEQ ID NO: 48355 - DNA, 467 bp, Homo sapiens
  misc_feature 311, 378: n = A,T,C or G
agggaacaaaagctgggtaccgggccccccctcgagagtacttctagaattaattaaggcggggggcggtctccgaagtggagtatgatccctaactcctgatttggatgcatctgagggacaaggggggcggtctccgaagtggaataaaataggccgggcgtggtgacttgcacctataatcccagcactttgggaggcagaggtgggaggattgcttggtcccaggagttcaagaccagcctgtggaacataacaagaccccgtctctactatttaaaaaaaagtgtaataaaatgataatatacttnaaaaaaaaaaaaaaaaaaaaaataacaagccaaaaaatcaaacaccaattaagaaaaacgtataaantggaaccgccccccccccgggggggctcccacccccccctttaggggggcttttcccccccccccccctcgccttttttttaaaaaaaa

SEQ ID NO: 48356 - DNA, 475 bp, Homo sapiens
taaagggaacaaaagctgggtaccgggccccccctcgagagtacttctagaattaattaaggcgggacctttttgtatttcgcaatttacatgtgtttggtttgttttaaattctgtgaaagtggcttgattaaaagactccttttaaatggaagccaccagtcagcagaatggaagcttagaggaacttgcctgtgagcgctggtctttgtgtttggttttgtgatgtaacgatctttgctggggtttttttgctttgttttgagggaaatgtcttggagtaaattttaagttcctggagttaatttgttttacaggaattttgttttttaaaaaaataggatcattctgaactttggaatgacccccttatatattttctgaaaatgaaaacagttacatgaaaaaaatttccaatgaagatgtcagcattttatgaaaaaccagaagttattagatgaaagcagcgagtgaa

SEQ ID NO: 48357 - DNA, 474 bp, Homo sapiens
ctaaagggaacaaaagctgggtaccgggccccccctcgagagtacttctagaattaattaaggcggggcgtatatgaaaactttctgtacttcctgctcaattctgctgtgaatctgaaactactctaaaaaataaggtctattttcttaaaggtcattttgcctccatagtgggaaagacaatagcactcgactaatatctgctcttatcctgcctaaacaaaattaaaaagccatcttggaatgatgaaaattgtttttaagtaactttattgtataccaaaacaaagctcaaagaattttaacacaaaatgcaaaaaaatccagcacccaataagttacaatgctcaatgtctaaccccaaataaaataatgttaggaatgcagagaaacagaaaactgtaatccatgataagaagggggaaaaaaaatcaatctacttaaactgacttagaaaagacacatcaggtgaga

SEQ ID NO: 48358 - DNA, 487 bp, Homo sapiens
accctcactaaagggaacaaaagctgggtaccgggccccccctcgagagtacttctagaattaattaaggcgggggactgttgggaaggcatgattggttttaaaatgtgaggacatgagatttgggaggtgcaaggggaggaatgatatggtttggctgtgtttccacccaaatctcatcttgaattgtagcctcccacaattccctcatattgtgggagggacctggtggaatataattgaatcatagggtggttttctccatactgttctcatggtagtgaataagtttcataagatctgatggttttataaggggcttcccttttcatttggctctcattatctcttccctgcctccatgtaagacatgacttttttcttctgccatgattgtggggcctccccagcacgtggaactgtgagtccattaaacctccttgtctttataaattacccaatctcagttatggtttgatcagcaccg

SEQ ID NO: 48359 - DNA, 493 bp, Homo sapiens
ctaaagggaacaaaagctgggtaccgggccccccctcgagagtacttctagaattaattaaggcgggcagatcacgaggtcaggagatcaagaccatcttggccaacatggtacaaccctgtctctactaaaaaaatacaaaaaactagccgggtgtggtggcgggcgcctgtagtcccagttactcgggaggctgaggcaggagaatggcgtgaagccgggaggcagaggttgcagtgagcccagattgtgtcactacactccagcctgggcgacagagtgagactctgtctcaaaaaaaaaagaaagaaagttataaagcaatgtccaaatataccaaaatatcattgagttttttaacttgcttacactgaatcttaacatatctgagtgattcctaaagagaagtcaaattaacctcacatttataaaatgaaattgcagttgttaaatgcaaactcagctgggaatggtggctcacacctgtaatctc

SEQ ID NO: 48360 - DNA, 498 bp, Homo sapiens
actggccgtcgttttacacacaggaaacagcgtatgaccatgatgtactggccgtccttttctacacaggactcagatatgaccttaatgccgtgaccgaaggtcttcttcatagaactttaacactcatacagggcatccttgcctgatcacttgctctttataggaaaccacctttcctctggggaagaacagtctgaattaataaaacatcacagtggttgagtagtaaaaataaacacagatgtcttgctttcaagtcttagagtgacataaagtagtcttaaataactagttcttagtttattttaagcaattagattgtactaacgagatgtaattatctgaagtatttatgattagcatattggtttttataagtatttctgagttattgagggtgcttaaaaatgctgaagaaactttaaaacatgattcttcttataattttatgtgattcttatagcacaatcatttttgaaaaaggaaaactaggct

SEQ ID NO: 48361 - DNA, 459 bp, Homo sapiens
  misc_feature 437: n = A,T,C or G
ggaacataagctgggtaccgggccccccctcgagagtacttctagaattaattaaggcgggcgacggaagacccatctgatcatgaggctgtgcactacctagtggtgagaacctctcttatgttgaacctgctctgatcaaacatgtggctcctagtgatcatgccagtcacactgatctctatttcatctgagctctcacttctcaatctccgtcgtgcagtattctgcaaaacaggattacagtagatctacagtactgtctagttacttgtcatgataccctcctttcatcagttatgtaaatatggcagtacacgttacataatttttgtaaatacattgttataaagtctgactaaaaaatgttaagaaaaccaaaaaataaaacatttttctatcttttgtaaatcaaaacagggaaaaaaacaaaaaancggggggccccccccggggggg

SEQ ID NO: 48362 - DNA, 522 bp, Homo sapiens
  misc_feature 438, 439: n = A,T,C or G
aaagggaacaaaagctgggtaccgggccccccctcgagagtacttctagaattaattaaggcgggggaaggatctgagctacagatataaatgtaacattgttaacttcttgattttgataattattctgtggttatatacaagcatgagcttccccgactcccaccccaaattaagacatgcttactgaaatatttaaggggtagggtgtgatgtctgtaacttagtctcaaacagttcagggaaagtaatcatatagacagatcaatagagaataataaagcgagtgtgatgaatttaacatttaaagaacctgggtgaaagatatatgagaattctttgtactatgctttcagcagcttttctgtaaatcagaaattatttcataacagaatgtcttttaaaagtgaaggaaaatacagacatttccaggcaaannaaaaaaaaaaaaaaaaaaaaaaaaggggcccccccccgggggggaccccaaatcccccctttaggggggtttttacccccccc

SEQ ID NO: 48363 - DNA, 494 bp, Homo sapiens
actaaagggaacaaaagctgggtaccgggccccccctcgagagtacttctagaattaattaaggcggggggtccgcagcttcattctttaagtcagcgagaccaagaacccactggaaggaaccaattccggacacatgtagcctatggaacaccaagtagatttaacccaaagaagactacttaaaggcatttaataatgaagctccaaaggtcaagaaatggaaaaattccttgaaacaaatgataatggaaacacaacatacccaaaacctgtgggatatagcgaaagcagtactaggagggaagttcatagctattagtgcctacatagaaaagaataaaaacttcagataaataacaatgcatcttaactaaaaaagcaagagcaaaccaaacccaaaattagtagaagaaaaagtaaagatatgagcagaaatacatgaatttgagatgagaaataatacaagaaatcaatgaaacaaacagttggct

SEQ ID NO: 48364 - DNA, 457 bp, Homo sapiens
aaccctcaataaagggaacaaaagctgggtaccgggccccccctcgagagtacttctagaattaattaaggcgggttcctgacaatgcagaagtattctgatattcaaaactgtctccacagccagtatatttttttctccttgtttggatttctgacattgcataaatgtcagtttaatgtataaaatcctatgccgcaggtcttccaataatgctgtttcattcaacagcatttcattataacattgatgagaagaatacggattcccggccgggaccactgtgtgtgtggagtttgcaagttttcctcatgtcctcgtgggtcttctccaggcactccagtttcccacaccccaaaaagctgtgcatatcaggtgaactgctgtgtttatgtggtcccagggcgatagagtgtggttttgtgtgtgtgtgtgtgtgtgtgtgtgtgcgcatgtg

SEQ ID NO: 48365 - DNA, 488 bp, Homo sapiens
  misc_feature 472: n = A,T,C or G
aaagggaacaaaagctgggtaccgggccccccctcgagagtacttctagaattaattaagggcgggtgacttgtgctcacactaaaacctgcctgggaggcccggatttgatagtcagttgttgccgtagcccagggatgtacgacgtgaaactctccttgtgcgaaagcgttacagctattatatggcttgacattgccggcgagcccgtatgatgccttctgtatgctactattcgcaatcggtctataagagtgatggcggctttactgccctttgatagactgcggaacgaaaaggttggcttacttaccgatggtccttcaggtggaacctggtctagatgggatctgaacccggacagtgtggctaaactgttgatctatgctgcctttcagccagcaccgtgacaccatcgagaataatggtttcaaacatttattgaaggcatattatgcgccggctatgagtnaagccttttgcacaca

SEQ ID NO: 48366 - DNA, 379 bp, Homo sapiens
caaccctcactaaagggaacaaaagctgggtaccgggccccccctcgagagtacttctagaattaattaaggcgggtgcctgtagtcccagctactcgggaggctgacgcaggagaatggcgtgaacccggcaggtggagcttgcagtgagccgagatcgtgccactgcactccagcctgagcagcactccaaaaaaacaaaaagaattttcttaaagatgagtgtcactttttcatggctccccaccatcaccctccttaacctctacttctacctacgcctaatctactgcacctgaatcacactactgcccatgtctaacacacaatgattacagaaagcggactgggggcccccccccgggggggaacccaatct

SEQ ID NO: 48367 - DNA, 358 bp, Homo sapiens
gctgggtaccgggccccccctcgagagtacttctagaattaattaaggcgggtgcaagccttcgctgtgccgagccttgtgtttctgacgcaagccaaatgaagaaaagcaaagctttaaaaaaaaaaaaaaaaaaaaaaaaaaaaaaaaaaaaaaaaaaaaaaaaaaaaaaaaaaaaaaaaaaaaaaaaaaaaaaaaaaaaaaaaaaaaaaaaaagggccccccccccggggggggaaccccccccccctaaaaaaagggggtaacccccccccccccgggggggttttttaaaaaaaaaaaagaaaaaaaagggtttaaaattgtggtgggggggggttaaataaaaaaaaaaaaa

SEQ ID NO: 48368 - DNA, 556 bp, Homo sapiens
aaagggaacaaaagctgggtaccgggccccccctcgagagtacttctagaattaattaaggcgggagacaagggaattacattttaaagagctaaaaacattaacatacaactctatatacaacaaaaatagctttccaaaaaaagatgagataaaaactttcagagagaaaatctgagaaaagtgtttgccatccagcttttatgaaatactaaagaaaattcatcagatggaagaaagtgataccatgtgaaaccttggctctatacaaatccatgaagagtgacagaaatagtaaaattagatacttttttattttaaacattattttaaaggtaattatttaaagcaaaaaataccattctattttggtttttctaacatttgtgtatgtaaaagacatagaaaaatagcataaaggcaggaagaggagaaatggaaatatacagctttaaggtcattgtgtgtgaaataggataattatacaaataaaccaggagagaagataaaaagaagtttcaacaaataatatcaaataatatagaaaaggaaaaaa

SEQ ID NO: 48369 - DNA, 440 bp, Homo sapiens
tactaaagggaacaaaagctgggtaccgggccccccctcgagagtacttctagaattaattaaggcgggggtgggcgcacaacgcaatggtaaaagcgcctggggttctatctagggtgatggaaattcttaaattgactctgaggatcgtctgcctatcttcgcaaatatgtgaatatgctgaaacaccattcactcctgcactttgaatgactgtatcgtatggtacataaaactgtatctcgatgacaccttctcaaaacgaataaatgccttggctcacacctgtaatcccaccactttgcgaaccagaggagggccaatcacctgagatcaagagttcgagaccactctgaccaacatggtgaaagcccatgtcgactaaaaatacaaaagtagcctggcgtggtggcacatgcctgtaatcccagctagctggg

SEQ ID NO: 48370 - DNA, 464 bp, Homo sapiens
cgcaattaaccctcactaaagggaacaaaagctgggtaccgggccccccctcgagagtacttctagaattaattaaggcggggctggtgccgtgtggcctggacactaattctcctctcatatgtttgctcaaaggtaaaatgaggccgggtatggtggctcacgcctgcaatcccaccaccttgggaggccgaggggtttcttggaactcatcagcggaaccagccatctggcctcccacaggatgctgctggcacagtctagactcagaccaaggcacatgagccaaggtgcccaaggaggactgagaagggcagtgagagggaaggattcattcattcatttgcatttattaattcagcaaacaaaaaattgaatgcaatagtttggtgccacacacaggctcggcagccagactttgaacataagacactgtcacttgccaggtgtgtatcctggagata

SEQ ID NO: 48371 - DNA, 484 bp, Homo sapiens
gccctaactaaagggaacaaaagctgggtaccgggccccccctcgagagtacttctagaattaattaaggcgggaggcgcaggttgcagtgagccaagatcgtggcactgcactgcagcctggcgacaaagtgagactccatctcaaaaacataaaaaaaattaaaaaaagatcagtttgctacaaagagtagcatctgccagttaccaagcacctgctgtgcccaggtgagtaggacatgcttcctgcctgcaaatgtccccaggcttgttcccaaacaagcggctaggaaaacaagaggctgattttacatctggcaacctccatctgagtggaaacaaatttaatgaaagcctgtggtaataaggtcctgagaccgcattcttggtagtagatctccagtcctaacatggacacagtttaacttgccgggggaacatatgtatcccctagcagcagaaaagatggaatccctaagatccta

SEQ ID NO: 48372 - DNA, 622 bp, Homo sapiens
  misc_feature 536, 537, 538, 539, 540, 541, 542: n = A,T,C or G
accctcactaaagggaacaaaagctgggtaccgggccccccctcgagagtacttctagaattaattaaatttttatttttatttaaaagaaataggaggtctcagtgtgttgcttagactggtctcgaacttctgggctcaagtgatcctcccaccttggccttccaaagtgctgagattgcagatgtgagccaccatgcctggcctgagccactgtgcctggtcccctttttattgttgaataatattccattgtgtctatatcacatttttttatcaatttatccatcgatggacaattaggttgtttcacccagcctggatgacagagtgagactctctaagaaaaaaaaattgaaaaatcgaaaaacagaaaaatgaaatggaaagtaatcagtattgttaaggatgtggataaattggagccctcatatattgctagtgtagccactgtgaaaaatttcactagttctttgaaaggttaaacatataattaaccgtatgacccagtaattctgcccctaactatgtacccnnnnnnnaaaaaaaaaaaaaaaaaaaaaagggcccccccccgggggggacccccaatccccctttaaggggggttttttaccccccc

SEQ ID NO: 48373 - DNA, 306 bp, Homo sapiens
accctacactaaagggaacaaaagctgggtaccgggccccccctcgagagtacttctagaattaattaaggcgggtaggcctaggattgtgggggcagccgatgcctggtccaggctgtgagggacacgtatggagcagataaagaattcactcaagcaaaaaaaaaaaaaaaaaaaaaaaaaaaaaaaaaaaaaaaaaaaaaaaaaaaaaaaaaaaaaaaaaaaaaaaaaaaaaaaaacgcccccccccccggggggggaccccccccccctttaaaaaaggagtatacccccccccccccgggg

SEQ ID NO: 48374 - DNA, 565 bp, Homo sapiens
ctaaagggaacaaaagctgggtaccgggccccccctcgagagtacttctagaattaattaaggcgggggaggaacgaaagatctcgaatctaacccgactgtgcacagcatggccaaaacatttccatactctgtggacgaacttcacgccggctgcaatgacagacacctgaactgccagcactccgaggccttcagactctacggtcactcgctgtcggtactgcaggaccaacgttcttcacacccagaagaacataagtttactgtaccccaaccgagcagcatgtaacttgaaggatggaaactgcagagactgcatcaaagattgcacttcagcactggccttggttcccttcagcattaagcccctgctgcggcgagcatctgcttatgaggctctggagaagtaccctatggcctatgttgactataagactgtgctgcaaattgatgataatgtgacgtcagccgtagaaggcatcaacagaatgaccagagctctcatggactcgcttgggcctgaatggcgcctgaagctgccctcaatccccttggggcctgt

SEQ ID NO: 48375 - DNA, 392 bp, Homo sapiens
aaagggaacaaaagctgggtaccgggccccccctcgagagtacttctagaattaattaaggcggggggatcatgatcatttgttcagaaaaaaagcccctgaactgattttgttaccatagaatttaaaaaaaaaaaaggctttaacagttggctgtaatttggcttttattatcctttattaaaatacaaatgtcaaaaaaaaaaaaaaaaaaaaaaaaaaaaaaaaaaaaaaaaaaaaaaaaaaaaaaaaaaaaaaaaaaaaaaaaaaaaaaaaaaaaaaaaaaaaaaaaaaaaaaaaaaaaaaatttttggccccccccccccggggcgatccattattttttttattatgaatacccccccccccccccccgctgttattaaaaaaaa

SEQ ID NO: 48376 - DNA, 453 bp, Homo sapiens
  misc_feature 351, 352, 354, 378: n = A,T,C or G
agggaacaaaagctgggtaccgggccccccctcgagagtacttctagaattaattaaggcgggtaggcctaggattgtgggggcaatgaatgaagcgaacagattttcgttcattttggttctcagggtgtgaaattggaagtatcaagggctttctttggtgattgagggaaataatgtctctacttgtaatttattgtgaccctttttcactgtatatgctttgtatgtctaatatttatttcaatgcaaattcaattgttccttcatctgtattgttatatctaagattttattgatgttaaaatctaattgtggaataaaaatctctctggaatttagcagatcccnnanaaaaaaaaaaaaaaaaaaaaaaangggggcccccccccggggggggcccccattccccccttttggggggttttttcccccccccccttggcccttttt

SEQ ID NO: 48377 - DNA, 301 bp, Homo sapiens
aagggaacaaaagctgggtaccgggccccccctcgagagtacttctagaattaattaaggcggggggaggaaaatttttactttccatcttaatgtaaccttatgctattctgtatttttactgtatattgcttttacaataaatataaaatgaaatgtttatgttgacatttcagtgtgaaaaaaaaaaaaaaaaaaaaaaaaaaaaaaaaaaaaaaaaaaaaaaaaaaaaaaaaaaaaaaaaaaaaaaaaaaaataaaaaaaaaaaaaaaaaaaaaaaattttaaaataaaaaaaaaat

SEQ ID NO: 48378 - DNA, 481 bp, Homo sapiens
aaagggaacaaaagctgggtaccgggccccccctcgagagtacttctagaattaattaacagatagatatgatgtgacaattcagtttaagtgcaactttcagtttctatcttaactataacttgagagattaatttagaattacaaatgtgtgtatatatatatatgagcatatgtatacataacatatttacacacaaggcacacatactatgagcaccctgcagtttgtaggcatttttacatgcgaatgttattggaacagataggcatcacgggaagaaattttgcctctacctgctctcaccatgtcagttgacaggactcaggacatgggagaagagtgagcttcctttctgaagttgatggtagctgtcaagatttttgaaaagttagtgccaggaattaggtgattggtaagcagcggcccattccttgccttcagtgaaatgacatcccgaaaaaaataaaaaaaaaaaaa

SEQ ID NO: 48379 - DNA, 433 bp, Homo sapiens
  misc_feature 93: n = A,T,C or G
aaccctcactaaagggaacaaaagctgggtaccgggccccccctcgagagtacttctagaattaattaaggcggggagggaatggaggaggcnaccgttgttctcgagcattgcactatctgacgcgtctatgggcgcaacgccgaggacctgagccaggcgctgcacctggaggccccagagcttcaagacaaggtgaacccgacgaagccccggaggggcaggttcgaggtgacggtgctgcgcccggacggccgcaaagaggagctctggactgggattaagaaggggcccccacgcaaactgaaattccctgagcctcaagaggtggtggaagagttgaagaagcacctgtcggacggagatttgggtagaagccctcatgctgagctttgtgtccctggtgaagttggaacattaatgatggaacatg

SEQ ID NO: 48380 - DNA, 544 bp, Homo sapiens
accctacactaaagggaacaaaagctgggtaccgggccccccctcgagagtacttctagaattaattaaggcgggcactggagcactgattcggacacgccatggaccatcgggctattcccagggcatggcccatcggacagattctttttcccaggattaaaactctgaccccctagaaaaaaaagctgaaagaaaatgaaatggggccccccccggggtggaggatattattgcacagtttggctggttttgccccccgcatggaagaactttttatttatactgtgattttgaacagattatgcaacattggaaggaaggctgtactttgatggtttgaaggaactcagcagtatgatgatctggttccaggggaaaaaaatagctggttggtgtctagccccccaacacttttgtctgttgtgtataaaagaagaaagactggcatgtaccttcatttgcttagctatttgagtatctagagaaaaattaaaatgcaatgagttagcagtataccctggcacacttaataaattaaaca

SEQ ID NO: 48381 - DNA, 443 bp, Homo sapiens
  misc_feature 274, 276, 278: n = A,T,C or G
accctcactaaagggaacaaaagctgggtaccgggccccccctcgagagtacttctagaattaattaaggcggggatgcttgcatgtgtaatcttactaagagctaatagaaaggctaggaccaaacctatctccccttttatactaataatcttataaaaaaaaaaaaaaaaaaaaaaaaaaaaaaaaaaagggggcccccccccgggggggaccccaaacccccctatgaggaaggatttaccccccccccccggggccgtttttaaaaaangnangggggttcttgctaaaaaaaataattcctctggtgctacttttaatgtggtcaggtttaaaatgttttcagaaaggttaagcttcctttgcattagtgcctggtgtggtcaaatgaaagaatgactttggaatggactgcttgtgtttataaatgaccttcccat

SEQ ID NO: 48382 - DNA, 461 bp, Homo sapiens
aaagggaacaaaagctgggtaccgggccccccctcgagagtacttctagaattaattaaggcgggggaattgcttgaacccagaaggcggagattgcagtgagccaatatcacaccattgtaccctagcctggcaacagagcaagactctgtctccaaaaaaaaaaaaaaaaattttttttaaaaaatttttgtagcgaaaattttttgttttattgccagggcgggcctaaaattttgggttaaaagggatcctcccacctaaccctcccaaaaacttgggattaaaaatgtgagccactgcccctggccaaaaaacttttttaaagccttttttttttggattctaacatccaagggtaaacatgatccctagaggaatcccccctattttatgattattgggataaatgtctaaggccaaatccaccagagggataaaaaaggaatccttttccttga

SEQ ID NO: 48383 - DNA, 467 bp, Homo sapiens
ctaaagggaacaaaagctgggtaccgggccccccctcgagagtacttctagaattaattaaggcggggggcaagataaaatagctgtgaaatgtaattagaagaatatacaaacaacaaacaataacgtttcaaacctagaacgatgcaaggaaacatgcactatttgatattatgaagtcctgtgaagtccaaagatgagttacagaaagtgacttcagggcccatgcacatgctttctgtgtgtatgtgcatgtgtgtaagtgatttcttcattgcccatttttgtattttccacatctccaaagtgaccattaaaatgcaccattcttggtaggcagcgtcttcattctggctggggaaggcagagataaagaatgcattcagggctgggcgcggtggctcacgcctgtaatcccagcactttgggaggccgaggcaggcagatcacaaggtcaagagatcaag

SEQ ID NO: 48384 - DNA, 440 bp, Homo sapiens
agggaacaaaagctgggtaccgggccccccctcgagagtacttctagaattaattaaggcgggtgagggataaaaaactacatattaagtacagtgtgcactgctcaggtgacaagtgcactgaaatctcagaaaacacactaaagaacttatccatgtcatgaaaaaccacctgtatttccaaaacaattgacacttaaaaaaaaaaaaaaccctattgactttttttaaaaagctagaaaaacaaaaccaacccaacccaaatttagaaaaaaaaaattattaaagatcaagccaaaaataattgattttgaaataaaatccaaagggtcaataaaatgcaaagttgttttttggaaaaaaaaaaaaaaaaccttgacaaccttttcttaaaattaaaaaaaaaaaaaaaaacccccccggggcggggggtttttttt

SEQ ID NO: 48385 - DNA, 573 bp, Homo sapiens
tgattactggccgcgcgcatatacaaccctcactaaagggaacaaaagctgggtaccgggccccccctcgagagtacttctagaattaattaaggcgggggaaggaggagccgcctcagccgcagctggccaacggggccctcaaagtctccgtctggagtaaggtgctgcggagcgacgcggcctgggaggataaggatgaatttttagatgtgatctactggttccgacagatcattgctgtggtcctgggtgtcatttggggagttttgccattacgagggttcttgggaatagcaggattctgcctgatcaatgcaggagtcctgtacctctacttcagcaattacctacagattgatgaggaagaatatggtggcacgtgggagctcacgaaggaagggtttatgacctcttttgccttgttcatggtcatttggatcatcttttacactgccatccattatgactgatggtgtacagctcccaagtgcttcctatccagtccaaaggacccttttgattacagcacaggaacttgatcgttggggaaccccaaccccttggaacttg

SEQ ID NO: 48386 - DNA, 484 bp, Homo sapiens
ctaaagggaacaaaagctgggtaccgggccccccctcgagagtacttctagaattaattaaggcggccatggcggcgggggcctgcaatcccacctattctgaaggctattgcacacgatcgcgtgtgaacctggaaaacggagcttgcagtgagccgagatcatgccactgcactccagcctgggtgacagagccagactccgaaaaaaaaaaaaaaaaaaaaaaaaaaaaaagggggccccccccgggggggaaccccaatgcccccaaaagggagccattttacccccccccatgggccgttttttaaaaaagcagtctccctaaattagtggcaaaagaaagagaaggggaggttctaaacagttaaagcattgaagaggagacagtatcacacagaaagcaagcgccagagaaatggagagcaatgaaagaaaaaaaaatcccatcaattagatttaaaaaaccaaagcagaatgcttt

SEQ ID NO: 48387 - DNA, 471 bp, Homo sapiens
aaagggaacaaaagctgggtaccgggccccccctcgagagtacttctagaattaattaaggcggggaagtgggagcagaccacatgtgagtggaatccagaacattaggactggaagggaactgaggtggggtaggtttcttggagaaagtagtgtcaaaacaagggttttccctagccacctggcaactctgtgatcttaacctctctcaggctcagtgtcttatcaagaaaagggggctaatgatcatagaactgttaagggtattcagtgagaatgtatatagagcacttagcacaatcactggcttacagtaagcagtcaataaatatgagctagttattgcatcattcaaggccccagcagacaccaaattttccttcctcatttagcatttctatcacaggactgtgattatatatatatatatatttatttacttattatttattttttgagatggagtttctc

SEQ ID NO: 48388 - DNA, 502 bp, Homo sapiens
aaagggaacaaaagctgggtaccgggccccccctcgagagtacttctagaattaattaaagcgggcatggtggcacacacctgtattctcagctactcagggggctaaggcaagagaatagcttgaacccgggaggcagaagtggcagtgagccgagattgtaccactgcactccagtctggatgacagagcaggactccatctcaaaaaaagaaaaaaggaacaaatgcattaaaaatctcctttttttgacacacaaagtagaatgatgcaaatttatgacatcaacttaaaagaggtgtgaatgaacctataatggtgtagcattctggtatgttattgaagttaaattggcatcaatttagagtgttgtaactctaggatagtaaatgtaatctccatgacaattataaacaatacagcaagagcatatacacaaaacaaaataagaaggaaatttaaatgtttcactacaaaaagcaactaaaagcaaaagaacaca

SEQ ID NO: 48389 - DNA, 494 bp, Homo sapiens
aaagggaacaaaagctgggtaccgggccccccctcgagagtacttctagaattaattaaggcgggagcttgtgatcccacctactttcgatgctgaagcaagatactggcgagaacactcggccgagccgctcgtggtgactcatgcctgtaatcctggaattacgtgaccccggaggctgaagcctggaggatcacattaaaccacgagtttgagaccagcttgggctacatagcaagaaaataaaaagcaagcaaaaaccaaacaggagccccccctctggggggaatcaactagacctcatgaaatacagaatatagccccccatttatcactaaaacctcaatagatgacattgacttgatactggacataattgaagaattagtgaattaaaagccagtgctgaggaattcatgagagacccaacccggggcaatgaataaaaattatgaaagattagttaagagacacaggaagtagatggaaagatt

SEQ ID NO: 48390 - DNA, 443 bp, Homo sapiens
  misc_feature 374, 375, 376, 377, 378, 414: n = A,T,C or G
tacaaccctaactaaagggaacaaaagctgggtaccgggccccccctcgagagtacttctagaattaattaagcgggaagcatgtccgggatcaacgcacgttaattgacgaggcggggttgggaaaaaatctttactaataatacaaaaatgaaacgcggcagtgccacctccttgataccatctgcttgggaggctgagggaggagaatcagttgaacccggagggtggagattgcagtgagactctcaaaaaaacaaaacaacacaaaaaaaatctcctaagatgattaaaacaaacttgcttctacaataaaccgtaaactcaccgtatctagtgattctgtacattaaatcttttgaacatgtttcccnnnnnaaaaaaaaaaaaaaaaaaaaaaaaaaaaaaaaaaancccccccccaaaaaaaaaaaaaaaaaaaa

SEQ ID NO: 48391 - DNA, 395 bp, Homo sapiens
  misc_feature 278: n = A,T,C or G
taaagggaacaaaagctgggtaccgggccccccctcgagagtacttctagaattaattaaggcgggggaggcagtgctaccagaaccatggttcggttggttcagccgcctggacctcatctgctccctgaggttggtctttgctccgcaccctggtgcggcctggtacacagaaggcgctcagtaaacacttgtggatgaaggaaaaaaaaaaaaaaaaaaaaaaaaaaaaaaaaaaaaaaaaaaaaaaaaaaaaaaaaaaaaaaaaaaaaaaaaanccgcccccccccccggggggaccccccaccccccctttaggggggtttttacccccccccccgggggccttttacaaagcacataacttggcactttaatctttttcactgactaat

SEQ ID NO: 48392 - DNA, 449 bp, Homo sapiens
taaagggaacaaaagctgggtaccgggccccccctcgagagtacttctagaattaattaaggcgggtaaagaaaaaacagtggagaagaaatcacaaaggaaaatatagatagatttgtttacataaaaataaaaactaacgtatatttaaaatcatattaagactcatttttggccaagacccacttattgatgggagtataaattggtattgtataaattggggattgggagtaccaatccccagccctcaggccatggattggtactggtccgtggcctgttaggaaccaggctgcacagcaggaggtgagtggtgggcaagcaagctttaattcccgagctttgcctcctgtcaaatcagtggtggcattagattctcataggagtgtgaaccctattgtgagctgtgcatgcaagggatctaggttgcacgctccttatgagaa

SEQ ID NO: 48393 - DNA, 448 bp, Homo sapiens
aaagggaacaaaagctgggtaccgggccccccctcgagagtacttctagaattaattaaatatgatgttgagaggctgagatgggcggatcactaggtcaggagatcgagaccatcctggctaactcggtgaaaccccgtctctactgaaaatacaaaaaaaatagctgtgcgtggtggcgggtgcctgtactcccagctactggggaggctgaggcaggagaatggcaagaacccgggaggcggagcttgcagtgagcagacatcgcactactgcactccagcctgggtgacagagcgagactccgtctcaaaataaataaataaataaataaatattacgtaaactgagaaaatgagtataacaagagtagtattgttgtttctctgagaaataaactaaatatgttggaaaaatgagaaactcaacagttgctgtcagcttaact

SEQ ID NO: 48394 - DNA, 495 bp, Homo sapiens
ctaaagggaacaaaagctgggtaccgggccccccctcgagagtacttctagaattaattaaggcgggagggatgtcatggggagatttacctcatgctagatgactcataattgggtgcaacgcaccatcatggctcatgtatacatatgtacttaacctgaccagagtgcacatgacctctacaactaagagttttatatacaaatcaaggagaatatgaaagagaggactattttggggaggatatcaaaaacagaggttccagaagaagatgcactaagtagcaaagaacactcaaaaagcagtgttaagaaaaaattacctcaaaatttactgggtatatttcgtcctatgcccaatttttaaaattggaatttgggttttttgcccatccggtggggggactcccttttttttttgggggagagattttttaccgagtgttggcttggaaaataaaatttcccttccaaaaaaaaaaaaaaaaaaaaaaa

SEQ ID NO: 48395 - DNA, 491 bp, Homo sapiens
  misc_feature 444, 445, 446, 447, 448, 470, 471: n = A,T,C or G
ctaaagggaacaaaagctgggtaccgggccccccctcgagagtacttctagaattaattaaggcggggccgagatcaaggcattgcagtgcagcctgggtaacagagcaagactttgtctaaacaaaaacaaaaacaaaaaaattctttttctcagaatagctacattcatctcatcattatataaaagacttactaaaaattaaagccttggatttgactctaggtaaagtgcatggagaataaacatgaatcattatttgttttagtatactattagtataataattgaaacagactactcatattcctgcttatgtgacatacttgtttttgttttgttttgtttttttgagcaagactttgtctaaacaaaaacaaaaacaaaaaattctttttctcagaatagctacattcatctcatcattatataaaagacttactnnnnnaaaaaaaaaaaaaaaaaaaaannggggggccccccccgggggg

SEQ ID NO: 48396 - DNA, 504 bp, Homo sapiens
cctactaaagggaacaaaagctgggtaccgggccccccctcgagagtacttctagaattaattaaggcaggagaacaaagctgagaactatttcaaaatatacaatcagaggagaaaaataaaaaggaatgaggaaaacttataagaattatgagatataatcaaaaaagcaaatatttgaattataggagctcaaaaagaaaaagagaaaaacaaagcttttttaaagaaataattttctacagaaaacattctaaatctgggcaaagttacaaattccaggtataagaaggtcaaagatctccaaaccaattcaatccaaataagatgacatcaacatatttgataatcaaactgccaaatatcaacaacagagagaatatcctgaaagtagcaagagaaaaaaaatacatatgagggagttcaataaacatgtattttataagagatattataggccagaagagagtggcattatatatgtgaagtgctaaaagaaaaaaa

SEQ ID NO: 48397 - DNA, 377 bp, Homo sapiens
ctaaagggaacaaaagctgggtaccgggccccccctcgagagtacttctagaattaattaaggcgggaggagataaatggaagtatactgatgtaagactcttatactatacatgaagtggtataatatcactgtgataagtgataagactgtgagaaattgaagtgtatactttgaacctcaaagcaatgaagaaaatagcaaaacaaagaatttacagctgataagccaacaaaggcaataaaaattaatcattaaaaaatacgcaatccagaagaaaaaaaaaaaaaaaaaaaaaaaaaaagggggccccccccgggggggaccccaattcccccctttggggggggttttaccccccccccctgggccgtttt

SEQ ID NO: 48398 - DNA, 444 bp, Homo sapiens
  misc_feature 389: n = A,T,C or G
ctaaatggaacaaaagctgggtaccgggccccccctcgagagtacttctagaattaattaaggcggggtcccatatagggttggaggttaagaaaaatcttttttttttttttccaggaggaaaaaaaagcctatttaatgaactcagaaaaaatgaagacaaaagaaacataaaatgaacatatggccttttccatgatacatgctgttattttacctgtcttctattactcatgtgatattcatctttcttccagattagcatatttctccatttatacatagggaattgggaacttttagaagtttttccctgtctctgatggattggacaatgtttgcaattctaggagacatctgattattctttcaaaataaatttatcagtngaaaaaaaaaaaatgattttaataaaaagcggccgccaccgcgggggagctccaa

SEQ ID NO: 48399 - DNA, 426 bp, Homo sapiens
aaagggaacaaaagctgggtaccgggccccccctcgagagtacttctagaattaatgaaggcgggaattaagtacttctaattaacaatgctagataatgtcagcgactgtttcttgtatctgtactgtaaggacaaatgctgttcatagttgtaacttctaagacaaggctttgatttctttacagtattgttcacctacaccagaaccacttgtagagaggcaagaatatttactaaaagttgcatcatgacatgagacttcttgcaatatattgattaaggattcttttaagtcctgcctttttcaggaagcctttacctaataggacacttatgtccaagaaaggactgatctttacatgtatatctatgtgttactgaatttaggcccacacaacccctaactagatattgcctatgggtt

SEQ ID NO: 48400 - DNA, 470 bp, Homo sapiens
ctaaagggaacaaaagctgggtaccgggccccccctcgagagtacttctagaattaattaaggcgggtggatcacctgaggtcaagagttcgagaccagcctggccaacgtggcaaaaccctgtctctactaaaaatacacaaaattaaccaggcgtggtggcgggtgcatgtaaacccagctactctggaggctgaagcaagataatctcctgaacccaggaggcggaagctgcaacgagccgacatcgcaccattgcactccatcctaagtgacaagagcaagactctgtctccactttactacccccaaatgttatgggcccggaacgaggggggtgggggctaaagtgcgggatattgatggcacacccgatggttgtcaagggaccccttttttttgggggttatccatgccgtcgatatcccaaaaatttttgggcccaaaggggaacccaaaaaataaaaaaa

SEQ ID NO: 48401 - DNA, 572 bp, Homo sapiens
  misc_feature 389, 390: n = A,T,C or G
gatatgattacgccagccgcgcaatgtaactcctcactaaagggaacaaaagctgggtaccgggccccccctcgagagtacttctagaattaattaaggcgggaggtcaagcacgctggctcatgcctgtaatcccagcactttgggaggctgaggcaggtggatcacttgaggccaggagtatgagaccagcctgggcaatgtggtgaaattgcatctttactaaaaatacaaaaactagccaggcatggtggcacatgcctgtaataccaggtgcttgggaagctgaggcataagaatcacttgaacccgggaggtggaggttgcagagtgagccaagatcgcagcactgcactctagtctgggtgacagagcaagactctgtcacnnaaaaaaaaaaaaaaagcccttaaaattttcggggaacccttgttttttttaaaacaacttccttttgctttaaaaacctcaaaggaccccaaaggtaaaataatttccggggccccctaaattttccagtttagaataaaagctggaccaatgatttgtggggctgaacaaaaaaaaaaaaa

SEQ ID NO: 48402 - DNA, 496 bp, Homo sapiens
agggaacaaaagctgggtaccgggccccccctcgagagtacttctagaattaattaagtcgggggaggggggagggatagcattgggagatatacctaatgctagatgacacattagtgggtgcagcgcaccagcatggcacatgtatacatatgtaactaacctgcacaatgtgcacatgtaccctaaaacttagagtttaataaaaaaaaaaaaaaaaaaacggaaggaagaaattttttaaaaaaaaaaaaagaaatgacaaaattaatgaaggaaaaaacgagcaaaaaaggtataaatgaagaatttaagacaaaactgaaaaaaagtgaaagccccaatgttttttccggttttttgcctttttttgaaattgggatttgggtttttttgctattgagttgttggagtcccttattttttgggaggaaaaaccccttaaagaaggtttgcttgacaaaaaaatttccccctccccgccaaaaaaaaaaaa

SEQ ID NO: 48403 - DNA, 454 bp, Homo sapiens
  misc_feature 363, 365, 366, 368, 388: n = A,T,C or G
ctaaagggaacaaaagctgggtaccgggccccccctcgagagtacttctagaattaattaaggggggaaacactacacctaaacgtttcagtcaaactgctgaaaagtgaaagataaagagatcttacaagtagcgagaataaaaatggggcattacttacaggggaacaatgatatgaatggtggctaatttcttaccagacattacttacaggggatcaatgatatgaatggtggctaatctcttaccagaaacaatagaaacttgaacacaatggaatgagatctttaagtactaaaggaaaaaaaattgtcaatctagacttctatatctggtgaaagtaacttcaaaaacaaaagccnannanaaaaaaaaaaaaaaaaaaanggggggccccccccggggggggcccccaattccccctaaaggggggttttttccccccccccctgg

SEQ ID NO: 48404 - DNA, 377 bp, Homo sapiens
ctaaagggaacaaaagctgggtaccgggccccccctcgagagtacttctagaattaattaaggcgggtgttccgaataatgtcctggaagttataacgacacctattttaaatataagcctgaattttgtaaagtaatatttaatgtggtccgtgataattaaataaaatgcttaattaatgtggcgaaaaagctataacttaaaaagattataacgcgggtcgccctccatgggagaacaccccataatcgctttgtatataaaataaacagctcgacaaaggggcgagatttaaaaaagaaagggggccccccccggggggggcccccggtgtcccccttcgggggggtttttccccccccccattgggggggtt

SEQ ID NO: 48405 - DNA, 465 bp, Homo sapiens
ctaaagggaacaaaagctgggtaccgggccccccctcgagagtacttctagaattaattaaggcgggagaatggtgtgaacccaggaggcggagcttgcactgagttgagattgtgccactgcactctaccctgggtgacagagcaagactctgtcttcaaaaaaatatatctgtaatcaaaaatactcaagaagctaaaacaaggggggccccccccacgctgagaggcacatgctgccctgagccaagattgtttcatcgcccaccaggctgagcgataaaatgagacttcacctcaaaaaaataataaataagaaggccaggcacggtggctcactcctttaatcccaccactttgggaggcttaagcgggcggatcacaaagttaatagatcgagaccatcctggccaacatggggaaaccctgtctctactaaaaatacaaaaattagctgggcgtggtg

SEQ ID NO: 48406 - DNA, 410 bp, Homo sapiens
ctaaagggaacaaaagctgggtaccgggccccccctcgagagtacttctagaattaattaaggcgggggtggggtatgtatctatcctggggatgactgcgggctcatgctaacatcttaagaaaagtttaacattgcccacaaaaccctctaatcctttagtaaatttaactgagagcccaaagaggaacatctctttggacactaagaaaaaaccttgtttatagagtaaaaaatttaacacccatagtaggcctaaaaagcagccaccaattaagaaagcgttcaagctcaacacccactacctaaaaaaaaaaaaaaaaaaaaaaaaaaaaggggggccccccccggggggggcccccaatcccccctttggggggggtttttccccccccccctgggccggtttt

SEQ ID NO: 48407 - DNA, 575 bp, Homo sapiens
gccaagcgcgcaattaaccctcactaaagggaacaaaagctgggtaccgggccccccctcgagagtacttctagaattaattaaggcgggcagatcaagaggtcaggagtttgagaccagcctggctaacatggtgaaaccccatctctactaaagatacaaaaaattacctcagtgtggtggtgcatgcctgtaatcacagctactcgggaggctgaggcaggagaatcgcttgaacccaggaggcagaggtttcagtgagctgagattgtgccactgcactccagcctgggcaacagggtgagactctgtctcaaaataaataaataagtaagtaagtaagtaaaaaaacaaaagtaaagagcaggtttggcgctctgagccctctccagttgagttcttaccccatctttttaagggccttcttgacaaatccattacatttctgaaaagagcccggtttctcaagggatcagaatcttctttcctagtctcctgctagagtgctgttatttttggggttgtccagattaaaaatcttgtgtggttttctttacattcttccctctccttta

SEQ ID NO: 48408 - DNA, 455 bp, Homo sapiens
caaaagctgggtaccgggccccccctcgagagtacttctagaattaattaaggcggggtatctttttccatctatttgctttccacagacagcatctgtgtcttccttttaaggcccatctcatatagacaagatatagctgagtcttgttttttcagcccttccaaacatttctaccattgaactgtagtgctcagtggatttacagggagtgcaataattgttagtcaaaatagacctatacgtttaccatttaaactacggttgtctagtctaatttttttactcctttttcccctgcacattttaatgttaattaccttttagaattccactttaactgggtactggacttttatgcatacctatttccatgatctatgtgcaagtgctatagggaatacagtatacactcaagtgcttatattctattgaaggtttttttaaaatagatt

SEQ ID NO: 48409 - DNA, 463 bp, Homo sapiens
  misc_feature 399, 400, 401: n = A,T,C or G
ccctactaaagggaacaaaagctgggtaccgggccccccctcgagagtacttctagaattaattaaggcggggtgatgaatccaaagcgtttgcagcattaggggaacttacatacagaggacttcagcgtcctcatgacagaaaaaaatacgttctacccaagtatgtccttaaccagagtgtcaccctatgtagtttatataagagtgtcaggaatttggcccaggccgttgctagattctatgtgtttggcagcatgcttgatatttcagggcttgggaaaaccacctaaacaacttcctgtgggccttggagtactccttgataccttccaggccccagtttccccagtttgggtttaagcctgcagggaaaaaaaaaaaaaaaaaaaaaaaaannnggggggccccccccggggggggcccccaattcccccttaaggggggttttttcccccccccc

SEQ ID NO: 48410 - DNA, 385 bp, Homo sapiens
ccctcactaaagggaacaaaagctgggtaccgggccccccctcgagagtacttctagaattaattaagcgggccatgaaagcctgtaaaccaacaacacaaaaggctgcttcagagaacggctacctgcctgtgctgccaccgggagaaggaaggaggaaggacacatctactaaaataggagctgcttgttttatatatgataaagatgttagggaaggtttccatacatatagccattaaagcccttaactcaaggctttaaataatctggcggtgcttttatttttaaatggctgtgctcgaacataggtgtatgcttttaaatatggatttgtttataaacatatgtacctacttttgtaactgctgatttaaaacaaaga

SEQ ID NO: 48411 - DNA, 406 bp, Homo sapiens
taaagggaacaaaagctgggtaccgggccccccctcgagagtacttctagaattaattaaggcggggagggtgtattgtcacaaagtcaatttatcagttagggtggggcaggaacaaatcacaatggtggaatgtcatcagttaaggcaggaactggctattttcacttcttttgtggatcttcacttgcttcaggccatctagatgtatacatgcaggtcacaggggatatgacggctttcatgtcccagagacctgttgtgctgtgtattttgatttcctgtgtatgcaaatgtgtgtatttaccattgtgtagggggctgtgtctgatcttggtgttcaaaacagaactgtatttttgcctttaaaattaaataatataacgtgaataaatgaccctatctt

SEQ ID NO: 48412 - DNA, 321 bp, Homo sapiens
  misc_feature 305: n = A,T,C or G
aaagggaacaaaagctgggtaccgggccccccctcgagagtacttctagaattaattaaggcggggtacagtaaggcagtgcttcccacactggacctctttcctgggtctcttttgcaatacattaacagaccctttatcaacataaacaatagtaactgagctattaaaggcaacctctctgactccttctgcctcctgaaaaaagagcacatgtaccctaaaaaaaaaaaaaaaaaaaaaaaaaaaaacccccccccccacaagaggaaacccccccccccccaaaaaaaaaaaaaaattanaccccccccccccccc

SEQ ID NO: 48413 - DNA, 637 bp, Homo sapiens
cgcaattaaccctcactaaagggaacaaaagctgggtaccgggccccccctcgagagtacttctagaattaattaaggcggggggcatggtaacacacagcacatatggtttgggggccctgtatgtgctgaatctacacatctagaaatgtcttccttgattcagtactatattatctaaagtctacactaaacattgtacgagtggtaatatattgcctcgctaaaggcatactgaagtgtataacctatactgatattacaacatatatgacatactatatatttctttatataaacttgggacgttgttaataccatatactttatatttctatacatttatatttctaataatacagttatcactgatctatgtagacacttttagaatttattaaatccttggccttgtgcattatagcattccattaacaagagttgttccccctccccagtcttcgccttcctctttttaagctgttttatgaaaaagacctagaagttcttgattcatttttaccattctttccattaggtaaagaaaaagttgattggttggttgtttttcaattatgccattagactaaacatttctgttaaattacccctatccttttgtctctactggtttctt

SEQ ID NO: 48414 - DNA, 470 bp, Homo sapiens
ctaaagggaacaaaagctgggtaccgggccccccctcgagagtacttctagaattaattaaggcgggattcctgagattcctatgctgtacagcagtgggttctcaaatcttttgctcaggactcctttatattttaaaaaattattgaagaccccaaatagctcttgtttatatgagttatatctatcaatattgtctctattaaaaactaatactgataaatcttttaagtatgtattaagcttcactctgtcagccacgctggaatgcaatggcatgatcatgactcactacagactccacctcttggctcaaacaatcctcccacctgagcctgcctagtagtggggattacaggcgcccgtcaccacatctagctaattattgtattgttagtagagatggggtttcaccatgttggccagtctggtgtcgaactcctgagctcaggtgattcacttgccttggc

SEQ ID NO: 48415 - DNA, 476 bp, Homo sapiens
cgcaattaaccctcagtaaagggaacaaaagctgggtaccgggccccccctcgagagtacttctagaattaattaacggcggggaaaatgtctagtagctgttacttctgtcacagaagtaaaaacttattctattagaggtgtatccgaatgaagtaacaaaaaaccttgccaatactttgagtcagatatgatttcttcatctgattaaaggaaatgatgcaaactgggtagggtggcacatacctgtagtcccagctgctccaaaggctgaggtgggaagattgctggaggccagtggtacaaggctgtattgcgctggttgtatctgtgaatagccactatacacctgtctggcaacatattgagaccccatctgtaaattaattagtgagtggtatgaaaaaaataaaaaaaagcggccgccaccgcggtggaactccaattcgccctatagtgagtcgtattacgcgcgc

SEQ ID NO: 48416 - DNA, 464 bp, Homo sapiens
  misc_feature 382, 383: n = A,T,C or G
aagggaacaaaagctgggtaccgggccccccctcgagagtacttctagaattaattaaggcaggtaacaattagaacttagtgttagccaatttctctggtgtaaacacgccagccatggcttattccaagtaccaggacaaaggcactgcatgtgaagttgggaagagatgtgcacaatcagctcctgcaaaccactgcaggctggcttctgcacaccactggctctgagacacacgtgaatattcaccctggcttcccctggccacaagcctaagatggtcgctctgcacccacctctctcaaaggaatttttgatgtcattgacttccacctgagatcctggcactctgaagatcccctgctgctggagtcctaaaaannaaaaaaaaaaaaataaaaaaaaaaggggccccccccgggggggacccccaattcccccttaaggggggctttttccccccc

SEQ ID NO: 48417 - DNA, 522 bp, Homo sapiens
taagctcctcactaaagggaacaaaagctgggtaccgggccccccctcgagagtacttctagaattaattaaggcgggggagaatgttttcgtgttacttatactaacattctttcttctatagggtgatagattggctcaattgggtgtgaggagttcacttatatgtttgggattttttaggtagtggcgacaaacctacccagcctggtgatagctggttgtccaagatagaattttaacagccaaagctaactagatctactcaattgacccatttacttgaccctcggccccagagggagactctatctcttccgcaaatagtattctataatccatctcaacggtggggtttactaactagatgttggatcaggacatcccgatggtgcatccgctcttaaaggttcgtttgttcaacgattaaagtcctacgtgatctgagttcaaaccggagtaatccaagtcgggttctatctacttcaaattcctccctgtacgaaaggacaagagaaataa

SEQ ID NO: 48418 - DNA, 529 bp, Homo sapiens
aattaaccctcactaaagggaacaaaagctgggtaccgggccccccctcgagagtacttctagaattaattaaggcgggacacgagggtgtccttcacggaaaattctttttattatttttgacgcaccgaggctgttgtgttcactggtttttggaagccaagatgtcaaacacttccgaagtatgaaaagaagattgcgaaagttacattagggttctgctgtccccaaaaagccctttgtgcacaagttctcacagtcccgccccatgcattttgtgccacaagtgcaaattgaaggacttcatgcagatcgcgccagggaagagcaatttgaagtttttttttttttaaagcttttaaatttcagttaccagctccaatgaaaaaaagaaatccagtctaaaacagccactctgaaagccaaaacaaaaagagctccaaaaaactgttgagcaaagttaagtgccttttcggaagcaaaattcgggattttgaaagcctggcttggtttttctctgggtgaaaaa

SEQ ID NO: 48419 - DNA, 482 bp, Homo sapiens
acaaaagctgggtacttggccccccctttagagtacttttagaattaattaaggcggaaatagggaataaacaacgctaagcatagttgtactatctcagatagtgatagaccaggataagaggttagaaagtgaaggtgaagtgctcttgttttcctgagtaacactcttactccagatacatatacaggtcactcaactgcttgaatttgtaaatctctggttaaatagaaaggtagcagatcagccctccttgatctctgccaacttaatatttgaacagagatttaaaggaaaaaatattacagaagtgggaatcctcaaaatactttctaaaactagctttgggctgggattataggcataagctactgcacccatctcagaatttgtctatgtttacaatattatcaatgggtagacagctaattgcacagaatataaatgaggagaggtagatttttattaatgggtacattttc

SEQ ID NO: 48420 - DNA, 473 bp, Homo sapiens
gaacaaaagctgggtaccgggccccccctcgagagtactattagaattaattaaggcgggagaaagagtgaatgagctcaaaaacagtctatttgaaaatatacagtcacaggagacaaaaggaaaaataagaggaatatggtacacttataagatctagaaaatagccagaaaacaagtaaagagagatctaggtagaaagtttatttaaagggataacagataacttttcaaacctagaaaaagccataaatattcaagcacaagaaggtgatagaacaccaagcaggcttaacccaaatagtacaacttaaagatatttaataatcagacttctgaagatcaaggagaaagaaaggatcctaaaagcagcaagggaaaagaaataaataacataaaagtagctccaacatgcctggccacagaattctttgtggaaactacaggccaggagacagtggcatcacatattt

SEQ ID NO: 48421 - DNA, 297 bp, Homo sapiens
cctcactaaagggaacaaaagctgggtaccgggccccccctcgagagtacttctagaattaattaaggcgggggaggggaaggttggtaggtaagctgtaacagattgctccagatgccttatactatgcacatagctaagtgaccaaacttcttgtgttgatttgaaaaaagtgcatttgtttcttgtccctcccttcagatgaaacgttaccctatgacgggccttttgatgtgaacagatgttttctactacaaactatcacgactaattttaaacttcaaacatatcactttt

SEQ ID NO: 48422 - DNA, 500 bp, Homo sapiens
gcgcgcaattaaccctcactaaagggaacaaaagctgggtaccgggccccccctcgagagtacttctagaattaattaaggcgggccttatgctatcgcctgaggaccttctgacaaaaagacaagactgatttcccacgtaagatataattctgccaaacgactgcgtttggacttgagatgcaacatcacctcttccccaggtccccggcctgtcagcctaccctacagattttgaacttgcaagccttcacaatagcatgagccaattcctcaaacatcaatcaaccagtcaatctgtacacacacacaccctattggccttgcttctctggagaaacctaatatactgccatactccagcagtagtattcttctataatatagaaccggtattaatataagcttagtctgtcactaaactctaccagaatgaatattcttcactctggatactgcttgaactctactccctgtgtaccctccaagcaaattaatgc

SEQ ID NO: 48423 - DNA, 465 bp, Homo sapiens
accctactagagggaacaaaagctgggtaccgggccccccctcgagagtacttctagaattaattaaggcggggaggcagagaagagaactttgtttaaaaacaaaacaaaacagaacaaaaaactatgactaaaggatagaactctacagcagacatttagtttctacaattgatgccaaaggtagaagagattttgagaggaaaaaaaaaaaatagatggataatttctaaaacaggtaaagcaaaacagcaaatatgcaaatgcaggggaaaaaatacacaactagcagcttgaaaaccccagggaaacaaacaaaaacatcatggtaattgatagtaattgaaccccggcttaaccttcctcccaatacctgataattctgtgaaatcacccagctgtcacgcttgtccttttagaaacatgacattgatttgtctagcaaagacccatcattagaattct

SEQ ID NO: 48424 - DNA, 490 bp, Homo sapiens
aaagggaacaaaagctgggtaccgggccccccctcgagagtacttctagaattaattaacaggtaatcataaaatatctatctcatttatagggtacagaaaagttaaatatatttaggttataaacaaaatatatttaggttataaacaaaaattgaggaaatattcagaaattgttgtcatgtggtataaaacagttcaaaattacttcctgggtttttcactggaaattcgagttactaagagttaaaattgtagttaatatacgtaattaaaactattaggtataagaaacaattttatatacagagcatattttaaaagatgtaaggaaagttgaaaagagactaattgtttttcccttgtacacagagatctttgtatggtcaaaatgataagggggaaaggaaagtaagtttttctcttaaggtaaaatgccaatataaaaaagaaaggtaggttgcagtgagccgagatcacgccactgcac

SEQ ID NO: 48425 - DNA, 357 bp, Homo sapiens
  misc_feature 308, 310, 311, 312, 313, 314: n = A,T,C or G
taaagggaacaaaagctgggtaccgggccccccctcgagagtacttctagaattaattaaggcgggagtagcaaatttgaagacaggacagtggaaataactgagtctgaggagcaaaaagagaaaagattgaagtgaacagagcctgtgggccctgcaggacaccatcaggctgaccagtgcacatgttgtggggtctatgaaggagaagagaaagaaaggggcagagagaatatttgaagataataatggctgaaaacgcaccaagtttaataaaagacatgaatataaacatccaagatgcaccntnnnnnaaaaaaaaaaaaaaaaaaaaaaaaagggggccccccccggggg

SEQ ID NO: 48426 - DNA, 395 bp, Homo sapiens
  misc_feature 293, 294: n = A,T,C or G
taaagggaacaaaagctgggtaccgggccccccctcgagagtacttctagaattaattaaggcggggggatcgaaaggatctgactacagtacccagcttgttatctgagatgtcccgttttcatcctaaattggactttacgctccaattacaatacaaagattatgctgggcactgtgactcacacttgtaatcccaacactttgggaggctcaggtgggtggatcacctgaggtcaggagtttgagaccagcctggccaacatggtgaaaccccatctctacaaaattcnnaaaaaaaaaaaaaaatgttaaaaaaacggcccccccccgggggggacccccatttccccttatagggggttttttaaccccccccctggggggggttttta

SEQ ID NO: 48427 - DNA, 430 bp, Homo sapiens
tcaaaggctgggtaccgggccccccctcgagagtacttatagaattaattaaggcgggggggcgggcgcctgtagtcccagctactcgggaggctgaggccaggagaatggcgtgaacccgggaagcggagcttgcagtgagccgagattgcgccactgcagtccgcagtccggcctgggcgacagagcgagactccgtctcaaaaaaaaaaaaaaaaaagtaaacctggttgaaccctcaaaaccccttttacttttatttttaaggggattccccatgggatttttttgggaaatgagtgtttttttataaaaggggtttttttcagcccttttttttaattgtgggccctccccagaaacttttatttccggcccattaatatattttgggggttttaatgggggggcccattttgggcttacaaaa

SEQ ID NO: 48428 - DNA, 585 bp, Homo sapiens
  misc_feature 75, 76: n = A,T,C or G
ggaacaaaagctgggtaccgggccccccctcgagagtacttctagaattaattaagaacatataagagggatgtnncataaacacaaaatttttcaattatttgtcccaatagaagcttatttcttctgtatgtctgtgtctacatcaaacatctttctaagaggtcacacagggacccaggttccttcttttttggtttctacctaccctacgtatttggagttctcttcgttcactggggaaagagagtagaagattccactgcagacgtattcacaggttgggctgaaagtgttacataaccctctgcccatatttttattgtgcaaaactcaatcacaaagctatatctaaacacagaggacatagttatgtgcataatgtggaactgaaataagttttaatgttcacataaaatctgttacctcacagagtcgttgtgagattggaggaaatcacgtatgtgacatgcttattacaatgcatagcatatggaggtatttaaatgtcccttttaaagaataggaaccattatataatgtttaaattgagtacagataatcccccttattttttttattaaa

SEQ ID NO: 48429 - DNA, 411 bp, Homo sapiens
aaagggaacaaaagctgggtaccgggccccccctcgagagtacttctagaattaattaaggcggggtcgggaggcctccctgtcgctccttgttcatcttgttctgactgcggggggcggccatgcccaattcctcttcgagagtgtgccccatccagacagcctgagtcttcagcaaacagaaacccttacgtcttactcataccccctcaagccgagtttccatttctcacctgtgggcagaaatgaggcagatgtgtggttgccttcatcacgtggccagaaggtaatatggctcactgggccaccccaggacctttctcagagatgctccgatacagaaagatccttcagctatggccccaggccttggtgagagacaagcactcgatggtatagttctgtccccat

SEQ ID NO: 48430 - DNA, 233 bp, Homo sapiens
  misc_feature 18, 35, 36: n = A,T,C or G
ctgggtaccgggcccccntcgagagtacttctatnnattattaaggcggggggggaaaaaaaaaaaaaaaaaaaaaaaaaaaaaaaaaaaaaaaaaaaaaaaaaaaaaaaaaaaaagaaaaacatcttaaaaaccctccccccaaaaaaaaaaaaaaaataaaatacccccccccccccccccccgagggcacacactttcttttttatttggaggccccccccccccccccc

SEQ ID NO: 48431 - DNA, 476 bp, Homo sapiens
taaccctcactaaagggaacaaaagctgggtaccgggccccccctcgagagtacttctagaattaattaaggcggggagttgactctgcttccataaccatctaattaaatcaagtgcccataatggaatttgaataactgcctaactgtgatatttaaacagaaactttgaggaaaaacaagtctctttttgtaaatatattctacttgttaagaaaaaataaagtagatcatgatgttcatctgaaaaaaaaaaaaaagaaaaaaaaaaacaggggcccgcccccggggggaagcccaaaaccccctataaggggtaaaataaacccccccctcagtgggtatttataaaaatcagcaaattgattccttcaatgcatatgtgctccagtttaattttcatttgtggacacattttcaacgcaaatcacaggtgaccttaatccaaggaaaaaaaaaattatgaaaaaaaaaaa

SEQ ID NO: 48432 - DNA, 523 bp, Homo sapiens
gcgcgcaattaaccctcactaaagggaacaaaagctgggtaccgggccccccctcgagagtacttctagaattaattaaggcgggcagaagccaagaagtggcagaacacacccagagttactactggacccactcctttcagcaccatgccaaacgcagcagccgttgccatggctgcaacacttacacagcagcaacagcctgctacaggatttggaactagctctggttttggatgcagcaccacaggggcctccacatttggatttggaacaacaaataaaccctcaggaagtcttagtgcaggctttggcagctcaagtacatctgggtttaacttcagcaatcctggcatcacggcatcagctggtttgacttttggggtgtccaatcctgcctctgcaggttttggaacaggaggacaactccttcagttgaagaaacctccagctggaaacaaaagaggaaaaagataaacatgggttgatgtgttgagagaatccatagcagcaccgttcattc

SEQ ID NO: 48433 - DNA, 345 bp, Homo sapiens
accctcactaaagggaacaaaagctgggtaccgggccccccctcgagagtacttctagaattaattaaggcgggagtggagtggaagaagagggagaggtggagcaaagtgagggccgagtgagagcgtgctccagcctggctcccacaggcagctttaaccattaaaactgaagtctgaagtttgaaaaaaactaatgaaataatataaaaaagcaactgacttactatcattaaaactgaaagcaaaaaaagtgccattttcctgaaagtttttaattatttccatagagataccaaaccccagtgattaaaaaaaaaaaaaaaaaaaatgggccaccccggg

SEQ ID NO: 48434 - DNA, 537 bp, Homo sapiens
ctaaagggaacaaaagctgggtaccgggccccccctcgagagtacttctagaattaattaaggcggggctgaagaacagggaaaagccgctgtgcaaacttataacacttgtgttcaaactaacatgtgtgacgagtgcgcctccctgtagccatctcatgtcttacgctggccatacctctgggggttccttctggcatatatacactgctatctagagtctaatggaacctaatgaaatgctgacctttcttaagctattatgactgaaaagagcatatctcgtagcatcacactatctgacatcaaagtatattacaagcctatagtatccaaacaagatgatactgatgtgaaaacagacacatacaccaatggaacagaaatgaggatcccgaaatgaatccatgtatttacatccaactgattttcaacaaaggtgccaaaaacacacactaagaaaaggactctcttaaataaatggtgctgagaaaaatggatatccatatgtaaaagaatgaaactgaatccatttgt

SEQ ID NO: 48435 - DNA, 487 bp, Homo sapiens
aaagggaacaaaagctgggtaccgggccccccctcgagagtacttctagaattaattaaggcgggcgtggtggcctgaacctgtagccccagctactcaggaggctgatgctggagacttgcttggactctgggaggcatcaggttgcgattcctccgagatcctgtcactgctctactgctgcgcatcagagggtgactttgtctccaaatacccaaaaattaaaacaaaggactttcaattaggaaccgagggattttctcttaattacaagtggattggaattggctttacaggataaaatatgaaatgataacataattgaaaagtctatggtagcatcgagcatactacagcccgcaggccaaatctggcccatctcctatttttatatggcctgtgagataaagatgtgatatggtttggctgtgttcccacccagctgtcatcttgaattgtagctcccataattcccatgtgttggggg

SEQ ID NO: 48436 - DNA, 472 bp, Homo sapiens
aaccctcactaaagggaacaaaagctgggtaccgggccccccctcgagagtacttctagaattaattaaggcgggcggatcaccaggtcaagacatcgagaccaacatggctaacactgtgaaacgatatctatactaaaattccataagattcaccgagcctggtggcgggcccctgcactcccgactacttgggaggctgatgcaagaaaacggcctcacccctgaaggcggagcttgtactgaccctagatcagatcacgaccctgcactcctgtctgtgcgacacagccagactctgtatcttgtggcacatattcaccatggaatactctgccgccaccgggaggatgagttcatgtcctttgcagggacatggatgaagccggaaaccatcattctgatcaaactatcacaaggacagaaaaccaaacaccccatgttctcactcataggtgggaattgaacaatg

SEQ ID NO: 48437 - DNA, 492 bp, Homo sapiens
agcgcgcaattaatccctcactaaagggaacaaaagctgggtaccgggccccccctcgagagtacttctagaattaattaaggcgggggaggagtagaattaggagaaatacctaaagtaaatgacaagttgatgggtgcggcaagccaacatggcacatgtatacctatgtaacaaacctgcacgttgtgcacatgtaccgtagaacttaaagtacaattaaaaaaaaaaggtaaaaaaatgtgaacaggaacagtttgttttagaaaggcttgaatggctttgattggaagatcttttagtgtgataaattaaaggaggaaaaattacatgagtatataagttggctatggaaaaaaaaaaatgaaaaaaaagcggccgccaccgcggtggagctccaattcgccctatagtgagtcgtattacgcgcgctcactggccgtcgttttacaacgtcgtgactgggaaaaccctggcgttacccaacttaat

SEQ ID NO: 48438 - DNA, 402 bp, Homo sapiens
  misc_feature 16: n = A,T,C or G
cccccctcgagagtanctctagaaataattaaggcggggaatctgatggaggttgacttctatcaaataaattggctccaaatcaccccccaggaattcctgtgcatgaaagcactgctactcttcagcattagtaagtgcctagaagtgcagggaatgccccctgagggcacagagattcatagaggaccacttttgccattaaaacattattagggaaaagccagctcctggacatttgccttcttgattccccctccccatccccactctactctctctcagcatcattttcctaacaagaaacaatttcatgactagaagccaatttatttgctagaagtcaacctccatcagattccccacctatccccattctgtctttgggacaaggcctttttg

SEQ ID NO: 48439 - DNA, 327 bp, Homo sapiens
ttaaccctcactaaagggaacaaaagctgggtaccgggccccccctcgagagtacttctagaattaattaaggcgggagggtcttcctttggcatgggatggggatgaagtaaggagagggactggaccccctggaagctgattcactatggcgggaggcgtattgaacaaaccctgacaacccgcacatgtgccgaagaactaaaagtacactcaaaaataaaaggctgatatactgggacaggaacagtttgatttacaaaggcttgaatggctatgattggaagatctttaagtgtgataaattaaaggaggaaaaattacatg

SEQ ID NO: 48440 - DNA, 472 bp, Homo sapiens
ctaaagggaacaaaagctgggtaccgggccccccctcgagagtacttctagaattaattaaggctggaacattatatattacatctgatttaatctcaacaagaactctttcaggaagaattatcctcctcttacaaataagtagaatctatctcctggtagttacaataacttggccaactttaaacaagcataaagacattatttgaacttagaaatgataaaactaatctatctgaaacaaatccaatatgcttttccactcttctactcttccccaaatagaaaagctatataagaattataaatttggagagcatcttttccttaattcccacaatccatgtggaaaaaatataatatctttaaaaccatttaaaccatgagaaaaaaaaaaaaaaaaaaaaaaaaaaggggggccccccccgggggggaccccaattccccccttaggggggtttttttccccccc

SEQ ID NO: 48441 - DNA, 455 bp, Homo sapiens
aaagggaacaaaagctgggtaccgggccccccctcgagagtacttctagaattaattaaggcggggcttgcagtgatcccagatagcgccactgcactccaggctgggcaacagagtaagactccgtctcagaaaaaaaaaaaaaaaaaaagcggggtttaggggccccccccggaaaccccaccatttgggggggccaggggggccaaataacctgaaatcgggagttaaaaaccgttttgaccaaaagggaaaacccccttttttcttaaaaatacaaattttcctcagggggggggggggtccctgcaatcccagttctttggggggctggggcaggaaaatcttttgaccccggggggcaaaggttccagggggctgaaacagcccctttgccctccacccggggaaaaaaaacaaaacctttgtttaaaaaaaaaaaatccagcccgggg

SEQ ID NO: 48442 - DNA, 467 bp, Homo sapiens
  misc_feature 317, 318: n = A,T,C or G
caagcgctcaattaactcctcactaaagggaacaaaagctgggtaccgggccccccctcgagagtacttctagaattaattaaggcgggtggatcaccagaggtcaggagttcaagaccagcctggccaacatggtgaaaccccgtctctattaggaatacaaaaattagctgggtatggtggtgagtgcctgtaatcccagctacttgggagactgaggcaggagaatcgcttgaaccagggaggcggaggttgcagtgagccgagattgtgccactgcaccccagcctgggcaagagtgagattctgtctcaaannaaaaaaaaaaaaaaaaaaaaaaaaagcggccgccaccgcggtggagctccaattcgccctatagtgagtcgtattacgcgcgctcactggccgtcgttttacaacgtcgtgactgggaaaaccctggcgttacccaacttaatcgcctt

SEQ ID NO: 48443 - DNA, 454 bp, Homo sapiens
ctaaagggaacaaaagctgggtaccgggccccccctcgagagtacttctagaattaattaaggcgggggctataatcgtaccatgggatgtacaaacgatcttgtatttaaaggcccaaaatgctgaccactctaccactgatgctcagtagttcgcacaagtctaaatctggcaagaccttgactctaatttcatataaggagaaaccgctgtctggaaagcgtgaatgacttaagcatgagatcactgacaggcctgctactgtctgttagaacaagattgtgagaatggtgaaagattgaagagtttgattagatctatttaattctgttagcagaccacaatttttgtgaaaattttaagaactattacagagcttccgtgttttatttaaaacgattaataaaaatggaaagtggtacatgagaaaatttaaagccctttgcattttaa

SEQ ID NO: 48444 - DNA, 438 bp, Homo sapiens
taaagggaacaaaagctgggtaccgggccccccctctagagtacttctagaattaattaaggcgggaggagtaagttttagtgatctattgcacagcacgaaaatcacattattaataatgtatttgtatacttcaaaattacttagaggagatttcaaaagttttcaccacaaaaaaggaaatgaggtgacagatatgtcaattaacttgatttaattattctgcaaggtatacatatatcaaaacacgctgtattccataaatatatataattattatttctcaattaagaaatttaaaaaaatcgttcctactttaaggcaatgacatccttatacctaaattttttaaaaagcatatgattaatatattgagatatttgcatgcctgctttttcaagttaagaatgtaattcttgaaggtttattaatttgtct

SEQ ID NO: 48445 - DNA, 439 bp, Homo sapiens
  misc_feature 359, 360: n = A,T,C or G
tactaaagggaacaaaagctgggtaccgggccccccctcgagagtacttctagaattaattaaggcgggatgagtgaacagaagaaatcttgggctttgattgggtcggaaagaaagtgtggccctacccactttgatgccatctctaagacctactgctacctgacccccgacctctggaaggagactgtattcaccaagtctccctatcaggaattcactgaccacctcgtcaagacccacaccagagtcttcgcgcagaggatccaggctccagctgtggctacaacatagggtttttatacaagaaaaataaagtgaattaagcctgataaaaaaaaaaaaaaaaaaaaaaaaannggggggccccccccggggggggcccccattcccccctttggggaggttttttccccccccccccgggccggtttttaaa

SEQ ID NO: 48446 - DNA, 497 bp, Homo sapiens
  misc_feature 411: n = A,T,C or G
accctcactaaagggaacaaaagctgggtaccgggccccccctcgagagtacttctagaattaattaaggcgggcggatcacgaggtcaggagttcgagattagcctgatcaacatggtgaaatcccgtctctactaaaaatacaaaaattagccgggcatggtggcgggcgcctgtaatcccagctactcaggaggctgaggtaggagaatcgcttgaacccgggaggcggaggttgcagtgagccgagatcgggccattgcactgcagcctgggtgacagagcgagactctgtctcaaaaaaaaaaactaaaaaaaaaaaaaaataataaaaatattcggggcccccccgaggggggaccccaagtgaccctttgggtgtaccattgaacacccccacatgggcgaagntgtataagagagcaagggaacagggcggatacctgaccaactcgtgatcctagacatgaagcatggagtggaggcgaaaaattacg

SEQ ID NO: 48447 - DNA, 608 bp, Homo sapiens
aaagggaacaaaagctgggtaccgggccccccctcgagagtacttctagaattaattaaggcgggaacacaaaaactatccttgctagggaaacacagccctggaacaaaccccctggaccccttgtcaccaccagcccatcctgtaagaaaatgatggttgaagctgcagtgacagaattggagagatgctctgttagacaagtctgtcagctgaaaggggcagaaaccattgttgaactgcttatatgagaggaagacctgggtggcacaggcctggctggacgcagggctcacagagcgtcatcagcacttcatctcttcccctgcgggacctgctgtcctctgcgttgcacacaccccccgccaggctcatccctgtatcctccttggaggaaagtgccaggctggtgctacttggccctgcctgggtcacacgcctgcctcgggatgtggaggatggtcagcccagccacagcacatggattgctatgtgaaggatgatgttccacaagaaaaccaggacggcttcaccagggaggcaagagcagcagatgcccatgacagaaggtgtatactctgaataaaagaatttggatttttaaaaag

SEQ ID NO: 48448 - DNA, 377 bp, Homo sapiens
  misc_feature 307: n = A,T,C or G
taaataaagggaacaaaagctgggtaccgggccccccctcgagagtacttctagaattaattaaggcggggggaacatcccagccttgtcaacataatgagaccatgtctctacaaaaatttaaaaaattaaccaggcatagtggcatgcacctgtagtcctagctactcaggaggctgtgacaggacgatcacttgtgcccaggagttcaaggctgccgtgagctgtgattacaccactgctctccaacctgagtgacagagtgagaccctgtctcaaaaaaaaaaaattaaaaaaaaaaaaattnggccggaattaaaaaaaaaattcccggacctgataattgccccaggattttaaattttaccaaaaaaaat

SEQ ID NO: 48449 - DNA, 466 bp, Homo sapiens
aaagggaacaaaagctgggtaccgggccccccctcgagagtacttctagaattaattaaggcggggtatggccgggcacgcggtggctcacacctgtaatcccagcacttttggaggccaaggcaggtggatcacaaggtcaagagatcgagaccattcgatgacctaggaccaccagcacacaccaccatgcttggctaatatttttatttagtagaggcgaggtctcactatgttgcccaggatggtctccaactcctgggctcaagtgattctctcaccttggcctcccaaagtgttgggattacaggcgtgagccaccatgcccagcctagatggttccttttaagtgcatatataatgttcactaaaaaaggccatataattagctataaaacaagtctcaaaaaatttaaaatgattgaattcaccagagtatatttttctaacccactggtaagctaaa

SEQ ID NO: 48450 - DNA, 462 bp, Homo sapiens
gaacaaaagctgggggccgggccccccctcgagagtacttctagaattaattaaggcgggcagatcaccaggtcgtgagatcaagaccatcctggctaacgcagcgaagctccgtctctgctgggaataccaaaattatcctggcatggtggtgggcgcctgtaatccaaactacttgggaggctgaggaaggacaatggtgtgaacccatgaggtggagcttgcagtgggccgagattgcaccaatgcactccagcctgggggacacaacaggactctgactcaagataaaatcccttgtgaccgtggatcactacaataacctggggcccccccgggggggtgtgcatatccccttggacaaagctgtatacacccccgatgtggcccgagatgctgctcttaaacgcaaggcccgactggaggccaaggtcaagtttgaagagagatacaagacaggca

SEQ ID NO: 48451 - DNA, 499 bp, Homo sapiens
agggaacaaaagctgggtaccgggccccccctcgagagtacttgtagaattaattaagggggatggtttgagcctgagaggtcaaggctgctgtgagctatgattgtgccactgcactcactccagcctgggagacaggtcaagaccctgtctcaaaaaataaaataaactaaaataatttgacataatactccttataccattaccatggcaactatgggatgtcttagaagtgttgaaaagcataaccatacttatattttcagtttacattctgatatagaaaaattctttatgaagctgtatttaccataaagttgtatttacagctaagagggaacatattaatttacatgaaaaacaggaaattcatttgcctttcctaagctaaataatatacatttaatatcaggccttaagaagatgtgttaaaggcattagtggacgacagaatacctttttcaaatggaaatgtactgtgtggatcctgagtttaaat

SEQ ID NO: 48452 - DNA, 486 bp, Homo sapiens
ctaaagggaacaaaagctgggtaccgggccccccctcgagagtacttctagaattaattaaggcgggaggtaggggagtggaggaactctacagtggagaaaactgataaacattatttcaactggatgatcaaggtcagtatcactagttacaaatcaggttgatagtaggtacccttgttatgacatcatgaaattgacactttacctctgtgatttacctcccgcaaatacatgactccagtctaatcatgatgaaaacatcatataagtcgcaatagggcagcatcctacaatatatgtgaggagtactcctaaaacatttcaaggtcatcaaaaacaaggaaaaactgagaaactgtcacagccaagaggtgcccatggaattatgacaactaaatgcaatgtggtatcctgtatggaatcctggaacagaaaaaggacacttggtgaaattaagaagatctgagtaactatggactttgg

SEQ ID NO: 48453 - DNA, 488 bp, Homo sapiens
ctaaagggaacaaaagctgggtaccgggccccccctcgagagtacttctagaattaattaaggcgggacgccgcttacttaatgagctctcgccatcggttcattcgttcattgacctgatatccctcgagaagttttatttttggggaacttgtagacgtatcaaagcatttatagctcctgacctaagaaccttattttttgtccatttaccttatacttccaactatcttcatgatctctgcgcgatgagagtatcactattgtgccctatatacgactctttttggtaataacaaacgtgttttttccaaaagcctggtgtttctcaatacgcctttaaaggtttttaaattgccccatatctggtcaagttgatatttttaagaacttcatttttaatttgtaataaaagtttacaacttgattttttcaaaaaagtcaacaaactgcaagcacctgttaataaaggtcttaaataattgtct

SEQ ID NO: 48454 - DNA, 429 bp, Homo sapiens
  misc_feature 330: n = A,T,C or G
ccctactaaagggaacaaaagctgggtaccgggccccccctcgagagtacttctagaattaattaaggcggggtgtggcagcgcacgcctgtaatcccagctactggggaggctaattgcttgaacaggagaattgcttgaacccgggaggtggaggttgcagtgagccgagattgtgccactgcattccagcctgggtaacagagcgagacttcatctcagaaaaaaaaaaaaaaaaaacaaattatcccgcccccccccgggagagcccacattcccccctttatgaaggttttttcccccccccccagggccgttttttaacatagnctgttgaatctgattctgactatgccaagcaagaaatccaagtttgaaatatcaattgaaactgagatgaagaaagagttcaaactggagagaacaccc

SEQ ID NO: 48455 - DNA, 540 bp, Homo sapiens
ataaagggaacaaaagctgggtaccgggccccccctcgagagtacttctagaattaattaaggcgggaggatcgattgagcccgagatgtcgaccctgctgtgtgcctcgattgtgccactgctctactacctgggcaacagaaccgacactctccgctaagcggtgggtcagcacgagtcagatagataccatgaggctggctattaagactgacgaaagcagtacaggccgaatgcaggcaacatctggaacacggaatagacactaacgcacattctgccatggcgcctccagaaggaaccagccctacctacccagattttagcccacgcagatcatgttaggcttctaatcaacagaactataaaacaataaatctaaggttatggtggttagttacagcagcgctggaaaaccaacacgggcagcactgacacaagtcccagcacttctccaacgcccaagagctgttctctgtctcccttccacaccctccatttgccttcactcatccccccgaaccaatatatttatgggc

SEQ ID NO: 48456 - DNA, 505 bp, Homo sapiens
  misc_feature 350: n = A,T,C or G
aagggaacaaaagctgggtaccgggccccccctcgagagtacttctagaattaattaaggcggggggtgcagtggctcatacctttaatcccagcactttgggaggccaaggtgggcggatcacctgaggtcaggagtttgagaccagcctggccaacatggttaaaacctcgtctctactaaaaatacaaaagttagccgggtctggtggcgtgcacctgtaatcccagctactcaggaggctgaggcaggagaatcgcttaaacccgagaggcataggttgcagtgagctgagattgtgccactgcactccagcctgggcgacaaagcaagactttgtctcaaaacanacaaacaaaaaacccacatacacactataaagatgggtgggattacaggaaggcagatgcagaccctgaagcctgcgatggagctgattttgtatttccagcattaacaagttcctctcatgttcttccatttgctcacagacctcccacagccc

SEQ ID NO: 48457 - DNA, 414 bp, Homo sapiens
  misc_feature 400, 402: n = A,T,C or G
accctactaaagggaacaaaagctgggtaccgggccccccctcgagagtacttctagaattaattaaacttgtccgaatcctcctataacttggtaattttaggcaatatagtctcccctcagtgttcatgagagattggctccaggacacccctcataccaaaatccttggatactcaaatcccttatataaaatagtgtattatttgcatataacttatgtaccttctcctgtatactttaaatcatctctagattacttataatattaatggtaaaaccacaattacttctgcaccaacctaataatacaatgtaaatgctatgtaaatagctgttaaactgtattgcttcttaagtttggattatttaattgtatatatatatatatatatatatntntttttttttttc

SEQ ID NO: 48458 - DNA, 383 bp, Homo sapiens
  misc_feature 11: n = A,T,C or G
ccgtcgttttncttgccgtcgttttccacacaggaaacagcgtatgaccatgattactggccgtcgttttacacacaggaaacagatatgaccttgatgccgtgacccggtttcattttttgcagagatccaaactgataaatgctttatttcattacaattctgcatataagtagcaaagaaaattctgtatgccaaaaaaatcctttgttgtttaacaaatgttcattagacataattatttcccagcctcatgcccctgatcatattctgtctttctctgccctgctctgtgctccgtcccctagggactacatcatccagactcaggctctttggctgaacattttattcatccaacgggaggtatcaaaaggaggtca

SEQ ID NO: 48459 - DNA, 422 bp, Homo sapiens
aaagctgggtaccgggccccccctcgagagtacttctagaattaattaaggcgggatgggacagggcacgggctctcagaaaataaactgctttattggaaaaaaaaaaaaaaaaaaaaaaaaaaaaaaaaaaaaaaaaaataaaaacaaaagaaaggggatagtacgccccgggggcgcttacatggtgaccccaacactctacctatgggattaaacttccccaaatacatgactccagtttaatcatgatgaaaacatcacataagtcgcaatagggcatcatcctacaatatatgtgaggagtactcctaaaacatttcaaggtcatcaaaaacaaggaaaaactgataaactgtcacaaccaaaaggtgcccatggaattatgacaactaaatgcaatgtggtatactgtatggaat

SEQ ID NO: 48460 - DNA, 437 bp, Homo sapiens
ggaacaaaagctgggtaccgggccccccctcgagagtacttctagaattaattaaggcgggagggtcagtaaagaaaaaagccaaaaatgatagtcagggtttgggcttgaactactcaaatggttaaacaaaaatgtttggtattttgcaggttttttgtttttgtttttgaaaggacaggtgaatttattaggagtgtattaggagtttattactttatggtaaagacagacacaaatcagtttggacaagttgaatttgaggtgttttgggggaatcaagacagcaataggtgctagaaataaggacaatgaaaatacacagagcaatgtgttctagagccatgaacctgggacttacgatcacattacaaggaaatgggtaagttcagccaaaaggggacccaggaagaacatatacaggtaggcaagaaacc

SEQ ID NO: 48461 - DNA, 515 bp, Homo sapiens
accctcactaaagggaacaaaagctgggtaccgggccccccctcgagagtacttctagaattaattaaggcggggctgtaagaaagataggagatcgagctcttaccatctagctacgtgccatgctagccgcactgcatcctacgctcttcactcacctaccaatcgcgacgggaaccggttcctcgacccaatataactgctggtacgaatatatggcacaacaccacttatactacctggctgtggcacaagataacaccaccatattatacaacgactgacataacggaaatctgtattgatcacatatggggcacatataatatttcggttgaaaaaaccaaacctcctaaagaagcacaactggcaagagtcttatacacgcaactatagctttgcatcaccagtcttgtatcccaagaaaagccaagtgctacaaattgataggatacactatgatactttctaaataaactcttattttttgtaggtgattaaaataatttgaaagc

SEQ ID NO: 48462 - DNA, 374 bp, Homo sapiens
gggtaccgggcctcccctcgagagtacttctagaattaattaaagcgggtgggggtggaataaaatactatttttactgccaaaataaaaaaatatataaaaaaaaaaaaaaaaaaaaaaaataaaaaaaaaaaaaaaaaaaaaaaaagtctactttaaaactacctaagacacgtgtatattataatttattatgtgactgttacattcacatacttacaacaattatttcaaaacttcatttttcggcatattccataaaacttaatttattaaaaataaacatgagtgtattttttaaaattgatttttctcttcatttttttttcaatcaactttactgtaatataaagtattcaacaatttcaataaaa

SEQ ID NO: 48463 - DNA, 477 bp, Homo sapiens
  misc_feature 400: n = A,T,C or G
actaaagggaacaaaagctgggtaccgggccccccctcgagagtacttctagaattaattaaggcgggagctaccagcgagggtgtcagggacccgttgggagcatttgggtgggggccagtggggttgtagagagctggaactcacctgcttttaatacatgtgacttctagtgagacacatgcacccctgacccaaggaacatgcggggaaaagaggagccactggctcctttgcgatgttatttattttctcgctctgcagatgtttattgaacatttctgaaaatgaatatatcccaattgaaacagctggggccccccccctgggggaatgcaaactagcctatttgagaaagtttttccgcgcccgtgtctgctgaagttataaaaaacccttnctaaaaatgaaaagtttgtttcatatagtgagagaacgaaatctctatcggccagtcagatgtttctcatccttctt

SEQ ID NO: 48464 - DNA, 478 bp, Homo sapiens
aagggaacaaaagctgggtaccgggccccccctcgagagtacttctagaattaattaagggggatgatacaagtaaatctggaaaatgtttcattattcttttaattctaatatataatccaatattaacattatttaaattctaagtcactggctctcaaactttttggtctcagaacttcttttcactcctcaaaattaagaacccccaaagaggttttgtttatgtaggttatagattgagttcgaatcctgctctgctaccatcatttgacattaaaactgagattgaatgccacatgcacggtttgttaaatctaaaaatacataaatgaggccaggtgcggtggctcatgcctgtaatcctagcactttgggaagtcaaggtgggtggatcacctgaggtcaggggtttgagactagccttgccaaaaaaaggtgaaaccctgtctctaccaaaaaaaaaaaaaaaaaaaaa

SEQ ID NO: 48465 - DNA, 519 bp, Homo sapiens
  misc_feature 381, 467: n = A,T,C or G
gattacgcctagcgcgcacttaaccctcactaaagggaacaaaagctgggtaccgggccccccctcgagagtacttctagaattaattaaggcggggttgactcttccagtgagggcagaaccaagctggcaggatgggaggacggtgtacctgctgctcagagcccacaaggctctactctgacagccaccaagcaggacagaacagctcttgtcaccaggtccctccggctgaggcgccgtgtcaccatgagaatagtgctcacagcccacgcatggtgtgtggctcctggattggctcatggggcgggatgggacacggcacgggctctcacaacataaactgctatattgacacctggatgggaactatgaaatgtncatgggtccccccccggggtacctgtgatcttgcctaaaatagcggcacttttttccccctctctgcctgtgtttttaacaacaantgcacaaggacagggcgtgtatgtatctgccttatttatttatttatttttg

SEQ ID NO: 48466 - DNA, 458 bp, Homo sapiens
aaccctcactaaagggaacaaaagctgggtaccgggccccccctcgagagtacttctagaattaattaaggcgggagggggaggggagtggtcggaggaggggataagagggaacaacgggaaggaggggaaggaggaagggcagaagggattaataacaaaatagtgctaccaaaaggagaaataaagtttagcatgctagttacaaagacatgatgatgttcatgaggtagtaaaaatattatctgtgtatttaaaaaaaaataaaggaagcagctgtgtaaatattttaactttttccccccaaaaaatgtttatatgctgttctgaggatagaaataatccaagctggggcaatgtgttaaccccctataaaacacacacacacatatacacaggcacacacaaaatgaagtgccttgaatctcttcatccttcccctttttgattcgaaacat

SEQ ID NO: 48467 - DNA, 493 bp, Homo sapiens
cgcaattaaccctcactaaagggaacaaaagctgggtaccgggccccccctcgagagtacttctagaattaattaaggcgggcgcctgtagtaaggagctactcgggaggctgaggctttgataatggcgtgaacccgggaagcggagcttgcagtgagccgagattgcgccactgcagtccgcagtccggcctgggtgacagagcgagactcccaaaaaaaaaaaaaaaaaaaaaaaaaaaaaaaagcggccgccaccgcggtggagctccaattcgccctatagtgagtcgtattacgcgcgctcactggccgtcgttttacaacgtcgtgactgggaaaaccctggcgttacccaacttaatcgccttgcagcacatccccctttctccagctggcgtaatagcgaaaaagcccccaccgatcgcccttcccaacagttgcgcaacctgaatggcgaatggaaattgtaagcgttaatattttgttaaaa

SEQ ID NO: 48468 - DNA, 466 bp, Homo sapiens
aacgggaacagaagctgggtaccgggccccccctcgagagtacttctagaattaattaaggcggggacaaacccggaagcggatcgcgtggagtgaaggtcacgccgcggcgcgtgagtttccctttgtgtaaattaatctgcgcttcccaactcccccgcgcttctgtacccgggatctgaggggccacacagaccttgaaatcctcgcaccgctccctctaccccgaccaaattcaggcgtctccgtgagagtcaggcggtcgcttccctgtgtgtttaaatcgctcggcggcgggtcctgtcccccgtccttctgccacagggccatgtagtcacctcctgtcgcggagttttcctgtttcaagtccttcagtgatgcttacatccgccccgcacagcgtaaagtcctcccccgctaggcggattccggtctatgcggtcccccaagcctcgcctttgttggc

SEQ ID NO: 48469 - DNA, 403 bp, Homo sapiens
taaagggaacaaaagctgggtaccgggccccccctcgagagtacttctagaattaattaagggggaggttttgaaaaaaaggtacagaattgaactgatgcctgaatgacacgaatctagcaggaagaagtgagggatacactgttgtgaacagaggtgtaaaatacacggatatggttgaatatgagaaggctggagaaagactgggggcactgagaacataacaccatctgtaaaggagtgaagtattatacgtcataggtgaacagtgaaaatacataagaacaggttcgaattctattaagacggtaatggaaactattggttggcacaagagtgacatgagcatatccacactgtagaaatgtttacttgcagttatgtgtgatatggatgacaggca

SEQ ID NO: 48470 - DNA, 456 bp, Homo sapiens
cctcactaaagggaacaaaagctgggtaccgggccccccctcgagagtacttctagaattaattaaggcgggatggaatggatgcacctactataaagcattttgtgagatatcttgttaaacaaaaaatgcttttcttgcaaaaaacaaaggtcataccactgccaatttgtctcataaaatgactctacgctgtctcttattcctaaaaaatcctgtttatataaaaaatcagtccatgaaaaaaatttcaaaatgtttttcgtatattctgttgtaagaacccattcctgttattgcgatatactctggattctttacataatggaaaaaacaaactgtctattttgaatggctgaagctaaggcaacgttagtttctcttactctgcttttttctagtaaagtactacatggtttaagttaaatacaacaattctgtatgcaaaaaaaaaaa

SEQ ID NO: 48471 - DNA, 402 bp, Homo sapiens
  misc_feature 199: n = A,T,C or G
tcactaaagggaacaaaagctgggtaccgggccccccctcgagagtacttctagaattaattaaggcgggcacctgtaatcctagctacttgggaggctgagggagaagaattgcttgaacccaggaggcagacattgcagtgagcagagatcgcaccactgcactccagcctgggagacatgtgagactccatctcanaaaaaaaaaaaaaaaaaattttcctttaccgggccgggcccgggggttcaccccggaatccctaccttttggggggcccggggcgggggaatcttttgaacccgggatttgaaaaccccctggggaaaaaaagggaacccccgcccccttttttttaaaaaaaaaagggaaaaaaattttcccccctaaaaaattaggggggg

SEQ ID NO: 48472 - DNA, 501 bp, Homo sapiens
taaccctcactaaagggaacaaaagctgggtaccgggccccccctcgagagtacttctagaattaattaaggcgggtggattagctgagtttaacgagtttaccaagagtttaagaccagcctgactaacatggtgagaccctgtctctgttaaaaatacaaaaaattaactgggtgcagtggcgcgcacctgtaatcccagctactcaggagactgacgcgggaaaagctcttgaacccaggaggtggaggttgcagtgagccgagattgcaccactgcactcctagactgggcaacagagccagacttcatctcagatctataaaaggtatttgaaataccttaccggggccccccccggggaggaacaatcttcccgattggcttcgagtggttgcatccgacaaggagacctactaacttcgtacttcagattagtcaagatgaagatgaatcagagtcggaggactaggcaaaggctccccttacagggctttgct

SEQ ID NO: 48473 - DNA, 405 bp, Homo sapiens
aagggaacaaaagctgggtaccgggccccccctcgagagtacttctagaattaattaaggcgggggtctagttctgcatctgctcaaagatcttgttcgttcaattttcgtagccgccctgctgctgacccatgacataccactcgaccatgttctgggttgacatatatcaggaccgttgatatctctgaagtgaagatggatgcataattccgacatgactcaggatatgaagttcatcatcaaaaattggtgttctttgcagaagacgtgggttcaaacaaaggtgcaatcattggactcatggtgggcggtgttgttatagcgacagtgatcgtcatcaccttggtgatgctgaagaaaaaaccgtacccatccattcttcatggtgtggtggaagttgac

SEQ ID NO: 48474 - DNA, 523 bp, Homo sapiens
ctaaagggaacaaaagctgggtaccgggccccccctcgagagtacttctagaattaattaaggcgggccctgggccgatggtggagcggacctgcgcatgagctatgcatgcacttaccctgcgagtacaagaagagcacgggcgggggcttgcactaatggcgcagctgatgcaaagacctctgtggctcgctactacatcgtcgcgcattgacaatgcgacgactgagccgcgcttcggctggggctgcgcacagagtgccagtgttgggggaacatatagttctatttattccttgggacaaattgaattatgtaacatgcccatagagggggcgaaataaatgtttgctccctcccttaactatagctaataaacaggatagaattttatgcagacgttcagaacttagcatactaattatctataggaatagagaataagtgaaaaaagcagaagacaattatatatctctatctgagcaccattgttggaactatgtaaatactctgctttcagata

SEQ ID NO: 48475 - DNA, 516 bp, Homo sapiens
ctaaagggaacaaaagctgggtaccgggccccccctcgagagtacttctagaattaattaaggcgggagctctgaagctaatatgggtcaactgagttgcttagcatttgggctgaaatgtccagacctttatatttctacctagatgggtctctggatatgggctatattcaaaaatatatgatactgggcaaagtgtcagtgcctgaatggactgaaagctgaatgctgttatctgacagcacttgtagtatctgggacaagacatctttctgtgtagaggaagtggtgtcaatgtgcattgtccaccacatatgctgtccaaggttcactgcagccaccttccatttttctatctgctatgatgctggattctacatacttctataatgcttgcactgaatattactattcctcaaactaaattactgttcactcccaactagcatagacttagcatgttataatctgaattcctcttaaatatgcccagattaaaatatgtttaaattcctt

SEQ ID NO: 48476 - DNA, 393 bp, Homo sapiens
accctcactaaagggaacaaaagctgggtgccgggccccccctcgagagtacttctaaaattaattaaggcgggcggatcacaaggtcaggaaatcgagaccattctggctaacacggggaaaccccgtctctattgaaaatacaaaaaattagccgggcgtggtggcggacgcctgtagtcccagctactcgggaggctgaggcaggagaatggcgtgaaccctggaggcagagcttgcagtgagccaagatcgcgcccctgcactccagcctgggtgacagaacaagaatttggctcaaaaaataaaataaaatatttccccttggtgtgtaccgaacggtgatttgaacccagcaatattagttcggcgccccgcttcgggtgtgggtca

SEQ ID NO: 48477 - DNA, 478 bp, Homo sapiens
  misc_feature 329, 332, 333: n = A,T,C or G
caaaagctgggtaccgggccccccctcgagagtacttctagaattaattaagccggggcaacagagtaagaccttgtctcaaaaagatatatatatatatatttaatttaaaaactggctcatccaggaaacacattgaagggctgatcacccagtgttgtgagccctctcagaagtcataaacctctggagagagaaactgagacatgtaagagggtggaaaccattcagtggtggcacattgtggagtcctgcccacaagcagcacgtgatgatccaccacacagaaactctaagccacagctcagtttctccttttaagaagaaancannaaaaaacaaataaaaaaagcggccgccaccgcggtggagctccaattcgccctatagtgagtcgtattacgcgcgctcactggccgtcgttttacaacgtcgtgactgggaaaaccctggcgttacccaacttaatcgccttgca

SEQ ID NO: 48478 - DNA, 439 bp, Homo sapiens
cgcaattaaccctcactaaagggaacaaaagctgggtaccgggccccccctcgagagtacttctagaattaattaaaatgttaacaggattaaaaagtgatccattaccatttcttcactgctatgtgcaaggatcatcttctttgtctaattcaccttcacagggacacagtgtagtggttaagtgtataggctctggaatcagactgccagttcatagccaaggcattatcagttatggcgtgaccttgggccaataggtacacccccctgtgactcaagttcatctgtaacataagggcttcctatgtctcaaagggttgctgtgaggattaaatgaataaagccctttatgacagtgctcattacacagtaagtgctcaattaagttttttgtaatgccacaaaatatgaacagttgaatcttttctgaaactaa

SEQ ID NO: 48479 - DNA, 458 bp, Homo sapiens
ggaacaaaagctgggtaccgggccccccctcgagagtacttctagaattaattattgcgggagaatcggttaaacccgggagttgaaggccgcactgaattgtgttcttgccactgcattccagccagggtgacagggaggctgtcttaaaaaaaaaaaaaaaagggccggccgcgggggttaacccctttaatccaacccttttggaaggccaaagggggcgatttccaaggaacccaaattataaccttcttggttaacacaggaaaccccttttttttttaaaaaatccaaaaatttacccgggtttgggggcttcccccggaaatcccatataatctggaggctaaggcaggaaaatcttttgatccaaaaaggcccaggttgcagggaaatagtcccaccgccttttaccctggggaaaaagggaaaattttttaaaaaaaaaaaaaaaaaaa

SEQ ID NO: 48480 - DNA, 473 bp, Homo sapiens
gcaatgtaaccctcactaaagggaacaaaagctgggtaccgggccccccctcgagagtacttctagaattaattaaggcgggatgaaaggttttgccataacgggtcccttgccgtaggagtgtgcagacttgtggccctggattgtatccaacgctggcagatttgcatgattctccagtgatatttgtgaaggatagacagaggctgcccagacttctgagaaactgaagtggtatactctggccgcaccacgggggggggccatttcaacacatgggggggggttacattgatgcctaaattgccattttttttaaaaaagctgtgcaatgcctggtgtcagagactagacagtcgctattcataatggctgttgcaattccttcatgaatagatcgaggagtcgcttcccaagtcaatcgtcgcctatgaccatttagctcaagtcggtaagcaaaattttcagcttgc

SEQ ID NO: 48481 - DNA, 474 bp, Homo sapiens
acaaaagctgggtaccgggccccccctcgagagtacttctagaattaattaaggcggggcacagaattggaagatgctggaagtacaacacatgggccttcagcttttgcacaggagtttcacagagacttctcgacagcctattactacccaagacaagttcttctagggctggtccacctcctcaaccccctgacattatcccctaacccctgtctttagatttacagtccaatgcttcactcagccattttacctcacccccaataaaaaaaaaaaaaaaaaaaaaaaaaaaaaaaaaaaaagtgaaacttaaaaagcggccgccaccgcggtggagctccaattcgccctatagtgagtcgtattacgcgcgctcactggccgtcgttttacaacgtcgtgactgggaaaaccctggcgttacccaacttaatcgccttgcagcacatccccctttcgccagctggcgta

SEQ ID NO: 48482 - DNA, 658 bp, Homo sapiens
aaagggaacaaaagctgggtaccgggccccccctctagagtacttttagaattaattaaggcgggatcaatagtgatgttttaggatcagttctcctatggtaatttcactaaatgcctatttaatgaattgatttgatttcatacatctctaccacttactagaactgtctttgtacaaacgtcaaactttcctgttacatatgggtaagcgtagaagcacttgatataatttttttttatcttggttcatagtgtagaagtggtctgttgcttttcctaaaattgctatacatattttttctttaagagtgatcatttcaggtaccctattatgtacagtggtaaaaagtaaactcgttatgatagcaacgacgatgtaaccaaaataagcaacacttaattggtctgaaagttatacatataagctttattattgcttcagtggaagttgtctatgcattctgtgctttgttcagccattaaacaactgggtccgtgatcttcttcaaggggccgtgaagtccctaaaattgtatttaaacattagagtggctgcattttaagggagatagtacatagtcaaatatccaaaatggacctgtgtcctaatagaaaattaagaaccacggggtaaaaacacgtaaaccatacttttt

SEQ ID NO: 48483 - DNA, 505 bp, Homo sapiens
cctactaaagggaacaaaagctgggtaccgggccccccctcgagagtacttctagaattaattaaggcgggctctttcccgtgatgttctcgtgatactaagtttcatgagatctgatggttttataagggggagttcccttatacaagctctcttgactgctgccatccatgtacaatgtgactttgctcctccttgcctcctaccatgattgtggggcctccccagccatgtggaatgtaagtcaattaaatctctttcctttctaaattacccagtctcggatatgtctttatcagtagcgtgaaaacaaactaatacaaggagtcattatattagtggtgatataaattggtataactactttgggaagcaatttggcagtaactagtcaggttgaagactggccagccctataactcagcaatcacactcctagatacataggctatgcacatccatgtctatgagcaataagagtgttcacatttgtgtggcagtgttt

SEQ ID NO: 48484 - DNA, 446 bp, Homo sapiens
  misc_feature 333, 339: n = A,T,C or G
gggaacaaaagctgggtaccgggccccccctcgagagtacttctagaattaattaaggcgggaggcgttgctgattctcgattaaacaatagtgacgagacgcgtgcggggcgcctgcgagccccttcctgccacgccggggcctccaccgcctggtcctgagcctgaccgggccattcccaaatttgggacgcggaaggagaggctctcggagcagaagaggccagataccctgaagcataaagtgtacgtcaaaagtttacatggagaaggcggttacgttctgaagcgtggtctgctgtcccctgggcgtgaggcctcctgggcctgtcnggcctncgatttcatcctcagcacgtaatgctcaccaacagcacttgcactgagttgactcttgcacactcttgactccataatatgatgctttttaagatgtgtgttcacac

SEQ ID NO: 48485 - DNA, 444 bp, Homo sapiens
atgattacgcatagcgcgcaatgtaaccctcactaaagggaacaaaagctgggtaccgggccccccctcgagagtacttctagaattaattaaggcggggtgaggtaaatattctataattgattgccacattggttacacaactctttgagtatatttaaaaaacactgatatttagaatactttaaatgaatgaattatgtgatttgtgaattatatcataatttagctgtttaaaaaattctaattactagaaccagaaatcaaagtcatgtttaacaactcactattatgaggccttgattttgaaagctaccaattttagaattgaatctactctgaaactgttcagagtagattctacttgtttgattaatacttgttgcatctccttcggcatgaaatgaaacctttaaaattcagttgtaaaataaaaaaaaatca

SEQ ID NO: 48486 - DNA, 473 bp, Homo sapiens
accctcactaaagggaacaaaagctgggtaccgggccccccctcgagagtacttctagaattaattaaggcgggggggagagagaaacctttgcctgaccctgcctccccgattgtgcgctctgagcgccacagagtgcatccggtgctgtctcttttgcttgattttcgatagtatgagactcactcactgcacttctgctcagccggcttctgcatcgggatcacacagccatcagcccgactgcccagttggtgagcacactccattgaccacgtggcgccagcgcttcctcaatgcacatgattgagaggaaagaaagttctcttagatgttactgcttttgctcagactttgcaaaaaaaaaatatatatatatatatgtataaatatataattattaatcacttttgcccttgaaaaagtcttgaatgaacagaaaatttattccattgcaatatttgattgtatag

SEQ ID NO: 48487 - DNA, 504 bp, Homo sapiens
ggaacaaaagctgggtaccgggccccccctcgagagtacttctagaattaattaaggcgggaaagctgcggcacagcccgctttaaacgcaagcttttgggacttctggttttggctttttctttttaagccaagttagggagaaggctgactgccatggagccacttctgcttttggcccagacaatttacgggattttttttttcctcccatttagagattttttgtaggaagttaacaaattattttaaagaagtagttagagcttgtcagataaaatacaggacgcccagttaaattggaatttcagataaccagtgttttggcatatgtgtgttacatatatttttaaaattgtttatctgatattccaatttaactgcacattctcaatttttaatgactgtatctggcaaccctatcaacctttacccctggaaatccaaactggttatgacaaaagtaaggaatggagggaaatgaaaagcatgttttaccctaac

SEQ ID NO: 48488 - DNA, 431 bp, Homo sapiens
taaagggaacaaaagctgggtaccgggccccccctcgagagtacttctagaattaattaaggcgggcggatcacgaggtcaggagatcgagaccgtcctggctaacacagtgaaaccctgtctctactaaaaatacaaaaaaaaaaaaaaaaaatttccccaaatttgggggcggggccctgtttccccactttttcagggggttaaaccagaaaaagggcttaaccccggggggtaaattttgcatgaacccaaaatcgcccccttgccctccacctggggaaaaaaaccagaattctttctcaaccaaaaaccagggaaaaaaaattaccctcccccccttttaaatggcctctcaaaaaaaattgggggggggagggatttcaaaatcttttaaaaaatttttttttgacagggccaatttttccccc

SEQ ID NO: 48489 - DNA, 462 bp, Homo sapiens
gggaacaaaagctgggtaccgggccccccctcgagagtacttctagaattaattaaagcgggagccaggttaagaactctgaggatttctgcattctagaaagtcagcattcatttcttggtcaaatcttgcttttcttctgagagggctcactttggagtttatttgtgcggatttatgttttgggggtgtccagagttagtgaagtaacccaaaagctgctgcctttgatgtggatgtaaaacattctattgggtgatatgaaatcggtcttttattgagactgggcctttgctaatttacagaaagatttttcaataaataaagaaataaaggctgcactctctttattatttgtttttaatgcttattcatttatttatttcgagatggagtctcaaaataaataaattagttaaaaaaaaaaaaaaaaaaaaaaaagggggcccccccccggggggg

SEQ ID NO: 48490 - DNA, 351 bp, Homo sapiens
accctcactaaagggaacaaaagctgggtaccgggccccccctcgagagtacttctagaattaattaaggcgggaagttgagaaccgctgtgggcacctcaggactgagtctggttaccctgctgatccaagaaatgaagccatctaaaattttgcctgctttcacaattttctgtgtgtgtgtgtgtttattaaacaaagtgaactaagaagccttttattggagacataatgtactcacagtagtttcaaaatcaatggtgtcactcttcaggtaaattactccaaggcttgggcctagtgcagatgttcattggggcagggagcagagagcggctgcatctagatcag

SEQ ID NO: 48491 - DNA, 373 bp, Homo sapiens
actaaagctgggtaccgtgccccccctcgagagtacttctagaattaattaaggcgggggatggaactccgattgaaagcaatagctggagtggagcacgaatttcaacaagccgcatgttgaagtgtgaggcgtgaaagggtatgtctgatatttgctttaaaatgctccaccaaataaattaagggatggatgaagctaaagaaccaggtatggtggctcatgcctataatctcaacactttgggaggccgaagcaggcagatcacctgaggttcaggagtttgagaccatcctgaccaacatggtgaaactcgtctctactacaaacatataacaattagctgggcgtggtaccacgcacctgtaatccc

SEQ ID NO: 48492 - DNA, 482 bp, Homo sapiens
ctaaagggaacaaaagctgggtaccgggccccccctcgagagtacttctagaattaattaaggcgggacaataaaataaaagacatcaagaatgaaaaagaaataaactgtctctcttcccatataacatgatcttgtataaagaaaatcctaaggaatccactaaactattagaactccaataggttcagtaaggttgcagaatacaagatcaatatacaaaaattgtatttctatatacttgcaaaaaatccaaaatttaagaaaactgttccatatatgatagtatgtgatacagtttggatgtttgtcccctccaaatctcatgttgaaatgtaatccctactgttggaggtggggcctggtgagaggtgtttgggtcatggggccagatctctgatgaatggcttgttgctgacctcttgatagtgaatggcttcttgtgagatctggttaagagtgtgtggctcttcctcctctct

SEQ ID NO: 48493 - DNA, 196 bp, Homo sapiens
ctcaattaaccctcactaaagggaacaaaagctgggtaccgggccccccctcgagagtacttctagaattaattaaggcgggaattcaatggaatcatatcttcagtgtgtttccaaggaacagtagacttttatagacagaaattaaaaatgatattttttcagaataaatattaactacccaaaataccaaatt

SEQ ID NO: 48494 - DNA, 508 bp, Homo sapiens
cactaaagggaacaaaagctgggtaccgggccccccctcgagagtacttctagaattaattaaggcgggggatggaactccgattgaaagcagttgctggagtggagcacgaatttcaacaagccgcatgttgaactgtgaggcgtgaaacggtatgtctgatatttgctttaaaatgctccagcaaagaaattaagggatggatgaagcaaaagagccaggtatggtggctcatgcctctaatctcagcactttgggaggccgaagcaggcagatcacctgaggtcaggagtttgagaccatcctgaccaacatggtgaaactcgtctctactacaaacataaaacaattagctgggcgtggtaccacgcacctgtaatcccagctactcctctggaggctcagacaggagaactgcttgaaccgggaggcggaggttgcagtgagctgagatcgcaccactccattccagcctgggcaacagagtgagactccatctcaaaaaaaa

SEQ ID NO: 48495 - DNA, 603 bp, Homo sapiens
tgattactgcccgcgcgcaatcaaccctcactaaagggaacaaaagctgggtaccgggccccccctcgagagtacttctagaattaattaaggcggggcactatcgctagacgggacggggagcgcgtccgcatgtctacttttcctgaccctactccgcacacccacaatattatgctgacatatctgcttccaaatcgatgtgctttagcaccatcactgtaacattcctgattctgaatatagaatgaattgcttgggctttctgcaacctaaaatgctgccccaactatactatatctatgaggcagtgtgctgaaagcctccgtgctgctggatctttggggggaaatacaggatccttcaccactgaggtgtttaagatttgcaactagcaatgcaattttttctaaatatggggatatttacctttattaagaaattatactaaacattgatgtccttgatcattttatgttctcatattacttttgattctactatgattgtgtggtggtgaacaaagatcattacaaacaaaaactgtaattttgttatatttgattcaatggaatttacctaaaaaataaagactaaaaatgt

SEQ ID NO: 48496 - DNA, 439 bp, Homo sapiens
caattaaccctaactaaagggaacaaaagctgggtaccgggccccccctcgagagtacttctagaattaattaaggcgggagagcacgttgactggagtttctcttgagggcaataaaagttgtcatggtgtgtaaaaaaaaaaaaaaaaaaaaaaaaaaaaaaaaaaaaaaaaaaaaaaaaaaaaaaaaaaaaccgcctcctccccgaagaaaaactataaattcaattttaaaaagtatgaaccacaccaaaaaagaccctctttgaaacaaaaagctaagggcaaaatgtacaaacttagaaaaaaaaaaaattaaaattgtaattttctggcccgccaccgggggagacgccccaactccttttgaaagagccataaataggcccccccaggtgggggttttaaaaaaaaaaactttattaaaccatataaaaaa

SEQ ID NO: 48497 - DNA, 449 bp, Homo sapiens
taaagggaacaaaagctgggtaccgggccccccctcgagagtacttctagaattaattaagggggcgccaccgcggtggagctccaattcgacctatagtgagtcgtattacgcgcgctcactggccgtcgttttacacagggccagaccctgtctcaaaaagtaataaaataaaatgggatagtatttgcatataacatagcactattcttctatatactttaaatcatctctaggttactcataatacttaatacaatatgaatgctatataaatagttgtcatacttattttttatttgtattatttgttatagttgtattgttatttttatgttttatttttcaaatatttctgatccttgatgggctcaatctcaggatatggaacctgctgataaagggggactggctgtatttatgtgcatcttattcagacaccccctaac

SEQ ID NO: 48498 - DNA, 484 bp, Homo sapiens
  misc_feature 328: n = A,T,C or G
cgcaatgtaaccctcactaaagggaacaaaagctgggtaccgggccccccctcgagagtacttctagaattaattaaggcggggcggaaagaaacaattgtccatcccaggaaaaacagccaggctttactgacaaagggaaccatcagccttagtacaaagtcataatgaacactgactatagtttcatcagcaaattgccatctaattgcatagaaagtccattggaaaggaagagtgagaggtatagagacctgaggcctcatctgctgacgtaggaagctgcagttactccccaaaatcttaatacaaaaaaggaggtaataantttgcgtccctcgccggcggtgtaattctcaaaccaatctggagattgtacaataccccctgttctggataaaggtaaccattgatttaggaggaaattcctaaagtctactggcagttcagttgtgaagaacctaactacagtgtaataaatgat

SEQ ID NO: 48499 - DNA, 388 bp, Homo sapiens
agggaacaaaagctgggtaccgggccccccctcgagagtacttctagaattaatgaaggcgggcaggatagttcagacggtttctatttcctgagcgtctgagatgttagtttagggcatcttagagttgattgatggaaaaagcagacaggaactggtgggaggtcaagtggggaagttggtgaatgtggaataacttacctttgtgctccacttatgccagatgtgttgcacctttcctgagatgctaggatctactttaataccacactctcgttaataaattgaataaaaggggatgttgtggcacctgatataatccgccaagctatgtgacagtaggagagaatgagaacccctatcaagcccagatgcactggtctgactt

SEQ ID NO: 48500 - DNA, 488 bp, Homo sapiens
taaagggaacaaaagctgggtaccgggccccccctcgagagtacttctagaattaattaaggcggggctttatggataagagagtgaagcataggcagtggattctcatgagtagtctcccgtgcttccacattaaggactaaatgttggccagtggctgtgctcaggccccgtcttccacatgtggatgctagtgaggcaggggtgctttcttgctgtgtatattcacatttcagagtccctcatagcttccagaggactctgctgtgtgaacctcacatatctctattttatagtttttcagattactttgtaaataattattgtatctttaatctcctcttttatcatggactgacatttaacgtagctaattgaaaaggtcatagctgagattcctggttcgggtgttacgcacacgtacttaaatgaaagcatgtggcatgttcatcgtataacacaatatgaatacagggcatgcattttgc

SEQ ID NO: 48501 - DNA, 443 bp, Homo sapiens
aagggaacaaaagctgggtaccgggccccccctcgagagtacttctagaattaattaaggcggggagaggaggctctcaataaataatcgtgtaaccttaaaaaaaaaaaaaaaaaaaaaaaaaaaaaaaaaaaaaaaaaaaaaaaaaaaaaaaaaaaaaagaaaaaagctaaacggggggatctcggggaagagccttaaaagcaacattaatcgctgttggatcgggctctaaaggaaagggtgtataaattcaaccagttagcgtgaaagttggagataaagttcttctcccagaatatggaggcaccaaagtaattctagatgacaaggattatttcctatttatagatggtgacattcttggaaagtacgtagactgaaataagtcactattgaaatggcatcaacatgatgctgcccattccactgaaattctgaaa

SEQ ID NO: 48502 - DNA, 591 bp, Homo sapiens
aaagggaacaaaagctgggtaccgggccccccctcgagagtacttctagaattaattaaggcgggcggatcacgaggtcaggagatcgagaccgtcctggctaacacagtgaaaccctgtctctactaaaaatacaaaaaaaaaaaaaaaaaatttccccaaattggggggcggggccctgtatccccactttttcgggaggttaaaccaggaaaaggggggaaccccggggggtaaactttgcatggacccaaaatcgccccattgcactcaacctggggcaaaaaaaaaaaacttattttaaaacaaaaaccggaaaaaaaaaattagcctccccccactttaaatggcctctaaaaaaaaattggaggggggagggattccaaaatcttttaaaaaattttattttgacatggacaatttttcccccccgaaataaacaggaaacttggggatttgtcctaaaagtataaccccaaatttaaaatcctaaggtatttggcctaaaaaaaaaaaaccctaataaactgggttttcaaccctaatttttaaaaaaaccacaccttgaacccttgcccacttttccccaac

SEQ ID NO: 48503 - DNA, 547 bp, Homo sapiens
caagcgctcaattaactcctcactaaagggaacaaaagctgggtaccgggccccccctcgagagtacttctagaattaattaaggcggggctggaggagaccgcagataagtatttttcccttcgaaagatagagatcaatacaacttcttaaaaaatatagtcaatgggttactaagatattgcttagcgttaagtttttaacgtaattttaatagcttaagattttaagaaaaaaacataaaaaacaaaattaaaaaaagcggccgccaccgcggtggagctccaattcgccctatagtgagtcgtattacgcgcgctcactggccgttgttttacaacgttttgactgggaaaaccctggcgttacccaacttaatcgccttgcagaacatccccctttccccagctggcgtaatagggaaaaggcccgcaccgatcgcccttcccaacagttgcgcagcctgaatggcaaatggaaattgtaagcgttaatattttgttaaaatatcggtaaaaatttttggtaaatcagctcattttttaac

SEQ ID NO: 48504 - DNA, 574 bp, Homo sapiens
aaagggaacaaaagctgggtaccgggccccccctcgagagtacttctagaattaattaaggcgggaagaatacataccacttgatcactcactggcctcatcatccgggccaggacattcagtaagtcttgtctcttgaggaactgaaaaaaatgagagaagtaagtaaatccaactgcaactcctacttagtataaaaaaaaaggccttgaaggagaatcaaatgcttcatcaaatatactttacgacacatttgccagttagtataaatatcacttttagacctcattttaagtcaaacatgaagggataagatgctgaattggggggctgggaatcacaactggacaaaattaagggaagatatatatcgtacaagaagtttcctacttaccctcagctggataagcatgccctcacagcacactcgaccagaacaccacaggttatagatgtgctcattctcctggttcaactttcctgtgcttgtggcttctttgttagttccatcatcccctaggggtaaaaccacttaatgtgactcaacagaaaatgtcaaggccgggccgggggt

SEQ ID NO: 48505 - DNA, 523 bp, Homo sapiens
taaagggaacaaaagctgggtaccgggccccccctcgagagtacttctagaattaattaaggcgggcagacttcacatgtaattcttctactgtcgttacaatttcctacactaatcctaaattccgtggagtttttattacattggttggtggcattagcctgtcaacagctggatgagatagaagttagaaaatggactttttgaggtcaggaagctaagcaaccagaagaaccaatttgtcaacttaaatcatctggggaatggaaaaaattattccacaatgtgggaaataaaagaccgcctggagctactggtttttgtttttattttctttttgttattcctctttgcacttcccttttccgagcagcattatgtgtgggttatagaaagcttacatgttgactttgttatgtggtcatttgatgtggtcgcgctaacgtttattgtaaatactgtgagtatttttcacccttctggcttaattacctgtggccacatcaacctgaatgtatttgag

SEQ ID NO: 48506 - DNA, 500 bp, Homo sapiens
tcactaaagggaacaaaagctgggtaccgggccccccctcgagagtacttctagaattaattaaggcggggataactgactagcaccattatgatcaccagtattgtggctggaatggaagaagatcaccttggtgttccttgtttggaagattatttcctctgaatttctgggcttggtcttccagttggcatttgcctgaagttgtattgaaacaatttaatgaaaatattaaatatttggtttcacaaggcgaaaccttgactctatacaaatccataaagagtgacagaaatagtaaaaattaagatacttttttattttaaacattattttaaaggtatttatttaaagcaaaaaaataccattctattttggtttttctaacatttgtgtatgtaaaagacatagaaaaatagcataaaggcaggaagaggagaaatggaaatatacagctttaaggtcattgtgtgtgaaataggataattatacaaataaac

SEQ ID NO: 48507 - DNA, 473 bp, Homo sapiens
accctcactaaagggaacaaaagctgggtaccgggccccccctcgagagtacttctagaattaattaaggcgggcgtgctggcgggctcctgtaatcccatctactcgggagggtggggcaaataactgttcaaacctgggaggtggaggttgtattgagctgatatcgtaccactgcattccagcctgggcgacatagtgagactccttctcatatcaaaccaataccggacttgttgccgccccccgccgggtgagttatctgtttccctcctttaggttcgaaacctggacctgctctattattacactgtacaaaatgttagccccaaaagttgtcatttcgctgttttatttcgactgacaatctaatcattgctgtctattctcgggcatctttgaatctccaatgaagagtctttgttgttctgtctacgttagcagactttcctgccagtgtcagaaaatcctat

SEQ ID NO: 48508 - DNA, 443 bp, Homo sapiens
acaaaagctgggtaccgggccccccctcgagagtacttctagaattaattaaggcgggtgcttgtagtcctggctactcgggaggctgaggcaggagaatggcgtgaacccaggaagcggagctggcagtgagccgagatcacgccattgcactccagcctgggagacagagcaagactctgtctcaaaaaaaaaaaaaaattacctgggcatgggggcccatgcctgtaatcccaattactcaggaggctgaggcaaaaaaatcgtttgaacccgggagggggagcttgcagtgacccaaaatcgcaccactgcactccaccctgggggacaaagcgagactttgtcccaaaaaaaaaaaaaaaaaaaaaaaaaaaaagggcccccccccggggggggccccccattcccccttaaggggggttttttccccccccccccgg

SEQ ID NO: 48509 - DNA, 404 bp, Homo sapiens
ctaaagggaacaaaagctgggtaccgggccccccctcgagagtacttctagaattaattaaggcgggttgggtgggattttttccctttttatgtgggatatagtagttacttgtgacaagaataattgtggaataatttctattaatatcaactctgaagctaattgtgctaatctgagattgtgtttgttcataataaaagtgaagtgaatctgtctaaattttttctcgatcctggaacaggggggctccacactggggggggggcaaatgcccttccagatggtgcttgagggccccccctgatggccgatggtcggaatagcataggtgaccaacaagtaacaaatcctgagaatgttttaattgttggacaccatattctcaggagtggactttcctt

SEQ ID NO: 48510 - DNA, 523 bp, Homo sapiens
  misc_feature 195: n = A,T,C or G
aaagggaacaaaagctgggtaccgggccccccctcgagagtacttctagaattaattaaggcgggtggctgtagtcccagctacttgagaggctgaggcaggagaatggcttgaatctgggaggcagagcttgcagtaagccgagattgtgccgctgcactctggcctgggcaacagagcaagactccgtctcanaaaaaaaaaaaaaaaaaaaaaaaaaaaaaaaatttttttttttttttttaaagggggcaaaaccttttggggggaaaaattttttcccccaaaaggttgcccaaaaaagggggccccccggggggcccttttttttaataacccccttttttttttttggccaaaaaaaaaaatttttttaaaaaaaaaataagggggtttttttttaaaaaaaaaaaaacttttgggggaaacccctaaacccccccttttgggggccccgggggggagattttttaaaccccggggtttaaaaaaaagggtgcccaaaaaaaaaaacccccttttt

SEQ ID NO: 48511 - DNA, 442 bp, Homo sapiens
  misc_feature 8: n = A,T,C or G
cgggaganggggaaatttgttattaaactgtcataggctagcatcccagttactacagatgtataataaaccgtcacacacttagttgccagtatttgtgttcacagattttgtgagtcaaggattcagaaagggcacagcaggaacagctttgtaactccatgatgtctggggtttcagttgggaaaactcaaggttggaatcaacagttggtcagtggggtcatttgaagcggccacactatgatagccacaagtggctactgagcagttgaagtgaggccagtctgaatggagactagtgtgttgattgaaaataggactgtaagtataaaatgtgcatcagatttggaagactttgtataaaaaaagaaactaaactatcttaatggtttttatattgattatattttaaatagattaaactcaatgtattaaaattg

SEQ ID NO: 48512 - DNA, 519 bp, Homo sapiens
taccctcactaaagggaacataagctgggtaccgggccccccctcgagagtacttctagaattaattaaggcggggatcttttattcctcttccctataaaataaaggccttggaaatcacaattttattttttttaaagaagttgttttagtgcctagagtaagaccgcatcaaatgttgttaaagaacctaatttagattgtgtggtatataccactgtttatctcaatacacagacacctcttacttcttgttataagtgagaactctaaagaaaaatcaaactcccaagttttctgtaaacatacgtggtcttaatagggtcactgtctgaggcaaaatgggttgtcttaaagcaattgctacaaatttgcatcaaagaaactagatagcaaaatacaacaaccatgtaccacccaggcagaagagtcctcacctatacgcagttctgcatattgatcatcatgacaggaagtatttcgttttttaactgatcccaggtgcacagatgtattcat

SEQ ID NO: 48513 - DNA, 479 bp, Homo sapiens
aaccctcactaaagggaacaaaagctgggtaccgggccccccctcgagagtacttctagaattaattaaggcggggaagggtgcatacctgtattacctgacggacctggtgcctacgcacccaaacctaactatgcttaatcatgatcatccttccacggttgttaatgttgcatgatgaaacattcatttttaccttgctgatgctgatgctgaagagtgaaatgttgtacacagcctgatttctatgtggtcataaacactactgcatcatttgatatttattgatggtaataaatttgaatactcctatttcttactaacctggaatgggacccatacgaagtgtcactagtgacgctagaaatgctcccccgcaccacaagagatcctaacatgacccgaaagagttgaactgcttgacgcctactgtagattgatgccaacagctgaggttgcctgccatttcaagaaaaatg

SEQ ID NO: 48514 - DNA, 617 bp, Homo sapiens
aaagggaacaaaagctgggtaccgggccccccctcgagagtccttctagaaattaattaaggcgggagaaatatgtatatccaaatccaggaaactctggagttccacatagataaaatccatacggtcctctcctcgacatataataatcaaactgtcagaagtcaaagagaattctaaaagcagacaaagtgccttgtcacatgtaagggtatcttcattagattatcaacggatttctcaccacaagccttgcaggttagtacagaatggatggtatagtcaaaatgctgaaagaacaaaacctgtcagctaagaatactgtacccagcaaagctatccttcagaaatgaacgtgaaataaactctttcccagacaaggaaaagctgagataattcatcaccactagattggcctaacaagaaatgattatgctgagtcctacagcaagaagtgaaaagcaggtaattactgtcatgaaaacatcagaaattataaaactcacagatagagataaatttgtaatcaaactcgtaatactccaatactatgatgatgctgtgtaaatctttcagacctcaactctgaaggttaaaagtcaaaatagtaataacta

SEQ ID NO: 48515 - DNA, 472 bp, Homo sapiens
ctaaagggaacaaaagctgggtaccgggccccccctcgagagtacttctagaattaattaaggcgggagatcatggtgggcctgaccaggggcttggtggtgtccaaagatggtcaggtgctacaatgatgggacgtaggcgccagtagtggattgtttggggaaccatatttcatgctaaagattgttgccaggatttcctgacagactggatatggggtgtgagagaacgccggggtcaaggttgagtttgattgttactgaaattattaactccttttaaaaaacactactgcctttcccaatcctaccaagtatgggatgctagattaaagaaatttcttcaggcccattgcagtggctcatgcctgtagtcccagctgtttggtaagcagaggtgggagtatcttttaagggcaggtgttcaagaccagcctggacatcacagcaagatctgctctttacaaaaata

SEQ ID NO: 48516 - DNA, 516 bp, Homo sapiens
cgcaattaaccctcactaaagggaacaaaagctgggtaccgggccccccctcgagagtacttctagaattaattaaggcgggaggtttattactgaatcatgagatctgttttaatatactgaggggcttatatttccagagtgattagatataaattactggtaggtaaaaaacagttaagtattaacttcagggagaaaaaaaaagctgcacaagaatgaaaataaaatcacagcatattccatggcttatctaaagctttaataatacttacacagccataataaaagtaattattgagccaatcaaaagttatataactacagtaaaaagatgtaagggatcattatttcatgttgaagtggtgagaggtggtaggaatgcaggcttttcaagaaggtatttctaagaatttttaagcatttgctcttaaatatgaggaacagtaaatgatcccaaggcatctgaagaaacatcaaaataaaacactaaactaaggggaaaatcaaatgaaa

SEQ ID NO: 48517 - DNA, 487 bp, Homo sapiens
aaagggaacaaaagctgggtaccgggccccccctcgagagtacttctacgcaattaagtaaggcgggggtaatgaaggcgggtgagtataagctaaatccacatctgttgctatacaagcgctcagaagatcagatagaactgaaggaaaagcagttgtcaactatgagggtggatgtgtgcagcacagaaactctcaaatgctgaaaaggtaatgcttacatccttttagagtaagtcagattttctttccatatgtgtcatatttccagtaatcatactggtttacctcataaggagatccttgggtaaaaagcagttgtggcacctctggtttcccaggtagttatttcatgcatataaatttcataagtaaattctgttgttctcatttctagaactttcttggtgtactaggttatatatagacagttgtatttcacatgtatggttaattggtatgggtatgctctttaatgaaggcactc

SEQ ID NO: 48518 - DNA, 475 bp, Homo sapiens
aaagggaacaaaagctgggtaccgggccccccctcgagagtacttctagaattaattaaggcaggagatttgggaggagccagggatggaatgatatggttgggctcagagttcccacccaactctcatcttgtagctcccataattcccatatgctgtggaagggacccagtgggagactgttgaatcatgagggctagtctttcccatgctattctcctgatggtgagtgggtctcatgaggtctgatggttttaaaaatgggagtttccctgcacaagctctctctctttgcctgctgccatccatgtaagacgtgacttgttccttcttgctttccaccatgattgtgaggcctctacaaccatgtggaactgttaagttcattaaacctctttcttttgtaaattgcccagtcctgcgtacatctttattagcaggatgaaaatagactaatatatgcacactaatccat

SEQ ID NO: 48519 - DNA, 466 bp, Homo sapiens
ggaacaaaagctgggtaccgggccccccctcgagagtacttctagaattaattaaggcgggagaattgtttgaacccagaaggcagatgttttggtgagctgagatcgcgccattgcactccagcctgggcaacaagagcaaaatctgtctcaaaaaaaaaaaaaaaaaaaaaaaacttgtgtaattgagttgtgagctgaactaggtccgtttttcatggaacactttttcttgaaagaatgaaagacatgcttttgttattcagacttcagtatttggcttgctgcactccagcctgggcgacagagcaagactgtctcaaaaataaaataccatgttttgagttttggtttaacataaaaaaagattatccataatttttttaaaaggctagttaagtaaaacagttggaagtgggaaggaacaaagaaatgtataactgggtatgatgaattaattgaaaca

SEQ ID NO: 48520 - DNA, 422 bp, Homo sapiens
aagggaacaaaagctgggtaccgggccccccctcgagagtacttctagaattaattaaggcggggtaaggagggtggtaaaaagggaaggatgaggctcccccaatgtcacattaaattcatggttttcattcaaggcaaaaaaaaaaaaaaaaaaaaaaaaaaaataaaaaaaaaaaaaaaaaaaaaaaaaaaaaatataggccactaaataaaccaaaacaacttaagaagaaatcacttaaatacctctggcttccaaatttcttcatgcaaactattgaaatgtatgctaattgaacatgcaaatggggaaaaaaaaatgtagaatgattcttgctatttttagcacaaaaaaaatgtctgttttccaaagataatgttatacatcctattttgcaatttactttaaaaaaaaaaaaa

SEQ ID NO: 48521 - DNA, 498 bp, Homo sapiens
ctaaagggaacaaaagctgggtaccgggccccccctcgagagtacttctagaattaattaaaacagtgagaaacaggcacatgaagagagaactcatcaatggaagagtctggaacacacccaaataaacatatcagaaatttatatatttcacataagcctggaaaaactagatttaactaatgaacccaataggcttcctatttcactccttagaccaaataagttccacgtaaatttttaaaaaaatgaatgtgaagtcttcaaagaaaaaaaaaagcctattaatattaagagttttagaaaaaacaagggaaaatgtttcttatctcaaattggtgaaagcctttcaaactataaaaaaagattaactggacaattaactattattgtggaaaatacagcataaatgaaaattcataaaaatataagctatgagctaatttccaaatatacaaagagcccctgcattaagtaaaaaaaaaaaaaaaaaaaaaa

SEQ ID NO: 48522 - DNA, 494 bp, Homo sapiens
taaagggaacaaaagctgggtaccgggccccccctcgagagtacttctagaattaattaatgcggggactgatagacggagctccatgaattctgtataccattgccttattgccatgctggagtagggtggacactgtgggaactttagactggtcggttcatggaaaatattgtacatactaccgtctgggtcaatactatgtcatacaaataacattttcatgtttatactgcaacataacagattgaggcttccagaagtttgtccactagaggggtccacgcggaacaaggtctgctgaccacagttacacacgtcgtgacgccactgtatcacggcgaatgtccgaacactagagttacagacgacaggcaacaagaacatgcagagccggccgccagccagctcctacgccccgtgcccgccttaattaaagcggggatcggggcaagagaggctgagtacggatgggaaactattgtgcacaagtc

SEQ ID NO: 48523 - DNA, 475 bp, Homo sapiens
agggaacataagctgggtgccgggccctgcctacagagcccttcttcaagagtacttctagaattaattaaggcgggtggatcacaaggtcaagagatcgagaccatcctggccaacatggtgaaaccccagctctgctaaaaatacaaaaattagccaggcgtggtggtgggcgcctgtagtcccagctactcgggagactgaggcaggagaatcacttgaacccaggaagcagaggttgcagtgagccaagatcgtgccgctgcactccagcctgggcgacagagcaagactccgtctcaataaacaaacaaacaaacaaacagacacccgacagtgctccttatcatcaggaggaaactgctcaatggcaggaatcacccctggcagatagtctctcccaatgaagctcatgtttctctctcatttggtctgagaggctggaggaggatcagccctatgaagagtaaacttc

SEQ ID NO: 48524 - DNA, 469 bp, Homo sapiens
  misc_feature 347: n = A,T,C or G
taaagggaacaaaagctgggtaccgggccccccctcgagagtacttctagaattaattaaggcgggagcagtttgcgtgtttgggttttttaattgagatgaaattcaaataacctaaaaatcaatcacttgaaagtgaacaatcagcggcatttagtacatccagaaagttgtgtaggcaccacctctgtcacgttctggaacattctgtcatcaccccgtgaagcaatcatttcccctcccgtcttcctcctcccctggcaactgctgatcgactttgtgtctctgttgtctaaaataggttttccctgttctggacatttcatataaatggaatcacgcccgcntgaagaaaaaactggacaccaacagagatggacaaaaaaaaaaaataaaaatcccgccccccccccggggggggaaccatcgcccccccatgaggggttttttaacgccgccccttcccgga

SEQ ID NO: 48525 - DNA, 478 bp, Homo sapiens
ctaaagggaacaaaagctgggtaccgggccccccctcgagagtacttctagaattaattaaggcggggcggtgtggctacctgctgaccattgggcaattgaatacgtgtggccagggcctgatccagtgatgtgcatactatgatgccaaggctgaaacccatgaacttatcgcacgtgggatgactccgaatgggcactaacgtactcaaaagataacatggtctcacgaacacctctgtcatgtagtactagcatgtctccctacgctagatttgggatgaaatacttaatgatctttccattggaaataactggaagtgaagaggttttgttgcttgtacagtgtcagatgaggaacaccactatcttaattttgtgatacactgcatttgctggtgctatttttatacagtgaagcaacagctttgcagcaaaataataaaatacttcttcgttaaaaaaaaaaaaaaaaaaa

SEQ ID NO: 48526 - DNA, 520 bp, Homo sapiens
aaagggaacaaaagctgggtaccgggccccccctcgagagtacttctagaattaattaaggcggggggtgtaacagtatatataggaagattatcaaaaaactctttggctttagaaggaaaaccactagtctaataattgtctctaaatgtgcaggtgacaatcaggctgccatatctaaaatgttactgtctgacatcaaccaaaagatgccaggaaaccgttgatagttaaactcaaactgcaagaaaatattaatgctattcccaaaacacagcacagctcatcacaaaccagggtcacacgaaagccacagtcagctactggtgttattcagtctctttatgccaattaaaataaattgcctaggtttgttgtaatagttaagttctgggtttaaaaaaaaaaaaccaggaagttgtcacattaaggcgtaaaataggactgcaaaaatcagctttgtgcgcaaatgaaagaaaaagatgccttaatatgttaaagtgcagttcctttttgccta

SEQ ID NO: 48527 - DNA, 480 bp, Homo sapiens
accctcactaaagggaacaaaagctgggtaccgggccccccctcgagagtacttctagaattaattaaggcggggggtgtgattccgtcctgcgcggttgttctctggagcagcgttcttttatctccgtccgccttctctcctacctaagtgcgtgccgccacccgatggaagattcgatggacatggacatgagccccctgaggccccagaactatcttttcggttgtgaactaaaggccgacaaagattattactttaaggtggataatgatgaaaatgagcaccagttattctttaagaacggtcagtttaggggctggtgcaaaggatgagtttgcacattggtgaatcagaggcaatgaattacgaaagcagtccaattaaagtaacactggcaactttgaaaaaatggttgtacagccaacggtttcccttgggggctttgaaaataacacccaccagtggtcttaaagttga

SEQ ID NO: 48528 - DNA, 470 bp, Homo sapiens
ctaaagggaacaaaagctgggtaccgggccccccctcgagagtacttctagaattaattaaggcgggggaagcgaggcttgttaaagctcatcgaaccgctcttaccgggagttcagattgtaccccttgtgagatgattattatgctagtggcaacgccttagcagttcgcgtcctctaagcagaatatgcttgaagttgtccagcccgtgcgcaattatgagaatgactgcaccagtgaaactgggaacggcctgcgaagctatgcttctacattgaccgacttaaacaaggaaaatgcttcgaacattgaaaaaatccttgtgctaatttcgattgggccaacttctagaggcaccaatgccttcttagtgtggaatcatttttctgccctttagtcgtttttgttttgtagaaagtatctctcaaaatatattatagctagaattgtagaactatgttatagtcca

SEQ ID NO: 48529 - DNA, 492 bp, Homo sapiens
ttggtacgcgagctcggatacacacgtagtaacggccgcgcatcgtgcggcaattctggacagatcttgtagatatgacattacagtgggcagacgatcaaacatgcatgactaaggcccaataaaacttctggagagttgagcagggggcctctgcacccaccttaccaagtcttgaactgaacacccatcaacacacgcatgtgaggaaactacctgaggccagggaaataattacctgaaaggacggcagagaacaatattcagaccttacacaggaacaggaataatttctgttaccagcaaccataataggaaacctcgttatttcaaggaaattgggtagagtactcagaaacatttacctctgtggtaaagaaaaataaccccagacttaacgctgtgccggtcccgcctaaaaatgcttaaaagcaagacccaaaaggatcaaactgtttccaagtaaccagtgttccagaacaaagttcaaga

SEQ ID NO: 48530 - DNA, 439 bp, Homo sapiens
accctcactaaagggaacaaaagctgggtaccgggccccccctcgagagtacttctagaattaattaaggcgggatcgggggtatgctgttcgaattcataagaacagggaggttagaaagaattactacaatgcagctagaacgtgaaaaggctcttgaacataagaatcgaatgtcacgaatgcttgaagacagagatttattcgtaatgcgactcaaagctgcacggcagtctgtttatgaggaaaaacttaaacagtttgaagagcgattagcagaagaaaggcataatcgattggaagaacggaaaaggcagcgtaaagaagaacgcaggataacatactatggagaaaaaaaaaaaaaaaaaaaaaaaaaaggagggggcccccccccggggggggccccaaatccccctttggggggggggattaacccccc

SEQ ID NO: 48531 - DNA, 287 bp, Homo sapiens
aagggaacaaaagctgggtaccgggccccccctcgagagtacttctagaattaattaaggcggggggagaggggaaaggggccaatttcatcatgctcagatgggcaattcgtggttagcagtggtggagataggctcactttgaactcctattagctatttgacatctgataacttgactcaaccgctatgaccaaaagcacccctcccccaaaggagttgcttttcattgacagtgccccaaacctggaaggaagggcccctgagtgcccccagaggtcaccctc

SEQ ID NO: 48532 - DNA, 567 bp, Homo sapiens
taaagggaacaaaagctgggtaccgggccccccctcgagagtacttctagaattaattaaggcgggcgcctgtagtctcagctactcaggaggctgaggcaggagaatggcgtgaacctgaaaggtggagcttgcagtgagccgagatcacaccactgcactccagcctaggcgacagagcaagactccatctcaaaaaaaaaaaaaaaaaaaaattttggttcccccgccaaaataaggaattggcggggcccttgacccccttttttttggaaaatttccccctttgggaaggggttcttttccccaaggccgggttttcccttggttttgggaaagaaaaaaccgggttttgattttaacggcctattggcaaaagggacttgccttttttaaaaaaaaaatttggactggggacttttggattaaggccaaaaagaataaaaaattttggggacttgtgggaagggctaaattgttttaaaatggggaaaccttaaatttgggaagggccccccgctaaaaaaatagggtggggtggggccccccccaaaccttttttttaat

SEQ ID NO: 48533 - DNA, 542 bp, Homo sapiens
  misc_feature 480, 482, 483, 506, 507: n = A,T,C or G
tgattacgcctagcgcgcaacgtaactcctcactaaagggaacaaaagctgggtaccgggccccccctcgagagtacttctagaattaattaaggcgggcagatcacgaggtcaagagatcaaaaccatcctggccaaaatggtgaaccctgtctctactaaaaatacaaaaattagctgggcatagtggcacgcgcctgcagtcccagctactcaggaggctgaggcaggagaatcgcttgaacccaggaggcagaggttgctgtgagccaagattgcgccactgcactccagcctgggcaacagagtgagactccatctcaaaaaaaaaaaaccccaaaaaacccggggcccctggccgggcccattgctcacccctgtaatgccaccactttgggaggccaaaatgggcaaatcatgaggtcaaaaaatcgaaaccatcctgaccaacatggtgaaaccccatctttactaaaggtnannaaaaaaaaaaaaaaaaaaaaaanngggggcccccccccgggggggaccccaatcccccc

SEQ ID NO: 48534 - DNA, 406 bp, Homo sapiens
ctaaagggaacaaaagctgggtaccgggccccccctcgagagtacttctagaattaattaaagaggccgaatttttgctgcttaagtcatctaaaagctgatacttgagctgtgtgcccagagatcatgcatttagattgatattattgccataaaatacatggttataataaaacataagaactaccatttcagaaaaaaaagataaatttaaaccatgaaaagtaagaagcagaagaaaaaagacaagctaggaaacaaaaagctccgggcaaaatgtacaaacttacaagaaaattggaagaaaaaaaaaaaccccccccaaggggagtgggggcccccccgggggggggcccccattcccccttttggggggggttttcccccccccccttgggccgttttt

SEQ ID NO: 48535 - DNA, 293 bp, Homo sapiens
cctcacttaagggaacatatgctgggtaccgggccccccctcgagagtacttctagaattaatataaggcggggggtcaggtaagcttttttttttattttttcagctgtttgcttttgcttgttatatcaatcagaaatcctgcactgaaaggtactatatttgctagactctagacaagatattgtacataaaagaatttttttgcctttaaatagatacaaatgtctatcaactttaatcaagctgtaacttatattgaagacaattagattcataataaaaaattatga

SEQ ID NO: 48536 - DNA, 413 bp, Homo sapiens
ctaaagggaacaaaagctgggtaccgggccccccctcgagagtacttctagaattaattaaggcgggtgatggtggctatgatggtggggatgatgaggctattgttttttgtgaattcttcgataatgtgcattcctgtagttcattaacaaggtacatgcaatagtctaaagaaccagagtcactactatagtggcttaacatttaatctgtctccaatattttaaccaagtgacaccgaggtttttatcgaagcatttcacttaaatgaacaaatcatggctgttatattaacttgaaataaaatatattttaacctctcttaaaaaaaaacataccaaaactcgggggccccccccggggggaaacacaaactccccatagtaggggcctaataacccccccccttggg

SEQ ID NO: 48537 - DNA, 469 bp, Homo sapiens
ctaaagggaacaaaagctgggtaccgggccccccctcgagagtacttctagaattaattaaggtgggagcaaggtagataagtgaaggattttgattgtcatgtgaaggtcagtcttgttcttttcccatacagattgtgggacagaggaaggagtagtgcattaaaagttttaagcagagaaagggaacaatgaaaattggtatcactgaagcagattgttatggtagtatgtgagagattggtgcctgtgcctgtagcagggagacctgtagacctttttgctggaatgagcttgagcttgaaataaaaaggatctgaattagtcaatcgtcacaggaacagaaagaaaaaagatgccttaagataaaggcttattgttgagagagcaaggaataaagtataaattgcaggacagccagccagagtgctggaagaattgcaggttcttgtagtaaattgggcatcta

SEQ ID NO: 48538 - DNA, 392 bp, Homo sapiens
aagctgggtaccgggccccccctcgagagtacttctagaattaattaaggcggggaatgatggttgcatatgctagttgctggagacaatggtgacagacagaaatagatttaagattaatttaaggcatggtgatagactttatgtgagggataagaaaaagcgaagtgttaatcctaaggttccttgaatgaaaaatggaatgggaggctgggcatggtggcttacgcctgtaatcccagcacattgggaggccgaggcaggcagatcacttgaggtcaggagttcaagaccagcctggccagcatggtgaaaccccatcttcactaaaaatacaaaaatcagccaggtatggtggcacacacctgtagtcccagctactcgggaagctg

SEQ ID NO: 48539 - DNA, 427 bp, Homo sapiens
agcgcgcaattaaccctcactaaagggaacaaaagctgggtaccgggccccccctcgagagtacttctagaattaattaaggcggggtttcaccatgttggccagttggtctcaaactcctgagctcaagtgatccacccacctgcagcttccaaagtgctggaattacaggcatgagccacctggtcggcctagaggaggagttcttaaccctttttttgcaccatggatccttctagcagtctggtgaagcttatggagcccttctcagaatccgttaaaaatggattaaataaaatacataggattatgaagcaaaccaattatataatataaaattacaaaatatttttaaatgtaagatagtaatgttcatgctccccaatttgtgtgtgtgtatttttttcttttttatcaagacagagtc

SEQ ID NO: 48540 - DNA, 575 bp, Homo sapiens
aattaaccctcactaaagggaacaaaagctgggtaccgggccccccctcgagagtacttctagaattaattaaggcggggatgcttgcatgtgtaatcttactaagagctaatagaaaggctaggaccaaacctattccaccttactaccagacaaccttagccaaaccatttacccaaataaagtataggcgatagaaattgaaacctggcgcaatagatatagtaccgcaggggaaaaaaaaaaaaaaaaaaaaaaaaaaaaaagcggccgccaccgcggtggagctccaattcgccctatagtgagtcgtattacgcgcgctcactggccgtcgttttacaacgtcgtgactgggaaaaccctggcgttacccaacttaatcgccttgcagcacatccccctttcgccagctggcgtaataacgaaaaggcccgcaccgatcgccctttccaacagttgcgcaacctgaatggcgaatggaaattgtaagcgttaatattttgttaaaaattcgcgttaaatttttgttaaatcagctcattttttaaccaataggccgaaatcgggcaaaa

SEQ ID NO: 48541 - DNA, 294 bp, Homo sapiens
accctcactaaagggaacaaaagctgggtaccgggccccccctcgagagtacttctagaattaattaaggcgggggtggacagggaggcaccttgagaatatttgttttactggccaactctatcaaaacagaaagaaaaggagactaaaccgttctgacccttcaaaggagaaaccccagtctctactaaaaaatacaaaaaaattagccgggcgtaatggcgggcgcccgcaggcccacctacttgggaggctaatgcaggagaatggcgtgcacccaggaggcggagcttg

SEQ ID NO: 48542 - DNA, 327 bp, Homo sapiens
aaggcggggctgaggtgggattatcacttgagcctgataggttgaggctacagtgagccggcccgggtgacagatcgagaccctgtctcaaaaaaaaaggcatttgaaaataatttagtaaaaatcatacttaatacttgaaaatagtagttctcaaccttttttcctcaggaccccttaacatcttaaaaattgaggactccaaagaacttgtttatttgacatatctactgagatttaataaaaaagtagttatttaataattcattttagaataaccccatgttaatataagtaatttaattttgtacaaagtatttgtatatt

SEQ ID NO: 48543 - DNA, 356 bp, Homo sapiens
accctactaaagggaacaaaagctgggtaccgggccccccctcgagagtacttctagaattaattaaggcggggtcggtgccatctgcaggctacgggaaaatgttacatgcctcactccgagcttttggagactgctggcactcttggactttccttggcttgtagacgcttcactccaatctctgcccctgtcaccacatggtggtcccctctgtgtcctctcctcttcttacagacacctgtcttttcttttctttacttttctttttttttttttttgggagcttgagcttgaaataaaaaggatgtgaattactcaatcgtcgcaggaacagatagaaaaaagatgcctta

SEQ ID NO: 48544 - DNA, 501 bp, Homo sapiens
aattaaccctcactaaagggaacaaaagctgggtaccgggccccccctcgagagtacttctagaattaattaaggcgggcgtctgtaatcccaactacttgggagactgaggcaggagaatcacttgaacccagggggcggaggttgcagtgaactaagaccacgccacttcactccagcctgggcgaaagtatgaaactccgtctcaaaaaataaaaataaaaacaaaaacagtaagccactgctcactttggcagcacatgtaccaaaattagaatgatacagacaaggtcaacatgggtcttgaggaattaaaaaacattgaaaaacaaagcaacgataagccaacaaacatatttaaagtgattttttttgttttgttttgtttttagcagttgaagagatggatttattagagggagagcaaaaggggatggtccaacagtgagcacagaagctaaactcccctgcctgccaagcaaggcacctaggtatgaaaat

SEQ ID NO: 48545 - DNA, 520 bp, Homo sapiens
agcgcgcaattaaccctcactaaagggaacaaaagctgggttccgggccccccctcgagagtacttctagaattaattaaggcgggtggagtcagtgtttccaaacttgaccatagatcagaatcacctgtagggcttcacaaaatacagattgctgagttctgcctccagagtttctgatttagtaggtctggagtagggcctgagaatttgagtatctgagttcccagataatgatgatgctctggatctgggaccacactgtgggattcattggtttaagaacctaaactgaagtctcatagcgggtaagctgaagaccttgccttaaacaggcatttatctacatatcctatgcttagctattatactacactattctacttctgcattgtagggttaaagtcttgggcttttgttcccgtgactacaatgttttcctgctcattactgaagaaaacatacaaagaatactgatgcgaagggtcctcaagaagtagaagaaataaattattttgac

SEQ ID NO: 48546 - DNA, 336 bp, Homo sapiens
  misc_feature 179: n = A,T,C or G
accctcactaaagggaacaaaagctgggtaccgggccccccctcgagagtacttctagaattaattaaggcgggagggtgggctctatattttcattccaaataaaattctctttctaaaaaaaaaaaaaaaaaaaaaaaaaaaaaaaaaaaaaaaagaaaaaaaaaaaaaaaaaaaanaaaaaagggggcccccccccggggggggccccaattccccctattgggggggcgtattaccccccctcactggccggcgttttacaacctcgggaccgggaaaaccccggggttacccaacttaatcggcttggagcacatccccctttcgccaggt

SEQ ID NO: 48547 - DNA, 481 bp, Homo sapiens
ccgggccctttcctcgagagtatttctagaatttttaacgcgggagaatggcgtgaacccggttgttcttatgggaccactgtcatatatgtggtccgttgctgactgaaatgtggcataggactgtatctgatcagggttaatatccaaaatatataagaaacccctacaattcaacagtaaaaaatcaactaacttgattaaaaactgggccagggactggaagagacatttctcaaaagagggcttccaaatggctgacaggtatataaaaaaatgctcatcatcactaatcatcagagaaatacaaaccaaaaccacaaggtgtcacgtcacacctgttaggatggtcattatcaaaaaacaaaaaataacaaatgtgggcaaagaaagaaattggaacccctgtgcattgctggtggaaatgtaaaatggtgcaatcactatggaaaacagtatgaaagctccttaaaaaaaaaaa

SEQ ID NO: 48548 - DNA, 472 bp, Homo sapiens
agggaacaaaagctgggtaccgggccccccctcgagagtacttctagaattaattaaggcgggtcctatgagtcttaggcaggcctaggcacgtgttctctctttttgttgtttgattctcaatttacgacaaatgaagaacgaggcctttacctggtctggatcgacttgttatggagcccatgtgaaatgaaaatgattcataaacaaaactgattccatccccagcaacagcagagatgaccatgaacaattagccacctgagaatcctcaacaattcttggggaattcattaattacattttattaaagggcagggatatccaaggtgacatatgggttacaaaggcaaagtataatttctttatgggttttgttaatgtgaaatataaattaataagctttttgattttactaatacaaacatacccatcaattggtcttcttcaattcagaaataactagagtttg

SEQ ID NO: 48549 - DNA, 570 bp, Homo sapiens
taactaaagggaacaaaagctgggtaccgggccccccctcgagagtacttctagaattaattaaggcgggggagttgggctggcgagactgagggaaagcaaaaaaagaaagtggataagctgtaagtctgcctttctttatggtccaggacacatagccctcctgtgcaaataactcacaatcttcctgtgcaaagctatcaccagacacctcagctaatagaaaaatgcaagttagcttactgcaaccttagctttatcagtactgcacaaagccctcttcagcacacagcatgagcaccagcaactctttgtctccttgcagttagctcctctcttgctgacctgccctttgctttcttgcaatgtattttcctactttgtctaataaatctgcctttctttacccacaactgtcttggcaaattatttttaccactcagagcaacaccagccccagatagtcactgcccacaacagatctcttgagcccaggagtttggggcagtagtgtgctatgatcacgcctgtaaatagccaattgccttcaagcctgggcaatataacaag

SEQ ID NO: 48550 - DNA, 474 bp, Homo sapiens
  misc_feature 451: n = A,T,C or G
aaccctcactaaagggaacaaaagctgggtaccgggccccccctcgagagtacttctagaattaattaaggcgggtggatcacttgaggtcaggagttccagaccatcctggccaacatggtgaaacctcatctgtactaaaaatgcaaaagttacccaggcctcatggtgcgcgcctgtaatcccacctactggagaggtggaggctggatattcactcgaatccgggagacagaggttgcagtgagctgacattgcactccagcctgggcgacagagggagactccgaattaaaaaaaaaaaattacgaaagatgtgggcccccccccggggggggccacaaattcccctataagggaggattttaaccccccccaccggtccggtttataaaaaatatttactattatgcttattagaacaaaaggtgtttaaggatgaactaaatantttaattgagcatttatatggat

SEQ ID NO: 48551 - DNA, 481 bp, Homo sapiens
ctaaagggaacaaaagctgggtaccgggccccccctcgagagtacttctagaattaattaaggcgggataccataaccagacacatgagttaaagaagacatggataccataaccaaagacattactaggaaagaaaactaataccaatatcccttttgaatacagaggcaaaaaaaaaaagtcctagcaattgaaatccagcaggatttcaaaagaattatccactgggatcaatggggatttatcccaggaaagcaagattggtttaacatccgaaaataaggaaatccagtttattaaggggataattcacaaaagataaatgcatagtcttttccatagacacaaagcatttgacaacctccagtagcctttcttgataaaagcagtgaacagactagaggtaaacgggaccttcttaaacctgagaaaggatatctatgaagacccacagctaacatcgtacataatgatgaaaga

SEQ ID NO: 48552 - DNA, 493 bp, Homo sapiens
ctaaagggaacaaaagctgggtaccgggccccccctcgagagtacttctagaattaattaaggcgggtggatgagctgagtttaaggagtctaccaggagtttaagaccagcctgactaacatggtgaaaccctgtctctattaaaaatacaaaaaattaactgggtgcaatggcgcgcacctgtaatcccagctactcatgagactgaggcaggagaatctcttgaacccacgaggtggaggttgcggtgagccaagattgatccactgcactcctagcctgggcgacagatccagacttcatttcaaatcactactctgccagaggttccctaacttcgtgcccccacctgggggagcctttgatctctaatttaatgggatattcatcgcgggggaggagcaccatgtttaaaaagaagatgtggctgtgtttaaacaaaatttccaagtttgaattgagataatttcatttatataacagatacttttc

SEQ ID NO: 48553 - DNA, 485 bp, Homo sapiens
taaagggaacaaaagctgggtaccgggccccccctcgagagtacttctagaattaattaaggcgggatggtggtgagggtttaaacaaattatctactgagtacagtcaccgttcgggtggtgggtgcactagaagcccaaacctcactattatgcaagatactcatgcagcaaacctgcacacatgcctccgaatctaaaatttaaagaaattttaaaaagaattaccaaaaccctggggttcaaaccaccaccatctctctcaaggatttactggagaagcctcctaacttgcctcctccactctcccccttattatggactgaacgtttatgccctcccccaaattcatatgtggaagccctgaccctcagcgtgatgttctatggaggtggggccttggccccatgatggggttaatatctttatgaaaagaggaagaaacaccagaacattgcttgttgcgcgcgcgcatgcgcactcgc

SEQ ID NO: 48554 - DNA, 338 bp, Homo sapiens
actaaagggaacaaaagctgggtaccgggccccccctcgagagtacttctagaattaattaaggcgggcagaaagcccatgagggaaaggtgaggcacctggggaaaagcaaaaaaacaaaacaaaacaacaacaacaaaaaaaaaaaaaaaaaaaaaaaaaaaggggggcccgttttttttttttttttttttttttttaaaaaaaagagggggttttttttaagaaggggggggttacccaacccccctaacttgggattaccaccggcttattccacctgtaatgatgatttacagggtgcataccccctccctcgaaaatatgttttttttttt

SEQ ID NO: 48555 - DNA, 497 bp, Homo sapiens
ctaaagggaacaaaagctgggtaccgggccccccctcgagagtacttctagaattaattaagcggggttcacatcattttcagaattgttgttatattattttatgaacctctgtgttttgattatatagttggtagctagctgctgcactaaactgtgagaaagaaaatgacacctaacatcctgaactaggtaaggttatgtgttactacaagctgacttgatgctcccagctagagaacactgttctcctggtgaacataaacaatctcacagagcataacaacatcaggtcacgttgaagggatgataaagtgagataaaacaaggtcaccatgtaccccatgaagtactcgaacatcctcctctctctgctaaaatgaattatggctgcttctttacctagtctatccttcctgtagataagatttgttgaggttctcaattatgaacttgtctgtcttcctgacagcatccaatcatgatcaaagcctgaa

SEQ ID NO: 48556 - DNA, 472 bp, Homo sapiens
ggaacaaaagctgggtaccgggccccccctcgagagtacttctagaattaattaaggcggggtttcaccatctgggccaggccggtctcgaactcctgacttcatgatccacccatctcggcctcccaaagtgctgggattacaggtgtgagccactgcacctggccaaaaatattttttaaaagatagtttatctgcgtattacttcaataactaaaatttaaaagtaaaaacaaaactaatagtctcaattctccttctacagatgtgagaatcaggactcagtgagcctaaaatatttagtttatttcataattttgataaacgtaccacatttcacatttatgtaaatattatataaaatgtaagccttgcaattttcctctaaattttgaagtactcaaaaataaaatgtttatttaaaaacttcaaacacatagcctagtttctttttctttgtgtaaaatgtttt

SEQ ID NO: 48557 - DNA, 475 bp, Homo sapiens
tacatgattacgcctagcgcgcaatgtaaccctcactaaagggaacaaaagctgggtaccgggccccccctcgagagtacttctagaattaattaaggcgggtgagtaagaggaatttgaaactcgaacgtttatagcaaaggaggaaagcacaaaaggactcagagagagatgagctgtatgcccagtggggaaaagggcttgcccagagccggcaacagcagcctaaaagaaaaaaaaatataaaaaccaaggcgcccccccccgcggggagaccccaatgcccccataggagtgcattttggccccccatcatgacctcattttaaaaaaaaaaaaggtggcatgcgggggttcacccctgtaatcccagcactttgggaggccgaggcgggtggaccacaaggtcaggaaatcgaaaccaccctggctaatacagtgaaaccccgtctttacttaaaattcaaaaaattaa

SEQ ID NO: 48558 - DNA, 622 bp, Homo sapiens
ctaaagggaacaaaagctgggtaccgggccccccctcgagagtacttctagaattaattaaggcgggtgttaataagcagtaagaaatcatctgaaggcataaaactcactggtaacagtgagtacacagaaaaatacagaatattataacataattataacgtaattgtggtatgtaaactactcatatcttgaaaagggagactaaaatatgaacctatcaaaaataacaactacaacaactttttaagacatagaaagtataataagatataaatagaaacaacaaaaagttgactgggcatggtggttcacgcctgtaatcctagcactttgggaggccaaggtgctgggattacaggtgtgagccacagtgccctgccaaaacaatctttcaaacgtgaaggagaaataaagactttgccaaacaaaagcagagagatttcgtcaacaccacatctgtcctgcaaaacatgctaaggtgagttcttcaatctaaagcgggtgttaataagcagtaagaaatcatctgaaggcataaaactcactggtaacagtgagtacacagaaaaatactgaatattataacataattataacgtaattgtggtatgtaaactac

SEQ ID NO: 48559 - DNA, 424 bp, Homo sapiens
tcactaaagggaacaaaagctgggtaccgggccccccctcgagagtacttctagaattaattaaggcgggaggaatgagaaggtgggaggcttaatgggtgatgcggtgagagggaaggacagatttttctggttctcaaatgtctctggaagttccttagggtttgctcctgcctcagcacttaccatgtgtagcctctactcgcttcttggacactgtgctttcccgtttgtaactcaagtttgatcccgcggttggtgaagaccgcccctctatgggtgtccctagtagggtggggacatgttccctactcaacccatactgtctgtgcctggagatccctaagtggggcctagcgtgggttgaatctaaatagttaacagggttgctcatttgcaggggcagcatctttccagtgagtga

SEQ ID NO: 48560 - DNA, 303 bp, Homo sapiens
aaagggacaaaagctgggtaccgggccccccctcgagagtacttctagaattaattaaggcgggtgaagaagaaaaggagagaggaagaagaacgaagaaggaggaagaactaagaataagaaggagaaggaagaaggatgaaagaaaaagaacgaaggaggaggagaggaaggagaaggaagaagaaaaagaaggagaaggaagaaggagaagaataagaagaagaaaggaggagaaggaagaagaagaaagaggaaagaagaagaagaaaaagtagaaggtgcgaataaagaggcagatga

SEQ ID NO: 48561 - DNA, 449 bp, Homo sapiens
  misc_feature 382, 384, 385, 388, 389: n = A,T,C or G
ctaaagggaacaaaagctgggtaccgggccccccctcgagagtacttctagaattaattaaggcgggaaatgtgtgatcagaggctttcccaggcacacactgctctacagccctaccacacaggcttaaccgagaatttgaccccggaaggtgacggatgaacatgtgtcctggtattctgatctacagaaatcctgccctctcttaatgatccatccagagctctaggatcgtttctagatttatttactacacacagactggaagtttttgacagaagctttgaactgggaaccctaccctgttccaccagcttctctagaagtacaatgttctaattactcctgagagactccatctgagggtaactctctgagccancnngannaaaaaaaaaaaaaaaaaaaaaaaagggggcccccccccggggggggccccatttccccct

SEQ ID NO: 48562 - DNA, 529 bp, Homo sapiens
  misc_feature 498: n = A,T,C or G
ctaaagggaacaaaagctgggtaccgggccccccctcgagagtacttctagaattaattaaggcggggtaagatttgccgacttccttacacttaacttaacctttccttatgagcatgcctgggtagggttgacagtgagggtaataatgacttgatggtagattgtagatatagggctgttaattgtcagctcactgttttaatctgacgcaggcatgctcacatttgccactgtaaaaaaattggaaaggggaactcccgattggggaaacctggtttccccctagggaagcttatttcacaccccctctgatatttcatatactttcttttcgactttatactctgagttattacttactgtaagtggtgtatatgaaacctccatgcattttccagtatggatctgctaatatgcacaggaaatccatgtctttgtttgtttttctattaaaaagcaatcaagaaagataatgtgaaaaagaaaggaatttanaggtagggaaaaaatgaatgtcaaacatttg

SEQ ID NO: 48563 - DNA, 510 bp, Homo sapiens
  misc_feature 423, 424: n = A,T,C or G
agggaacaaaagctgggtaccgggccccccctcgagagtacttctagaattaattaaggcgggaaagaatcaaacgaggaatcttcataatattgagaaaacaaactagcatgagtaaattattacttatcagtagtaaccttgaatgtaagtggattaaattccccaattaaaaaatatagagcagctggatggattgaaaaaaaaaaagacccaactgtatgttgcctacaagagacacacctcatcattaaatataaacatagactgaaagtgaaggaatggacaaagatatcccatgcaaattcaaaccaaaaatgagcagaagcagccatacttgtactagatacaatagactttaagtcaaaaactgtaaaaagagacaaagtcattatgtaataataaaataatcaattcaccccnnaaaaaaaaaaaaaaaaaaaaaaaaaggggccccccccggggggggccccaaatccccctaaagggggggttatacccccccccccc

SEQ ID NO: 48564 - DNA, 503 bp, Homo sapiens
accctcactaaagggaacaaaagctgggtaccgggccccccctcgagagtacttctagaattaattaaggggggcttgtacacccacttcctcacgaggctaacgctggccattcgcttgaacctgtgaggccgaggctgtatggatcatgcattgtgcctatgccctggcatctaggctactctatgaaactctgtctcagaacaactataaaagtgataaaatcagacgctcacacgacaaatacaccaaggagaacgaatggaataaataatgaactccccgacctggacgatagctttatgcctgttgctgcacccctaggtcatccaagagagctgcagaagtactccagtgattctgagagccccagaggaactggcagtggtgcgttgccaagtggtcagaagctggaggagttgaaggcagaggagcctgataacttcagcagcaaagtattgcaaaggggccgagagttctttgacagcaacgggaacttcctg

SEQ ID NO: 48565 - DNA, 469 bp, Homo sapiens
aagggaacaaaagctgggtaccgggccccccctcgagagtacttctagaattaattaaggcggggaagacaaaccaaaaaggaaataataaatcgcggacgaaatggatgaaagagaattgttaaagacaattggaatctataaaaagaatcagatggaagttctaaaatgtcacaatacaatactggatttaacagaagacacgattgataaacttgaagaaagttcaatagaacatatccaaagtaaagcacagagggaacaaagaaaggaaaacagttgaacagaatatgagaaatgagttttataaagtccctagaggaggaaagagaataatagaaaagcactatttgaggaaatcatggcagacaatttcccaaatttgatgaaaaacaaatccactgattcaagaagcttaatcaaatcttagcaggataaattcaaagaaaactatagctgaaaaacatca

SEQ ID NO: 48566 - DNA, 495 bp, Homo sapiens
taaagggaacaaaagctgggtaccgggccccccctcgagagtacttctagaattaattaaggcggggagggaagacatcaattatgaatgtgcctaataacagagcctcaaaatactggaagcaaaagcaacagaattaaagggagaaatagacaatctcacaaccatagtaggagattttaacctctctctctccaattcttagaacaacagaccaaaaacatcaatagacaaccgacaatcatagtcggagattttaacctctctctttccaattcttagaacaatagaccaaaaacatcaatagacaacccacaatcatagttggagattttaacctctctctctctccaattcttagagcaatagaccaaaaacatcagtagataacccacaatcacagtcggagattttaacctctgtctctccaattcttagaacaatagaccaaaaacatcaatagacaacccacaatcatagtaggagattttaacc

SEQ ID NO: 48567 - DNA, 523 bp, Homo sapiens
gcgcaattaaccctcactaaagggaacaaaagctgggtaccgggccccccctcgagagtacttctagaattaattaaggcgggtagccctgccgcactttgtcacgggagcccagggtacccgcctccttttcgtaacactgttccccccggtcagcccatctagccctgtcctccattcctcacgccatctccatccccatcttgagtcctggaacggccctgggtgcctgcccctcactgtgcaactctgggagcagcccggcaggttggggcgtcttccagaacctctcccttctggagccactctgcactgcgggctaaacatgtttccagtgtgattccttccagtgagccaaacccggtggctgcttcatgagcctgactgcctctcgcctgctcttaacaagaaaggacccctggagcaagctggcccggggtggtgaagtatctggagcccgatcacagtcccgcggtttgtcaaggggcccaccttctagatgaccccttaataaagtgatggc

SEQ ID NO: 48568 - DNA, 513 bp, Homo sapiens
actaaagggaacaaaagctgggtaccgggccccccctcgagagtacttctagaattaattaaggcgggaataggaacaaagaacaggggccacacacagaaacctgtaataaatatgatagatactagtccagactatatcaataatcactgtggttaaatataccaattaaaagacagagattagtagagtgaattaaaaagcaagacccaactatatgttatcaactagaaacccactttaagtttaaagacacaaagattaaaagtaaaggaatggagaaagatatatcatgctaacattaaccaaaataaactgagggtagctatattaatagtagacttcagagcactgtacgttatcagggataaataggacgtaatgacaaagggtaagtaatccaagaagatacaacaattcttaatatctatatgcctaacaacaaagcatcagaatatgtgaggcaaaaactgatagaactacaatgagaaatatatgaatgtactattataa

SEQ ID NO: 48569 - DNA, 412 bp, Homo sapiens
ctaaagggaacaaaagctgggtaccgggccccccctcgagagtacttctagaattaattaaggcgggtaggcctaggattgtgggggcaatgaatgaagcgaacagattttcgttcattttggttctcagggtttgttataattttttatttttatgggctttgtggaattctttgtgtagtaatgttttaaaaaaagatgtttactgatagttacatgtaggattagaatatgtaatataatataaggctcatgttccagacctacgatagcttgtagtctatgttacgtatttctttatatcacatttttaatcattggattaaagtatcaaggaaagcttaaaaaaaaaaaaaaaaaaaaaaaaaaaaaaaaaaaaaaaaaaaaaaaaaaaaaaaaaaaaaaaaaaaaa

SEQ ID NO: 48570 - DNA, 322 bp, Homo sapiens
taaccctcactaaagggaacaaaagctgggtaccgggccccccctcgagagtacttctagaattaattaaagcgggcggatcacgaggtcgggatattgagaccatcctggcctacaaggtgcaaccctgtctctactaaaaatacaaaaatgagctggacgtggtggtgcatgcctgtaatcccacctactccggaggctgatgcacgagaatcgctagaaccacggagtcatagtttgcagtgagccgaaatagcaccactgcactccagcctgggcaacagagcgagactctgtctcacatccaatgctcttcaaaaaa

SEQ ID NO: 48571 - DNA, 501 bp, Homo sapiens
attaaccctcactaaagggaacaaaagctgggtaccgggccccccctcgagagtacttctagaattaattaaggcagggaatacagtacagtatagtggttctcaaactttagcatatgtgagaatcacctggaaatgctgataaaacgtacattcctggaccctaccctaatcacctggggttactgataaaatgtacattcctgggccctcccttagccctatatcataactcagctcagaactcttagaggttctgatctaagagccatgatgtagggctaagaaaaatgatatttttgcaatcacatccctcttaggagattctgatgaaggtgggttgctgctacatttggaagcacactgttttatctgaacaagcacttatgagccaagtgtgtgctttcctaaatttaacagggtcaaaaaaaaaaaaaaaaaaaaaaaaaagcggccgccaccgcggtggagctccaattcgccctatagtgagtcgtatta

SEQ ID NO: 48572 - DNA, 423 bp, Homo sapiens
taaagggaacaaaagctgggtaccgggccccccctcgagagtacttctagaattaattaaggcttctatagggtagtatgcattataaaatctgaaatgatccagcctggatttagattatgcaagtttctttgcttgtatcttctcttttggtaagaaagaacatacctagaaagtagacagcctcctttagggaggaaatagtatttgacatggatatgtcttgggaattgcgtttcttttgctaggtaatctaagaatttgtgtaggcttttagtatggagtagttttagggtgactgctttaaaacttcaaagctatagaaatgaccctctaaattgagagaataaagtcacttttaaagactgttaagccgtaattcatggtagtatgtaaaagtaaaattttatttcattttagcat

SEQ ID NO: 48573 - DNA, 291 bp, Homo sapiens
taaagggaacaaaagctgggtaccgggccccccctcgagagtacttctagaattaattaatgcaggcgggtctaggcagccgtccttgctgagaatctggacagggaccaccggggctgatcgtgtggcactgcctacagactcattctggcctggacctcctttctggggagcctgctgctgtctggcaggcttccagaatggaccgtagcccactcgctagatgagagtggcaaacgcatccataagcaacgacgaggaataaaaaaaccaatcaagattgggcctgat

SEQ ID NO: 48574 - DNA, 464 bp, Homo sapiens
caaaagctgggtaccgggccccccctcgagagtacttctagaattaattaaggcgggatccccttttttttcccttccatggccagttgttttatagaatatcctacagtttggacttgtttgatttctcatgaatggattcaggttacatttaaacattttggtaagaataagacataggtgacattttgattaccttttaagagtaaaacaattcacatgtcaaactatttggatactgtctcagtccatttgtgtgggtataaaagattacccgacgccgagtcatttatcaaagataaaccaaagaatttaaattgtaagcggccgccaccgcggtggagctccaattcgccctatagagagtcgtattacgcgcgctcactggccgttggtttacaacgtcaatgactgggaaaaccctggcgttacccaacttaatcgccttgcagcacatccccctt

SEQ ID NO: 48575 - DNA, 604 bp, Homo sapiens
ctaaagggaacaaaagctgggtaccgggccccccctcgagagtacttctagaattaattaaggcgggggatgcatgggccattgtcgctagctggccaaatgggaaactccagctccctatttgggcttctctgcttggaccactatgtgcttaactgcggtttcccctctgactctgtacatgtcttcagactttgctgaacgggtttagactaaggtcacactctgtttaaggtgcttgtctggagtcaaatggtcattatctgcaagatttttctcttataaggctgtcctttcctcatcctttggctacagaaagcaagcttttgttggagcatttctgtctgtgcccattgctgtctctagattgccagcttattcacctccaagtttgggatatatgaaacaaaaagaaaatccagggagcttaccaccatgttgttcgtcaggtcccaagttccctagttagtctgcctcttctcttccccatttagagtcttcttatatttgtttgataggtgatgtctgggattttagcagtacttagtggaggtaataggaaaaagtatgcctattctatcttcctcaaagtacaagtttgtca

SEQ ID NO: 48576 - DNA, 479 bp, Homo sapiens
ctaaagggaacaaaagctgggtaccgggccccccctcgagagtacttctagaattaattaaggcgggcagatcacctgaggtcgggagtttgagaccagcctgactaacatggagaaacccatctctactaaaaatacaaagttagctgggcatggtggctcattcctgtaatccaagctactcgggaggctgaggcaggagaatcacttgaacctgggaggcggaggttgcagtgagccgagaccgcaccattgcactccagcctgggcaacaagagcaaaactccgtctcaaaaaaaaaaaaaaatcttatgtcccccataaatataaatccctattatgtcccattaaaagtaaaaggtaaaaggtttcatttgtttcacacctttaaaaaatatccacagaggcttgaggaaattttgttttgcccccacaacccatttttatgctttttcaaaaggggacattcaaaaaacaaa

SEQ ID NO: 48577 - DNA, 506 bp, Homo sapiens
aaccctaactaaagggaacaaaagctgggtaccgggccccccctcgagagtacttctagaattaattaaggcgggagttgggaaggattcaccatacttgtgttctcctccctttataaattttattcataggacttttaaaaggcttgtgctatctttccagtgaaaactgaaagtgcattattatggaagaatgtatttgcaggtagtaatagcattaaaaatatactcgtgtgtaaacacatactaattttgaccttgaaagatgaattccttcaagaaaaataaaataatgcttaagataatgtgtacgaaattaaataaaggactttatttacatactacataaggtagcaaactgttgaatgagtttgaaggtatcacttatttttttatgcatgtggttttagctttagaaagaaatgcgttatagaaacaagtaatagcaagaaaattgatgtatattttaatgatacattaaaattcccttttaatcataatagtta

SEQ ID NO: 48578 - DNA, 159 bp, Homo sapiens
ctaaagggaacaaaagctgggtaccgggccccccctcgagagtacttctagaattaattaaggcgggaggccaaggtcaagtttgaagagagatacaagacaggcaagaacaagtggttcttacataaactgcggatttagatgctttgttttgatcat

SEQ ID NO: 48579 - DNA, 468 bp, Homo sapiens
caaagctgggtaccgggccccccctcgagagtacttctagaattaattaaatcaggttgacagaagccaatatctcaatgtttttaaattaaaatttatttaaaggaataagtatgggtgcattaatgagatgttcagtttacagaatttgaagtttgagttctattttaatagtctgccgtgtcccccaaatcccatttagataaattgaggttcatttttcacatagacttgcaatttttagacaccacatttttttatagtaacagcctcatttgcctgtacaataactaataatacagtatttcataggtacattgtatgtgcacaggaaatttttctttaaatcttaagagcctttaataaacgggatattttaatattttaatgttactacatttaaaaaatagtgttttcctacaaaattttctgtattcagtatacgttaactatgaaaatgtcaaaaaa

SEQ ID NO: 48580 - DNA, 646 bp, Homo sapiens
tcactaaagggaacaaaagctgggtaccgggccccccctcgagagtacttctagaattaattaaggcgggagacttgattgaacctgcacggcggtagttgcgctgagcctatatctcggcactgcccttttgcctggcgacatcgcgagactcctttgacctgcacctatgagaagcctcctacttttgacttgatcgccactttgcacaaatcctagctgaccgtgtacccttatttccaagtgaatgagaaaactgatgccgctgacataattgaactggtgactggatgaacaggggaacctttccagtgtgaccttcgtctcactggaagagcctacaatgctacccagcatgctgggggcatcggtgggggcaaacaacttaacggcaagattcttgccaagaaaatccctgtgcgtgttgagcacattaagcactctaagagccgagatagcttcctgaaacgtgtgaaggaaaatgatcagaaaaagaaagaagccaaagagaaggtacctgggttcaactaaagcgccagcctgctccacccagagaagcacactttgtgagaaccaatggggaagagcctgagctggtggaacctattccctatgaattcatggcattaatagtgttaaaaaaaaa

SEQ ID NO: 48581 - DNA, 484 bp, Homo sapiens
  misc_feature 375, 432: n = A,T,C or G
cctactaaagggaacaaaagctgggtaccgggccccccctcgagagtacttctagaattaattaagggggctgaagtgaatgggcttgcaacccagagcatgcttgatggcactataaaacatggtgtatcctcaacactgccactctactttgccagccttgcgtactgagtctgcactccatactacttgccttggtccagccatatactcgcactaacgcttgaagccataggtcagcggccgactcgctatgcgcagctgagatgccttctgctggaaccaactagacttcctttctatatcacattcccctctgtcattgctgcacctgggaccataagatgggaggatcgggagcccctcatgactganggcagaagaaattgctagaagtcagaacaggatggctgggtcttcccctacctcttncagctcccacaattttcccatgatgaggtagcttctccctgggctctccttc

SEQ ID NO: 48582 - DNA, 592 bp, Homo sapiens
ctaaagggaacaaaagctgggtaccgggccccccctcgagagtacttctagaattaattaaggcggggatttcccacatacaattaaggcatggttccctgtttttcttcttggtctttttaccaaaactactgcacttttaacaaatatgatcatgaagccaaccccatccccaaagtgtgtgtccttaacatttttcaaggcccgtgtatagctgttatcttgtgtgaacctcagatggcccaataaggatgtaaggcaagttcaagtacagtctccgcactagagataagaaaacagagatagcgcctgtaatcccagcactttgagaggccgaggagggcggatcatgaggtcaggagatggcgaccatcctggctaacacggtgaaaccccatctcttctaaaaaaaatacaaaaaacttagctgggcatggtggcaggcgcccgtagtcccagctactcgggacgctgaggcaggaaaatggcgtgaacccaagaggcggaacttgcagttagctgagatcgagccacggcactccaacctgggcgactgagtgagactctgtctcaaaaaaaaaaaaaaaaaaaa

SEQ ID NO: 48583 - DNA, 474 bp, Homo sapiens
aaccctcactaaagggaacaaaagctgggtaccgggccccccctcgagagtacttctagaattaattaaggcgggaggatagtctgagctcacgaggttgaggttgcagtgatctgtgattgcacccctgcactgcaacctgggctacatagagagaaactctgtctcaaaacaaaacaggacaaatcaaataaaatagaccctgtctcagaaaatatactttatacaaataaagccgggcgcccccccctgggggtacaccccatgccccttatactgtgcacccttgccccctcagatgcgggacaattgcattttagttttattttgtggaggtgcagaatatttactctttctgtccaacccttgattctgccgaggaagacactgatggtttgatgagtgattcagctgtttttggctaagggcttttggagctgatggcaggggtttgatgaatccaaatgagctcta

SEQ ID NO: 48584 - DNA, 623 bp, Homo sapiens
gccaagcgcgcaattaaccctcactaaagggaacaaaagctgggtaccgggccccccctcgagagtacttctagaattaattaaggcgggtggattacctgaggtcaggagttcaagatcagactgaccaacatagtgaaacccaatctctattatatacaaaaaattagccgggttggtggtgcatgcctgtaatcccagctacttgggaggctgaggcagtagaatcacttgaacccgggaagcggatattgcagtgagccatgatcgcaccattgcactccagcctgggcaacaagggcgaaaccccgtctcaattaaaaaaaaaaaaaacggcagatcatatatttgatacaagattaatatccacaatatatttaaaaactcaacaaaaacataacccaatttaaaaatgggcaaaggacttgaatagacattgcaccaaagaagataaaccaatgttcaataagcctatgaaaagatgctcaacatcactaatcattaggaaatgcaagtcaaaaccacaatgagatgccatttcacatccattcaaatggctattaagaaacagaacagcaagcactaacatgggtgtggaaaactggaacacttgtgcactgttc

SEQ ID NO: 48585 - DNA, 479 bp, Homo sapiens
aaaagctgggtaccgggccccccctcgagagtacttctagaattaattaaggcggggacaaataagggaataaaagctggccaccccagccagcagcatcaacctgctctggtccctttccacactgtggaaactttgttctttcactcttcacaataaatcttgctgctactcactctttgggtctgtgccacctttaagagctataacactcaccgcgaaggtctatggcttcattcttcaagtcagagagaccaaaaacccaccggaaggaaccaactccagacacactcttccttcagtctatcacaacaatgtagtcagaacgatcctattacgccattaagtcacatcatgtcactcttctgctccaatgatttcccatctcaaaaaaaaaaaaacttttttgaaaaaaaaaaaaaaaataaaaaaaagcggccgccaccgcggtggagctccaattcgccctatagtgagtc

SEQ ID NO: 48586 - DNA, 245 bp, Homo sapiens
taaagggaacaaaagctgggtaccgggccccccctcgagagtacttctagaattaattaaagcgggggtctgctggaggattccaacagagagtatttcctccactgtacaatgtcacagactatctctatcatcattgctttgcggctgtttctgttttttactgtatgtaactggtagctgattgtactaggattaaaaacaataaactttcatgatcaagccgctgagattcatgggctata

SEQ ID NO: 48587 - DNA, 627 bp, Homo sapiens
taaagggaacaaaagctgggtaccgggccccccctcgagagtacttctagaattaattaatgcggggtgcggtggctcacgtctgcaatgtcagcactttgggaggccgaggtgggtggatcacctgaggtcgggagttcgagaccagcctgaccaacatggagaaaccctgtctctactaaaaaaatacaaaattagccggggtggtggtgcatgcctgtaatcccagctactcgggaggctgaggcaggagaattgcttgaacccaggagacggaggttgcaaaactccgtttcaaaaaaataaagttaggtgaaacaaaatttttactcttctgaaagtcaaatttttaattggggctggttctgccttgcttgatttcattttgttcttagtgttttaagactgatttctggaaaacagtttttgaaagaagagtagcaaaacttcaggtctgtggctttctaaagcataattctccattttctaaaagtattgatccgccttgggctctttgtcagttttatgcacttttgtaatactctttgcgttttcaagatggatagccaatggtgttttgataaacttggtcaatttctttactaccctaaaatgcaagtaaccggc

SEQ ID NO: 48588 - DNA, 329 bp, Homo sapiens
ccctactaaagggaacaaaagctgggtaccgggccccccctcgagagtacttctagaattaattaaggcgggtggatcaactgtggtcaggagtttgagatcatccaggccaacctggtgaaaccccgtctctactaaaaatacaaaaattagctgggcgtgatggtgggcgcctgttatcccagccacttgggaggctgaggcaggagaatcacttgaacccgggaggcggaggttgcagtgagccgagatcgcaccattgcactccagtctgggcaacagagtgagattccgtcttaaaccaagaaaaatagcctgaatccaaaaga

SEQ ID NO: 48589 - DNA, 497 bp, Homo sapiens
aattaaccctcactaaagggaacaaaagctgggtaccgggccccccctcgagagtacttctagaattaattaaggcgggggtaaggttatagattaacagaatctcaaggcagaagaatttttcttagtacataacaaaatggagtctcctatgtctacttctttctacacagacacagtaacaatctgatctctcttgcttttccccacatgggcgtggtggccactgcctgtaatccagctacttgggagggtgaggcaggagaatcacttgaacccaggaggcagaagttgcagtgagccaagattgtgccattgcactccagccttggcaacaagagcgagactctcttaaaaaaaaaaaataaaaaaaaaaaaaaggcggccgccaccgcggtggagctccaattcgccctatagtgagtcgtattacgcgcgctcaactggccgtcgttttacaacgtcgtgactgggaaaaccctggcgttacccaactt

SEQ ID NO: 48590 - DNA, 454 bp, Homo sapiens
ccctcactaaagggaacaaaagctgggtaccgggccccccctcgagagtacttctagaattaattaaggcgggggtatgtaagtgcttaagactgaaattgtaggatctaaggttagtatgtacttaactctgtaagaaaatattcatgtcttacctcacatctctagggaatgaaagattttagatcagaatggtagggtagaggaaaatccattggggaaattgttcctttggtatttacttaatctgaacattttttaaatgcaattgtaactattgatgaaatgtgaatattgattgaaaaaagacgttgatgttaaataagactttacaagcttgtaaaagaaaatatagttacagaaggaaaacaagtttttaaaaacagctttattgtgatataatttatataccatagaattcacccatctaaagcgctcaattcagtgaattttg

SEQ ID NO: 48591 - DNA, 687 bp, Homo sapiens
gattacgccaagcgcgcaattaaccctcactaaagggaacaaaagctgggtaccgggccccccctcgagagtacttctagaattaattaatccaagatttacaatagcacaacgctaaatcacacagtaactacaaaaggttacatagatatgaaaagattggcagaggccattgcaggatgaatcacttgtcacttttcttctgtgctgggaaaaataatcaacaatgtgggtctttcatgagcagtgacggatagtttagcttactatgtttcccccccaattcaatgatctataacaacagagcaaagtctatgctcatttgcagactggaatcattaagtaatttaataaaaagattgtgaaacagcatattacaagtttgaaaattcagggctggtgaaaaaaatcaactctaaatgatgataattttgtacagttttatataaaactctgagaactagaagaaattattaactttttttcttttttaattctaattcacttgtttattttgggggaggaagactttggtatggagcaaagaaataccaaaactactttaaatggaatcaaaccaactttattctttttttcccccatactggtagataaagcaaactttataagtgggctattgaaagaaaagttacaagcttaagatacagaagcatttgttcaaaggat

SEQ ID NO: 48592 - DNA, 613 bp, Homo sapiens
gcgcgcaattaaccctcactaaagggaacaaaagctgggtaccgggccccccctcgagagtacttctagaattaattaaggcgggcggatcacgaggtgaggagatcgagagcatcccggctaacacagtgaaaccctgtctctactaaaaatacaaaaaattagccgggcacggttgcgggtgcctgtagtcccagctacttgggaggctgaggcaggagaatggcatgaacccgggaggcggagtttgcagtgagcccagatcacgccactgcactccagcctgggcgatagagtgatactctgtctcaaaaaaaaaaatataaaaaaagcggccgccaccgcggtggagctccaattcgccctatagtgagtcgtattacgcgcgctcactggccgtcgttttacaacgtcgtgactgggaaaaccctggcgttacccaacttaatcgccttgcagcacatccccctttcgccagctggcgtaatagcgaagaggcccgcaccgatcgcccttccaaacagttgcgcaatctgaatggcgaatggaaattggaagcgttaatattttgtaaaaattcggttaaaattttggtaaatcagcttattttttt

SEQ ID NO: 48593 - DNA, 456 bp, Homo sapiens
agcgcgcaattctacctaaagggaccaaaagctgggtaccgggccccccctcgagagtacttctagaattaattaaggcggggacggaattttttaaaatatggcagagaaggaaagaaacagcaacactgaacatggagaacacatagaaatctttagtaagatgctagtgttaacccaagtagatcagtaattaaatgtaaatggactaaatgtcaaagattctcagaagtgataaaaagaagacagagcaaagacgtaagattataaaaagattaatagtaaaaaacaaaaatggaaaaagagcacactaatactcacctagaggaagctaatgtctatatttttatatgaatgtagattttaaggcaaaaacatattggtgaaagattcaactggccaggaagatataataatgtaatgtctgcttatatttagtaataagccctcaaaatg

SEQ ID NO: 48594 - DNA, 475 bp, Homo sapiens
acaaaagctgggtaccgggccccccctcgagagtacttctagaattaattaaggcggggttgggggaacttggctgtcccacgtctttcaaataaagctgttttgtctaactcaaaaaaacaaaaaaaaaaaaaaaaaaaaaaaaaaaaaaaaaaaaaaaaaaaaaaagcggccgccaccgcggtggagctccaattcgccctatagtgagtcgtattacgcgcgctcactggccgtcgttttacaacgtcgtgactgggaaaaccctggcgttacccaacttaatcgccttgcagcacatccccctttcgccagctggcgtaatagcgaaagaggcccgaaccgatcgcccttcccaacagttgcgcagcctgaatggcgaatggaaattgtaagcgttaatattttgttaaaattcgcgttaaatttttgttaaatcagctcattttttaaccaataggccaaaatcggcaaa

SEQ ID NO: 48595 - DNA, 556 bp, Homo sapiens
  misc_feature 471, 472, 473, 474, 495, 496: n = A,T,C or G
tggccgtccttttacaaccctgaataaggggaacacatgctgggtgccgggccccccctcgagagtacttctagaattaattaaggcgggcagatcacaaggtcaggagatcgagaccatcttggctaacacggtgaaaccccgtctctactaaaaatacaaaaaaattagccaggcatggcagcgcgcgcctgtagtcccagctgctggggaggctgaggcaggagaatggcgtgaacccgggaggcggagcttgcagtgagccgagattgcgccactacattccagcctgggtaacagaggaagattccgactcaaaaaaaaaaaaaaaacccctcccaggccaggggggggggtttaagccctgaattcccaccttttgggaaaacaaggggggggggatcattgggggcggggattccaaaaccgccttgacaaattgggaaaacccccttccttcctcaaattccnnnnaaaaaaaaaaaaaaaaaaaanncggggcccccccccgggggggacccccaatccccccttaaagggggttttatcccccccc

SEQ ID NO: 48596 - DNA, 201 bp, Homo sapiens
aaagggacaaaagctgggtaccgggccccccctcgagagtacttctagaattaattaatgctcaggacagtagaataacacaagatattcatggctctaaactgagtactggatcaaatggacctgatagatatctacaaaattctccacccataaacaacagaatagacattctatctcatcacctccatgagccactta

SEQ ID NO: 48597 - DNA, 444 bp, Homo sapiens
aagggaacaaaagctgggtaccgggccccccctcgagagtacttctagaattaattaaggcggggtatttagagcctgtaatctaaatgctggctcaaatttattccccagctacttcttataccactattcttttaatgtttgcataatcataagcacctcaacacttgaatacataatctaaaaattatatagtaaagctggtagccttgaaaatgtcagtgtgatatctattatgtagataaatatatatagtggcctttcaggactgtcacagtaacactttatttacagagctaatgtttgtcctaaattttcaggaccctagaggagagctttatacaattaccgatgtgaatttctctaaagtgtatatttttgtgtccagttatattatttaaaaaagtgttactttgtaaaaattgtatataaagaactgtatag

SEQ ID NO: 48598 - DNA, 318 bp, Homo sapiens
caaaagctgggtaccgggccccccctcgagagtacttctagaattaattaaggcggggaccccccacaggaactaggtctcaggctgtggaaagggagctgccccagggcccaggagggccggctctgcattccgcatgttcccagagtgaaagagaatgagaaggagacacacaagtgctgttatgacctgggttgttggttggcaaatacagcatctaatagaaactttcttccatcccagaataccctctaccatctgctttggtcagggtgccgctcgaggatttaaatgcctattataaaaaaaataaaaaaa

SEQ ID NO: 48599 - DNA, 340 bp, Homo sapiens
ccatgattattggcggtggttttccttccagaaaaaggaaatacctttgtttctggccggtggttttccttagaaaaaaaaacatgaattttgcttgtttgagagatttcccatattgccatcagagaaataaatatacttgctttaattcttaagcctatgcaaacaagatataaaaatatatgctgaattacttgtgaagaatgcgtttaaagctatcttaaatgtgtttttatttgttagacattacttattaagaagtgggttattatgcttactgttctaatctggtggtaaaggtattcttaagaatttgcaggtcctacagatttttaaaact

SEQ ID NO: 48600 - DNA, 564 bp, Homo sapiens
  misc_feature 443, 446, 447, 448, 449, 450: n = A,T,C or G
agcgcgcaattaaccctcactaaagggaacaaaagctgggtaccgggccccccctcgagagtacttctagaattaattaaggcggggatgtaagggagataagcaaggaaggaaggaaggataaactgtctattaacagataaatatttggtcatgtccataatgatcatttacatgttttcttttttttttctttttcttttttttaagaaatagagacaaggtcccactatgttgcccaggctagtcttgaactcctgagctcaagtgatcctcccatctcagcctcccaaagtgctaggattacaggcatgagccagcaaacctggccactacaaatttttcatcctatacaagggctatatggtcaatttaagaatatgacaaatgtggcatatcgcacactactgtgatacaccagaaagctagattaacactctgtnccnnnnnaaaaaaaaaaaaaaaaaaaaaaaagcggccgccaccgcggtggagctccaattcgccctataatgagtcgtattacgcgcgctcactggccgtcgttttacaacgtcgtgactg

SEQ ID NO: 48601 - DNA, 453 bp, Homo sapiens
ctaaagggaacaaaagctgggtaccgggccccccctcgagagtacttctagaattaattaaggcggggagactgaagatggcttagtggttatacgatacaaacagacataacccgagttaccttcttgcggataagcattatggaaaagaatacgggaatgtttacggaaggctccatggtaaacatgtttcaaatgtacataagatactgtacataaatgaaaaaataaattatgtcattcacaggaaatgttttacagattacaataggctataacttagattgttatgaataaaatttatggcacatcatacatttttacatcacagattctgtgttaaatgaattcagacatgatgaagcttagacttgacaagaatgatgtaatagaatgaggcaactgaaactgaaatggcatgtgtgagtaaaattaatccccaaattaaaggat

SEQ ID NO: 48602 - DNA, 545 bp, Homo sapiens
cgcgcaattaaccctcactaaagggaacaaaagctgggtaccgggccccccctcgagagtacttctagaattaattaaggcgggtgcctgtaatctcagctacttgggaggctgaggtgggtggatcacctgaggtcaggagcgcgagaccagcacagccaacatggtgaaactccatctcctaaaaatgcaaaaaattagctgggcatggtggcgcacgcctatattcccaactattcaggaggctgaggcaggagaatggcttgaacccaggaggtggaggttgcagtgagccaagatcgtgccactgcactcaagcctgggcaacaagagtgagactccatctcaaatcaaaataaaataaaaaaaaaaacctttccagtttttttaatagttcatatatgtatacatacatttatatttatatacgtatgtaattatatatacgtacacagacatatacgtataaatgtgtatctatatgtatatattgatggtttttttttttaatgtgaagttgcattgaagcggtgcttgaagatatc

SEQ ID NO: 48603 - DNA, 613 bp, Homo sapiens
gcgcgcaattaaccctcactaaagggaacaaaagctgggtaccgggccccccctcgagagtacttctagaattaattaaggcggaggcaggccaacatgaggatggccctgtattgattgttacctttctataaaacgtctgcaggctcctcaccacgttccaagcagattttctcctttaaacctccagagatcctgcccatttgtctacacttggcccgtgtgggtatctggtgtacagctgcttgtcacaggaacactgaattctgttcctgtacccgttgctcgtcacagctggacagagagtatggacttaaaagggtccagttatccatctctgcattccgtaaatatttattcatcactttctttttgacagactctgcgggaggcactgctataaaaagataatgaatgctgatgcggctggattacatgaggtcaggagcttgagaccaacctggcaaacatggtgaaaccctgcctctactaaaaagacaaaaattagctgggcatggtggcatgtgcctgcaatcccagctactcgggaggctgaggcaagagaattgctgaacctgggagatggaagttgcagtgagccgatcatgccact

SEQ ID NO: 48604 - DNA, 470 bp, Homo sapiens
aaccctcactaaagggaacaaaagctgggtaccgggccccccctcgagagtacttctagaattaattaaggcgggtgtgctcttacacctcttcatcccactctgggggtacttatcactgtgacaacactaaaataataaaccaaaacactacctgacaaaaagcaaaaatatagataaaacacaagctaaaggcggcgactcgctgggtgattaaccaaagaacaccaaaatgtcattttcaaccccccttgagtgttagagtttatagactctgttatgatacttttcaagacctgggaaatatttgtatcctttagtgaaaaggggaagaatcaattactgaaagccataagcctacagtaacggagccaattaatcctttgtcatctttgttgagtttagttttcttctgttcttagcacgtcagctagtagatctttgatgaactgttgctcctctttaaatgt

SEQ ID NO: 48605 - DNA, 372 bp, Homo sapiens
  misc_feature 309, 310, 311: n = A,T,C or G
aagggagcaaaagctgggtaccgggccccccctcgagagtacttctagaattaattaaggcgggggagaatgttttcatgttacttatactaacattagttcttctatagggtgatagattggtcagtaggagagcacgttcagagggaagagccatctcaacagaatcgcaccaaactatactttcaggatgaatttcttctttctgcatcttttggaataaatattttcctcctttctatggaaaaaaaagcactcaaacccggaagaaaaaagagacaccccgtctaaaaaaaaaaaaaaaaaaannnggccccccccccccgggggggccccccccccccccctaggggggtttttttcccccccccc

SEQ ID NO: 48606 - DNA, 437 bp, Homo sapiens
ctaaagggaacaaaagctgggtaccgggccccccctcgagagtacttctagaattaattaaggcgggctgttaacgatagaataggttattacaggaaacgaaagattgatgctgtggtttgaacgtattccccaaatttcacgtgttggaaacttaatccccaataaaacagtgttgagatgtgggacctttaaaaggtgattaggtcatgagggctctgccctcatgaatgatgctggtttcaagagagtgggtaagttattacaggagtggactcttgataaaaggatgtgtttcgccactctcactattttttaaataatagagacaaagtctcactatgttgcccaagctggtcttaaactcccaagctcaatccatccttccccctcagcctcctgaaaagctggggccacaggcatgtaccatcatgcca

SEQ ID NO: 48607 - DNA, 601 bp, Homo sapiens
aaagggaacaaaagctgggtaccgggccccccctcgagagtacttctagaattaattaaggcgggaggagctaaaaaaaaaaaaaagattgggtactaagcttagtacctaggtaatgaaataatctgtacaaccaaccctgtgatacgaatttccctatataacaaaactgcacatgtacccctgaacctaataaaaaagttaaaacaattaccaatttgttaagttaaaaaagcaaaaacaaacaaaaaacaacatctgaggcgtatctttttacaagagattctagggagtgatgatttgaccaacacaatggggatccacaacaacatgaaaagtccctcaacactagcaagtggtgctgatgttggctggccaggctcaaaagaataactcaaaggctaacagagagtagccctgccacagcctacattctcaacgtatctgtcaaaatcttgggtttatatgtgttttagagtccagtagttgaggacatatatgagttcatatatgtggtctgataaggtgtgatataacatttccatggggaggaagattacactctgtgttcttaccacaacaaaacttttatcattcatgc

SEQ ID NO: 48608 - DNA, 369 bp, Homo sapiens
ggaacaaaagctgggtaccgggccccccctcgagagtacttctagaattaattaaggcggggcaactcgtcgtgggcacacgtgcaggaacgccaggttccccttctttcttctgaggttccccgcacctccttgggtgtcttgaagcccagaccgatgttcttgtagtaccgcgggagcttctccttgcctggaccccgcctcagctcagaaagccaattccctagattccaaaggccttcccagaccaattagcatgtcctgcagctgtcagctccctgtgcctagcctggacctcagctcatgtctagcacccagtctcccaaccccacacatattcacaaattaaagaaaataacaaatgacatg

SEQ ID NO: 48609 - DNA, 480 bp, Homo sapiens
ccctcactaaagggaacaaaagctgggtaccgggccccccctcgagagtacttctagaattaattaaggcgggaggatgctaggaacgggtctctgcaggatgaagcatgtggaagagatccctgggggtgtttgtctttctttattctccttttccttcccttctctccctttttccaccccagccctgccttatggcaatagcagccacacatccagataaaacataattcactttttactcgctttcaaaatgtcaacagtaaagatgaacaggatgcaagatgaaagaacattgaaaaataaagattaacaagaaagtagtttaaataaaagagagaaaaaaaaatcaccaataaaaggtagaaggctaaagataaatgaaggtagtaaaaatggctttaaaaaatcttacccaatcttacccaattcttatttagaataagttccaaaaaaaaaaaaaaaaaatcataaaaaaaa

SEQ ID NO: 48610 - DNA, 485 bp, Homo sapiens
  misc_feature 334: n = A,T,C or G
gcaattaaccctcactaaagggaacaaaagctgggtaccgggccccccctcgagagtacttctagaattaattaaggcgggagcattgcctgaagccagaaatttgagatcagtctggaagataaagtgagactctatctctacaaaaaattgtaaaataaataaatcaataaataaggtattgttttgctacattatcctattttaagtgtcagaaattgaatattaccttgggttttttttttttacattttttttcattgaattctaatttcataggtagatcagtgactcagagagtctagagaaaaaagactgctcttagaagcaaaanaaaaaaaaaaaaaaaaaaaaaaaaagcggccgccaccgcggtggagctccaattcgccctatagtgagtcgtattacgcgcgctcactggccgtcgttttacaacgtcgtgactgggaaaaccctggcgttacccaacttaatcgccttgc

SEQ ID NO: 48611 - DNA, 498 bp, Homo sapiens
gcgcgcaattaaccctcactaaagggaacaaaagctgggtaccgggccccccctcgagagtacttctagaattaattaaggcgggggcggcaggcttagggctggctagtttgaacaatttcagcaggctctgggtcacaggttgtctggtacttggctctagggttgactagggcatgggactagtggcccggcatgtaagcaccaaataaaggaggtgactgggagtgcagactctggatgggttggtgttcctattacaggcacacttgcaggagaatcgcttgaacccgggaggcagaggttgcagtgagctgagatcacgccactgtactccagcccaggtgacagagtgagaccctgcctcaaaaaaaaaaaaaaaaatgaaagtaagtaaacatatctatatggcacagtggggtaaatttgagggattttagggacatcttacatgggcctaggctaaaatagtcattgcgttttctttatattatataa

SEQ ID NO: 48612 - DNA, 483 bp, Homo sapiens
actggccgtcgttttacaccccggaataagcgtgtacccatgctgggtgccgggccccccctcgagagtacttctagaattaattaaggcgggcggatcacctgaggtcaggagttcgagaccagcctgaccaacatggctaaacccgatctctactaaaaatacaaaattatctgaacatggtggcgcatgcctataatcctagctacttgggaggctaaggcaggagaatcgcttgaacccaagacatggaggttgcagtgaactgagatcatgccactgcactcaagcctgggtgacacagcaaaaatctgcctcaaaataacatttaaaacaaagatctatcacccaaacatcggcgcccccgggcgggggggcccccctccccccttttggggaaaattggaccccccccaccggggccgattttttaatccagtccctcatagcactggtgaatgacccccagcctgagcacccgct

SEQ ID NO: 48613 - DNA, 448 bp, Homo sapiens
actggccgtcgttttacacccgggaacaagctataactatgattatggccggtggttttctttagagaaaaagaaaattactttattgcggcggaggcggtccgtgccctggaatagaaaaacacacccaggcttgatttggatccacaggcagagccaagggaaggtgtgattctctgaggaaagagtgattctgatatatgtacttgtcacattggtgttggacacatttgcgccaaaagtatggtaattctattattaaataattctctgagaacaaaaaagaaaaaagaaaaaaaaaaaaaaaaaaaaggcccccccccccggaatttaaaaaaaaaaaaagacggcccccccccccgggggggccccccccccccccctttaaaaaaaaaaaaacccccccccccgggggggtttttttaggggggggaaaaaaaaaaacccc

SEQ ID NO: 48614 - DNA, 628 bp, Homo sapiens
gcaattaaccctcactaaagggaacaaaagctgggtaccgggccccccctcgagagtacttctagaattaattaaggcgggcattcaaaaggattccagagccagacggttacagagctaacctttaaagaaggaaaactgtctgtctgtctgtccattcatctgtctgtctgtctatctatctatctatctatctatctatctatctatctatctatctatctatctaatcaatcatctgttttctagctttattgagggatagttgtcaaataaaatttgtatgtatttaaggtgtgcaacatcatgatttggtatatgtatacaccgtgaaatgaccaccacaactgagctaattaacacatccatcactgcaaatgcagtgagaacacttaagatctactctcctagcaaatttcaagtatacaatacagtgttattaactatagtcaccatcctgcatgttatgtcctcagaatttatacatcttattactgattatgcccttttgaccaacatttccctatttcccacagcccctggcaaccccaattctactctctgcttctgtgagttcagtgactttaaattccacaagtgacagccgggcgcaatggctcacacctgt

SEQ ID NO: 48615 - DNA, 500 bp, Homo sapiens
tgatacgccaagcgcgcaattaaccctcactaaagggaacaaaagctgggtaccgggccccccctcgagagtacttctagaattaattaaggcgggcaaatgctcacaaagacctacgaagctgttatctctcatgtctgctttacctccaagcactgcacaagcaggaagaaaagaaaacagcaaagttgtaatctttctggctaagtaaacccaactgcaagaactagtagatttatatttgatgtgagcaggcatttgagaaaatctctgtcaaatagctagctcacatgaagctaataaagcagagatttttattgctaaacacgacaaaaggatgatattttaaaaataattttgaaaactcaccaaacaaacaagtaaaatttacaataagcaacaaaaaaaacccaacgggatgagagagaatattatttcagggttgttgtaatagaaaaagtctagttttcagcaacagcaatgaaatacaaagtgtgcaa

SEQ ID NO: 48616 - DNA, 541 bp, Homo sapiens
accctcactaaagggaacaaaagctgggtaccgggccccccctcgagagtacttctagaattaattaaggcgggcgctcggattgacagatcctcttggaactgacgcaggataatatcttgaatccatgtggctgcacgagctggaggcataaagcgcgcctgtggacgcacggctgagctaccaaccattactgatgctaaaaaatcaacgcgcctaatggacatcacaatacttgacatctagactaaagcaatgctaacatttctagtgcctttacgacataaaattacatcttactatcaatatgaatcaatttatcccttgatttgcaagtgcagcctttgcatgccatgcacactggctcagcctcattaagaaataacatgtgattgaaagcaaacgctggatccccttggccttataaatgtcccaccgccttcgggtttcccaaaaccacttccctgtgggcttccaaaagggcctttatcatttctccattttaaacccttctttcctgcttccatacacccaaggcttg

SEQ ID NO: 48617 - DNA, 499 bp, Homo sapiens
cgcaattaaccctcactaaagggaacaaaagctgggtaccgggccccccctcgagagtacttctagaattaattaaggcggtgccaaaacactgaaaagtcaagataataatttagtacaatattttttaagataaacattaatgcaatatgatggacaaaatatcaacattttaaattaacgctgctgttgtttgataatcctccactattatgcaatgagaatggtcatttctacttaactggtggagtcccccacttggaaggacacaatggtgtccaacaggtcgggcattgtggatctttctatatagtcaattttttttattgtagagcttttattaacttttttcatttggtacaaaatatgaggggatatactgataagtgcatatacaggcatactttcttctatatttttgcctcgggctctagtatgattcagcaggatactggatttaaggattcagtctgtcagctgatacagcatgaagatactt

SEQ ID NO: 48618 - DNA, 370 bp, Homo sapiens
gcaattaaccctcactaaagggaacaaaagctgggtaccgggccccccctcgagagtacttctagaattaattaaggcgggatgcgattatttatctgtcaattcttagaggaaatcaatggacaaagcagagaattcttttactctagtaacagaatacaaatgttattatctttaattatccaaaaatattagaatagtcaacagaggtatgagggcacataaaaataaaatgacaatttgaacgtgccccgccccaccgtggggcacatcagatacacccggtgtgcataaaatctagacggctgaggaaggaattgttcaagctaaaactggtttcaagccaaccccatggcctccatgactttta

SEQ ID NO: 48619 - DNA, 495 bp, Homo sapiens
ctactaaagggaacaaaagctgggtaccgggccccccctcgagagtacttctagaattaattaaggcggggagatactgagtttccttagaaggctcaaggttgaaaaaatagttaaagaggttgactaagaggaagaaacagtgagctgacatgaatggagcaggtgagtctgagagagaactgaatggggtgtctttgttttaaaaatcaaaatcaaaagccatgcttggtggctcacacctgttacgccatcactttgggaggccgacgctggcgggtcacttgaggctcgagtctgagaccaacctggctaacatggcaaaacccatctccattaaaaatagcaaaattagccaggtatgtggtgcacgtctgtagtcacagctactcgggaggctgaggcttgagaatcgcttgaacctgggaagtggaggttgcagtgagccaagatcatgccactgcactccagcctgggagacagagcgagactccc

SEQ ID NO: 48620 - DNA, 460 bp, Homo sapiens
aaccctcactaaagggaacaaaagctgggtaccgggccccccctcgagagtacttctagaattaattaaggcggggtttatatgcactttcttccgatctgtacctgagaggtttgtggaaaagatggcaaatggggaataaaaagattttgtgtcacaataataaataacaaaaaaaaacaaaaaaatataataaaaatacacgccccccccccgggggggggcccaatgccccccattatggaggccaatttcccccccccgctggggcggtaaaaaaaagggaacccgggaggcggaccttgcaataacccaaaattgccccactgcacttccacctgggccacagagcgagactccgtcgctgaaataaaaaaaaaatataaaaaactccgcccccccccccgggggggaaccaacatccccccttaaggggggttttttccccccccccattggg

SEQ ID NO: 48621 - DNA, 483 bp, Homo sapiens
gcgcgcaattaaccctcactaaagggaacaaaagctgggtaccgggccccccctcgagagtacttctagaattaattaacgcgggggaaggaaagcgaaacaggaagggttgagagaaagaaaaagaaaaagaaaacacacaattaaggtagtgctacctgataagtctgtccagtgaggggcaggtggaaagctgacctgcgctgagattacgggtttgaggcacgcaggccttcccctttctgaaatgaaatacttttatctttattagaatttaatagtgatgataggctggaattgcatgtgccgtctggcctaaaaaaaaaaaaaaaaaaaaagcaaaaaaaagaggcggccgccaccgcggtggagctccaattcgccctatagtgagtcgtattacgcgcgctcactggccgtcgttttacaacgtcgtgactgggaaaaccctggcgttacccaacttaatcgccttgcagcaca

SEQ ID NO: 48622 - DNA, 491 bp, Homo sapiens
cgcgcaattaacccttactaaagggaacagaagctgggtaccgggccccccctcgagagtactgctagaattaattaaggcggggtacagtggctcatgcctgtaatcccagcactttgggaggccaaggcaggtggatcacttaaggccaggagttcaagaccagcctgggcaacatggcaaaatcccatctctactaaaaatacaaaaatgagctggatatggtggtgcatgcctacatgggaggctgaggtgggaggatggaacgagcctggaaggtggaggctgcaatgagctgagatcacatctctgcactccaccctgggcaacatagaccccatctcaaaaataacaacaacaacaaattctagcgagctatccagagtgggaatgtgataaattgatgttagtcccctttggtacctaaaagtgtttgagttctttaataatctttcatgacctaggcatctgacttcattaaaattaactaa

SEQ ID NO: 48623 - DNA, 505 bp, Homo sapiens
ctggccgtgtgtttacacccctaaataaagggaaacacatgctgggtagccgggccccccctcgagagtacttctagaattaattaaggcgggtaaatgggtgcagcacaccaacatggcacatgtatacatatgtaacaaagctgcacgttgtgcacatgtaccctaaaacttaaagtataataaaaaaaaaaacagcttcccaattaaaaataaaaaaaaaaaagactctggggcccccactggggggtgatcaatgacccacttattgtgaggatattcccccaccctatgcggtcctgttttaatacttggaaatccgtctagttaacatttcaagggcaataccgtgttggttttgactggatattcatataaactttttaaagagttgagtgatagagctaacccttatctgtaagttttgaatttatattgtttcatcccatgtacaaaaccattttttcctacaaatagtttgggttttgttgttggttcttttttt

SEQ ID NO: 48624 - DNA, 371 bp, Homo sapiens
aaccctgaataaggggaacacatgctgggtgccgggccccccctcgagagtacttctagaattaattaaggcgggcggatcacaaggtcagatcgagaccatcctggctaacacggtgaaaccccatctctactaaaaatacaaaaaaattagccgggcatggtagcgggcgcctgtagtcccagctactcgggaggccgaggcagtgaatggcgtgaacccgggaggtggagcttgcagtgagctgagatcacgccactgcactccagcctgggcaacagagcgagactccgtctcaaaaaaaaaaaagccatttatgacaaacccacagccagtgttatattgaacagggaaaagttgaaagctttccc

SEQ ID NO: 48625 - DNA, 575 bp, Homo sapiens
agcgcgcaattaaccctcactaaagggaacaaaagctgggtaccgggccccccctcgagagtacttctagaattaattaaggcgggaggattgcttgagtctgggaggtcgaggctgcagtgagccactgcactccagcgagtgatggagtgagaccctgtctcagaaaaaaaaaaaaaaaagaagaaaaaatatattaattcacaaaattgtcaaccacatgttgagaaatacatttttatacttgctgtatatttttcaataggtaatggttcaaaaattttaaagtacaaagggtatacagtagatggtagatttctgccacaactgtgcccacccaaccttttgtatttttccagaaacattctatacatatataaggaaatgcatataaatatatacatatataaaaacatatgcattttacatatgtgttaataccattggcacaaccacagacattatgcatgccggtttttttcacttgatgtatctgggttcttctttcctatacatttatctttttggttcttttgaatcagaagaagttatgaaggggaaggaagacatgcttg

SEQ ID NO: 48626 - DNA, 494 bp, Homo sapiens
  misc_feature 434: n = A,T,C or G
cgcgcaattaaccctcactaaagggaacaaaagctgggtaccgggccccccctcgagagtacttctagaattaattaaggcggggatgacattattcaagactattgtaatagggttcaagactgttgcaataggagaaagaagctgaactcaactctgctgatgcaaatggtggaaggatttttaagggctagggtaagctaacagaaaagtactggagtgcattatggagaaaattggtcaatgtgattcgaccatctgcttgttaattagcacttatctaagttagattacttcccctcctcaaaggcttgaatatggggtcgctatctcctttcctgcttacatttctaagacatggctttcaaatccttaagaaagacattcctgggttgtaaaactggcaagagtctgggaaaagatttacatctcanaaaaaaaaaaaaaaaaaaaaaaaaaggcggccgccaccgcggtggagctccaattcgccc

SEQ ID NO: 48627 - DNA, 490 bp, Homo sapiens
gcgcaattaaccctcactaaagggaacaaaagctgggtaccgggccccccctcgagagtacttctagaattaattaagccggggatggatcttttctaaatgttattacttgtaaataaagtctatttttctcccgtgaaaaaaaaaaaaagagaaaaaaaaaaaaaaaaaaaaaaaaaaaaaaaaaaaaactatattaaaaaagctaaaaaaattttaaaaatggtgacttctgtggttttcctagcatttgtctctaacaaatggtgaaataattactcatggccctctctgccattgtctttcattttttcacagtgaaattagacccctttacttcaccattctgccactgcaaattaagtataaagaaaatagcaagagtgtccacaccagtagacagtaagcttctctacctgtaagtgatgaaatcatagctaatgcacttgccatggaatttttaagatgattggtgtcaaaaaaatttcaa

SEQ ID NO: 48628 - DNA, 457 bp, Homo sapiens
agcgcgcaatttttcccttacttaagggaacaaaagctgggtaccgggccccccctcgagagttcttctagaattaattaaggcggagctacagtgagctgtgatcgcatcactgccctccagcttgggcaacagagtgagaccctgccacaaattaaaaaaaataataatgacaaagtctataatatttaaatttctgaaaatgaaagactgttgaaagtcttaagagctgccagataatagcatcaccttatctatgatgggaaatgcaattagaatgacagtggatttcccatcagaaactactgcctgagaaaataacaatatttttcaagtcctggggaaaatgaaatctgtatactcagaaattaagactttcttaaatgaaggaaacctaagagaatttatttgcagattgattctaaaaaatggctaaaggggcctgtaatcccagcat

SEQ ID NO: 48629 - DNA, 417 bp, Homo sapiens
tggccgtcgttttacaccccggaacaagcaatacccatgatggtggccggtcgttttctttagagaaaaaagaaaaaactttatgcggggggagaaatccgttaaacaaaactacatcaacgcaattagtgaaacctagagtgtagaaaaccacacaaactatttcagctttaggttttataaccaagtgaatttcaaagaaaaaaaatatcagtgggatgggattacctaggaggcatatctaccaattgccatataaggactacttgggatcccaatttaaatgaaaaactgtgtatgtgtgtgtgcgccaatctgaaatattggaacaatgaatgtttcataatattaaggaattattgttaatttttaggtggttaatcctactgggggtatacttttaaaaatattcttata

SEQ ID NO: 48630 - DNA, 455 bp, Homo sapiens
gcgcgccaattaaccctcactaaagggaacaaaagctgggtaccgggccccccctcgagagtacttctagaattaattaaggcggggctaaaatagcggttttatactacagccattaagtatggtggaagcaggcagggattccctgttatgtctcttgagtttacctgacaggcctttcttctgatgatgcctaatgatggcaagttaccgttctactacagttttcccacttaaacaattatttctaatctaatcctgttaaaactactctctagtaaatgttatcttaagccaagaactcaatttccacatttccagacatcaccttcatataagactgcttataggggtggagtatgaatccattcctgagatgatgaaggaaagacagagaatgggagtctctatcctacacagatgtggggcctattattccatttgtttttgaaaaa

SEQ ID NO: 48631 - DNA, 371 bp, Homo sapiens
agcgcgcaattaaccctcactaaagggaacaaaagctgggtaccgggccccccctcgagagtacttctagaattaattaaggcggggagaggagtggtatttgatgctttctgtggacattgtaaccctaaacacatcatgtattttaaatgccacctacataaataaaacataagcttattgcctgaatataggacaaaaaaatctaagataacatgaaaaaatggactctagaggtcatatgaaattcaaggaaacagaaccaaaccaaaaaacattaaagtggtcaccacatatgggggaaactaccagttccctaaaacagaagcagtattaactccgcaaaatggccaaaggtacaaaatgcatta

SEQ ID NO: 48632 - DNA, 416 bp, Homo sapiens
ggaacaaaagctgggtaccgggccccccctcgagagtacttctagaattaattaaggcggggtaaggggtggtgatcctgccaaatacgctaggaacactgttaaacatactacaatgtataaaacagcctttacaccaccaccaccactcagttgtaatgatacaaaatgccctgaggggtgaattcactcaattgagaaccattggattagagtgtagacttctggtaatgaaattccatcagattatgcacatttttaaaaaccttaatatctcaactgttttgattcttatatctcaaacttcaatgttcttgtcaagaataccagtaaagcccttgtgggcttcttattgataggacctgcttgaaattcaaaatagcaacattacttgttttttcagtgcacaaagaccc

SEQ ID NO: 48633 - DNA, 475 bp, Homo sapiens
ggagtcgacgcgtaatacgtgttctgcgacccggcaccaccgctgggttctacgccccgccctcgagagtacttttagaatcaatcacgggtgtgagaaggtgacaaagacctacaaaaatgttttatgtcatggctgctttacctccaagcactgcacaagcaggaagaaaagaaaacagctaagttgtaatctttctggctaagtaaacccaactgcaagaactagtagatttatatttgatgtgagcaggcatttgagaaaatctctgtcaaatagctagctcacatcacgattcttgtgactaggtttttattgctaaacacgacaaaaggatgatctcttaaaatgtaatatgaaaactcaccaaacaaacaagtaaaatttacaataagcaacaaaaaaaacccaacgggatgagagagaatattatttcagggttgttgtaatagaaaaagtctagttttcagcatct

SEQ ID NO: 48634 - DNA, 448 bp, Homo sapiens
gcgcgcaattatccctcactaaagggaacaaaagctgggtaccgggccccccctcgagagtacttctagaattaattaaggcgggggaggaggaagaaacaattggcttactagagattgggaagaaaagaattggtcacatggaataggggcaacttgatgaacaactagctagttatatacaaaagatacttttaaaagataaaaatacatttaaaagaatatgtaaaaatggaaaaggcaaaaagtcggaagacaattaaataagaattggattataaagcggccgccaccgcggaggagctccaattcgccctatagcgagccgaattacgcgcgctcactggccgtcgttttacaacgtgcgagactgggaaaaccctggcgttacccaacttaattgccttgcagcacatccccctttcgccagctggcgtaatagcgaaga

SEQ ID NO: 48635 - DNA, 373 bp, Homo sapiens
gggaacaaaagctgggtaccgggccccccctcgagagttcttctagaattaattaaggcgggtaggcctaggattgtgggggcaatgaatgaagcgaacagattttcgttcattttggttctcagggtttggtggaaattttttgttatgatgtctgtgtggaaagcggctgtgcagacattcaattgttattattatgtcctacaagcatagaataaaaaaaaaaaaaaaaaaaaaaaaggaaaaaaaaaaaaaaaaaaaaaaaaaaaaaaggcggccgccaccgcggtggagctccaattcgccctatagtgagtcgtattacgcgcgctcactggccgtggttttacaacgtcgtgactgggaaaaccct

SEQ ID NO: 48636 - DNA, 322 bp, Homo sapiens
taaagggaacaaaagctgggtaccgggccccccctcgagagtacttctagaattaattaaggcgggggggggttacaaaattacaccttaaactctattaaataaactacggggccggctccgaggggtgcttacttttccccataattgtttccacctggactccccaccagaggactagttttaaacatttgagctggagaggcttatgggcaatatgaagtgggccaaattcttgcaatacaccctattcaattgaaagtacagtgtctaaggataagaatacttctttaaagaccaacaattgttttaatgcaatctt

SEQ ID NO: 48637 - DNA, 453 bp, Homo sapiens
ggaacaaaagctgggtaccgggccccccctagagagtacttgtagaattaattaaggcggggtgatcaggaatgccttggagaaggatcaggagggaatgaaggggcaaatcctgcagatgagggagagaaggacattgcaggcaaagggaactgcaaatgagaaaactctgaagcagatgcatgtctgggatattccaagaacatcaaggatgttagttgggctaaaatgagtgagaagatgcttggttgaagatgtggaaaaagagtgggagtgaccctcaaggccagaaacagaaagttctttttctgggtgagcagggagccattggaagggtctgaaggagaggagaatgttgtaatctgactggtgattttagaagatcactctggctgctgtgttgagaacatgccttgctgaagtaagagagtaagggagaaagcagggagacct

SEQ ID NO: 48638 - DNA, 412 bp, Homo sapiens
cgtcgttttacaacccggaataaggggtaaccatgatgggtgccgggcccccccttgagagtactaatagaattaagtagggcggggggtacaatataaactctatacacataaaaaagataatacagaaatgttatgaacaaatccatgtcaataaattcatgaatttagatgaaatggacaaactccatgaaagacaaactaccatcggttactcaagaacaaatatataacctgaatagccctaacctattaaagcaaatataattcatagttaaaaattagatattttcgagtgaaggaaattccaggtctatatggattcactgatgaatgctaggaaacatctaaggaagacgtaaaaccaaacttacaaaaattattctatagtgtgagaatttgatggacccat

SEQ ID NO: 48639 - DNA, 457 bp, Homo sapiens
gcgcgcaattaaccctcactaaagggaacaaaagctgggtaccgggccccccctcgagagtacttctagaattaattaaggcggggtaatttttaaattcatatcaatcatggatgagtctcgatgtgtaggcctttccattccatttattcacactgagtgtcctacaataaacttccgtatttttaaaaaaaaaaaaaaaaaaaaaaaaaaaaaaaaaaaaaaaaaaaaaaaacacggaaaaaaaaaaaaaaaaaaaaaaaaaaaaaggcggccgccaccgcgggggagctccaattcgccctatagggagtcgaattacgcgcgctcactggccgtcgtttaacaacgtcgtgactgggaaaaccctggcgttaccaaacttaatggctttgcagcacatccccttttctccagctggcgtaataacgaaaaggcccgaaccgatcgcccttcc

SEQ ID NO: 48640 - DNA, 519 bp, Homo sapiens
gcgcgcagcgcactctataccttcactaaagggaacaaaagctgggtaccgggccccccctcgagagtacttctagaattaattaaggcgggcagatcacgaggtcaggagttcaagaccagcccggccaacatggtgaaaccccatctctactaaaaatacaaaaattagtcgggcatggtggcggacacctataatcccagctacttgggaggctgaggcagtagaatcgcatgaacccaggaggcagaggttgcagtgagccgagatcgcgccactgcagtccagcttgggtgacagagcgagactctgtctcaaaaaaaaacaacaaatcagttgccttttacatactgggtccacataaggactgtgctatagttagattgtcaacatcacatatagtgtcctggtcaggctgcaactctctccaaagcatgctcttcacatgctttagttcaaaatgagtcattatatctgattgctgcgtggcaggctattctgctagtccttcctttcaca

SEQ ID NO: 48641 - DNA, 453 bp, Homo sapiens
ttaaccctcactaaagggaacaaaagctgggtaccgggccccccctcgagagtacttctagaattaattaaggcgggaattctaccactggtggttcagtggtagaattctcgcctcacacgcgggagacccgggttcaattcctggtcaaggcacgaggaaagagaaagccaagatccaccaccggaagaagaaacagctcatgaggctacggaaacaggccctgaagaacgtggagaagaaaattgacaaatacacagaggtcctcaagacccacggactcctggtctgagcccaataaagactgttaattcctcaaaaaaaaaaaataaaagacaaaaaaaaaaaaagaaatacccaatataaaattagaaatatggggagcatccggtttgaaatacaaaaaaaaaaagggggccgccaccgggggggacccccaattccccctatggg

SEQ ID NO: 48642 - DNA, 575 bp, Homo sapiens
cgcaattaaccctcactaaagggaacaaaagctgggtaccgggccccccctcgagagtacttctagaattaattaaggcgggggttttctagttccttagagaaatattaaacagtggagaattgaaggtagagatgaatccttgaagtgcatgaaacgagcactgatagtttcataacttctctaattgctaagtaacctgaagtgtgtcccaaaggttgcacgttttactttaaagctcattttgacttttaaaaatgtcagttttctctgctaaacagacttagccatttaagatctcataaatagtcctgtttttcaaaaaaattatgacagtatagtcagcttatagtcagcttattgttatcagtctgaattaagagatatactcttccttcttttgctaattatgtattattttctccttattctgcagcctgtgactgtcatcctgagggatctctttcacttcagtgcaaagatgatggtcgctgtgaatgcagagaaggctttgtgggaaatcgctgtgaccagtgtgaagaaaactatttctacaatcggtcttggcctggctg

SEQ ID NO: 48643 - DNA, 306 bp, Homo sapiens
agcgcgcaattaaccctcactaaagggaacaaaagctgggtaccgggccccccctcgagagtacttctagaattaattaaggcgggggcatcagtaaacattttgaaaagttgagtttgaaaccaggctttactagcatttgaaaagggtgtctggtagggcaatttggcttcaggaactgttgtaaacaaaggcaatgtgacacatataaaccagtttgggctggaacttactggattagaaaaattttctacaaggtttcctcccatttaaaacaaaagggcaaagtcgtcagtgtaacactta

SEQ ID NO: 48644 - DNA, 431 bp, Homo sapiens
  misc_feature 128, 186, 269, 270, 271, 272, 273, 274, 275, 277, 279, 281,282, 283, 286, 287, 290, 295, 296, 298, 301, 320: n = A,T,C or G
aaagggaacaaaagctgggtaccgggccccccctcgagagtacttctagaattaattaagagcggggcaggaatcaaagacagatactgcgacataaggtgctccggctccagcgtctcgcaatgctntcaaaaaaaaaaaaaaaaaaaaaaaaaaaaaaaaaaaaaaaaaaaaaaaaaaaaaaanggcgccccccccccggggggaaaaaaaaaccccccaaaaaaaaaaaataaaacccccccccccgggggcggtttaaaaaaaannnnnnnangntnnngcnnaangatanntngantcaaagaaaaaagttgaangaacccgtaaatgtgtcactgcactccaacaagggtgacagagatctaatctcttaaataaaattaaaaaaaaaataaaaaatactcttaaataaaattaaaaaaaaaaaa

SEQ ID NO: 48645 - DNA, 506 bp, Homo sapiens
cccagcgcgcaattaaccctcactaaagggaacaaaagctgggtaccgggccccccctcgagagtacttctagaattaattaaggcgggggaagctcttggaagttctacatgtaaaatcacataatttgtgaacaggaaaaaatttccttcttcctgtccaattctgatatcttttctttttcttgtctaattactctgactagaacatccggtactatggcgaatagtagtggtaaaagttaactaagtctcaatagatttttttaaatagaataaaaaataatagtaagttaaaatataaaatgattgtataacacacattcaacatacgaatatacatttacactgttaatatataaatacaaaataaagtaaaatataaaataatattagctcggtgcagtggctcacacctgtaatcctaacactttaggaggcaaagacaggaggactgcttaatgccaaggagtttaagaccagcctggacaacatagtgaaatcctg

SEQ ID NO: 48646 - DNA, 304 bp, Homo sapiens
cactaaagggaacaaaagctgggtaccgggccccccctcgagagtacttctagaattaattaaggcgggtgatggtggctatgatggtggggatgatgaggctattgttttttgtgaattcttcgataatggcccatttggccaaacacagaatcagcaaagaggaggccatgcgctggttccagcagaagtatgatgggatcatccttcctggcaaataaattcccgtttctatccaaaagagcaataaaaagttttcagtgaaaaaaaaaaaaaagaaaaaaaaaaaaaataaataaaataa

SEQ ID NO: 48647 - DNA, 584 bp, Homo sapiens
gcgcaattaaccctcactaaagggaacaaaagctgggtaccgggccccccctcgagagtacttctagaattaattaaggcggggagaggaaagaaggaaggaaggaaggaaggaaaagaagggaattagattataactcaaaacattgaaaaaaaatccttgggtccacgttgatataaataaatgactaaataagaactttcaataatttatataaatcctctgtcttaaagagatgggctgtaagtccctcctccttaagtgtgggccatgcatagcaacttccttgcaaagagcacagaacagaagtgttgggggggggagcggggtcactttacagcagagaagcctgactaacacaatctcacccaggtgatcaaggtaaaagcagccgtgatgatccatcttgataggatgtacccttggcatgatgtgatgaaaatggcattctgcctctgtgggcttgctaccaccaacacttaactccagactaatgggaaacacattagacaaatgtcaatgagggatatgctacaaaatacctggccaatattcctcaaaactgtgaggcttacaaaaaagaa

SEQ ID NO: 48648 - DNA, 490 bp, Homo sapiens
gcgcagcgcgcaattaatcctcactacagggaacaaaagctgggtaccgggccccccgtccagagtacttctagaattagattaaggcgggcatggtggtgggcgcctgtagtcccagctactcaggaggctgaggcaggagagtggcgtgaacccgggaggcggagcttgcagagagccgagatcgcaccactgcactcccccctgggcaacagagcgagactccatcttttaaaaaaaaaaaaaagaattagtgaagattcaccaggggttgagctcaaggattgcgtgggggacctgacaattctctaggcaaagggaatgacctggataaagatacagaggcaagcaaacattgctaaaaatagtatcctttgcaagctctattgcttggacctgagaaaataaaatgtatagctttatttatttctgcgagatgagttaccaatgggtactgctattcaaaaaagcaaaacagtgcaattctttt

SEQ ID NO: 48649 - DNA, 609 bp, Homo sapiens
gccaagcgcgcaattaaccctcactaaagggaacaaaagctgggtaccgggccccccctcgagagtacttctagaattaattaaggcgggcgcctgtagtcccagctactcgggagactgaagcaggagaatggcgtaaaccctggagacagagcttgcagtgagccgagatcccaccattgcactccagcctgggtgacagagcaagactctgcctcaaaaaaacaaaaaaaacaaaaaaaaaaacaccagagaaaactcctaaattcactctgagaaagaaaaaggtgaatgagaattttcaacaaataaaatatacagatattattttctgaaactcacctttttatgctctttgtaaatattttcttacctttcaagccctactaataaaatgcaatttacagttaaaaaactgaggtcagccgggcacagtggctcacacctgcaatcccagcactttgggaggccaaggtgggcagattacttgaggtcagaattttgagctcaaacagcctggtcaacatggcaaacccccatctctactaaaaatacaaaaagtagccaggtgtggtggtgggcacctgtagtcccacctacttgggaggc

SEQ ID NO: 48650 - DNA, 321 bp, Homo sapiens
ctggccgtcgttttacacgttttacaccccggaaaaagagaaacacatgatgggtggcgcggccccccctcgagagaactaataaaattaattaaggcgggtgttgggtttgttatgggttaaagtgcttttgaaataagtaaattattagtttgattttcaaaaaaaaaaaaaaaaaaaaaaaaaaaaaaaaaaaaaaaaaaaaaaaaaaaaaaaaaaaaaaaaaaaaaaaaaaaaacgccccccccccccggggggggaccccaccccccaaaaaaagaggtttttcccccccccccccgggggggttttttaaaaaaa

SEQ ID NO: 48651 - DNA, 496 bp, Homo sapiens
taaccctcactaaagggaacaaaagctgggtaccgggccccccctcgagagtacttctagaattaattaaggcggggcgcgaagttaaaacttccaggatctttgaaagaaaagagaacaaagctgaagatatcatgtgcatcaaagtaaattccagatgaagaatgaatgtaaaatatgaaataattcaaagcactgtggaaacacaggtaggatttatctgagcttcaaggtggagaaagccttttcaagtgcaatagtaaaagaaccaatcaaaagggaaaataatgcattaattatataaaaatgaaaaacaatgcaaaattaaaaagaaaagaaaaaccaagtaacaaatgggaaatatttgtaatacagcaactagttaatatccttaatacatgaagggacatacataaggaaaaaaataaatatcaataaaatgtgcaaaagacacaaatagaacactcaccaaagtagaaattaaaatggctaaaaa

SEQ ID NO: 48652 - DNA, 511 bp, Homo sapiens
tacgccaagcgcgcaattaaccctcactaaagggaacaaaagctgggtaccgggccccccctcgagagtacttctagaattaattaattatccacaagtgtgttgactcaaagcctttgttattaaatctgtgctgaataaatgcccacagggccagctagtcaggttatatggctgctacaactctttctgtgagtggcctggttccctagccactctttcactttatatcggtgtctgagtatgttattcatccaccgtgcagcctgggtctgcaggtcagaccccagcatttactcaaaaaaaaaaaaaaaaaaaaaaaaaaaagcggccgccaccgcggtggagctccaattcgccctatagtgagtcgtattacgcgcgctcactggccgtcgttttacaacgtcgtgactgggaaaaccctggcgttacccaacttaatcgccttgcagcacatccccctttcgccagctggcgtaatagcgaagaggcccgcaccgatcgccct

SEQ ID NO: 48653 - DNA, 466 bp, Homo sapiens
  misc_feature 429: n = A,T,C or G
accctactaaagggaacaaaagctgggtaccgggccccccctcgagagtacttctagaattaattaaggcgggggagggaaactgatttttatttgcctgatttaagtgtctgataaacaaatctttgttctcttaggctgcaatggaacaactttaccagggttttggcatttcctttccttttctttataaaacatgctcagcaaactgcaccagttaactacagtttggtcaattgttatgttaacaattatgacatctgcaatgttttatcaagcacctcatttaataaaatcactgttgtgaggacgtctccttaaaactagtcctgttgggctagtctgtccggcaccgggggggactctcctccacccattggaagggcttaaaaccgcctcgccaccgtcaccttttttaacacttacttntacctacgcctaatctactccacctcaatcacactac

SEQ ID NO: 48654 - DNA, 355 bp, Homo sapiens
gcgcgcaattaaccctcactaaagggaacaaaagctgggtaccgggccccccctcgagagtacttctagaattaattaatgcccgtaaagtgaagatctttgtaagtagcacctattcactgattaactgctgctggaaggccttccatatgccctgttaaaatcataaactcctcctgcccccaaataaacatgatccacatttctatagcgattattaccttgtttctttaatatttttatagcgcattcctaaacactatacattatagcttagacctgctgtttttctaaccttttaaattaactttattaaggaataatttacatacaataaaatgttactctaagtgct

SEQ ID NO: 48655 - DNA, 512 bp, Homo sapiens
gcgcgcattaccctactcaagcgcgcaattaactcctcactaaagggaacaaaagctgggtaccgggccccccctcgagagtacttctagaattaattaaggcgggttatgcagttctctaaatgacgtcattgaaagtacatctctccctccaagcacaagcactcaattagttgagctaatagctctgacaataacacttaaattaaacaatggaaaggtagctaacatttacactgactccaagtatgctttcctggttttccatgctcatgctgtcatctggaagggaagacattttcttaccactaatggatctcctgtaaaatatcaccaggaaattatcaggttattatcttcagttttccttccatgagaaatagaagttatgcatttcaggggacatcaaaagggaacagatgaggtagcctaaggaaatagactagatgatcaggccgctaagtcagcagcaaggaagcctcaagacatcaacacacttcaaaaccctctaa

SEQ ID NO: 48656 - DNA, 580 bp, Homo sapiens
ctggccgtcgttttacaccccggaaaaaaggggaaaccatgctgggtgccgggccccccctcgagagtacttgtagaattaattaaggcgggcgcctgtagtcccagctacttgggaggctgaggcaggagaatggtgtgaacccaggaggcggagcttgcagcgagctgagatcactccactgcactccagcctgggtgacagagcgagactccgtctcaaaaaaataaaataaaataaaataaaataattttaaaaagtgttgtatatatttacatatatacacatagatacataaaggaaagacaggcaggaaccacatgccatgctcaagatctagggctttctcttctaagcaaacagtgaagctccagagacacatttttaggcaggtaggtgagatcagagcttccttctggaaggaaataaggtaggtcagaagcgaggcccactttcccttcccctggttcacagagaggtaacagtaccagcaactacccaatctttccatctgtaaggattggaccaaggaccctctcctgcaccactctcacgctatggcccagtccgggcaatgctg

SEQ ID NO: 48657 - DNA, 463 bp, Homo sapiens
taaccctcactaaagggaacaaaagctgggtaccgggccccccctcgagagtacttctagaattaattaaggcgggggaggtgtattgaggtcctacatacaaacctcacatgtgatgatggtgtagtccaacttacacaaataatgagctgttatactgggcgtggtggagcacacctgtaatcccaactactcgggaggctgaagcaagaaaatcacttgaaccctggaggcagaggttgcaatgagccgagatcacgccactacactccagcctaggcaacagatcaagactctgtctcaaaaaaaacaaaacaaaaaggaggcacaaaaccccaggcttcaagtctctgcagcctgctccacatttgggcacagaaggactcatacaggcactgtgtgggcacgaggttttacaggggtggtcagacctcaggctttaatgaataaagacactactccc

SEQ ID NO: 48658 - DNA, 408 bp, Homo sapiens
ccctcactaaagggaacaaaagctgggtaccgggccccccctcgagagtacttctagaattaattaaaagctgatattcaggcttttttttttttaagaaaaaatacctttctgctttttctcatttggagcctgtttctgggaatttttttttttttctgttgactgaaacccctttttacatatgtttagtccctttgtttgcttcttttcttgttagtatgatgtaaagttttattggccttctgaaaaacttaaaatctccccaaattggcttagagctctcccattttcttctactttttcttcctttagctatctttgataccacataaagaaatctagaggagtcttctaatatctctgagaccctttgaggaacacagtaaagtgtcacatacaccttta

SEQ ID NO: 48659 - DNA, 486 bp, Homo sapiens
cgcgcaattaaccctcactaaagggaacaaaagctgggtaccgggccccccctcgagagtacttctagaattaattaaggcggggaggagaaatagaagcagtaaaggagccttcgaagaggtaagcaagtaaatacggatgaaaaccagaagaggataatgtgctatgagcccagtgaagaagtcctctggaaaatggatcaagtgcttcagaagactgagaattgaaccttggattcagtaacatggaggtcagtaatgacttttatgagaagagttttggtggaacagtcagggaaaaagtaagatacaattggcttacgagagaatgggaagaaaagaattggacacatagaatagggccaacttgatgaacaactagctagttattttcaaaaaaaaaaaaaataaaaaaaaaaatgcggccgccaccgcggtggagctccaattcgccctatagtgagtcgtattacgcgcgctcactgg

SEQ ID NO: 48660 - DNA, 354 bp, Homo sapiens
gcgcgcaattaaccctcactaaagggaacaaaagctgggtaccgggccccccctcgagagtacttctagaattaattaaggcgggggttattaaagaggaaattagagccagctgattacaaacacataatcaaagcttctgagcagtcacaaaatgagataaaggtttcagtgttttcaccataaactgatatactaattcctgtgagtaaatgagatcttcaagaaagagaatgtaaaaattgaagaacttaggacatgttgctcaatcttagggaatagacatttgaaagaaaaggaatgaacatgaggaatgaagggaacaaatgagaaacatgtgcctgctatcaactt

SEQ ID NO: 48661 - DNA, 561 bp, Homo sapiens
caggccggcgtctttccctttcaaccctgactaaggggaacaaatgctgggtaccgggccccccctcgagagtacttctagaattaattaagggggaaggaattggtacaaagtgctaattgagaaacactggctgataatattttccaaagctgatgaaaaacatcacaccagagaattcagaacctgtccaaaccataagcaagataagatgatgaaaagccacttacgccccatacgattgctggaaatcaaagaccaagagaaaatcttaaaagtttccagagattatggctgacttctcaacaaacaatggtatcatatatacaaagtgtaaataaaaaataactgccaaactagaattctatactcatcacaaatattccttgaaaataaatgtaaaataaagatgtttttacaaaagcacaaactaagagaattcattacaagcatactaaagaaattcattaccagtccactaaagaatatattacccaagctaaaaaaaaaactgaaagaaaattctttgagcagaaggaaaattatcctggctggaagccc

SEQ ID NO: 48662 - DNA, 457 bp, Homo sapiens
  misc_feature 252: n = A,T,C or G
aaagggaacaaaagctgggtaccgggccccccctcgagagtacttctagaattaattaagagcgggggacgggacttaaataaaggcagacgctgtttttctaaaaaaaaaaaaaaaaaaaaaaaaaaaaaaaaaaacaaaaaaaaaaaaaaaaaaaaaaaaaaactctcccccccccccgggggaacaaaaaccccccccaaaaaagggaatatttccccccccccttgcttagcattaaaaaaaaaacgnaattctaatatcttaccatgttaacagaaaatatcaccacttacaagaaaaacatgatgaaggaaaagataaaaggattctaaaacatgacggaggttgagataaagcttattcatggagttaaaaatgtatttcaaagaaaattgagaaaaaggactacagagccccgattaataccaatagaagggcaatgcttttaattaaa

SEQ ID NO: 48663 - DNA, 271 bp, Homo sapiens
gcgcgcaattaaccctcactaaagggaacaaaagctgggtaccgggccccccctcgagagtacttctagaattaattaaggcgggggaacagggacgataatatgacacccctagacactgtaaattatgaacagaggttactctagcctgcttaaagagattttggggcaaaaactccggccggcgccgacagtggctctccattacacccctataagctgtggattactcgcgcttattgtgcgatacttaccaactttaggactggga

SEQ ID NO: 48664 - DNA, 382 bp, Homo sapiens
  misc_feature 320: n = A,T,C or G
tggccgtcgttttacaccccggaatacagcgtgtacacatgctgggtagccgggccccccctcgagagtacttctagaattaattaaggcgggtgtggtggtgcatgcctgtaattccagctactcgggaggctcccgggaggcagaggttgtggtgagctggagatcgtgccattgccctgggcaacaggagcaaaactccatctcgagaatagaatataatagaatagaatagaatagaatagaatagaatagaatagaatagaatagaatagaatagaatagaatagacttgagaggacaaaaagacactacatctnagggcgcgcccccccccggggggaacccccccccccccctaaggggggggtttttccccccc

SEQ ID NO: 48665 - DNA, 519 bp, Homo sapiens
agcgcgcaattaaccctcactaaagggaacaaaagctgggtaccgggccccccctcgagagtacttctagaattaattaaggcgggagttttttcctaaaattgtaatataacttagtgatttagatcccaaactctagagtcagataggtccaggttccaattctagcttagcctctgcctagttgtatgaccattagcctcagtctcttaatctgtaaaatggggacaataatggtacctttctcataaggaaaattaatccaggtttatgaaatagccaggacaagtaagcagccaagagatgttagctattattattatcttatgattatgcaattcttgttccctgatctatttgtcatccactttcagacttccttgtggatgagaagtttggactaatctctatactctttctcccccagcctcctttgaaaaaggcacattctcagctgggtgtggtggctcacgcctgtaatcccagcactttccgaggccgaggcaagcggatgacaag

SEQ ID NO: 48666 - DNA, 456 bp, Homo sapiens
cgcgcaattaaccctcactaaagggaacaaaagctgggtaccgggccccccctcgagagtacttctagaattaattaaggcgggagcggctatttttcctaaatgagaattgttacattgcaaattgttgaataaaatattttgcgctccttcaaaaaaaaaaaaaaaaaaaaaaaaaaaaaaaaaaaaaaaaaaaaaaaaaaaaaaaaaaaaaaaaaaaaaaaaaaaaaaaaggcggccgccaccgggggggagctccaattccccctatagggagtcgaattaccccccctaactggccgtcgtttaacaacgtcttgactggaaaaaccctggcgtaaccaaactaaatcgccttgcagaacatccccttttcgccagttggcgtaaaagcaaaaaggcccgcaccgatcgcccttccaaacagttgcccagcctgaatggcaaatggaaatt

SEQ ID NO: 48667 - DNA, 437 bp, Homo sapiens
caagcgcgcaattaaccctcactaaagggaacaaaagctgggtaccgggccccccctcgagagtacttctagaattaattaaggcgggtggatcacaaggtcaagagatcgagaccatcctggccaacatagtgaaaccccatctctactaaaaatacaaaaattagctgggggtggtggtgcgtgcctgtagtcccagctactggggaggctgaggccggaaaatcgcttgaacctgggaagcagaggttgcagtgaaccgagatggcgccactgcactctagcctggtgacagagcgagactgtctcaaaaaaaaaaaaaaaaaaaaaaaaagcggccgccaccgcggtggagctccaattcgccctatagtgagtcgtattacgcgcgctcactggccgtcgttttacaacgtcgtgactgggaaaaccctggc

SEQ ID NO: 48668 - DNA, 329 bp, Homo sapiens
  misc_feature 229, 230, 231, 232, 255: n = A,T,C or G
tggccgtcgttttcacccggaaaaagggtgaaccatgttggtgccgggccccttcctcgagagaacttgtagaattaattaaggcgggaggggggggtttgtttaaaatagtaaatcagtaagtcacttctaaatttaaagaaaacaaaattggagttgaagaataagtaggtttccaattggctattgccgttttctttgaaaaaataaacattttttaaaaaacccnnnnaaaaaaaaaaaaaaaaaaaaaancggcccccccccccgggggggcccccattccccccttaagggggtttttttcccccccccttggggcccttttt

SEQ ID NO: 48669 - DNA, 333 bp, Homo sapiens
  misc_feature 47, 50, 61, 62, 69, 100, 114, 171, 215, 216, 260, 283, 327: n = A,T,C or G
aggcgggagggaatgttcgggaagggggggatttttaggcaagcggnggngggagcaccannggaaggnggaaaaaacggagagcaaagagcaaaagggngcaaacccgggccnaaaaaaaaaaaaaaaaaaaaaaaaaaaagcggccgccaccgcgggggagccccaaancgccccagagggaggcgaataacgcgcgcccacgggccggcggnnaacaacggcgggacggggaaaaccccggccggacccaaccaaancgccgggcagcacaacccccatncgccagcggggggaaaagcgaagaggcccgcaccgaacgccccncccaac

SEQ ID NO: 48670 - DNA, 487 bp, Homo sapiens
aagggaacaaaagctgggtaccgggccccccctcgagagtacttctagaattaattaaggcggtcttcaccctgttagccaggatggtctcgatctcctggccttgtgatccgcccgcttctgcctcccaaagtgctgggattacaggcgtgagccgctgcgcccagcctctaaagctttttgataaactttcactcactcctgctctgggtgggggagaaagagtgtttaaaagcagattgtgctctgttttctaaaaatcttagcctgtgatcttccagtatagaaacttaaataatctcttacatgatataaaatatattaaatattctgaaaaagtaatctttgttcaacaaaagaaagtcccatcaggcaaacttgaaatatttaatctacataaacaccatctacatagcgctttaatatcttaacttggaaactgaaagatgctgaaaatagtttcgttagggacttagatatgtgaaat

SEQ ID NO: 48671 - DNA, 432 bp, Homo sapiens
agggaacaaaagctgggtaccgggccccccctcgagagtacttctagaattaattaaggcggggggtcaccattttggtcaggctgatctcgaactcctgacctcaagtgatccacccacctctgcctcccaaggtactgggagccaccatgtgtggcccactgcagggttttgagcacagaaataaaacattggttttatggtatctttagattttaagtattatttctgtctccattatgttttagcctcttttttgactcatgagcaagtaatcaaaatgattcagtattctatgaaatgtactactagtgaaaagtatctcatagataatttaagctcaaatccccactaatttactttatgtgggtagaatactaaaaacagataatattgtttctgttaaattcaatcatgtgactcacagaaatg

SEQ ID NO: 48672 - DNA, 343 bp, Homo sapiens
aaagctgggtaccgggccccccctcgagagtacttctagaattaattaaggcgggagcaggtgacttatgcatgttgcatcctattatttaacaaagaccctcgggttgagtcacgtaaagcaaaactacttctcattatttcctggttttatgaaagggtagccctattttgcagtattacactaaattataaatgaaaaacttattcttactatcatacagtgataacttacacaataactattccaatcaccctactgatcaggtgaaattaagcagtcttttgggaccaaagctccctaacttttagctatgaatatatcgaaaaaaaaaaagctgggg

SEQ ID NO: 48673 - DNA, 621 bp, Homo sapiens
gcaattaaccctcactaaagggaacaaaagctgggtaccgggccccccctcgagagtacttctagaattaattaaggcggggacattactacaaaccttacagaaatgaaaaggattataagaaaacaccatgaggagggtgaagcaagatggctgaatagatgctttcaccgattgttcccctgctaaccttgcaggaacaccaatttaacaaccatctacacacacaaaaaagcacctacataagaaccaaaaatcaggtaagcaatcacagtacctggttttaacttcatatagctgaaaaaggcattgaagacggtaggaaagacagacttgaattgctgacgccgccccttccccactccttcagcagcggccatgagatacagagcatctgtgctcttgagggagggagagcacagcgattgtggtactttgcattcaactcagtgctgctctgtcacagtgggaaacaaaactggactaaactcagccaatgcccatccatggaggcagcatttagatcagccctagtcagaggggaatcgcccatcccagtggttagaacttgagttttggcaaaactttttaccacggaaaaggtgctctggggttctaaat

SEQ ID NO: 48674 - DNA, 499 bp, Homo sapiens
ctggccgtcgttttacacccgggaacaagatataaccatgattctgggcggtggttttccccaaagaaaaggaaaaaaacattaatgttgggcatgggtgtctctcttgcacatgaataaattgagaaatctcatagattataattattttcccaaaccgtaacaatcattgtagagatacaaataatttattcttacttttagaaagtagatactatgatcaattagtcatgcagagtgatctcttgatatgtcaacatgttgagttaaaagtttgagaagagatactttagaaagtagtagacccactcctcttgtctcatttcccttcctataatttagtggtagtacatttatgaatccaaccctgtatgtttgcaaaccctgaggtagacaatttggcagtgaatttctatagtacaataaagttcaaattgccatttgagaccctggcagcctttaatttaccattcctttaaaaataactggggcatttttc

SEQ ID NO: 48675 - DNA, 620 bp, Homo sapiens
gccaagcgcgcaattaaccctcactaaagggaacaaaagctgggtaccgggccccccctcgagagtacttctagaattaattaaggcgggcattcaggaaattgctatcataagatggaagaaataacttacacacgggtaatttatattatggaaaggtgaaactgccccttgagataacctgaaaggcagatcatctaccctttactaaagaaaaagacagaaaaacaaaatattttgtagttgctgttcactgcacttgacaaaacgtacagaagagatgaactcagaaaagactggtcagtttgcaggcaaaaatgaaaaggaagagaattcaaattcaagtacttactgggtaggatgaggcaacattttaatatcaaaaagaaagataaaaatgggaaatccttttaaaaataaataaaaagagaaatcctttagccaaaaggttgattaaaagccagttttgccgccgggtgcagaggctcacacgtataacaccaacattttgggagcccgaggcgggcggactgcttgagtccaggagttcgagactagcctggggaatacagcaagaccctgcctccacataaaaatacaaaaattagctgggtgtactc

SEQ ID NO: 48676 - DNA, 381 bp, Homo sapiens
  misc_feature 335, 346: n = A,T,C or G
ctggccgtcgttttacacccgggaacaagctataaccatgatgtctggcccgcgcgcttttctcataaagaaaaaaaaaaaaactttattgctggcctcccgtttagatctctttacctgacttggaggtgaaaagtcctatctgagaaaatgtttgcagtgacccctagtctggggtacacagaccagtgttccttattgacagtgttcaataaggccccgtcattctcgccagtctgttgttgttcttaatgggctcctccttgaaatgtgtgtgtgtttgtgtcaagaggagttgtgttctttgtaaataaaggtgaaaaaaaaaaaaaaanaaaaaaaaaancgcgccccccccccgggggggcccccaattcccct

SEQ ID NO: 48677 - DNA, 404 bp, Homo sapiens
gcgcgcaattaaccctcactaaagggaacaaaagctgggtaccgggccccccctcgagagtacttctagaattaattaaggcgggggaatttatcctcacaaattggtgttctaaatgtcttaagaacctaattaaatagctgactacaaaaaaaaaaaaaaaaaaaaaaaaaaaaaaaaaaaaaacaacaaaaaaaaaaaaaaaaaaaaaaaaggcggccgccaccgcgggggagctccaattcgccctatagggagtcgaataacgcgcgctcactggccgtcgtttaacaacgtcgggactggaaaaaccctggcgttacccaactaaatcgcctggcagaacatccccctttcgccagctggcgtaatagcaaaaaggcccgcaccgatcgcccttccaa

SEQ ID NO: 48678 - DNA, 397 bp, Homo sapiens
  misc_feature 368: n = A,T,C or G
ctggccgtcgttttacaccccgaaacacagatataaccatgattattggcggtcctttcccccaaagaaaaaataaaataaattattgcgggtgcccgggatgctttaaaaacaccaacggatctttaaccatgcacaaacggtagttttgtgtgttggctgctccactgtcctctgccagcctacaggaggaaaagcatggcttacagaaggatgttccttcaggaggaagcagcactaaaagcactctgagtcaagatgagtgggaaaccatctcaataaacacattttggataaaaaaaaaaaacaaaaaaaaaccaaaccaaaaaaaataaaaaaaaaaaaaaacacaaaaaaaaaaaaaaatngcccttttggcggccccccccggggggcc

SEQ ID NO: 48679 - DNA, 495 bp, Homo sapiens
ccctactaaagggaacaaaagctgggtaccgggccccccctcgagagtacttctagaattaattaatagatataattgattactggtcagaatagcaaaaagaactagaaaacttgaacaacactaaataccaagtatacttcaccagatatctatagaacattccactcagcaacagcagaatccagcagaatatatattcttctgaagtgtatgtggaacattctccgggatagaccatatgttaagtcataaaacgagtttcaataaatttaaaaggactgagatcataccaagtatgctctctgaccagaatggaatgaaattagaaatcaataacagaagaaaatttgggaaattcacaaatatgtagaaattaaaaaacacactccttaaacaaccagtgggtcagaaaagaaatcacaagggaaactagaaaatactttgagctgaatgaaaatgaaaatgtaatataccaaaacttattgaatgcag

SEQ ID NO: 48680 - DNA, 502 bp, Homo sapiens
gcgcgcaattaaccctcactaaagggaacaaaagctgggtaccgggccccccctcgagagtacttctagaattaattaaggcgggaggagggagaagatcaggaaagataactgatgagtactacgcttaacacctgagtgatgaaataactgatacaacaaacctacatgacacaagttttcctatgcaacaaacctgcacttttatccctgaacttaaaagctaataaaaaaaaaaaaaaaaaaaattccccccccccctgttttttataaggtttttgttaaaaaaaaaggctttaaaaaaatttgggaaatttttaaaaaattaatgggcggggaccttttaattattgcctaaaaaaaacttttttaattaaaaaaaattaaaggttttttgtttttagaaacccttaacagcgttttaatttttaaattcttcaaaaaaaaaaaaaaaaaaaaaaaaaaaacccccccccccccgggggggcccccaaatccccct

SEQ ID NO: 48681 - DNA, 412 bp, Homo sapiens
agggaacaaaagctgggtaccgggccccccctcgagagtacttctagaattaattaaggcggggggggtgtggctgaaaaccatatagagtgagaaatacaggcagtaagattctcagagccatgtttgcgtatctacattgcctgtactttatggaattctggttcttggtgatatttggagttcagatagtggatttatagtgggaagaggattttgaatatagagatagtagaactagggaatgattttttaaaaataaaaggtaaagaacagaataggccgggtgcagtggctcatgcctataatcccagtgctttgggaggcccaagagggggaattgcttgaggccaggagtttgagacagcctggccaacataaagagaccccatctctacaaaagttaaaattt

SEQ ID NO: 48682 - DNA, 363 bp, Homo sapiens
actggccgtcgttttacaccccggaacaagcgtgtaaccatgatggggggcgcgccctttctcgagagtacataatagaattaattaaggcgggaaaatgggaagtccctctgcctaaagtacgtgcccagggagaaacagaagtattaaaagttattcgaacaggaaagagaaagaagaaggcatggaagagaaattagaagataaaaacatacttttagaagaaaaaagataaatttaaacctgaaaagtaggaagcagaaaaaaaaaaaaaaaaaaaaaaaaagggggggccccccccggggggggccccaattcccccttttggggggtttttttaccccccctcagggggggtttttt

SEQ ID NO: 48683 - DNA, 688 bp, Homo sapiens
cgcaattaaccctcactaaagggaacaaaagctgggtaccgggccccccctcgagagtacttctagaattaattaaggcggggatgtcaagttcatttatgtgactctttggctcaacttacataatctttgttttgatatcacagttgtctaattattttactttgtagcttaaggcaggctgaattgttgataaaatggaaaaagtagtatattgttatataagcttctgaggtgtgttttgttgtataagccctggaggttaaaaagtcatcccttatgtatagtagttaaaggcataaaactgtgacttttagatattccacagaaccagacttatttgatgtggataataaccaatgatttagcattttgtttgcttttgttttattttatccgggttcattttttactcttcccatgtacatgaaacaggtggtggcgtgtagagatcagctgatccttgttttatggttaattgaactactttgtatccagggtttctgcaaatccaaaagtgatttttcatctaggatctattcctaacagtctactccaatcccactttagttttccacaattttaaatcttaatagtgagaattcaaatgaaagtcatttcatttgactattctgatgacatgattgtggcagaataaattgggtcttaaaatgcccctaaaaatggt

SEQ ID NO: 48684 - DNA, 407 bp, Homo sapiens
ggcagatcacctgaggtcaggagttcgagaccagtctggctaacatggctgaaaccccatctctactaaaaatacaaaaattagccaggtgaggtggtgcatgcctgtagtcctagctacttgggaggctgaagtaggagaatcacttgaatccaggagagggaggttgtggtgagccaagatcacaccactgtgctccagcctgggcgacagagcgagactctgtcaaaaaaaaaaaaaaaaattgtttggaaacctccttggggaaattttttttaacagttttttaaggggaccccctaaatttgccccccaaattttaaaaatttttaagtcttcattcctttttccggggggttttaccttttggccctaaaaatttttccaaaaaaaaaaaaaaaaaaaaa

SEQ ID NO: 48685 - DNA, 469 bp, Homo sapiens
agcgcgcaattaaccctcactaaagggaacaaaagctgggtaccgggccccccctcgagagtacttctagaattaattaaggcgggggaggggagctggtttcctggtgaactttctaaaaggaaaaataattttaagtcaagaaaaaagaaaaaaaaggaagactaaacagaaaccagaactgaaacattcacctggtagcatatgacacatgcacgcacacacatacacgcacaagcgccagtgcgcacgtgtacacagaaaaacaaaaggacaagctttctgtgaaacaaaatatttacttagggataatgtggggattcacatgaattaaatagctgcaattgggaaaagagtttcaaatagaaaatgaaaaacaagctaagacaagtattggagaagtatagaagaatagaaaaatataaagccaaaaattggataaaataactaccggggccccccccggggg

SEQ ID NO: 48686 - DNA, 347 bp, Homo sapiens
ctaaagggaacaaaagctgggtaccgggccccccctcgagagtacttctagaattaattaaggcgggagaatcgattgaacccgggaggcagaggttgcagtgagcagagatcgagccactgcactccagcctgggtgacagaacgagactcaatctcaaaaaaaaaaaaaaaaatgttatttccaggctggcccgggggcttacccctttaatcccaaccctttggggggcccaggcagggggattacaaagtcaggaatttaaaacccgcctgaccaacattttgaaacccagccttttcttaaaaaaaaaaaaaaatcttttaaaggcgggccccccccggggg

SEQ ID NO: 48687 - DNA, 238 bp, Homo sapiens
taaagggaacaaaagctgggtaccgggccccccctcgagagtacttctagaattaattaaggcgggagatgagtaccactgttagaagataccttatgcctctgtcctcattaggattcctatgatcatcctctagataccacatataggcccattcctgcatttgagatagggttggaatatagtactctacatgatgaatgtggaagctttgcgtttggtattaaacctgttagat

SEQ ID NO: 48688 - DNA, 291 bp, Homo sapiens
aaagggaacaaaagctgggtaccgggccccccctcgagagtacttctagaattaattaaggcgggtgatggtggctatgatggtggggatgatgaggctattgttttttgcgtaatgctacacacctaacttatggagccaaaaaatcatgtacaaatgcttgctgctgatttaaacacacttttggaacattacagataaatttaaacctgaaaagtatgaagcagaagaaaaaagaccagctaggaaacaaaaagctaagggcataatgttcaaacttacaagaaaatt

SEQ ID NO: 48689 - DNA, 374 bp, Homo sapiens
cgcgcaattaaccctcactaaagggaacaaaagctgggtaccgggccccccctcgagagtacttctagaattaattaaggcggggaaaaatactatttggatagctattcactaaagaacaactcgggtaagctgcatggtactcttgcttgctatcaggatgggggtaatcttttagatattagttattttactctgttacattgctaacagggtaaaacaggttaaccattatttatgtagaaaatatagaatgtgagaaaataaataacacaatgagaaatacaaagactaaacaaacattaaataaaaaataccaaacacatgcataaagatacaaactcatacagtaatactcatccttgaaataatct

SEQ ID NO: 48690 - DNA, 504 bp, Homo sapiens
gcgcgcaattaaccctcactaaagggaacaaaagctgggtaccgggccccccctcgagagtacttctagaattaattaaggcaggaagtgtctctaagatattgtagccaatccatagatcttgaactccactttctatttaaagcatacacacacatgcatgcatgcgtgttctctctctctctctccccccccaccaacctttcactctctctaggattggcagaagatggtgcggcaagaagcataggaattgtctccccatctagacaacaattacactggcagaataggtcttacataattattttggaactctgatgtctattgaaggcttacgactaagaatgcttggatggtcaatgagggttaattctggtcaatgtcagctctttacacagtaacaactactcatttcccacacccagtcctatggcaggcagctcttcttgtgttcatacagaaacttgcatacagcttataggagccaagatgggcaaaaag

SEQ ID NO: 48691 - DNA, 503 bp, Homo sapiens
cgcgcaattaaccctcactaaagggaacaaaagctgggtaccgggccccccctcgagagtacttctagaattaattaaggcgggtggatcacaaggtcaggagatcaagaccatcctggctaacacagtgaaaccctgtctctactaaaaaatacaaaaaaaaaattagccgggcgtggtggcgggcgcctgtagtcccagctactcgggaggctgaggcaggagaatggcgtgaacccgggaggcggagcttgcagtgagcccagatcgcaccactgcactccagcctgggtgacagagcgagactctgtctcaaaaaaaaaaaaaaaaaattaaaaaattaaaataaaaaaataaatgctacaggtgaccaataaaggctgcaataataagggaaatgtttataaataagtagatatttaagtcaggccttgaagcaccatttctcaaaagtactatttctcaaagtggaatgtggtgtagcaatcacatgagtacttgtc

SEQ ID NO: 48692 - DNA, 474 bp, Homo sapiens
ctggccgtcgttttacaccccggaacacagaaataactatgattatggccggtggttttccttcaagaaaaagaaaaaacctttattgctggccgcgggggttcatgccagaaaaaaaaaaactttgggaggccgaggtgggcggatcacaagctcaggagttcaagaccagcctgactaacatgcataggacagatgtggttggatgtaactttggagattcagttacaaaaagactgcagctttgctcactctgagagaaggcagcatccatgtcttgaggacactcaggcagcctgggacaggcttggggaggacccaggactgtgtgggtttcttacctgcctgagccacctcagggaatcttccagcctaatgcaggcatttctgcacctttggggtcatgctttgtagcaatgtctcccttgcgacctcgcaataaattgggccccacgggggtgattttgacagtca

SEQ ID NO: 48693 - DNA, 492 bp, Homo sapiens
  misc_feature 472: n = A,T,C or G
ctggccgtcgttttacaccccggaacacagcggtacacatgatggtgggcgcgccttttctcgagagaactagtagaatactttaggcgggcgcctgtggtcccagctactcgggaggctgaggcaggagaatgccgtgaacccgggaggcagagcttgcagtgagccaagatcgcgccactgccctccaggctaggcgagaatgcgagactccgtctcaaaaaaacaaacaaaaaagctattggtgatctaaagatctaaagaaacaacattccagtagcaatgagcacttccagtaccccagatcctggttttcaatatcattctctactaaaaggaaccagggcccccttggagacatggctgcttctaggacgaagggcagaaatacacaagataggcctgcagcattttgtgttgccacaaagtttaaggaactgcttcgaaaaaaaaaaaaaataaaaaaaaaaangggggggccccccccggggg

SEQ ID NO: 48694 - DNA, 572 bp, Homo sapiens
  misc_feature 489, 511, 512, 513: n = A,T,C or G
ctggccgtcgttttacaccccggaacaagagtataaccatgatgagtggcgcgcccttcctccaaagaaaaaataaaattaattaaggcggggggatcctttgaggtcaagagtttaaaaccaaactgaccaacatggtgaaaccctgtctctactaaaaatacaaaaaaatgagccaggcatggtggcacatgcctgtaatcccagccactcaagaggctgaggcacgagaattgcttgaacccaggaggcagagactgcagtcagcctaaatcacgccactgcattccagcctgggtaacagactgacagcctgtctcaaaaaaaaaaaaaatttagcagggcctggggacacaccctggtattcccatctattcagaaggctaaggcaggaaaatcccttgaacctggaaaccccatgtttctttaaccaaaaattgacccgttgaactccttaatccggggcaacaaagtgaaactctgcctccnaaaaaaaaaaaaaaaaaaaaannnggggccccccccccggggggaacccccaatcccccctaaagggggttttttcccccccc

SEQ ID NO: 48695 - DNA, 437 bp, Homo sapiens
cctcactaaagggaacaaaagctgggtaccgggccccccctcgagtagtacttctagaattaattaaggcgggaaggacagcttgagacacttaattctccaagtgaggtgtcagtgcagttcccaaagcaaccccagccttgtcaccatgcctgccaatacctcagctagcagaattcgtcgaaaagcattggcaatggctgcgtcaattcccaccatgtcaaactccagtgagttttcatccatgtgtactacatccacacggaaattctagagggacaggaaaaaaacatttaagtgaaatctgctctctgtgtaatatctcttcatacctcccccttaaataattccctcaagtattatcctctcatccaaaaacctccctttgcccaaatgtctcttattaaatattctatctcgcccagtgttttaaaaaa

SEQ ID NO: 48696 - DNA, 501 bp, Homo sapiens
ctggccgtcgttttacaccgggactcgcggttagccctaaataaagggaacaaaagctgggtaccgggccccccctcgagagtacttctagaattaattaaggcgggaaaaaaaagactcattatgaacacaggaacaccagttagaataacaactgacttctcattagtaacaatagaggcaagaaggcggtgagagcatatattctaagtgctgaaagtggaaaaactgtcaaccaagaatctcctatccatcaaaattactatgcatgatcaaggctaagtaaagactttctcagatgaacaaaaactaacagaattcacccaacctgacttataagaaataatagacatactaaaggatgttcttaaagctgaaacaggtaccatcgaataataatttgaataacatgtaaaaattacagaagagagtgtaattgaatatttttatacattcttttcttgactgattttaacagaaagtatacgaactgtttataca

SEQ ID NO: 48697 - DNA, 335 bp, Homo sapiens
  misc_feature 178: n = A,T,C or G
gaaaaaaaaaaaaaattaaggcgggtgcgctgtgttcccagctactaaagaggctgaggcaggagaatcgctcgaacccaggaggctgaggttgcagtaagctgagaccatgccattgcactccagcctgggcaacaagaatgaaactgtgtcacacacacacacacacacaacgtcntataaaaaaaaaaaaaaaaaaaaaaaagaaggtgattgtgggtgtttttttaaaaaaaaaaaaaaaaaaaaaaaagcccccccccccccgggggggcccccccccccaccatataggggggaatctccccccccccccggggggttttttaaaaaaa

SEQ ID NO: 48698 - DNA, 478 bp, Homo sapiens
  misc_feature 413: n = A,T,C or G
caattaaccctcactaaagggaacaaaagctgggtaccgggccccccctcgagagtacttctagaattaattaaggcggggaaaaacaccttataaaaccatcagatcttttgaaaactcactaactatcatgagaacagcatagaggtaactgcccccatgattcaattacctcccaccggatccctcctgtgacatgtggggattatgggaactacagttcaaaatgagatttgagtggggacactgccaaaccatgtcactatctttgttaacttttctctaaacctaaatctattttaaagtagatttttaggagacacacatggctttggagttctctgcctttagccctctcatgacattagagattcactgaatatttctgacctcaagctcctactttatcaaanaaaaaaaaaaaaaaaaaaaaaaaaagcggccgccaccgcggtggagctccaattcgccctatagt

SEQ ID NO: 48699 - DNA, 510 bp, Homo sapiens
cgccaagcgcgcaattaaccctcactaaagggaacaaaagctgggtaccgggccccccctcgagagtacttctagaattaattaaggcgggctaatttaactagtcactcacagatgacttttctttaataaagtcccttttcctaaaaaaaaaaaaaaaaaaaaaaaaattaaaaaaaaaaaaaaaaagaaaaaaaaaagcggccgccaccgcggtggagctccaatatcgccctatagtgagtcatattacgcgcgctcactggccgtagttttacaacgtcatgactgggaaaaccctggcgttacccaacttaatcgccttgcagcacatccccctttcgccagctggcgtaatagcgaagaggcccgcaccgatcgcccttaccaacagtagcacagcctgaatggcgaatggaaattgtaagcgttaatattttgttaaaatacgcgttaaatttttgttaaatcagctcattttttaaccaataggccgaaatcggcaaaatc

SEQ ID NO: 48700 - DNA, 411 bp, Homo sapiens
  misc_feature 318, 321, 337: n = A,T,C or G
ctgggtaccgggccccccctcgagagtacttctagaattaattaaggcgggaagaaattaggaactgcagtacatcatcaccccaggtgtaagagttatttctctcccagtgcagaaaggggagtgtggcccctggctgtacctgagcttcctcttctccatccctgagacatcacagaatcacccgggttctgacctctccacttctagctctcactgacatctggatatcttgatgcactgcctgtttgtaacaacatatacttctttgctgaatgctaataaacttctgggttcaagagggaacccctcagaccnaanaaaaaaaaaaaaaaangggggccccccccgggggggacccccaattcccccttatggggggttttttccccccccctattggccgttttt

SEQ ID NO: 48701 - DNA, 433 bp, Homo sapiens
ataaaggaaacaaatgctgggtaccgggccccccctcgagagtacttctagaattaattaaggcggggaactaatactttatgggatttggattgctacaggtttaatcatgctatctatccttgctggtgggacatttgacttagaattgtatataagtaaaatatagatgaaaaattgtataatttatagctatctgaaaacaacttttttttaatatttgaacactttgaaatgccttacacttccttgttaaaaatcttaaagggatattaaaattaaatggcacttaattactattagtaattcctaatataatatttaattcataaaagaaaaaaaaaaaaaaaaaaaaaagggggccccccccgggggggacccccatttccccttatggggggtgttttaaccccccctcatgggccgtttttta

SEQ ID NO: 48702 - DNA, 481 bp, Homo sapiens
ctggccgtcgttttacaccccggaataaggggtacacatgatgggtgccgggccccccctcgagagtacttctagaattaattaaggcgggtggaatagagggtcaaactccttggcgagttcagtctaacagaggacacattactgccctacaaagcagctctggaaaatgacaaccagtggcactaactccaagcaatatctttgtgaggcttgtgggctgtaatatagtctgctcaggctgccataaaaaaaaaatcacaatcaggccaggcactatggctcacacctgtaatcccagcaccttgggaggccaaggagggcagatcacctgaggttaggagttcaagaccaggctggccaacatggcaaaaccccgtctctactaaaaatacaaaaattacccggatgtggtagcacgcaccggtagtcccagccactcgtcaggctgaggcaggagaattgctcgaacccgggaggg

SEQ ID NO: 48703 - DNA, 483 bp, Homo sapiens
gcgcgcaattaaccctcactaaagggaacaaaagctgggtaccgggccccccctcgagagtacttctagaattaattaaggcgggggagggggactttctccctttctttttggctcccatgaattcttttaagtgtattgacatttgcattctgactcagaatttggactgtcttcataaatgctcactgtgaacttaaaaaatgtacattctgcagtttcagggtggaatattctataaatgtgatttaggcctatttggtaaatagtgttggacaagtcttctataccagtattgatttttctctatacttgtcctgacaattgttgaagagagatatataaatctctgaatctatttgcggatatgtccattactctgtatagttctatctgtttcggcttgcatattttgaagctttttaattaggtgtatgaatgtttaggattcttgcatcttcctgattagtgaacctctttatc

SEQ ID NO: 48704 - DNA, 407 bp, Homo sapiens
ctaaagggaacaaaagctgggtaccgggccccccctcgagagtacttctagaattaattaaggcgggagactgcggtaaaacaagccccataggggatgccttggttgtggctatgaaccgctcaaagctctagctgaccactgaactatgcatgcgaaactaatgctgtatgaactgaactaaaagttgaactacttcccactgcaggggaaacagttttgtcactgagttcaaccaagttaactgcatgttttaaaataattatttttcagaggaatattagacaatcctgagtttctacaacacaatgtaaattatacactaaatacaatgtctacgatacaatccaaaattactcactatctgaataaactaaatagtatgcctgattctcacgagaagagac

SEQ ID NO: 48705 - DNA, 544 bp, Homo sapiens
  misc_feature 6: n = A,T,C or G
aacagnactggccgtcgttttacaccccggaaaaagagtataaccatgatgagtggcgggcccttcctagagagtactaataaaattaattaaggcgggtggatcacgaggtcaggagttcgagaccagcctggccattatggtgagaccctgtgtctactaaaaatacaaaaattatccaggcatggtggcgcgcacctgtagtcccagctactcaggaggctgagacggaagaatctcttcaacctgggaggtggaggttgcagtgagctgagatcacaccactgcactccagcctgggtgacagagtgagatgccatctcaaaaaaaaaaaaaccaaattttcaaaaaatttatttgggcttagggggggacccctgaattcccacttactggaagggtaaggcagaaaaatcatttaaccctgggagggggaggttccattgacccaaaataatgctattgccctccaccctgggcaagtgaaactccttttaaaaaaaaaaaaaaaaaaaaaaaaaaaaaagggccccccccccggggg

SEQ ID NO: 48706 - DNA, 427 bp, Homo sapiens
ttaaccctcactaagggaacaaaagctgggtaccgggccccccctcgagagtacttctagaattaattaaggcggggcggaatggtgacaccttgaaacctgctctaatgggttacttacagacatgaatagagccaaagataatctgacacgtctaattctatccctctgtgcgagacaagtgcctctgtctacaacacctgtaatggctgttccacatcatgcacacacattggaattactggatgccctcttgcctgcagcttaaagtacctgaattcccaatgaactgtatgactaatctgcggagaatccatacacacagaatacatcaagttttctttcagacgaaagtccagccataattccattatattcatggcaactatcacctgctaatgctaatgttagtgtataaaaatgtatt

SEQ ID NO: 48707 - DNA, 375 bp, Homo sapiens
ctggccgtcgttttacaccccggaacaagcgtgtaaccatgatggtgggcgcgcgcttcctcgagagaacataatagaataaattaaggcgggctgtctgggatgatttctgaaccaacagtccaagaccttttgttgatttcagccccacttagccaagacctcaagtataaataattctgataattatggagaaatcaactgctattttatactgattctgtaaaaaaaaaaaaaaaatttttgtaactattaaaataattttctgactctgtctaaaaaaaagaaaaaaaaactgaacggcggcccccccccgggggggcccccattcccccctattgggagtttttttcccccccctcaggggcctttttt

SEQ ID NO: 48708 - DNA, 502 bp, Homo sapiens
aagggaacaaaagctgggtaccgggccccccctcgagagtacttctagaattaattaaggcgggagaacaaagttagagtttctattagttttcttatagcttgtttgttagtttgtttttgcaatcagtgttaaattgccatcagtctaaagtaatgtattataagatgttatttgtaagcctcatgataacctcatatcaagaagcctgcaactgatacacaaaaaataaaaagcaagaaattagacataccactggagaaaatcagcttcacaaaaaggaagacaggaaggaaagaaacaaacaggagatcaaaataaaaaaaaaaaaaaaaaaaaaaaaaagcggccgccaccgcggtggagctccaattcgccctatagtgagtcgtattacgcgcgctcactggccgtcgttttacaacgtcgtgactgggaaaaccctggcgttacccaacttaatcgccttgcagcacatccccctttcgcccgctggcgtaat

SEQ ID NO: 48709 - DNA, 473 bp, Homo sapiens
ccctactaaagggaacaaaagctgggtaccgggccccccctcgagagtacttctagaattaattaaggcgggagaaagccttttatctgtatatgcatatgttatgtgaatatacatgcacatatacatatatcttcatatatacgtacatatgtgtgtttgcaatacacttagggttagggtggggtgtgtgtgatgtggatgaaggtcattagtatgttagcttatttaaattaaacctttacttgagatgatttaaataaattccagacaattgttttttggtgtttcatatgcaaccattcataatagaaatataaggggaaatacaaggcggccgccaccgcggtggagctccaattcgccctatagtgagtcgtattacgcgcgctcactggccgtagttttacaacgtaatgactgggaaaaccctgtcgttacccaacttaatcgccttgcaacacatccccctt

SEQ ID NO: 48710 - DNA, 568 bp, Homo sapiens
ttacgccaagcgcgcatttaaccctcactaaagggaacaaaagctgggtaccgggccccccctcgagagtacttctagaattaattaaggcgggggtattacatattcatagcatgccgcagaaatcattttaagtctatcaaaaacaactatattgtgcattttcaaataagcacatataaaagatgagctataagaagagagaaggatgctaaaaaaaaaaaaaaaaaaaaaaaaaaaaaagcggccgccaccgcggtggagctccaattcgccctatagtgagtcgtattacgcgcgctcactggccgtcgttttacaacgtcgtgactgggaaaaccctggcgttacccaacttaatcgccttgcagcacatccccctttcgccagctggcgtaatagcgaagaggcccgcaccgatcgcccttcccaacagttgcgcagcctgaatggcgaatggaaattgtaagcgttaatattttgttaaaattcgcgttaaatttttgttaaatcagctcattttttaaccaataggccgaaatcggcaaaatcccttataaatcaaaag

SEQ ID NO: 48711 - DNA, 468 bp, Homo sapiens
ctggccgtcgttttacacccgggaacaagatataaccatgattattgccggtggttttccataaagaaaaaaaaaaaaactttaatgctggccgaccggttgaggccaagaaaaagaaaccagcctggccgacatggtgaaacgccatctctactaaaaatacaaaaattagccaggcgtagtgacgtgcgcctgtaataccagctacttgggaggctgaggctgcagaaccgcttgaaccttggaggtggaagttgcagtgagccaagatcgcaccactgcactccagcctggatgacagagaaagactccgtctcaaataaaaacagaaacaaaacattaatgtcattaagcccccactgctaaatctgactggcttaaaaaaaaaagagggtcccttcaagattgtatctaacttaacatgcccataagttgaataatatcagtatcaaaatggataacagcaaa

SEQ ID NO: 48712 - DNA, 374 bp, Homo sapiens
  misc_feature 314: n = A,T,C or G
ccctactaaagggaaaaaagctgggtaccgggccctccctcgagagtacttctagaattaattaaggcgggtggatcacctgaggtcaggagttcgagactagctggggcaaccgcgtatgccctattcttagaaaaactctatcgctattaaaaatacaaaaattagctgggcatagtggcacacacctgtagtcccagctacttgagaggctgaacacgagaatcgcttgagcttggaaggtggaagttgcactcagctgagattgtgccactgtgctccagcttacgaaacatagtgagacaccgtctcanaaaaaaacaccggagcaaggaccaatcataacaaatggctaggggctccccccggggggg

SEQ ID NO: 48713 - DNA, 587 bp, Homo sapiens
  misc_feature 418, 419, 431, 432, 445: n = A,T,C or G
ccctcactaaagggaacaaaagctgggtaccgggccccccctcgagagtacttctagaattaattaaggcgggtggatcacaaggtcaggagatcgagaccatcctagctaacacagtgagaccccatctctactaaaaatacaaaaaattagctgggtgtggtggcaggcgcctgtggtcccggctactcgggaggctgaggcaggagaattgcatgaacccaggaggcggagcttgcagtgagctgagatcgcgccactgcactccagcctgggcgacacggtgagactccatctcaaaaacaaacaaacaaacaaaaaaaccctgctctgtctttgttcaaggctcagctttttagatgtgagtccactgagctggtgtgtaccttaaaataaacaatcctcctgttctccagannaaaaaaaaaaannaaaaaaaaaaaangggcggccgccaccgcggtggagctccaattcgccctatagtgagtcgtattacgcgcgctcactggccgtcgttttacaacgtcgtgactgggaaaaccctggcgttacccaacttaatcgccttgcagcacatccccctt

SEQ ID NO: 48714 - DNA, 455 bp, Homo sapiens
gaacaaaagctgggtaccgggccccccctcgagagtacttctagaattaattaaggcgggatcagaatggaaaaagaactgtttaaaagtttgatacttttaaatagttggtttttttgcttactctggtaatgattttctacaaatacataataaattgtttttttgagtctatattctgtatgcagttgaatatccattacttattctgctgtgctttaatagaatggaatgtttacaggcccttaaaatattatttttaaaaaaccttctgaagatacataccaaagtttttccaagaagattttataatcaatttaataatgtaaggtttatcagattctataatagtatagttattaaagcaattttatgttagagactatattgtaatgtactgagtggtacctttataagaaaagtgactgccaatatatttttatagctgatcttta

SEQ ID NO: 48715 - DNA, 365 bp, Homo sapiens
aaagggaacaaaagctgggtaccgggccccccctcgagagtacttctagaattaattaaaattaacctgtacaacaaacccccgaaacatgagtttgcctgtgtgacaaaccttcacgtgtaaccctgaaactaaaataaaagttttttttaaaccaacaaaaaaaaaaatccaaaatattttgattaatttaaaagacaatattcccaacataaagagataataaatgttggaaataatggataccctgattttcccgatctaatcactattcattacatgtatcaaaacctcaccgtgtaccccatgaatatgtacaatgttttctgtcaatttttaaaaattaaattaaatttttaaatgct

SEQ ID NO: 48716 - DNA, 569 bp, Homo sapiens
  misc_feature 517: n = A,T,C or G
ctggccgtcgttttacacccgggaacaagagataaccatgatggtgggcggtggttttctatagagaaaaaggaaaaaacttaggcgggtggctggactcctgttttaatgaggaatagagaaaaagaacaaaagccccttactcaagctgcagcttacttaacttctagccagtcagcaacaaaagacccaagaagctatgaaccactagttcctgtcttagagaggggctggagacttccctgcgaccctgcatgtgcaattagaagtaaacttcgccttatactggcctcttcctcattttaatgctgaaaatcacacccaggtgtggaaatttaaactgctaatgttacgtgcaatgtatgaaaaagcatgagggcagggcgcggtggctcacgcctgtaatcccagcactttgggaggccgaggtgggcggatcacgaggtcagaagatcgagaccatcctggctaacatggtgaaaccccgtctctactaaaaaacatacaagaaaattanccgggtgtggtggggggcgcttgtaatcccagctacttgggaagctgaggca

SEQ ID NO: 48717 - DNA, 516 bp, Homo sapiens
tggccgtcgttttacaccccgaaacaagagaaaacaatgatgggtgccgggccccccctcgagagaactaataaaattaattaaggcgggcagatcacctatggtcgggagttcgagaccagcctgaccaacacggagaaacccgtctctactaaaaatacaaaattagctgggcatggtggcacatgcctgtaatcccagctactcaggtggctgaggcaggagaatcgcttgaaaccaggaggtggaggttgcggtgagctgagatcgcaccattgcactgcagcctgggcaacaagagcgaaaccctgtctcaaaaaaaaaaaattacccaggcggtggcgcatgcctgtaatcccagttacgtgaacccaggaggcggaggttgcaatgggctgaaatcatgccattgcactccaacctgggcaacagaaagagactctgtctaaaaataattttattaaaaataaaaaataatattaaatttggaaaatattcaacttcatctcaaataaa

SEQ ID NO: 48718 - DNA, 464 bp, Homo sapiens
  misc_feature 158, 159, 161, 162, 164: n = A,T,C or G
ccccccctggagagtacttctagaattaattaaggcggaactcggccctttggaatctaatgctatgtcccggtagatagcgtcaccattgaattagaagacacacatatgttgagaataatcattctggtcatttgctgcatgtcttattgacaaannannanaaaaaaaaaaaaaaaaaaaagcggccgccaccgcggtggagctccaattcgccctatagtgagtcgtattacgcgcgctcactggccgtcgttttacaacgtcgtgactgggaaaaccctggcgttacccaacttaatcgccttgcagcacatccccctttcgccagctggcgtaatagcgaagaggcccgcaccgatcgcccttcccaacagttgcgcagcctgaatggcgaatggaaattgtaagcgttaatattttgttaaaattcgcgttaaatttttgttaaatcagctcatttt

SEQ ID NO: 48719 - DNA, 473 bp, Homo sapiens
accctaactaaagggaacaaaagctgggtaccgggccccccctcgagagtacttctagaattaattaagggcggggcggcgccctcagggtacagagcacagacagatagacattccagagactgtattgagagtctttataaagtgtgggagatttaaaaaaaaaaaaaactgataaaaatgccctttttgggagtggggagggaaaacctttaaaagttttaaaaaccaaacaaaaccccaaaagatgaaaaaccaaaaaatttcatttttcttgtccataaaaaaaaaaaaaaccccttaacccccccttgttacaaccgttgcaaaaaaaaaaaaaaaaaaaaaaaaaaaaaaaaaaaaaaatattttgaaaaaaaaaaaaaaaaaaaaaaccaaaccccccccccccgggggggcccccccccccccccataaaggggaggttccccccccccccctgggggtttttt

SEQ ID NO: 48720 - DNA, 504 bp, Homo sapiens
tcgcaattaaccctcactaaagggaacaaaagctgggtaccgggccccccctcgagagtacttctagaattaattaaggcaggtagacaggaggggaagagagagagtaaagccgctgaccctgcacacatggctcatgcccaggcttctgcccagagagataataaagccatatcaaaactgcccacaattcctcgagtgtttttccagcaacccaccactcgcccactgacttctatcagacctcagcttgggctggaacctgacacttagcatgacaggggagctttcagattaaatgtgattgtttctgcacattagtcagaaagtctctcgaaaatacctgttaataatacagtttttagaaagttattttaaagtgaagaattccttcaggaaacatgctaaccaagtgaataaaatggacagattggcatcaggtgcggatgcatatatgaggatgcaacatgacttctgtgagattactggccaaaaatcataaat

SEQ ID NO: 48721 - DNA, 541 bp, Homo sapiens
gcgcgcaattaaccctcactaaagggaacaaaagctgggtaccgggccccccctcgagagtacttctagaattaattaaggcgggcttgacgacaggctatttgaaatatccactcagagataataaaagaaaaagcatgaagcatgcctacaagatctagaaaatagcctcaaaagggcaaatctaagagttattggccagtagagagagagatagcagagtagaaagtttattcaaagggataatcacagagaacttcccaaacctagagaaagacatcaatattcaggaaaatgacacgaaataatacacaaaaaaagcggccgccaccgcggtggagctccaattcgccctatagtgagtcgtattacgcgcgctcactggccgtcgttttacaacgtcgtgactgggaaaaccctggcgttacccaacttaatcgccttgcagcacatccccctttcgccagctggcgtaatagcgaagaggcccgcaccgatcgcccttcccaacagttgcgcagcctgaatggcgaatggaaat

SEQ ID NO: 48722 - DNA, 431 bp, Homo sapiens
aaaagctgggtaccgggccccccctcgagagtacttctagaattaattaaggcgggaggtatttaactgaaaggaatatctgcttcactgttgcaaccaaaccagatgccttcttccacttcaccagaccaaggagatgacctggagaactgcattttaagattttctgacctggatttaaaagatatgagtcttattaatcccagcagcagtcttaaagcagaattagatggcagtacaaaaaaagaaatactcgtttgcaaagaaaaaggtagaattcttatgaatgtttcatgatcatgtatgtgtggttaacgcagatacatttggaagtcggttatcaaggttgctctccaactcaaggtaaagtctagtcaggaacattaaccagtgatgttaattccatcccaggcaaagggtaatcataggca

SEQ ID NO: 48723 - DNA, 496 bp, Homo sapiens
agcgcgcaattaaccctcactaaagggaacaaaagctgggtaccgggccccccctcgagagtacttctagaattaattaaggcgggtgcctgtagtcccagctactcggaaggctgaggcaggagaattgcttgaacccaggaggtggaggttgcagtgagccaagatcgcgccactgcactccagcctggctacagtgcgagactccgtcgcaaaaaaaaaaaaaaaaaggtaggtttctgagttgagaactaggttcaaatgtaaagactcaaatgatctgcctttgggagtaaaaattattatagagggctaaagatagcttaaacatacagttaacctaaaaaaaaaaaaaaaaaaaaaaaaagcggccgccaccgcggtggagctccaattcgccctatagtgagtcgtattacgcgcgctcactggccgtcgttttacaacgtcgtgactgggaaaaccctggcgttacccaacttaatcgccttgcagc

SEQ ID NO: 48724 - DNA, 565 bp, Homo sapiens
tgatacgccaagcgcgcaattaaccctcactaaagggaacaaaagctgggtaccgggccccccctcgagagtacttctagaattaattaaggcgggtgtgctcacagatcaggccatatgtgcattaattgtttaaagccagtattatctcaactctattgatgcggggttaataatactcacaaaattgtccagcagaccaattaactagggacaaactataaacctcaagtttataatgcgtgaaacgtgcgactgacacatatatgtaaagcacggcgaaacattaattacctacgactccaaaacattaataacgtcttttaaccagagagaatatggactcaatggtttaccatacgaaacgtgacatatccaaccaaccatccattcccacctgtgccctattctctcctagtggccctttagagcctttgcagctattgccagagaagcaaactgccccaacgcctgcccccggtaaccggttctttgcccaaatgggccattatcgacgaatacgcacaaaacgatagccttatcatccacaccatcatagccacca

SEQ ID NO: 48725 - DNA, 472 bp, Homo sapiens
ctggccgtcgttttacacccggaaaaaagagtatacacatgatggtgggcggcgctttccttgagagaactagtaaaattaattaaggcgggccgatcacgaggttaggagttcgagaccagcctggccaacatagtgaaaccccgtctctactaaaactacaaaaaaaattagccgggcgtggtggcagacgtctgtagtctcagtcacttgggaggctgaagcaggagaatcacttgaacccaggggcggaggttgcagtgagccgagatcgtgccactgcactccagcctgggtgacagatggagactcagtctcaaaacaaactaaacaaaacgaaaaccacctaattgcatcccatccttcagctgacctccaactccacacagaaaatagaagctactcagcatataactttctcaatgtagtttcctggatttgtggcactgctttccttttctatttttttttt

SEQ ID NO: 48726 - DNA, 568 bp, Homo sapiens
cctactaagggaacaaaagctgggtaccgggccccccctcgagagtacttctagaattaattaaggcggggtagaaaagagattttagatctgtgggataatatcagatggtctaacatatatgtaattggagtttcagaaggagagaagagaatgtggcagaagacatatttgaagagacaatgctcaggaacttctaaaattgatgaggtcatcaattcacaaatggaagaagttcagcaaatcccaagcaagttaaatacaaaacaaaaataagccaacaaatttaaaaatcccatatataggcatatcataatcaaaaaaaaaaaaaaaaaaaaaaaaaaaaaggcggccgccaccgcggtggagctccaattcgccctatagtgagtcgtattacgcgcgctcactggccgtcgttttacaacgtcgtgactgggaaaaccctggcgttacccaacttaatcgccttgcagcacatccccctttcgccagctggcgtaatagcgaagaggcccgcaccgatcgcccttcccaacagttgcgcagcctgaatggcgaatggaaa

SEQ ID NO: 48727 - DNA, 403 bp, Homo sapiens
gcgcaattaaccctcactaaagggaacaaaagctgggtaccgggccccccctcgagagtacttctagaattaattaaggcggggtaagagagagtttttaaagaagaaaatcaaaaggtatgtttttgaatgtaattttttttcgtgttaagttcagcttagttaatgatattgtaccaaatatagtttctcaaggcaaaatgtctatagatatcttctacttttaattcataactatattatggtagtgtacatactgattcttcctggaagaaattaaggtgacactatactaagtgtcttaaatctaaaccaagagtgtttttttaaaacactaatgaaaaaaaaaaaaaaaataaataaaaattaagcggccgccaccgagggggagctccaatttgcc

SEQ ID NO: 48728 - DNA, 473 bp, Homo sapiens
aagggaacaaaagctgggtaccgggccccccctcgagagtacttctagaattaattaaggcggggtaagatttgccgagttccttttactttttttaacctttccttatgagcatgcctgtgttgggttgacagtgagggtaataatgacttaaggttggagagctaaacactgggatttttggataacagactgacagttttgcataattataatcggcattgtacatagaaaggatatggctaccttttgttaaatctgcactttctaaatatcaaaaaagggaaatgaagtataaatcaatttttgtataatctgtttgaaacatgagttttatttgcttaatattagggctttgccccttttctgtaagtctcttgggatcctgtgtagaagcttgtctcattaaacaccaaacagttaagtccattctctggtactagctacaaattcggtttcatattctacttaac

SEQ ID NO: 48729 - DNA, 451 bp, Homo sapiens
aattaaccctcactaaagggaacaaaagctgggtaccgggccccccctcgagagtacttctagaattaattaaggcggggggttcatagtagaagagcgatggtgagagctaaggtcggggcggtgatgtagagggtgatggtagatgtggcgggttttaggggctctttggaacagatttctgacattgatgatgcagtaagaaaactgtaaaattcgagccatataaataaaacctgtactgttctagttgttttaatctgtctttttacattggcttttgttttctaaatgttctccaagctattgtatgtttggattgcagaagaatttgtaagatgaatacttttttttaatgtgcattattaaaaatattgagtgaagctaattgtcaactttattaaggattactttgtctgcccaccacctagtgtaaaataaaatcaagtaa

SEQ ID NO: 48730 - DNA, 324 bp, Homo sapiens
ctgggtaccgggccccccctcgagagtacttctagaattaattaaggcgggacacacgggctcatggctgtaaacccaacactttgcagggctgagccgacggtaaatcgcttgagcccaggagttcaagaccagcctgagtaacacggaaaaacaccatctctgctaaataaatgaataaatcaatacttaaaccaaaacatgctaaaacaaaacaaaaaaaaagcggccgccaccccggtggagctccaattccccctatagtgagtcaaattacccgcgctaactggccgtaattttacaacgaagggacatggaaaaccc

SEQ ID NO: 48731 - DNA, 548 bp, Homo sapiens
gcaattaaccctcactaaagggaacaaaagctgggtaccgggccccccctcgagagtacttctagaattaattaaggcggggaaataaaaactaaataacaaaaaaaaaaaaaaaaaaaaaaaaaaaaaaaaaaaaaaaaaaaaaaaaaaaaaaaaaaaaaaaaaaaaaaaaaaaaaaaaaattttcaaaaaaaaaaaaaaaaaaaaaaaaaaagggggcccccccccggggggggcccccatttccccttttggggggtgtttttccccccccccttggccgggtttttccccccggggggggggggaaaccctggggtttccccattttttccccttgggaaaaatcccccttttccccgggggggtttttacaaaagggccccccccctttcccctttccaaccattgccccccccttatgggcaaggggaatttgaggccttttttttttggtaaaattcccggtaaatttttggtaaaacccctttttttttaacccattggccccaatccggaaaacccttttttttttcaaaagattcccc

SEQ ID NO: 48732 - DNA, 487 bp, Homo sapiens
agcgcgcaattaaccctcactaaagggaacaaaagctgggtaccgggccccccctcgagagtacttctagaattaattaaggcgggggctgatttgatttgaagtggaggccaaaaaactcattagtgatattgtcaacgaaaaaagcacgctgaaggaaattaacagtctaaggctatggccttggtagggctaagcaacacattggtggtatagcaagaaacatagcatggggtaaatgaagatgagacagacagaggctacgtatgttcaccaggccacccagtctgcccacctggctatgcaatctgactaggaggtgatgacaagcacaaacgacaccaaagagggcccagtggaaagttaaagctggtacagacttccgaactgcctaaatactgcatgtgctcctcaatttgcacacagttccatcagcactggctggtcccagtgtttgagtacaacctctgatcaatcattaaataac

SEQ ID NO: 48733 - DNA, 292 bp, Homo sapiens
ctggccgtcgttttcaccccggaaaacagggtaaccagcttgggtgccgggccctcccctcgagagtacttctagaattaattaaggcgggcacctgtagtctcacctactcgggaggctgaggcaggagaatggcatgaacccaggaggcagagcttgcagtgagcagagatcacgccactgcactccagcctgggcgacaaagcaagactccatctcaaaaaaaaaaaaaaaaaaaggctgaatacccttgccccttcctttttaagggaaccaaaaaaccggggggggg

SEQ ID NO: 48734 - DNA, 479 bp, Homo sapiens
gcgcgcaattaaccctcactaaagggaacaaaagctgggtaccgggccccccctcgagagtacttctagaattaattaaggcggggggattgcttgagcccaggctgtgtggttcaccataattgtgtttgtgactagctactgcactccaacctgggcaacatagtgggacttcatctctaaaacaaaacaaaacaaaattacacttaagcactattgtttaatttttaattgtcagtttatcattattttgggtaagacattctggggtttcttgaatcttgtccaaaaaccagttgttttggaaaattgctttaaattgagcatatttatgtatattggataaaaatgtactacagagcaaatttcaaatttttcattatatcagtctttttgaaaggatcaacttggataaaataaatatataatgctctatttgttagagctctattaaaaaggaaacagattccatagatcta

SEQ ID NO: 48735 - DNA, 451 bp, Homo sapiens
ctaaagggaacaaaagctgggtaccgggccccccctcgagagtacttctagaattaattaaggcgggagccaccgtgcccggccaatacgtactttaaataaaacacaagtaggttgaagccagaagacagaaaagataaactatgtaaataataagcataagaaagctgattcgtgaccatattaatgctaccacatagacttcaagacaaagagtataagaggcaaaaaaggacattttataatactcaaaaggtcactggtaaattctatgaaaactttaagatatatttatatcaatggaacaccaacaaatgaactaacactcttatacaaactttcagaaaataaagggagaaggaaaactacccaatttattgtataaggtcagtacaaccctgataccaaaacctgacataaacttgataagaaaaaaaaaaaaaaaaaaaaa

SEQ ID NO: 48736 - DNA, 362 bp, Homo sapiens
agggaacaaaagctgggtaccgggccccccctcgagagtacttctagaattaattaaggcgggataatgcagagaggtaccatcttgattttccccagttacattcacctggtctggtctctgtaagcttagaagagtagaatcactttattttttaaagacttccggccaggcacggtggttcacgcctgtaatgccagcactttgggaggccgaggcgggtggaccacctgaggtcaggagttcaagaccagcctggccgacatggcgaaaccctgtctctactaaaaaaaaaatacaaaaagattacctgggtgtggtggtgtgtgcctataatcccagctactcaggaggctgaggca

SEQ ID NO: 48737 - DNA, 494 bp, Homo sapiens
actgccgtcgttttacacccgggaacaagagtgtacacatgatggttgccgcgccttttcttgagagaactagtagaattaattaaggcgggcggatcacgaggtcaggagattgagaccatcctggctggcacggtgaaacccagtctctactaaaaatacaaaaattagcccggcgtggtggcatgcgcctgtggtcccagctacttgggaggctgaagcaggagaattgcctgagcccaggaggaggaggttgcagtgagccgagatcgcaccactgcattccagcttgggcaacagagcgagactccatctcaaaaaaaaaaaaaaggttttttctttctttaaagtggctttaaataaagtttatttgggtccttatggaaacaaagttttcattaatgaggggacagtaagggggggttttccaaagggcccttttttaataagttaaataaccccaaaattccgggttaaaaaaaaaaaaaaaaaaa

SEQ ID NO: 48738 - DNA, 525 bp, Homo sapiens
  misc_feature 300, 301, 302, 303, 447, 463: n = A,T,C or G
attaaccctcactaaagggaacaaaagctgggtaccgggccccccctcgagagtacttctagaattaattaaggcgggtggtaattactttcctttcacaaaatttgaaatctattttaattctccctttgactcaaaaatctctctctcaatacacacacacaatggggctcactcacccaccacattaacaacataaaaccctcattcacacgagaaaacaccctcatgttcatacacctatcccccattctcctcctatccctcaaccccgacatcattaccgggttttcctcattnnnnaaaaaaaaaaaaaaaaaaaaaaaaaagcggccgccaccgcggtggagctccaattcgccctatagtgagtcgtattacgcgcgctcactggccgtcgttttacaacgtcgtgactgggaaaaccctggcgttacccaacttaancgccttgcagcacatncccctttcgccagctggcgtaatagcgaagaggcccgcaccgatcgcccttcccaacagttg

SEQ ID NO: 48739 - DNA, 651 bp, Homo sapiens
aattaaccctcactaaagggaacaaaagctgggtaccgggccccccctcgagagtacttctagaattaattaaggcgggagacgtcttacagaggaacaaaaataaggatgacagaaaacttcacctcaaaaacaatgcaaaggagaaaacagtagagtgccatctttatgaatacaggagagaaaaaagtcagtctagaattctatataacaagccaaaatattttttttaaataaagaagaaaattaaacttttgcagacaaaagacagaaaaattaattactagctaatcttcacttaagaacttaaagtcgttcaggcaaatttaaatctacataaaggcataaaaagcaatagaaatagtaaacatgtgagcaaatataaaatagtatataaaatacattttaaaacattcaaaactcaacattttaagaatattcaaattaggccgggcgcagtggctcacgcctgtaatcccagcactttgggaggctgaggcgggaggatcacctgaggtcaggaattcaagaccagcctggccaacatggcgaaactctgtctctactaaaaacacaaaacttagctgggcctggtggcaggcacctgtaatcccagctactcggaaggctgaagcataagaatcacttgaa

SEQ ID NO: 48740 - DNA, 370 bp, Homo sapiens
aactggccgtcgttttacaccccggaaaaaggtgaaacatgctgggtgaccgggccccccctcgagagtacttctagaattaattaaggcgggagtgatgttctaattttcatcgcttctagcctgaggccagcccttgtctgcaccacacatggaagcaaaaagaatacataaaaattaaaaaaaaagtaaatcttctactgggaagtgaaagaggaaacaggaaaaggagagtaccaggattagaggcacaaattatctgcatttactctgcctgtcaggctgaccacaaatgctgaagacacagccttagtaggctacataagaatagaataactgaactaagatttggcctgctacttaagaccat

SEQ ID NO: 48741 - DNA, 468 bp, Homo sapiens
accctcactaaagggaacaaaagctgggtaccgggccccccctcgagagtacttctagaattaattaaggcggggggtcagtcagtctgaatattgcatcttttggagaaaaaaggcagccagatggtccacgcagcactggaagaagagggtggtgatgtggtcagtgtactgtgtccctaagaaatgtatgtactgtgaaataaggagcagatggcaggagaactaggagacacttgagtgatgaactcaagtatccagaagaactgggaagcaaaaaaaaaaaaaaaaaaaaaataaaaaaagcggccgccaccgcggtggagctccaattcgccctatagtgagtcgtattacgcgcgctcactggccgtcgttttacaacgtcgtgactgggaaaaccctggcgttacccaacttaatcgccttgcagcacatccccctttcgccagctggcgtaatagcgaa

SEQ ID NO: 48742 - DNA, 334 bp, Homo sapiens
tttgcatctgagatcctgctggaaaccacagcaacctgtatccactattaggaggtaaaaatcaataaaatggcccattcaaaaaaaaaaaaagaaaaataaaaatttaaaatatgtttgctaaaaaaacaaaacaaaaaaaaaacccctaaggtgagtccgttggttataaaaaaaaaaaaaaaaaaataatccccccccccccccgcggggtcccccccctctaaaaaaaaaaagggggacccccccccccccggggggaaaaaaaaaaaaaaaaaaaaagaaaacacccccgggggggtctctttattttggaaaaaaaaaaaaaaaaaaa

SEQ ID NO: 48743 - DNA, 504 bp, Homo sapiens
accctcactgaagggaacaaaagctgggtaccgggccccccctcgagagtacttctagaattaattaaggcgggggggggggctctgacatttacctgctccccacctctgcaggttgcgcttgcaatagacctgtgttgctgtagagccgccaactctctctctgtctttctttaaccttcaccttctcttcaaaacttaacccttagtttcaacattgtaattgtccaccctcagtttcaacattgtaatatgttgaacagtaacattttatagaggttcttagagcatttagagtttttttagaccatatgtaaggtccttagcatagtcctctagtacctccagacatttacaaatgtaacttcctttcttctctttctttcctaaatgatttgtcccaagtactgagaatattataaaaactgcatcagaaaatatacttgaacttagcttcattttatggttggacttataaagctcctatttgacatctttcttttt

SEQ ID NO: 48744 - DNA, 451 bp, Homo sapiens
  misc_feature 368, 369, 370: n = A,T,C or G
ccgtcgttttacaccccggaacacagcgtatacacatgatgattggcgcgcccttctcttgagagaactagtagaattaattaaggcggggatactgattcagaaatcctgtagcgtgtaataaaagaagaggaaatggcatggaatcactgcctcctgcgatttgaaggccattgtgaaggaaaacaatgcagtgaaagaaagttcttcatattaggacagatatcattgcatcacatttatttatctttctgggtatttttatagcccttaataaaaaatattaaaatagccaaaaaaaaaaaaaaaaaaaaaaaaaaaaaaaaaaaaaaaaaaaattttaaaaaaaaaaaaaaaaaaaaaaaaannncccccccccccccggggggggccccccccccccctttaaagggttttttccccccccccccccggggcctttttaaaaaaa

SEQ ID NO: 48745 - DNA, 606 bp, Homo sapiens
cgcgcagttcaccctcactaaagggaacaaaagctgggtaccgggccccccctcgagagtacttctagaattaattaaggcgggaggcacggaatccaaaagcctgttgtttgagagtgtgttaggagaaaggatactagaagtggacacatttcatttctaagacatctcaagataaatgagtaactttccaaatctttcacatgtgtaacatatttatttttgatgcagtatataataatcatatttctatagtaataaatccattcctttgactgtatgtaattctaatttatcacctaccccaccattttatcctaaaaaaaaaaaaaaaaaaaaaaaaaaaaaagcggccgccaccgcggtggagctccaattcgccctatagtgagtcgtattacgcgcgctcactggccggcgttttacaacgtcgtgactgggaaaaccctggcgttacccaacttaatcgccttgcagcacatccccctttcgccagctggcgtaatagcgaagaggcccgcaccgatcgcccttcccaacagttgcgcagcctgaatggcgaatggaaattgtaagcgttaatattttgttaaaattcgggttaaa

SEQ ID NO: 48746 - DNA, 341 bp, Homo sapiens
gccgtcgttttacaccccggaaataaggtgtcacaagctgggtaccgggccccccctcgagagtacttctagaattaattaaggcgggccctgggccgcatggtggagcggagcctgcgcatcgagctggctgcacttccccccagcgtacaggaggagcacgggcagctgcttgcgctactggcagagctgctgcgaggaccctgtggcagctctgatgtgcgcaagacagctgacgactgagccctgcttctgctggggctgtgtacagagtgcaaatgtttatgtaaaatgaagttctatatttccctgcgcctgcagcaaacatactacaaagtatg

SEQ ID NO: 48747 - DNA, 481 bp, Homo sapiens
ctggccgggccgtcgttttacagaaaggaggaacacatgctgggtgccgggccccccctcgagagtacttgtagaattaattaaggcgggataagagtgagttgaatgaaataaaagaaaatcagagaagtccagttagagtaaaagagagaaaaataacagatcacaggaatgtatctgagagtccaaacagaaaaaatgaaaaggagaagaaagttaaagaccataaatctaacagcaaagagagagacatcagaagaaattcagaaaaagatgacaagtataaaaacaaagtgaagaaaagggccaaatctaaaagtaggagtaagagcaaagagaaatcaaagagtaaagaaagagattcaaaacataatagaaaaaaaaaaaaaaaaaaaaaaaaaaaagggggccccccccggggggggacccccattccccctttagggggggtttttacccccccccctggggcggtttttta

SEQ ID NO: 48748 - DNA, 502 bp, Homo sapiens
gcgcgcaattaaccctcactaaagggaacaaaagctgggtaccgggccccccctcgagagtacttctagaattaattaaggcgatgtaatttactcaggaagatcacaaattccttaacattctttacaattataaaattaacggcttttttattatcaataaattacttcctattgctccctaaatcacctccataaaaccaaatattaagctgtttgtgttacatttcctgtgatgccttttaaaaacattttgggccgggtgcagtggctcacgcctgtaatcccagcactttgggaggccaagatgggtggatcacgaggtcaggagatcgagaccatcctggctaacacagtgaaaccccgtctttgctaaaaatacaaaaaaaattagccgggcgtggtggcgggcgcctgtagtcccagctactcaggaggctgaggcaggagaatggcatgaacctaggaggtggagcttgcagtgagcagagatcgctccact

SEQ ID NO: 48749 - DNA, 471 bp, Homo sapiens
caattaaccctcactaaagggaacaaaagctgggtaccgggccccccctcgagagtacttctagaattaattaaggcgggagacaaaagacatatttttcaagtggtgaaagaaaaaaaagactatctactgtgaattctaccattgacaaagctatacttcaggaacaaaagaaaaataaagatatattcagacaaaggaaaacaaaaataatttggcactataagacctacctttaaatattagctaaaggaagttctttaaacacaatggaaataatttttaaaaaggaatcctaagcatcagaaaaaaaaaaaaaaaaaaaaaaaaaaaaaggcggccgccaccgcggtggagctccaattcgccctatagtgagtcgtattacgcgcgctcactggccgtcgttttacaacgtcgtgactgggaaaaccctggcgttacccaacttaatcgccttgcagcacatcc

SEQ ID NO: 48750 - DNA, 617 bp, Homo sapiens
gccaagcgcgcaattaaccctcactaaagggaacaaaagctgggtaccgggccccccctcgagagtacttctagaattaattaatgaattcattagattggtcaaggcatgacactttaactacacaataggatttaaaaagcaggtggtttttttagtagttctctggtaatcacacgcacatacacacatacacaaaaatttatagagtactctgaatataggatttcccccttaattaaggcgggcaaaaggggtggatttaatacctttagagacagggaaaattatgacagaggttactctagcctgcttaaaagagattttggggcaaaaactcagaatggtgtttacagtgctgcaaattacaccaatgggagctttggaagtaattttgtgtctgctggtatacagaccagttttaggactggtaatccaacagggacttaccagaatggttatgatagcactcagcaatacggaagtaatgttccaaatatgcacaatggtatgaaccaacaggcatatgcatatcctgctactgcagcagcacctatgattggttatccaatgccaacaggatattcccaataagactttagaagtatatgtaaatg

SEQ ID NO: 48751 - DNA, 455 bp, Homo sapiens
accctcactaaagggaacaaaagctgggtaccgggccccccctcgagagtacttctagaattaattaaggcggggtgtggtggcatgtgcctgtagtctcagctactcgggaggctgaggcaggagaatcacttgaacctgggaggcggaggttgcagtgagtcaagatcataccactgcactccagcctgggtgacagagtcaggctccatctaaaaacaaaagattgtcacaatagcagttaacaaacacaaaaacatttcctagttataagaaccttacctggaaactggaaagcaggagacagccaagccgtttgctttctgctaaatcgacactgatagaccggctgagctctaacataaaacatagccacatttaaggagctggatagctacatagttagcaactaacaaaactgaaaaatgtcctccctcttgataaatccaacttaa

SEQ ID NO: 48752 - DNA, 476 bp, Homo sapiens
aaccctcactaaagggaacaaaagctgggtaccgggccccccctcgagagtacttctagaattaattaaggcatgtaactatactttttttatgctacattataacatgagtgcttttccttgttatgaaaagtttttaatgaattcataatcaaagttttgttacctgccgtattctaatcattcttctattatggaacatttgagtgtgtgagctcttcgtgtgataaatatttccatgaggaatcatctttgcattctatattatgtatttacaaattcacacttaataacacttttaaaaggttatataacctcttagtaacctctttaacagatatttagctttcatatataactgccttaaaaattttggaaaagaattattgaaatagtctcttatgtaatgagactgaaatctagaagacaggcttgaagctcgactctggctctgaaattagccggaaataaactca

SEQ ID NO: 48753 - DNA, 486 bp, Homo sapiens
tggccgtcgttttacaccccggaatacagcgtgtacacatgatgtgttgccgggccctccctcgagagtactagtagaattacttaaggcggggttgggaggggtggcaaagtttcactcttgttgcccaggctgaagtgcaatggcacaatcttggctcaccacaaccgctgcctactgggttcaagcaattctgaatggtcttgagacaaacagaaaaatggaaagtctcagcaaagaaacagatatgaagaataaaatgaaaattttagaactgaaaaatgcagttacgtgctgtataaccatgtttccatcaacaacggactgcatatacagtgaggatcctgtaagattataatagagctgaaaaattcctatcacctagtgacatcatagtcattgtgacatagcacaattacttaatttttaaataaatttagtgtagcctaaatgtacagcatttataaagtctacagtaatgtaatg

SEQ ID NO: 48754 - DNA, 303 bp, Homo sapiens
tggccgtcgttttacaaccctgacaaaaagggaaacaagctgggtaccgggccccccctcgagagtacttctagaattaattaaggcgggaaattcattaaagtaggaaaagctctcattcaagagcacagggaaatgaaaacctttaaggatttgaatgagtgcaccaaataatataatatcaatgtttccaaaaaaaaaaaaaaaaaaaaaaaaaaaaaaggccccccccccgggggggaccccaaatccccctaaaaaaaaggtatttacccccccccccggggccgttttttaaaaaaa

SEQ ID NO: 48755 - DNA, 481 bp, Homo sapiens
cgcgcaattaaccctcactaaagggaacaaaagctgggtaccgggccccccctcgagagtacttctagaattaattaaggcgggagaatcagttgaacgtgggaggtggaggttgcagtgagccaagatcgcaccactgcactccagcctgggtgacagagcgagactgcatctcacaaaagaaaaaagaaaaaaaaagacatgtcaacttaaagcactgtggtatcctggatgagatgattctgggacagaaaaggaatactgggtaacaactaaggaaattcgaataaaatattaactttagttgacaatagtgtattggtattggttcattggttgtgctaatgcaccatattgaagtaatgtaagatgttaaaaatagagggaattgggtgtaggatatatagcaactctactatcttttcagcttttctcaaaatttaaaactattcttaaaaggtcactctccttcctcctcttc

SEQ ID NO: 48756 - DNA, 562 bp, Homo sapiens
cactaaagggaacaaaagctgggtaccgggccccccctcgagagtacttctagaattaattaaggcgggcaggtcatctgaggtcaggagttcgagaccagcctggccaacaggacaaaaccccgactttactaaaattaaccaggcatggtggcgggcgcctgtaattccagctattcaggaggcttaggcaggagaatcgcttgaaccctggagggagaggttacagtgagctgagatcgtgccactgttctccagcctgggcgacaagagcgaaactctgtctcaaaaaataaaagaaatatcttcttgggctctgtctctctgtctctcctcctctcttcttcccttcttgtctttttagttctctttcttctccctttcctttatcttctcctaccaaagaaacttaaaaaaaaaaactgagcctttaaaaagcggccgccaccgcggtggagctccaattcgccctatagtgagtcgtattacgcgcgctcactggccgtcgttttacaacgttgtgactgggaaaaccctggcgttacccaacttaatcgccttg

SEQ ID NO: 48757 - DNA, 335 bp, Homo sapiens
  misc_feature 322: n = A,T,C or G
ctggccgtcgttttacaccccggcacaaggagaacacaagcatggggccgggccccccctcacaaagtacttactagaattaattaaggcgggtgaggatttccccatataccagtgtgtgttcatctacccatgaggaataaaaccatgcagcagcatgcaaaaaaaaaaaaaaaaaaaaaaaaaaaaaaaaaaaaaaaagggggcccccccccggggggggcccccaacccccccaaaaagggggattaaacccccccccccgggggcggtttttaaaaaaaaaaaaagagaaagcccccccccctgggcgcgcgctttnataaaaaaaaaaa

SEQ ID NO: 48758 - DNA, 460 bp, Homo sapiens
actaaagggaacaaaagctgggtaccgggccccccctcgagagtacttctagaattaattaaggcggggggatggctgcacgacatttacctaatgctaaatgactagtctatgggggcgctgcaccaacttgggacatggctacatatgtaactaacctgcccattgtgcacatgtaccctaaaacttaaagtgtagtgatagctgacataaaacaatgatgataacactaaatttcaaaaaacgaaggacaatccttacagcatcttatgaaaatactacaaagccaggatcgtttattcacaagttacacaaaataattttttttactgtttacctgacatctaaagtaaaagcagaataaaataaacttctcaccaatagttaaaaaaaaaagaatgttcttccgaactaaactttatgtatgaaggagaaatgaaatctttttcagataagcaaa

SEQ ID NO: 48759 - DNA, 301 bp, Homo sapiens
  misc_feature 73, 119: n = A,T,C or G
cctcactaaaggtaacaaaagctgggtaccgggccccccctcgagagtacttctagaattatattaaggcggngggaagcatttagtatttcattaagtatgatgttagctataggttntttgtagatattctttatcagtttaagaaaatttcctacgattactagattgttcagaattgttttaagatcatgagttgatatttcaattttgttaaatactttttctgtttccattaagataatcatgtgttttttttagtcagtcattgtagcccattgtattgcttgattttctttat

SEQ ID NO: 48760 - DNA, 272 bp, Homo sapiens
ctggccgtcgttttacactccggaacaagttataactttgattcttgcccgcgtttttccataaagaaaaaaaaaaaaattttatttttggcggtggctttacggacaaaaaggaaaagtattgtgttgttttgttcccctgccctcctttctcaaaaaatttttgttattgttgttgttgttcttacacgagtgcctcctggtgcctgcggcatccttctgcctgtttctgtaagcaaatgccacaggccacctatagctacatactcctg

SEQ ID NO: 48761 - DNA, 301 bp, Homo sapiens
aaccctcaataaagggaacaaaagctgggtaccgggccccccctcgagagtacttctagaattaattaaggcgggggaaggggacacaggatctctctgtattctttcaactgcatgtgaaactatgagcatctcaaaataaaatttaactgtaaatacaaaaaaaaaaaaaaaaaaaaaaaaaaaaaaaaaaaaaaaaaaaaaaaaaaaaaaaaagggggcccccccccggggggggccccccacccccccaaaaagggggtttaaaccccccccccccggggccgttttaaaaaaaaaa

SEQ ID NO: 48762 - DNA, 465 bp, Homo sapiens
agcgcgcaattaaccctcactaaagggaacaaaagctgggtaccgggccccccctcgagagtacttctagaattaattaaggcgggacctggaattgatttttgtttgttgagaagtcagaatccatgtaatatgtcaattagatttgctgtgtgattaaccaccccaaaacttagtggcttaaaagaaccaccatttatttaacatatattcctatgaggctggtctcaactgggctcacccatgtatatgctagtcagttgccagtgaactgagtcactcatcccctggaggttagctggttgtccactgggatagcgggcatattgccagtgagccacatagctctaccactcatgaggctctctgaacttcttgatagtgtggcagcaggttgcaaaagggaatgagccttattgtgcaagcctctatgtgcggtggttgctatcatctcattagccaaag

SEQ ID NO: 48763 - DNA, 488 bp, Homo sapiens
actggccgtcgttttacacccctgaatacaggggaacacatgctgggtaccgggccccccctcgagagtacttctagaattaattaaggtgggcacatttaaggtcagttcactaacctatggttcagagttctgatcatatggaagtttggaaaagagagcttatcacaggtttgtatgctggtgaatggatagttttaattctcactgtctcaaaagagaatcagctctccagcagttctagaaaagctttgacaatccccaaggggcagtgttaccttactccttcactgcttcttagaaggtagaattaagtttctggaattgcacctacatgttttcttattaacattcagaattgggaatattaatttttccagtgagtagttttctgaaattggtaacttggagagtaaaataacgtattttgcttttcaattttgtgtttgtttacttttattgtaaaatttgatatgtgaattacacag

SEQ ID NO: 48764 - DNA, 520 bp, Homo sapiens
cgcgcaattaatcattactaaaggcgcgcaattaactgtgactaaagggaacaaaagctgggtaccgggccccccctcgagagtacttctagaattaattaaggcgggagccgttaagggactttaagtaagggatgataagacagcatctgctaagtattaaacacattgttagctaacatgctgacattgacggacactacagaaaaaaaacttaaaagcagacaaaaaaaaaaaaaaaaaaaaaaaaaaaaaaagcggccgccaccgcggtggagctccaattcgccctatagtgagtcgtattacgcgcgctcactggccgtcgttttacaacgtcgtgactgggaaaaccctggcgttacccaacttaatcgccttgcagcacatccccctttcgccagctggcgtaatagcgaagaggcccgcaccgatcgcccttcccaacagttgcgcagcctgaatggcgaatggaaattgtaagcgttaatattttgttaaaattcgcgttaaatttttg

SEQ ID NO: 48765 - DNA, 454 bp, Homo sapiens
  misc_feature 336: n = A,T,C or G
aaagggaacaaaagctgggtaccgggccccacctcgagagtacttctagaatgaatgaagggggcatgaatatttaaaatctaaaaacctcagatcagcagaccgagtcgaaatgtgattcttcaaagcaagtattgctttacccttgtcctgaatgcagtccgtcatatgaccactaacttgcatgtgaccaaatgtttgcagagtgtttttttagatatgctctcggtgagccgtcatccgtcaatccaagaagaagatgttgttgaactgcgttgcacaaagtttcttgacctcttcatttacttcaatcaggtttgcatttttttgattcanaataacatagagcccccgccttaattaaggcgggagaactcactgaggatgaggtggaacgtgtgatcaccattatgcagaatccacgccagtacaagatcccagactggttcttgaa

SEQ ID NO: 48766 - DNA, 424 bp, Homo sapiens
  misc_feature 390, 391, 392: n = A,T,C or G
aataaagggaacacatgctgggtgccgggccccccctcgagagtacttctagaattaattaaggcgggtggggggagtgggcggcattcctcccagctttaaattaggaagtttcaggacccactccttctcctaggtctatattagtatcacctgggggcagacttaaacaaatattggttctcaagtaccacacccccccagattctgatataattggcttggcctggggtcagacactgacctttttaaagctctccaagggatgacagccagggttgcaaagcaatgaaatataccagggattcccaacttggctaaatattacaattatctggggaccatttaaacatacccaaacccatgccacctatcacaccccatcctaannnaaaaaaaaaaaaaaaaaaaaaaaaaaaaaaaa

SEQ ID NO: 48767 - DNA, 466 bp, Homo sapiens
agcgcgcaattaaccctcactaaagggaacaaaagctgggtaccgggccccccctcgagagtacttctagaattaattaaggcgggggggaatggattgggcagtttgaggagcttggacaagacttgaaatagttgcagaaaatgagagtaagtgtcactgaggaaatgtggaattatatattaagtaaaacaagctggttgtagcactaactagactattattattacagataagcaaagaaaaaaaaccacaacaaaccaacaagccttattaatacatctccttatgataccatgtacttacaatgttgtttaaatggacatcagcggtgcataattaaaatacacctaaattgtcgcttgcctttagtgaatagataaattgcttatctttaacatgtcatttattggaaataacaattcttataattcttttatcaaggctgccaaaattgacatttaaa

SEQ ID NO: 48768 - DNA, 407 bp, Homo sapiens
taaccctcactaaagggaacaaaagctgggtaccgggccccccctcgagagtacttctagaattaattaaggcgggggggatttgtggcctaacattgggaggactttgcatctaagaagacagaagtacgggaaggcgaagaaaagaatagataacatggggaaattagaagataaaaacatactttttgaagaaaaaagatcaatttaaacctgaaaagtaggaagcagaagaaaaaagacaagctaggaaacaaaaagctaagggcaaaatgtacaaacttagaagaaaattggaaataaaaaaaaaaaaatggaacaattgggggcccccccccgcgggggatgccaattcccccctttgtggggagatttaacccccccccccggccccgtttttaaaaaaa

SEQ ID NO: 48769 - DNA, 433 bp, Homo sapiens
  misc_feature 354: n = A,T,C or G
cgggccccccctcgagagtacttctagaattaattaaggcggggagccagcatcagacatgctaatatccaaaaacatctactcacatcaacttaatttccagtttctttcaaattgaagagtaagttccaagacaaactttttattctattctctgaccaagtgttgggaaaagaaaactgttaccattttcatttctagcatactaaaacaaaaaaacataaaaaccccaaaatctaaaacacttttaaaaataacatggcgttaagagtagtttgttcagtttccctatagaaaatgatttatggaaggagaataaaagattattctgaacactaaaacaataagaccaanttatataaaaaataaccaaaaagtatgcggccgccaccgcggtggagctccaattcgccctatagtgagtcgtattacg

SEQ ID NO: 48770 - DNA, 502 bp, Homo sapiens
  misc_feature 414: n = A,T,C or G
caagcgcgcaattaaccctcactaaagggaacaaaagctgggtaccgggccccccctcgagagtacttctagaattaattaaggcgggggagggcttctcataacaaaaactatcacaaaagactctgcaaaccccacaatgttgcacaaagatcatcataacctttcaaaaaaaaaaaaacacttctgctaggacagctgccagcaactgcctgttgaaacttggactgatgccaccctgttattgatccttacagccaaggagaattatcgcaaaacaattatgtaatcctcctcatttttcctgtgtcaactttcatcttcctttacctccccaaatacaaacataatttactatgacacccgtattcccattgcaatgccctatccccaaataaatgtcattttcctttnaaaaaaaaaaaaaaaaaaaaaaaaaaaggaaaaaaaaaaaaaaaaaaaaaaaaaaaaaggcggccgccaccgcggtggagctccaatt

SEQ ID NO: 48771 - DNA, 451 bp, Homo sapiens
ctcactaaagggaacaaaagctgggtaccgggccccccctcgagagtacttctagaattaattaaggcgggggggacaatagaccagataaggaatttagactataatgacatactttgggtacattaaggacttctttcacctttaatagttcgagacatatcaaaatggaccatcttggatacggcaagctcctggcaaagctgtacttgagaagataataagtaggatttttgttttgggttgccctttgggggggcaccgagaactgattagaacttaggaagtgccccccgggttggtgaacatgccatcaataaaagccctggaaacaaggtcatactagagattggttgtgccttgtcacaactgcaaacaatacctgagtggagtattcaaaaacttgcttagaaagaaaactctaggaacagatggcttcactgaagttatt

SEQ ID NO: 48772 - DNA, 646 bp, Homo sapiens
ctggccgtcgttttacaccccggaacacagcgtgtaaccatgatgggtggcgcggcccttcctcgagagtacttatagaattaattaaggcggggtatacagattggaaaggacagtatgaatgcctataatagaaaatgccatggactcaccaaaaattctagaactaataaatgagttaagcaaggtcacaagatagaaaaggcagttgtattttaatatactagcagtgaacaattggatattgagatattaaacagtaccatttgcagtaacttagaaaaaaatgaaattctatgtataaatctcacaaggatctgtatactgaaaactataaaaacactgataatgaaagaaatccaggacccaaataaatggagagatataccatgctaaaatgttggttctccccaagttgatttatagattaagcacagtcccaagcacaatcacagcatgtttgtttataaatattactatagatgtaaatatctaaaatctgtgcctttacatgtagattttaaaatctgtatgaaaaggcaaaggaactaaaaagccaaaacagtttggaagaaaaaacaggaacaattggaggattcacaacaccttgtttcaagacttaattataaaagtacagtagtaatga

SEQ ID NO: 48773 - DNA, 431 bp, Homo sapiens
aagggaacaaaagctgggtaccgggccccccctcgagagtacttctagaattaattaaggcggggatgaaaccgatatcgacgatacggttgtataggattgcttgaaaaaaaaaaaataattaagattttaaaatagaaaatattaaagaaaaaaataaaagcggccgccaccgcggtggagctccaattcgccctatattgagccgtattacgcgcgctcactggccgccgttttacaacgttgtgactgggaaaaccctggcgttacccaacttaatcgccttgcagaacatccccctttcgccagctggcgtaatagcgaagaggcccgtaccgatcgcccttcccaacagtttgcgcagcctgaatggagaatggaaattgtaagcgttaatatttcgttaaaattcgcgttaaatttttgttaaa

SEQ ID NO: 48774 - DNA, 396 bp, Homo sapiens
  misc_feature 391: n = A,T,C or G
ctggccgtcgttttacaccccggaacaaggtataacctatgatgtgattggcccgcgcgcttttctataaagaaaaaaaaaaaaactttattgctgagcgttccggatcggccaagaaagagtagtgggaagaaagttagatttacgccgatgaatatgatagagaaatggattcagtataaggataaggagggaaggtggaccagaatgaaaactgtaaatatttttttaacctaatatcacttaaatcgaggcagaaagatatagacattcaatgaattatattcaatgcatttaaaataccactgtaattgacagagtaaaagtatagatacaaaaccttgggtaaaaggctgacttttccaaataaacattttttgaaaaaaaaaanaaaaa

SEQ ID NO: 48775 - DNA, 528 bp, Homo sapiens
ctggccgtcgttttacaccccggaaaaagcgatacacatgatggttgccgggcccctcctcgagagaacttgtagaattaattaaggcggggtttcaacttattctattgtaagatactgttaaatctaatagaggcattgtcacttttacgtataattttattttatttcatatatttcctattggctttttacatttaaattatggagcacttcatcatataaaaaacttcaattatatttaaacagtaagtctttggatttttttgccttgtaatttccatattacataataatgagataaacattaatgttttcagggtactttaaattttagataattactcattgtattcatgtgaaatttgtttttactgcatgtgtgggttggaggactgttttcacttctgattcatctttactcttatctcatcagagctcatacctcttgtaattgggggattgcagtttataattccaataaatggggcaaattcaataataacataatacaaatgagtttgaatg

SEQ ID NO: 48776 - DNA, 431 bp, Homo sapiens
aaagggaacaaaatctgggtaccgggccccccctcaagagtacttctagaattaattaaggcgggccaactcaaagctggggcttccaagctgtaagtaaatttaaacattttctggttgacaattgcttgagtttatttgaagacctgggattaatggaaagaaatgttcaggttaagataaatgattgtggggaccaagttttactgtgcagaggaatctctcagcagacttcatagagagcaaattgttaaatgtttcttatcggacccaaaagggtgcctggctctcaactgaatatcccctggatctgcatacaaaggaaggaaaacaaaagggaaagggggttctctttagaatgtggatttttcccacaagagactttgccgggcaatttcaaggcatgggaaggaaataatattttggattaa

SEQ ID NO: 48777 - DNA, 449 bp, Homo sapiens
gggaacaaaagctgggtaccgggcccctcctcgagagtacttctagaattaattaagctgaattttatgttactttattatgagggaacaatgaataatttaaattacagtttaagtaagttttagattcctttatattttcaaaatgaaataaaagatatacaatagaattaatattcagataatatttaactatcactcaaaatatgtagataatagccaggcacagtggctcatgcctgtaatcccagcactttgggagaccgagttgggtggatcacctgaggtcaggagttggggaccggcctgcccaacatggtgaaaccccatctctactgaaaatataaaaattaactgggcgtggtggtgtgtgcctgtaatcccagctgctcgggaggctgaggcagaagaatcacttgggcccgggagacagaggttgcagtgagcct

SEQ ID NO: 48778 - DNA, 160 bp, Homo sapiens
aaagctgggtaccgggccccccctcgagagtacttctagaattaattaaggcgggggggagacaaaaaaaaaaaaaaaaataataaaaaaaaaaaaaaaaaaaaaaaaaaaaaaaaacaaaaaaaaaaataaataaaaaaaaaaaattattataaaaaaa

SEQ ID NO: 48779 - DNA, 199 bp, Homo sapiens
ctggccgtcgttttacacccggaaaaagcggtacacctgctgggttaccccggccccctcctcgagagtacttctagaataattaaggcgggtaaaatgaattttgtaatatcctcaggatacttttatcttaaaagtatgttgttaaagattttgtaaattgtatttcaacaattttaaatgtgttgagcaagttgca

SEQ ID NO: 48780 - DNA, 369 bp, Homo sapiens
ctaaagggaacaaaagctgggtaccgggccccccctcgagagtacttctagaattaattaaggcgggtcacctgaagttgggagtttgagaccagcctggccaatatggtgaaacctcgtctctattaaaaatacaaaaattagccgggcatggtggcacacacctgtaatcccagctacttgggagcctgatgcaggagaattgcctgagcccatgaggcagaggttgcagtgagctgacatcacacctctgtactcctgcctgggtgacagagcaagactccatctcataaaaaaaaaatggaaacaagtgcctgaaaacgcggccgtcaccgaggtggagctccaattgaccctatagtgagtcgt

SEQ ID NO: 48781 - DNA, 483 bp, Homo sapiens
  misc_feature 407: n = A,T,C or G
gcgcaattaaccctcactaaagggaacaaaagctgggtaccgggccccccctcgagagtacttctagaattaattaaggcgggcgagtcggacagttaaatgagaaaatgaaatagaaggcatccaggttagaaagaaagaagttaatctatctctattcacagatgacttggtcttatacatagaaaaccctaaagaatccacacacacgaaaaaaaacctatcagagctaataaatgagttcagtaagttacagcgtacaagattaagatacaaaaatcaattgcgtttgtatacgctatagaacaatctgaaaatgagtaaaaattaaaaggagtaagatgcttagaataaatttaatgaaagaagtgcaagacttgcataatgaaaaccacaaaacattgttnggcgacaaaaaaaaaaataaaaaaaaaaaaaaaggcggccgccaccgcggtggagctccaattcgccctatagtga

SEQ ID NO: 48782 - DNA, 350 bp, Homo sapiens
agggacaaaagctgggtaccgggccctccctcgagagtacttctagaattaattaaggcggggtttttgtaaataaagttttattgtaccacaaagtgtatctgaaatgataaaatgtagccctggcccactgccctgaagtgtaagtagcaaccattggtagtaattcttccccgtgtataaattcaattttaagtataacaaatgtgacatgacatgaaaatattctagaatagatactgtattaaatattgccatgtttacaatatgtaatatgtttttagccgatggatttaaacatgtagattcaacttgaatccatttgtgatatttgtaaataaaggttgaaa

SEQ ID NO: 48783 - DNA, 439 bp, Homo sapiens
actggccgtcgttttacaccccggaacacagcgtgtacccatgatgattgccgcgccctttcctcgagagaactagtagaattaattaaggcgggaggactgattcctgtattcccttctgcctctgctggggcttctgccagttgataagatgaggcaagattacttaataaggttcattaggtaactctacgtcacctgcctgccttgttgattgttgggatcctttgtaaccaagccaatcatttatcctgatttacttgggaccatctgaagctctcccattgtcccagtgtaattattagtgttcctttcattcttaaaaaggtcctagtttagggaaggggaacatcacacactggggcctgttgtggggtggcaggacaggggagggatagcattaagagatatacctaatgtaaatgacgagttaatgggt

SEQ ID NO: 48784 - DNA, 377 bp, Homo sapiens
agggaacaaaagctgggtaccgggccccccctcgagagtacttctagaattaattaaggcgggggcagaaattggtatcatgactgaatttttagagacacataccaacaagacctgaactcaggagttcatgctaagagaagttaacagatatcgatattggataggtaaaacatattacaggtatcgttgtgaagattatacccagcaccaagaggaggagtgcacttatggagcataaatgttgagctgcatctgatatctgtgagacttgatcctaatttgcgcactatcacctaaagtgctagcatacttgcatttccaggaaatgtaatgagaaagaagtcctgaaagcctctaattcctggaaacatatg

SEQ ID NO: 48785 - DNA, 480 bp, Homo sapiens
gcgcgcaattaaccctcgctaaagggaacaaaagctgggtaccgggccccccctcgagagtacttctagaattaattaagggggatgggaatagagacattcatctacctactttgtgtttttttccttttcatccagctccctgtttcttgaagtgaaagagctcttcctggcagctgtgcggctggaccctacctccattgaccctgatgtgcagtgtggcttgggagtccttttcaacctgagtggggagtatgacaaggccgtggactgcttcacagctgccctcagcgttcgtcccaatgtgagcccaggggaggaatggaaatgggacatgactgtgtaccttattgaagagccatttgttgggaagctgggtttgatggtgcatgcctgtagtcccagctacttgggaggctgaagtgggaggatcgcttgagcctgggagttcaaatccagcctgggcaacatagcaagacc

SEQ ID NO: 48786 - DNA, 466 bp, Homo sapiens
cgcgcaattaaccctcactaaagggaacaaaagctgggtaccgggccccccctcgagagtacttctagaattaattaaagcgggtgtcactccttgccaaagctttagaaagccttcctcttcaatgatccctagagctgtgcgcaccattcccctatagggggcagattctcttgcaccgtctcccaaccgagcaagagctgcttctccttgcatttggagtcgagtttttgtgagatccaggggaaaggttgctaacaaaaacacaaatgcagggaaaaacccacaacattcagagaaacaaacaaaaatctaaaatcataggagtaatattttcccaagactggttgttctcatattttagaatatatcagaatcagctagggagattttaaaaattagaaatttcctagccccgtgcccatggattctaattcagtagagtgaagagggtttagaaacttga

SEQ ID NO: 48787 - DNA, 353 bp, Homo sapiens
  misc_feature 266: n = A,T,C or G
gtacttctaaaattaattaaggcgggtggatcacgaggtcaggaaatcgagaccatttgtctaacaaggtgaaaccccatctctactaaagaaaaatacaaaaaattagtcgggtgtggtggcaggtgcctgtagtcccagctacttcagaggctgaggcatgagaatcgcttgaacccaggaggcggaggttgcagtgacccaggattgtgccactgtactccaggctaggtgagattgtgacactgtactccaccctgtctcanaaaatcacaaaacaaactgacaaaaaaacccagtaaatcaaagtctgtacattttaaattaacgacttacggttataaagagaaatc

SEQ ID NO: 48788 - DNA, 498 bp, Homo sapiens
gcgcgcaattaaccctcactaaagggaacaaaagctgggtaccgggccccccctcgagagtacttctagaattaattaaggcggggtaagggtgaaatactgtaaatggaagctttctgcttaaaagccaagtgattatttttattagttcttttcagcattggaataaagaatcagcctctggtgcaaaaaaaaaaaaaaaaaaaaaaaaaaaaaaaaaaaaaaaaaaggcggccgccaccgcggtggagctccaattcgccctatagtgagtcgtattacgcgcgctcactggccgtcgttttacaacgtcgtgactgggaaaaccctggcgttacccaacttaatcgccttgcagcacatccccctttcgccagctggcgtaatagcgaagaggcccgcaccgatcgcccttcccaacagttgcgcagcctgaatggcgaatggaaattgtaagcgttaatattttgttaaaattcgcgttaaatttttgttaaa

SEQ ID NO: 48789 - DNA, 442 bp, Homo sapiens
  misc_feature 324, 333, 334: n = A,T,C or G
ccctactaaagggaacaaaagctgggtaccgggccccccctcgagagtacttctagaattaattaaagcgggaaaacttgtagagaaaatcttactgaagattgttaaaggattattaaaaacaaagtatgataatagagagtgataaaatagaagtttaaagtaaggaggaacatcccactaaaacttaagccttaaaaagagtcagaagtcaaataagtaaagatgataaaacattaagataaaaaatttgacatggtgaaagttgagagattttaagaacataaactaaaacatgataaaaaaaaaaatataaaattttanttggggttnnaagaggggggggaccccaattgcccctaatgggaaggttttttcccccccctctgggccggttttttaaaaaacgttatgaaaaaccagataatctacttttttacct

SEQ ID NO: 48790 - DNA, 581 bp, Homo sapiens
tccaagcgcgcaattaaccctcactaaagggaacaaaagctgggtaccgggccccccctcgagagtacttctagaattaattaaggcgggcgcctgtaatcccagctactagggaggctgaggcaggagaatcacttgaacatgggaggtggagtgagccaagatcatgccattgcactccggcctgggcaacaagagcgaaactcggtcttaaaaataaaaaaataaaacagcctcacaggtgtgctgaatcttgacctgagagtcaccaatccatctgtggaccagattcacctataagagtcaattttgcaattttccactgcctccaggtgtgacattcagagcttcagaagtaggttatgtttatgttaagggatgacaatatttactgttggctggttgcgcatatgagtataacaatgtcacctgtgtgctgggccatgtaagggcactcagtgtattacccgagggctttatacaatatacaggagagtcaaatccactctgagatctttgtgattgtataaaaccatgatcgtacctgcggccctaggcccagactggggcaggtggatcat

SEQ ID NO: 48791 - DNA, 513 bp, Homo sapiens
gcgcgcataaccctactaaagggccaaaaactcgctactaaagggaacaaaagctgggtaccgggccccccctcgagagtacttctagaattaattaaggcgggtatgtaacatacatactgctttgtaaatacgtgcataataaatgctgttgtttactaaagcttaaagctctatagactagcatactgtcttattaacaaaaaaaaaaaaaaaaaaaaaaaaaaaaaggcggccgccaccgcggtggagctccaattcgccctatagtgagtcgtattacgcgcgctcactggccgtcgttttacaacgtcgtgactgggaaaaccctggcgttacccaacttaatcgccttgcagcacatccccctttcgccagctggcgtaatagcgaagaggcccgcaccgatcgcccttcccaacagttgcgcagcctgaatggcgaatggaaattgtaagcgttaatattttgttaaaattcgcgttaaatttttgttaaatcagctcatttttt

SEQ ID NO: 48792 - DNA, 413 bp, Homo sapiens
gcgcaattaaccctcactaaagggaacaaaagctgggtaccgggccccccctcgagagtacttctagaattaattaaggcgggggagagagagagaaggcaaaaaaggaaaaaaaatgatattggattgaaagatatgactagggtgctagaacagtacaaactacactcccatataattctagcattccatgaaataaacagtaaaagccgaacattcatgaaattttcccaattgtctataaaatgttagtttaacttatacttctacccaatccaaaaaaaaatttttttaattgtatggaatttttttttaactgttaaatgcactgtttcttgtctgctggtaagtgctatcaaagacaaaaattggtcccacgtggtggctcatacctgtaatcccaacaccttgag

SEQ ID NO: 48793 - DNA, 447 bp, Homo sapiens
tacataaagggaacaaaagctgggtaccgggccccccctcgagagtacttctagaattaattaaggcgggagaggacagaaaagttctacattcaggctgccccccaccctgagactttgactgtgtatcttaatttggctcattctgattctttataataaaactataatcataagtaaaatgatttcctgagctctatgagttgttttagcctattactgaacctgacagagtcacaggaacccccagagttgcagcctggggaacttcaaatttgcacctgaaaactacagtgaaagcagtcttattggggacaatgaccttaaatccgtggagtctcatgctaactccaggtggttagtgtcagaattgaattacagcatgctgcaacacaaaagacaaactttccacattcaaggagttacatgggtatgtgtagatccact

SEQ ID NO: 48794 - DNA, 485 bp, Homo sapiens
  misc_feature 394: n = A,T,C or G
ctggccggcgtctttcttttacaacccggaataagcggtacacatgctgggtgccgggccccccctcgagagtacttctagaattaattaaggcgggtgccatctgtctccgcaatgccccccaagaaacaggctcaggccggggggcagcaaaaaggcggagcaaaaaaagaaggagaagattatcgaagacaaaactttcggtttgaagaataagaaaggagcaaagcaacagaagtttatcaaggctgtcacacatcaagttaaatttggtcaacaaaatccacgtcaggtaagtaatttaaatgtccatatctttttataaatgtaatattaatatagcctctgtttcagataaaatgtctggtattattatataattgtatttcaaaanaaaaaaaaaaaaaaaaaaatttccgggcccccccccgggggggaaccccaatcccccttttggggggtttttaaaccccccccccgggggg

SEQ ID NO: 48795 - DNA, 500 bp, Homo sapiens
gcgcgcaattaaccctcactaaagggaacaaaagctgggtaccgggccccccctcgagagtacttctagaattaattaaggcgggcggatctatttgaggttaggagtagatcctaaccaacgtctgaccaacatggcaaaaccctgtatctacaaaaatacaaaacctagccggggatggtggcacatgcctgtaatcccatgtgcctgcaatcccagctgttctggagggtgaggcaggagaactgcccgaatatgggaggaggaggttgcagtgagctaagactgcgccactgccctccaacctgggtgacagagcaagactccgtcaaaataaactaacaaacatacatttcattcatgtttaaaatggcttaaatgaagaattattcacagtaacattatttctaattttcacaattattaattaaggcgggaatggcaatacttgcagaaacagagtagcccattacaaacaaaggcacatgggcctttaaaca

SEQ ID NO: 48796 - DNA, 479 bp, Homo sapiens
cgcgcaattaaccctcactaaagggaacaaaagctgggtaccgggccccccctcgagagtacttctagaattaattaatagatgaataacagaattagctgaccaagtcaattgttgcaagtatttaaagcagactaggtcttaatatcagcaatgttttcagaaattattggagactagaaggtttggaattgaggggaggcaaaccacaggtgtgtaaagaaataaaagtgtgaatttttaccttaagataacaaaaaaaaaaaaaaaaaaaaaaaaaaaaagcggccgccaccgcggtggagctccaattcgccctatagtgagtcgtattacgcgcgctcactggccgtcgttttacaacgtcgtgactgggaaaaccctggcgttacccaacttaatcgccttgcagcacatccccctttcgccagctggcgtaatagcgaagaggcccgcaccgatcgcccttcccaacagtt

SEQ ID NO: 48797 - DNA, 540 bp, Homo sapiens
gccaagcgcgcaattaaccctcactaaagggaacaaaagctgggtaccgggccccccctcgagagtacttctagaattaattaaggattgccagcttcagttaagacaagacctatcagtaaatgaatatatgttttgatttaacacatctttacaattaattcataatagggactcaggctcaaataactgttcctgtgtctagatttataatgaggacatcagggagcctttttaagctaaagagtgattatctttcacagtagaactagaaacaaaaccctaacttgtgaagttgctatttatttttccctgagtgaatataactgttatttggtctttaacagatatactgaggtttgagtttcactttctttaagtctcacattgctaacatgacattagctgtaagaaacaagatagctttacatttgaatgccatttactgatttctaatgattctctttttttgtaaacaactgtttcctttgattatgtcaacatgtttctgatgtggcatttttgttttaatcccaatcg

SEQ ID NO: 48798 - DNA, 455 bp, Homo sapiens
gggaacaaaagctgggtaccgggccccccctcgagagtacttctagaattaattaaatgctgtcgtccagaagtgatgtacagcatttctgtccacaactctttggccagaattattctcatgaccctgccaagggcaaggtggcaaagaagtaccattctttcatgtggctgggagggaaaaaaagaaccagatttagaagagcattagatatctctgtcacatctgaggaacaaattagccatcagagcaaaggtccaggcatcccatctcggcaaacaaagcatgattaaccctagagctgctgattctgagctcaccctaacttgattccctccactggccccaagctggcagctgtagctttgcaaacatgataatgcttctcttgttagaactgaatttagaattggcagcaacagaaacctgcaagctgcagttcatttgtgtatcca

SEQ ID NO: 48799 - DNA, 502 bp, Homo sapiens
gcgcgcaattaaccctcactaaagggaacaaaagctgggtaccgggccccccctcgagagtacttctagaattaattaagggggctagggctgaaaaagcaagggggggccaagggccccaggcaaagaagcaggctcaaaggcgggccttcagcgcaagaggcacagagtggcgagaccaccgagacagatgtggaggcattgaggcagccagcgcaggggcttctgctgagggggcaggcggagcttgaggaaaccgcagataagtttttttctctttgaaagatagagattaatacaactacttaaaaaaaaaaaaaaaaaaaaaaaaaaaaaaaaggcggccgccaccgcggtggagctccaattcgccctatagtgagtcgtattacgcgcgctcactggccgtcgttttacaacgtcgtgactgggaaaaccctggcgttacccaacttaatcgccttgcagcacatccccctttcgccagctggcgtaatagcga

SEQ ID NO: 48800 - DNA, 312 bp, Homo sapiens
taaccctcactaaagggaacaaaagctgggtaccgggccccccctcgagagtacttctagaattaattaaggcggggtgatgcctgttgggggccagtgccctcctaattgtggggtatggggccatccgagctgacgccatctgagtggtggtggctgatggtactggagtaactgagtcgggacgctgaatctgaatccaccaataaatgaagcttctgcagaatcagtgaaaaaaacaaataaaagaagattattaaaccccccaaaatgctctaattataaaaaacttgctgtccccccccgggggga

SEQ ID NO: 48801 - DNA, 223 bp, Homo sapiens
  misc_feature 23, 39, 40, 41: n = A,T,C or G
gcgcgcaattaaccctcactatngggaacaaaagtctgnnntcacgagcactatacgcgcaattaaccctcactaaagggaacaaaagctgggtaccgggccccccctcgagagtacttctagaattaattaaggcggggggggggtctatacattcctgagattctgggaaaggtgctcaaagatgtactgagaggaggggtaaatatatgttttgagaaaa

SEQ ID NO: 48802 - DNA, 448 bp, Homo sapiens
aagctgggtaccgggccccccctcgagagtacttctagaattaattaaggcgggtggatcacgaggtcaggagatcgagaccatcctggctaacatggtgaaaccccgtctctactaaaaatacaaaaaattagccgggcgtggtgactcgtgcctgtagtcccagctactcatgaggctgaggcaggagaaatcacttgagtccgggaggcagaggctgcagtgacccgagatcgtgccactgcactccagcctgggcgacagagtgagactgtgtctcaaaaaaaaaaaaaaaaactcaatgggctttttctttgttgttggaaagatgcggtcctgctatgtaacccagactcctctttggtctgcatgtatgcctcaaattccaattctttcttgccaaataaaacattaactttagagattcatctctaaaaaaaaaaaaaac

SEQ ID NO: 48803 - DNA, 205 bp, Homo sapiens
attaaccctcactaaagggaacaaaagctgggtaccgggccccccctcgagagtacttctagaattaattaaggcggagagagtgtggctgaaaaaaaaatatttatatctcatttaatcgccatcaaacatgctcaatacctgtgttgagaaaaggctttctttatcctaaagattattacctttttaaagtgctcttatattt

SEQ ID NO: 48804 - DNA, 311 bp, Homo sapiens
agcgcgcaattaaccctcactaaagggaacaaaagctgggtaccgggccccccctcgagagtacttctagaattaattaaggcgggcaggatagttcagacggtttctatttcctgagcgtctgagatgttagtattagattagttttaaacccttgtttgaaagccacattgttttggttatttctattaaattagaaaattgaaaaagttaaaaaaaaaaaaaaaaaaaaaaaaaaaaaaaaaaaaaaaaaaaaaaaaacaaaaacaaaaaagaaaaaaaaaaaaaaaaaaaaaatattaaattaaaaa

SEQ ID NO: 48805 - DNA, 297 bp, Homo sapiens
gccaagcgcgcaattaaccctcactaaagggaacaaaagctgggtaccgggccccccctcgagagtacttctagaattaattaaggcgggagacattggcagcagccaaagtggagcacagggagttcaactattcctgttgacagactatatgatctcatatctagaaagcctatgggctcaatcaaaaactgctttgatctgaacaataaattcagcatagctgcatgacacaaagtcaggatacgaaagagaatcatgatataaaaatccctagatccaaaattactgataaaa

SEQ ID NO: 48806 - DNA, 403 bp, Homo sapiens
tggccgtcgttttacaccccggaaaaaggtataaccatcatgtgtggccgcgccctcttctccagagaacataatagaattacttaaggcggggggttgtgacgttgctagcgcttgtccggtggctgctgcgctgccgcaacgaatagggtttctggctgcgtaggagggacgggggcgcggagctgtgggaaactgcgccaggcgcccgaaaggtgaacacgggagtcgcgcgtctcccccgcagcagcggtaaagcggaagttatgctgcagccggagcccgggcttcctcccggagccgcgtcgcggggcccggctgccccgagctgagcggagcatcctttccgggtgaggggaggagaggacttggcgcgttcccctcgctgccccgggagccgcag

SEQ ID NO: 48807 - DNA, 494 bp, Homo sapiens
cgcgcaattaaccctcactaaagggaacaaaagctgggtaccgggccccccctcgagagtacttctagaattaattaaggcgggacgacagaaaaatttagattcttaaagtagccacattcaaattacccaggagtaattggccacctaagcagctggataaagcaatttctttgaaatacatttcaaggccaagcacagtggctcatgcctgtaatcccagccctttgggaggccaaggcgggctggtctcaaactcctgacctggagtgagccactatatccggcctttataaacttttttgattcttgtcataacacttagcctaaaatgcaaatgtacagctgtagaaaaatactttatttctttatatccttattctagaagctttttttctattaatttttgtttgtttgttttgttttactatttacttctaaaacttttttgttaaaaaccatggcacaaacacacacattatgctaggcataca

SEQ ID NO: 48808 - DNA, 395 bp, Homo sapiens
  misc_feature 193, 194, 195, 196, 197, 198, 199, 200, 201, 202, 203, 205,206, 208, 210, 211, 212, 214, 215, 218, 221, 222, 233, 235,285, 287: n = A,T,C or G
caagcgcgcaattaaccctcactaaagggaacaaaagctgggtaccgggccccccctcgagagtacttctagaattaattaagggggtctaattttggggatctcttttattatttttagatggagtcttgctctgtcacccaggatacagtgtgatcagaaaacagttttaaggaggtctaattttggggannnnnnnnnnntnncntnnntnnatnatnnttaaatatttnanctttttttttttgatttaaacacaaattatatttttttactatttatatnangcactgttggaatataaaacctgtatattttactttgttgcagatagtcttgccgcattttggcaagttgcaaagatggtggagctagaaaaaaaaaaaaaaaaaaaa

SEQ ID NO: 48809 - DNA, 625 bp, Homo sapiens
ttacaaccctaaataaagggaacaaaagctgggtaccgggccccccctcgagagtacttctagaattaattaaggcgggcttgacgacaggctatttgaaatatccactcagagataataaaagaaaaagcatgaagcatgcctacaagatctagaaaatagcctcaaaagggcaaatctaagagttattggccagtagagagagagatagcagagtagaaagtttattcaaagggataatcacagagaacttcccaaacctagagaaagacatcaatattcaagaacaagaaagttatataaaaacaagcagatttaaaccttattaaataagactacctcaagacatttagtaatcaaacttcaaaaggttgagaatacagaaaggatcctaaaagaagcaagagaataaaaacaaataacatgccaagaaccttctatatgactggcagcaaatttctcagtgaaaaccttaagggccaggagagagtggcatgacatagctaaagcactgaaggaaaaagtattttatcctagaatagtatatccagtgaaaatatcctttaaaaatgtgggagaaataaagacttctccagacaaactaaaataagggatttcatcaata

SEQ ID NO: 48810 - DNA, 384 bp, Homo sapiens
ctggccgtcgttttacacccgggaaaacagaaataaccatgattatggccggtggttttccataaagaaaaaaaaaaaacctttaagtttggccggggtttttccaacaaaaaaaaaaaaaaacttatagggtcgagtgatgctcccacttcagcctacaaagaaactggcactacaggtacacaccatacctagcccaacataatattagcacatagaattcatcaatatacaaaacagagttatacatcatcaccaagtggtaattatttctggaaggcttcaatacatgaagtgcaatcagtggaacccattatattagcagactacagaagagcttaaaaaaaaaaaaaaaagaacgggtagggggccccccgggggggg

SEQ ID NO: 48811 - DNA, 563 bp, Homo sapiens
gccaagcgcgcaattaaccctcactaaagggaacaaaagctgggtaccgggccccccctcgagagtacttctagaattaattaaggcgggagaggaagcctgcggacacctgccctttgtgattgaaccgcagacaccaggcctggcggggtcgcttgcctccgctgcccaagctaaggctccgctaagctggtcctgagaacatacttcatgctcaacttcagggatgtggctgtagtgtcctcactctatgctgagaatgaaagaagcacagtctatgaaaggaaaaccccgacagcacagagcacttcgtgcggcagcagcacaccgggagtcccactccctttcctgctgcgtttggatctgccgtgacaaggactatcagaaccactcacagtaaggtcgggtcgcgtttctaaatccactgtttatggaccgtcttttcactgagaagaagctcgtcagttcaggggtttctagaacttctccagactcttcaaaaactcatgactttctccaagttggtaatcccagcactttgggaggcccaagcgggcggatca

SEQ ID NO: 48812 - DNA, 508 bp, Homo sapiens
  misc_feature 353, 492: n = A,T,C or G
ctactaaagggaacaaaagctgggtaccgggccccccctcgagagtacttctagaattaattaaggcggggcgataagtgctgccatgtcacgaccggtcacatacgagcgtgcgaactcgggggccatgattgtatccgatgctggcagcattgcctgatcctacagtgtattggtcccaaataaaaaaaaaaactcaacccgccaaaaaaagtaaaacaataaacaataaactacctgaaaaagtaaaagtaaacaattttatttataataactcccccccagggagctcataaatgtaaccaaaatggtgaaagatttctatctcccaatggagaaacactgagtagaanaactttctaaatcacaaataaatggaaagatatttctggttcattgattggcagaattaatactgttaaaatgtctacactgagcaaaacaatctacagattcaaagcagtcttttatctgtatacaaatgaaattatntagaatatttcaaaaa

SEQ ID NO: 48813 - DNA, 455 bp, Homo sapiens
ctaaagggaacaaaagctgggtaccgggccccccctcgagagtacttctagaattaattaaggcgggggaaagagagagctcctttcaccatgttttaccagtctgctgttataacctcttaggttgtatcctttaatatccagccttttaggttagtttctgtaacagatcaagtgagtctgggatgaattcctcaaagtacttcaaatggtacttgttttgttgcttgtaatagcttaacaaataaacctaggttttctattttttgaaaaaaaaaagatggtaaaaaatataaatcatcagaactcataataaaaaaaaaataaaaaagggtgccccccgggggggggccccccaaggcccttcaaaatagggactattcccccctcctggggggggttttttaaaaaaacaatggttataaactgaattaggcaatcttaaaaaaaaaaaa

SEQ ID NO: 48814 - DNA, 333 bp, Homo sapiens
gcgcgcaattattcctcactaaagggaacaaaagctgggtaccgggccccccctcgagagtacttctaaaattaattaaggcgggggaccggctatccgaggccaaccgaggctccgcggcgctgccgtatcgttccgcctgggcgggattctgacttaaaggcgttcagtcataatcccacagatggtagcttcgccccattggctcactcacccaccacattaacaacataaaaccctcattcacacgagaaaacaccctcatgttcatacacctatcccccattctcctcctatccctcaaccccgacatcattaccgggttttcctctt

SEQ ID NO: 48815 - DNA, 375 bp, Homo sapiens; identical to SEQ ID NO: 48328

SEQ ID NO: 48816 - DNA, 420 bp, Homo sapiens
gcgcgcaattaaccctcactaaagggaacaaaagctgggtaccgggccccccctcgagagtacttctagaattaattaagggggtaggagtggaaagtatagaggacacagaaaaatatctaaagatacaagagcaaaaaattttccgaatttggtgaaaatttaaaacccacatgcccaaggagctcaacggatctcaagcacaataaacatcaaaaagaaaaagaaactacaacacataacacataacgtaaccaaatcacttaacaccagcaataaagagaagacctcaaaagcagtcaaaggcaggagacgtcttacagaggaacaaaaataaggatgacagaaaacttcacctcaaaaacaatgcaaaggagaaaacagtagagtgccatctttatgaatacaggagagaaaaaa

SEQ ID NO: 48817 - DNA, 446 bp, Homo sapiens
tgatacgccaagcgcgcaattaaccctcactaaagggaacaaaagctgggtaccgggccccccctcgagagtacttctagaattaattaaggcgggagaatcgcttgaacctgggaggcggaggttgcagtgagcctagattgcgccattgcactccaccctgggcaacagagtgagactctgtctcaaagaaaataataataataataataataatcagataaatagaaaaagaggaaaggcagaatttacaaacatatattaaccaagaaatagtgttatttattctttaccatacaaatttgcattgaaaagttcacaatatttgatttttgagctttctgagctcaggattggtcagagcttgaagtttaaaatagttgacagatttagggaatagctttcatgttagttaccgcatgttcattagctttgagttgcatggg

SEQ ID NO: 48818 - DNA, 626 bp, Homo sapiens
gccaagcgcgcaattaaccctcactaaagggaacaaaagctgggtaccgggccccccctcgagagtacttctagaattaattaaggcggggtaagatttgccgagttccttttactttttttttaacctttccttatgagcatgccagtgttaggatgtcagttttacaaaataatgaagcaattagctatgtgattgagagttattgtttggggatgtgtgttgtggttttgcttttttttttttagactgtattaataaacatacaacacaagctggccttgtgttgctggttcctattcagtatttcctggggattgtttgctttttaagtaaaacacttctgacccataactcagtatgtctgaattccagaggtcacatcagcatctttctgctttgaaaactctcacagctgtggctgcttcacttagatgcagtgagacacatagttggtgttccgattttcacatccttccatgtatttatcttgaagagataagcacagaagagaaggtgctcactaacagaggtacattactgcaatgttctcttaacagttaaacaagctggttacagtttaaactgctgaatattatttgagctatttaaagcttattatattt

SEQ ID NO: 48819 - DNA, 393 bp, Homo sapiens
gcgcaattaaccctcactaaagggaacaaaagctgggtaccgggccccccctcgagagtacttctagaattaattaaggcgggagccatatgaatagtggctgggagactggattgtttttaatactccagacaccaaagctcaaatgagcttcccagtgggcaatattccatgtgtattttcacacaatgttcctagagaaataggtactgcacacatgccttcactgggagaggataactggaagccctgtgccttaaggtctcctgaaccctgccttgtgtgcctgtttcttctgctgattttaatctgtatcttttcactgtactgaactgtaaccatgtgtgtaacagctttccaagatctgtgtgtccctttagagaatgatctaac

SEQ ID NO: 48820 - DNA, 368 bp, Homo sapiens
  misc_feature 63: n = A,T,C or G
aagggacaaaagctgggtaccgggccctccctcgagagtacttctagaattaattaaggcggngtaagatttgccgagttccttttactttttttaacctttccttatgagcatgcctgtgttgggttgacagtgagggtgtagtagataaattcaaggaaataagagatttgtaagaaactaggaccagcttaacttataatgaatggcattgtgttaagaaaagaacatttccagtcattcagctgtggttatttaaagcagacttacatgtaaaccggaatcctctctatacaagtttattaaagattatttttattaccgtgaaaaaaaaaaaaaaaaaaaaaaaaaaaaaaaaaaaaaaaaaa

SEQ ID NO: 48821 - DNA, 386 bp, Homo sapiens
tactcgggaggctgaggcaggagaatcacttgaacccaggaggcggaggttgcagtgtgctgagatcatgccactgtactccagcctggtgacagagtgagactccgtctcaaaaataaaataaaataaaataaattcttgcctgtggttgttccacatacactattcacaaagggtaattctccagtctcttcaaactcagcactcactcctcaaatagtattggtacacaggtcaacttatcaagagccaaggaacatcattcaaaaaaatttgccttgctttttaattgactactgatgtctgtcctcagtgtcctcaactcttgaagcaactagtcttgcctaaagactactagtcctggatacatttcttcagctgcttaa

SEQ ID NO: 48822 - DNA, 505 bp, Homo sapiens
gcgcgcaattaaccctcactaaagggaacaaaagctgggtaccgggccccccctcgagagtacttctagaattaattaaggcgggtggatcacttgaggtcaggagttcaagaccagcctggccaacatggcgaaaccccgtctctactaaaaatacaaaaaaaattagccaggcttggaggcatgtgcctgtagtcccagctactcaggaggctgaaatcacaccactgcactccagcctgggcaacagagtcctccatctcaaaaaacaaaaaaaaaagttctacataaatctgattttttaaaataatagttccctttggaattaaatcacgtatcattttagaaatgtctttcccactgccttttctactatctctcctgacccctagtccagcttcacagtagtatctctgtaacctgataaaccataaatgaacaggaattctctacagccattaaaagcaaaagatatagcgggtatcttaactaagatgataactta

SEQ ID NO: 48823 - DNA, 308 bp, Homo sapiens
acgccaagcgcgcaattaaccctcactaaagggaacaaaagctgggtaccgggccccccctcgagagtacttctagaattaattaaggcgggggagaatgttttcatgttacttatactaacattagttcttctatagggtgatagattggtccaattggctgcaaactcttcagttcctttggttatggattttgaatcttttctgtgtttcttaataaagttcttttgaaaaatgggaacctttctcagatgggaattttgtatctttcctctgtttcttaataaagttcttttgaaaaattggaa

SEQ ID NO: 48824 - DNA, 515 bp, Homo sapiens
gcgcgcaattaaccctcactaaagggaacaaaagctgggtaccgggccccccctcgagagtacttctagaattaattaaggcgggggacaggcagagccaggacaagaccgacaggtcgggctgtgggggtcccggcacctggcgtgagtttcatgtatgaaaacataaaattgaaaaaaaaaaaaaaaacctacacgagcaccgtgatttcaagtaataaacagaaaatgaatcacataaaaaaaaaaaaaaaaaaaaaaatttcgaaaagaaaatagaaataaaaaaaaaaaggcggccgccaccgtgttggaactccaattggccctatagtgagacttattacacgcgctcactggccgtgatttaacaacgtctagactgggaaaaccctgtcttaccccaacttaatctccttgaagaacatacccttttcgccagctggcgtaatagcgaaaaggcccgaaccgatcgcctttcccaacaattgcccagcctgaatggcaaatggaaa

SEQ ID NO: 48825 - DNA, 414 bp, Homo sapiens
cgcaattaaccctcactaaagggaacaaaagctgggtaccgggccccccctcgagagtacttctagaattaattaaggcggggtaagatttgccgagttccttttactttttttaacctttccttatgagcatgcctgtgttgggttcacagcgggcagggaaagccgcgggaagggtactccaggcgagaggcggacgcgagtcgtcgtggcaggaaaagtgactagctccccttcgttgtcagccagggacgagaacacagccacgctcccacccggctgccaacgatccctcggcggcgatgtcggccgccggtgcccgaggcctgcgggccacctaccaccggctcctcgataaagtggagctgatgctgcccgagaaattgaggccgttgtacaaccatccagcaggtc

SEQ ID NO: 48826 - DNA, 252 bp, Homo sapiens
ccctcactaaagggaacaaaagctgggtaccgggccccccctcgagagtacttctagaattaattaaggcgggtgacagctgaggagcaactaaaaagcagagcattctgtggtttggaacgctgatggcgggaaaatggatgtggccacgtttttgaaatcaaactgaccaatgtttttattgactttgctgtaaatcaaatcataggatacgtaagctacctgaagcttaacaaaagagtccatctaaag

SEQ ID NO: 48827 - DNA, 442 bp, Homo sapiens
aaagggaacaaaagctgggtaccgggccccccctcgagagtacttctagaattaattaaggcgggcggatcacgaggtcaggagattgagaccatcctggctaacacggtgaaacccagtctctactaaaaatacaaaaattagcccggcgtggtggcatgcgcctgtagtcccagctacttgggaggctgaagcaggagaattgcctgaacccaggaagaggaggttgcagtgagccgagatcgcaccactgcattccagcctgggcaacagagcgagactccatctcaaaaaaaaaaaaaaagttctctcattctttaaagtggctttaaataaggtataattaggtcactatggaaacaaagttttcattaatgaggggacagtaagggggggctctgcaaatggcccctttctaataagtttaataaccccaaaaaaa

SEQ ID NO: 48828 - DNA, 266 bp, Homo sapiens
tatggaccctgcccgcctgcgtgtagagtgtgtgtcccgcgcctttgctcactattgcttccgtgtgggagggggtttcccccccctcccttcccttatttccctggaaacaaggtcatactacagattggttgtgccttgttcctactgctaacaatacctgagtggagtattcaaaaacttgcttagaaagaaaactctaggaacagatggcttcactgaagttattcccaatatttaagaaataataccaggcttttataaac

SEQ ID NO: 48829 - DNA, 460 bp, Homo sapiens
gcgcaattaaccctcactaaatggaacaaaagctgggtaccgggccccccctcgagagtacttctagaattaattaaggcggggcaatatccttgtctaaaaaaaaaaaaagttgacttaaacattttctttaacagttgtctttttttttctaaattcagtctttctcttgcttttttttccctgctattgaggaagtattttgccttccctactcactgagaagtaatgacttcgtggtacacattctaaagcatttctgatttgaatatttttgtacattgttatcaattattaaaccttctcttctagtccaaaaaaagataaataagacatatatatatgcggtcgccaccgcggtggaactccaattcgccctatagtgaatcgtatttacgcgcgctcactggccgtcattttacaactttctgactgggaaaaccttggcgttacccaactt

SEQ ID NO: 48830 - DNA, 555 bp, Homo sapiens
gccaagcgcgcaatcaaccctcactaaagggaacaaaagctgctaccgggcgccccctcgagagtacttctagaattaattaagggggcagagagaatatttgaagataataatggctgaaaacgcaccaagtttaataaaagacatgaatatatacatccaagatgcaccatgaactccaaggaggataaactcaaagatccacaccgtgacacattattattaagctttcaaaagacagagaagaccttgaaagcagcactagttggagcaatccatcacatacaaggggcccgcaataaaataatccacagagttttactcagaaactggaggccacaaagtagtgggccagtatattcaaactgctaaaagaaaaacaataaactaccaagaattctacaactgacaaaactgtccttcaaaagtgagggcgaaattaagacattcccagataaacaaaagctgaggaagtgtgctgccactagacctgccctgcaagatgtgatcttatatgcaagaaatctgaaagaatccacttagtttcagacacta

SEQ ID NO: 48831 - DNA, 419 bp, Homo sapiens
ctaaagggaacaaaagctgggtaccgggccccccctcgagagtacttctagaattaattaaggcgggtagccatgtgtcttaatcccaaatggccttccaaaattggccttttttgtcgcaagaattaagactttgaagattgtattccatacatttctggattctattatatgaaatgtcagccatcaatatatttcgttatttctttgtaggtaatctggcttttgtctcttgatgattctatagttttccctttgcatttgatgtatggtagtttcactctgatgtgtcacaccagatgtgacttcctgctctgaacttgatgggatttctgaatatgagatttgacgtatttagttctgaaatattccaggatttggatatatattgatagatattgcttctctatatacactat

SEQ ID NO: 48832 - DNA, 467 bp, Homo sapiens
accctcactaaagggaacaaaagctgggtaccgggccccccctcgagagtacttctagaattaattaatgcatgtgctatatgtgctgactgctccataacctggatgggtctatatctgtctttatctattaactcttccctatttcctgacaaaaataccactatcacatgttaaagccccttaatgatccctacgactggctcctacgtgtacaagtgaaaacaagagtcacatgtgtctcactttaaattataagctcaaaacgattacactgactgatgaaagcatgtgaccaaaacatgattaatcttggcgaggaaggctgggaaggacaacatttaggcatcacataccaaagagttagccaaattgtgaatagaaagaaaattttttgaagtaaattaaaagggctccatcggtgaacacactaataataaggaaataaaatagtcttattactgaaa

SEQ ID NO: 48833 - DNA, 447 bp, Homo sapiens
aagggaacaaaagctgggtaccgggcccccactcgagagtacttctagaattaattaaggcgggcgaggtcaggagttcgagaccagcctggccaacatggtgaaaccccatctctactaaaaatacacacattagctggtcgtggtggcacctgccagtagttccagctacttgggaggctgacgcaggacaatcacttgaacccgggaggtggaggttgcagtgagccgagatctcaccactgcactccagtctggcaacagagtgagactctgtctcaaacaaaactaaaaaaccccccaaaaccaaacaacatcaacaacaactaaaagagtaactgaatggagatgtgtgtgtgaacagataaagccacagcgtaaaaatggccaatgtgaaaacatgtgcagctgttcttgtaatcaaagaaatgcatattaaattgagat

SEQ ID NO: 48834 - DNA, 634 bp, Homo sapiens
ttaaccctcactaaagggaacaaaagctgggtaccgggccccccctcgagagtacttctagaattaattaaggcggggggaaaagagcacattacatatggaagaacagagataaggatggcaggagtcatcattgcatctcattgaacagtgaagccagaagatagtggtgcagaatcttttaagtactgatagcaaaaactatcaactaggattcattacctactaaaaatttatttcagaaatgaagatgaaataaagacttttcccagacatgtaaaagcgagataattcatccgcagcagatctgcattacaagaaatgtgaaaagatgtccttaggcagaagggaaatgataccaaatggaaatctgaaaatgaatacagagtaccagagatggtaattatgtggataaatataaattactcttaccataactgaatatttaaagcacaagaaaaaaaaggaacattaaaggcggccgccaccgcgggggagctccaattcgccctatagtgagtcgtattacgcgcgctcactggccgtcgttttacaacgtcgggactgggaaaaccctggcgttacccaacttaatcgccttgcagcacatccccctttcgccagctggcgtaat

SEQ ID NO: 48835 - DNA, 505 bp, Homo sapiens
aattaaccctcactaaagggaacaaaagctgggtaccgggccccccctcgagagtacttctagaattaattaaggcgggcagatcacgtggtcaggagatcaagaccatcctggctaacatggtgaaaccccctgtctactaaaaatacaaaaaattagtggggcgtggtggtgcacgcctgtaatcccagctactcaggaggctgaggcacgagaatcacttgaacccaggaggcggaggttgcagtgagccaagattgcgccactgcactccagcctgggtgatagagtgagactccgtctcaaaaaaaaaaaaaaaatctcttggatgagaaaactagacttaggatttaaggaaatctacgttaatggactggccagaaaaacaagtcataaagggaaattaggaagtaatcatgagagagggggatgttatgtcctattacctgaagcagaaatataaatggaaaacatatcagtgttattaactgaagggaaaagaaaa

SEQ ID NO: 48836 - DNA, 448 bp, Homo sapiens
  misc_feature 143, 150, 226, 227, 228: n = A,T,C or G
gcgcgcaattaaccctcactaaagggaacaaaagctgggtaccgggccccccctcgagagtacttctagaattaattaaagcggggccggctcgagggggtggatactgtgagtttaattataaagaatgacctggtacaaangccaaanaaaaaaaaaaaaaaaaaaaaaaaaaaaaaaaaaaaaaaaaaaaaaaaaaaaaaaaaaaaaaaaaaaaaaaaaaaannnaaaaaaaaaaacccaaaaaaaaaaaaaaaaaaaaaaaaaataggggggcccaccccggggggaacccaaaattcccctaaaagaaagggaaaaaacgcccccaaatgggcgggttttaaaaaaggggagaagggaaaaaaccgggggttaacaaaattaaatgccttgaaaaaaaatccctttttccaaagtgggaaaaaaaaaaaaaagccccacacaa

SEQ ID NO: 48837 - DNA, 509 bp, Homo sapiens
gcgcgcaattaaccctcactaaagggaacaaaagctgggtaccgggccccccctcgagagtacttctagaattaattaaggcgggaggatcgcttgaggccaggggtttgaaaccagcctgggcaacattgtgaaggcttgtctctaagaatcttcttaaattagctggatacggtggtatatgcacctgtagtcccagctacttaggaggctgaggtgagaggatcacttgagcccaggattttaaggttagagtgagtcatgatcgtgccacttcactctagcctgggcaacagagcgagaccctttctctaaaaaacaaaaatccccagaaaacagacagagagatacaaagggtgtcataagtctggtgcttacatgagcctcagaacagttttttgctgttctctttgaccacataaaagttagaaactcctgttcaacaaacggcacataacataaagcaaaaatctcacacgcagcctgtgaaaagatacttgccatccaaa

SEQ ID NO: 48838 - DNA, 372 bp, Homo sapiens
agcgcgcaattaaccctcactaaagggaacaaaagctgggtaccgggccccccctcgagagtacttctagaattaattaaggcgggccagaatctatcattgactccaaaatactgagtgagctctttccactgggttccatttgaggacggttcactctgtaattctttctcattcttcaatttatctgaaaagaattcacaaactgtcaatacctaacttcagtaatttcaaaaccatattttaaaaaaatggctaaactcactcacaacttatcattatcacgacgaacaacctgagttaaaacaaaacaccttttctggagcgttttcttcttttacctctgaatcttgaggatgggcttttctgttc

SEQ ID NO: 48839 - DNA, 504 bp, Homo sapiens
gcgcgcaattaaccctcactaaagggaacaaaagctgggtaccgggccccccctcgagagtacttctagaattaattaaggcgggagtgttcaggaattctttttaatattcttgcaaattttctgtaaatttaaaattatttaagaatctaaagtttaaaaaatgtctctaaactgttaaaagcttacaaaaggtatttatagatattttacccgtgggatttttttctttttttttttcttgatagggtatttttctgtctcccaggctagagtgcaatctgctgcgctggagtgatcctcccatctcagcttcctcagtagtgggactacaagcatgtaccacccaggcttgctaaataaaataaaaaaattaaaaaaaaaaaagcggccgccaccgcggtggagctccaattcgccctatagtgagtcgtattacgcgcgctcactggccgtcgttttacaacgtcgtgactgggaaaaccctggcgttacccaacttaa

SEQ ID NO: 48840 - DNA, 265 bp, Homo sapiens
  misc_feature 134, 135: n = A,T,C or G
gagagtacttctaaaattaattaaggcgggggaagaaaagggtcccctagttgaggatagtcaggagcgtcaatgtgcttgtacatagagtgctgtagctgtgtgttccaataaattattttgtagggaaagtnnaaaaaaaaaaaaaaaaaaaaattttaaaaaaaaaaaaaaaaaaaaaaaaaaaagcgccccccccccgggggggacccaaattccccctttaagggggttttttacccccccccttgggggggtttttaaa

SEQ ID NO: 48841 - DNA, 503 bp, Homo sapiens
ccctactaaagggaacaaaagctgggtaccgggccccccctcgagagtacttctagaattaattaaggcgggagggaataaggaactactggacttgaattgcacttttgaccacttggaactaacagacattttctgaactttgcatccatcgacaacagagtacacatttggctctagcacacatgcatagaacatttttcaagatagaccttgtgtaatgccacaaaagaagatggaccatatatctagtattgtttcaaactacagtgatctgaaactataaatcagtagcaggaggaaccttggaaaattaacaaatatgtggaaatttaaaaacatgctcctgaatgaccagtgggtcaaagaataaatcaaaagagaaatttctaaaatgtcttgagacaaatgacagtggaagcacagcataccaaaacatgggatgcagcaaacgcatttctaagagggacattatagcaattaatgcctatgttaaaaagaag

SEQ ID NO: 48842 - DNA, 445 bp, Homo sapiens
  misc_feature 430: n = A,T,C or G
ccctcactaaagggaacaaaagctgggtaccgggccccccctcgagagtacttctagaattaattaaggcgggtcttcaaacaaggcagttaaagtttctggaatattaaaagggacttacaaaaagatctacagcaagtattcacagtagtcgtataacagtagtgcttcaatgtagaggacaaaataaatgcatgaccaaatgttttcttgaaaatcactctaaaattagatgaccaaagacgtaagtactacatccacagtcaagatataaagagattttccatataaatgaatgagcacgacacacacagattctgcaagcatagcaaaacctgaaactaaaaatattgttttagctgggaaaaacattgtttatatataagtgaattacggtgagtttccaaaaggcctgaaatgcatcctgaangcaaaagatgcaatg

SEQ ID NO: 48843 - DNA, 339 bp, Homo sapiens
agctgggtaccgggccctccctcgagagtacttctagaattaattaagtcggggtagggggtactcttgtcaaaaggcacattggtgcatgtgtgtttgctagctcacttgtccatgaaaatattttatgatattcaagaaaatcttttgaaatcgctgttttttaacgaagagaatttatgtggcttctcatttgtaaatccctcaaaggtgtgactagtctctttctcaacacacacttaacaaatttttaatatcggctattcaagataggacaaacttggagagtatggacaactttgatattgcttggcacagatggtattaaaaaaaccacac

SEQ ID NO: 48844 - DNA, 395 bp, Homo sapiens
  misc_feature 341, 342, 343, 344, 345, 346, 347, 371, 372, 373, 374, 375,376, 377: n = A,T,C or G
cgctttacaccccggactaaagggaacaaaagctgggtaccgggccccccctcgagagtacttctagaattaattaaggcgggcagagcacgaggtcagaagatcgagaccatcctggctaacacagtgaaaccccgtctctactaaaaatacaaaagaaaaaaaaaagaaaaaaaaaaagggggcccgacccggggggggcacggaactgcccctggagggagcgtgtacgccccccgacagggggcccttttttgagccactgccaggggaggaaaggccttgatgttccagacaataataaatgcgcctgtgacttaaaaaaaaaaaaaaaaaaaaannnnnnnaaaaaaaaaaaaaaaaaaaaaaannnnnnnccccccccccggggggga

SEQ ID NO: 48845 - DNA, 436 bp, Homo sapiens
tcctcactaaagggaacaaaagctgggtaccgggccccccctcgagagtacttctagaattaattaaagccgggcccgctggataactcatttaatgccgccgctttgggagccccaggcggttcaatcactaggtctctatttcaatacctacctactctacatggtgatacctcttctcttctaaaaacacacacacacaaaaatagctgggcatggtagtgcatgcatataatcccagctacttgggaggctggggcatgataatccaagagacggaggttgcactgagctgagatcgtgcactccagcctgggcgacagagtgagactccttctcacaaataaataaacaaacaaataaataaagtgagtaggtgggccactggccaatttttataacctcagccttacggggtctgctccaaaagcatctg

SEQ ID NO: 48846 - DNA, 553 bp, Homo sapiens
gcgcgcaattaaccctcactaaagggaacaaaagctgggtaccgggccccccctcgagagtacttctagaattaattaaggcgggcggctaggtctgtgcatttctggttgcaccgcggcgcttcccagcaccaacatgtaaccggcatgtttccagcagaagacaaaaagacaaacatgaaagtctagaaataaaactggtaaaaccccaaaaaaaaaaaaaaaaaaaaaaaaaaaaaaaaaagcggccgccaccgcggtggagctccaattcgccctatagtgagtcgtattacgcgcgctcactggccgtcgttttacaacgtcgtgactgggaaaaccctggcgttacccaacttaatcgccttgcagcacatccccctttcgccagctggcgtaatagcgaagaggcccgcaccgatcgcccttcccaacagttgcgcagcctgaatggcgaatggaaattgtaagcgttaatattttgttaaaattcgcgttaaatttttgttaaatcagctcattttttaacaataggccgaaatcggcaaaatcc

SEQ ID NO: 48847 - DNA, 239 bp, Homo sapiens
  misc_feature 128, 170, 171: n = A,T,C or G
agcgcgcaattaaccctcactaaagggaacaaaagctgggtaccgggccccccctcgagagtacttctagaattaattaaggcgggaagatagatgtgtatatgaaggggactttattaagggggcanttgactaacaccatcataagggtgaagttccacaataaggcnncatctgcttggcttgaggagcaaaggaagccagttcaagtccccggaacctcaaaagtagggaattcg

SEQ ID NO: 48848 - DNA, 504 bp, Homo sapiens
  misc_feature 462: n = A,T,C or G
ccctactaaagggaacaaaagctgggtaccgggccccccctcgagagtacttctagaattaattaaggcaggcgaaaatctaagataatgccatgaccttcacccttagggtcatgttatatataataatccaccccctctgagtgtgggtgggatctgtggcttgcttctggccaatagaatatggcaaagtgatgggatgccactccctttattaggttcattatatagcaagagtgagaggatgtcactcctatgatcaagttgcattatattagaactctgtcttagcagacaagagagactcttgtgagctagccaggcatggtggcttatgcctataatcccaaaaatttgagaggctgaggcaggaggatcatttgaggccaggaatccaagaccagcctgggcaacatagcaagagcttggtgttacaaaaaacttaaaaaacataaaacttancatggtgtgatggtgcatgcctgtagtcctagatacctggga

SEQ ID NO: 48849 - DNA, 452 bp, Homo sapiens
ccctactaaagggaacaaaagctgggtaccgggccccccctcgagagtacttctagaattaattaaggcggggggggactgacttactctgtgcgaacaggaacatgtgtaaccatttccagccaaatgatcgtgaaaagccctgagaattatcgtacacgccttgtaattagcctatcatcaacttgttccactataatgaaaaagctcatgaaaaaaaaaagctctgaactgctctacagagcttcaatgtgaaaagatcgtgccattgaaagctcattaccagtaggaacataatgtttggctctccctattcacaaccagtgcacagtttgacacagtggcctcaggttcacagtgcaccatgtcactgtgctatcctacgaaatcatttgtttctaagttgtgtttattcctggagtgacatgccaccccgaatggctcactttcac

SEQ ID NO: 48850 - DNA, 523 bp, Homo sapiens
cgcgcaattaaccctcactaaagggaacaaaagctgggtaccgggccccccctcgagagtacttctagaattaattaagggggagaaaagagcgataaccagagatatggagatgattcaagggacttgatgaaaataacacttgcatgaatatcaataaatttgaatatctagagcagaggtcaataaactttttctgtaaagggccagatagtaaacattttaggctttataggtcacgagagtattatgtgggtacttatgtaatcttattgatgaaatttaaaaaataattttaaaaatataggactattagaagaatggaattattttttatttgacattattttacttaattgggattcatggttattgttttctaccatcaaattaattccaaatgtttatctgtaaaaaaacattcttaggttataggctatacaaaaatagatggtggatgaaatttaactcaggtgctatggtttgctgacctctgacctggaacaaatggattattttcata

SEQ ID NO: 48851 - DNA, 474 bp, Homo sapiens
aattaaccctcactaaagggaacaaaagctgggtaccgggccccccctcgagagtacttctagaattaattaaaaaaataaaaaccaacattaaccagagtttggaagaagttgattccaaccttcataggtgactctgaggggttcaagtcttcagtggaaaaagtaactgtggatgtgatggaaaaaagagaactagaattagaagtggagcctgaagatgtgacagaattgtttcaatctcgtgaaaaaacttgaacagatgagaggctgctttgtatagataagcaaagaaagtggtttcctgaaatgaaatctactcctgaagatgctgtgaacattgttgaaaagacaacagacttagaatattacatcaacttagttgatcaagcagtggcgaagtttgagaggattaagtccaattctaaaagaagttccactatgcgtaaaatgttatcaaacagcgtcgaatgc

SEQ ID NO: 48852 - DNA, 266 bp, Homo sapiens
taaccctcactaaagggaacaaaagctgggtaccgggccccccctcgagagtacttctagaattaattaaggcgggagggagtagtctttgtctaactttataccagtaccaaactatgttaatttaatgtagttttataataaatctttaagtccttaaaaaaaaaaaaaaaaaaaaaacaaaaaagggggccccccccgggggggaccccaattcccccttaaggggggggttttaaccccccccctggggcggttttttaaaa

SEQ ID NO: 48853 - DNA, 478 bp, Homo sapiens
tacgccaagcgcgcaattaaccctcactaaagggaacaaaagctgggtaccgggccccccctcgagagtacttctagaattaattaaggcgggagtcagtggatggaaaattacccaaaggaaacatcaggggcaaggtgggattctggctaaattgacttgacaggattcttgctgaaggcatgccaggctgatcaaataccaagggtgggagttctttctaaactgattcagcaagattcttgctacaactgggtgggtagtgcaggcccaacaaagatgtcaaggtcagggcctagacagcttagaggaacctgactagaagtagataaaggagggcatcttgtcagtgcaaagaataataagacacttcctgccctcaaggaatgcagtccaaaattacaaaatttctttgattctaggtcatcaataatttttttcctgtgccagtcttctaaatcatagctttgccgggtgc

SEQ ID NO: 48854 - DNA, 468 bp, Homo sapiens
ccctactaaagggaacaaaagctgggtaccgggccccccctcgagagtacttctagaattaattaaggcgggcattagagagcccaacatctcccgatgctgaggcacaagaatcacttgaacctggtaggcggaggttgcattgagcccagatcgcacctctgtgctccagactgggcaacagagcgagacccaatctcttaaaaaaaaaaaaaaaaaaaaggggtaaaaatttccccgggggggagggtttgcccctgtatccccacttgccccaggggttaagggaaagggatggtttacccccagggggccccggccattgtgacccataattttccccttgttttccacccggggggaaaagggaaaaccctttttaaaaaaaaaaaaaaaaaaaaaaaaaagggggccccccccgggggggggccccaattcccccttaaagggggatatttcccccccccc

SEQ ID NO: 48855 - DNA, 555 bp, Homo sapiens
cgcgcaattaaccctcactaaagggaacaaaagctgggtaccgggccccccctcgagagtacttctagaattaattaaagcagcatgaagaatatattataaaaatactttctgtaaattgtttatattaatttgcatttatgtttatttaaggaatagaggaatggatttcatttatttcagagttgttataagaggtaaatatgaagtgttaagcatggtgcctggcatgtagtaagtgttccataaatgtcagctattttaattgtcatcgtgaagcagggccagcctttgtttatttacagagcaataatttgatgattattggaaaattctcctttcccaaggttttctaattataattccctaaattccacttataaatatccattactttggatttagactttctgtctttggggcctttttgttaatatgaagattaatcttttggaacaatgggtaataactgggaggggcctctgtggagctggtaatgttctatttcttgatttggttggtggttacatgtgtcactgtgtaaaagtcaaagct

SEQ ID NO: 48856 - DNA, 432 bp, Homo sapiens
caaagctgggtaccgggccccccctcgagagtacttctagaattaaaagcatgtacggtatcaacgcagagttaataggcgggtgtgctcttttagctgttcttaggtagctcgtctggtttcgggggtccttccctttgcctgtggtgtaaaagtgcatcacacaggtattgccttttaacaagaactgatgctccttgggtgctgctgctactcagactagctctaagtaatgtgattcttctaaagcaaagtcattggatgggaggaggaagaaaaagtcccataaaggaacttttgtagtcttatcaacatataatctaatcccttagcatcagctcctccctcagtggtacatgcgtcaagatttgtagcagtaataactgcaggtcacttgtatgtaatggatgtgaggtagccgaagtttggttc

SEQ ID NO: 48857 - DNA, 509 bp, Homo sapiens
  misc_feature 342, 426, 427: n = A,T,C or G
ctggccgtcgtttacaccccgcacacgatataaccttgattattggcggcggttttccttagagaaaaagaaaataactttaggcgggctggcggggtgcccccgccaaaggcggacacgggctggacggcctgtcttctttccactggccccccggcatgggatgggccagggcgccgggtcgggtaccggagtgcaagctcgaaagagagagagaaaacactgagacagcattagtggagtgaaaggcggacacagatgagcctgcagaccatgcccccaaccctccgctgcccatcccctcctccctcctcacttggataaaaagcagatttgccttanaaaaaaaaaaaaaaaaaaaaaaaaaaaaaaaaaaaaaaaaaaaaaaaaaaaaaaaaataaaaaaaaaaaaaaaaaaaaaaaaannccgccccccccccccgggggggcccccccccccccctttagggggggttttacccccccccccgggggggttttttaaaaaa

SEQ ID NO: 48858 - DNA, 467 bp, Homo sapiens
ccctcactaaagggatcaaaagctgggtaccgggcccttcctcgagagtacttctagaattaattaaggcgggtacatatgttggaattaacagacaaggacactagttattataaccatactccatatatttaaaaagttgcatacagacatataagactcaaagtgaatttctagacatgaaatctacaatatctgagatgaaaaatacactggatgggattaacagcagattaacattgcagattagtgaactttaaagcgtatcagtagaaactatccaaaacgaaaaaaaaaaaaaaaaaaaaaaaaaaaaggcggccgccaccgcggtggagctccaattcgccctatagtgagtcgtattacgcgcgctcactggccgtcgttttacaacgtcgtgactgggaaaaccctggcgttacccaacttaatcgccttgcagcacatccccctttcgccagctg

SEQ ID NO: 48859 - DNA, 587 bp, Homo sapiens
  misc_feature 268, 270: n = A,T,C or G
acgccaagcgcgcaattaactcctcactaaagggaacaaaagctgggtaccgggccccccctgaggagtcttttagaaattaattaattttcaggacataaaataccaaagatattcatggcctaaactgagtactgaatcaaatggacctgatagatatctacaaaattctccacccagaaacaacagaatagacattcttctcatcagcccatggcacttactctaaaattgatcacataattggaagtaaaacactcctcagcanangaaaaaaaaaaaaaaaaaaaaaaaaaaaaggcggccgccaccgcggtggagctccaattcgccctatagtgagtcgtattacgcgcgctcactggccgtcgttttacaacgtcgtgactgggaaaaccctggcgttacccaacttaatcgccttgcagcacatccccctttcgccagctggcgtaatagcgaagaggcccgcaccgatcgcccttcccaacagttgcgcagcctgaatggcgaatggaaattgtaagcgttaaaattttgttaaaattcgcgttaaatttttgttaaatcaactcattttttaacca

SEQ ID NO: 48860 - DNA, 481 bp, Homo sapiens
accctcactaaagggaacaaaagctgggtaccgggccccccctcgagagtacttctagaattaattaaggcggggaagtacacaagaggtgcaattttattttatatttttagagacagtttcttgctcttttgcccaggctatagtgcagtggagcgatcagagctcactgcagcctccaactcctgggaccaagcgatcccccactcccaaccttggctctagactgttactcttaagctttgagaaattttcacattgatgactattttaaaatcaaataaaactattttactggaaaaaaaaaaaaaaaaaaaaaaaaaaaaaaaaaaaataaaaaaaaaaaaaaaaaaaaaaataaaaaaaaaaaaaaaaaaaaaaggcggccgccaccgggggggagctccaattcgccctatagggagtggtattacgcgcgctcactggccggggttttacaacgtggggactgggaaaaccc

SEQ ID NO: 48861 - DNA, 494 bp, Homo sapiens
  misc_feature 388, 391: n = A,T,C or G
ctaaagggaacaaaagctgggtaccgggccccccctcgagagtacttctagaattaattaagcaaagaaatgatttttaatctgtatgtaattgttttaaagcacccattttaagagaaaatactgtgcaatgaagaaaccagtttaggcatttgctataaactgaaatattccaaaagaatcatctataacagccctgtaaattcctttaaaatgataactaacaggacagtttgaccaattttttttaaatatacttccttttatgtgttcaacagggaaaaaaaaaaaaaaaatagaaatattggggggccccccggggggggaacgctaactaccgatattgaggagttgaattcacacctgcaccgggcgacttaataaaatntanagacctctccaccccaaatgaacagagtatacattcttctcagcaccacatcacacttattccaaaattgaccacatagttggaagtaaagcactccttagca

SEQ ID NO: 48862 - DNA, 511 bp, Homo sapiens
gcgcgcaattaaccctcactaaagggaacaaaagctgggtaccgggccccccctcgagagtacttctagaattaattaaggcgggctgacagaattgtcttcctcatttccaagaaaaaaaaaaaaaaacaactcatgagctttttaacagaattactttgactctgtaggtcaaaaaaaaaaaaaaaaaaaaaaaaaaaaggcggccgccaccgcggtggagctccaattcgccctatagtgagtcgtattacgcgcgctcactggccgtcgttttacaacgtcgtgactgggaaaaccctggcgttacccaacttaatcgccttgcagcacatccccctttcgccagctggcgtaatagcgaagaggcccgcaccgatcgcccttcccaacagttgcgcagcctgaatggcgaatggaaattgtaagcgttaatattttgttaaaattcgcgttaaatttttgttaaatcagctcattttttaaccaataggccgaaatcggcaaaatc

SEQ ID NO: 48863 - DNA, 461 bp, Homo sapiens
  misc_feature 326: n = A,T,C or G
ttaaccctcagtaaagggaacaaaagctgggtaccgggccccccctcgagagtacttctagaattaattaaggcgggcgtggtggcgcatgcctgtaatcccagctactcgggaggctgaagcaggacaatcgcttgaacccgggaaggcagaggttgcagtgagccagatcgcgccactgcactccagcctgggcaacaagagcaaaaccccgtctcaaaaagaaaaaaagatttatattagaaggaggcgccttctctaaaagtaatgaatcctttttttccctccccaagcaaaaaatccttctctaaaattaacaatcattnttctaagcgtggtttaatgcttttttggaagactacttatttcttttcctttcaaaagttatgcaagctcattaaaaaaaaaaaaaaaaaagcggccgccaccgcggtggagctccaattcgccctatagtgagt

SEQ ID NO: 48864 - DNA, 482 bp, Homo sapiens
ttaaccctcactaaagggaacaaaagctgggtaccgggccccccctcgagagtacttctagaattaattaaggcgggcagatcacatgaggttgggagtttgagaccagcctggccaacatagtgaaactctgtttctactaaaaatacaaaaattagccaggtgtggtggcatgcgcctgtaatcccagctactcaggaaccttcttttcatgatttaaatacaaatcaaattcagagacacgcaagttaagcctcctttaaactatacttggttttaaacttttaatagaacactttagccaaatacatacagatttaactaaccaagccatagaaaacctgtttgagatgttcactagttttataaaattatcctccaaaacatttaaaattcctaaagcaaaggaaaaactgactttaaaataacctattttctgggcgggagcggtggctcacgcttgtaatcccatcactttggga

SEQ ID NO: 48865 - DNA, 478 bp, Homo sapiens
gcgcgcaattaaccctcactaaagggaacaaaagctgggtaccgggccccccctcgagagtacttctagaattaattaaggcggggaagcagcaagtgcacaggtccagacaaagaactgcacacgctcatgaatctggggaacagaggccacacgcaaagaatggctgacgggccactcggctgggatcgctccttttaccaagagcaagcagaggccactggaggagtttaagaacaatattaaaatgttgacatctgagctttctgtacttatatgacagtatactctaacccttacagcgctacacgttaaagctgtccctattttacgaaaatagaggccagattaacaatacgtgatgcggccgtcaccgcggaggagctccaattcgccctatcatgagtcgtataacgcgcgctcactggccgacgatttacaaccacgtgactggtaaaaacctggcgtaaccaaactt

SEQ ID NO: 48866 - DNA, 504 bp, Homo sapiens
taaccctcactaaagggaacaaaagctgggtaccgggccccccctcgagagtacttctagaattaattaaggcgggagaagggcaagagttgaaaaactaactgttgggtactatgctcactacgtgggtgatgggattattcatacctcaaacctcggagtcatgggtaacatttttttaacccatgtaacaaacctgtacatgtacctcctgaatctaaaataaaagttgaaaaagaaaacaagagattagaacagagacaatatacatggctagaagaccttgtgaagacacaacgagaaaatagccattgacaagccaaggagagaggctttagaggaaaccaatcctgctgacactttgatctcggacttccagcctctagcacttgggggaaataatttgttttttgagccagtcagtctgtggtatttgttacagaagccctagaaaactaataaaatgccctcctctgttttaaaaacaaaagagttcatctgaaa

SEQ ID NO: 48867 - DNA, 302 bp, Homo sapiens
gcgcgcaattaaccctcactaaagggaacaaaagctgggtaccgggccccccctcgagagtacttctagaattaattaaggtgggctgaagatggatcccccaaggatacaaactgcagagggtggtagagaagcccaaagatacgagaaaggaagagaagggaagaatgggatgatccagacttcagagttgcagaagtcaaaaagtgtgggctctgaggtggaagagtgatgagcactgccaaacacaacagagatgtccaataagatggggcctggaaactgcttactggatttggcaa

SEQ ID NO: 48868 - DNA, 501 bp, Homo sapiens
  misc_feature 322: n = A,T,C or G
ccctactaaagggaacaaaagctgggtaccgggccccccctcgagagtacttctagaattaattaaggcggggacactgaggggcgggtgaagggtcgaggccatgtctatagctgtctatcatcacacacggagaaccacttcattaaatagagtggccggatatgtcactattgattatgctgacatacattacataatataaaagatcaacatgtaggatgagtctgtctttttccttcttctgcgtgttggtctccagatggtgcatttcttcagttacttttcgtaactgtagattctcacaagaaatgaacacttntaccatacttgtaaggtgttgtaaagatgtgtaaagttttcactttttgcatcatattcacatgtggctatatgcccttttgtcttcaaagttttctttatcttgatcacttatcagaggcgtgactgttttattatcttagtcttttgaaagaatcctcccttagttttattttttaa

SEQ ID NO: 48869 - DNA, 437 bp, Homo sapiens
  misc_feature 69, 392, 393, 394, 395: n = A,T,C or G
tactaaagggaacaaaagctgggtaccgggccccccctcgagagtacttctagatttaattaaagcggnggagaaagacaagggaacagctagttggtcgagcagtcagaaacccacatttgttagttaattttgcattcagtcttccatggtgtggtttgtggcaacccaaaataattacaatagtaacatcaaagaccactgactacagatcactataatggaaataataatcatgaataagtttgaaatattgtgagaattacccaaagtgtgacacaaacagaagtgagcctatactgttagtaaaatggcactgataggcttgcttgatgcatagttgctacaaactttcaatttttaaaaaatgcaacacttgtaaagtgcaattnnnnaaaaaaaaaaaaaaaaaaaaaagggggccccccccggggggg

SEQ ID NO: 48870 - DNA, 183 bp, Homo sapiens
ctggccgtcgttttacaccccggaaaaaggtttaaccatcttgtttgaccccgccctcttctctagagtactaatagaattaattaaggcgggcagatcacgaggtcaggagatcgagaccatcctggctaacacagtgaaaccccgtctctactaaaaatacaaaaacttagccggggtgtg

SEQ ID NO: 48871 - DNA, 316 bp, Homo sapiens
gcacctcactactagggaacaaaagctgggtaccgggccccccctcgagagtacttctagaattaattaaagcggggttgctccatgttggccagggtggtctggaatcctgacttcaggtgacccgccgcctttgccttccaaagtgctgggattacaggcgtgagccagcgtgcccgatcaatctaataacttttaacgctttcttccatgattaccgctctatgtgggtattttatcttgaaggaattttgaaaatgtgtgtatggctcaaaaaattatgtttcactgagattttcaagtggttataaaatat

SEQ ID NO: 48872 - DNA, 445 bp, Homo sapiens
  misc_feature 185, 186: n = A,T,C or G
tttccttccagaaacaaaaaatacctttgttgcctggccggggtttttccttccaaaaaaaaaaaaaatcttttgggtttgccccggcttccatctactcaaggctaacaaactgtgttgggtttttattcttatcattattatgaagggtataatataattattttattttagttgttgtgccnncctcaataatgctgttctaactacagtgctcaataaaatgattaatgacaggatggggttcccctgtgcttttaccagtagcatgaccccttctgaagccatccgcagaaagtactttgtcctccaaaaagctaacatacgggtttgaagcaacattgaaacttttgtagcaatctggtctatagacttttaactcaagaagctagggctggacttgttaccttcgttgaatgatgttagttgaactgactgtaatgtt

SEQ ID NO: 48873 - DNA, 446 bp, Homo sapiens
tgatacatacgccaagcgcgcaattaaccctcactaaagggaacaaaagctgggtaccgggccccccctcgagagtacttctagaattaattaaggcggggagagagagaagtcacagcagtggggggaggcgcagaggagtgagggaggccagtgcctagagtgaagacagctgctgttttaataaaaaaaaaaaaaaaaaaaaaaaaaaaaaaaaaaaaaaaaaaaaaaaaaaaaaaaaaaaaaggtgaaaaaaaaaaaaaaaaaaaaaaaaaaaagcggccgccaccgggggggagctccaattcgccctatagtgagtcgtattacccgcgctcactggccgtcgtttaacaacgtcgtgactgggaaaaccctggcgttacccaacttaatcgccttgaagcaaatccccttttcgccagctggcgtattagcaaaaaggc

SEQ ID NO: 48874 - DNA, 456 bp, Homo sapiens
cactaaagggaacaaaagctgggtaccgggccccccctcgagagtacttctagaattaattaaggcgggggaaggatgcaagaataaatctactggattcagatatttgagcaggtagttaaaatattggtgattgcctgtggtaggaaaactgaacttactctaacctcactaaagaatgttgaaggacgtgactacttatgtgtactggatacactgtcaggggcagccttcagaggtactgaaaaaaaaaaaaaaaaaaacaaaaaaatggcggccgccaccgcggtggagctccaattcgccctatagtgagtcgtattacgcgcgctcactggccgtggttttacaacgtcgtgactgggaaaaccctggcgttacccaacttaatcgccttgcagcacatccccctttcgccagctggcgtaatagcgaagaggcccgcaccgatcgccc

SEQ ID NO: 48875 - DNA, 480 bp, Homo sapiens
gcgcgcaattaaccctcactaaagggaacaaaagctgggtaccgggccccccctcgagagtacttctagaattaattaaggcgggaggtgaacataagaacaaacatatggataagtgacacaaaacggagttcagaaataaacccacacgtatgtagaaaattaatattggatctaggggcgaagtaattaaatttacgaagttttttttcatttaatgataccagaacaagtgactattcctgtgcacaaaaataaaccttgcttctttcctcatatatatcaaaattaattgaatgccaaaattggaaccaacctaaatgtcatcaactggtgaatggatgaccaaattgtggttacattttacaatggagcactgatcagcaatacaaagaaacaaataactgatagacaactgaaaaagagcagaccaaacacaggagaagggcggccgccaccgcgggggagctccaattcgcc

SEQ ID NO: 48876 - DNA, 458 bp, Homo sapiens
taaagggaacaaaagctgggtaccgggccccccctcgagagtacttctagaattaattaaggcgggagtgcagtgacacgatcgggacccactgtagcctcaaactcctgcccttaagcaatccaactgcttcagcctcccgagtagctgagactgcaggtgaggaccgccatgtctagctttttgttttttttttaaacatatggggtctctctgtgttgcccagcctgctctggaactcctagcttcaattgaccctctgcctcagcctcccaaagtgttgggattgcagatgtgagccactgtgcccaacctgtttttcttggtgttttatataaatggaattgtatcgcacgtaatctttagggaagtgggggctgttcattgagcataattatgctggaattcatgtatatattgataaatattttaagagctttttattgctgaacggtgtc

SEQ ID NO: 48877 - DNA, 391 bp, Homo sapiens
gattacgccaagcgcgcaattaaccctcactaaagggaacaaaagctgggtaccgggccccccctcgagagtacttctagaattaattaattaatgcttgtaggacataataataacaattgaatgtctgcacagccgctttccacacagacatcataacaaaaaatttccaccaaaccctgagaaccaaaatgaacgaaaatctgttcgcttcattcattgcccccacaatcctaggcctacccgccgcagtactgatcattctatttccccctctattgatccccgccttaattaaggcgggggccacttgagaagtgaataaatggggcggtttcggaagcgtcagtgtttccatgttatggatctctctgcgtttgaataaagacta

SEQ ID NO: 48878 - DNA, 456 bp, Homo sapiens
ggaacaaaagctgggtaccgggccccccctcgagagtacttctagaattaattaaggcgggcgtggtggcgcatgcctatattcccacctacttgggaggccaaggcaggagaatcgcctggacccgggaggtggagattgcaatgagccgagatcgagaaaaaaaaaaaaaattcaatcgccatcacttaaaaaaaaactctcatttcctttaaagtgaaagaaattagttttgcaaaattcactacatagtcttgagctttcttggtttttttcagggactgttctcacagatcagtacctgtttgttgaccactgacttaaggagtttgataagggcataatcaaactacataagtgtccagtattttggcttccctgggccacattggaagaataaaaattgtcttgggccacacacaaaatacacgaacgcaaacgatagttgatgagcta

SEQ ID NO: 48879 - DNA, 407 bp, Homo sapiens
gcgcgcaattaaccctcactaaagggaacaaaagctgggtaccgggccccccctcgagagtacttctagaattaattaaggcgggcagatcacaaggtcaggagtttgagaccggcctggccaacatggtgaaaccccgtctctactaaaaatacaaaaatttgctgggcatggtggcgcgtgcctgtaatcccagctactaggggggctgaggcaggaggatcgcttgaacctgagaggcagaggttgcagtgagccaagatcatgccactttactccagtctgagcaacagaacgggacttagtcaaaataaataaataaataaataaataaataaataaataaaatatcttttatctttaaagtgtttaacattggtatactgcctgtaggtggttcattaatc

SEQ ID NO: 48880 - DNA, 453 bp, Homo sapiens
  misc_feature 379: n = A,T,C or G
ccctcactaaagggaacaaaagctgggtaccgggccccccctcgagagtacttctagaattaattaaagcattcaaatttaaattactggaggttattttaaaactttcacaaatctgctgcctcatgctgtttgttttatagttgtaacacttaaaaggctaataattggctggtctgagtgcattggtgtttacaacataattgatcataatcagctacagatttctttattcattctccactcccactgcttcacttgactagcctgcaaaataaaccaaggcttgattaaagaatgctgccccccccgggggggctgctaatagcccccaggtgtattatactttcccccccctcaagtgatggaaattacttgngtaaaagggcttcaagaatatatccaatttttaaatattttaatatatctcctatctgataacttaattcttct

SEQ ID NO: 48881 - DNA, 463 bp, Homo sapiens
taaagggaacaaaagctgggtaccgggccccccctcgagagtacttctagaattaattaagcgggcttatagacaaaacatgtaaaatcatctaatcagaggagaaaaaaagaattaaaaacaatgacaaaggcatacaaaatttatgggacaccatcaagtaaactaatttccatgtaattggaattccttaagaagattaaaatagaaaaatcttaaaaagcatatttaaggaaataacgaacatattttaatctagaaaaagaagaggaagacaagatcatccacgtataaggatctcagaaatcaccaattactttcaacacaaagaagtaattacccaagttatatcataatcaaattagcaaatccaaacactaaaaaataaaaaattcagtgcagcaggagaaaagaaccataacacatgaagtggaggcattatatgcctttcaacagattactt

SEQ ID NO: 48882 - DNA, 446 bp, Homo sapiens
gcgcgcaattaaccctcactaaagggaacaaaagctgggtaccgggccccccctcgagagtacttctagaattaattaaggcgggtgaggaggactccctcccccatgcaggctttgcctgcaggagctgcaccaggaactcacagaggatcaggaattattctgagaacatacttctgagggctgcctacagggagaaaataaattataaaaaataaatcaattctaaacaaaatatgacatttgttattagaaactatttctggaacctgtgggaaacaaaccaaccctgtggctgacaacaaccaccggcagacaccatcccctccacagccctgtgtttggaacatcacctgagtgattgtataaggaactttctttcataatcatgttaaagacttatgagtcccatttcacatggagaggtcatctatccattttgtctt

SEQ ID NO: 48883 - DNA, 459 bp, Homo sapiens
cctactaaagggaacaaaagctgggtaccgggccccccctcgagagtacttctagaattaattaaggcggggattgagacagtgttcttttgatgaatgtatcttaagactgcttgcttaggactgatgtgaaactagattaatacatggttcaagatagagactatgtcatatatgcctattatcactttgatacataatggcttagacatgtgactttgaaataaaataaccacaaaataactacactagctactgctaagtgaggaaatatgtatgaaaagaagtgagctgtcatattatgaaactcgactttcattatgtccctacatagccatgcaaaagactacaaaatgaaataaagatatgaaaacatattaagaatattcccctaccaaaaatagaaatctctctaaaacagacaagtaagtaaacaacacacaactattctacttccta

SEQ ID NO: 48884 - DNA, 480 bp, Homo sapiens
ctaatgggaacaaaagctgggtaccgggccccccctcgagagtacttctagaattaattaaggcgggcgggtcacctgaggtcaggagtttgagacaagcctggccaacatggcgaaaccctgtctctactaaaaatacaaaaattagtccggcacagtggcgggcacctgtaatcctaactaaggaggctgaggcaggagaatcgcttgaacctgggaggcagaagttgcagtgagccaagattgtgccactactgcactacagcctgggcgacagagccagactccgtctcaaaaaaaaaaaaaaaaaaaaaggatcaaatctctggaagtaagagaggttaaagaaaaaaaaatctgtgcaatggcaacaaaagagtaaatcagaaaatactgtaaagaagtgaaatacacagatcagctagattttgctgctttctattaacagctgttttgcaatataattcatgtactgtaaaa

SEQ ID NO: 48885 - DNA, 453 bp, Homo sapiens
gcgcgcaattaatccctactaaagggaacaaaagctgggtaccgggccccccctcgagagtacttctagaattaattaaggcgggatctctaataattaaacagaaagtagtaggcttgcaaagcaagtcagtcacatataaaaaaatagctctgacatagattctagtatattttatgtataaaaatatgttttaagtatattaatatataatgggataatatgtaaattatgtatgttatataattatatatgttataggctaataaagttatatattatgtaactagtatataattttatgttttaaaattatgttttataaaataatattttatgcatattttatatagcttagtacatgataaagcattgcaaactcttggggaaacattattctacacacatggggaaaatagtcataataaagaagccatggaagttcttggtata

SEQ ID NO: 48886 - DNA, 474 bp, Homo sapiens
agggaacaaaagctgggtaccgggccccccctcgagagtacttctagaattaattaaggcgggggaaggatgcaagaataaatctactggattcagatatttgagcaggtagttaaaatattggtgattgcctgtggtaggaaaactgaacttactctaacctcactaaagaatgttgaaggacgtgactacttatgtgtactggatacactgtcaggggcagccttcagaggtactgaaataaaaaaaaaaaaaaaaaaaaaaagggcggccgccaccgcggtggagctccaattcgccctatagtgagtcgtattacgcgcgctcactggccgtcgttttacaacgtcgtgactgggaaaaccctggcgttacccaacttaatcgccttgcagcacatccccctttcgccagctggcgtaatagcgaagaggcccgcaccgatcgcccttcccaacagttgcgcagcctgaa

SEQ ID NO: 48887 - DNA, 322 bp, Homo sapiens
  misc_feature 148, 149, 276, 279, 283, 290, 291, 294, 295, 296, 297, 298,299: n = A,T,C or G
gcccccctcgagagtacttctagaataattaaggcggggagtcaaattttctttttaaaaaggagcttcaatgatttgtaactgaaatatcaggttctagaagaaactggcgcttacaccaaaaaaaaaaaaaaaaaaaaaaaaaaanncccccaaaaaaaaaaaaaaaaaaaaaaaaacccccccccccccggggggccccccccccccccccaaaaaaaaaaaaaaaacccccccccccggggggggtgttaaaaaaaaaaaaaaaaaaaaaanccngggnggggggnnggnnnnnnaaaaaaaaaaaaaaaaaaaaaaa

SEQ ID NO: 48888 - DNA, 186 bp, Homo sapiens
accctcactaaagggaacaaaagctgggtaccgggccccccctcgagagtacttctagaattaattaaggcgggggggttatgtgattcatcactgcaatgtggaagtgaatgttgccaattgtcagctttttccaaactgcatactgttatatggtttatgtcgcaatcaatggtggcaaaactc

SEQ ID NO: 48889 - DNA, 505 bp, Homo sapiens
gcgcgcaattaaccctcactaaagggaacaaaagctgggtaccgggccccccctcgagagtacttctagaattaattaaggcgggttgtaaaggtaatgtttaatcattgtatagtgattatgcctctggtatagctttcctaataaaaagtttttgaaaaacataaaaaaaaaaaaaaaaaaaaaaaaaaaaaaaaaaaagcggccgccaccgcggtggagctccaattcgccctatagtgagtcgtattacgcgcgctcactggccgtcgttttacaacgtcgtgactgggaaaaccctggcgttacccaacttaatcgccttgcagcacatccccctttcgccagctggcgtaatagcgaaaaggcccgcaccgatcgcccttcccaacagttgcgcagcctgaatggcgaatggaaattgtaagcgttaatattttgttaaaattcgcgttaaatttttgttaaatcagctcattttttaaccaataggccgaaatcggca

SEQ ID NO: 48890 - DNA, 520 bp, Homo sapiens
aattaaccctcactaaagggaacaaaagctgggtaccgggccccccctcgagagtacttctagaattaattaaggcgggattgcatgggtagaggattttaaggggtagactctcaagagctaataagttttacttgtttgtggaaaacacacacacacacacgcacacacacacaaccattatctgaaagttcttcatactactccagttctagtctctccatcccaaaaaaaaaaaaaaaaaaaaaaaaaaaaaaagcggccgccaccgcggtggagctccaattcgccctatagtgagtcgtattacgcgcgctcactggccgtcgttttacaacgtcgtgactgggaaaaccctggcgttacccaacttaatcgccttgcagcacatccccctttcgccagctggcgtaatagcgaagaggcccgcaccgatcgcccttcccaacagttgcgcagcctgaatggcgaatggaaattgtaagcgttaatattttgttaaaattcgcgttaaattttt

SEQ ID NO: 48891 - DNA, 488 bp, Homo sapiens
agcgcgcaatacaccgcgcgcaattggccctcactcatgggaacagaagctgggtaccgggccccccctcgagagtacttctagaattaattaagggggatgaagttaaggcatagagttattattagttttctttttgcttgtttatgcaagcactattaggttgtgataacagtgataagcttaaaataatggcttataaaatagtgctggaaaatctcatggtaactcaaatcacaaacatacaacaaatagacacaaaagtaaaaagcaagaaattaaatcataccaccagagaaaatcacctttactaaaaggagaagaaaaaaaaaaaaaagaaaaaaaaggcggccgccaccgaggtggagctccaattcgccctatagtgagtcgtattacgcgcgctcactggccgtcgttttacaacgacgtgactgggaaaaccctggcgttacccaacttaatcgccttgcagcacatcccccttt

SEQ ID NO: 48892 - DNA, 330 bp, Homo sapiens
ccctactaaagggaacaaaagctgggtaccgggccccccctcgagagtacttctagaattaattaaggctggtggaggaccaggctaaatgatgcattataatgggagcccgtatgaggttatagaagctactgtgaaccatgcttctttctacaagtttagtgaaacatttcacgtaaaaatgaacaacagattgtggtgatggttacacaactctgaatataaaacactgaactgttggctcacacctgtaatcccagcactttgggaggcggatcacaaggtcaggagtttgagaccagcctggtcaagatggtgaaaccccgtctc

SEQ ID NO: 48893 - DNA, 354 bp, Homo sapiens
cacttaaccctcactaaagggaacaaaagctgggtaccgggccccccctcgagagtacttctagaattaattaaggcgggagttgggaaggattcaccatacttgtgttctcctccctttataaattctattcataggacttttaaaaggcttgtgctatctttccagtgaaaactgaaagtgcattattatggaagaatgtatttgcaggtagtaatagcattaaaaaatatactcgtgtgtaaacacatactaattttgaccttgaaagatgaattccttcaagaaaaattaaataatgcttaagaaaatgtgtaccaaaattaaataaaggacttaatttacatactacat

SEQ ID NO: 48894 - DNA, 382 bp, Homo sapiens
  misc_feature 276: n = A,T,C or G
ctggccgtcgttttacaccccggaataagcgtgaacacatgatgggtgccgggccccccctcgagagtacttctagaattaattaaggcggggagaagatagggaacactcatccctggtcgtctatcccagtgtgtgtttaacattcacagcccagaaccacagatgtgtctgggagagcctggcaaggcattcctcatcaccatcgtgtttgcaaaggttaaaacaaaaacaaaaaaccacaaaaataaaaaacaaaaaaaacaaaaaacccangaaaaaaaaaaaaaaaaaaaaaaaaaaaagggcgcccccccccgggggggaccccaattcccccttaaagggggttttttacccccccctttggggcggtttttta

SEQ ID NO: 48895 - DNA, 129 bp, Homo sapiens
gggtaccgggccccccctcgagagtacttctagaattaattaaggcggggttttttgcttttgcttcttcctcattttctcttgctgctgccatgtaagaagtgcctttcacctcctgccatgcttctg

SEQ ID NO: 48896 - DNA, 334 bp, Homo sapiens
ccctcactaaagggaacaaaagctgggtaccgggccccccctcgagagttcttctagaattaattaatgcgggagtttaccaagagcagctctgaattgctacttgttgaaactgagagatacatgaggtttcattgctatgttcatgaaaaagaatgtggatagatatcaaagccaataaagtactctcttctgatgtttaaggaattcatttaaaagattgtaatttaaatttgtctttcagtcaaaaatgacaccaagggatattttccctaataaaaagatcatactaattaggttcattgtgctgactgcttttatatatgttttaaat

SEQ ID NO: 48897 - DNA, 484 bp, Homo sapiens
  misc_feature 55: n = A,T,C or G
gcgacgcgttagacgtgtctcgcgaccagggaacaccagctgggtaccgggcccnccctcgagagtacttctagaattaattaaggcgggggaaagcaacatcgtatttatatactgatggtgacattctaataatgaaaagaaagagaatggaaaagacagaggaaaaagctgaagtgatgtctttagtagggaattataatgataaataattcatcattataacagcagaagcacatggataaaataacaataataacagctgaacacatgaacatctttgcagataagtgggcagatgtaatatgggggcttgtggaagtgctctttaaccagattatattttagacaagatattccagaagcacccctgagggggatggcaagtatctgattgcggaagtgttcccaggagaaggctgttgtgagtcagaaaaggaggaaagagaagaagccaaaaaaaaaaaaaaaaaaaaaaaaaagc

SEQ ID NO: 48898 - DNA, 607 bp, Homo sapiens
  misc_feature 401: n = A,T,C or G
caagcgcgcaattatccctcactaaagggaacaaaagctgggtaccgggccccccctcgagagtacttctagaattaattaaggcgggctaattgaaagtacacagacgagaaaacagaataacatggaatgaggcacaactacacggtctagaaaatagcctcagaagggcaaatttaagagttattgtccttaaagaggaggtagagagagagttaggcgtacaaaatttattcatatagataataacagagagcctctcaaacctagtaaaagatatcaatattaaaatacaagaaggttatagaacactgagcagatttaacccaagactacctcaagatacttaataatcaaactctcaaaggtcaaggatgaagaaaggatcctaaaagcagcangaaaaaaaatttaaaaaaaaaaaaaggcggccgccaccgcggtggagctccaattcgccctatagtgagtcgtattacgcgcgctcactggccgtcgttttacaacgtcgggactgggaaaaccctggcgttacccaacttaattgccttgcagcacatcccccttttcccagctggcgtaatagcgaagaggcccgcaccgatcg

SEQ ID NO: 48899 - DNA, 509 bp, Homo sapiens
ctcactaaagggaacaaaagctgggtaccgggccccccctcgagagtacttctagaattaattaaggcggggggagggatagcattaggagatatacctaatgtaaatgacgagttaatgggtgcaacacaccaatatggctcatgtatacacatgttacaaagctgcacattgcgcacatgtaccccataacttaaagtgtaattatatgaactcaataaaaccaaaaataaaatcccaccagcaagaaagaaagaaagaaagaatgattgattactgtcacatatactctattagttatcatcacaagcctaccacgtatatacgataggctttaagtcagaaaacaaacagagatgaagtgatttacccactgtcatacagctagcaaagctacagacttaaccttggactttccactctagctcttatcaattatcccacactgagttacctgtcaaaaacacagatgacaccaagttaacactggtaaagttatgagaaaaata

SEQ ID NO: 48900 - DNA, 509 bp, Homo sapiens
agcgcgcaattaaccctcactaaagggaacaaaagctgggtaccgggccccccctcgagagtacttctagaattaattaaggcggggagctaaaggaaaatatgaacatgatgaggagagaaacagaagacataagaaaacagatcttctagagctaaaaaatacaatatctaaaatgaaaaattccatagatgggattggacactgcgaactagaagtttggatactctaaaggattaataaacttgaagacagagcaaaacaaactagacaaactgaagcatagagagaaaagagtgggaaaaacttagcagagcctcaatggctgtgggacaatattgggtggtcttacatatatatatataattggaatcccagaaagacaagagaatatttgaaaaaatatggcagaaaacattccaacttgattaaagctataatcccacagattcaagaagttcaatgaattccaaaaaggttaaacaaaaataacaaggcacatcataatc

SEQ ID NO: 48901 - DNA, 372 bp, Homo sapiens
ctaaagggaacaaaagctgggtaccgggccccccctcgagagtacttctagaattaattaaggcgggtggatggtgttaaggtgtaaagtttttattagttttattttgcatgtttgtttcttcatgcaaacagtgttattatttagttgaaaataatgggtcataagatagtatttgcaagtatgtggcatgccaacagtgaacaatctgaaaaagaaataaaaaattaatcccatttacaatagccagaaataaaattaaatagcggggcgttaaccaaaaaaaaaaaaaaaaaaaaaaaaaaaagggcccccccccgggggggacccccaattcccccttaagggaggttttttccccccccccctggg

SEQ ID NO: 48902 - DNA, 568 bp, Homo sapiens
  misc_feature 389, 391, 392: n = A,T,C or G
caagcgcgcaattaaccctcactaaagggaacaaaagctgggtaccgggccccccctcgagagtacttctagaattaattaaggcggggcacagtgggatagggagagcatcaggaagaatagctaatggatactgggtttaattcctaggtgatgtgttgatctgtgcagcaaaccaccatggcacatgtttacttatgtaacaaacctgcacatcctgcacatgtggtacttttaagtaccccagaacttaaaagttgaagaaaaaaatagtaaggggttctctagttttgtcaatgagcttagtgataattcacaataggtacattcgtttttaaggaaaaaagaaataaagcaattataaaatcaaaaactaaaagattattcanannaaaaaaaaaaaaaaaaaaaaaaagcggccgccaccgcggtggagctccaattcgccctatagtgagtcgtattacgcgcgctcactggccgtcgttttacaacgtcgtgactgggaaaaccctggcgttacccaacttaatcgccttgcagcacatccccctttcgccagctggcg

SEQ ID NO: 48903 - DNA, 477 bp, Homo sapiens
agctgggtaccgtgccccccctcgagagtacttttttaattaattaaggcggggactctggcaccttatacaaaaatttaaatccatcaaaggtcttaaacataagtcttaaaactataaaactcttagaagaaaatgtaggggaaaagcttcatgacattagatttggcaatgattttgatatgacacccaaagcacaggcaacaaaagaaaaaatagataagctgaactttatcaaaattaaaaaattgtgtattgagggatactataaagagaaccacagaatgggagaaaaatatttgcaaattatgtatctggataagggattaatggccacaatatatgaaaaactcctaaaactcaacaacaaactgattcaaaaatggggaaaggactttaatagaactttttccaaagagggcacaaatgaccaaccgacacataaaaagatgctcaacatcacaattactaaggaaa

SEQ ID NO: 48904 - DNA, 449 bp, Homo sapiens
ctaaagggaacaaaagctgggtaccgggccccccctcgagagtacttctagaattaattaaggcgggccctgcactcatgagggcttccaatgtgctgcccccctcttaatactcaccaataaattctacttcctgtccaaaaaaaaaaaaaaaaaaaaaaaaaaaaaaggggggcccccccgggggggggccccaatttcccccaaaggggggggaatatcccccccccccggggggggtttttaaaaaataatgccagattttaaaaacatataaagataacataaactaagggtaacttattaaggcgaccaattattcaaagaggctagcattaactccataaacacggcttccactacagaaatctgaaaatgttcccaagaatatgggcccaaatagattattatatagaaaaaataattattctattattagcaggtggaca

SEQ ID NO: 48905 - DNA, 516 bp, Homo sapiens
agcgcgcaattaaccctcactaaagggaacaaaagctgggtaccgggccccccctcgagagtacttctagaattaattaaggcgggataaagttatcataaggaattaaaaaaactcagaaaagctgagccagcagaacacagtaatacaaatgctattttaagaaagagataaataactttgtaacaaagttctaaagctaatttattaaaaaaaaaaaaaaaaaaaaaaaaaaaaagcggccgccaccgcggtggagctccaattcgccctatagtgagtcgtattacgcgcgatcactggccgtcgttttacaacgtcgtgactgggaaaaccctggcgttacccaacttaatcgccttgcagcacatccccctttcgccagctggcgtaatagcgaagaggcccgcaccgatcgcccttcccaacagttgcgcagcctgaatggcgaatggaaattgtaagcgttaatattttgttaaaattcgcgttaaatttttgttaaatcagctcatt

SEQ ID NO: 48906 - DNA, 461 bp, Homo sapiens
cctcactagagggaacaaaagctgggtaccgggccccccctcgagagtacttctagaattaattaaggcgggacagtaagattaatttattctaacaatgatcttgataatccccctgattcccagactccttggaatagctccacagctatcagtggttctgccacaggttcagagccttcccagtactgccttcttatttgagaggtgtgctaagagctataaagcagaggcttcaattgtacacaattgggaagtttaggcaaaagtcatttcttccctatattttgtcatgcttatctcctgtctctttctgttttacagattagcaataaactccttaaaacccaaaggtttgggcttctgttcctttcacttgcagtcagacatggagttagtggtagaagaaacagaaggggtaacctgcatggtgacagctactgaggggatggataggaaag

SEQ ID NO: 48907 - DNA, 234 bp, Homo sapiens
ctggccgtcgttttacaccccgcacaagctataacctgattcttgcccgccttttccataaagaaaaaaaaaaaaactttattgctggccgatcacctgaggtcgggagtacaagaccagcctggccaacatggtgaaaccccatctctactgaaaatacaaaaattagccgggcatggtggcaggtgcctgtaatcccagctacatgggaggctgaggcaggagaatcacttg

SEQ ID NO: 48908 - DNA, 510 bp, Homo sapiens
gcgcgcaattaaccctcactaaagggaacaaaagctgggtaccgggccccccctcgagagtacttctagaattaattaaggcggggtgtgcggagcgctttaccttccacagtgtccggcacacgcatccttttcgacatcatcacttgacctgctgcaataggcaacctacctggctctctcgcatcccgttatcagcgtcaagaagatttgcacgtaggcctttaaagccagccgccagccccggacgccttcctctcactaaccccatgctgcctttccaaacggaagatgaacttagcaattctaggcgctgcctgtgtactaggtagggaccctgaaagttcatagccatctagttcagtttttctcagcctccacgctattgacattttagaccagataattctttgcctttgaggggctgccctttgcattgtaagatgtttagcagcatatctggcctctccacactaaatgccagtagtgccaccacccccagtcatgaca

SEQ ID NO: 48909 - DNA, 353 bp, Homo sapiens
  misc_feature 72: n = A,T,C or G
ttaaccctcactaaagggaacaaaagctgggtacagcgccccccctcgagagtacttctagaattaattaangcgggggcactcggagggcaggaaaacccccattttcacaaaatgcgtttgaacgttaaatgccggcaaaagtgctgaatcaactataaaactaaatccctgcattccatcgcccttttaaatatgtaatcattctccacaaaatatatgcatacctcctaagaagcggtcgccaccgctgaggaactccaattccccctataatgagtcgtataactcgcgctcactgtccctcaatttacaacttcctgacttggaaaaccctggcgttacccaactta

SEQ ID NO: 48910 - DNA, 503 bp, Homo sapiens
gcgcgcaattaaccctcactaaagggaacaaaagctgggtaccgggccccccctcgagagtacttctagaattaattaaggcgggtggatcacgaggtcaggaaatcgagaccatcctggctaacacgggtgaaaccccgtctctattaaaaaaatagaaaaaaattaggcgggcgtggtggtgagcgcctgtagtcccagctactcgagagcctgaggcaggagaatggcatgaacctggaaggcggagcttgcagtgagctgagatggtgccactgcactctaacctgggcgacagagtgagacaccgtctcaaaaaaaaaaaaacaaaaaacaagaattatccaggtgtggcggtgggcgcctgtgaggcaggcgaatctcttgaacccgggaggcggaggttgcagtgagccaagatcacaccattgcaccccagcctgggcaacaagagtgaaattccatctcaaaaagataccaaaaaaacaaaaaaaaaacatgcc

SEQ ID NO: 48911 - DNA, 449 bp, Homo sapiens; identical to SEQ ID NO: 46688

SEQ ID NO: 48912 - DNA, 483 bp, Homo sapiens
aagggaacaaaagctgggtaccgggccccccctcgagagtacttctagaattaattaaggcgggctgaattgttgataaaatggaaaaagtagtatattgttatataagcttctgaggtgtgttttgttgtataagccctggaggttaaaaagtcatcccttatgtatagtagttaaaggcataaaactgtgacttttagatattccacagaaccagacttatttgatgtggataataaccaatgatttagcattttgtttgcttttgttttattttatccgggttcattttttactcttcccatgtacatgaaacaggtggtggcgtgtagagatcagctgatccttgttttatggttaattgaactactttgtatccagggtttctgcaaatccaaaagtgatttttcatctaggatctattcctaacagtctacttcaatcccactttagttttccacaattttaaatcttaatagtgag

SEQ ID NO: 48913 - DNA, 477 bp, Homo sapiens
cgcaattaaccctcactaaagggaacaaaagctgggtaccgggccccccctcgagagtacttctagaattaattaaggggggggatccaaagatggtttcactaagaagggaaaaacaccggacctgagacttgaatgcaagtagaattttgtcaggcagatgatctgttcttccaggtagataatccatcctgggcagacaaaaccaggctgtagaaggaacaccatgtgtggagcaatagaaatatctcattgttactggagtataatgcatgcaagaagcaggcaaggtagacaggggccaccgtgaaggaaactctgaataggggaatgatatcatcacatttccatgttaggacaaataggagaagtttaatatcaagatgtaagaaagttaatggagggagacaattcaggtgttccagccaagggatgacaatacctagtttgaaggcagggatagggagacaaaaaaaa

SEQ ID NO: 48914 - DNA, 331 bp, Homo sapiens
  misc_feature 154, 156: n = A,T,C or G
taaggcggggggtcttgggggcctctcaactcccgcccatgcctccctgatgggtgggcccagggcggcctctctctgaggagacctcacccactcctcgctcagtttgaccactgtaagtgtctgcactctgtattctattaataaactaaantnaaaaaaaaaaaaaaaaaaaaaaaaaaaaaaaaaaaagggcgccccccccccggggggaacccccattcccccctaaaaggggttttttacccccccccccggggccttttttaaaaaaaaaaaaaaaaaaaaaaccctctcccttgtggggtgggtaaaaaaaaaaaaaaaaaaa

SEQ ID NO: 48915 - DNA, 362 bp, Homo sapiens
gggaacaaaagctgggtaccgggccccccctcgagagtacttctagattaattaaggcgggcgcctgtcaagcccgcgtctacggaggctgacgcaggagaatcgcttgaacctgggaggcgaaggttgcaatgagccgagattgtgccattgcactccgacctgggcaacaagtgcaagactctgtctcaaaaaaaaaaaaatggcacacgctggcatgctttaggaggagcatgctggctgctatgatgaaaaaagtacaggagggcaaggtcaaaagctaggaaaccagttaggaggtgatggcaatgactcaggtgaaagatgatgatggtttaaaccagggcagtaccaatggctaa

SEQ ID NO: 48916 - DNA, 460 bp, Homo sapiens
  misc_feature 291: n = A,T,C or G
gaacaaaagctgggtaccgggccccccctcgagagtacttctagaattaattaaggcgggctactcggggaagtactgattccaggacttggaaaggaatgtaacaggaagcctacatcatgttgtgccagaaaccaagtaagttttaaagactaataaggtcatgtcaaaattatacagcaatcaaggactcctactagacaaatctaggacaatttaaacatcgaaaagaataatgactgcaattgactgaaacatgaaaatttaaaaatcgtaaatactgatactcanaaaaaaaaaaaaaaaaaaaaaaaaaaaggcggccgccaccgcggtggagctccaattcgccctatagtgagtcgtattacgcgcgctcactggccgtcgttttacaacgtcgtgactgggaaaaccctggcgttacccaacttaatcgccttgcagcacatcccccttt

SEQ ID NO: 48917 - DNA, 435 bp, Homo sapiens
ctgggtaccgggcccttcctcgagagtacttctagaattaattaatgcttgtaggacataataataacaattgaatgtctgcacagccgctttccacacagacatcataacaaaaaatttccaccaaaccccccctccccccgccttaattaaggcgggggtgctggactggactcttgttcactttaccttctgccaaatgcagagagggaggccagtgtcagggtcggagtggcctggctcttaacactgaccgaccattgccatttctggcctcgctaggcccaggagaggagggaggcaagccagtcgggttttctggagcaatgggtgtgccagccctcaacatgactctgccaagcattcagaccacaaatgcaggaatttggctgaggagcatccttaggtatggattgatgactaagtcaagctact

SEQ ID NO: 48918 - DNA, 380 bp, Homo sapiens
tgggtagccgggccccccctcgagagtacttatagaattaattaaggcgggagatggaggccaaacgcgccgagaggaaggtggccaagggccccatgaagctgggagcccggaagctggactgaaccgtggcggtggcccttcccggctgcggagagcccgccccacagatgtatttattgtacaaaccatgtgagcccggccggcccagccaggccatctcacgtgtacataatcagagccacaataaattctatttcacaccaaaaaaaaaaaaataaacctaaaaaaaaaaaaaaaaaaaaataattcgggccccccccccgggggggccccttaaagccccttaaaaggggtgaaaacccccccccctggggggg

SEQ ID NO: 48919 - DNA, 534 bp, Homo sapiens
gattacgccaagcgcgcaattaaccctcactaaagggaacaaaagctgggtaccgggccccccctcgagagtacttctagaattaattaaggcggggcacggtggctcacgcctgtaatcccagcactttgggaggccgacacccaacgcaggtggattgcttgaagccaggagtttgacaccagcctgaacaacatggcaaaaccctgtctctaccaaaaatacaaaaaaatagccggacatggtggcacgtgcctgtagtcctagctattaggggggctgaggcaggacaatagcttaaacccaggaaacggaggttgcagtgagtggagatcacgccaatgcactctagcctgggtgacagggcaaaactctgtctcaaaaaaaaaaaaaaaaaaaaaaaaagcggccgccaccgcggtggagctccaattcgccctatagtgagtcgtattacgcgcgctcactggccgtcgttttacaacgtcgtgactgggaaaaccctggcgttacccaacttaattgccttgcagc

SEQ ID NO: 48920 - DNA, 500 bp, Homo sapiens
gcgcgcaattaaccctcactaaagggaacaaaagctgggtaccgggccccccctcgagagtacttctagaattaattaaggcgggtggattacctgaagttgggagtttgagaccagcctgaccaacatggagaaaccccgtctctactaaaaatacaaaattagctgggcgtggtggcacatgcctgtaatcccaactactcgggaagctgaggcaggagaatcacttgaacccgggaggtggagcttgcggtgagccgagatcgcgccattgcactccagcctgggcaacaagagtgaaactccatctctaaaaaaaaaaaaaaaaaaaaaaaaaaaaaaagcggccgccaccgcggtggagctccaattcgccctatagtgagtcgtattacgcgcgctcactggccgtcgttttacaacgtcgtgactgggaaaaccctggcgttacccaacttaatcgccttgcagcacatccccctttcgccagctggcgtaat

SEQ ID NO: 48921 - DNA, 284 bp, Homo sapiens
acgccaagcgcgcaattaaccctcactaaagggagcaaaagctgggtaccgggccccccctcgagagtacttctagaattaattaaggcgggggcgggtgaacctgtgtgctgcgaatgacgagacttactgttgaacagtgtgctggtgtaaacatatggggaaactattactaataaagatttgtttattagaagataaaaacatacttttagaagaaaaaagataagtttaaaccaaaaaaaaaaaaaaaaaaaaaggcggccgcccccgcggcggagctc

SEQ ID NO: 48922 - DNA, 519 bp, Homo sapiens
  misc_feature 365, 366, 368, 369: n = A,T,C or G
caagcgcgcaattaaccctcactaaagggaacaaaagctgggtacagggccccccctcgagagtacttctagaattaattaaggcggggcaggactgtattgaaataatacatattatttaaattaagtaatacatatatttaaataacacatattctttaaatatgtgtatactctttatatatactatatttatggtatgcatatgtatatatacgtatttatgacaaaaccatatatatataggccaggcatggtggctcatacctgtaatcccagcactttgggtggctgaggcaggtggatcacttgaagtcaggagttcgagatcagcctgggcaacatagtaagacctcattgctacnnannaaaaaaaaaaaaaaaaaaaaaaaaaagcggccgccaccgcggtggagctccaattcgccctatagtgagtcgtattacgcgcgctcactggccgttgttttacaacgtcgtgactgggaaaaccctggcgttacccaacttaatcgcctt

SEQ ID NO: 48923 - DNA, 505 bp, Homo sapiens
atcccagcgcgcaattaaccctcactaaagggaacaaaagctgggtaccgggccccccctcgagagtacttctagaattaattaaggcgggcatggtggcgggcacctgtactcccagctactcaggaggctgaggcaggagaatgacgtgaacccgggaggcggagcttgcagtgagccgagatcacaccactgcactccagcctgggcgacagatcaagactctatctcaaaaaaaaaaaaaaaaaaaaaaaaagctttagaacagtaaggaaagaaggacagaaagtacaacttggaagagggccaagtaggtgacttgtgtgcctgatttaaaatattcttacgaagaattctaacagggaaaatatctgccctcaagctatgttttcaaataagtctccattcgacatgaaaatatcccagtaaaggactattatttcccagatgaagaaagagaggtttaaaggttacagaacaaataagcttgagaaaagagacagat

SEQ ID NO: 48924 - DNA, 343 bp, Homo sapiens
cgggggagggagaatgaggaaggaaaagaggatgtcacaggtactattttggtagattttagttgctattaacataaaagaaacaagatgtgagtttggttttagatgagctgttttttaaggtgaaaagagatgggtgttgaagacagaggcatttatacaggatataatattgacctcctctatgggactttgccttgatttgatcatattcaaaactgtaatgtaaccatgtatcactcttctactttttaactgaatgcataactgccttacgaaaacaattaagagctggtttttttggggaattgcccctggaaagtaggtgatcaatttttaacct

SEQ ID NO: 48925 - DNA, 486 bp, Homo sapiens
cgcgcataaccctactaaagggaacaaaagctgggtaccgggccccccctcgagagtacttctagaattaattaaggcggggaagcaaagaatcgaaggtaaaatgttgattcaaagattgtctcccctaaatccttcatttctttctctgaaatggaactttggaagccatttatatagattagtctgacagcctttatatttgcatgtaagtttacttgcatccttagacttggctttatgcaaaaagaaaatttttattcgttatattgtatttcatctgtctgatttccctggcacattaagatggtcctggtccctcaggatactttttcccttaataaatgtcatatgtaaataaaggcaactcatttattagtttgggattatttttcccttgagaaataaatgtttgttgaacataaattcttctttacctcatgtgctaagaactaaactatataatctgatatattttttatgcct

SEQ ID NO: 48926 - DNA, 483 bp, Homo sapiens
agcgcgcaattaaccctcactaaagggaacaaaagctgggtaccgggccccccctcgagagtacttctagaattaattaaggcggggttggcccttgtcttttcaagtaattttcatattaaacaaaaacaaagaaaaaaaatcttataaaaaggaaaaaaaaccaaaaaaaaaaaaaaaaaaaaaaaaaaaaaaaaaaaaaaaaaaaaaaaaaaaaaaaaaaaaaaaaaaaaaaaaaaaaaaaaaaaaaaaaaaaaaaaaacgcggccccccccggggggaaaccccaattccccctataaggaggggattaaccccccctaacggcccgtgttttaaaaaccttggaacgggaaaaaccctggctttcccaaattaaaaggcttggaaaaaaaaccccttttccaaactgggtgaaaaacaaaaaaggcccgcccaaatcccctttcaaaaaaatggccaaattttatgggaaaatgaaaa

SEQ ID NO: 48927 - DNA, 668 bp, Homo sapiens
gcgcgcaattaaaagggaacaaaagctgggtaccgggccccccctcgagagtacttctagaattaattaaggcgggctaagaagcagagaggaagttttagagtagcatttcccagagagtcttccacagcttttcataagtgttacgtgaaaagggttaaataaataataattctgtaaaaaaaaaaaaaaaaaaaaaaaaaaaaaagcggccgccaccgcggtggagctccaattcgccctatagtgagtcgtattacgcgcgctcactggccgtcgttttacaacgtcgtgactgggaaaaccctggcgttacccaacttaatcgccttgcagcacatccccctttcgccagctggcgtaatagcgaagaggcccgcaccgatcgcccttcccaacagttgcgcagcctgaatggcgaatggaaattgtaagcgttaatattttgttaaaattcgcgttaaatttttgttaaatcagctcattttttaaccaataggccgaaatcggcaaaatcccttataaatcaaaagaatagaccgagatagggttgaatgttgttccagtttggaacaagagtccactattaaagaacgtggactccaacgtcaaagggcgaaaaaccgtctatcagggcgatggcccactacgtgaaccatcaccctaat

SEQ ID NO: 48928 - DNA, 478 bp, Homo sapiens; identical to SEQ ID NO: 47431

SEQ ID NO: 48929 - DNA, 467 bp, Homo sapiens
caaaagctgggtaccgggccccccctcgagagtacttctagaattaattaaggcaggtcctatgagtcttaggcaggcctaggcacgtgttctctctttttgttgttagattctcaatttacgacaaatgaagaacgaggcctttacctggtctggatcgacttgttatggagcccatgtgaaatgaaaatgattcataaacaaaactgattccatccccagcaacagcagagatgaccatgaacaattagccacctgagaatcctcaacaattcttggggaattcattaattacattttattaaagggcagggatatccaaggtgacatatgggttacaaaggcaaagtataatttctttatgggttatgttaatgtgaaatataaattaataagctttttgattttactaatacaaacatacccatcaattggtcttcttcaattcagaaataactagagtttga

SEQ ID NO: 48930 - DNA, 318 bp, Homo sapiens
aaagctgggtaccgggccctccctcgagagtacttctagaattaattaaggcgggggttcttaagattatctgataaataacttctactacattgaaatgcagacttaaaaaagcaagacattgcattagagcagtcaaaacaaccaagcaagcataaaaggttaataagatgtaatcttgatcgacaaggtggaaaacttattataatggaaagaaagtcttattccctttatttgtttgatgggcactatgccatataatacccaaagttcttttaaaaaatattttcatcaaccatttttatttaaaataaacat

SEQ ID NO: 48931 - DNA, 466 bp, Homo sapiens
  misc_feature 390: n = A,T,C or G
agcgcgcaattaaccctcactaaagggaacaaaagctgggtaccgggccccccctcgagagtacttctagaattaattaaggcgggggattaatctggggtgcactttgaaagaagaaacaaatattttatgttaagtgaggattaaggaaagatttgagatatcttaatgggtaatgccccactagcagcaatacatgttgggattgaaaatcagtgtaactgttatttgggtatcatttactttaacatacctactagatctaaggtcggcagactttttctgaaacacgccaaataggaaatatttgaggctttgtaagccaaaatacagaattgtggattctatttaagtatttatataacaaggggaaaaataagtttccaaaanaaaaaaaaaaaaaaaaaaaaaaaaagcggccgccaccgcggtggagctccaattcgccctatagtgagtcgtatta

SEQ ID NO: 48932 - DNA, 451 bp, Homo sapiens
cctcactaaagggaacaaaagctgggtaccgggccccccctcgagagtacttctagaattaattaaggcgggatgctattaaaaaaagaaaaaagaagagaacaaaaaagtcctccagtaaatttaaaatatggtagtcaaggccgggcttggtggctcaatcctataataccagcaccttgggaggccgaggcgggaggatcacttgaggccaggagttcaagaccggcctgggcaacataatgagaacccatctttaccaaaaaaataaaattacattaaaaattatccgggcacggtgacgtctgcctgaggtcacattcaagaagctgatgtgggaggatcacttgagctcaggagttccagaccattccaaagcaaaaacaaaaggattttgagatcagtgtggacaacttagcaaaacaccatctctaaaaaaaaaaaaaaaaaa

SEQ ID NO: 48933 - DNA, 502 bp, Homo sapiens
ccctcactaaagggaacaaaagctgggtaccgggccccccctcgagagtacttctagaattaattaaggcgggggttgcagcgagccgagatcacgccactgtactccagcctgggtgacagagtgagactccatctcaaaaaaataaaataaataaaataaaataaaattgaagaaactttttttaattttaaactttgaattttgagataatggtagattcacatgcagctgtaagaaagaacacagagaaatcctatatactcttcccccagtttttttgagactctgtctcaaaaaaaaaaaaatgaaaaaaaaaaaaagcggccgccaccgcggtggagctccaattcgccctatagtgagtcgtattacgcgcgctcactggccgtcgttttacaacgtcgtgactgggaaaaccctggcgttacccaacttaatcgccttgcagcacatccccctttcgccagctggcgtaatagcgaagaggcccgcaccgatc

SEQ ID NO: 48934 - DNA, 459 bp, Homo sapiens
accctcactaaagggaacaaaagctgggtaccgggccccccctcgagagtacttctagaattaattaaggcgggcgccgttggctaggcggttacaagagacggttctagaatcaagaccgttttcctgtaacggatgactgtggctgggccatgggagaaccaacgggggtcaagaaacaaataaaatttgtaagacaaccccccccccatgggggacccccaaagtagcctttaaaactaggcacacaccgccccccggcccccaaacggactggctgtgtgttcacagaaagacaaacaccacgcggtctgtgctagtagggctgctctgaagacaattacaaagaattggaatcacaaaatcaagtgggtatcttatgaagttctagaaaaatagatttgttgtatattcaaatgcaagtgtaaatatttccccttcagcagtcgttctagcaaa

SEQ ID NO: 48935 - DNA, 382 bp, Homo sapiens
tggccgtcgttttacacccgggaaaaaggtttaaccatcatgactgcccgcctttctaagagaacaataaatacttaggcgggctggagggttgctctcaaaactaatgcatgaagaattggagaccccatgacagtcctataacacctaaataacttgaatcattcaatcatctaggcccacatgatttcactggagtgttctgtataattcaagggagaaaatatccgacttttttcacgcattcttctgggaaacaacatacttccctcggttttctcatcccaaagtctgaaatatttttttctcctacacgatatttacctttcatatttagatctgcaatccatctggaatggatattgtgtgtggtgtgagggaa

SEQ ID NO: 48936 - DNA, 687 bp, Homo sapiens
aattaaccctcactaaagggaacaaaagctgggtaccgggccccccctcgagagtacttctagaattaattaaggcgggggttgcagtgagccgagaccacgctattgcacttgagcctgggcaacaagaacgaaacttggtctaaaaaaaaaaaaagattatgggtctagcatgagtgtcatgcaagtaaaaaaagaaaattttcatggaaagattctaaatgataagctgttagatagtgtaataaactgaatacaaagcagagtatatacatttgcttttagcatttttgaggatttttgttttctagtaaattagacatcttattaaaatgctttgttttgtttcaatattgctcttttcttctgaaaacagttacaaacttatattcaaacacccttactccttaaacctgttatatctttagactaatagatgtgtatatttaactctatgtaagtcaaaactaaaactctattgtgtgctcttaggcagaggccacgtgttcaaaaaatacataaaaaatttttgaaaattattcaggactcagaaatatatcattttatttacgcttgtatataatttttatgatgaccataaaaataaccatgtagcccataataatttaactgtacaacttagaataactaagactgtagaattgaattgtttgtaatacaaaacat

SEQ ID NO: 48937 - DNA, 402 bp, Homo sapiens
gcgcgcaattaaccctcactaaagggaacaaaagctgggtaccgggccccccctcgagagtacttctagaattaattaaggcgggggttgtttacaggaaattaggagaataataacatttccaaataaggaaggggtgtaggctgtaagctgggaaatgcctgggcacgttcggacatgtctgagcaggttatagtccagaacaaataacctggttaaagtacaaggacatagaatgtacttattcccttactatatttaacagccacatagggcttaacaaagagttattagcaaaaagcaagggagcttgaaggaagttaatttctaaaagaaactgctatttctaacacttgctatttattctttaacaaaaagggaaactttgaagaggaacttttt

SEQ ID NO: 48938 - DNA, 585 bp, Homo sapiens
  misc_feature 371: n = A,T,C or G
cgccagcgcgcatttaaccctcactaaagggaacaaaagctgggtaccgggccccccctcgagagtacttctagaattaattaaggcgggcacaatggctcacgcctgtaatcccagcattttgggaggccaagacgggtggatcacctgaggtcaggagtttgagaccagcctggccaacatggagaaaccccatctctgctaaaaatacaaaaaaaattaactgggcgtggtggtgcacacctgtggtcccagacacttgggaggctgaggcacgaggatcgcttggacctgggaggcggaggttgcaatgagccgagatcatgccactgcactccagcctgggcaaaaagagtgaaactccgtccctntaaaaaaaaaaaaaaaaaataaaaaggcggccgccaccgcggtggagctccaattcgccctatagtgagtcgtattacgcgcgctcactggccgtcgttttacaacgtcgtgactgggaaaaccctggcgttacccaacttaatcgccttgcagcacatccccctttcgccagctggcgtaatagccaagaggcccgcaccgatcgcccttccc

SEQ ID NO: 48939 - DNA, 672 bp, Homo sapiens
agcgcgcaattaaccctcactaaagggaacaaaagctgggtaccgggccccccctcgagagtacttctagaattaattaaggcgggtggatcacaaattcaagagatggagaccatcctggctaacacggtgaaaccccatctttactaaaaatacaaaaaattagccaggcatcatgacgggtgcctgtagtcccagttactcgggaggctgaggcaggagaatcgtttgaacccaggaggtggaggttacagtgagccgcgatcgcaccactgcactccagcctgggcgacagagtgagactctgtctaaaaacaacaacaaaaaagcatttatttgtatttttaagatggaatttatttgagaaacgtataaaaacacaacagaacgcttcctaggccactttacacaatcaataggcaataataacatacatatatttgcaagcataaaactcaggtatgctaacgatagtctcacgggtataatggtaatgagcagatgagttgtatttgtaaagaaatgggtcaaaaagcaaaatgcataaaagcatggttggtaactgggtgcactcagctttataacttaggtcatctggaatattgtgccaacctaagtcttttgaccagattcatcaaaagctgggatgggtcaccatctaatatgtagtca

SEQ ID NO: 48940 - DNA, 488 bp, Homo sapiens
cgcgcgcacgcaccctcactaaagtggaacaaaagctgggtaccgggccccccctcgagagtacttctagaattaattaaggcgggaaattttgcttcctttgggctttgctgttaggactctgcgtagaggcagggtttcgccatgttgcccaggctggtcttgaactcctgacctcagatgatccacctacctcggcctccccaaagtgctgggattacagaggcagaatccacgctgcaaaattcatcctcagctgttcatactgaaagtaacaagctacaacccaagagaacggcagatgcgatgaatctcagtgttgatgtggaaagtagtcaggatggagacagtgatgaagataccacaccagccctggatttttcgggattgtcaccctactaaaggaagagactgaagaacctattataaaacgcagacttttttgcttctctttagttgtctgagtctgctgcaagactccgtgaaat

SEQ ID NO: 48941 - DNA, 365 bp, Homo sapiens
aaagggaacaaaagctgggtaccgggccccccctcgagagtacttctagaattaattaaagcggggtcgagagctgatgggcggcattggaaaaccatgatgcagagtggcggcacctttggcacattcatggccattgggatgggcatccgatgctaaccatggttgccaactacatctgtcccttcccatcaatcccagcccatgtactaataaaagaaagtctttgagttaaaaaaaaaaaaaaaaaaaaaaaaaaaaaaaaaaaatgggtaaaaaaaaaaaaaaaaaaaaaaaaagcgcccccccccccgggggggccccccccccccccacaagagagaatttttccccccccccccggg

SEQ ID NO: 48942 - DNA, 625 bp, Homo sapiens
aagggaacaaaagctgggtaccgggccccccctcgagagtacagctagaattaattaaggcgaggtagatgttgatcaaagcatataaaatttcagttagataagggaataagctcaacatgatgactacagttaaaaacaatgtactatattgtattcttgaaaatcactagaagcatagattttaagtgttctcacacaaaaaataagaatgtgagataatacatatgctaattagctatatttagccattctacactgtatacacatatcaaaacatgatgtatatgataaatatgtataattttgtcaattatcaaaaataaataaatatttaaaagttattctatcatatctggttaatccactaatacacatacacactaaattgtaaaaatattgataatgtataaaaaaatctaaattttgaaaaattataaaactccttttccctcaatcttgatttcccaaaaacagtctttacgcttgtaatctaaaataacagataatactctacaaacatttatactaacttaaaaataaacatgttctgtagcacctttaaatcactgtctccattaaacactctatgataaacataatttaataaaaacacataatttta

SEQ ID NO: 48943 - DNA, 316 bp, Homo sapiens
  misc_feature 264, 266, 269, 270, 271, 272, 273, 275, 276, 277, 278, 284,292: n = A,T,C or G
caaaagcagtgagagatgcactgaagacagaattcaaagcaaatgctgagaagacttctggcagcaacgtaaagattgtgaaagtaaagaaggaataatctaccctgactaaagcttgaaatgctacatttccaaggtgaagatgtgtgggcacatgttatggcagattgaaaaggatctcattccatgggaaaaaaaaaaatcctgtcttgttcataaattgacaatgtcaataaattgaaatatggttcactgttaaaaaananaannnnnannnnaaaaanaaattttnaaaaaaaaaaaaaaaaaaaaaaaa

SEQ ID NO: 48944 - DNA, 657 bp, Homo sapiens
acgctggccgtcgttttacactccgaaaggggaaataaccttgattccggcgccccccctcaagagtacttctagaaattaattaaggcgggatcgagagattggtgaggagaaacggaagtcctcattcttgacagctctcagcacatgcagccctccccacacacacagtcacactcacacacactcacaaccagattcacattcctacccatgcacacactaacacacacttgtgcacttaaactcgtgcacttacacattcacattcatatactcacatgcacacattctaaacacacacatactctacaaacactcatgttgcaaaaggggatttgtaagctgaatgtttagaactcagaacacatattttcacaaaaataatattatggtcgggcgctgtggctcacgcctgtaatcctagcactttgggaggctcagctgggcggatcacttgagatcaggagttcaggaccagcctggccaacatactaaaaatacagaaattagccaggcatggtggtgcatgcctgtaatcccagctactcgggaggctgaggcaggagaatcacttgaacccaggaggcaaaggttgcagtgagccgagatcctgccactgcactccagactgggcaacaagagcaaggctccatc

SEQ ID NO: 48945 - DNA, 376 bp, Homo sapiens
ctgcagcaataacattcagtgagatatgtactaaaacttactgacactgaccttagaagataaaacatctttcaattactcaaggaattctcaatagcacacgtgttgtgtttttgataggcaaactgtatctttcctctattgattcattttttgttactacacaaacaaccgttaaactgctcccaggcattttcctaagtagttactagtgagaaatacttctgatttaatttttgtagattttctacttatgatatcattactgtgaagagagattctcacttctggggcatctttgagtggatttggttttagctggagcatcagcttcatatgattgagctcttagccatgatctcaactcactttactc

SEQ ID NO: 48946 - DNA, 454 bp, Homo sapiens
tggccggctcttcaaccctgaataaagggaacacaaagctgggtaccgggccccccctcgagagtacttctagaattaattaaggcgggcgtggcacagcacgacgagaagaccctatggagctttaattgattaatgcaaacagtacctaacaaacccacaggtcctaaactaccagacctgcattactggtaataactgaaaaaataaaaaagaaaagaaaaaggaaattacggggccccccccggggggaccccccctaccccataaaagggagtaaatttaccgaccctacgggagaaaattatataaaccacaaaagaagacaagaagaaaggcagacagtagttacaagacaatcagaaaacaaacaacaaaatgacaaaaataagtccttatttatcaaaaataacactgagtgtaaataaactcacttcatttaaaaaccatacag

SEQ ID NO: 48947 - DNA, 501 bp, Homo sapiens
gcgcgcaattaaccctcactaaagggaacaaaagctgggtaccgggccccccctcgagagtacttctagaattaattaaggcaggactacactaaacaacagaattttaatatagaagaaacagccttctattgtcagatgatactatctagaagtttcttagctagagaagagaagtcaatgcttggcttcaaagttgcaaaggacaggctggctttcttcttagggaataatacagctggtgactaagctgaaggcaatgcccatttgctattcttatagtcctagcgtccttaagaattacgctaagtcgtaatcccagcactttgggaggccgaggaaggcagatcatgaggtcaggagatcgagaccatcctggccaacatgatgaaaccccatctctactaaaaatacaaagattagctggacgtggtggtgcacacctgtagttccagctactctggaggctgaggcagaagaatagcttgaacctgggaggcg

SEQ ID NO: 48948 - DNA, 489 bp, Homo sapiens
  misc_feature 424, 425, 426, 432: n = A,T,C or G
gcgcgcaattaaccctcactaaagggaacaaaagctgggtaccgggccccccctcgagagtacttctagaattaattaaggcggggaacaacacacactgggcctgtcggaagggcgaggggagggagagcatcaggaaaaattgctaatgtgtgttgggcttaatacctaggtgatggattgataggtacagcaaaccaccatggcacacatttacctacataacaaacctgcaggtcccgcacatgtatcccagaacttaaaataaaaataaaaattaaaaaaattaaaaaaaagaaaatttggcattttaggtgtcatatggtagcaactagatattgatttcccttctctctctctgaggcttttttgttgttgttgtcatttgcttgtttagtgacttgattaaactattttaccaaannnaaaaanaaaaaaacaataaaaatggcggccgccaccgcggtggagctccaattcgccctatag

SEQ ID NO: 48949 - DNA, 485 bp, Homo sapiens
tggccgtcgttttacacccagaaaaacagaaataaccatgattattgcccgtggttttacataaagaaaaaaaaaaaaactttgttgttggcgggtcactttgaggtcaagaaaaagaaaccagcctggccaacgtggtgaaaccctgtctctactaataatacaaaaattagttgggcgtggtggcaggcacctgtaaagcgagctacttgggaggctgagactggagaattgcttgaacccacaaggcagaggttgaagtgagccaggatcgcgacacttcaccccagtgtgggtgacagagcaagactctgtctaaaaaaaaaagaaaaatgaaatactggtattgacatatttaaaacaattgcctacacagaaccatattcattcatttaaacaatacttatagagtgtctaatatatgtgaggcagcagtgattgtaatcagtgctttgaacaaaatccacaaaatagggtaatatttc

SEQ ID NO: 48950 - DNA, 616 bp, Homo sapiens
gcgcgcaattaaccctcactaaagggaacaaaagctgggtaccgggccccccctcgagagtacttctagaattaattaaggcggggagaaacaggacttgaggattctagaatctcaggttgtagagaactcagtcaccaaactcaatgctttaatcccttctacaaaatccctgccaaatggttagccagtgcggtgacagcattcactatctcctgaaactacattagaaactagtcaaaactgtccctgtggtcacttcctctcagtagcccttatgtcagctgaggacattcaaagtgtaactcattttgttctatatctccaatatcttaattgaccaggtattaagtcccttcaaattctggtctggtctttgaatacatccttatctgtatctgtttggtgcagatggcagatagaagtctatcaatgtagtctactgtttctcaaagtgtaggccatggttcacttgcatcggaatacctataaattcctctaagagtttgttagacgtgcagctttcaaggccacacttcaaaacctctggatgtgaaatttgacaaacatcccaaataataatcatttgtttcacagtttgagaatcactttggcc

SEQ ID NO: 48951 - DNA, 469 bp, Homo sapiens
cactaaagggaacaaaagctgggtaccgggccccccctcgagagtacttctagaattaattaaggcgggtatcttggctcagcctaggcagttctgaaacccaggaccaggaaaaattggagggggaacggaagacagatcattctgtaaagtttccaaaaaggaacctcaacccaaagacatcctgatgtctgtgcctaggaaaaataaaaggagaggcacaaaggttttgttcactgagatgtgtggtgattttttctctgccttcttctcatgtgaaattttcagaaatagcaaacaaatactttaaaaagaatcatctattgctctgtgataaaataataaacaattaaaatacactgcatctgttttaaacgggatgaataaatacaatgttgtactataaagaagaaatagttgataatattgtgaactggagaatggagttgatgttggaaacgcgggagag

SEQ ID NO: 48952 - DNA, 554 bp, Homo sapiens
agcgcgcaattaaccctcactaaagggaacaaaagctgggtaccgggccccccctcgagagtacttctagaattaattaaggcggggtagctcacacagacagttccttatccccttcaccctggcttccttccatccccacggtggacaaagatcaggagttcccaacctccacactaagtgatattttacctggaggattctttgctgtcggggggctgtcttgtgccttgcgggaggttgagcagcatccccggtgcctacctaggagcagcaccccctccccactcatccaccagcacacccaggaccaggagcctcgacacacttgggactcaagggcttgcaccccacccagccctgaggatgaacaacctcagagaagaggtggtttagagcaaggaaaaaaatgaaaccagtgaccaaaaaataaaaaaataacctgatacattaaaaatagactaaaaaaaaaaagtcattgaaaaccagtctaggacaccatagagagtactatgactctataaaaatgccggccccccccgggggggaccccc

SEQ ID NO: 48953 - DNA, 681 bp, Homo sapiens
gccaagcgcgcaattaaccctcactaaagggaacaaaagctgggtaccgggccccccctcgagagtacttctagaattaattaaaaactaagacaaaaacacacgtattaacttaggcctccacagggtcaggttcatcaatatccctgtcttccaccacctcccctcatcccattggaaggccgtcaggggcagtaacactcatggagttgtcatcttctgtgataatgatgccttcttctggatacctcctgaagaacctgcctcaggctgtttcacggttaacttttttttttataagtagaagtacactctaaaattttaaacaataaaaagtatagtaaatacataaagcagtaacataaccatttattatcattatcaagtattatgtagtgtacataattgaacatgcttagacttttatatgactggcagtataggtttgtttacaccagcatcaccacaaacacctgagtaatgggttgtcttgtgatattatggtggctacagcattgctaggcaatgggaattttcagctccaacctgggtgaaaaagtgagactctgtctcaaaaaaagaaaaaaagacatcatagtgcactgtgttcttacctgtgaatagccactgcccttaaacctgggcaacatagcgagacctccatctcttaaaaaaaaagaa

SEQ ID NO: 48954 - DNA, 485 bp, Homo sapiens
  misc_feature 401, 402, 403, 404: n = A,T,C or G
caataaagggaacaaaagctgggtaccgggccccccctcgagagtacttctagaattaattaaggcggggtcttgtcatgttgcctaggctggtcttgaactcttgggctcaagcaatgctcccacatcagcttcccaaagtgctgatattacaggcgtcagccaccatgcttggtgtgtttcctttcagttataaaatatctcagatacataaacatgattcgttcattcgacaaatatttgttgagcatataccacatggaaggcactattctgggtttaggaacataacaattgacacagtagtccgagtccttgttctcaaggagctacattctagcggaggaagatagataatcaacaaataaatataaaacaggtttgttggtgttgagtaccannnnaaaaaaaaaaaaaaaaaaaaaaaggggccccccccgggggggaacccaaattcccctttaaggggggtttttaaccccccc

SEQ ID NO: 48955 - DNA, 193 bp, Homo sapiens
ctagaattaattaaggcgggctgcgtggttcccgtgtcttcaccctttccctagtgactgcgttgtcggctttacgtttattcctttttgtggcccgctttgtaattggtgcatttttttctatgtattataacacatggctcataaaataaaactaatttctattttcatcacaaaaaaaaataagaagaaa

SEQ ID NO: 48956 - DNA, 528 bp, Homo sapiens
agcgcgcaattaaccctcactaaagggaacaaaagctgggtaccgggccccccctcgagagtacttctagaattaattaaggcgggtggatcacatgaggtcgggagtttgagaccagcctggccagcatggtgaaaccccatctctactaaaaatacaaaaattagtggctgacgcctgtaatctcagcactttgggaggccaaggtgggcaggcggatcatgaggtcaggagatcaagaccatcccggctaacacggtgaaaccccgtctctactaaaaatacaaaaaaaaatttagccaggtgtggtagcaggtgcctgtagtcccagctactcggaaggctgaggcagaagaatggcgtgaacctgggaggtggagcttgcagtgagccgagtgagccactgcactccaacctgggtaacagagagagactccgtctcaaaaaaaaaaaaaaatacaaaaagttgccgggcatgggggcaggcgcctgtaatctcagctactcaagaagctgaggcgggaatcg

SEQ ID NO: 48957 - DNA, 516 bp, Homo sapiens
gcgcgcaattaaccctcactaaagggaacaaaagctgggtaccgggccccccctcgagagtacttctagaattaattaaggctgggaaaaggggagaaacaggaactggaaagccactggcacttgtctgtgaacaatatgagaagaaaacagcaaattcatgttttccagtcagcagctagtcaaacctctaacagtacgtaagtggtcagagaggacaagccctctcatccagggctgagaacaggttgttttggctgtcaagcattttcaaaacaagttttcttggtctcatgacaggttgtggcaagaaaaaaaaaaaaaaaaaaaaaaaaaaaaaggcggccgccaccgcggtggagctccaattcgccctatagtgagtcgtattacgcgcgctcactggccgtcgttttacaacgtcgtgactgggaaaaccctggcgttacccaacttaatcgccttgcagcacatccccctttcgccagctggcgtaatagcgaagaggcccgcact

SEQ ID NO: 48958 - DNA, 537 bp, Homo sapiens
  misc_feature 413, 508, 509: n = A,T,C or G
ctggccgtcgttttacaccccggaatacagagtgtacacatgctgggtagccgggccccccctcgagagtacttatagaattaattaaggcgggcggactgtccgagctcaggagttcgagaccagcctgggcaacatggcgaagccctgtctctaccaaaaaaatacaaaaaaattagccaggcacggtggcgcacggccgcagtcccagctactcaggaggatgaggcacaataatcgcttgaacccgggaggcggaggttgtaagctggagcgcactgcactccagcttgggtgacagagcaagactctgtccccccaccacccccaaaaatcaggaaagaaggtgcggctaattaaaaaaatggaaccctttcaatgttaaaatatcacaaaaaaaaaaaaaaaattgnactcccccccccccccggggggcccacccctcccctaaaaatttttgccacaaaacactgggaatgaatttgaaagtaaaaaaaaaaaaaaaagnntttttttttggggggcccccccgggggg

SEQ ID NO: 48959 - DNA, 602 bp, Homo sapiens
tgattacgccaagcgcgcaattaaccctcactaaagggaacaaaagctgggtaccgggccccccctcgagagtacttctagaattaattaaggcgggtggtgagaaatggtggaagaaggcctttaaaggttggtaatgcactggaacagaagaaaagagcacttgttacctgattcctgcctgctatcttttacactggagaatgacccctggctcattttgtggagctgttaattataggctcctgcctcttctaccacctatcccttggccacagtgcttggttcagggatggtcacatgctaggcctatgagagccaaccatgagatatttttttggcatatcctatttttattctagagccatcagctagctgttagtagtcctctttgccacctgataagaagaccctgcctaagaatgaagtcagcacagtgaaaagcagagttgaaaactaggaagagataaagagccctgctgacattatttgatctcctgcattcagacatacctgaatccatggctagatttttaattgaatgagccaataaattcctttcctttctatggtttgggttgaagtttttgtcacctttgact

SEQ ID NO: 48960 - DNA, 642 bp, Homo sapiens
tgattcgccaagcgcgcaattcaccctcactaaagggaacaaaagctgggtaccgggccccccctcgagagtacttctagaattaattaaggcggggatccagcctgggaatggatagtcacaggcttgcagatgatcagcccatctttgatcagcttctggatctgctgataggagcttggcgctggtgattttaccgatctcactgaggttcaagtagacctttttgccacagtgaaggccactggaggcgagcctcttctgaagcctgagcgtactcctggctatagacgcagccctgtaagactcttcagctttgtacaggaatgcagttgagttacttgggaacagatcccgttagtcttttctctctcatgtagactcttctttcaaaatacatccagactcacaccactttttcccacctccactgatactgccctggtctaggccatcatcactgcttgcctgaattatgacataagcctcttgactggtcttctgctctgcctttgccttcctcagggatctctcaacaacgcaactcatacaccttctatgaaaaaacttcctaccactcacccttacattacttatatgatatgtctccatacccattacaatcttcagcattccccctca

SEQ ID NO: 48961 - DNA, 351 bp, Homo sapiens
cgcgcaattttccctcactaaagggaacaaaagctgggtaccgggccccccctcgagagtacttctagaattaattaaggcgggcggatcacgagatcaggagatcgagaccatcctggctaacatggtgaaaccccatctctactaaagatacaaaaaattacccgggtgtggtggcaggcacctgtggtcccagctacttgggaggctgaggcaggagaatggtgcaaacccgggaggcagagcttgcagtgagcaaaggttgtgccactgcattccagcctgggtgacaaagtaagactccatctccaacacccactacctaaaaaatacaaaacagcggccgccacc

SEQ ID NO: 48962 - DNA, 576 bp, Homo sapiens
gattacgccaagcgcgcaattaaccctcactaaagggaacaaaagctgggtaccgggccccccctcgagagtacttctagaattaattaaggcgggaggatcacttgagctcagaaggtcaaggctacaatgagctatgattataccactgtactagagcatctgtgacagacaaagaccttgtctcttaaaaaaacaaaaacagactaaagatgtgatgaattgctgtaatctcatgataaaacatgaataaatgaggaattgcttcttacagataggcaaacaagtggtttcttgagacagaatctacagtgttgaaatgataaagtgtaaacagatagagggtctccagggattataggaattttacatttaaaggagaaaagtataatatgtaagcaatattttaattactagctcctctaaagaggaatctagtataaatactgtaccctaaactttctagctaaaagagggtataaaacctaaaaaaaaaaaaaaaaaaaaaaaaaaaaaaggcggccgccaccgcggtggagctccaattcgccctatagtgagtcgtattacgcgcgc

SEQ ID NO: 48963 - DNA, 473 bp, Homo sapiens
gcgcgcaattaaccctcactaaagggaacaaaagctgggtaccgggccccccctcgagagtacttctagaattaattaaggcgggcgtggtggtacacacctgtagtctcagctactcaggaggctgaggcacaagactctgactcaaaaaaataaaaataaaagactggtggttggcagcatctaggtggcttcaggatggggctggtcaccagaaagaccaagccaggattagaggattgggactttcacccccaccctcaacctccaggaaggggataggggctggaggttaagctaatccccagtggccaatgattccatcagtcatcctatgtaataaagcctccataacaacccaaaggactgggtcagggtagccgggcacagtggtacggtcctgtggtcaggctgcttggcaagctgaggtgggaggatcacttaagcctgggacactaaggctgcagtgagct

SEQ ID NO: 48964 - DNA, 501 bp, Homo sapiens
caaaagctgggtaccgggccccccctcgagagtacttctagaattaattaaggcggggtttcagaataaggaacacattttgagaaatgttaatttctgaatgagactttttttccccaaagtagctgtgaaaaaaagagcctcaggcataagtcagccagcttattttgtctcaatataaattaaaaattaccctcaccaccacctccaccaaaactgaaataaaaaataaaataagtaaaagtccaaaataaaaaaaaaaaaaaaaaaaaaaaaagcggccgccaccgcggtggagctccaattcgccctatagtgagtcgtattacgcgcgctcactggccgtcgttttacaacgtcgtgactgggaaaaccctggcgttacccaacttaatcgccttgcagcacatccccctttcgccagctggcgtaatagcgaagaggcccgcaccgatcgcccttcccaacagttgcgcagcctgaatggcgaatggaaattgt

SEQ ID NO: 48965 - DNA, 513 bp, Homo sapiens
  misc_feature 337, 338: n = A,T,C or G
gccagcgcgcattaccctactaaagggaacaaaagctgggtaccgggccccccctcgagagtacttctagaattaattaaggcgggtcattatgtgttgtcgtgcaggtagaggcttactagaagtgtgaaaacgtaggcttggattaaggcgacagcgatttctaggatagtcagtaggatgaaacaatttggagaagatagaagtttgaagtggaaaactggaagacagaagtacgggaaggcgaagaaaagaatagagaagatagggaaattagaagataaaaacatacttttagaagaaaaaagataaatttaaacctgaaaagtaggaagcnnaaaaaataaaaaaaaaaaaaaaaaaagcggccgccaccgcggtggagctccaattcgccctatagtgagtcgtattacgcgcgctcactggccgtcgttttacaacgtcgtgactgggaaaaccctggcgttacccaacttaatcgccttgcagcacatccccctttcgccagct

SEQ ID NO: 48966 - DNA, 494 bp, Homo sapiens
gcgcgcaattaaccctcactaaagggaacaaaagctgggtaccgggccccccctcgagagtacttctagaattaattaaagaactttattatcactattatcagtcttcattgttaagaggaaacaaaagaatccttttaacgtcttgctattatagtacgtaaaagtcgcagttattgattcaccaaggtggttctctaggacaatttaagaacaaaaaaaaaacctctcacttcttgagaaaccagatgaccttttaaggtgatctgtcattagaacattttaatgaacggaaatgaacctatcattctattttttcagcctattagactttgctggctctggttagtcatagagtttggcccaacttcctattccctaattctagctacctggtttatgtaatgatatcggggttgggagatgagatcttagccttgatgggcatatctttaaaactaatgacttggctcctaaataactacaaagttata

SEQ ID NO: 48967 - DNA, 481 bp, Homo sapiens
ccctcactaaagggaacaaaagctgggtaccgggccccccctcgagagtacttctagaattaattaaggcggggaggggggaagggggagagcacacacttcgtcacgcttttggatttctttgtgtaggctaggttcagaaagaaattatctgtttcctattaaacacccagaggattcgctctgaactcaggacgtggtcaacaattaacaaaaccaaaaaaaaaaaaaaaaaaaaaagaaaaaaaggcggccgccaccgcggtggagctccaattcgccctatagtgagtcgtattacgcgcgctcactggccgtcgttttacaacgtcgtgactgggaaaaccctggcgttacccaacttaatcgccttgcagcacatccccctttcgccagctggcgtaatagcgaagaggcccgcaccgatcgcccttcccaacagttgcgcagcctgaatggcgaatggaaattgtaagcgtta

SEQ ID NO: 48968 - DNA, 447 bp, Homo sapiens
ctggccgtcgttttacacccaggaaaaagatataaccatgattacggccggtggttttccacaaagaaaaaggaaaaacctttattgcgggccggtggtttacaattaaacacataacatatagaataatttgcgtctcattttgcctaaattggttctgtattcataaacactttccacatagaaaatagattagtattacctgtggcaccttttaagaaagggtcaaatgtttatatgcttaagatacatagcctacttttttttcgcagttgttttctttttttaaattgagttatgacaaataaaaaattgcgtattagatatagagaagggaaaaaaaaaaaaaaaaaaaaagagaagaaaaaaaaaatatttaaaagaagaaaaaaaaaaaaaaaaaaaaggaggggggagttttaaatgggtgggagaaaaaaaaaaaaa

SEQ ID NO: 48969 - DNA, 598 bp, Homo sapiens
aattaaccctcactaaagggaacaaaagctgggtaccgggccccccctcgagagtacttctagaattaattaaggcgggaggccagggatgctctgctgagcaccatctgtgtagctagcctgcgtcacccccacccaggaccaactcatacacctcctatgaaaaaacttcctaccactcaccctagcattacttatatgatatgtctccatacccattacaatctccagcattccccctcaaacctaaaaaaaaaaaaaaaaaaaaaaaaaaaaaaaaaaaaaaaaaaaaaaaaaaaggcggccgccaccgcgggggagctccaattcgccctatagggagtcgtattacgcgcgctcactggccgtcgttttacaacgtcgtgactgggaaaaccctggcgttacccaacttaatcgccttgcagcacatccccctttcgccagctggcgtaatagcgaagaggcccgcaccgatcgcccttcccaacagttgcgcagcctgaatggcgaatggaaattgtaagcgttaatattttgttaaaattcgcgttaaatttttgttaaatcagctcattttttaaccaataggccgaaa

SEQ ID NO: 48970 - DNA, 320 bp, Homo sapiens
ctaaagggaacaaaagctgggtaccgggccccccctcgagagtacttctagaattaattaaggcgggcagatcacttgcagtgagctgagatcacgccactgcactttagcctgagcgacagagtaagactgtctcaaaaaaaaaaaaaaaaaattttttccggtgtaaccggcaaaaattttttggggcgggccccgggggttaatccctgtaatcccacactttggggaggttgggggggggggttttgagggttagaaaatgaaaactttttggccaagggggggaaaaccccttttttcttccaattttaaaaaat

SEQ ID NO: 48971 - DNA, 482 bp, Homo sapiens
gcgcgcaattaaccctcactaaagggaacaaaagctgggtaccgggccccccctcgagagtacttctagaataaatcaacgcgggcatggtggcaggcgcctgtaataccatctgctcagcaggctgaggtaggagaatcgcttgaacccggaaggtggaggttggagtgagctgagatggcgccagtgcactcctgcctgggtgacagatagagactccatctaaaagaatttttaaaaataaaaaaggcaaacattaaaaagacaaaattagataacttcccccaaattacatctaaccagccaataaaagaaaaataaaagttaacaggcataaaaaatgggcaaaaaatcctactagacaattgcgggcagtatcacaaaagggacctacattagtgtaataaaataacaactgctaaggaaatatgatatattctaagattataagcaatcacatatgtgatcaaagatacgtacca

SEQ ID NO: 48972 - DNA, 485 bp, Homo sapiens
  misc_feature 441, 442, 443, 445, 446, 447, 448, 449, 450, 451, 452, 453,454: n = A,T,C or G
ctaaagggaacaaaagctgggtaccgggccccccctcgagagtacttctagaattaattaaggcgggggagaggtggggatggttaatggatacaaaaaaattacaaagaataaataagacctagtatttgctagcacaacagaatggctctagtaaaataatttaattgtacattctaaaataacaaaagagcataactggattgtttgtaacacaaaggataaatgcttgaggtgatgaatgctccatttaccctgatgtgattactacacattgcatgcctgtatcaaaatatttcatgtaacccataaatacatacatgtactatgtgcccacaaaaattaaaaattaaaagcatattaaaaaccaatctctttaaatgtttttcatggacattaaaatgtgggaccactggcctatagtttagactcaaaaacgannnannnnnnnnnnaaaaaaaaaaaaaaggggccccccccggggg

SEQ ID NO: 48973 - DNA, 561 bp, Homo sapiens
caagcgcgcaattaaccctcactaaagggaacaaaagctgggtaccgggccccccctcgagagtacttctagaattaattaagcgggtggaaatcttgtaataaatgcctaaaaatgttttaagcaatttgactgggctctggaaagcattttgtgattctgaactaaaagatggacaagtaaattttatcaattaagaacaaacacccagagactatttctcttatccagaatttatgacaaggtcctgttgttcttattatcagtgatacttataatatggtttcttgggatgagtaatggagtttactccaagaaactcaaagcatttcatacattatttctgtgataaatcaggaaatatgtgaataattattttatgaatatgtattacctaaagttcattagttcacattttatttttgcattcagaaaatctaattctttacccatcctaaccttttagcaagcaattttgtagtcaccctcaggcaagcaatagtgtagctatactctggaaacccttcacttcttgaaagaagaaaaagtcttcctgattga

SEQ ID NO: 48974 - DNA, 599 bp, Homo sapiens
atgattatgccaagcgcgcaattatccctcactaaagggaacaaaagctgggtaccgggccccccctcgagagtacttctagaattaattaaggcggggtaagatttgccgagttccttttactttttttaacctttccttatgagcatgcctgtgttgggttgacagtgagtattccacagaaagtggtaattatctctctctcttcctccattagaaaattaggtaaataatggattcctataatgggagcatcaccacttattaaaacacacatagaatgaaaaaaaaaaaaaaaaaaaaaaaaaaaaaaaaagcggccgccaccgcggtggagctccaattcgccctatagtgagtcgtattacgcgcgctcactggccgtcgttttacaacgtcgtgactgggaaaaccctggcgttacccaacttaatcgccttgcagcacatccccctttcgccagctggcgtaatagcgaagaggcccgcaccgatcgcccttcccaacagttgcgcagcctgaatggcgaatggaaattgtaagcgttaatattttgttaaaattcgcgttaaatttttgttaaatcagctcatttttta

SEQ ID NO: 48975 - DNA, 484 bp, Homo sapiens
gcgcaattaaccctcactaaagggaacaaaagctgggtaccgggccccccctcgagagtacttctagaattaattaaggggggcagggacgggtgttagaaaatggccctaattactggattctgaaacactgaatacactccccctaggaaaaggtcttaaactattatcactcttttaagccttagaaaaactagttaagactgatttctcatcttttattccttctcctcttgctaaaaagaagagattacacatttaaaaaaaaaaaataaaaaaaaattaaaaagcggccgccaccgcggtggagctccaattcgccctatagtgagtcgtattacgcgcgctcactggccgtcgttttacaacgtcgtgactgggaaaaccctggcgttacccaacttaatcgccttgcagcacatccccctttcgccagctggcgtaatagcgaaaaagcccgcaccgatcgcccttccaacagttg

SEQ ID NO: 48976 - DNA, 464 bp, Homo sapiens
gcgcaattaaccctcactaaagggaacaaaagctgggtaccgggccccccctcgagagtacttctagaattaattaaggccggtggggagatgactgtgggtcatggatcttctaatatttaaacttaactgttcctgtctgcgcgaaagataaagtgataagcagccaggtttccctaaggagatagtcttgattcgtcttttaacgtttgatcgtaccctttatatagttctttaaaataacttaaaaattattaggaaacaggataatcaataagttattatgctgatacaagtttaactgattattttaatgaattataataaaactcgtatgtgcattatgttggagggccttgatgttttagaaattatgagaagcattcatatatttgtgtgccgatacctctataatctcaacaatcagatttttattgatcgaacaagccctaactagcttttga

SEQ ID NO: 48977 - DNA, 540 bp, Homo sapiens
gcgcgcaattaaccctcactaaagggaacaaaagctgggtaccgggccccccctcgagagtacttctagaattaattaaggcgggcacctgtcaatcccatctactcgggagactgaggcaagaaaattgcttgagcccagcaggcagaggttgtagtgagccgagatcacgccactgtgctctagcctgggcgacagagaaagactccgtcttgagaaaaaaaaatgcatatatatgtatctatttcccttcctatcccttgcgtccttccttatatgaagctaacgacactctataagggatccttgcattggcattaggtagaaggtcggattctgaaactattggtgccttgtcttaaagaggtatacttaaattttagagttgtgtcaccatcaccactatttgattttacaacactgttattcccctgaaatgtgccattgtgcccatttgctggaaatgactgctccactctcagcctgtggcaaccactggtcttctgctttcctatgaatcctgggccttctatataaatg

SEQ ID NO: 48978 - DNA, 369 bp, Homo sapiens
aaagggaacaaaagctgggtaccgggccccccctcgagagtacttctagaattaattaaggcgggggatgaagtcaaagtgtacagtttttattagttttctttctgagtgtttgtttatgcagttagtgataagttatcatcagtttaaaataatgggttataagatattatttgcaagcctcgtggaaacctcaaatcaaaaactacaacagttacaaaataaataaataaataaaaggcaagaagttaaaacataccaccagagaaaatcacctttgctgaaaggaagacagaaagaaagtgaagatcacaaaacaaccagaaaacaaataacaaaatggcaggagtatgtttttacttattaaaa

SEQ ID NO: 48979 - DNA, 498 bp, Homo sapiens
  misc_feature 392, 393: n = A,T,C or G
gcgcgcaattaaccctcactaaagggaacaaaagctgggtaccgggccccccctcgagagtacttctagaattaattaaggcgggaaggaaggacaaagcggttatgtacaaactgaaaactacataattgaaattaaaacctttgctggatggactcatttgccgaatggaaatgataaaatagtgatcttaaaaggtcaagatcaagatatattatcccatttgaaacagagaggaaaaaagattgaaaaaaataacagacttgcatacctgtgggacaatatcagaaagattaacatttatgtctttggtgtcccagatcaggaggaagatactgctgcagatgaatattgaaaaaaataaaggatagaaactttaaaatttggcaaannaaaaaaacaaaaaattataaaagcggccgccaccgcggtggagctccaattcgccctatagtgagtcgtattacgcgcgctcactggccgtcgttttacaacgtc

SEQ ID NO: 48980 - DNA, 658 bp, Homo sapiens
gccaagcgcgcaattaaccctcactaaagggaacaaaagctgggtaccgggccccccctcgagagtacttctagaattaattaaggcgggatttgacataaagccataaaaatatttagtatgaaaatagaaagcctttctctgtgaaacaaacataacatgcaatttcccccaatatatttttatgaaacattttaaacaaacagaaaaattaaaagaattttacagtgaacactcacatgcccactgcctagattctaccattaacattttactatgcttgcttcgtcacatattcctccacttatttatcaataaaaccttcttattttttggatgtatttcaaaataatttctagacagccagaaactttctcctaaaaacagtacttcagaatatatatgttaactggagttcagtatttgtttagagttatgttttattttgaatatacagttaaagcactaatgaggccgggcatggcggctcacacctgtaatcccagtgctttggtaggctgaggcgggtggatcacttgaggttgggagtttgagaccagtctggccaacatggtgaaaccccgtgtctacttaaaatacaaaaagtagccgggtatggtggtgggtgtctgtaaacccagctactcaagaaggctga

SEQ ID NO: 48981 - DNA, 493 bp, Homo sapiens
gcgcgcaattaaccctcactaaagggaacaaaagctgggtaccgggccccccctcgagagtacttctagaattaattaaggcgggtcacagtttaaaaaaaaaggttgagaaacaccattagtgaatctcttaaaatatggagcccaactgtcatatactgctggcagaaacctcaactagtacaactcttttggaaaggtagctggcacaatttatcatgtatctctaaagtatttatgctctttgacttggtaattccacttctgggaatgtgtcctgaggaaattagcagaggtctgacacacgtatgactcacaaccattctaaccataagagttaaaacctataaacaacctaaatgtccaacaacaacagaatggttacacagagtaaaccactcaatagaagaataagccatttagatggtattttatttaaatggtgtttttaaagacttcgcaatgcaaaaatatttgctttaatgtctttaaa

SEQ ID NO: 48982 - DNA, 552 bp, Homo sapiens
gcgcgccgcgcacttataccttcactaaagggaacaaaagctgggtaccgggccccccctcgagagtacttctagaattaattaaggcgggggagtagagagttagtgtttcgtgggtacggaatttcaacttggaaagacgaaaaaggttttggagatggatagtggtcatggttgtccagtaacataaacacactaaatcccactgaacaatacacttaaaatggtaaatttaatgttttgtatattttaccacaaaaaaagatacaataaaacatacccaccagaacagctaaatatggaaaagagatgaataatcccaagttttggcagggttgtgaagcaactggaactctcagactgttggtgggtgtgtaaatttgtacagtcattctggaacaccgacagtatctactgaggctgagcagctgcaacccatgactcaacaatgctactcctaggtatgcactcaatgccagcgtgtacatttgttcaccataagacatgaactaaaatgttcatagctgcactattcatactacccctaaactg

SEQ ID NO: 48983 - DNA, 275 bp, Homo sapiens
taaagggaacaaaagctgggtaccgggccccccctcgagagtacttctagaattaattaaggcgggggaattgaattagaacttgattcttgaaaaaagaaattgtgatttttttagacttctttttatgcaaaagtaacgtaacttccattcaacacattttatcccaaaaaaaaaaaaaaaaaaaaaaaaaaaagcgggccccccccggggggggcccccaattcccccaaatggggggttttttccccccccccctggggcggtttttaaaa

SEQ ID NO: 48984 - DNA, 376 bp, Homo sapiens
ttaaccctcactaaagggaacaaaagctgggtaccgggccccccctcgagagtacttctagaattaattaacacactttagtgaaaaaaaaaaaaaaaaaaaaaaaaccaaaaaaaaaaaaaaaaaaaaaaaaaaaaaaaaaaaaaaaaaaaaggaaaaaaaaaaaaaaaaaaaaaaaaaaaaaaaggcggccgccaccgggggggagctccaattcgccctatagggagtcgtattacccgcgctaactggccgtggttttacaacgtcgggactggaaaaaccctggcgttacccaactaaatcgccttgcaaaaaatccccttttcgccagttggggaaatagcaaaaaggcccgcaccgatcgcctttccaa

SEQ ID NO: 48985 - DNA, 487 bp, Homo sapiens
agcgcgcaattaaccctcactaaagggaacaaaagctgggtaccgggccccccctcgagagtacttctagaattaattaaggcgggagggacttgccttgtctcagatgagactttggactgtggacttttggattaattctgaaatgagttaagactttgggggactgttgggagggcatgattggttttgaaatgtgaggacctgagatttggaggggccaggggtggaatgataatgatttggctgtgtccctattcaaatctcaactgaattatatgtcccagaattctcacgtgttgtgggagggacttacggggaggtaactgaatcataagggccggtctttcccatgctattcttgtgatagtaagtctcgggagatctgatgggtttatcaggggtttccgcctttgcttcttcctcattctttcttgctgccacattgtaagcagtgccttttgccctctgccatgattatgagacc

SEQ ID NO: 48986 - DNA, 454 bp, Homo sapiens
ctaaagggaacaaaagctgggtaccgggccccccctcgagagtacttctagaattaattaaggcggggattactaaaattatgtcctcttgatatgatgaaatagaaagtatacagaaccttccaggaaatgttccccccaaataataataaataacattaaagttaaactcgactctaattttcagtttacagaaaataaggatgatggaagaacaagctaaatgacaccatagatgctaactggaaaaacgtacctattaaaaaaggacattgctgtgacaatcaggaaaagttgaacataaagtggctatcaaatgatacaataaaattgtcgtcaattttcatagatttggaaatggagttatatttaaaataagttcttaactgtcagagatactactgaagaagtataagtgacatgataggatgtctgaaacttcttttaacatgct

SEQ ID NO: 48987 - DNA, 508 bp, Homo sapiens
agcgcgcaattaaccctcactaaagggaacaaaagctgggtaccgggccccccctcgagagtacttctagaattaattaaggcgggaggaaagggagctccctgaccccttgtgcttcccaagtgaggcaatgcctcgccctgcttcagctcgcacatggtgcgcgcacccactgacctgcgcccagtgtatggcactccctagcgagatgaacccggcacctcagatggaaatgcagaaatcacccgtcttctgcatcgctcacgctgggagctgtagaccggagttgttcctattcagccatcttggctcctcccgaaagacgggcgtctactggtggctgatctttgtcatgcaacttctaattcattagcggcttgaaataaagcagtgaaacgaagacagaagtgcctatcctcatacagattactggttaataaaatgataatgattgcttttgcaaagaaaatctgagctgaacaatgaaaatcttcagcagaaatagaaa

SEQ ID NO: 48988 - DNA, 486 bp, Homo sapiens
agcgcgcaattaaccctcactaaagggaacaaaagctgggtaccgggccccccctcgagagtacttctagaattaattaaggcggggaaaaaataagacagatatgtagagtattaagtaataacacaataaagacaatgttgaaccacaaaaaaaaaaaaagaagaaaaaaaaaaaaataaaaaaaaaaaaaaaaaaaaaaaaaggcggccgccaccgcgggggagctccaattcgccctatagagagtggaattacgcgcgctcactggccgtggttttacaacgtcgtgactgggaaaaccctggcgttacccaacttaatcgccttgaagaacatccccctttcgccagctggcgtaatagcgaaaaggcccgcaccgatcgcccttccaaacagttgcgcagcctgaatggcgaatggaaattgtaagcgttaatattttgttaaaattcgcgttaaatttttgttaaatcagctcatttt

SEQ ID NO: 48989 - DNA, 376 bp, Homo sapiens
taaagggaacgaaagctgggtaccgggccccccctcgagagtacttctagaattaattaagggggctccgaccaacaaaagagaagagtaactcatactgaaatctatgagttcaaaatattacacacatatacccttcccacttgtcacctttggagtctgtaagagtatcatctctcctgaaaaaactcttctgaaaagaatcaagagaagtatttaccctacattttctgtatcagctgcattttaaggtaacctattaactagcaagggaaatcattatctgtaacataactccatgtaataaatacctaaatactgacaaaattataatgatatccttttgaaactctgaattgaacgatggatctaggcg

SEQ ID NO: 48990 - DNA, 586 bp, Homo sapiens
  misc_feature 436, 437, 438: n = A,T,C or G
ccaagcgcgcaattaaccctcactaaagggaacaaaagctgggtaccgggccccccctcgagagtacttctagaattaattaaggcgcgatctcgactcactacatcctccgcctcctgggtttaagcagttctcctgcctcagcctcccaagtagctgagattacaggcgcccaccaccacgcctggctaattttttgtgtacttttagtagagatgaggtttcaccattttggccaggccgatcttgacgcctgacctcgtgatccacccacccgtcttggcctcccaaagtgctggaatttacagttgtgagctaccgtgcccggccagtatttacatgttttacacatttatgccgtatctttctcttaaatttttttgatatttctaggctatggtagttcatctgtgaggttttttttaattgttccaannnaaaaaaaaaaaaaaaaaaaaaaaaaagcggccgccaccgcggtggagctccaattcgccctatagtgaggtcgattacgcgcgctcactggccgtcgttttacaacgtcgtgactgggaaaaccctggcgttacccaacttaatcgcc

SEQ ID NO: 48991 - DNA, 505 bp, Homo sapiens
  misc_feature 345, 346: n = A,T,C or G
cgcaattaaccctcactaaagggaacaaaagctgggtaccgggccccccctcgagagtacttctagaattaattaaggcgggggatctctctgttagagaacttaacattaccctaggaacagcaagagcatcatcagccccaggaaaatctacctctgatatggagaccaggcttaagaaaatcccctagaacccagagaaaaagtgcaaaacaaggaaaatggccaaagagaatatcatagatacagagatcagacaatgagaatccagagtcttgttaagtgatagaaggaaaatactaacagaacacatgtaacaggaacaacattttagaggaaacagannaaaaaaaaaaaaaaaaaaaaaaaaaggcggccgccaccgcggtggagctccaattcgccctatagtgagtcgtattacgcgcgctcactggccgtcgttttacaacgtcgtgactgggaaaaccctggcgttacccaacttaatcgccttgcagcacat

SEQ ID NO: 48992 - DNA, 288 bp, Homo sapiens
gcgcgcaattaaccctcactaaagggaacaaaagctgggtaccgggccccccctcgagagtacttctagaattaattaaggcggggtttatatgcactttcttcccatctggacccgaaaaggttgggggaaaaaatgccaaatggggataaaaagattttgtgtccaccaaaaaaaaaaaaaacaaaaaaaaccccacaaaaaaaaataaaaaaaaaaaaaaaaaaggccgcccccccccccggggaactccaattccccctatagggaatcgtattaccccccccc

SEQ ID NO: 48993 - DNA, 561 bp, Homo sapiens
cgcaattaacccctcactaaagggaacaaaagctgggtaccgggccccccctcgagagtacttctagaattaattaaggcggggaattaaactgtgtagttctttttcccatctgatatttacaatctcttcactgggtcatactccacagctattttaccactttctgaaataaagttagcaaggatcaattcagaatctttttcattctaaaacttcctgcatatactggtcgcaccccacaatgagacattcttttggtttctaaaagcagaaaataagatgtgatgattaaatgaaataatggccagatcttggttcacattccacacaacagggaaccacgactctagggaatgtggctgattcccaggctgtagcaggaaagggttatgagatcagtctggattcttgttgtaccacaaattttaaaaatgctcaaagtatggattggggcatgtcaaatggacacaagagctagctcaaagaggcactgactggccagatcttggacaatattttttggtaaccagtttattgagatataattcatgtatcata

SEQ ID NO: 48994 - DNA, 405 bp, Homo sapiens
ccccccctcgagagtacttatagaattaattaaggcgggggctgtaagccaaaaagttcccgaagttcacacaggcctgggagatgttcacgttttgaaaagcaaaaagcgaagaggccttgttgagcacctgggcattttgtagagatcggagaaggactgtgcctcagtcttaggactaaactagccccagaggaaagactacccttgatttaacctaactgcttaaaaataagcctttaaaggacaaagctgatccacaagtaactggactgtctgccagagaaagtccaaaatctgtggaaaaaaaaaaaaaaagaaaaaaaagggggggcccccccccggggggggcccccaatgcccccttaggggggggtttttaccccccccattgggccgtttttt

SEQ ID NO: 48995 - DNA, 532 bp, Homo sapiens
atgattacgccaagcgcgcaattaaccctcactaaagggaacaaaagctgggtaccgggccccccctcgagagtacttctagaattaattaaggcgggaggtcaagttggtcaggggagaatgaatactggccgtatttcagtggcccccacagatacacagagtttggcaaacagaacaaagcatatgtaccaacaatgcatgtttatattctgtgccatgccaggggcaaattcatagttggcctgtttccataagtgtggggatggaaccttgaaacacaggacatctcataatgctgtaagcagggaccattgaaattgattcctagagtcttgttctacaacttctttaaaaattactgatttgacagcagtatgtattcaacatttaagactttctgtctaattttgagcatacattcttgactaaggctagcaattagagattctttctttaatttatcagatatctattaattgtctacttttgagtgggctctgtgcaaggcgctaaaaagccagttactggg

SEQ ID NO: 48996 - DNA, 401 bp, Homo sapiens
taaagggaacaaaagctgggtaccgggccccccctcgagagtacttctagaattaattaagggggatgctggacgtctggagagaccaacgcaatgctccgccatcgtcttcctacttcattgtctatcacaaggatctctgctgttacttacccccaaaggaattggtgaattccagttcttgtgtttctaaagtgaaaggcggagagatggagtgtctggtaaagggcagcaaggggttcttcacgatcgactttggcctgctgatgttcgtttttctcattagcaccacttactgctaattaattcgtcacaaactatctcattgatttattgctgtcccgtagagaatggaatacttggggaggatcatgaaaattgaaacaacataagggggggcc

SEQ ID NO: 48997 - DNA, 418 bp, Homo sapiens
ggctgggtaccgggccccccctcgagagtacttgtagaattaattaaggcggggtgatggacgcagtggttaattgctgagtacggtagtaataagccatgaggttctgaacacatagcacaagcccagttctactaatccgctcatcattagtgaagggaattatgttagcttccagaagtcagccagacttctattcttccggccctctccctaacgtctccttctcccaccccaaacctgctaattgtggttaactttttacctttattattttcaattattcttgcagacaactatggtggagggcaggagccaggaagcagttaccaaggagggagtccacatctaaacaatatggagtcagtcaggaaggaagaccttgtatgctacaaggtaaacggctaaaaagatcgat

SEQ ID NO: 48998 - DNA, 460 bp, Homo sapiens
taagggaacaaaagctgggtaccgggccccccctcgagagtacttctagaattaattaaggcgggggagccggtgccctgggatcatggtggcgttgcggggccttggtagcggcctgcagccctggtgtccgctggatcttagactcgaatgggttgacacagtgtgggaactggatttcacagagactgagcctttggatcccagcatagaagcagagatcatagagactggattggctgcattcacaaaactctatgaaagccttttaccctttgctactggagaacatggatctatggaggtaaaaatataaaaacaaactagccaaagtttggtgttagaagtagaagatgaaagtcattattataatctgaagcttagctttcttggtggacagttcacagggagtacaatattagtaacaataaagaatgtggctatattattggaatatcct

SEQ ID NO: 48999 - DNA, 248 bp, Homo sapiens
agcgcgcaattaaccctcactaaagggaacaaaagctgggtaccgggccccccctcgagagtacttctagaattaattaaggcgggatgagagagaatattatttcaggggcgtcgtattagaaaaagtgtagtttccagcacctgctttgtaatacaaggtgcgcatattacttaatgaaaaaatcatggcccactaatctgactacatgttattaacagaaacagtcctagaggaatcgtgggcat

SEQ ID NO: 49000 - DNA, 312 bp, Homo sapiens
ctaaagggaacaaaagctgggtaccgggccctccctcgagagtacttctagaattaattaaggcgggggggttgggagctgaaccatccccacctcaaggttatatctccctctcccctttcctccccgccaagagctctcccaggggcgggcaaaaataaaagttaaaagaaaagaaataataaaaaaagaaacaaaccacctctacatattatggaaagaaaatattgttgtcgattcttattcttttataattatgcgtggaagaagtagacacattaaacgatttcagttgggaacttgaaagaaaaa

SEQ ID NO: 49001 - DNA, 374 bp, Homo sapiens
gcgcgcaattaaccctcactaaagggaacaaaagctgggtaccgggccccccctcgagagtacttctagaattaattaaggcggggggggggagattcttaatctcatcacaatactgcatgtattacaatataaattttaaaataaattctagcacgactaaataaaatgccatatagagtaatattacctgaattacaggagaacaagactgaagcaagaaaaactgcttgaacccaaagggcaaaaggttgcagagagctgaaatcatgccggttaactccaaactaagtgagtgagactggggggccgccaccgggggggagctcaaattccccctttagggagcggtttaaccccccctcactggccgg

SEQ ID NO: 49002 - DNA, 395 bp, Homo sapiens
  misc_feature 63: n = A,T,C or G
agggaacaaaagctgggtaccgggccccccctcgagagtacttctagaattaattaaggcggnggtaggagttgactacaaaagggcctggagagttttaggggggtgatgcaactatatttcgattgtggtagtggttcactcctgtatatgtttgtacaaactcacataactaaaactataaagagtgaactttactatatgtaaatgtaccctaattgttttgaaaaatgaaggtaaaaagttaagaaaatacttttttaaaaaaaacctttgagatatgctgtaggtagagaaactgcactcccaacctcttttttgttttcctctttttttttccccctgagacagtctcactctgtttcaaaaaaaaaaaaaaaaaaagccgccccccc

SEQ ID NO: 49003 - DNA, 280 bp, Homo sapiens
  misc_feature 169: n = A,T,C or G
gaaaaaaaaaaatactttaatgctggctctctgggaacacgggcttagctttgtcactgctgttccccagggccagactaacacacagtaggtgctccataagtgtttcttgaaaggatgtttggagggatggatggatggatggatggatgggcaggaaattatatanacgggggcaaactgccaaaggctacagtttagttggcagcaaaaaaaatcgtttctgagaacgcatcccactgaatttagaataaaagccaaactcttagaacaaaaaaaa

SEQ ID NO: 49004 - DNA, 367 bp, Homo sapiens
  misc_feature 357: n = A,T,C or G
agggacaaaagctgggtaccgggccccccctcgagagtacttctagaattaattaaggagggtggggaattagagcctaagacacagatgcctgaacaggttataatgttagactttgatcctatgctgcggggtgcctattttaaactcaagacaatgcacctagctggcagacctagtgctcttaagcctaaatgcctagaaatgtaaactgccatatataacagatacatttccctctttcttataatactctgttgtactatggaaaatcagctgctcagcaacctttcacctttgtgtttttttcaataataaaaaatattcttgttaaaaaaaaaatacaaattaaaaaanggggggcccc

SEQ ID NO: 49005 - DNA, 450 bp, Homo sapiens
ccgggcccttcctctaaagaacaaataaaattaattaaggcgggagttatcagactgagaactaagtttgcctactgcattaaaagaaacaaatgactagattgaaatttttgtcaaagaattagaaactatgccaaaaaaaagctaaatggaagttgtagaactgaaaaatacattagttaaaattaagacatcagaggatggattgtacactgccagagagagaatcggcaagctctaaagaaactaaagtaaaataaggataatgaaaacagtagaaaatagaaaagaggtgctaagaaatatagagattacagtgagatggtcaaacatcatgtaattggagtcccagaaaacaagagaatgcagcaaaaacaagtttgaagagataatgcagagaattggaaggcatgaaaccactaattcaagaaacttccaaactctgtaagt

SEQ ID NO: 49006 - DNA, 539 bp, Homo sapiens
aattaaccctcactaaagggaacaaaagctgggtaccgggccccccctcgagagtacttctagaattaattaaggcgggggtggacagggaggcagcttgtgaatttttgttttactgtttaactttattaaaaaagaaaaaaaaaaaagagaataaaatgttttgacccttcctgaaaaaaaaaaaaaaaaaaaaaaaaaaaaaaaaaaaaaaaaaaaaaaaaaaaaaaaaaaaaaaaaaaaaagggggccgccaccgcgggggagctccaattcgccctatagggagtcgtattacccgcgctcactggccgtcgtttaacaacgtcgggactggaaaaaccctggcgttacccaactaaatagctttgaagcaaatccccttttcgccagctggggtaatagcaaaaaggcccgaaccgatcgcctttcccaacagttgcccagcctgaatggcaaatggaaattgtaagcgttaatattttgtaaaaattcgcgttaaatttttgtaaaatcagttaattttttaacaaataggc

SEQ ID NO: 49007 - DNA, 346 bp, Homo sapiens
  misc_feature 257, 258, 260, 308, 309, 330: n = A,T,C or G
actggcctttacatccctacataaaagaaacaaaagctgggtaccgggccccccctcgagagtacttctaaaattaattaaggcgggggagtgactttttaaagagacacttataatttctactactgcactactgtccattgtgggatgattaaacatggtatttaactgtgaaaaaaaaaaaaaaaaaaaaaaaaaaaaaaaaaaaaaaaaaaaaaaaaaaaaaaaaaaaaaaaaaaaaaaaaaaaaaaaaaaanncncccccccccccccccgggggacccccccccccccaaaaaaaaagaganncccccccccccccccggggcntttaaaaaaaaaaaaa

SEQ ID NO: 49008 - DNA, 384 bp, Homo sapiens
acaaaagctgggtaccgggcccccctttgagagtttttttagaattaattaaggcgggtgaggtgcttgtgaccaggagttcaacaccagcctgggcaacacagtgaagctgcctttgcacaaaccttaaaaattagctaagcatggtagcctgtgcctgtagtcccagctattcaggaggctgaaggggatggatccattgaacccaggaatttggggcggcagtgatccgtgattatgccactgcactccagctgcctgggttacaaggtgagacactgtctttaaaaaaagaaagaaataggccaggcgcggtgccttacacctgttatcccagcactttgggaggccgaggcaggtggatcacctgaggtcaggagtttg

SEQ ID NO: 49009 - DNA, 401 bp, Homo sapiens
taaataaagggaacaaaagctgggtaccgggccccccctcgagagtacttctagaattaattaaggcgggacgtccttaaggatgtactgctcccatggtacaatgcctatcgcttcttaatccagaacgttctgaggctccagaaggaggaagaaattgaatttctctacaatgagaacacgggtagagaaagccccaacattacagaccggtggatcctgtccttcatgcaatctctcattggcttctttgacactgaaatggcaggtgagtctctcttggtctggcctcccaggaataaggactattctctttgtaactgcccctttgatatttaatagtggaaatattgagagatacagaaaattaaataattgtttccttttacctctgatatagt

SEQ ID NO: 49010 - DNA, 565 bp, Homo sapiens
ctggccgtcgttttacacccgggaacaagcgatacccttgatgctggccgggcgctttactagagagaaaaaataaaattaataagcgggagatgacggtgacataaaggcaacagtttttatacttcactcaaactttatgtattaatgtaatccataaagcaaccaaaaaagctatactaagtacattcaaaaacacaatagataaaccaaacaaaattctaaaggatgtacaagtaacccactggaagctgcaaaaaatgtaaacagaaactaaaaacagagaataaatgaaaaattaaaaacgaaatggcagacttaggccctaatatacaaattatcacattaaatataaatggtctaaatacaccaactgtaagacagagattagcaaagtcgatttaaaaacatgactcaactacgtgctgtctacaagaaactcacttcaaatataccaagataggaaggttgaaagtaaaacgatggaaaaagatgtatcatgtgaacattaatcaaaggaaagcaggggtggctatattaacatcaggtaaaataaacttctgag

SEQ ID NO: 49011 - DNA, 260 bp, Homo sapiens
aacaaaagctgggtaccgggccccccctcgagagtacttctagaattaattaaggcgggtgatggtggccaaggatgctggagctgaatcagacgctgacagttcttcaggcatttctatttcacaatcgaattgaacacattggccaaataaagttgaaattttaccaccaagaaaaaaaataaaaaaaaataaaaaaaaaaaaaaaaaaacaaaaaaaaaaaaaaaaaaaattatgtgtgataaaaaaaaaaaaaaaa

SEQ ID NO: 49012 - DNA, 371 bp, Homo sapiens
  misc_feature 292: n = A,T,C or G
tacaaccctaaataaagggaacaaaagctgggtaccgggccccccctcgagagtacttctagaattaattaagggggatcttgtaagctgaacccttcaaaaaaaaagagcaataaaaataaaaataaatccttataatatatgtcaatgagatatatatgtacataagaattgttcattaaataagtttatggatcactggtagatcgtttataatcaatttctttgttttcaaatttcattaagaaacctcagtcaggaactgaaaaaaaaaaaaaaaaaaaaaaaaaangggggccccccccggggggggaccccaattcccccttttggggggtttttttcccccccccatgggggggttttttaaa

SEQ ID NO: 49013 - DNA, 283 bp, Homo sapiens
agaattaattaaggcgggcgtggtggcaggtgcctgtaatagtgtctaactggttttttaataaatccttttgttttggccaaaaaaaaaagaactgaatactactattgctaggtgtgagaaagtggtggagaaaacctataaagcagtggagatttgctacctggtctgtgttttgaaaaaagccccttagaaagttcaaagaatgtagaaaagatactcagtcttaatcctatgcaaaaaaaaaacaaaaaaaaaaaaatattggccccccccccggggg

SEQ ID NO: 49014 - DNA, 661 bp, Homo sapiens
  misc_feature 577: n = A,T,C or G
ctggccgtctgtttacacccggaaaaacaagggaacacatgctgggtgccgggccccccctcgagagtacttctagaattaattaaggcgggaggatcacttgagcctaggaagtcaaggctgcagtgagctatgattgcaccactgcactccagcctgggcaacagaacgaggccccaactcattttatataaaggacttgagcatcctggggttttggtggaggaggagagttgtggaaccaatccttgaggatattgagaattggctgtaatttgaataaaatctttagttaatagtattacgcacatgtcaatttcctggttttcatcattgtactaggattatataagatgttcttggggaaatataatttaagacaaaaattcctgccacaacaaaaaacctctccattaaagtagaagagaaaaaaacaattttagtatttgaaaacctatcagaccagaatgtgatgtgcattacaggcaatctgctaaagagattgcaaagacaacctaaccctcacccctggaaggcagaggttgcagtgagccgagattgcgctactgcactccancttgggtgacggaatgagactctgtctcaaaaaaataaaaaacactcacccctttatataaccaggcagatgcaacccatgtca

SEQ ID NO: 49015 - DNA, 338 bp, Homo sapiens
ctaaagggaacaaaagctgggtaccgggccccccctcgagagtacttctagaattaattaaggcgggatctgttgtagctttgtctttttctttttcttttcattacatcaggtatattgccctgtaaattgtggtagtggtaccaggaataaaaaattaaggaatttttaaaaaaaaaaaaaaaaaaaaaaaaaaaaaaaaaaaaaaaaaaaaaaaaaaaatttaaaaaaaaaaaaaaaaaaaaaaaaaaaggccccccccccccggggggggcccccccccccccaaaaagggggttttatacccccccccccggggggtttaaaaaaaaaaaaaa

SEQ ID NO: 49016 - DNA, 482 bp, Homo sapiens
atactgaccgtctcttcaactcctgaatacagggaacacatgctgggtgccgggccccccctcgagagtacttctagaattaattaaggcggggaattattgtagttttgtttatttatgaatactaagtttatttcagtgtataactgttaatttctttgattatgggttgctgactgatatggtttggttgtgtccccacccatatctcatcttgaattgtagctcccataattcccacatgttgtgggagggacctggtgggagataactgaatcatggtggtgggtctttcccatgctattctcatgataatgaataagtctcataagatctgatggctttataagggggagtaaatttccctgcacaagttctcttatcttgtctgctgccatgtgagacgtgcctttgaccttccaccatgattgtgaggcctccccagccacgtggaactgtgagtgcattaaacctctttcttt

SEQ ID NO: 49017 - DNA, 450 bp, Homo sapiens
  misc_feature 366, 367, 368, 369, 371, 390: n = A,T,C or G
aactaaagggaacaaatgctgggtaccgggccccccctcgagagtacttctagaattaattaaggcagggaaagctttaggtcatgatgcagacctgacagaatcttggccaacaaaatcggggagctccagagcaaagactgcctgttagaggaatcttgcatgcacggaaatgctcctgcagagctagatcactaggcactgcccaggaaaagcatggccttggcttgaaagctgaggcagatcctgcagagggaacagctggaggctgtcagctcactacaccatttacagctgaacaattgttttcttgaagggacaactgaataacacatttccatacctgccactgggagacaaagaccnnnnanaaaaaaaaaaaaaaaaaanggggcccccccccggggggggccccaattccccccttagggggggttttttccccccccc

SEQ ID NO: 49018 - DNA, 250 bp, Homo sapiens
  misc_feature 16: n = A,T,C or G
ctcttcacataaaggnaacaaaagctgggtaccgggccccccctcgagatacttctagaattaattaaggcggggtgggcttggaacacaggtgtgtacagcgtgctgtagtggaagttttgtatcatagtaatcctgtttccactttgttatactctagccaagattgactgtattagatgaaatgtgaggatcttgttcaatcggaaacccccgttacctcctctttttctttctctttctttttttt

SEQ ID NO: 49019 - DNA, 404 bp, Homo sapiens
  misc_feature 357, 378, 379: n = A,T,C or G
taactcctcactaaagggaacaaaagctgggtaccgggccccccctcgagagtacttctagaattaattaaggccgggcatagtggctcactcctgtaatcccagcactttggaggccgaggcgggtagatcacctgaggttaggagttcaagaccagcctggccaacatggtgaaaccccttctctactaaaaatgcaaaaattagctgggtgtggtggcgggcgcctgtaatcccagctactcgggaggctgaggtgggagaattgcttgaacccaggagacggaggttgcagtgagccgagatcacgcctctgcactccagcctgggcaacaagagtgagactccgtctccaanaaaaaaaacaaaaaaaaaaannggccccccccccccggggggaaccc

SEQ ID NO: 49020 - DNA, 269 bp, Homo sapiens
accctcactaaagggaacaaaagctgggtaccgggccccccctcgagagtacttctagaattaattaaggcgggaagccacaagcagactgacaacgtttctaggatcaggtgagctgtgtccagaaaaccaacgagaaggagtggaaggaggaatgaacgtttcgttctcgttaataaaggcattatcctaattaaaaaaaaaaaaaaaaaaaaaataaaaatgaacggggcccccccccggggggaccccccaacccccctttgaga

SEQ ID NO: 49021 - DNA, 472 bp, Homo sapiens
  misc_feature 383: n = A,T,C or G
tacattcgggaataaggggaacacatgctgggtgccgggccccccctcgagagtacttctagaattaattaagtcggggaacatctgaagaaataatggctaaaaagttcccaagcatgatgaaatacgtgaatctacacattccaaaatctcattgaattcatagtataaactcaaagaactctacaccaagacaaattacaataaaactttcaaaagctaaagagacaactttgaagaaagttatggagaaaagactactatttgcaatgcatctacactgacattaacaactcactaaaaactagagtccagaatataatttctcactaaaaactacggagtccagaatatgataggacaatatatttaaagtgtagaangaaaaaaaaaaaaaaaaaaaaaaaaaaaaacccggcccccccccgggggggacccaaattccccccttaggggggggttatcccccccc

SEQ ID NO: 49022 - DNA, 333 bp, Homo sapiens
ctggccgtcgttttacatccgggaacaaggggaacacatgctgggggggggccctccctcgagagaacttgtagaattaattaaggcgggtcagaaaaaatattcatttggtaccccagaagaaaaccaaacaacgaaacagaactaatatttaaaactgtaatccaagaaagcattccagaaacaaaaaaaaaaaaaaaaaaaaaaaaaaaggggggcccccccgggggggggccccaatttcccctaaagggggggtttttacccccccccttgggggggttttttaaaaaggggaaagggaatatcccccctcccctgggggttgttttt

SEQ ID NO: 49023 - DNA, 501 bp, Homo sapiens
  misc_feature 432: n = A,T,C or G
accctcactaaagggaacaaaagctgggtaccgggccccccctcgagagtacttctagaattaattaaggcgggctgacatttcaagtcattacagaagtaaaaaacgaaaacaaggcccagagctgtggctcatgcctgtaatcccagcactttgggaggccgaggcgggcagatcacgaggtcaggagatcgagaccatcctggctaacacggtgaaaccccgtctctactaaaaatacaaaaaaaaaaaaaaaaaatttccccggccgggggggaagccccttttttccccacttcctgggggggttaatccagaaaaagggtgtaaccccggggggcaaattttgcagggaccaaaaatgggccccttgccttttccccggaccaaaaaaccgaattttttttttaaaaaaaaaaaaaaaaaaaaaancggggcccccccccccgggggggaccccaaacccccttaagggggggttttatccccccccccttgggg

SEQ ID NO: 49024 - DNA, 496 bp, Homo sapiens
ataaagggaacaaaagctgggtaccgggccccccctcgagagtacttctagaattaattaaggcgggcatagaagagactgacttttttattagacttttcgttatttgcttttaactagagaaaattaagtttttaaaaattaccaaaaaagcaatgtaattacctgtcaaacttttgactcaccctggcagtaattgttccgtgcttttctcctctgttgtttatcatccgaatcccagccgactgaaacatctccttcatttgagtaggggtagcagtggtggcaaaatctatatcctgaggctttactccatttaataaatccctcactgctcctcctgctattcttaattcgtgattctctttgacaaataattctgagatgagagaaaataagatttttattcccaagttctttatttcaatgtgtttattttaaccacaaaagtacaaggcttttccatctaattggaacagcagagaatcatttaact

SEQ ID NO: 49025 - DNA, 324 bp, Homo sapiens
aacaaagctgggtaccgggccccccctcgagagtacttctagaattaattaaggcgggcagatcgagaagacaggagatcaagaccatcctggctaacaccgtgaaaccagtctctactaaaaatacaaaatattaaccaggtgtggtggcatgcacctgcagtcccagctgattgggaggctgacgcatgagaatcacttgaacccatgaggtggaggttgcagtgagctgagatcctgccactgtacttcaacctgcgcaacagtgagactctgccccaactgtatcttgatgttaaaaaaagtattcgcgcccccccgggg

SEQ ID NO: 49026 - DNA, 587 bp, Homo sapiens
gactggccgtcgttttacaaccctgaataaggggaacacatgctgggtgccgggccccccctcgagagtacttctagaattaattaaggcgggagccttggggcagtcccagggcgccgtgaagaggtgacggagggctggctatgggcggccggccggggtgggggacgagcgccgggttccgtccaagccctgttgaagcaggaaacccctacgactctcggcgaagaacgtctctcatcagagactcttaatagcagagttgaccaagcagaagaattggcgagcttgacgacaggctatttgaaatatccactcagagataataaaagaaaaagcatgaagcatgcctacaagatctagaaaatagcctcaaaagggcaaatctaagagttattggccagtagagagagagatagcagagtagaaagtttattcaaagggataatcacagagaacttcccaaacctagagaaagacatcaatattcaagaacaagaaagttatataaaaacaagcagatttaaaccttattaaataagactacctcaagacatttagtaatcaaacttcaaaaggttgagaat

SEQ ID NO: 49027 - DNA, 194 bp, Homo sapiens
gcgcaattaaccctcactaaagggaacaaaagctgggtaccgggccccccctcgagagtacttctagaattaattaaggcggggagaggaggctctcaataaataatcgtgtgaccttaaaaagaaaaaaagaaaaaaaagccggaaaaactctatgctaaatgtgtctaaaaaaaaacaaaaactttctacta

SEQ ID NO: 49028 - DNA, 324 bp, Homo sapiens
aacaaagctgggtaccgggccccccctcgagagtacttctagaattaattaaggcgggagcagcgtgtgggggcccccgccacccccagagctagtctcagaccaggaagggagctgggcaccagagaagcgacatcacgtcggcacctgtaactcccgggatccgtaattgggccccgctccacccagcctgcgccactgtgttcttctcttaagaggcttccagagaaaacggcacaccaatcaataaagaactgagcagaaaccaaaaaaaaaaaaaaaaataaaaaaaaataaatagaaatcgaaaaaataaaaaaaaaa

SEQ ID NO: 49029 - DNA, 582 bp, Homo sapiens
  misc_feature 575: n = A,T,C or G
aaagggaacaaaagctgggtaccgggccccccctcgagagtacttctagaattaattaaggcgggagaatcgctttaacctgggaggtggaggttgcagtgtgccgagatcacatcattgcactccagcctgggcaacaagagtgaaattccatcttgaaaaaaaaaaaaaggggttgaaattaaaaaattaaaaaaccccaaatttttggggggaaatctaaattaatttttctcccaaaaatggatggggaaaataaacacctttttaaaaaaaaattaaaaattttgaatccccctataaatcatttaaattaaatggacttttataaaacattccccaaaaaaatggaaaaatccttttttttttaaaaggcccttaaaattttccccaaaatgggaccctgccaaaattttaaaaaaaagtctaattaaatttaaaaatccaaattttccccagattttgttttgggaccccattaaaaaccattcccttaaaaatttttaaaaaaacccccaaatatttgtccttttaacaacccttttcaaaaagggattccccggggaaaaaaaaanaaaaaaa

SEQ ID NO: 49030 - DNA, 507 bp, Homo sapiens
aaagggaacaaaagctgggtaccgggccccccctcgagagtacttctagaattaattaaggcggggtagtttatttatatacattttcttgaatgtagatttatctaatttttaaaaccttaaagttaatagtgaattcttcatttttaccagagttcattttaaacatgtttgtttaggttttactgcaatcacagcaaccaaccccatttggcttataaagactcggttacagcttgatgcaaggaaccgcggggaaaggcgaatgggtgcttttgaatgtgttcgtaaagtgtatcagacagatggactaaaaggattttataggggcatgtctgcttcatatgctggtatatcagagactgttatccattttgttatttatgaaagtataaaacaaaaactactggaatataagactgcttctacaatggaaaatgatgaagagtctgtgaaagaagcatcagattttgtgggaatgatgctagctgctgccacctcaaaaac

SEQ ID NO: 49031 - DNA, 341 bp, Homo sapiens
  misc_feature 313, 314, 316, 317: n = A,T,C or G
caagcgcgcaattaaccctcactaaagggaacaaaagctgggtaccgggccccccctcgagagtacttctagaattaattaaggcgggtggatcatctgaggttaggagttcgagaccagcctggtcaacatggaaaaaccttgtctctaacaaaaatacaaaaattagctgggaatggtggtaggtgccggtagttccagctactggagtggctgaagcaaaagaatcacttgaatcagggaggcagaggttgcagtgagcagagatcacatcactgcactccagactgggcagcaaagcaacactgtcccnnannaaaaaaaaaaaaaaaaaaaaaaaa

SEQ ID NO: 49032 - DNA, 220 bp, Homo sapiens
acaaaagctgggtaccgggccccccctcgagagtacttctagaattaattaaggcggggatgctttcttgttctttattcatttgctcacatacttattatttaatttggccttttttttttccatcagaaatttcctgagtcctttcagtgtcaccaagtgctgggattacaaagatagaggagttcgtgctttcagggcattcacacagtgataagga

SEQ ID NO: 49033 - DNA, 484 bp, Homo sapiens
  misc_feature 400, 401, 402: n = A,T,C or G
accctactaaagggaacaaaagctgggtaccgggccccccctcgagagtacttctagaattaattaaggcgggccatcaaaggaacgtaattccctagtaacacactccaatgggaaaaaaacttaatgaattgccagaaaaggaattcaaaattatgatcgtatggaaactcagagagatacaagaaaacgtgtagacaatcaatagagttggggaaacagttcacaatataaacaggaaattgaataaaagagaagtaagaatcaaatcctgcagctgaagaattcaatgaatgaaaaaacatacagtggagaatttcagcagcaaacttgatcatatgtaagaaagaatctctcaacttgaagataggttatttgaaattaacaagtcagagattannnaaaaaaaaaaaaaaaaaaaaaggggggccccccccgggggggacccccatttccccctatagggggggtttttccccccccc

SEQ ID NO: 49034 - DNA, 389 bp, Homo sapiens
ctaaagggaacaaaagctgggtaccgggccccccctcgagagtacttctagaattaattaaggcgggcagatcacgaggtcaggagatcaagaccaatcctggctaacacggtgaaaccccgtctctactaaaaatacaaaaaaaaaaaaatttacctgggcgtggggccggccccctggggtcccggttgttttggaggctaaggcaggaaaatggtgtgacccagggaggcggattttgcagtgacccaaaattgccccactgcactccagtttgggctacaaagggaaactccttctcgaaaaaaaaaaaaaaaaaaaaaaaaaagggggccccccccccgggggggacccccactcccccctatggggggttttttacccccccc

SEQ ID NO: 49035 - DNA, 382 bp, Homo sapiens
aaagggaacaaaagctgggtaccgggccccccctcgagagtacttctagaattaattaacttagtgacaccaccaagtgttttgatataactaaatttgtggtaataagactgtctgcacctgtattcattgtggaacttcctctttcattggaaactttcttactcaagaatgacggcagtattgttttcttatatgtgcaatgaagtggaatgataaacagtatgcctttaatttaaaaaaaaaaaaaaaaaaaaaaaaaaaaaaaaaaaaaaaaaaaaaaccaaaaaaaaaaaaaaacggcgcccccccccgggggggagaccccttcccccctatgaccggggttttttccccccccccccggggtttttttaaaaaa

SEQ ID NO: 49036 - DNA, 347 bp, Homo sapiens
  misc_feature 334, 338: n = A,T,C or G
acaaaagctgggtaccgggccccccctcgagatacttctagaattaattaaggcgggcacatgctcacagagacctacaaagctgttatctctcatgtctgatggtaccttcaagcactgcacaagcatgaagaaaagaaaacagcaaagttgtaatctttctggctaagtaaacccaactgcaagaactagtagatctatatttgatgtgagcaggcctttgagaaaatctgtgtcaaatagctagctcacatgaagctaataaagcagagatttttattgctaaacacgacaaaaggatgatattttacaaataattctgaaaactcaccanacanacaagtaaa

SEQ ID NO: 49037 - DNA, 458 bp, Homo sapiens
  misc_feature 384: n = A,T,C or G
taaagggaacaaaagctgggtaccgggccccccctcgagagtacttctagaattaattaaataaaagcactgaatgaaatgatacaaaaaacattttatcacttcaagtggtaaaagcttttctaactaagagtttttaagatttctggacttcatattgacatatttaactatataataatcagaaactctatatgcaaaaaaaaaaatcaaaaagtaaattaaacccttaaaaaaatcatttgcaacccatatcattacataagcacaaatagcttcctgaaaaaaaatttttaaaaaaaaatatatctgcttgtgggaactagggtgttaaaaaaaaaaaaaagaaaattttgggaaaaaaaaaaaaaaaaaaaaaaaaanggggccccccccccgggggggcccccccaccccccctttgggggggtttttacccccccccctgggggggtttt

SEQ ID NO: 49038 - DNA, 530 bp, Homo sapiens
ctggccgtcgttttacatccggaaacacagtgttaccacattgctgctgggcgggccctttcctctagagaacttatagaattaattaaggcggggcgggaggattgctctagcccaagaagaagaagtttctgattgccttggattggttactgttctctatcctgggcaacaatattcgcagttcatatatttttctattgaagaatggagcaggcagactgatgctggggaaggacccatctgggaaaaataggcttcaatgagtacaatgaagaatctatgatgaagctgtcagtttaggaagatgaagacgatgagagtccgaacactaatagctcagatagctaattaggaaatttcgggtcggccactggtagcattctctttgacctttaaaaataatttttattcccactccatgcgtaattgattttacacctcattactggtggataatttatgtgatgtggattgctggtgtccagcatgacccctaaacaggtcaaaaaaatgatggaatgttttaa

SEQ ID NO: 49039 - DNA, 396 bp, Homo sapiens
  misc_feature 317: n = A,T,C or G
aagcgcgcaattaaccctcactaaagggaacaaaagctgggtaccgggccccccctcgagagtacttctagaattaattaaggcgggcagatcatctgaggtcgggagttcaagaccagcctgaccaacctggagaaaccccatctctactaaaaatacaaaattagccgggtgtggtggcacatgactgcaatcccagctactcaggaggctgaggcaggagaatcacttgaacccgggaggcagaggttgcagtgagccaagatcacaccattgcactccagactgggcaacaagggtaaaattccatctaaaanaaaaaaaaaaaaaaaaaaaaaggcggccgccaccgcggtggagctccaattcgccctatagtgagtcgtattacgcgcg

SEQ ID NO: 49040 - DNA, 424 bp, Homo sapiens
aaataaagggaacaaaagctgggtaccgggccccccctcgagagtacttctagaattaattaaggattaacactggctgctttcctcaacctgaatgtcaaatgacttctgtgtgtgtgtgtgtgagcgtgtgagtgtgtgtacgcacacacccacgcatatgtatctgtgtgtatgtctatctcatggggcataacattctgactaaaaagaaagagggatgattgaaacaagatagaaaatgaaaatatcgctaagagttacacatagaaaatgaaaaactagttcagacaatataagcacaatactctactatagaacaagattgagccaccaaaaaatacactttatactaaattggccctcaacagatggacaaatacctttttttaaaaaccccataaaaaatcaactggtagagctg

SEQ ID NO: 49041 - DNA, 287 bp, Homo sapiens
agggaacacagctgggtgccgggccccccctcgagagtacttctagaattaattaaggcggggacttctcacatctgaccataatcaagactgaaaatgggtttcttctgccagctcacttgctgtgctaccagggctatacctgctttctaaaaatagcttcccacctatttccaaggtttccagttgttttacctacaggtatctgtgccctgaaataactcacacatgaaaccatctgaacccagagccttttctagtgatagttaccataaaataatcccaac

SEQ ID NO: 49042 - DNA, 298 bp, Homo sapiens
  misc_feature 279: n = A,T,C or G
acaaaagctgggtaccgggccccccctcgagagtacttctagaattaattaaggcggggaaaaaaagagtgtgtgcacaggaactcccctttataaaaccatcagatctcatgagacttattcactatcctgagaagcacaggaaagacccacccccatgaggcaattatctccaaccaggtcatgcccatgacacatggggattatgggtgctacaattcaagattagatttgggtggggacacagccaaatcatatcaaaagctgtcaaggtctcanaccttagtttgattctaaa

SEQ ID NO: 49043 - DNA, 450 bp, Homo sapiens
gctgggtaccgggccccccctcgagagtacttctagaattaattaaggcgggagcactaaaaccaaaatacatgtattatttatagaaaatattttctgttttaatcttttctttttaaacaaggactcatacttaaaaaaatgtttagcaaaaaaaaaaaaaaaggtgaaaactttttattttttttaagggctggcaatccccgggtaattttttaatttgccgttttttgaaaccactttgtttattaaaaacccaaaaaaaaaatttccctcccctttaaaaagccccctatttttgttttaagggtttacttttacccccaatttgaaaaaatttgggggtaaacagggaaaaaaaaattttttttttggcataaaaattttttgcccgcctttaaatttggttgaaaaaatttaaaaaatcccaattttttttaaaactttctt

SEQ ID NO: 49044 - DNA, 449 bp, Homo sapiens
agggaacaaaagctgggtaccgggccccccctcgagagtacttctagaattaattaaggcgggtagatcacttgaggccaggaattcaagaccaacctagccaatatggctaaactctgtctctactaaaaatacaaaaattagccaggcttggtggcacacgcctgtgatcccagctactcaaaaggctgaggcaggagaatcgcttgaacccaggcggcggaggttgcggtaagccaagatcatgccattgcactccagcctgggcaacagagcaaggttgtatctcaaaaaacacaacaaaaaaagttcaatttaattttaaaataaatcgtaaaactgccacaaagcttgtaggacaatgtataaattttttaaattataaataattttataattataaaatttcataacagcataaaattataaatcataaaagcatacataag

SEQ ID NO: 49045 - DNA, 320 bp, Homo sapiens
aaaactgggtaccgggccccccctcgaaaatacttctagaattaattaaggcggggacacgggggggtgggtgaaggttcgttaccttttctagtgcgttctatcatagttaacggttgcacacttttttaaaaaaagtaaatggatttgccacaattaaatgtgataacatttatgacagaatataaaatattaacatattttaagccaagttttaggtgtattttttgaatcttggttataaacccatttttaaagggcgatgtatccagcgttgtgaaggcaacagattgtacccatatttatatttttataaaata

SEQ ID NO: 49046 - DNA, 459 bp, Homo sapiens
  misc_feature 348: n = A,T,C or G
agggaacaaaagctgggtaccgggccccccctcgagagtacttctagaattaattaaggcggggtaagatttgccgagttccttttactttttttaacctttccttatgagcatgcctgtgttgggttgacagtgagggtaataatgaatgttgctgatagggataaatcttgaggctgagggcgggtggtacagatgtgtatgggaaaccccaacccctatatattgtaaatagatgggctgggctaaacattgttgccgtttcatacttctaccaactcagcttttacacaataaagctctactgtctctggaaaaaaaaaaaaaaaaaaaaaaaaaaaaattttnaaaaaaaaaaaaaaaaaaccccccaaaaaaaaaaaaaaaaaaaaaaaaaaagcccccccccccggggggacccccccccccccctataggggggaatttcccccccccccc

SEQ ID NO: 49047 - DNA, 592 bp, Homo sapiens
aaagggaacaaaagctgggtaccgggccccccctcgagagtacttctagaattaattaaggcgggggtttttcacacttagtatttggcagatatttcttgaaaatgaagtgagcttgtcacttttaggaaaacaactgacagtatttattaccagtgataaaatttgggtgaaaattagaatttttaaaaagttgacagctggagtttgacagcttcctagtacttaaaagactttccttatgatatcagtggttaaggactgcaatattttaaaatgttgtttaatgaaatatgttatttggaagatgggcataactcagtaaatctaggctttgcaaatgaccaatgcatgatgttgcaaaatcaagcaaaggcaaaagatcctttgaaaattccagatatagcaatggattttaacagtaaaaaaagtggattgatgtggtttcagattccaaaatgttaactgtcctttaagaaactactatttggcctagcgtggtggctcactcctgtaatcccaacactttgggaggccagggtggaaagattgtgtgagcccaggagttggagttgagcctggtcagcatagt

SEQ ID NO: 49048 - DNA, 412 bp, Homo sapiens
cttttccccacagaaaaaagttataaccttaatggggggcccgcggttttacactcagaaaaagggactttccttgctttgtgcattttaatagttttgaaccttatcctactagtgaaacaggatcatcatttcactattatattaaagaacaaaaaactcattttcttccaaacaatgagattactttaaagagagcatttttggtagcacagcacgatagacacagagactagactgcagagggctgacaagtcaatttcagaaaacaaaaaagacactgattgtagacacttttttttttgaaatggagtctcgctctgtcgcccaagctaaagtgcagtattaggatctcagctcactgcaaactccgcctcgcaggttaagacaattctaacggggggaaaaaaaa

SEQ ID NO: 49049 - DNA, 481 bp, Homo sapiens
  misc_feature 173: n = A,T,C or G
acaaaagctgggtaccgggccccccctcgagagtacttctagaattaattaaggcggggcgcagtggctcatgctctgttgtacccaacactttgggagaaccgctgtggctggatcacactggagtcaggatttagacaccagcctggctaacatggtgaaaccccatcgcntcctcataaaaactgcgggaaaaacctatgcgctcccctccacaagaggtcaatcggtttcactctagtaatgtacaaaggaaatatccaagtgttcttcaagcctgtactatacaaagagtgccacacgattgaaatccatgacattgtattcatgcataaaaaagaatgaattcatgtcctttgcagggacatggatgcagctagaaaccatcattctgagcaaactatcacaaggacagaaaaccaaacaccacatgttctcactcataggtgggaattgaataatgagaacacctggacacagg

SEQ ID NO: 49050 - DNA, 426 bp, Homo sapiens
  misc_feature 323: n = A,T,C or G
ctaagggacaaagctgggtaccgggccccccctcgagagtacttctagaattaattaaggcgggggaccgggtatccgaggccaaccgaggctccgcggcgctgccgtatcgttccgcctgggcgggattctgacttaaaggcgttcattcataatcccacaaatggtagcttcgccccattggctcactcacccaccacattaacaacataaaaccctcattcacacgaaaaaacacccttatgttcatacacctatcccccattctcctcctatacctgaaccccgacataattaccgggttttcctcttaactgggcaanaaaaaaaaaaaaaaaaaaaaaaaaggtgggcgcccccgggggggggccccccccgggggggaaaacaaaatccccttttagggggatttttcccccccccccc

SEQ ID NO: 49051 - DNA, 559 bp, Homo sapiens
actggccgtcgttttacaacccggaataaagggaacacaatgctgggtgccgggccccccctcgagagtacttctagaattaattaaggcgggagaagccccggctggtttgaagcaactacttcaaatttgcaatgcaatatgaaaatcacctcggagctggtaaaaagaggcctaacccctgtctttagatttacagtccaatgcttcactcaaccattttacctcacccccaaagaaaaaaaaaaaaagaaacccaactgaaaaactaaccaacataaaggagggccccccccgggggggtacactggctcatgtctatgaatgccattacttccccccgctgagaccaggtttgcaaatcatttgagttcaggaatttgagattagcctggctaaaatggtgaaactccacctctactaaaactacaaaaattagccaggtgtggtggtgtgtgcctgtaatcccagctactagagaatcacttgaacctgagaggcggaggttgcagtgagctgaaattgcaccactgctctcccacctgggtgacagagcaaa

SEQ ID NO: 49052 - DNA, 310 bp, Homo sapiens
actggccgtcgttttacatcacggacacagaaaaaaccataatgctgggcgggcctttactcgagagaacaaaatagaatataattaaggcgggggcggaggatgggaactggctagtgagcactgaaatataaattctgaatcctcaaaaaaaaaaaaaaaaaaaaaaaaaaaaaaaaaaaaaaaaaaaaaaaaaaaaaaaaaaaaaaaaaaaaaaaaaaaaaaaaaaaaaaaaaaaaaaaaaaaaaaaaggccccccccccggggagaaaaaaaattctttaaaaaaaaaagatataccccccccccc

SEQ ID NO: 49053 - DNA, 218 bp, Homo sapiens
  misc_feature 198, 199, 200, 201, 202, 203, 204, 205, 206, 207, 208, 209: n = A,T,C or G
tgggtaccgggccccccctcgagatacttctagaattaattaaaaaaagcctgtatgcctttttttggtcggattgtaaataaatataccattgtcctacaaaaaaaaaaaaaaaaaaaaaaaaaaaaaaaaaaaaaaaaaaaaaaaaaaaaaaaaaaaaaaaaaaaaaaaaaaaaaaaaaaaaaaaaaaaaaaaaannnnnnnnnnnnccccccccc

SEQ ID NO: 49054 - DNA, 504 bp, Homo sapiens
gaaacaaaagctgggtaccgggccccccctcgagagtacttctagaattaattaaggcggggcttaatgttgcacagcagcagcagaggcacaaacaccagccgggccagcaccaggcttggcagccagcggctgtccttcccaggctgtgggcaccaggcagggcctcagcccaggccgccaccccagggcacagccaggcccccaaggatccatctggggcccctcaggatctgaactgaaacctcaaagcctggttctccttagggggttactcttgaaaggggcatggtggagccttctggagtgctggaaatattctacatctcgatctgggcaggtatgtgtatatacatatattcattaagttgtacacttaagacttgtacttaactctgcgttgataccgtacatgcttttaaggcggggatactgattcagaaatcctgtagcgtgtaataaaagaagaggaaatggcatggaatcactgcctcctgtgatttg

SEQ ID NO: 49055 - DNA, 452 bp, Homo sapiens
caagcgcgcaattaaccctcactaaagggaacaaaagctgggtaccgggccccccctcgagagtacttctagaattaattaaggctggagggtttaaaactcttttttggggggttaagtggaggtaggggtcggagcctaacactcacagatacgtggggcctggaggaggcagcagtggggttggtcatggaatgagcacgtttgagtgtagggtcatcatggagcatcctgggggtagtgtcatgggactgttctggagaaatcaagactgttacaaatttggccgggcacagtggctcaagcctgtaatcccagcactttgggcggccaatgtgggcggatcacctgaggtcaggagttcgcgaccagcctggacaacatgatgaaaccccatctctactaaagatacgaaaattagccgggcgtggtggcaggagcctgtaatccca

SEQ ID NO: 49056 - DNA, 481 bp, Homo sapiens
cctaactaaagggaacaaaagctgggtaccgggccccccctcgagagtacttctagaattaattaatttttgtttggatggattatagtttttctggttctttgtttggaatggtgattttttgttgaaaatcaaacacttgaatctgataatgtggtagctctggaaatcacattctctctctttttcagggtttgctgttttgttttttttttcccttaaccttttaaaaattgttgaaggctgtctttgtcccacggatcaccctgaggtgtcaactaagggtcttttcaagttccttttaaccctgcccaatcactttctaattttccccatatatccatttccttttaaatgtttaagtctttaatgcctggctttcaaaagggacataatttaaaaaaaaaaaaaaaaaaagggcccccccccccggggggccccccaattcccccttagggggtttttttcccccccccctttg

SEQ ID NO: 49057 - DNA, 493 bp, Homo sapiens
aaagggaacaaaagctgggtaccgggccccccctcgagagtacttctagaattaattaaggcggggatgcaactttccctttcctcttaaattttggtgttatccttttgttctaccatcctttcctacagcattaccatttcattatgcagattaaactttgggaagcaaagccttaaggaataagttaccagaatttatatttaagaagagagtgattggtagtgaaagaaaaaaggagtgatcacaacatgggggaggagtagggaagaaggagaaggaagagattgatctgtttagggagagaagttgtgccacatagaagacagatacagagagtgacaataaagaaaaatgattaaaaaatttttaaggtatctttgaggaaaaaaaaaaaaaaaaaaaaaaaaaaaagaggggccccccccggggggggaccccaattccccttttgggggggttttttacccccccctttgggggggtttttaaa

SEQ ID NO: 49058 - DNA, 280 bp, Homo sapiens
gcccccccccctgaagagttcttaaaataattaaatgcggcgggagttaggcgaccaaaccagagagagccccaatccctgcagttttgtggcttcaagtgtgggtggacagtcctaatggggatctccagctccttccctgtgggctgccacaaacagctacctccaaaagggtcactgtttggagtggttgcgtgccaaaactgctccagtcaaagcgaactactatacgttattgatccaataacttgaccaacggaacaagttaccctagggataa

SEQ ID NO: 49059 - DNA, 309 bp, Homo sapiens
aacaaagctgggtaccgggccccccctcgaagtacttctagaattaattaaggcgggggattaatatctaggatatacaaggaaactcaaacatcttaacagccaaataaataaataaataaataaataaataactcgataaaaaaaaaaaaaaaaaaaaaaaacggggggccgccacggggggggacacaaacacccccttaggaagggatttttaccgccccccctggggccaaatattaaaagggtaatgtgttcagaagtcgctgtccttactacttttgcggaagtatggaagtcacaactaca

SEQ ID NO: 49060 - DNA, 459 bp, Homo sapiens
accctgaataaagggaacaaaagctgggtaccgggccccccctcgagagtacttctagaattaattaaggcgggggggggttaaaaaaaaaagaaactatacataagatcaggggccctcccccggaggaactccatatggccattgaatatgccatattaccacgccttccagggcctgccattaaaaagatacccctgggcatacactatcttggggaaaaggtcaaaaagacctcctgactccatgttacagtatacaaaacaagttggactcttttggacctataaaccctactctgaatacaacatacagcttccttactacatttttccaaagaaattagtgaggtgtttccagatcaattcattcatttgggaagagatgaagtgggaatttaaatgttgggaatcagatccaaaaatttcaagatttcatgaggcaaaaaggctttggcac

SEQ ID NO: 49061 - DNA, 361 bp, Homo sapiens
  misc_feature 255: n = A,T,C or G
accctcactaaagggaacaaaagctgggtaccgggccccccctcgagagtacttctagaattaattaaggcggggggacgtgccgcgccaggaagggcctcctcccgctgcgtcgtcgggagcgccctcgccaaatcgacctcgtacgactcttagcggtggatcactcggctcgtgcgtcgatgaaaaaaaaaaggattttgaaaaaagggaaaggggggggaaaggaaaagaaggaaaaggaacaaatttttnttatttataaaaaagggggaaaaaaaaaaaattaaaaataattggggcggcccccccccggggggggccccccccccccccaaaaggggggtttttaccccccccc

SEQ ID NO: 49062 - DNA, 496 bp, Homo sapiens
  misc_feature 334, 341: n = A,T,C or G
ccccccctcgagagtacttctagaattaattagcgcgggtgtgggccactgtggtggcagtggaggtggggtgtttcggaggctgcgtgccaatctacaataaaaaggcttgcattctcacattgtcgtgacgataacttcctatcctttactctaaagaaccctaggaacccgaaaacggtgccgcctcccggcgtttcatgccaaccacttcaaccgtttacctatatggcaaaccggggcccaagaaaaaatgacctgaacctgacccgaaggacttgaaaccctaccctatattttttccagatcaggcttggatttttattttttgcanaggatgnccataaggccagtatgatttataaatgcaatctccccttgatttaaacacacagatacacacacacacacacacacacacacaaaccttctccctttgatgttacagatttaatacagtttatttttaaagatagatccttttatgtgtgagaaa

SEQ ID NO: 49063 - DNA, 176 bp, Homo sapiens
acaaaagctgggtaccgggccccccctcgagagtacttctagaattaattaaggctggagaattgaatccaggaaggcggagattgcattgagccaatattgcaccactgaactacagcctggatacactaacactttgacactatacaccaggggctcttggaggaaaaaccccc

SEQ ID NO: 49064 - DNA, 328 bp, Homo sapiens
  misc_feature 74: n = A,T,C or G
actccttactaagggaacaaaactgggtaccgggccccccctcgagagtacttctagaattaattaaggcgggngaaaaagacagaactagacaaagatcagaatcaaaacacaaatcgcctaagaaaaagactggaaaggattctgtaagtatttagaattgtttcatgcctgtattttcaaaatgcaaaaatgtattctgtggttaaaccatgatggtgttgaaagaataggcttttttccaggtgtgctaccattgaagaaaacagtgaaaattcagttaagtacatttcacacaatatcatagtttttggtcatgcatgatcct

SEQ ID NO: 49065 - DNA, 491 bp, Homo sapiens
cgcaattaaccctcactaaagggaacaaaagctgggtaccgggccccccctcgagagtacttctagaattaattaaggcgggggatgaaattgtttttattcttttagaattttttttatcaggaaaacagaggtaaagtgctatcaattactatttaagagttctattttgaaaagtgagaattaaggatttttcttttctttttaaaaaaaacttttttaaaaatcaaaaaaaaaaaaaaaaaaaaaaaaaaaaaagcggccgccaccgcggtggagctccaattcgccctatagtgagtcgtattacgcgcgctcactggccgtcgttttacaacgtcgtgactgggaaaaccctggcgttacccaacttaatcgccttgcagcacatccccctttcgccagctggcgtaatagcgaagaggcccgcaccgatcgcccttcccaacagttgcgcagcctgaatggcgaatggaaattgtaagcgttaa

SEQ ID NO: 49066 - DNA, 633 bp, Homo sapiens
tactggccgtcgttttacatcaggaaacaggtatgacctttgctgctggccgggcctttcctcgagagaactagtagaattaattaattctggggtgggtggaaaaaaatagcttcaaatatgtttgtaaaggatttaagaacagccattacaaaaataagaagcatatatataactactagaacacttaaagaaaaaagaaatagcacaaataatcccaaggaaaggaaaaaaggaaagaatgatcaacagaaaatataacatatgatgtcataaataatttgaaacatatcaatatttgcaataaatatttgcatggaaacctaacaaatacatctagaaggagaacctaagacttcagactaactctcatcttatggcaaagccaataacgatctacagaatttacttgatatagtacttaataagctttatttaataggtatatatctatatcttaattattaatacatatttatttatataaaataaatatcaacttttgtgctgtccagaggctttgtatttttctcaaacatcaaaatattggtcatacattattaggtcacaaaaattcagtaacactgcaaaagaagttacgtatatgtcataacctctggtcataatgcataa

SEQ ID NO: 49067 - DNA, 197 bp, Homo sapiens
ctggccgtcgttttcctcactaaagggaacaaaagctgggtaccgggccccccctcgagagtacttctagaattaattaaggcggggacctgctcgggtgtgagggcacagggagggacgccatgaaggaacttgggattttcaatggagtaaatcaaacataaagtctatacttgggaaaatgcttaaatgaaaaa

SEQ ID NO: 49068 - DNA, 534 bp, Homo sapiens
  misc_feature 449, 450, 451, 452, 474, 475: n = A,T,C or G
tcactaaagggaacaaaagctgggtaccgggccccccctcgagagtacttctagaattaattaaggcgggggagagagagagagagagaagaagaaaagaaagagaaaaagagaagtgtaaggggtgggaggagaaaaaaactcttaactggaaaagtcagaaaaaaagcagaatccagagttgctacagtatatcatctaaaatatccagtgtttaacaaaaatagaagacatgtaaagaaataagaaagtgtgaccaatacttgggaggaaaaagcagtaaatagaaacttttgagtaggcttatattttggttttattagatagacttcagagcagccattataaatatattcaaagattgaaggaaactatgcacatatagtgtaaatgtaaatggctaaaagaaaatataatgaaaatgacaaatcaggaatctcagtaaattnnnnaaaaaaaaaaaaaaaaaaaaanncggcgcccccccccgggggggacccccattcccccttttagggggttttttcccccccc

SEQ ID NO: 49069 - DNA, 232 bp, Homo sapiens
accctcactaaagggaacaaaagctgggtaccgggccccccctcgagagtacttctagaattaattaaggcgggctcgcaggtcgtaggttagtacaaagaatttactgatgtcagcataggtttgaaaaaaaaaaaaaaaaaaaaaaaaaaaaggggcccccccccggggggggcccccaattccccctaatggggagttttttccccccccccctgggcccttttttaaa

SEQ ID NO: 49070 - DNA, 405 bp, Homo sapiens
accctcactaaagggaacaaaagctgggtaccgggccccccctcgagagtacttctagaattaattaaagcgggcgcctgtaatccaagctactggggaggctgaggcaggagaattgcttaaatccaggaggcggaggttgcagtgagccaagattgtgccactgcactccagcctgggtgacagagtaagactccgtctcaaataaataaattaaaaaaaaaaaaaaaaaaaaaaaaaaaagggggcccccccccggggggaacccccattccccccttgggggaggaaattaaccccccccttggggcctgtttttaaaaaatttacataatggaaaaaagaaactgtctattttgaatggctgaagctaaagcaacgttagtttctcttaccctgcttttt

SEQ ID NO: 49071 - DNA, 409 bp, Homo sapiens
gccgtcgttttacacccgagactaagagtgaacctatgctgggtgccgggccccccctcgagagtaacttatagaattaattaaggcgggatccgaataccgtctatacattgtacattagtacatctattaagtttggtaaagcctctttttcatagtattggcatgaagagttactaggattggggctggacatggtggctcatgcccaaaatcccagcactttgcgaggcacaggcggatggatcacctgatgtcaggagttcaagaccagcctggccaacacggtgaaaccccatgtctactaaaagaaaaaaaaaaaaaacattataggggggggccccccgggggggacctcaaattccccttaaaaggaggaaattaaccccccctttttggccgttttttt

SEQ ID NO: 49072 - DNA, 381 bp, Homo sapiens
taactaaagggaacaaaagctgggtaccgggccccccctcgagagtacttctagaattaattaaggcggggccttttgattattgctatatctccaaatactaacacagggtctggcattcaaaaatatttgttgaatagtgtatttaccttagtttataaaaaaaattaaagtctatttagctacatctcacacaccacaaatttagggggcagaccagttttcagttacattatacattaggaatccctctgaaacaacatattttcccaaaaaaaaaaaaaaaaaaaaaaaaaaaaggggcccccccccggggggggcccccatttccccctaagggggggttttttccccccccttttggggggttttttaaaaaaa

SEQ ID NO: 49073 - DNA, 314 bp, Homo sapiens
ctcttcacataaaggaaacaaaagctgggtaccgggccccccctcgagatacttctagaattaattaaggcgggatcctccgtatgctgaacgctggccccctgggcccccttatttctttctctaaaaaaaaaaaaaaaaaaaaaaaaaaaattccggtgttaattgccgaaaaaaaaaaaaaaagaaagaaagcaccagtctgaaccagaaatggctgcagcccagcccctgctatgaacactcaactattactgagcttggcctacacacagacacaactccagggcaagagcaactggacagtgggcctg

SEQ ID NO: 49074 - DNA, 298 bp, Homo sapiens
cctactaacgggaacaaaagctgggtaccgggccccccctcgagagtacttatagaattaattaaggcggggcgggtaaagggtattttaacttatgggtagttcctgctgtgagtggttacagctgatcctcgggaagaacacagctaaagctgccttttgtctgatattttatttttttgaagtttaaataaagtttactaattttgaccaggagatgggaactccaaatgtgcgcattgacaccaagctcaacaaaactgtctgggccaaaggaataaggaatgtgccataccca

SEQ ID NO: 49075 - DNA, 378 bp, Homo sapiens
ctaagggtaacaaagctgggtgccgggccccccctcgagagtacttctagaattaattaaggcgggggggagggcaaaacaaattgtttttagtaatccatttaaaaaacacagcagtaatataaacatcatttatgtttgaacattttcatgttgatccatataaacatgaaaatgaaataccagaccacgtctataatttagtgctacgacagtatagaaagaacattaagctgagagttaggaaacaatgcgaaaagcacttttatagcttttttttgttgtttttttgtgttttttttgagaaggatctggcctctgtatccaacctgggcaacagagcaagactccatcttaaaaaaaaaaaaaaaaaatttt

SEQ ID NO: 49076 - DNA, 385 bp, Homo sapiens
atgaagggaacaaaagctgggtaccgggccccccctcaagagtacttctagaattaattgaggcgggcatagtagcaggtgcctgtaatcccaggtactcgggaggctgagacagagaactgcttgaaaccaggaggcaaaggttgtggtgagccaagatcacaccactgcactccagtctaggtgacagagcgagactccgtcttatttaaaaaaaaaaaaaaaaacatgccttttatttgttaaggggaaaaggaataactttttaaatttaaggttttgtataaaattgctataaacgggattccctgccctttcagggttaatgcggtacccatttgggcaggcttttttttttaaaaaaaaaagggggtctccctggggg

SEQ ID NO: 49077 - DNA, 440 bp, Homo sapiens
aaagggaacaaaagctgggtaccgggccccccctcgagagtacttctagaattaattaaggcggggaaagactgcttgagctcacgagttcgagactagcctggcaatatactgacattctgtctctacaaaaactgaaaaaattagcaagtgcggtggcatgtgcctgtagtcccgactacccaggaggctgaagtgggagaatcgcttgagcccaggaggtgaagttgtagtgagctgaaactgtgccactgcactccagcctgggcgacagtgagaccctgtctcaaaacaaacaacaacaaaactcagaatggctgaataaatagcagcttagtgtaaaagccaaaatttatgaccttcagttcctcctaagatctgcaccctgatctcttctgaccatagctcgatcatgggctctaaccacaatggactctgct

SEQ ID NO: 49078 - DNA, 315 bp, Homo sapiens
acaaaagctgggtaccgggccccccctcgagagtacttctagaattaattaaggcaggcagatcacttgaggccacgtattcacgaccaacctggccaacattgagaaaccccgtctgtactgaaaataccaaattcaaccacacttggtggtacttgcctgtagtaccagctactcaagaggctaaggcacaagatttaattgaacccatgaggcggaggttgcagtgagctgataaggcgccactgtgactccatgctgggtgacaaatcaagactctgtctcaagacatacaacagatctataaaatgaatg

SEQ ID NO: 49079 - DNA, 405 bp, Homo sapiens
  misc_feature 49, 68, 100: n = A,T,C or G
aaagggaacaaaagctgggtaccgggccccccctcgagagtacttctanagtgggtaagcaggccggntcacaagggcaaaaatttgttactattctggntaacacggtgaaaccccgactctactaaaactacaaaaaaaaattagctgggcgtggtggcgggcgcctgtagtcccagctactcaggaggctgaggcaggagaaaagtgtgaacccaggaggcggagcttgcagtgagccgagatcacaccactgcactccatccagcctgggtgacagggtgagactctgtctcaaaaaaaaaaaaaggggaaccccaaaatttcctgcaaaatttttttcccagggttttggaaaaaaaaattgcccttgttttttaaggtggggaacctaaaaccaaaaag

SEQ ID NO: 49080 - DNA, 354 bp, Homo sapiens
aaccctcactaaagggaacaaaagctgggtaccgggccccccctcgagagtacttctagaattaattaaagcggggaaaggccacagcacactggcgctccagcaaagccaaatcatgtctcctctggccactgcggtcctctccttggtacatgtcatcccccagaggagtatccaaagctattccactatgcactcatcaaccctggcttgtcagccttggggaaggtcactttattcataaaaatgcctctttgagtttctaaaaaaaaaaaaaaaaaaaaaaaaaaaagggggcccccccccggggggggcccccattcccccctttagggggttttttacccccccccc

SEQ ID NO: 49081 - DNA, 262 bp, Homo sapiens
aattaattaaggcgggcgcaacatgacgtctggacatcgaaagcatactagtctctctcggagaaaccccttctgtactaatattacacacactactacacacacacacttttgttccaggtgtggtggcgggtgcctgtaatcccagctactcgggaggctgaagcaagagaatggcgtgaacccggtgggcggagcttgcagatcacaccactgcactccagcctgggtgacagagcgagactccgtctcaaaaaaaaaa

SEQ ID NO: 49082 - DNA, 596 bp, Homo sapiens
aaagggaacaaaagctgggtaccgggccccccctcgagagtacttctagaattaattaaggcgggaggggcatccaccttattaaggcttgagtggtggttttcccctcacaatgtaaaacaagccacctggatattaggactgggtggagcccacctcagtgcctcaaagcccctgtagccacactgcctctctagattcctcctctccgggcagggcatctctgaaagaaaggcagcagccccagtcaggggcttatagataaaactcgcatctccatgggacagagccccagggggaaggggcggttgtgggtgcagctacagcagacttaaacattcctgcttgctggctctgaagagaggagtggatctccaagcacagtgcttgacctctggtaagggacagactgcctcctcaagtgggtccctgaccccatacctccagatggggagaaacctcacagcagggttcaacagacaccttatacaggagagcttcagctggcatctggtgggtgcccctctgggacgaagattccataagaaggaacaggcagcaatctttgctgttctgcaacctccaatggtgatacc

SEQ ID NO: 49083 - DNA, 370 bp, Homo sapiens
  misc_feature 291: n = A,T,C or G
acaaaagctgggtaccgggccccccctcgagatacttctagaattaattaaggcgggggggacagagtctaactatttcgctaacactggcgtgaaaagaggctaaacccggtcactgaagtcgcagtgagctgagatcaagcgattgtactgcttcctgctacaggagcgatgctatttctggtgcacaccagcactccaggctaatttttgtgtttttagtagagatggggtttcaccatgttgttcaggctggtcttgaactcctgacctcgttcctgccttagcctnctaaagtgccgggattacaggcgtgaaccaccgcacctggccagtactacattcattttattgaatgattttgaatgac

SEQ ID NO: 49084 - DNA, 343 bp, Homo sapiens
actggccgtcgttttacatcagggagcaagtatgaccacttattgctggccggcggtttccattagagaaaaagtaaaaacattaatgccggacggtggcttgaaccctggaagcagaagatgcaatgatccgagatcacaccactacactccagcctaggcaacagagcaagactctgtctcaaaaaaaacaaaacaaaaaggaggcacaaaaccccaggcttcaagtctctgcagcctgctccacatttgggcacagaaggactcaaacaggcactgtgtgggcacgaggttggacaggggtggtcagacctcaggctttaatgaataaagacactactcc

SEQ ID NO: 49085 - DNA, 504 bp, Homo sapiens
gccaagcgcgcaattaaccctcactaaagggaacaaaagctgggtaccgggccccccctcgagagtacttctagaattaattaaggcgggaagacatttctccgagttctcccgaagggagccaggcgcgagcgcgacctggggaaagtccagagtgccagccacggggaagggcgggcagtgcagagtggaagagaagccagcaagttagacacagcccctctctgggaggccgcctctaaaatggaactagcggacgtaccttggtttgtacatttgaccatggacacacgtaaagattttgaaaaaaaatctttgaaaaaaaatttttttaacgcaattcctaaacttttaactaacgcaattttgtggacctctgaatcttaattcaaatgaactggagaacaactataaagcaatttcgataatatgatcagtgacattttatattgcagaattgtaaattttgttgtcattatactgtaattttatttctttaaaaga

SEQ ID NO: 49086 - DNA, 491 bp, Homo sapiens
tacataaagggaacaaaagctgggtaccgggccccccctcgagagtacttctagaattaattaaggcgggcagatcacctgaggtcaggagttcgagaccagcctgaccgacatggagacaccccgtctctactaaaaatacaaaattagccaggtgtggtggtacatgcctgtaatctcagctactcgggaagctgaggcaggagaatctcttgaacccgggagacggaggttacggtgagccaagattgtgccattgcactccagcctgggcaacaagagtgaaactcttgtctcaaaaaaaaaaaaaaaatttttggggggaaaaaaggaaaaaaagccttttcaaaatttttaaacttaaaaagggggaaattttggggggaattctttgaaaaacaaatccctttttttggattaaaaaaaacattccccgggcacgggggttaatgcctgaaatcccaccctttgggaaggttgaggcggccaaa

SEQ ID NO: 49087 - DNA, 479 bp, Homo sapiens
cgggccccccctcgagagtacttctagaattaattaaggcgggtgggtgaagaaagtacagagatgttagtcaaagaacacaaaatttcagttaagtgaaataagttcaagagatctattatacaacatggtggctacagctaataacaatacattgtatagagttgacctactgcaaccacaaattcaaacaggcatggatcaaaaatatttttaaaaaagtaagatttaacaaaaaaaaactaaaaaaaaaaaaaaagcggccgccaccgcggtggagctccaattcgccctatagtgagtcgtattacgcgcgctcactggccgtcgttttacaacgtcgtgactgggaaaaccctggcgttacccaacttaatcgccttgcagcacattcgcctttcgccagctggcgtaatagcgaagaggcccgcaccgatcgcccttcccaacaattgcgcagcctgaatggctaatggaaa

SEQ ID NO: 49088 - DNA, 320 bp, Homo sapiens
  misc_feature 285, 286, 287: n = A,T,C or G
tgggtaccgggccccccctcgagagtacttctagaattaattaaggcgggtgggggcagaaatcaaatcagcccaaggatatagttaggattaattacttaatagagaaatcctaactatatcacacaaagggatacaactataaatgtaataaaatttatgtctagaagttaaaaaaaaaaaaaaaaaaaaaaaaaaaaaaaaaaaaaaaaaaaaaaaaaaaaaaaaaaaaaaaaaaaaaaaaaaaaaaaaaaacccccccccaaaaaaaaaaaaaaaaaaaannnggggggccccccccccggggggggccccccccc

SEQ ID NO: 49089 - DNA, 278 bp, Homo sapiens
taagggaacaaagctgggtaccgggccccccctcgagagtacttctagaattaattaaggcgggtgtctataataccagctgtttgggaagctgaggcaggagaatcgcttgaatctgggggacggaggttgcagtgagccaagatcgtgccactgcactccagcctgggcgacagagtgagactccatcgaaaaaaaaaaaaaaaaaaaaaaaaaaaagggggcccccccccggggggacccccaatcccccctttagggaaaatttttcccccccc

SEQ ID NO: 49090 - DNA, 483 bp, Homo sapiens
caagcgcgcaattaaccctcactaaagggaacaaaagctgggtaccgggccccccctcgagagtacttctagaattaattaaggcgggcagatcacctgaggtcgggagttcgagaccagcctgaccaacacagagaaacctcgtctctactaaaaatacaaaattagccaggcgtgatggtgcatgcctgtaatcccagctactgggaaaggctgaggcaggagaatcgcttgaacccgggaggcagaggttgtagtgagccaagatcacaccattgcactccagcctggacaacaagagcaaaagtctgtctcaaaaaaaaaaaaaaaaaaggataagaaaaaaaaaaggttgaaacaaacagaaaaagcggccgccaccgcggtggagctccaattcgccctatagtgagtcgtattacgcgcgctcactggccgtcgttttacaacgtcgtgactgggaaaaccctggcgttacccaac

SEQ ID NO: 49091 - DNA, 420 bp, Homo sapiens
ctggccgtcgttttacaccccgaaacaagtgtggaccattgctgggtgccgggccctccctcgagagtacttatagaattaattaaggcgggggctggcaggtaggagttctaaaactttttggtcttgggcccctgttatactcttaaattagtaaggaccccaaggagatttgtttatgggcttattatcaatatttatcatttctaatacaattagaaattaaaattgaataatcaaaaatgttaatttattaatttctttaaaaataatagtaaacccattacagattaaaataaataaaatttgtaccgaaaaaaaaaaaaaaaaaaaaaaaaaaaaaggggcccccccccgggggggcccccaattcccccttttggggggttttttacccccccctttggggcggttttttaa

SEQ ID NO: 49092 - DNA, 475 bp, Homo sapiens
aaataaagggaacaaaagctgggtaccgggccccccctcgagagtacttctagaattaattaaggcgggtcaagattcattaggcaaactttggtttaagtaaacatatgttcaaaatcagattaacagatacaggtttcatagagaacaaaggtgatcatttgaagggcatgctgtaatttcacacaattttccagttcaaaaatggagaatacttcgcctaaaatactgttaagtgggttaattgatacaagtttctgtggtggaaaatttatgcaggttttcacgaatcctttttttttttttaaaacggattttcctttttttccccccctgaattgcattaccggaatttgggttaattggaacctccccctcccaatttaaagaaattttcttgcctaaccccccttaaaaactgggaactacgggggccccccacattcccaataaaatttttgttttttgaaaaaaa

SEQ ID NO: 49093 - DNA, 420 bp, Homo sapiens
aatataaccctcactaaagggaacaaaagctgggtaccgggccccccctcgagagtacttctagaattaattaaggcggggtgattatctcctagggttatgtccagccggggtgtttaagacagcacaaactgccaagttctgttttttttaaccgactgacatcactgtgggatatctcttcctgcaccactgcaaagttttagttttttaagaaaatactcatgcacatatatatatatatatgtttcccacccctttttttaaaatacagtctttattgggtctgcacctctcattcttgatcttgtcagccatgctgtttttgctgatagtcgggttagagttggctcttcgcgaggtttgttaataaaagtttgttaaaggttcgccaccgcggtggaactccaattcgcccta

SEQ ID NO: 49094 - DNA, 345 bp, Homo sapiens
cctcactaaagggaacaaaagctgggtaccgggccccccctcgagagtacttctagaattaattaagagcgggctaatttaactaggcactcacagatgacttttctttaataaagtcccttttcctatctctactaaaaaaacaaaaaaaaaaaacagacataaaaacaaagggcccgccccccgggggactccccaagctcccgcaggagaatgacttgtaccccccgcacacggaggttgttttgaactgaaatcatgccactgcactccagcctgggcaacagagcaagacaccgaaaaaaaaaaaaaaaaaataaaaaaaaaggcggccccccccggggg

SEQ ID NO: 49095 - DNA, 477 bp, Homo sapiens
accctcactaaagggaacaaaagctgggtaccgggccccccctcgagagtacttctagaattaattaaagcggggtgggggtggtcagacacttttgttagaaccatgtgaatggcattgttttttctgtattgcaaattagtatttctaccactctccccaggcctacacgcccagacacacacatacccaaccaaaaaaatctcccaagctcctctcttaggtatgtttccttattattcagtttttctgggaacaactgattgcataagaatatagaaccacctggaaggtgttaaatagaatctctaagaaattaggaataatttggatttgattagaatgaaagttttaaaaatcaagaatgccagtgagcgtttgtcatataaaactatctatagatactattggtactgatcctgggttgatttaataatcttagaaatgatttagagacaaagacatatttgaaaataa

SEQ ID NO: 49096 - DNA, 195 bp, Homo sapiens
tacttgctagaattaattaaggcgggggaggggcggcctgccctcatctcatttctattaaacgcctttgccagctaaaaaaaaaaaaaaaaaaaaaaaaaaaaaagggggcccccccccgggggggaccccaaatcccccttaaagggaggtttttacccccccccccggggccggtttttaaaaaaaaaaaaa

SEQ ID NO: 49097 - DNA, 493 bp, Homo sapiens
accctcactaaagggaacaaaagctgggtaccgggccccccctcgagagtacttctagaattaattaaggcgggcttgacgacaggctatttgaaatatccactcagagataataaaagaaaaagcatgaagcatgcctacaagatctagaaaatagcctcaaaagggcaaatctaagagttattggccagtagagagagagatagcagagtagaaagtttattcaaagggataatcacagagaacttcccaaacctagagaaagacatcaatattcaagaacaagaaagttatataaaaacaagcagatttaaaccttattaaataagactacctcaagacatttagtaatcaaacttcaaaagggttgagaatacagaaaggatcctaaaagaagcaagagaataaaaacaaataacatgccaagaaccttctatatgactggcagcaaatttctcagtgaaaaccttaagggccaggagagagtggcatg

SEQ ID NO: 49098 - DNA, 569 bp, Homo sapiens
aacgcgcaattaaccctcactaaagggaacaaaagctgggtaccgggccccccctcgagagtacttctagaattaattaagggggggcgttcttcgtaaagataaggatcagttcatcaagaagatacaacagtcctaaatgtgtaacttttataaaacagtatacccaacaattgcagaatattgttttaagtagacatgaactgctcaacaatatagaccaaatgctggaccataaaataagtcacactaaattccaaaaggaataaaatcatacatggtatattgttaaaccacataaaaaaaaaaaaaaaaaaaaaaaaagcggccgccaccgcgggggagctccaattcgccctatagtgagtcgtattacgcgcgctcactggccgtcgttttacaacgtcgtgactgggaaaaccctggcgttacccaacttaatcgccttgcagcacatccccctttcgccagctggcgtaatagcgaaaaggcccgcaccgatcgcccttcccaacaattgcgcagcctgaatggcgaatggaaattgtaagccttaatattttgttaaa

SEQ ID NO: 49099 - DNA, 310 bp, Homo sapiens
aacaaagctgggtaccgggccccccctcgagagtacttctagaattaattaaggcggggtgagatgggccgagttccctgaactttatctttacccttaactgaaatgtatacatagcttctggtgatatcttttcatgatttaatatctcttaaaatggcgatggatgtgacaccttatagaagagagctatgaactgtgaataactcttaaagaatatgtcattttaaacaataaaaatatgcgctgctcaactgcttgatctggtcctcttattgatataccttctgagacagaaagttctgttttt

SEQ ID NO: 49100 - DNA, 479 bp, Homo sapiens
accctcactaaagggaacaaaagctgggtaccgggccccccctcgagagtacttctagaattaattaaggcgggtccatagacacatttatttttacttttatatttacatttaatttaatttttttttttcaaagacagggtctcactctgctgtcctggctggagtgcagtggtgcaatcatggcttactcaacataccttaaaaatttttttattctgaaataaaagcgggatgcttttaaaaaaagaaaaaagaagagaacaaaaaagtcctccagtaaatttaaaatatggtagtcaaggccgggcacggtggctcacacctgtaatcccaatactttgggaggccgaggcaggtggatcatgaggtcaggagatcgagaccatcctggctaacatggtgaaaccctgtctctactaaaaaatacaaaaaaattaaccgggcatggtggcgggcacctgtaatcccaactactc

SEQ ID NO: 49101 - DNA, 318 bp, Homo sapiens
gctgggtaccgggccccccctcgagagtacttctagaattaattaaggcgggagaatcagagatcttgaagatacggctgttgaaattatgcagttggaggaggagcagaaagaaaaatgaatgaagaaaagtgaatagagcctaagggacctgtagaacatcatctgatgtaccaatattcacattaaggggaagcccaaagaagagcagagaacaaaaaaaaaaaaaaaaaaaaaaaaggggggccccccccggggggggccccaaattcccctttagggggggtttttaccccccccttttggggggttttttaa

SEQ ID NO: 49102 - DNA, 344 bp, Homo sapiens
aaagggaacaaaagctgggtaccgggccccccctcgagagtacttctagaatgaattaaggcggggttctagagagaaaggtgatcgttttagattattggtctctctgtaatctaaaatccactgtgcctggcctataacactatttcttaaaacaaaacagagagaccaaagaacaagctttacacaaccaacatgactgagaagacatcagtatctctcactagtggtgtgaattaagtgcgtttacttgcataactaagaataaatgatggttataatggcaccagtataggatatcttggctatgtgctttaacaatatacaggttgaccatgaaatct

SEQ ID NO: 49103 - DNA, 351 bp, Homo sapiens
tcgttttacaccccggaaaaagggtaacactgcttggtgcccggccctctcctcgaggtacttctagaattaattaaggcggggtgcggtggttcatacctgtaatctcagcactttgggaggttgaggcaggaggatcatttgggcccaggagttcgagatcagcctgggcaacataggggggcccatctctataaaaaatacaaaaattagccaggcgtgggtcacagctacttgggaggctaaggtgggaggatcgattgagtccaggagtatgaggctgcagtgagctgtgattgcaccactgcactccagtctcggcgacagagcgagaccctgcctctgataaat

SEQ ID NO: 49104 - DNA, 446 bp, Homo sapiens
taacaaaagctgggtaccgggccccccctcgagagtacttctagaattaattaaggcgggcgcctgtggtcccagctactaggcaggttgaggcagaagtattgcttgaacctaggaggcagagtttgcagtgagccaagattgcaccattgcactccagcctgggcaacaagagcgaaactccatctcaaaaaaaaaaaaaaaaaaaaaaacccttttaaatttttgaaaaaattccccccaaaatttttttggggcgggaatttttttttaaaaaagggtgaaaaaaaaaatttaaaacctttttttttttttttttttaaaaaaaaggaggggggaaacttttttttaaaacaaaaccccaaaaaaaaaaaaaaaaaaaaaggggggcccccccccgggggggagctcaacatcccgcttaaaaaaggattttaccccccccc

SEQ ID NO: 49105 - DNA, 359 bp, Homo sapiens
attaattaaggcgggtgtggtggcacgcacctgtaatcccagctactcgggaggctgagacaggagaattgcttgaacccaggagatggaggttgcagagagctgagatcacaccactgcactctactagcctgggtgacagagcaagactcccatctcaatctcaaaaaaaaaatagtcatgaattatgcaattattctaattgtatctgcacttacaaagtcagaggtctcctttttcagtccctctgatagtcccacctaagtgctgtcctgctcctgtgaacactttcctgtgcaaccaaacaggaggtgccaggttcccaaaactctctaacattacagatctctgtccatctt

SEQ ID NO: 49106 - DNA, 406 bp, Homo sapiens
taagggaacaaaagctgggtaccgggccccccctcgagagtacttctagaattaattaaggcgggctgcatgcctgagatatcgagaccatcctggctctcggcacagtgagcgcgaaactctactctatattcaaaataacaattgctcgcgcgctgtgggctggcgctccgcctgtctgctacttcggtaggctgagagcgggaaaattggcttaactcccgaaggcggaacttgcagtgggctgagtatcacaccactgtactccagcctgggcgacttgggatacctgtgtctcaacaacaacaaaaagttttaatagtgagtgatttctgatgacttttctggtgaaatttaaaaaatattaaaaaggtgaaataaaaaaattttgcccccccctttgggg

SEQ ID NO: 49107 - DNA, 493 bp, Homo sapiens
caattaaccctcactaaagggaacaaaagctgggtaccgggccccccctcgagagtacttctagaattaattaaacacataataaaaaaagatcaatgtttaaaattgtcagtctttgagactgcaaaggaatttactagttttcttactataagtatcaaattagatcttaagtgaatcttatttatttttatttattataaggaacaattttctgggttttttgttgttgctttgtgatggggtcttgtctatagcccaggctggagagcagtgatgcaatcatagctcactgcagtctcaacctccatggtctggcaatcctcctccctgcagcattccaagtaactgaagtgggaggacagcctgagcaagactacacggagctcagactgtgccactgaactgcagcctgtgcaacagagcatgactcataaaaacaaaaaaaaaaaaaaagcggccgccaccgcggaggagctccaattctccctat

SEQ ID NO: 49108 - DNA, 282 bp, Homo sapiens
aaataaagggaacaaaagctgggtaccgggccccccctcgagagtacttctagaattaattaaggtgggagtgtaaattagttcaaccattggggaagacagtgtggcgattcctaagacctaaagacagaaatactgtttgacccagcaatcccattagtgggtatatacccaaaaaaaaaaaaaaaaaaaaaaaaaaaggggggccccccccggggggggcccccaattccccctaaaggggagtttttaagcccccccttggggcgggtttttaaaaaa

SEQ ID NO: 49109 - DNA, 381 bp, Homo sapiens
  misc_feature 348, 353, 354, 355, 356, 357, 358, 359, 360: n = A,T,C or G
taactaaagggaacaaaagctgggtaccgggccccccctcgagagtacttctagaattaattaaggcggggtgggggaggagtataattaggagaaatacctaaagttaatgacaagttgatgggtgcggcaagccaacatggcacatgtatacctatgtaacaaacctgcgcgttgtgcacatgtaccgtagaacttaaagtacaattaaaaaaaaggtaaaaaaatgtgaacaggaacaatttgttttaaaaaggcttgaatggctttgattggaagatattttaatgtgataaattaaaggaggaaaaattacatgagtctataagttgccaaaaaaaaaaaaanaaaannnnnnnncacccccccccccccggggga

SEQ ID NO: 49110 - DNA, 609 bp, Homo sapiens
ctaaagggaacaaaagctgggtaccgggccccccctcgagagtacttctagaattaattaagacgagctgcctaacaccagcttatagagctcacccgtctatgtagcccactgaagtaaaggaactaattgacatcatcgttccctcaacggaaattgacgtttattccctcataagtgttggctattaccgcgcacttatccatacaatctatactttttctaggcactaaaagggggaaaaggcttaatagccaaaataattatcaaaagaccctaaagctggggtcctgtacaccatgaaaggattactttcattctcatgtaagggcatgcttttataaaaaacaaacatgggctaggcgcagtgactcacgcctgtaatcccagcaccttgggaggctgaggcgggcagatcacgaggtcaggagattgagatcatcctggctaacatggtgaaaccctgtctctactaaaaatacaaaaagttagccaggcgtggtggcaggtgcctgtagtcccaactactcggaaggctgatgcaagagaatggcgtgaacccggtaggtggagcttgcattgagcagagatcgcgccactgcactccag

SEQ ID NO: 49111 - DNA, 277 bp, Homo sapiens
  misc_feature 244: n = A,T,C or G
gggccccccctcgagagtacttctagaattaattaaggcggggtagcagcttcccctggaacagccaggcacatccggggcaggggcctgtgccagtgtggcagccagcacgcttagcagtaggcccagtcgaagttcccagggcagaggctgtcccctccctctttcccttgaggtcagctccatcctgaagaggggaacagggataaggggaggtgaacggtctcgggcccgagccctcctncttgctttggggttccgtgtcaactctgcctgt

SEQ ID NO: 49112 - DNA, 382 bp, Homo sapiens
ctaaagggaacaaaagctgggtaccgggccccccctcgagagtacttctagaattaattaagggggcagggatttagggtcagtgagacggacctcttaatcacttattttgtacacatcaaagcagtgacattgtgtttctttaaaaatactaggggccagcccgggcacagtggcatgcctgtaatcccagcactttgggaggccaaggtgggcagttcacctaagatcaggagttcaagaccagcctgccaacatggtgaaacctcatctctactaaaaaaaaaaaaaaaaaaaaaaaaaaaccgggcccccccccgggggggacccccaatcccccttaaagggagggaattaaccccccctcctgggccgggttttt

SEQ ID NO: 49113 - DNA, 485 bp, Homo sapiens
taactcctcactaaagggaacaaaagctgggtaccgggccccccctcgagagtacttctagaattaattaaggcggggatgagaaatggacagggaggaccacatagggcataggaaagacagtagagaaggaaattcattccaaatagaggtaagaagatagcagtaatgtgacacatgattttataaaccattccttaatttaagatcttggcagtcttgagaattccattgaagggaatattgtcttctaaaacctacgtcacagccaaaaagccctgcatgttaaacttaccttcagaatgacttttatggtgtgttcagaagtatacaggaagtattcagccaagactagggcctaactcagcactaggcacagaggtactgaattataagtttttggtgcctattaacatatacgtgttttgaaacccggcagttaagtttctattccaccaaaacgcccagtattttttgtgattatg

SEQ ID NO: 49114 - DNA, 429 bp, Homo sapiens
aaataaagggaacaaaagctgggtaccgggccccccctcgagagtacttctagaattaattaaggcggggaacatcacacaccagaccctgttgctgggtgggggactgtgggaggtatagcattaggagaaatacctaatgtaaatgacgagttgatgggtgcagccaatcaacatggcacatgtatacctatgtaacaaacctgcacgttgtgcacatgtaccctagaacttaaagtataattttaaaaaaaaaggaataattaatcacctatcaaattttaaaaaaaaaaaaaaaaaaaaaaaaaaaaaaaaaaaaaaaaaaaaaaaaaaaaaaaaaaaaaaagggccccccccccgggggggaacccaaatccccttataagggggtttttttccccccccctttggggccttttttaaaaatta

SEQ ID NO: 49115 - DNA, 622 bp, Homo sapiens
ataaagggaacaaaagctgggtaccgggccccccctcgagagtacttctagaattaattaagggggaaatagggaataaacaacgctaagcatagttgtactatctcagatagtgatagaccaggataagaggttagaaagtgaaggtgaagtgctcttgttttcctgagtaacactcttactccagatacatatacaggtcactcaactccttcaatttgtaaatctctggttaaatagaaaggtagcagatcagccctccttgatctctgccaacttaatatttgaacagagatttaaaggaaaaaatattacagaagtgggaatcctcaaaatactttctaaaactagcaaagtgctgggattataggcataagctactgcacccatctcagaatttgtctatgtttacaatattatcaatgggtagacagctaattgcacagaatataaatgaggagaggtagatttttattaatgtgtacattttccttaattcctgatttactcaggcccaggcttctttgtttctggtcttggatctatgggcctgtgtaaatctttgtcacttagctaaaaggatttcttgaaaatccttgtagttggttattgagcatttact

SEQ ID NO: 49116 - DNA, 214 bp, Homo sapiens
  misc_feature 141, 197, 198, 199, 200, 201: n = A,T,C or G
ggtaccgggccccccctcgagatacttctagaattaattaaggcggggtttatatgcactttcttccgatctgtacctgagaggtttgtggaaaagatggcaaatggggaataaaaagattttgtgtcaccaaaaaaacanaaaaaaaaaaaaaaaaaaaaaaaaaaaaaaaaaaaaaaaaaaaaaaaaaaaaaaannnnnccccccccccccc

SEQ ID NO: 49117 - DNA, 492 bp, Homo sapiens
agggaacaaaagctgggtaccgggccccccctcgagagtacttctagaattaattaaggcgggggatgaagtcaaagtgtacagtttttattagttttctttctgagtgtttgtttatgcagttagtgataagttatcatcagtctaaaataatgggttataagatattatttgcaagcctcgtggaaacctcaaatcaaaaactacaacagttacaaaataaataaataaataaaaggcacgaagttaaaacataccaccagagaaaatcacctttgctgaaaggaagacagaaagaaagtgaagatcacaaaacaaccagaaaacaaataacaaaatggcaggagtatgtttttacttattaaaaataagatttaatgtaaatgaactaaactctcccgtcaaaagacatagagtggatgagtgaataaaaaaaaaaaaagaccaaatgatctgttgcatgcaagaaacacacttcacttacaaagacaa

SEQ ID NO: 49118 - DNA, 247 bp, Homo sapiens
acaaaagctgggtaccgggccccccctcgagagtacttctagaattaattaaggcggggacatgactgatcccctcaaagcatgctcaagcctggagtctgcccccaaaagtttcacatatggccaggcatcctctgcgtttctttccctggacctgaactgtggacatgccattaaactctctctataatgtaactgaaactgctggctgggcgcactggctaccacctgtaatctcaacccttcc

SEQ ID NO: 49119 - DNA, 475 bp, Homo sapiens
  misc_feature 292, 293, 294, 296, 297, 402, 403, 404, 406, 407, 409, 410: n = A,T,C or G
aaagggaacaaaagctgggtaccgggccccccctcgagagtacttctagaattaattaaggcgggcggatcatgtggtcaggagatcgagaccatcttggccaacacggtgaaaccctgtctctactaaaaatacaaaaattagctgggtatggtggcaggcgcctgtagtcccagctatttgggaggctgaggcagaagaatggcatgaacccacgaggtggagcttgcagtgagccaagatcatgccaccgcactccagcctgggtgacagagcgagactccgtctcatnnntnnaaaaaaaaaaaaaaaaaaaagggcccccccccgggggggaacccacaatccccctttaaggagttttttcccccccccccccgggccggttttaaaaaaaaaaannntnntnntttatttttacactattacagatacgctagcatccgttattgaaggctcaacttttttttttttt

SEQ ID NO: 49120 - DNA, 538 bp, Homo sapiens
  misc_feature 425, 427, 435, 453, 454: n = A,T,C or G
tcactaaagggaacaaaagctgggtaccgggccccccctcgagagtacttctagaattaattaaggcgggggacgggtgggtgcagtggctcacatctgtaaccccagcactttgggaggctgagatgggcagatcacttgaggtcaggagttcgagaccagcctggccaacatggtgaaaccccatatccattaaaaatatttaaaaattagccagacatggtggcacgcgtctgtggtcctagctcctcgggaggctgaggcaggagaatcgcttgaactcgggaggcagaggttgtcatgagctgagctaacaccacggcacttcagcctgggtgacagaatgagactctgtgtcaaaaaaataaaaaataaaaaatctaagggctcaggaaaaaaaaaaaaaaaaaaaaaaaaaaagaaancngcccaatnccaaaaaaaaaaaaaaanncccccccccccccccgggggggaacccaaacccccaaggggggggggaattctccccccccccccggggggttttataaaaaaa

SEQ ID NO: 49121 - DNA, 491 bp, Homo sapiens
aaaagctgggtaccgggccccccctcgagagtacttctagaattaattaaggcggggtggtcatcaaaatagctacaaaccatactaaattattccatttgcaacttatccccaacaggtggtgaagcagtattttccaatttgaagattcatttgaaggtggctcctgccacctgctaatagcagttcaaactaaattttttgtatcaagtccctgaatggaagtatgacgttgggtccctctgaagtttaattctgagttctcattaaaagaaatttgctttatttaaaagtaacaaatttaaaaataaataggggccccccccccggggggcccccattcctcctttgagaggtttcattaacccccccttgagtggctgattttttaaatgttagaatatgacatgctatggaaatcactgtatacgaattcatctgcttatggatatgttattgcttcttatttttgtctgttaggaataaaactg

SEQ ID NO: 49122 - DNA, 423 bp, Homo sapiens
aataaagggaacacaagctgggtaccgggccccccctcgagagtacttctagaattaattaaggcgggaaggcataactccaacaaaaaattacagagtaaagttccctgattcttaatgtgtaatgtctgccctatgtgtacatacacaatataattatacatctgtgcatataaaagaaaaacaaaaaaaaaaaaaaaaaaaaaaaaatttgggcccgccaagggggaggcccaaaaaaccccacaagatgggaggcaaaacccccccgccagggggtacaaataaaaaaaaaaattggaagataaaaacaagatagaaaatgaaaatattgtcacgagtttcagatagaaaatgaaaaacaagcttagacaagtattggagaagtttacaagatagaaaaatataaagccaaaaattgga

SEQ ID NO: 49123 - DNA, 560 bp, Homo sapiens
ggtcccgggccccccctcgagagtacttctagaattaattaaggcggggtttcaccatactgaccaggctggagtgcagtagtacaatcacagctcactacagccttgacctccccaggctcaggagatcttcccatctcagcctcccaagtagctgagactaaaggtgcacaccaccatgcccatctaatttttttgtatttttcagagatagggttttgctctgttggccaggctggtttcaaactcctggcctcaagcacctcggccccccgcagtgtgctgggattacaggcatgagccaccatgcctggccaaaattttttttatgtaaatctttctgataaaaatttcagatccagatggcttgactggtaaatcctttcaaataattaaggagggagtaatatgaatcccacaaaaacttttagaaaacatagaagacaatacttcccaagtaattttatgaggccagtgttaactctgataccaaaaccaaacacctaacaaatagaccaggagtcagcaaaccatggcttgtggggccaaaccagactatg

SEQ ID NO: 49124 - DNA, 420 bp, Homo sapiens
cttcactaagggaaacaaagctgggtaccgggccccccctcgagagtacttctagaattaattaaggcgggaatatcatcgccccattcagcctgaagaagttacagaagatggatctttgtccctctacgactgttaggattaagggttctgctgtaaaagggaggggggaaacatgtcaggggtgtctgaaccagagaaactccatcttgaatagggggtgagtaaaataaggctgagacccactgggctacattcccaggaggttaggcattctaagtcacaggatgagacaggaggtcggcacaagatacaggtaataaagaccttaatgatgaaacaggctgcagtgaagaagctgaccaaaaccaagatggcgatgaaagtgacctctggttgtccttactattcattatactc

SEQ ID NO: 49125 - DNA, 495 bp, Homo sapiens
gcaattaaccctcactaaagggaacaaaagctgggtaccgggccccccctcgagagtacttctagaattaattaaggcgggagagcagacatctcttttctttaaataaacatgcccccagcattcggccttagggctctcaccttctctttctttccctaagtcaaagcaaacctctctttcacctgttatagaagtctagctaattcccacttcttaggatgagggaaagatagagcacttccaatgatagtgaatctaaaaagaaatggaagaatttttattatagtggtcacctgtatgagttcttattagacaggtatttttaaaggaaaaaaaaaaaataaaaaaaaaaaaaaaatggcggccgccaccgcggtggagctccaattcgccctatagtgagtcgtattacgcgcgctcactggccgtcgttttacaacgtcgtgactgggaaaaccctggcgttacccaacttaatcgccttgcagcaca

SEQ ID NO: 49126 - DNA, 370 bp, Homo sapiens
ctaaagggaacaaaagctgggtaccgggccccccctcgagagtacttctagaattaattaaggcggggggatcagctgacgtcatgagttggagaccaacgtggctaacatggcataacccggtctctactataaagacaaaaatatttatccgggcttagtggcaggcgcctgtcttcccagctactcaggaggctgaggcaggggaattgcttgaaccagggaggtgaaggtcgaagtgagccaagatcgtgccactgcactccatcctgggcgacagagcgagactccgtctcaaaaagagaaaacaaacaaacaacaccaacagcaaaacaaattatccgggagtggtggtgcacacctgtaatcc

SEQ ID NO: 49127 - DNA, 418 bp, Homo sapiens
  misc_feature 333, 334, 335, 336: n = A,T,C or G
cctcactaaagggaacaaaagctgggtaccgggccccccctcgagagtacttctagaattaattaaggcgggaaagacaatggtaggggcctgtttagggaagagctaggaagagattagcatctcatttctaatgatgtaatacatagaatcttgcaggagcctttagtgaagtgtagtttaagtcatttaatactaaaatttatataaagtgtccagaatgccttttactgtaaataacttattaaaataataaactgcccaaacaagaagacaaaaagagacaccagataaaaaaaaaaaaaaaaaaaaaaaaaaaaaaaaaaaaaaaannnnggggggccccccccggggggggaaacaccctttttttttggggggttttttccccccccccctcggggggggtaaaaaaaaa

SEQ ID NO: 49128 - DNA, 544 bp, Homo sapiens
ctaaagggaacaaaagctgggtaccgggccccccctcgagagtacttctagaattaattaaggcgggggggggccaatgtggtgggcctggacgtggggaggcagagacggtcagatcacctgagtgaggacaggggttgcataccaacctgaccaagatggtgaaacccttgtctttcccaaaaatgcaaaaattatccaggtgtctttggtgccaactggtgtttgaaagtatggacctgataggtttacctagagaacaggtggtttttaagggttatcttagatgtttcacaccggaaggtttttaaacactcagatgtctaaatttatagttaaggctcaaaagtatatttattgcagaggatgttcataaggccagtatgatttataaatgcaatctccccttgatttaaacacacagatacacacacacacacacacacacacacaaaccttttgtctttgatgttacagatttaatacattttatttttaaagatagatccttttataggtgaaaaaaaacaatttgggagaaaaa

SEQ ID NO: 49129 - DNA, 296 bp, Homo sapiens
aagctgggtaccgtgccccccctcgagagtacttctagaattaattaaggagggggggtttggtggaaattttttgttatgatgtctgtgtggaaagcggctgtgcagacattcaattgttattaaaaaaaaaaaaaaaaaaaccctacaaaaaaagctagagaaaaaaaaaaaaaaaaaaaaaaaaaggtccccccccccccacggggagaccaccctcacccttaaaaaaaaatctatacaccccccccagacgggctgtttagtaaaaataagtggagagggtgtggaaagtt

SEQ ID NO: 49130 - DNA, 328 bp, Homo sapiens
agggaacaaagctgggtaccgggccccccctcgagatacttctagaattaattaaggcgggaaatgcatcaaaagacttaaaggtaaagcgtattacccctcgtcacttgcaacttgctattcgtggagatgaagaattggattctctcatcaaggctacaattgctggtggtggtgtcattccacacatccacaaatctctgattgggaagaaaggacaacagaagactgtctaaaggatgcctggattccttgttatctcaggactctaaatactctaacagctgtccagtgttggtgattccagtggactgtatctctgtgaaaa

SEQ ID NO: 49131 - DNA, 532 bp, Homo sapiens
agccctaaataaagggaacaaaagctgggtaccgggccccccctcgagagtacttctagaattaattaaggcgggaggatcacttgagctctggagttcaaaaccaacctaggcaacatagcgagaccctctctctacaaaaaaataataataataataattagctgggcatagtgacacacacctgtagctcctgcttcttgcgaagctgaggccagaaggtaaaggctacagttacctatgattgtgcctctgcactccagcctgggcaacagagcagactcagtgtctcccaaaaaaaggaaaaaaaaaaaatctgtaccaacaattttcaaaaaggctttaaaaatcgtgggaatgatttctttcaaatgatgggggctatagctggtatcacttgataagcatttttgtaatacccttatttggagattttaaaagaataaatatccttaaattttttgagttataaattcatactggttagtaaatattttaaatgtccccactgatattctctattttgcataaa

SEQ ID NO: 49132 - DNA, 539 bp, Homo sapiens
ctggccgtcgttttacaccccgaaacacagctatacccttgattctggccgcgcctttcccccacagaacagggagaatcaatttaggcggggaggaggaggaggccaaaaaaaaatatttttttactgtcgggccaattgtgaaaatgaatatcatgcaaacaaattatgctattcttttttcaaagtaatacctatgcctagggatcctgttgatctgtgaccttacccccaaaccctgagctatatgaagcgtgccccgcgtccactcagggttaaatggattaaaggcggtgcaagatgcgccccgttaaacagatgctttaaagcagcatgctcgttaagagtcaccaccaatccctaatctcaagtaatcagggacacaaacactgaggaaggccgcagggtcctctacctaggaaaaccagagacctttgttcacttgtttatctgctgaccttccctccactattgtcccatgaccctgccaaatccccctctgtgagaaacacccaagaattattaattaaaaaataaat

SEQ ID NO: 49133 - DNA, 319 bp, Homo sapiens
aaccctcactaaagggaacaaaagctgggtaccgggccccccctcgagagtacttctagaattaattaaggcggggtaagatttgccgagttccttttactttttttaaccttaccttatgtgcctttcttcattgctgattttaatctgtatcctttcactgtaataaactgtaactatgagtgcaaaaaaaaaaaaaaaaaaaaaaaaaaaagcggcccccccccgggggggaaccccaactccccctaatgggggcttttttcccccccccctgtgtgcctattttaaaaaaatttcccaaaaaaaaaaaaaaaac

SEQ ID NO: 49134 - DNA, 446 bp, Homo sapiens
  misc_feature 287, 399: n = A,T,C or G
aataaagggaacaaaagctgggtagccgggccccccctcgagagtacttctagaattaattaaggcgggaggattgcctgggcctgggagtcagaggctgcagtgagccaggagcaagcctgtgaatagccactgcagtgcagtgggcagtgtggaatagaccccatttcaattaaacaaaaaaaaaaaaaaaaaaaaaaaaaaggggggccccccccgggggggacccccaattccccttttaaggggtttttttccccccccctatgggcctttttttaaaaaanggaggggctaatgcctgtaattccaggactttgggaggctgaaacgggaggataacttgaggccaggagttcaaaaccagcctgggcaacataacaagaccccttctgtccnaaaaaaaaaaaaaaaaaaaaatatgggggggggcccccccggggggg

SEQ ID NO: 49135 - DNA, 382 bp, Homo sapiens
  misc_feature 272, 273, 275, 276, 278: n = A,T,C or G
aaagggaacaaaagctgggtaccgggccccccctcgagagtacttctagaattaattaaggcgggagatcaaggccatcctggccaacatggtgaaaccctgtctctactaaaaatacaaaaattagccgggtgtggtggcgcacacctgtaatcccagctattcgggaggctgaggcaggagaatcagttgaacccggggggcagaggttgcagcgagccaagatcacaccactgcactccagcctggcgacacagtgagattccgtcgcnnannanaaaaaaaaaaaaaaaaaaaaaaggccccccccccggggggggcccccaattccccctattgggggtttttttcccccccccaaaggggcgttttttaaaaaaaa

SEQ ID NO: 49136 - DNA, 601 bp, Homo sapiens
ggccgtcggtttacaaccctaaataaggggaacacatgctgggtaccgggccccccctcgagagtacttctagaattaattaaggcgggggttgcagtgagcagagagcgggccattacactccagcctgggtaacagagcaagacttcgtctaaaaaaaaaaagcaatataactgaggttttttctaaacaaaagtaatgagcatactaacaagttaatggcaagccattttgtaaatattaccaacagggacttcaaaaaaacactttgagatggtcccatgtgaactgaggattgggtgtgggttttcacttgtttcctgatccacagatgaattaccatcggcaatgtttttcttaaacataaaaaccatatacctatttgcacactacaaattcaaagagtgcttttaacgtaaaaagtggaatataagtgactatgaagttcataacaatttctaaaaaatgaaaataaaagcttaaagtagttgctttctttaaatagggaatcttataagagatatgaaattcaacatctactgtactttaagcctatatcttattgataatttaaaattataattagtgttcttgggactga

SEQ ID NO: 49137 - DNA, 472 bp, Homo sapiens
gctgggtaccgggccccccctcgagagtacttctagaattaattaaggcgggggaactatcattctgagcaaactatcgcaaggacagaaaaccaaacaccgcatgttctcacacataggtgggaattgaacaatgagaacacttggacccagggcggggaacatcacacaccagggcctgtcgtggggtggggacatgggtgagagatagtattaggagaaatatgtaatgtaaatgaagagttaatgggtacagcaaaccaacacggcacatgtatacatatgtaacctgcacattgtgcacatgtaccctagaacttaaagtataatttaaaaaataaataaaaataaaaggataataaagaaatactaagaaaaactgctctgcccatgtatttgataacttagatgaaatttctttaatcaagacacaaacttccaaaatatacacaaggagaaatacatcatctca

SEQ ID NO: 49138 - DNA, 492 bp, Homo sapiens
aacaaaagctgggttccgggcccccctactagagtatttatagaattaattaaaagtaaatattcaagttataggtatatttaaaggagtgatagacagcttttgaaactgtcattgcaaaactgtcactgagacagtcaaagagatcccacccaaaaaaaaaaaaaaaaaaaaaaaaaaaaaaagcggccgccaccgcggtggagctccaattcgccctatagtgagtcgtattacgcgcgctcactggccgtcgttttacaacgtcgtgactgggaaaaccctggcgttacccaacttaatcgccttgcagcacatccccctttcgccagctggcgtaatagcgaagaggcccgcaccgatcgcccttcccaacagttgcgcagcctgaatggcgaatggaaattgtaagcgttaatattttgttaaaattcgcgttaaatttttgttaaatcagctcattttttaaccaataggccgaaatcggcaaaa

SEQ ID NO: 49139 - DNA, 516 bp, Homo sapiens
catgattactggccgcgcgcatacaaccctcactaaagggaacaaaagctgggtaccgggccccccctcgagagtacttctagaattaattaaggcgggacgactctcggcgaagaacgtctctcatcagagactcttaatagcagagttgaccaagcagaagaattggcgagcttgacgacaggctatttgaaatatccactcagagataataaaagaaaaagcatgaagcatgcctacaagatctagaaaatagcctcaaaagggcaaatctaagagttattggccagtagagagagagatagcagagtagaaagtttattcaaagggataatcacagagaacttcccaaacctagagaaagacatcaatattcaagaacaagaaagttatataaaaacaagcagatttaaaccttattaaataagactacctcaagacatttagtaatcaaacttcaaaaggttgagaatacagaaaggatcctaaaagaagcaagagaataaaaacaaatta

SEQ ID NO: 49140 - DNA, 509 bp, Homo sapiens
gcgcgcaattaaccctcactaaagggaacaaaagctgggtaccgggccccccctcgagagtacttctagaattaattaaggcgggtgaaactttgttgaggaacaggatatttatatagtttcaatgtatttctccatcaaatacttcttaactaccaaagagaaagaagtgatttttataatgaagaaacctggaagataataccttaatcaaatgtttaaagttgacatcacttgtaaaagcacaactcaacatcatgtgtctccttgacatgatacaaggagacagacaatatgacttctgtgttatttcttgtaaaaatgaaaaacctgcatcatcatgaacaaatagaaaattcaaatttaagggtatttgaaaaaataactggtctgtattcttcaaaaatgtcaaggtcctgaaagacaaggaaatagtaaaaaactattctacattgaagaacattaaaagtaacaaggcaactaagcacaacatatggtcctcaacagac

SEQ ID NO: 49141 - DNA, 257 bp, Homo sapiens
ataaagggaacaaaagctgggtaccgggccccccctcgagagtacttctagaattaattaaggcgggtggatcacgaggtcaggagatcgagatcatcctggctaacacggtgaaaccccgtctctactaaaaaaaaaaaaaaaaaaaaaaaaaaaaaaaaaaaaaaaaaaaaaaagggggcccccccccgggggggaaccccaacccccccaaaaaggggggtttaaaccccccccccgggggcctttttaaaaaa

SEQ ID NO: 49142 - DNA, 447 bp, Homo sapiens
ctggccgtcggtttacaaccggaaataaggggaacacatgctgggtgccgggccccccctcgagagtacttctagaattaattaaggcgggagagcagacatctcttttctttaaataaacatgcccccagcattcggccttagggctctcaccttctctttctttccctaagtcaaagcaaacctctctttcacctgttatagaagtctagctaattcccacttcttaggatgagggaaagatagagcacttccaatgatagtgaatctaaaaagaaatggaagaatttttattatagtggtcacctgtatgagttcttattagacaggtatttttaacggaaaagaaaaaaaaaaaaaaaaaaaaaaaaaggggcccccccccgggggggcccccaattcccccttaaggggaggtttttccccccccctctgggggggtttttt

SEQ ID NO: 49143 - DNA, 549 bp, Homo sapiens
aaccctaaataaagggaacaaaagctgggtaccgggccccccctcgagagtacttctagaattaattaaggcggggggcaagagtaagccttaggaaaaaaaaatgaaactatttcatctttggacttttcaatactattggagtgatttttttctttctaaacagggaaaataatgttacaaaagcatcttttttgttatttgtttgcatccctcccccacaccctggtgttttaaaatgaagaaaaaaaccatcaccttttgtacaaaaactcttaatgattaaaaaaacaaacaaaacataaaacaaaaaaaacaaaacaaaataaaaaaaaacaaataaaaaaagcaaacccgacaataaaacaaaataaagaaaaaaatttataagtataggcgacgagacctgccgatcctggtgatactctagaaggacaagatagattcttagttcaactttaaatttgcccacagaaccctctaaatccccttgtaaatataactgttagtccaaagaggaacagctctttggaacactaggaaaaaacc

SEQ ID NO: 49144 - DNA, 270 bp, Homo sapiens
  misc_feature 236, 241: n = A,T,C or G
aattaattaagggggggcacggtgcctgtaattattaaacatgaattcaattaaaaaaaaaaaaaaaaaaaaaaacccaaaaaaaaaaaaaaaaaaaaaaaaaaaaaaaaaaaaaaaaaaaaaaaaaaaaaaaaaaaaaagcccccccccccccggggggcccccccccccccccaaaaaggggggattccccccccccccccggggcgggtttaaaaaaaaaagagagggggganaactntttccccggggggttttttcaaaaaaaaa

SEQ ID NO: 49145 - DNA, 486 bp, Homo sapiens
  misc_feature 366: n = A,T,C or G
agcgcgcaattaaccctcactaaagggaccccccctcgagagcactcctccactcaataaaagctgtgagggaatatatgtgcctttacgcttacctaaccctgtcctccctacaagactgacagtacacatttcatatctggatttttacgactaatgatggctatctctaatggtaatctactcactgaaccagttaatttcaaagctttacacagtgctttgagaggataagacttgctggaacggcacagtgaagtacgagatcttttttttttctaatcagacatccacaggaggaaaatgttttaactctgcctcctaaaatggagaatgtacttcaccttcattaggtgatcaggcacnccaccacccatacaagagctaaaaattccttagcacaagagaattagctctttgtcatgtccatggaacatctattgtttggctagcttactctggaaggggtttctaagttagttggct

SEQ ID NO: 49146 - DNA, 651 bp, Homo sapiens
taaccctcactaaagggaacaaaagctgggtaccgggccccccctcgagagtacttctagaattaattaaggggggaagtgttcagaaacttattatacacggattcttccaaatggtgaaaaaaccactagatcctggttactttattcaacctcaaaagattctgtgttttgtctatattgcaaactctttggggaaggaaaaaatcaactgaaaaatgaaaatgggtgcaaagattggcaacatttaccacatattcttagtaaacatgaagaaagtgaaatgcacatcaacaatagtgttaagtactcaaaattaaaatctgatctgaaaaaaataaagctattgatgctgcagaacgcagattatatgaaaatgagaaaaatgatggtgtgctgttgttgtacacgtaatatacctgagttgttttttggcatgatgatcagaatcttacattactcagaaaacatctgtcctgcaatagtcagtactattgtgttgtaagtctcctctacagaataacttgcagcagttccttagcaataagtatgatagcaaataaatagcaaagaatgtttccattctaaatctaaaactaattagattcaatcatcattaggcaatgacttcattaggcaatgaagattaac

SEQ ID NO: 49147 - DNA, 514 bp, Homo sapiens
agcgcgcaattaaccctcactaaagggaacaaaagctgggtaccgggccccccctcgagagtacttctagaattaattaaggcgggcagtccactcccctggcttctcctaatagctcctcatagtggcaatgcccagacccagatgtcccatccccaccagatgcccatggctgcttcacagcaaacacgtcccaatctaagcccacttctctgttcttcctcctgcatctcccatttcagtgaataggaacgccccccactcaggcccccaagccatgaacgtgggcataatccaatgtcgtcctgcttggcgagcccaatcaccaagcttcctgaacagctcctaaccacaccccactccatgctcatgtcctttccctggtctgcctcatctcctctcacctagactcatcatggcactgacagaggaagatgagtggtgacaagccaagaactcaggccaggctgcccagggtcaaaccccagctctaccactggggaaccttgggcaa

SEQ ID NO: 49148 - DNA, 505 bp, Homo sapiens
  misc_feature 428, 429: n = A,T,C or G
aaagggaacacagctgggtgccgggccccccctcgagagtacttctagaattaattaaggcgggcagatcacgaggtctggagattgagaccgtcctggctaacacagtgaaaccccgtctctactaaaaatacaaaaaattagctgggcgtggtggcgggcgcctgtagtcccagctattcgggaggtgaggcagtagaatggcatgaacccgggaggcggagcttgcagtgagctgagatcctgccactgcactccagcctgggtgacagagcgagactctgtctcaaaaaaataaaaaagcttttgccaatatttaaaatatgacttgatgtgagagtcttaatttcttctacgcagtatacagatatatagcattcctgtcatttagcaggggtgatagcaaaaaaaaaaaaaaaaaaaaaaanngggggcgccccccccggggggggcccccaattcccccttaaggggagttttttccccccccctcggggccggtttt

SEQ ID NO: 49149 - DNA, 526 bp, Homo sapiens
  misc_feature 290, 291, 441, 443, 463, 464: n = A,T,C or G
ataaagggaacacatgctgggtgccgggccccccctcgagagtacttctagaattaattaaggcgggtggatcacgtcaggagatcgagaccatcctgactaacacagtgaaaccccatctctactaaaaatacagaaaattagctgggcgtggtggcaggcgcctgtagtcccagctactcgggagactgaggcaggagactggcatgaacccgggaggcggagcttgaagtgagctgagatcgcgccactgcactccagcctgggcgacagaacgagactccgtctcnnaaaaaaaaaaaaaaaaaaaggggggggggcggggggttcccccctttaatcccaacctttgggggggcccgggggggcggtttttgggggcgggaaaataaaacctttttggttaaacggggaaaaccccctttttttttaaattccccnanaaaaaaaaaaaaaaaaaaanncaaaggccccccccccggggggggccccaaccccccccttaaggggggtttttccccccccc

SEQ ID NO: 49150 - DNA, 642 bp, Homo sapiens
  misc_feature 554: n = A,T,C or G
aaataaagggaacaaaagctgggtaccgggccccccctcgagagtacttctagaattaattaaggcgggagctacaccaccaactttgctgggtctgcagcttgcggggtacaaatcactggacttagcctccataactgtttcaaccaattgcttatgataaatatctctcgctcccccgcaacaactgactctatctccctatctactatctcttctgatgttctgtagaaccttacaaaagcagtacatgtctcatacacaatgatttcctgatgccatatatatgaaaatgaccataatgtgtgagggcgcccccaccgggggggagcccacacaccccatataaccagttttaccaacacccccgtcgggataggccaagcatggtggctcatgcctgtaatcctagcactttgggaggccaaggtgggcagatcacttgaggtcaggagttcgagaccagtctggccaacatggtgaaaccctgtctctactaaaaatacaaaaattagccaggcatgatggcaggtgcctgtaatcccaactaccanggaggctgaggcaggagaatcacttgaacccaaaagtcagaggttgcaatgagctgagatcgcgccactgcactccaacctgggggac

SEQ ID NO: 49151 - DNA, 282 bp, Homo sapiens
acaaaagctgggtaccgggccccccctcgagagtacttctagaattaattaagggcggggcgggggttataaccaactactaaaagaaactgaaacaagaaaaatggcatgaaacctgggaggcaaagcttgcaaaagagccaaaattacaccactgcactccagcctgcgcgacagagagagactccatctcacaaaaaaaaacaaaattccccccccccctatactttgatactgaaccaatttttaaaaaatagcttaagataaaatttatactatgca

SEQ ID NO: 49152 - DNA, 305 bp, Homo sapiens
aagggaacaaaagctgggtaccgggccccccctcgagagtacttctagaattaattaaggcgggggcaggttggggggcacaaagttaacatattcttggttaaccatggttaaatatgctattttaataaaatattgaaactcaaaaaaaaaaaaaaaaaaaaaaaaaaaaaaaaaaaaaaaaaaaaacaaaacaaaaaaaaaaaaaaaaaaaaaaaaaaacccccccccccccgggagggggccaaccccctccaaaaagagggggaaaaaacccccccctccatgtggtaaaattaaaaaaa

SEQ ID NO: 49153 - DNA, 290 bp, Homo sapiens
  misc_feature 239: n = A,T,C or G
gccgtcgttttacactcaggaaacagcgatgaccatgattactggcgcgccctccctcgagagtacttatagaattacttgaggcggggtgggacttccttcctctgtccggagaggcacaggtgtcaccagttccagccaaaggctcctcacaggcgctgtgaatttttgtacaagtcttgtaattatcgaatcaacaacttgtttcaatttaataaaaatgctcatgggaagtgcanaaaaaaaaaaaaaaaaaaaaaaaaaaatttcttgggcccccccccccgggg

SEQ ID NO: 49154 - DNA, 292 bp, Homo sapiens
aagggaacacaatgctgggtaccgggccccccctcgagagtacttctagaattaattaaggcgggctaatttaactagtcactcacagatgacttttctttaataaagtcccttttcctaaaaaaaaaaaaaaaaaaaaaaaaaaaaaaaaaaaaaaaaaaaaaaaaaaaaaaaaaaaaaaaaaaaaaaaaaaaaaaaaaaaaaaaaaaaaagggggccccccccccgggggaaaaaacaacccatttttaaaaagaaaaaaaaccccccccccccggggggaaaaaaaaaa

SEQ ID NO: 49155 - DNA, 462 bp, Homo sapiens
ctcactaaagggaacaaaagctgggtaccgggccccccctcgagagtacttctagaattaattaaggcgggggacaggcatgcggagagcacaccactattgcagaagccacataaaggcctgaattatgagggtggaagggagagaaattctggaggacttgtgggatttggcagttgaatgctaagtatgaaagaaggagggaaaaaaataagttgaaggcagctttaatattttatgcctaggactaggtgtggtggcttacacctgtcatcccagcactttgggaggctgaagcgggtggatcacctgacgtcaagattttgaaaccagtctgaacactgaaatgagccatgatcaccctgctgcactctagcatgggtgacagaatgagactcattcccttacttgttttacatttcgaaaaaaaaaagcggccgccaccgcggtggagctccaatt

SEQ ID NO: 49156 - DNA, 496 bp, Homo sapiens
  misc_feature 349, 350, 351, 361: n = A,T,C or G
gcgcgcaattaaccctcactaaagggaacaaaagctgggtaccgggccccccctcgagagtacttctagaattaattaaggcgggagggaaaggtaaaggatgatattatgacttgggtgagtaattgagcagttcaattagataaggacaaaaaaaaggagaagttttgggaaacacatccatatttattgaagttttgggagagaggaagaataagccgagtgaaagtccatgggatgggatcaagagaggtccccaaactggaacctgatgaaaaaattaaagaattactactgaatggcccacaaccaaacttaaccaaaccaaaccaccaacaaaacaaaccgnnnaaaaaaaagnaaaaaaaaaaaaaaaaaaagcggccgccaccgcggtggagctccaattcgccctatagtgagtcgtattacgcgcgctcactggccgtcgttttacaacgtcgtgactgggaaaaccctggcgttacccaactta

SEQ ID NO: 49157 - DNA, 202 bp, Homo sapiens
gtttaacagatacctccctcacagccctcagaagaggctgaccctgcctttaccttttctctggctcctaatctgtcgagctatgaaggggtgcttttctcttggttaagtcatccaagttgtggaactttgctaaagcagctctaacagactaatgcaagttctttaaaattgtattatcttgtgcttattaatatcatct

SEQ ID NO: 49158 - DNA, 338 bp, Homo sapiens
gaacaaaagctgggtttcgggccccccttcgagagtacttctagaattaattaaggcgggtggatcacggatcacctgaggttaggaattcaagaccagcctggccaacatggcgaaacccccgactctactaaaaaaaaaaaaaaaaaaaaattttccccgggcgggggggggggcccctgaaaccccacttcctggggaccctaggggggaaaaattctttaaccccaggaaaaaaaggttgcagagacccggaaacgcccctttgccctcattccggggaaaaaaaagaaaaattttttctaaaaaaaaaaaaaaaaaaaggggccccccccggg

SEQ ID NO: 49159 - DNA, 350 bp, Homo sapiens
agggtaacaaagctgggtgccgggccccccctcgagagtacttctagaattaattaaggcgggagaatcgctgggacctgggaggcggaggttgcggtgagccgggatcgctccagtgcactccagcctgggtgatggagggagaccgtctcaaaagaaaagaacagaaatatttgtctaacccaaggccccagagattttctcctatgttttatagatttagaagttttatagttttagctctaacctatagttaagggtcagagtttttccatgtgaatatccagttgttccagcactattattgaaaagtctatcttttcccccattgaattacattggctgctttg

SEQ ID NO: 49160 - DNA, 505 bp, Homo sapiens
aaagggaacaaaagctgggtaccgggccccccctcgagagtacttctagaattaattaaggcggggaggattcgcgcctccatttttccaggagagagcgggataccaagagaaccggaccagctgctggcagggaaactgtcttccttttctccaagatgtacagaaccaaagtgggcttgaaggaccgccagcagctctacaagctgatcattagccagctgctatatgacggctacatcagcatcgccaatggcctcatcaatgaaatcaagcctcagtctgtgtgtgcaccctcggagcagctcctgcatctcatcaaactcggtagattgtgaacacaaatccatacgtcccatggcaaggttttagatattttcatatggcagaatttttcaagaatattcttgttttgtttcagtacctagtatgagcccggtacttcagtaagtaaatagttcaccatgagttcaggaaggagctcaataagtaaggggtaaagcaa

SEQ ID NO: 49161 - DNA, 477 bp, Homo sapiens
  misc_feature 270: n = A,T,C or G
gcccccccaagaaagtactttctagaattaattaaggcgggcggatcacgaggtcaggagatcgagaccatcccggctaaaacggcgaaaccccgtctctactaaaaatacaaaaaattagccgggcgtagtggcgggcgcctgtagtcccagctacttgggaggctgaggcaggagaatggcgtgaacccgggaggcggagcttgcagtgagccgagatcccgccactgcactccagcctgggcgacagagcgagactccgtctaatgnaaacacattaagctaaaaaaaagaggcgggccccccccggggggaacccaaattcccccattgagggaggattttgggccccctacgggggctgtttttaaaaatggggagcaaaccacagtttcatgcccatcgtcctagaattaattcccctaaaaatctttgaaatagggcccgtatttaccctatagcaccccctctaccccc

SEQ ID NO: 49162 - DNA, 540 bp, Homo sapiens
ccctcactaaagggaacaaaagctgggtaccgggccccccctcgagagtacttctagaattaattaaggcggggactaggggagggatagcattaagagaaatacctaatacggatgacgggttgatgggtgcagctaaccagcatgtcacgtgtatacctatgtaacaaacctgcatattctgcacatgtaccccagaacttaaaagtataattggaaaaaaaaaaaaaaaaaaaaaaaaaaaaaaaaaagcggccgccaccgcgggggagctccaattcgccctatagtgagtcgtattacgcgcgctcactggccgtcgttttacaacgtcttgactgggaaaaccctggcgttacccaacttaatcgccttgcagcacatccccctttcgccagctggcgtaaatagcgaaaaggcccgcaccgatcgcccttcccaacagttgcgcagcctgaatggccaatggaaattgtaagcgttaatattttgttaaaattcgcgttaaatttttgttaaatcaactcattttttaaacca

SEQ ID NO: 49163 - DNA, 408 bp, Homo sapiens
  misc_feature 306: n = A,T,C or G
cgggccccccctcgagagtacttctagaattaattaaggcgggggatgaagtcaaagtgcccagttttaattagtgttctttctgagtgttggttcatgcatttagtgataacttatcatcatgtttaaaataatgggttataagatattatttgcaagcctcgtggaaacctcaaatcaaaaactacaacagttacaaaatacataaataaataaaaggcaagaagttaaaacataccaccagagaaaatcacctttgctgaaaggaagacagaaagaaagtgaagatcacaaaacacccgtganaaaaagaaaagaaaaaaaaaagcgcccccccccccccggggggacccccattccccccttaagggggtttttttccccccccctcttggcggttttttaaaa

SEQ ID NO: 49164 - DNA, 498 bp, Homo sapiens
gcgcgcaattaaccctcactaaagggaacaaaagctgggtaccgggccccccctcgagagtacttctagaattaattaaggcggggtaggctagtttataatagtaacaataatataattgccagggaataaatcaaaatgttaagaatgtatatgattttagtaaaattgataagtgagtgaataaaaaatcatatgccactgtgatggaagatatgtcataaaggtgtcaatatttttataatatgcaaacataatgtaattccacttaagattctggtgcagttttaagaaaatgataaaattattctaaaattcatggaaagaacaaatgtaaaaaaactgtaaataaaattataaaaaaaaggaaagaagaaaagctttgtctagtcatatatttaaagtattataaaggaacaaattttttaaaagtataagacaagggtaaaaagacttatggggattgtctgcaaaatgtaaaaagcagatatcttttgg

SEQ ID NO: 49165 - DNA, 587 bp, Homo sapiens
cctcactaaagggaacaaaagctgggtaccgggccccccctcgagagtacttctagaattaattaaggcgggaggatcacctgaggctgggagttcaagaccagcctgaccaatctggagaaactccgtctctactaaaaatacaaaattagctgggtgtggtgatgcatgcctgtaatcctagctacttgggaggctgaggcaggagaatcgcttgaacctgggaggcataggttgcagtgaacccagatcttgccactgcatgccagcctggacacagagaacgactccgtctaaaaaattaaaaaaaaaagcaaagtggatgataaatgtgaaaagattctgaattttgctaacaaagtcaggttttggagatctaatttctagtcagtaaaattcatcctttctaggatacaatgctaagagttttgataaatgcatagaactgtgttacactgttgtgtaattaccacaatcatggcttagaacatttccatcgttcacccagattccctcctgtcccttcacagccagtctccttctccacccccagctttaaccaacccctgagttgtttgctgacctta

SEQ ID NO: 49166 - DNA, 435 bp, Homo sapiens
  misc_feature 299, 300, 301, 303, 305: n = A,T,C or G
ctcctaagggaacaaaagctgggtaccgggccccccctcgagagtacttctagaattaattaaggcgggcaagttctcgttgatttccacgggccatgccgaccaccaacggagcctggaagaagagcaactcggaaaagcaacggttctctggcactctgggataccgtcaccaccgctgaccgggaaggctgagccctcgtggaggttgcagtgagctgagatcgtgccattgtgatatgaatatgccttatatgctgatatgaatatgccttaaaataaagtgttccccacccgcnnnananaaaaaaaaaaaaaaaaaaaaaaggcggccgccaccgcggtggagctccaattcgccctatagtgagtcgtattacgcgcgctcactggccgtcgttttacaacgtcgtgactgggaaacccctgcgttac

SEQ ID NO: 49167 - DNA, 327 bp, Homo sapiens
ctgggtgccgggccccccctcgagagtacttctagaattaattaaggcgggtggatcacctgaggtcaggggttcgagaccagcttgaccaacaaggtgaaacctcgtctctactaaaaaatacaaaaattagccagttgtgatggcgggcgtatgtagtcccagctactcggaaggctgatacaggagaattgcttgaacccgggaggcagaagttgcagtgagccaagatcgcgccactgcactccagcctgggtgacagagcaagaccccatcccagaaacacataagaactcttaaaaaatatgctcggcccccccagggggg

SEQ ID NO: 49168 - DNA, 480 bp, Homo sapiens
ctaaagggaacaaaagctgggtcccgggccccccctcgagagtacttctagaattagtcaaggcggcgggggggggaaacaaaaaggcattcaagaataggttacaacaatttcaagcataatgcgtaactaacatgctcattcattattgcggccctcctgtcagttggacatacaggaaataaatgcacttacttggaaaggacggggcagtttttagacgcgtgttttacgcgtagcgttcagcatacatcacgttcggctacaagaagctatcataattgtccatcacctggggagggttttcggcgtgggggacaaggctcagggttatcttctcttgctaacttaatcttaatagaaattcctggttggtgagggcaggcccaccatctaagcagtgtttcttcttacggagggaaaggaagaaataaaatttattacgccgacccctgagtacctgcccgggcggccgctcta

SEQ ID NO: 49169 - DNA, 338 bp, Homo sapiens
gccccccctcgagagtactatctagaattaattaaggcgggcgtggcggcacatgcctgtaatcccagctacatgggaggctggggtgggagaattgcttgaacccaggaggcggaggcagaggctgcagtgacccaagattgtgccactgcactccaccctgggcaacagagcaagaccccatctcaaaaaataaataaatatatataaaaaataaaaagctatttctagtttatttcactataaagttttgctttattaaaaagctaataaacagctattaatcacagtgtattagtatttgttacatttttggatttcactatctttatactata

SEQ ID NO: 49170 - DNA, 474 bp, Homo sapiens
ctggccgtcgttttacatcacggaaacaagtgtgaccattgctgctggccgggcccttcctttagagaacttctagaattaattaagggggatacaatctgatccgagaaatgcattgctaggtaatttcctcattgtgtgaacatcacagagtgtattacacaacacctacacagctaggctacagacctatacaacatattaatgcactgaacagcaactgtaacataatggcaagtatctgtgtatctaaatatatctaaacataggaaaggtacagtaaaaaaaggaaacaatcttatgtggccactacactacacgcggtcggtcattgaccaaaacatcgttatgtagtgcatgactgcatatctcctcaaatctgacgattctaaacaagtaaagatgtggaagaattagataaacagaaagaaagtacatccttcaaatagagaatctgtatttttttcacacatc

SEQ ID NO: 49171 - DNA, 320 bp, Homo sapiens
tgggtgccgggccccccctcgagagtacttctagaattaattaaggtgggggactagaactgggatgtcttggcttgtatgttttttgaagcttcgattatgatttttaaacaataaaaagttctccacagtgaaaaaaaaaaaaaaaaaaaaaaaaaaaaaaaaaaaaaaaaaaaaaaaaaaaaaaaaaaaaaaaaaaaaaaaaaaaaaaaacggcccccccccccggggggggaaacccaccccccttaaaagggggtttaaacccccccccccggggggggaaaaaaaaaaaaaaaaaaaaaagggcccccccccgg

SEQ ID NO: 49172 - DNA, 492 bp, Homo sapiens
aactcctcactaaagggaacaaaagctgggtaccgggccccccctcgagagtacttctagaattaattaaggcggggttggatatccgggcacacttcaagagactctatggaaagtctctgtactcgttcatcaagggtgacacatctggagactactggaaggtactgctggttctctgtggaggagatgattaaaatccaactccctcaaggacaggaggattctcaacactttgaatttttttaacttcatttttatacactgctattatcattatctcaaagtgcttatttccaattaaaacgcctacagctgcctcctagaatataaactgtctgtatcattattcacctataataactcattatgatgctttaaagctgtacttgcatttccaagcttgtcacatatagatggagattttaaagtcaaaattaatatgcattccatgtcttcaactctgcgttggccaaagccaacaacggcgcc

SEQ ID NO: 49173 - DNA, 464 bp, Homo sapiens
ctaaagggaacaaaagctgggtaccgggccccccctcgagagtacttctagaattaattaaggcgggagatgtgggtgtgaagtgcaaagctgaacgcctgtttgcttttcaacctcgctttgatcaagattgaaaggcaaggcatggcctccttggggaagaaggagagagatgcggcactgtcctccccttaggagggtttagggacacactcattcatgaaaaccagagagggcggggcgccgtggcgcacacctgtggtcccagcactttgggaggccgggacgggaggatcgcttgatcccaggagttcgaggctgcagtgaacgttgatcgcaccactgcacacaagcctaggcgacagagaggtcctgcctctttaaaaacaaaaacaaaaaaaaaccctttttttaaattaaaaatcagatctacccaaatggtctacatttggacccacaaaccg

SEQ ID NO: 49174 - DNA, 482 bp, Homo sapiens
gcccgtaacccttactaaagggaacaaaagctgggtaccgggccccccctcgagagtacttctagaattaattaaggcggggtaccctagggattcatatgtgttcttaacttacctttgcatctgaaatactgatggaaaccacataaacctgcatccacctataatgaggtaaaaatcatataaatggcccatccatttgtgttgtggcttaagatgggataaaaaggaaaaaaaaaatattggagccctccggactaaatacgacggtcctgccatattctagtcatgataatgaccagtcatacccatctgaactaaattcttggatatggagatggtgacatcaatttgaggatgataggtcaaaaagcactggttaactgagtttgtatgattagagtcaccatacattggaagaggaggttgttctcttttgttaatgtgagaaaggaagaggacagaaatgaaaatcttttcac

SEQ ID NO: 49175 - DNA, 479 bp, Homo sapiens
cgcaattaaccctcactaaagggaacaaaagctgggtaccgggccccccctcgagagtacttctagaattaattaaggcgggggagaaatcaactgctattttatactgattctgttaaaaaaaaaaaaaaaaaaattttgtaactattaaaataattttctgactcaaaaaaaaaaaaaaaaaaaaaaagcggccgccaccgcggtggagctccaattcgccctatagtgagtcgtattacgcgcgctcactggccgtcgttttacaacgtcgtgactgggaaaaccctggcgttacccaacttaatcgccttgcagcacatccccctttcgccagttgtgcgtattaacaaaaaggcccgcaccgatcgcccttcccaacagttgcgcagcctgaatggctaatggaaattgtaagcgttaatattttgttaaaatacgcgtaaaatgtttgttaaatcagctcattttttaaccaa

SEQ ID NO: 49176 - DNA, 204 bp, Homo sapiens
gaacaaaagctgggtaccgggccccccctagagagtacttctagaattaattaatgctatgtgaaagaggacagggtgagaaaatgtaggaaagagaggaatgaaggataaatcctgagactctcaaaagcaaataattggaaaaagtggaattatgagaactggcttgagtttacaaaatgaattaataaaaacccaaatttt

SEQ ID NO: 49177 - DNA, 432 bp, Homo sapiens
acaaaagctgggtaccgggccccccctcgagagtacttctagaattaattaaggcgggatgaaaggtactgccattacaggaccagaagcaaaggcagtgcgcagactcgcggcccctgcattgcatccaatgctggcagcattgcatgattctccagtgtatttgtaaaaaataaaaaaaaaactctgccgcaggaaaatagattagaacccaaaaagagggcggcccacaccgccgaggatctccaattgcccttatagcgagtcgaattacccgcactcactggccgtcgttttacaacgtcgtgactgggaaaaccctggcgttacccaacttaatcgccttgcagcacatccccctttcgccagctggcgtaatagcgaataggcccgcaccgatcgcccttcccaacagttgcgcaacctgaatgg

SEQ ID NO: 49178 - DNA, 452 bp, Homo sapiens
tcactaaagggaacaaaagctgggtaccgggccccccctcgagagtacttctagaattaattaaggcgggggcaggttggggggcacaaagttaacatattcttggttaaccatggttaaatatgctattttaataaaatattgaaactcacgctgcacaaaaaatgtaatatgcattgagaaaaaggaaaaaaacaaaagctgcccgccgcccgtgggaagagtcccaagaccctatcactgtagaacgggccctgcccttgcagagcacggttagaacaaacagtctccatgtcaagaccaagggcctcctggaaacaccaactctgacaaaaaggagtcatctgggagcccgagaatcctactcctggccgggcacagtggctcacgcaccaacatggagaaaccccgtctctactaaaaaaagaagtaaaaaaaaaaaaaaaaaaggg

SEQ ID NO: 49179 - DNA, 440 bp, Homo sapiens
aaccctcactaaagggaacaaaaactgggtaccgggccccccctcgagagtacttctagaattaattaaggcgggtggatcacctgaggtcaggaacttgagaccatcctggccaacatggcatctctactgaaccctgtctctactaaaaatagaaaaatttaaggccaggtgcagtggctcatgcctgtaattccagcactttgggaggccgaggcgggcagaccatgagatcaggagtttgagaccagcctggccaacatggtgaaacctcgtcactactaaaaatacagaaattagccgtgcatggtggtccgtgcctgtagtctcagctactcgggaggctgaggcaggagaatcgcttgaacccgggaggtggaggttgcaatgacccaagatggcacccactgcactccagcctgggaaacagagcgagactg

SEQ ID NO: 49180 - DNA, 458 bp, Homo sapiens
cgcgcaattaaccctcactaaagggaacaaaagctgggtaccgggccccccctcgagagtacttctagaattaattaaggcgggtaggattatggtggtccaaagcagttaacgttgacttcaggcatttctaagttacatgaccttgggcaaattacctaatttctctgccacaatatttacctcacagattattgggggtattaaatgaaatttatcctttgagtttgcttttttaaaaaaaaaaaaaaaaaaaaaaaaaaaaggcggccgccaccgcggtggagctccaattcgccctatagtgagtcgtattacgcgcgctcactggccgtcgttttacaacgtcgtgactgggaaaaccctggcgttacccaacttaatcgccttgcagcacatccccctttcgccagctggcgtaatagcgaagaggcccgcaccgatcgcccttcccaaca

SEQ ID NO: 49181 - DNA, 517 bp, Homo sapiens
taaagggaacaaaagctgggtaccgggccccccctcgagagtacttctagaattaattaaggggggaagataaaaaatatactagttgttcaaagtcacagtccagtatgaattactgccataaggtagcactaaagatacaaatgagttacaagttatgattccaatctaatctcttctttttgttttatttttatttatgtgtctatttttgagatagagtctagctctgtcgcctagactggagtgcagttggcgctgtctcagttcagtgcagcctctgcctcccgggttctagcgattctcctgcctcacccttccaagtacctgggactacaggcacgtgtcaccacaatcggctgatttttgtatttttagtattttgtgtttttaaacctctttacttgaaatttgctggaaaaaaaaaacgcaaatgatagatttgctgtgtaaaatagtggaaatggagtacatacccatagttcgagcatttttttatttttaccacaaacattaa

SEQ ID NO: 49182 - DNA, 307 bp, Homo sapiens
  misc_feature 225: n = A,T,C or G
aaggaaacaaaactgggtcaccgggccccccctcgagagtacttctagaattaattaaggcggggtaagaaaactggtctggagttgctgaatgttgcattaattgtgctgtttgcttgtagttgaataaaaatagaaacctgaatgaagaaaaaaaaaaaaaaaaaaaaaaaaaaaaaaaaaaaaaaaaaaaaaaacccaaaaaaaaaaaaaaaaaaaaaaaancgccccccccccggggggggcaccccccccccccaaaaaggggggaaaacccccccccccccgggcggggaaaaaaaaaaaa

SEQ ID NO: 49183 - DNA, 383 bp, Homo sapiens
ataaagggaacaaaagctgggtaccgggccccccctcgagagtacttctagaattaattaaggcggggtccactgtccggcagaggaaaaatgccagctgtgggacaaggagtgcaggccgcacaacctcggcaggcaccggggggatgtggcgattctacacagaagattcacctgggctcaaagttggccctgttccagtattggttatgagtcttctgttcatcgcttctgtatttatgttgcacatttggggcaagtacactcgttcgtagaattcagttacatccatctgtcatctgaagaaggaggaaaaaaacccaacatttcttggaccaaaagtatagtgactatctgttcatgagagaaattttctgtaagct

SEQ ID NO: 49184 - DNA, 241 bp, Homo sapiens
aattattaaggcgggtccctgaagttggagaaccatttgaaaaaaagaaggctgtggtcaagtatcttagattcaactgttcaactaaatccatcagtgtcatgggtaaactgtttgtttattttattgcttcaaaagcagtggactgtcttttggattcaaagtgggcaaaggccacgaaaggagaggaagctttatttacaaccagggagtctgtggttgactactgcaacaggctttt

SEQ ID NO: 49185 - DNA, 275 bp, Homo sapiens
aattaattaaggcgggagaattgcttgaacccggaaggcggaggttgcagggagccaggatcgtgccactgcactccagcctggtgacacagtaagactccgtctcaaaaaaaccaaaaccaaaaacaaacaaaaaaagttaatatacaaataccaaaaacagaaactgcagaatatctgagtacttactaaggagcagtcaccattttaagtactttactcatttaattctcacaacagccatgtgaggtaagtagtattatctccattttcca

SEQ ID NO: 49186 - DNA, 226 bp, Homo sapiens
ctggccgtcgttttacacctgaaaaagggaacaaatctgggtgccgggccccccctcgagagtacttctagaattaattaaggcgggggaggacaagaactcagggaggccgggcgggacaaggcggggctccaggaaccccacagggctaggaacagatgccggtgcaacccagttttgaggctgggagcaaatgtcgaagggcttcctcccctccagcgccacc

SEQ ID NO: 49187 - DNA, 390 bp, Homo sapiens
  misc_feature 222, 223, 224: n = A,T,C or G
agggaacttatgctgggttctgggccccccctcgagagtacttctagaattaattaaggcggggaggaaccgtcccaaaatgtcccttgctcagaagaaggatcgggtagctcaaaagaaggcaagcttcctcagagctcaggagcgggctgctgagagctaaacccagcaattttctatgattttttcagatctcgataataaacttatgaacagctcttnnncccaaaaaataataaaaaaaaaaaggcggccgccaccgcgggggagctccaattcgccctatagtgagtcgtattacgcgcgctcactggccgttgttttacaacgtcgtgactgggaaaaccctggcgttacccaacttaatcgccttgcagcacatcccctttt

SEQ ID NO: 49188 - DNA, 323 bp, Homo sapiens
aaagggaacaaaagctgggtaccgggccccccctcgagagtacttctagaattaattaagagcgggaaacactgaagcatctttcagcagaatgctacaaaattgctgaggaagtaatgatttctaatagtagtagtggttgatgcaatccttagttgtaaatatttattttgttgtagtgctaacaaatggagatttttaaacaccttaaatgcagattaaaatatatttcatttcaacaactcagatgtgtaagtgattagttttcctcagtgttgtcaacacttttcattgagaattgactgctttatgcttctttgcaa

SEQ ID NO: 49189 - DNA, 496 bp, Homo sapiens
  misc_feature 413, 414, 415, 416, 437: n = A,T,C or G
ctgggtgccgggccccccctcgagagtacttctagaattaattaaggcaggttcttagaaaggataaataaaattgataaacctttagttaatttatgaaggaaaaaagatacaagttttaaatatcaggaatgaaaaagtagatgttactacagatcgtacataaaaggataataaaggaacattatggacaactttatgccaataaattcaacaagatgaaatggacaaattccttaaaagagacaaactagcaaaactgactcaggaagaaatagaaaacttgaatatccctgtatctatttaaaaattcttaatttaaaatattcccaaaatgaaaactccagaccagatggcatcagtcgtgaattgtgtaagagttttaagaaagaaaaaatactaattgctcattnnnnaaaaaaaaaaaaaaaaaaaanggggggccccccccggggggggcccccaatcccccctatggggggttttttaacccccc

SEQ ID NO: 49190 - DNA, 423 bp, Homo sapiens
taaagggaacaaaagctgggtaccgggccccccctcgagagtacttctagaattaattaagggggaggaatattaaataaaaaatatttcatgaatcctaagggaggtatagaagaaggaaaaaggaaatcaaagcagaagtgacaaatggtacagtgatagttttaaacccaaatatagcagtaatcatactacatgtaggccaggtgcggtggctcatgcctgtaatcccagcactttaggaggctgaggtggactgatcatgtggggccaggagttcgagaccagcctaaccaacgtaatgaaacctcgtctctatacaaaaaaaaaaaaaataaaaaaaaaaggcggccgccaccgcggtggagctccaattcgccctatagtgagtcgtattacgcgcgctcacttggccgtgtttta

SEQ ID NO: 49191 - DNA, 333 bp, Homo sapiens
ataaagggaacaaaagctgggtaccgggccccccctcgagagtacttctagaattaattaaggcggggggttgttagggagtatgcccaagtcttggagtcttggttcctgttcgcggtgtttatgggttatttccctctccatccctcattttttttttttaaaaaaaagcaaaaatgaaaataaacccaagtagacttgtcaaaaaaaaaaaaaaaaaaaattaaaaaaaaaaaaaaaaaaaaaaaaaaaccccccccccccccggggggaccccccaccccccctaaaaggaggtttttttccccccccctttgggccttttttaaaaaa

SEQ ID NO: 49192 - DNA, 426 bp, Homo sapiens
gaataaagggaacacatgctgggtaccgggccccccctcgagagtacttctagaattaattaaggcggggaaaggatgttccagaatgtttcagaagaatatcgctgaaagggttggaaccaattattatgaacataccttaaagcaggagtcagcaaatgttttctgcaaaggtattgacttttcagacagtacatatcttaggctttggggaggacatataatctttgttgaaacgattcagctttgccagtggagtgcacaaacagacctcgatgattatatataaaatgaacaagcatggttgttaaaataaaactttatttatagactaaaattttaattcctgtaattttcacatgtcacaaagtatcagtcttcatttgatttttttttcccaccagccacctaaaaaggtaaaaatca

SEQ ID NO: 49193 - DNA, 331 bp, Homo sapiens
  misc_feature 301: n = A,T,C or G
taaccctcacttaaagggaacaaaagctgggtaccgggccccccctcgagagtacttctagaattaattaaggcggggtaggataaattacggatatagtcattctaggggtttcagtcttttccatctcaaggcattgtgtgttttgttccgggactggtttggctgggacaaagttagaactgcctgaagttcgcacattcagattgttgtgtccatggagttttaggaggggatggcctttccggtcttcgcacttccatcctctcccacttccatctggcgtcccacaccttgtccnctgcacttctggatgacacagggtgctgct

SEQ ID NO: 49194 - DNA, 459 bp, Homo sapiens
  misc_feature 341: n = A,T,C or G
ctaaagggaacaaaagctgggtaccgggccccccctcgagagtacttctagaattaattaaggcggggaagtagtctcgggtatgctgttgtgaaattgaaactgtaaaagtagatggttgaaagtactggtatgtagctctgtatggtaagaactaattctgttacctcatgtacataattactaatcacttttcttcccctttacagcacaaataaagttggagttgctgctaaaagaccaaaatgagccattgcgctcccccctgggcaggagaaccagactccgtctcataacataatgaaattggcgatccctggtgggccaatatataatgttanttcaactttaaatttgcccacagaaccctctccatccccttgtgaatttaactgttagtccaaagaggaacagctctttggacactaagaaaaaaaccttgtagagagagtaaaaaat

SEQ ID NO: 49195 - DNA, 500 bp, Homo sapiens
gcgcgcagtgcgcaattaaccctcactaaagggaacaaaagctgggtaccgggccccccctcgagagtacttctagaattaattaaggcggggcagggcattttcacttcttttgtgattcttcagttatttcaggccatctgggcgtatatgtgcaagtcaccggggatgcgatggcttagcttgggctcagaggcctgacaagaacagaatttgtgaattgcattttatttctcataagaagtatttgtttagattgttaaaagtaagaaattggattgttgagagtaggcagtcttctcaattttaacttccgcatgtctttgcagttgacggtattgtctgtttttaaaaatttcttatttcagattaatcctaaatccttgagattgtggattattgaatagccatatatggtatatacgacattttggataattctgttttaacctggttctttggttaatcatgttatttgcttaaccaggtctcccattcct

SEQ ID NO: 49196 - DNA, 368 bp, Homo sapiens
ccccccctagacattatttatagaattaatgagggcgggggggggatgttccagaatgtttcccaaaactatctctgaaagggttggaaccaattattatgaacataccttaaagcaggagtcagcaaatgttttctgccaaggtattgacttttcagacggtgcatatcttaggctttggggaggacatataatctttgttgaaacgattcagctttgccagcggattgcccaaacagacctcgatgattatatatagaatgaacaagcatggttgttaaaataaaactttatttatagactaaaattttaattcctgtaattttcacatgtcacaaagtatcagtcttcatttgatttttttttcc

SEQ ID NO: 49197 - DNA, 479 bp, Homo sapiens
ggaacaaaagctgggtaccgggccccccctcgagagtacttctagaatcaattaaggcggggcgcgaagttaaaacttccaggatctttgaaagaaaagagaacaaagctgaagatatcatgtgcatcaaagtaaattccagatgaagaatgaatgtaaaatatgaaataattcaaagcactgtggaaacacaggtaggatttatctgagcttcaaggtggggaaagccttttcaagtgcaatagtaaaagaaccaatcaaaagggaaaataatgcattaattatataaaaatgaaaaacaatgcaaaattaaaaagaaaagaaaaaccaagtaacaaatgggaaatatttgtaatacagcaactagttaatatccttaatacatgaagggacatacataaggaaaaaataaatatcaataaaatgtgcaaaagacacaaatagaacactcaccaaaaaaaaaaaaaaaaaaaaaaaaa

SEQ ID NO: 49198 - DNA, 536 bp, Homo sapiens
taaagggaacaaaagctgggtaccgggccccccctcgagagtacttctagaattaattaaggcgggggaggagaaagaccggagccagccgagctgtcacgaccggaggggggactcgcagccttaccaggcacttaagtattcatcgaagagtcaccccagtagcggtgatcacagacatgaaaagatgcgagacgccggagatccttcaccaccaaataaaatgttgcggagatctgatagtcctgaaaacaaatacagtgacagcacaggtcacagtaaggccaaaaatgtgcatactcacagagttagagagagggatggtggtgagtatctttcttgttgaaactttgacatacagttttaacaatagccctatataaaaggcggcagtagtatttctagcttgaagaagttactgttcagttatgtcattaaaatattttaatcctatcattttttttttactctgaacaagttactgtaaaaacaagatgctgatgtgagcatctaaaaagtggactcttaaggccagg

SEQ ID NO: 49199 - DNA, 449 bp, Homo sapiens
gctgggtactcgcccccccctcgagagtacttctagaattaattaaggcgggagcagtgggacacactgacccctgagccccctgtggatcccaaccaggaagtgcctcctgggccacctaggttccagcaagttcctacggatgccctggccaacaagttgtttggtgctactgagccctccaccatcgcccgctctctaccatccactgtaccacagtcaccaaactaccggaacacctggacacctaggactaccgggacaccaccgctcattataccaacactagaaaagacggccgctctccaactaggggaggcccccggctgcccgaattaaatagttagcttaccgcccccgtcgacctcgatgggaggcccggtacccaattcgccctatagtgagtcgtattacgcgcgctcactggacgccgttttacaactcaccaa

SEQ ID NO: 49200 - DNA, 411 bp, Homo sapiens; identical to SEQ ID NO: 46193

SEQ ID NO: 49201 - DNA, 304 bp, Homo sapiens
  misc_feature 245: n = A,T,C or G
cctaactaaagggaacaaaagctgggtaccgggccccccctcgagagtacttctagaattaattaaggcgggcgtcacctgaagtcagtgagaccctgtctctactaaaaatacaaaaattagctagggcgtggtggcaggtgcctgtaatcccagctactcgggaggttgaggagaagaattgcttgaaccagggaggcagaggttgcggtgagccaagaccacgccattgcactccagcctgngcaacaagagtgaaaatccgtctcaaaaaaaaaaagaaaaaaaaaaatctgcctatcat

SEQ ID NO: 49202 - DNA, 511 bp, Homo sapiens
ctaaagggaacaaaagctgggtaccgggccccccctctagagtacttttagaattaattaaggcgggagacagagagaggaaatggttttcttaaatacctgctaaaaagttactgtggtatctatgacttatcatcttacctgtgttaaaaatgaatctttactatggcagatatggtatggatcgctctattttaaccactagaaatattttaatctcctctcattatgctgttcaataattggtttattaactgaattgcattagatcattaaaagtggaagtggattgtgtatatgttcttctacaaatccctgattctctatatctcatatccttcaaattcttttaggagacgtttgctgggtggtttcaaatcggggcccttttgcggaggaaaaattacatatttctttctgaaaccctatgttaaccgttggaaaacccgatgggcaaagctctttccatggatggggggcgtttttttttttttttggagggttttaaccc

SEQ ID NO: 49203 - DNA, 549 bp, Homo sapiens
accctaactaaagggaacaaaagctgggtaccgggccccccctcgagagtacttctagaattaattaaggcgggtaccaatttaattttcaagttgacagatgctgtgtaaagtctctcataatgagagtagtccattaaattgttgaaagttgcactgcttttcatctttcaggtacctgaaatgagtgacatcaggtatttggaaggagtaagatcataaactgtattcattttcttccttgtacaaagtgatgacttctaatgcttatatctcaaggtattttttaaaaaagcaacggtccctaatagagtaaaatttggttttggtccaagttcccaataatgtatttaatgtttctgttgtttactggtgcctcccgttgcatcaggtagagattgcctgcctctttgtagggcagccttgtggcaccttatgtccaacttggaggatagtatatggcttctttgtgcctctactatcttttcaaaagccattttataaaaatcctaagtagcctattttaatatttaaatatatatatttgtg

SEQ ID NO: 49204 - DNA, 386 bp, Homo sapiens
tttgatctgatggccatccttaggctgttcttgtcatactgattggaaggtgaaacccatgcatatactattataaccgtgttctgcatataaagacaccaatagcttaaaagtaaaaggaaggaagatgatatacaatgagaatactagtcaaaagaaaactggagtgactttttaaatatatcaaagtagatttcagagcaaagaacattaccagggataaagaaggtatcatgagggccagtctgccagaagaccataacactcgtaaatgtttatgcatctaataacatggttttgaaatatgtgaccccaaaactgatgaaactttagggagaaatagatacaagttatagatagaaattttaatattttcaataatttat

SEQ ID NO: 49205 - DNA, 454 bp, Homo sapiens
taaataaagggaacaaaagctgggtaccgggccccccctcgagagtacttctagaattaattaaggcgggtggatcacgaggtcaggagttgaagaccagcctggccagcatggtgaaaccccatctctaataaaaatacaaaaagcattagccgggtgtggtggcgggcgcctgcagtcccagctacttgggaggctgaagcaggagaattgcttgaacccagcaggcagaggttgcagtgagctgagatcatgccactgcactccagcctgggtgacagaataagactccggaatagagaaaaaaaaaaaaaaatccgggccccccccgggggggaggcccaatgaccccttataaaatccaatttaaccccccccctgggccgttttttaaaaaccccatctctataaaaaataaataagtaaataaaaaacaaattcgaaaaaaaaaaaa

SEQ ID NO: 49206 - DNA, 311 bp, Homo sapiens
acaaaagctgggtaccgggccccccctcgagagtcttctagaattaattaaggcgggggttgcaatactgtcactgataaaacagactttaaaccaacaaagatcaaaagagacaaagaaggccattacataatggtaaagagatcaattcaacaagaagagctaactatcctaaatacatatgcacccaatacaggaacacccagattcttaaagcaagtcctgagtgatgtacaaagagacttagactcccacacaataataattggagacttcaacaccccactgtcaatattagacagatcaacgag

SEQ ID NO: 49207 - DNA, 521 bp, Homo sapiens
  misc_feature 373: n = A,T,C or G
aaagggaacaaaagctgggtaccgggccccccctcgagagtacttctagaattaattaaggcgggcttaccggctggcgatttgggccgcggatcttaaggaggctgatgcacgcaaatgctattaactcatgaggtacagctagaatttagtggacaacctgtacctgtgccctgtgctactccacctaccaagagtgcgcttcaaggttgtgtataagtacctatagaacaatccccttttttccatcaagctgtaacctgcacagaatggaaacgtgggaaaggaatggtatgtgggggaaatgcatcccctcagaggactgaggcatagtctctcatctgctattgaataaagaccttctatcttgaanaataaaaaaaagaaaaaaaaaaaaaaaaggtgggggataaaaaaaataaaaaaaaaattaataattgggggcccccccccggggggggaaacccacccccttttatggggggtttattccccccccctttggggttttttttaaaaaa

SEQ ID NO: 49208 - DNA, 254 bp, Homo sapiens
gggtaacacagctgggtgccgggccccccctcgagagtacttctagaattaattaaggcggggtagccgcatgatcaaccgaagtcacactgggcacccttacagatgatggctgatacatgagaaccctgttttaaatagcacgggcaaattacaaacaatctggctgtatattcacaggcaaacaagagctgcaccactgggcattctcattctttagttaaccattttcagcacaactatatggcatctac

SEQ ID NO: 49209 - DNA, 564 bp, Homo sapiens
aaagggaacaaaagctgggtaccgggccccccctcgagagtacttctagaattaattaaggcgggaaaaagttatctttacaaggcagaaatctgatagatagcatcttaatcaaatgatcaaatttaacatctccagtatcatgacaaattggcgtgtgcttcttgatgatatactgaggatacatacttatatagtattcttatactatacttatatagtattcctgccaaaaatgtttagtttgaatctaatcatggagacagaaataaaaaattaaggacagtgtacaaaataattgatctggactttgtaaaaatgtcagtgttacataaaaagacacgacctcacaaaacaaatgtattgcaaaaatctttaataatctaggtggaagatatatacgtattgtacttttgttgtaattctgaaggattgaaatcttggaaatgttggggaaaatagaataatattgattttattttttaactttaatcttttaaaaatgagtattactaaacaatatgggggtactaagatgggaaattttttttgaaacaaattact

SEQ ID NO: 49210 - DNA, 259 bp, Homo sapiens
ctaagggtaacaaagctgggtaccgggccccccctcgagagtcttctagaattaattaaggcgggaggcgaaggaagagcaggcatgtcttacatggcagcaggcaagaagcttgtgcaggggaactcccctttataaaaccatcagatattgtgagacttattcactatcacgggaacagcacaggaaaaactcgtccccacgattcaattgcctaccaccgggtccctcccatgacacatggggatcattaaaattc

SEQ ID NO: 49211 - DNA, 584 bp, Homo sapiens
ctggccgtctttttacaaccctaaataaagggaacaaaagctgggtaccgggccccccctcgagagtacttctagaattaattaaggcggggtggaattaagaaattagacttattttcctgttcattaataaattatccattttaaacacaattttaaacataaaccttgctataaatactcttgtttatatgtgtgacatcaagcttaaccatctacacacccttttgtcccctgtgggtttcctgtttaattttttattagtaacagtatattccataacacacacacacaaaattaaacaaacaaaagaaaggttttaatgttaaggaaaacataagacaatggtaatacaacttagatcatacattaggaaagtaacacaacagatgtattattcagcattaccgcaagtcataagactagttattgtgtgttcacaaaactggggggtgtaacagtatatataggaagattatcaaaaaactctttggctttagaaggaaaaccactagtctaataattgtctctaaatgtgcaagtgacaatcaggctgccatatctaaaatgttactgtctgacat

SEQ ID NO: 49212 - DNA, 461 bp, Homo sapiens
gcgcgcatttaaccctcactaaagggaacaaaagctgggtaccgggccccccctcgagagtacttctagaattaattaaggcggggaggaggtgccaggctctgtaatcaactagctcttgcatgaactaataaagccagaatgcactcattactgtgaggagggaacgaagccattattcatgagggatctgcccccatgactcacacaccaacggtgagacccttcaaccaacattggggatcacatttaaacataagatctggagaggaaaacatccaaactatatcagatggggtctcaatatactgcccaggctggtctcaaactcttggcctcaagtaatgctcgtgccacagcctttcattgctagcgttatagacacgagctattgcacccagctaaatttggggttaggccataatatcttcaaatattccttttgttcctcttttttctct

SEQ ID NO: 49213 - DNA, 371 bp, Homo sapiens
taaagggaacaaaagctgggtaccgggccccccctcgagagtacttctagaattaattaaggcgggatggcacatggcacggtctctcagagagtaatctgctatattggaatggcatggaatcactgcctcctgtgatttagaaaggccattgtgaaggaaaacaatgcagtgaaagaaagttcttcatattaggacagatatcattgcatcacatttatttatctttctgggtatttttatagcccttaataaaaaatattaaaataaaaaaaaaaaaaaaaaaaaaaaaaaaaggggggccccccccggggggggcccccatttccccctttggggaggctttttacccccccccatgggccggtttt

SEQ ID NO: 49214 - DNA, 181 bp, Homo sapiens
cgcgcaattaaccctcactaaagggaacaaaagctgggtaccgggccccccctcgagagtacttctagaattaattaaggcggggagaacctaattagaaaatatgtatccactataattagctatgacagccatctgtaatgaatctgtcgcaaagacgtaataaaattaactggtggca

SEQ ID NO: 49215 - DNA, 459 bp, Homo sapiens
accctcactaaagggaacaaaagctgggtaccgggccccccctcgagagtacttctagaattaattaaggcgggactggggtaggcggtagtcaaggccctttggtgaagcaagcgattgtctccagcgttgtcagcttcgctcctccataagacagttgctaatttccacctctgttttcacctacataagacactttatgacaggtttaacttttatgttattattagctctagccactggtatttcatactcagttcgtctgagctacttataaagtgacaagtccagccagggcaacatggtgaaactccgtctctacaaaaattagctgggcctggtggcatgcacctgtagtcttaactacttgggaggctgaggtgggaggattgcttaagcccaaaaagcagaggttggagtgagccatgatcacgccactgcactccagcttgggtgaca

SEQ ID NO: 49216 - DNA, 483 bp, Homo sapiens
  misc_feature 277, 390: n = A,T,C or G
aaccctcactaaagggaacaaaagctgggtaccgggccccccctcgagagtacttctagaattaattaaggcgggggacatggtgagtgtgggtctctgtgcggcctagaactctatctgcctgcatctgtccttgttttcttctcccgcacccatctcctctcctgccttaccccgtgttctctcctgtctccatgcctttgcaggagacaccattgtcggaagctccccaaggcggaggggcgggggcgccttggctgggcctggcgcgctccanccgggttaacgccgggccttcggagcgcgcggccagccctgggcactggtttcgttgggttgaatttagggaaaactaggtcatatgtaattcacatgtcggtcacacgtcantgaggtggaggaacggtgtgtggaggctccagggcctgcctgggttccaggtctatcactggtttctcccttcactctaaacaggccaaacgt

SEQ ID NO: 49217 - DNA, 267 bp, Homo sapiens
gcgctattaaccctcactaaggtgaacaaagctgggtaccgggccccccctcgagagtacttctagaattaattaaggggggctgccaccccaggtcctccaagcaacccttttccccatagtgggaggtcagcatccctcagaagcatctcagggaaaaaatgataaagcatttagagaattgggaagaaaatagagggatactatcaaagagtaaaggacagtcctgggggatgaagggggattttcttttttcttttttttttt

SEQ ID NO: 49218 - DNA, 454 bp, Homo sapiens
aagctgggtaccgggccccccctcgagagtacttctagaattaattataggcgggggaagggaagattaattattgttgagtgttaactaactgccaggtgcttttatcttgtttgtctaatttaaattttatatggacttaataaagtagatattaccatgcacattttacaggttgccaaactgtggctgtgggaggttctaagcaactgttccaggtcacttgtacagtaagctgtatagcaaaaaatccaatttggttcggttccaaatactggacatactcaacttcggatttttaatgttaaaaaggtatttagcgctttatataaaatcatataaatatacataattaagcggccgccaccgcggcggagctccaatatcgcctatacagaggcgtattacgcgcgctcactggccgtcgttttacaactgtcgtgactgggaaaac

SEQ ID NO: 49219 - DNA, 466 bp, Homo sapiens
ctaaagggaacaaaagctgggtaccgggccccccctcgagagtacttctagaattaattaaggcgggagagtggcgtgaacccgggaggcggagcttgcagtgagccgagatcgcaccactgcactcccccctgggcaacagagcgagactccatcttttaaaaaaaaaaaaaaaaaatttggggaaaattccccgggggtggacctaagggatggggggggggacctgacatttttttgggcaaggggaatgaccgggataaaaatccaggggcaaccaaactttgttaaaaatagtacccttggaaagctttatccctgggcccggaaaaaaaaaaaggtatagctttttttatttttgggaaagaagtaaccaaggggtccggtttttaaaaaaagcaaaacagggcatttttttggactttaacggggccctacttttccaaaaaatccctatgttttaaac

SEQ ID NO: 49220 - DNA, 356 bp, Homo sapiens
gaacaaaagctgggtaccgggccccccctcgagagtacttctagaattaattaaggcggagctgcatcacaatgtacaatcatggaatcacaggaagaatccactcagctttgcaagatgctgcccaaggggttgcttggagtaaccaaattaacatttttcattctgcccagagcaaaatacatgtgacaaaacataaaaaaaaaaaaaaaaaaaaaaaaaaaaaaaaaaaaaaaaaaaaaaaaaaaaaattataaaaaaaaaaaaaaaaaaaaaaaaaggccccccccccccccgggggggaccccacccccctcaataaaggggtttccccccccccccccccggcccctttt

SEQ ID NO: 49221 - DNA, 334 bp, Homo sapiens
aaacaaaagctgggtaccgggccccccctcgagagtcttctagaattaattaaggcgggaagatcacttcagcccaggagttcaaggctgcactgagcgatgacggcaccactgcaccccagcctgtgcaacagagcaagaccctgtctcaaaaaatgaaaaacaacaataaaataaataaataagcctgggactccttccttctctctcttgcttcctctctctccacgttccctcttcaccttctgccatgattagaagcttcctgaggcctcagcagaagtggatgctggcaccaggcttccagtacagtccacagaatcataagccaatc

SEQ ID NO: 49222 - DNA, 406 bp, Homo sapiens
ctggccgtcgttttacaccccggaacacagtgtgaaaccatgctggttgccgggccccttcctcgagagaacttatagaattaattaaggcggggtcttagctttggctcccctcttctgagctagttggttgaattttttttaatgcttaagatttgtttttctcttttcacagcaacattttcttgaatttttttctgcacagcttttccaaaataaaaaccttccaaacaaaaaaaaaaaaaaaaaaaaaaaaaaaaaaaaaaaaaaaaaaaaaaaaaaaaaaaaaaaaaaaaaaaaaaaaaaaaaaaaaaaaaaaaaaagagggggcccccccccccggggggaaaccaaccctccataaaaaagggggggtccccccccccccccggcggggtttaaaaaa

SEQ ID NO: 49223 - DNA, 489 bp, Homo sapiens
tccctgactaaagggaacactaagctgggtgccgggccctccctcgagagtacttctagaattaattaaggcgggggagggcaatttcaaaactacatgagatactgttgcatcaaatgtttcaggaaaaaaaaaaactaccaaaaatttataaatccaactgctgtgtacaaaacctgtatagtgtaaaaatattggtcaacctgcaagttatataacattctaaatcaaatggagtttgtagtccatgctttaaaatttctctaaaactgtctccatctccttcaaaaaaaatcagtctgctgaaagtctcatgaataaaagccgatcgaaaagctgtgtgtctaacagtaggtaatctagctaacctggaaaggccacaaaatgctagcattctgaaacttgccttttaggcttacttccacttctctctggctcccttcttctcactactttaatcttacctttttatcccctcttccctcccaa

SEQ ID NO: 49224 - DNA, 576 bp, Homo sapiens
ataaagggaacaaaagctgggtaccgggccccccctcgagagtacttctagaattaattaaggcgggggtgtgagccatcgcacccggccagagattttttaaacattgtctacaccatgaagtcatactttgcgtttaaaaaagatgacttcatagttttacacgatatctgatggcaattttcacaaggtggaatgtagggagagctcttaatcagccctctccctctggaaacaggcagaaacttctccagtgaaatgatattaccattattgcttcatttcctgaggttagaaccggttcttggtcatcataagtttgcctacctgcctacatgtttgcatcccctcgaaacttttatgttgaaatcctaatcctcaatgtgacggtattaggaggtggagcctttgaaggtactgggttagggggtagaaatcctcatgaaaaggattagtgttcttaaagagaacctcaaaagctctctaacttttctctaccatatgaggatacagcaagaagacagttggctggaaaccaagaaacgcatccttaccagacctgaagctgccagcacc

SEQ ID NO: 49225 - DNA, 491 bp, Homo sapiens
ataaagggaacaaaagctgggtaccgggccccccctcgagagtacttctagaattaattaaggcgggcagatgacgaggtcaggagatcgagaccatcctggttaagacggtgaaaccccgtctctactaaaaatgaaaataaaaattaaaaaaaagtagccgggcatggtggcaggcacctgtagtcccagctactcgagaggctgaggcaggagaatggcgtgaacctgggaggtggagcttgcagtgagccgagatcgtgccactgcactccagcctgggcgacagcgagactctgtctcaaaaaaaaaaaaaaaaaaaattttttgaaacctaaaaaccaattttgggttctttaaaaagggttttaaaaaattggtgggattcaaaattttaaaaaggaaaatttttaataaaattttttggccaaagggttttaaattaattttaaaaataagggtttaaatttttttttaaaccgggccagggg

SEQ ID NO: 49226 - DNA, 284 bp, Homo sapiens
  misc_feature 25: n = A,T,C or G
tagaattaattaaggcaggcccagnaaagacacatctacatggtctcacttacacgcagaattttaaaaagttgaactcatagaaatagagaagaagatagtgtttttcagacactggaggaagaaagtgcagagaaggggagatgctgatcaaagagataagctttagtgatctgttgcacagaatggtgactataattagtaataatgtatggtatatttcaaaattgctaaaagagaagattttaaatattctcaccacaaaaaagtaacaactatgtgag

SEQ ID NO: 49227 - DNA, 509 bp, Homo sapiens
cgcgcaattaaccctcactaaagggaacaaaagctgggtaccgggccccccctcgagagtacttctagaattaattaaggcgggaaaaaagaatacagaatagttgggataagcagaaaataaataggaagatggtacacagccaggttaataattatacaaaatgtaaatggtcatacattcaaaggcagagattgtcagagtggattaaaaagcaagactcaactgtatgctgtctagagtaaacccattttaaatataaagacacagctaaaaaaaaaaaaaaaaaaaaaaaaaaaaaaggcggccgccaccgcggtggagctccaattcgccctatagtgagtcgtattacgcgcgctcactggccgtcgttttacaacgtcgtgactgggaaaaccctggcgttacccaacttaatcgccttgcagcacatccccctttcgccagctggcgtaatagcgaagaggcccgcaccgatcgcccttcccaacagttgcgcagcctga

SEQ ID NO: 49228 - DNA, 461 bp, Homo sapiens
tgggtgccgggccccccctcgagagtacttctagaattaattaaggcgggaggagagaagccatacaggagcaagtgttttgcatactattaaaattggttttactcagaactaaaatcttataaattaaggtattattggccaggtgcggtggctcacgcccgtaatcccagcactttgggaggccgaggtgggtggatcacgaggtcaggagtttgaggccagcctgaccaacatggtgaaaccccgtctctactaaaaatacaaaaattagccgggcgtggtggcacgcgcctgtaaccccagctactcaggaagctgaggcaggagaattgcttgaatccaggaggcagaggttgcagtgagccgccattgtgccatggcactccagcctgggcaacagagtgagactctgtcgcaaaaaaaaaaaaaaaaaaaaaaaaaagcgccccccccccggg

SEQ ID NO: 49229 - DNA, 238 bp, Homo sapiens
tcccggccccccctcgagatacttctagaattaattaaggcgggagaacagcttgaaccagggaggcggaggttgccgtgagatcgcaccattgcactccatccagcctgggcaacagaatgaggcaccatctcaaaaaaaaaaaatttcatttggtttcttttaaaaaatttggacttttttacatttaaatatttgatcaaactgtaatttattgggaaaaaacaagaaggagggg

SEQ ID NO: 49230 - DNA, 482 bp, Homo sapiens
  misc_feature 435: n = A,T,C or G
cgttttcacccggaaaaagggaacacagctgggtgccgggccccccctcgagagtacttctagaattaattaaggcgggagtccttttttaacagtaactattttaaatgaaaatggattcaactcttcaatttaaaggaagagattagcagaaggataaaataacaaacaaccaaaatgaccaaattatttattgtctaaaagaaacccattttagatctaaagtcacaaacaggtaaaaagtgaaaagatgtaaagatattctgtgaaaagaggaatcaaaagagagctctggtggctatcagacaaaatagactataagtaaaaatcgttaccagtgacaaagaagtgcattatacatggatgaaatagttttttcatctagaaggtataataaattataacaaatactacccttacacagaaccctaaaanttttaaaaaaaaaaaaaaaaaaaaaaaaaaggcgcccccccccgggg

SEQ ID NO: 49231 - DNA, 489 bp, Homo sapiens
cctcactaaagggaacaaatgctgggtaccgggccccccctcgagagtacttctagaattaattaaaaaaataaaaaccaacattaaccagagtttggaagaagttgattccaaccttcataggtgactctgaggggttcaagtcttcagtggaaaaagtaactgtggatgtgatggaaaaaagagaactagaattagaagtggagcctgaagatgtgacagaattgtttcaatctcgtgaaaaaacttgaacagatgagaggctgctttgtatagataagcaaagaaagtggtttcctgaaatgaagtctactcctgaagatgctgtgaacattgttgaaaagacaacagacttagaatattacatcaacttagttgatcaagcagtggcgaagtttgagaggattaagtccaattctaaaagaagttccactatgcgtaaaatgttatcaaacagcgtcgaatgctaaagagaagtttttcatgtaa

SEQ ID NO: 49232 - DNA, 553 bp, Homo sapiens
aaaagctgggtaccgggccccccctcgagagtacttctagaattaattaaggcggggatttcccacatacaattaaggcatggttccctgtttttcttcttggtctttttaccaaaactactgcacttttaacaaatatgatcatgaagccaaccccattcccaaagtgtgtgtccttaacatttttcaaggcccgtgtatagctgttatcttgtgtgaacctcagatggcccaataaggatgtaaggcaagttcaagtacagtctccgcactagagataagaaaacagagatagcgcctgtaatcccagcactttgagaggccgaggagggcggatcatgaggtcaggagatggcgaccatcctggctaacacggtgaaaccccatctcttctaaaaaaaatacaaaaaacttagctgggcatggtggcaggcgcccgtagtcccagctactcgggacgctgaggcaggaaaatggcgtgaacccaggaggcggagcttgcagttagctgaaatcgagccacggcactccagcctgggcgactgaatgagac

SEQ ID NO: 49233 - DNA, 517 bp, Homo sapiens
  misc_feature 299: n = A,T,C or G
ctaaagggaacacaagctgggtaccgggccccccctcgagagtacttctagaattaattaaggcgggtggatcacttaaggtcaggagttcaagactagcctgaccaacatggggaaaccccatctctactaaaaatacaaaaaaaattggccaggcgtggtggtgcacacctgtaatcccagctacttgggaggctgaggcaggagaatctcttgaatccgggaggcagaggttgcagtgagccaagatcgcgccactgcactccagcctgggcagtaagagtgaaactctgtgccanaaaaaaaaaaaaaaaaaaaaaaaaagcggccgccaccgcggtggagctccaattcgccctatagtgagtcgtattacgcgcgctcactggccgtcgttttacaacgtcgtgactgggaaaaccctggcgttacccaacttaatcgccttgcagcacatcccccctttcgcccagctggcgtaataacgaaaaggcccgcaccgatcgccctttccaac

SEQ ID NO: 49234 - DNA, 688 bp, Homo sapiens; identical to SEQ ID NO: 48683

SEQ ID NO: 49235 - DNA, 482 bp, Homo sapiens
accctcactaaagggaacaaaagctgggtaccgggccccccctcgagagtacttctagaattaattaaggcggggtgaggaatagactacatatttggtacagtgtacattgcttgggtggcaggtgcaccaaaatcttataaatcaccactacagaactgatccatgtaaccaaaaaacacctgtaccccacaaactattgaaaaacccaaaaaataccttgcaaacggggggcccccccccggggggacccccggaatcccatttgtggctttctttatgcccccaccatgggggatagttgcaagtttacaagctgtggatgggtttccatagtcttcctttctgtacattgctatatcttcagtcctttggagcaagtggacctaacaagttgagcaaaatgaatatttggatccatgttcctcttgtgaccctgagtcttcatgcaaggagatctgaagctgaacaatgaaaatctt

SEQ ID NO: 49236 - DNA, 283 bp, Homo sapiens
acaaaagctgggtaccgggccccccctcgagagtacttctagaattaattaaggcgggcagatcaccagatcaggagatagagaccatcctggctaacagtctttactaaaaatacataaaattagccaggcgtggtggcgggcacctgtagtctcagctaggcagagcttgcagggagccgagattgcaccactgcactctagcctgggcaaccgagtgagactccatctcaaaaaaaaaaaatcacgtttttggttttaatttatctgacttaccttatgt

SEQ ID NO: 49237 - DNA, 225 bp, Homo sapiens
gagtacatatatagaattaattaaggcgggctggtccatctcagaaaaaccttccaagagcgctggggtttatgctttctgaataaacactactgtttacatgaaaaaaaaaaaaaaaaaaaaaaaaaaaaaaaaaagggggcccccccccgggggggaccccaaatccccctaaaagggagttttaaaacccccccctctgggccttttttaaaaaaaaagaaa

SEQ ID NO: 49238 - DNA, 318 bp, Homo sapiens
agggaacaaaagctgggtaccgggccccccctcgagagtacttctagaattaattaaggcgggaaatttatagctgtgagcagttaactaaaaaagaagaaagatctcaaatccatagcctaactgtacactgtatggaactaaaaaaaagtaaaacaaaaatagaagtcatctttatgatttgaaagagtaaaagatttacctaataagtccctaaatttactaataataaaaaaaaaaaaaaaaaaaacaaaaaaccgggcccccccccgggggggaaaccaatccccccttaagggaaggcataaaccccccccc

SEQ ID NO: 49239 - DNA, 228 bp, Homo sapiens
gggtaccgggccccccctcgagagtacttctagaattaattaaggcggggtgaatattttatactgtaagtgagcaatcagagtataatgtttatggtgacaaaattaaaggctttctaaaaaaaaaaaaaaaaaaaaaaaaaaaaagggggccccccccgggggggacccccaatcccccctaaagggaggttttttacccccccccctgggccgttttttaaaaaa

SEQ ID NO: 49240 - DNA, 299 bp, Homo sapiens
aaaactgggtaccgggccccccctcgagagtacttctagaattaattaaggcgggcggatcacgaggtcaggagattgagaccatcctggctaacatggtgaaaccccatctctactaaaaatacaaaaaattagctgggcgtgtggcgggcacctgtagtcccagctacttgggaggctgacgcaggagaatggcgtgaacccgggaggcagagcttgcagtgagccgagatcacgccactgcactccagcctgggcgacagagcaagactccgtctcaaaaaaaaaaaaagcttttt

SEQ ID NO: 49241 - DNA, 560 bp, Homo sapiens
aaagggaacaaaagctgggtaccgggccccccctcgagagtacttctagaattaattaaggcgggatcagaatggaaaaagaactgtttaaaagtttgatacttttaaatagttggtttttttgcttactctggtaatgattttctacaaatacataataaattgtttttttgagtctatattctgtatgcagttgaatatccattacttattctgctgtgctttaatagaatggaatgtttacaggcccttaaaatattatttttaaaaaaccttctgaagatacataccaaagtttttccaagaagattttataatcaatttaataatgtaaggtttatcagattctataatagtatagttattaaggcaattttatgttagagactattttgtaatgtagtgagtggtacctttataagaaaagtgactgccaatatatttttatagctgatctttataaattctaatgttgagtttttaatgattattttaaatgtttatatagtttagtaaaatttgcatctcaaagtatcatttttatattatgggacgttttc

SEQ ID NO: 49242 - DNA, 466 bp, Homo sapiens
  misc_feature 378, 404: n = A,T,C or G
aaagggaacaaaagctgggtaccgggccccccctcgagagtacttctagaattaattaaggcgggtaatgtagcccggttgaacatgaaccagaaggaaaatggttaaagctgagggcactaattccttacaggcccggggacatggggctccaaccagtggatgcatgtagcttcccagaaccgaatgtctggccctccctggcggatgatgcctgccgcgttgcccccccccaactccctctaccggaactcagcccacgaggctgggccccgtatggcccaccataattacccccatactccttacactattcctcatcacccaactaaaaatattaaacacaaactaccacctacctccctcaccaaagcccanaaaaaaaaaaaaagaaaaaaaaaaangggggcccccccccgggggggaaccacaattcccctttatagggggggttattccccccccc

SEQ ID NO: 49243 - DNA, 569 bp, Homo sapiens
ggaacaaaagctgggtaccgggccccccctcgagagtacttctagaattaattaaggcgggtaagggatgaatccatgatgtcatctgccaccaggaagaaagcttgcagctagaaagagtggaataagacctgcagggctcctcattactgttccttctatcagcaacagagctgctactttataccaaaaaaaaaaaaaaaaaaaaaaaaaaaaaagcggccgccaccgcggtggagctccaattcgccctatagtgagtcgtattacgcgcgctcactggccgtcgttttacaacgtcgtgactgggaaaaccctggcgttacccaacttaatcgccttgcagcacatccccctttcgccagctggcgtaatagcgaaaaggcccgcaccgatcgcccttcccaacagttgcgcagcctgaatggcgaatggaaattgtaagcgttaatattttgttaaaattcgcgttaaatttttgttaaatcagctcattttttaaccaataggccgaaatcggcaaaatcccttataaatcaaaagaatagaccgagatagggttgagtgtt

SEQ ID NO: 49244 - DNA, 540 bp, Homo sapiens
ctaaagggaacaaaagctgggtaccgggccccccctcgagagtacttctagaattaattaaagcggggatgggttggtgtacatatgccctgcagacaaatgccacactgagtcacacatgcactggtggtcctgctgtccgtgcagaaaagttcaagagcagagtcctccacaatccttcaacctgactttctggctgtatgagttatggatgggagggagaggcaattatattttaagtgtctcctttctagaagaactgagtgttctctgaaggaccattccagctgcagaagtacttctgaatgggtgaagaaagggcactaaaatgtaccaaaagattttgggcccaagtgacatccagaccatttttcttttctattaaagtaaactgaagtttagataagggctagattaaattcaaggaaactcctgataaccatgttaagatcaaccacagtaggctgagttttactgaaaccttggtcctcttaagctactacatactgattctattataagtacattttgattctcccc

SEQ ID NO: 49245 - DNA, 578 bp, Homo sapiens
ggaacaaaagctgggtgccgggccccccctcgagagtacttctagaattaattagaggcggggtgtgaaaacatgtgccatgcaaaaactaggctgaagagagtttatgtagatgtcttttactagaagacaaaataaatgaaaagcattgttgtaaagtacactgcaatatgttaaaatgctcagattcttgaagaagatataacaattcttaatttgtatatatataattaccatcttaaaatatgtaacagaaattgacagtaggggatttccttatgacaaatttgtagtcataattcaagatttttgcacgcttctttcaagtattgattttaaaaacagacaaaatcatcaaggatatagaaaattaaaataacacaattagcaaacgtgaccctacaaacatagaaacacaatgcccaacaagtgcagtacacatattattttcaaggaaactagaaattatacaaaagttagttatacccagggccataatacaagtctacaaatgtcataggaatgaaagtctgcagggaatgttatattacaattagattatgcctaaaatcagtaat

SEQ ID NO: 49246 - DNA, 567 bp, Homo sapiens
ctaaagggaacaaaagctgggtaccgggccccccctcgagagtacttctagaattaattaaggcgggggaagcaaaggcgttggcggcgtgaggctcaggactgtacatcaaaggaagccaaaagccagctggaatacttcctgaatacagttttaatcttgtttgcaattatttcgaaggggagaaatcatctggatcagaattaagatgctctggtttcaaggaaatagcatgcaacttgccagatcctcctttggactcttcttgagaaattgctctgcctctaagacaactctgcctgtgttgaccttattcacaaaggacccatgccccctttgtgatgaagccaaggaagtactcaagccttatgaaaacaggcaaccctacaaggatcagaagctgccaggaacaaggagaagacgctccccttcctcaccttcccacccccacatggcttctcagtccgggaaaagatacaacttaactttaaaccaagtcttaagttttgattatgacatgggattagatgcaccaaaaacaatttcaagtgactgtggggcattcta

SEQ ID NO: 49247 - DNA, 467 bp, Homo sapiens
aaagggaacaaaagctgggtaccgggccccccctcgagagtacttctagaattaattaaaactaaaaattcagttcctcagtaatattactcacacttcaagtgctcaatagccacatgtggctagtgggtacaataatggaccatgcaggtttccatcaccacagaaatattagtagacaagtctgttctagagcctagaaaagtatgtgacactataattattgaatgaagaaatataaaaactattagcattcatggttcaagaagaataacaagaaaacatcaagaagaatgagtatcttcaattttggatctttgtaaaagatccaaaagaatcacaacacaagattatcttattaacttttataaaggcagtaaatttaaggctaggaaaatgccaattaagaaatatttctgtagccaggtgtggtgacacgtgcctgtagtcccagctcaagaggctga

SEQ ID NO: 49248 - DNA, 487 bp, Homo sapiens
  misc_feature 474: n = A,T,C or G
gcaatgtaactcctcactaaagggaacaaaagctgggtaccgggccccccctcgagagtacttctagaattaattaaggcgggggaaataggagaaaaggaaatggctaccaatctgtagtaataaagagatgatcgccgaagaaaacaagctttggactacaaacaaacattcataccataaacaggccataatgtcatgggttttaagttgagaagcatgtgaatacatcacttgcagggaaacagatgaaagaaaccgggactgaacaaatgggcttccccctgggggggacaccaagactcccctttaggggaacaaaataaccccccctaatgggcggggttttaaagggggggacacctgaacccccctttaaaatattaactaatccccgacctgattttttgaaaaaaattaataaaaaatagagtgctaactagactaagaaaaaaaaaaaaaaaaaaaaaaagnggccggccccccc

SEQ ID NO: 49249 - DNA, 482 bp, Homo sapiens
  misc_feature 434, 438: n = A,T,C or G
accctcactaaagggaacaaaagctgggtaccgggccccccctcgagagtacttctagaattaattaaggcgggtccctgcttgtcctatgaactgctcagagctcctgtcagtccagctgggccttctgggttctggcaccatttcgtagccattctctttgtattttaaaaggacgttatgaaagggcttagaccaaaataaatcataatgttacttgagccaccttatatagctgcttggagagtctatgtagttctttctgcatgcattaaaaatgtttagaaatgcttcagcaatggtgtttttttcctcaaagaaaccatggccagtagctaggtgttcagtaggaatcaaagaaaaatcagtaagagctccagattaaacctgatttttaactgaaggaacattctgaggaaaaatacttaaaagtnaaanaaaaaaaaaaaaaaaaaaaaaaaaagggggccccccccgggggg

SEQ ID NO: 49250 - DNA, 466 bp, Homo sapiens
ctaaagggaacaaaagctgggtaccgggccccccctcgagagtacttctagaattaattaaggcggggaatggaaaattatataggcacctaagtttcctttctagttatggtcagtgtttacactgagtattcatgacagacaatgcaccaattttttaataggctatgtatgtcaaaaaggatgttcctttgtggcaaaaacatggacggaacttctgaaacatgtgagagaaacccataaagaggaaatactatgtgaagtatgccggaaaacatttaaacgcaaagattaccttaagcaacacatgaaaactcatgccccagaaagggatgtatgtcgctgtccaagagaaggctgtggaagaacctatacaactgtgtttaatctccaaagccatatcctctccttccatgaggaaagccgcccttttgtgtgtgaacatgctggctgtggcaaaacattt

SEQ ID NO: 49251 - DNA, 509 bp, Homo sapiens
taaacggaagggaacctgagttcggtgccgggccccccctagacagtacttatataattaatgaaggcgggcagataaaaacgtcaggaaagccagaccatcctggctaacacggagaaactccgtctctactaaaaatacaaaaagaaatcagccgggcatggcggcgggcacctgtagtcccagctactcaggaggctgaggcaggagaatggcgtgaacccgggaggcacagcttgcagtgagccgagatcgtgccactgcactccagcctgggtgacagagcaagactctgtcttttagaactttaaaaaaagaaatgggccgacccccgggggggctccaacttgaccctgtaggaattattttaaccgcccctacctggcggctttttgacaattgatcctagaaagaaaaaataatttttcattttaaatcttgattgaatttaagatgtatttatatgcctacaaaaagtctggcttgtaactgttgtataaaataaacct

SEQ ID NO: 49252 - DNA, 325 bp, Homo sapiens
ctaaagggaacaaaagctgggtaccgggccccccctcgagagtacttctagaattaattaaggcgggcggcatggctgacaaggatgacaccggagtttgacgaagaggtggtttttgagacattaaaactaccactactatggaagttccactacttgatggaagtttgacctggacatggtggctcacacttgtaatcccagcactttgagaggccaaggtgggaggatcgctcgaggccaggagttcatgatcaacctgggctgcatagtgagaccccatctctgaatgatatcgaaataaaagtcaaaccaacctcacatt

SEQ ID NO: 49253 - DNA, 575 bp, Homo sapiens
  misc_feature 482, 506, 507, 508: n = A,T,C or G
ctaactaaagggaacaaaagctgggtaccgggccccccctcgagagtacttctagaattaattaaggcgggtggatcactaggtcaggagttcaagaccagcctggccaacatggtgaaaccctgtctgtactaaaaatacaaaagttagctgagcatggtggcgtgtgcctgtaatctcagctactcaggaggctgaggcaggagaatcgcttgaacccaggaggcggaggctgcagtgagctgagattgtgccactgcactccagcctgggagacagagcaagactcagtctcaaaaaaaaaaaaaaccttttttctgtttaaaggttgggaaactttttttggttctcccccttcccgaaccctttttttgatcctaacccaattttttggcaatttaattggggtaaatttagggctttcctcataaaaaaatttgttgcagtttttacagtggaataaaaaaaaacacctgcttttnaaaaaaaaaaaaaaaaaaaaaaannncgggcccccccccccgggggggacccaaattcccctttaaggggggtttttaacccccccctttggg

SEQ ID NO: 49254 - DNA, 325 bp, Homo sapiens
agtccttaacggttaagtgcctacaatgagctcaaattggttgtgtttactaactgacaggctctcttatcataatcctctattagcttgttattattacgataatcgttcctttatccatgagggccatgagataccgggagtttaaataactaacattgtactgcttggaaatgagggtttgcatatgggacatgtccaaagcctagcctcttaccaggacatcaccttgccattcagtgaaacagaaagggcttcattatagtgagagtaattggagaaaattattattccagggagaataaagggctcgggaaaaaaaaaa

SEQ ID NO: 49255 - DNA, 462 bp, Homo sapiens
cgggccccccctcttagtacttctttaattaattttggcggggcgaatactactttgtaacttttatagtcttaaacttttcaataaaattgagtgagacttataggcgcaaaaaaaaaaaaaaaaaaaaaaaaaaaaagcggccgccaccgcggtggagctccaattcgccctatagtgagtcgtattacgcgcgctcactggccgtcgttttacaacgtcgtgactgggaaaaccctggcgttacccaacttaatcgccttgcagcacatacccctttcgccagctggcgtaataacgaagaggcccgcaccgatcgcccttcccaacagttgcgcagcctgaatggcgaatggaaattgtaagcgttaatattttgttaaaattcgcgttaaatttttgttaaatcagctcattttttaaccaataggccgaaatcggcaaaatcccttataaatcaaa

SEQ ID NO: 49256 - DNA, 211 bp, Homo sapiens
aaaactgggtaccgggccccccctcgagagtacttctagaattaattaaggcggggtcaactccgtgtaaccagtaactacagccatttacaattgactccgtttccttttgtaggtttccctgtctgtctgtgttagtagaaaaataaaatcctatgaaatctgaaaaaaaaaaaaaaaataaccccctacaaaaaaaaggcccttttat

SEQ ID NO: 49257 - DNA, 335 bp, Homo sapiens
  misc_feature 135, 178, 179, 180: n = A,T,C or G
aaaggaaacaaaactgggtaccgggccccccctcgagatacttctagaattaattaaggcggggaatacagtgttttcaatttgtacagaatagttagaatattctattaaagtggtgaaacattgagtcaaaanaaaaaaaaaaaaaaaaaaaaaaaaaaaaaaaaaaaaaaaaaannngcgccccccccccggggggaaaaaaaaacccccccaaaaaaagagagtaataccccccccccccgggggctttaaaaaaaaaaaaaaaaaaaaaaggaaaaagaaacaaaccataaataaaaaaaaaaaaaaaaaaataaaaaaaaaaaaaaaaa

SEQ ID NO: 49258 - DNA, 311 bp, Homo sapiens
ataaagggaacaaaagctgggtagccgggccccccctcgagagtacttctagaattaattaaggcgggggaaacaacttgaccaaaaatttgtcacagaattttgagacccattaaaaaagttaaatgagaaaaaaaaaaaaaaaaaaaaaaaaaaaaaaaaaaaaaaaaaaaaaaaaaaaaaaaaaaaaaaaaaaaaaaaaaaaaaaaaaaaaaaaaagcccccccccccccggggggggaaaaaactcttttttaatggggggtttttcccccccccccccgggggggttttttaaaaaaaaaagaaaa

SEQ ID NO: 49259 - DNA, 682 bp, Homo sapiens
aaccctaaataaagggaacaaaagctgggtaccgggccccccctcgagagtacttctagaattaattaaggcggggacacagatccaaaccatatcagcaggcatttcccaaaagaaaaattcaaatggccaataaacatgaaaaggcgctcaccctcattgcaatgagagaaatgaatagtaaaaccacgagagctctacaaactcacaggaattgctacattaaaaagactgacagtggcaataccaagtattggcaaggatatggaacaacaggaattctcacatgctgcccttggatatgtaaagtggtacaaccgttttgaaaacattttggctttaccaaacgaaggtgaagatttacatacattaagattcagaaattccatgtttacatttatagccaacagaaatgtgagcccctgtgcacttgcaacatgtgcaaaaatgtttgtagcaacattaagaaccacaaatttgaaacaacccaaaatgcctcttcacgcaacttagactggataaataaattgtgacatatattcatacaaataaataatatttggcaagggaaatgaacagaccacttcttttcccctagaacaaggatgaatctcaaaaacataattgtgaattaaagagcccagaaagaaatatactatattattctacatatattattcta

SEQ ID NO: 49260 - DNA, 525 bp, Homo sapiens
acaaaagctgggtaccgggccccccctcgagagtcttctagaattaattaaggcgggcggatcacgaggtcaggagattgagaccatcctggctaatacggtggaaccctgtctctactaaaaatacaaaaataataataataattagccatgcatggtggcatgcatctgtagtcccagctacctgagaggctgaggcaagagaagaatcgcttgaacccgggaggtggaggatgcagtgagctgagatggtgccactgcactccaccctggatgacagagcgagactccatctcaaaaacaaacaaacaaacaaaaaaaaccaaaagaaagaaagaaagattctgaaagatggaaagaagaagtcagactacctggctacctgggaacctcaggaattgagaaatgacatggcagtgagttacttgggtttccttattatctcctgtatattctggacaggatactgaagaaagccttcaacctggaaccaccaacaggtggcgtaaacaaaaatacccctac

SEQ ID NO: 49261 - DNA, 377 bp, Homo sapiens
aagggaacaaaagctggtaccgggccccccctcgagagtacttctagaattaattaaggcgggtctttgaaataaggcccgtatttaccctatagcaccccctctaccccctctagagccaaaaaaaaaaaaaaaaaaaaaaaaaaaaaaaaaaaaaaaaaaaaaaaaaaaaaaaaaaaaaaaaaaaaaaaaaaaaaaagctggggccccccacgggggggggagctcctaacccaaaaaaaggggaaagaactccccccccgaaacagagtgaaaaaaaaaatcaaaaaacatacatacacacacacacacaataaaaaaaaataatcgtaagccataaaaaaagagtgagaaaaaaggtgtaataaaaacacttt

SEQ ID NO: 49262 - DNA, 495 bp, Homo sapiens
cgcaataaaccctcactaaagggaacaaaagctgggtaccgggccccccctcgagagtacttctagaattaattaaggcaggagatggcttaaataaataacttaaatttaaaaaaaaaaaaaaaaaaaaaaaaaaaaaaaaaaaaaaaaaaaaaattaaaaaaaaaaaaaaaaaaaaaaaaaaaaaggcggccgccaccgggggggagctccaattcgccctatagggagtcgtattacccgcgctcactggccgtcttttaacaacgtcgggactggaaaaaccctggcgttccccaacttaatcgccttgcagcacatccccttttccccagctggcgtaataccaaaaaggcccgaaccgatcgcccttcccaacaattgcccaccctgaatggcaaatggaaattgtaagcgttaatattttgtaaaaaatcccgttaaatttttgttaaatcacctcattttttaaccaaaaggccgaaatcggaaaaa

SEQ ID NO: 49263 - DNA, 394 bp, Homo sapiens
  misc_feature 302: n = A,T,C or G
aataaagggaacaaaagctgggtaccgggccccccctcgagagtacttctagaattaattaaggcgggtgcaagccttcgctgtgccgagccttgtgtttctgacgcaagccaaatgaagaaaagcaaagcttaaaaaaaaaaaaaaaaaaaaaaaaaaaaaaaaaaaaaaaaaaaaaaaaaaaaaaaaaaaaaaaaaaaaaaaaaaaaaaaaaaaaaagggctcgccctgggggggaggcacaatggctcacgcatgtaatgccaacactccccccacgctgaggcggtggataaaaaagncaggagatggagagcatcctggctaacacggtgaaaccctgtctctattgataaaaaaaaaaaaaaaaaaaaaatggcgggccccccccccg

SEQ ID NO: 49264 - DNA, 272 bp, Homo sapiens
aatataataagacaggattattggaaatttgttataatgaatgaaacattttgtcatataagattcatatttacttcttatacatttgataaagtaaggcatggttgtggttaatctggtttatttttgttccacaagttaaataaatcataaaacttgaaaaaaaaaaaaagaaaaaaaaaaaaaaaaaaaaaagccccccccccccgggggggcccccccattccccctaaaggggaggttttttccccccccccgggggcctgtttttt

SEQ ID NO: 49265 - DNA, 462 bp, Homo sapiens
taaagggaacaaaagctgggtaccgggccccccctcgagagtacttctagaattaattaaggcggggtgtttaatagctgactgaaatgttaggtttcctaaagggtacagtgccgtataaaacaacctgcctcatatatatctcctgctaacgttggactatttgggaaaaggaaaagagttgggaaaataggttttaaggtgagttttattcaaaagaattctttcttgaaactagctggtttgtggattcagatactctgatccttacagaatccaagaggaagctttcataaaaacaattcatcaaatatttccaatataattcgaatggctaattttcagttgctaattaattagcagctttgtaatacttgatttgggagcatttacttggaaatcctaaggactataataaaagttttcaacatatttctaaattgtgtgagtttccagctgtag

SEQ ID NO: 49266 - DNA, 428 bp, Homo sapiens
gcgcgcattacaccctcactaaagggaacaaaagctgggtaccgggccccccctcgagagtacttctagaattaattaaggcggggcacggtggtgggctcctgtagtcccacctactctgaggctgaggcaggagaatggcgtgaacccaggaggcagagcttgcagtgagccgaaatcgcaccactgcactccagcctgggcgacagagtgagactccgcctcaaaaaaaaaaaaaaattttaacagtgggccaggcccaatggctaatgcctgtaatcccacccctttgggaggccgaggcaggcaaatctaaaaacaaccctggccaacatagggaaaccctgtctcccctaaaattccaaaaaaaaaaaaaaaaaattttaaaaaaaagcggcccccccccgggggggcccccaattccccct

SEQ ID NO: 49267 - DNA, 473 bp, Homo sapiens
caaccctcactaaagggaacaaaagctgggtaccgggccccccctcgagagtacttctagaattaattaaaatatgctaagagcttaaaaaacatcaggtctttcttgagttctgaacatccattagtgaagaaaatgcaagattgaacttatattttggcatggcaaatactaatgctcatcccgccttaattaaggcgggggagagagagagagaagaaggagaaggaggagaaggagaagaagcagaagcaaaaaaggcagagaatgaggacagaacagctctgccagttttagaatgaaattacacatgaatatatttttaaatttacttgttgggtttttgaactgattatgggcagtttgactgtccttaattaaggcgggggaaggaggaggaggtgcaacagcaaaagttggcagaggagagacggcggcagaatttacaggaggaaaaggaaaggaagttggaa

SEQ ID NO: 49268 - DNA, 414 bp, Homo sapiens
accctcactaaagggaacaaaagctgggtaccgggccccccctcgagagtacttctagaattaattaaggcggggtaagggctgaggcagatgctggggtggttagctgttgtcacttacctccctacgatcagttttattgtgttggtaaagacgccattcagagccagggcaaggctggcagctgcaaagcaaagccattagttgaaaggatctgtctaggaggaaaggtatggtcatggcctcgttatgagagcagccgtgctgtttctgagatggatagaatccaaccaggcctgggcacaaaaataattagggtcctcagtgatcactcttttgtagccgagaacttttgtactaggccaaagacatttctgaggtacaaataacccagtgcatttaggcacagggctg

SEQ ID NO: 49269 - DNA, 516 bp, Homo sapiens
cctaactaaagggaacaaaagctgggtaccgggccccccctcgagagtacttctagaattaattaaggcgggaggtaagtactaccgattaccgaatccagaggtccagattagctactaatttgagttagaacaataataatcaactaccatttacagtgtatctctatgctattacataaagatatactggttcctgcccttaggcagcttagaagaggagacagcatttacaaaataacttactgaagtgacttagtgattgtttaggagatgggaagaacattcaaggaatatatttaacagacttgtagtgttttctttgggtaagaaatttgccattttaaatctaaaagagaaataagagtgtcctcttgcttgacattaaatttagtttactagtaaaataaatgaagaaacttaatacaaatggtctctagtgtataagtgatgagcatttctaaagaaaataagttagttttttggatattggtagaaacaatgttgtatgtggac

SEQ ID NO: 49270 - DNA, 494 bp, Homo sapiens
  misc_feature 464, 467: n = A,T,C or G
ccctcactaaagggaacaaaagctgggtaccgggccccccctcgagagtacttctagaattaattaaggcgggagaatcgcttgaacctgggaggcgtaggttgcagtgagctgacatcgctcactccactccagcctgggcaacagagcgagactccgtcttaaaaaagaaaaaaaaatccttcaattcatttaaattctatggcctttatatgtatagctcctccatatcctcctaaatgtctttgtgagtgaccttttcccttctctctcagcctttcagaccaggacatcactggctcttatccaggttgagcatcccaaatctgaaaatccaaaatccagaatgctccaaaattcaactttctgagcactgacgtggcgctcaaaggaacttctcattggaacattttggacttcaaatttatggatttgggatgctcaaccggtattctataatgcanaanaaaaaaaaaaaaaaaaaaaaaaaagcg

SEQ ID NO: 49271 - DNA, 581 bp, Homo sapiens
tacataaagggaacaaaagctgggtaccgggccccccctcgagagtacttctagaattaattaaggcgggtggttcacttaaggtcaggagttcaagatcagcctggccaacaacttgggtgaaaccccaagatctctacaaaaaaatacaaaaattagtcaggtgtggtgatgcacacctacagtcccagctactcccgggctgaggtgggagaacagcttgaactcaggaggcagaggttacagtgagctgagatcacaccactgtgctccagcccatgttataaagtgagaccctttcttaaaaaaaaagatttactaaaccttatatctgaaagtaatctctctcacatacagccatacacacatacaacccatttaagtttaattttagacatgatatcaaagtgtattctataacacattagcctgtaaggtacctgtcaaaagatctatgatcaaataaggttgggaaatactacaaattatagccccatcttgaaaagccacaatacttactaggattataggtcaatcccaatgactctaagaagtcaatcagtatagaattctacttgact

SEQ ID NO: 49272 - DNA, 440 bp, Homo sapiens
ccctcactaaagggaacaaaagctgggtaccgggccccccctcgagagtacttctagaattaattaaggcggggtaggaagggcaaaagcctcattggagtggattcaggtgagaccagaaaagaggaattggagataggatgaacagataaaagaggcgattgacttaagaaaaaaagcattagctctaataaattctgattgtgcagactatgggctttaatttgatagaggtataagggaaaaggtacattttaaagcagacataatttcttttattggttctgggatcagctgagctgtctgactcactgcacacagtattggccatttcactgatttaaaagctttcttggtaactttgatcaacctatcaaactggcatttcaaaagttactgaacaattccatgtttgaaatacagtcttagttcctagattt

SEQ ID NO: 49273 - DNA, 525 bp, Homo sapiens
gggatatcaaaatgccaatgcctggttagaatagataaaatatttcatccgcactttaaacaaaagcaattgttatgctcgtgctcatggcaggccagagggccagattgtcccctttccactatgatggtcctccagtcaaccaggcatgggctgtatggtagctctttttccaggattccacagcctggggtaacaagtcgtgccaagctctttctctgctatatcccgaagttcaagaccccacaggttagcccccgagggccatccagcttctgtctcctgacactgagttcattttgtgtctctcacgacaaagaggaaacttagcatcccttagagacctaaaaggatgcggtgagcttaagactttccaagagctcaccaaccagtcagcccttatacacccccgagcagatgtatggtgatattgtggtagacctttgctggacactctgcctagtaactggagtgtcacttgcgccctaatgcagttggctatccctttcaccctggcatttcatc

SEQ ID NO: 49274 - DNA, 188 bp, Homo sapiens
  misc_feature 183: n = A,T,C or G
gggtaccgggccccccctcgagatacttctagaattaattaaggcgggaggagtaagccctgggagagggtgggggggtgggcagcatgggagcctgatccttctgacataaataaacacaatgcatgcaggaactgaaaaaaaaaaaaaaaaaaaaaaaattggaaaaaaaaaaaaaaaaanaaaaa

SEQ ID NO: 49275 - DNA, 464 bp, Homo sapiens
  misc_feature 410: n = A,T,C or G
accctcactaaagggaacaaaagctgggtaccgggccccccctcgagagtacttctagaattaattaaggcgggtggatcacgaggtcaggagatcgagacgtcctggctaacacagtgaaactccatctctactaaaaatacaaaaaattagctgggcgcggttgcaggtgcctgtagtcccagctactcgggaggctgaggcaggagaatggcctgaacccgggaggcggagtttgcagtgagccgagatcgtgccactgcactccagcctgggcgacagagtgagactccgtctcacaatataaaaaaataaaaaccaataaagtgggggccccccccggggggggccccccattcccctttaggaggagtatttgcccccccccttaggggggttttttaaaaaangcctgtggttctgtacagggcttatttatttactgttaataaacagatcttcca

SEQ ID NO: 49276 - DNA, 457 bp, Homo sapiens
ctgggtaccgggccccccctcgagagtacttctagaattaattaaggcggggagaaatcaataggaattattcaatttgaagaacaaagagaaaaaaggttttaaaaagttaacgtattatcactgacctgtggaacaatgctatgagtctagcatatctgtatttgctatttcagaaaaagaggagagaaataatggagcagaaaataatttgaaaatatacttgctaaaaaattctcatttttgtgacaataattgatttttatatccataaattttaggaaaacaaaacacgataaatataaagaataccatacctaggcatatcgtaagctaactcctgaaaagcaaatgtaaagagaaaatattgaaaatcattacattatatatagagaaaagatgatagaagttatcactgactttttatcagaaacaaaggagatcagcagacaatggg

SEQ ID NO: 49277 - DNA, 404 bp, Homo sapiens
taaagggaacaaaagctgggtaccgggccccccctcgagagtacttctagaattaattaaggcgggggactatgagaatcgaacccatccctgagaatccaaaattctccgtgccacctatcacaccccatcctaaaaaaaaaaaaaaaaaaaaaaaaaaaaaaaaaaaaaaaaaaaaaaaaaaaaaaaaaaaaaaaaaaaaaaaaaaaaaaagggcccccccccccgggaggggccccaaccccccctaaaaaggagatttaatcccccccccaagggggccaaataaaaaaaattaccctaaggataacaccgcaatcctattctaaagtccatatcaacaatagggtttacaacctcaatgttggatcaggacatcccgatggtgcagccgctattaaagg

SEQ ID NO: 49278 - DNA, 460 bp, Homo sapiens
taaagggaacaaaagctgggtaccgggccccccctcgagagtacttctagaattaattaaggcgggtacctgtaatcccagctacttaggaggctgaggcaggagaatctcttgaaaccgggaggcggaggttgaggtgagccgaaattgcaccattgcactccagcctgggcaataagagcgaaactccatctcaaaaaaaaaacaaaggaacgaaggaaggaaggaaagaattggcagttcccatctgttttttttgtgtgaaacatgggagtttaactgaagtctctctttcctaataaatgttcccactctaaaaaaaaaaaaaaaaaaaaaaaaaaaaaaaaaaaaaaaaaaaaaaaaaaaaaaaaaaatccccccccccccccgggggggggccccccccccccccttaagggggttttttcccccccccccttgggggttaaaaaaaaaaaaa

SEQ ID NO: 49279 - DNA, 432 bp, Homo sapiens
actggccgtcgttttacaacccgaaacaaaggaaaccaatgctgggtgccgggccccccctcgagagtacttgtagaattaattaaggcggggggaagaagaagaggtcaggaaataaataccttcctggccaacatggtgaagccctgtgtctgctaaatacaaaaaattaaccatgtgtggtagcacatgcctgtaatcccagctacttgggaggctgaggcagaagaatcgcttgaacctgggaggcagaggctgcagtgagctgagattgcaccattgcactctagcctgggcaacaagagtgaaattccatcccaaagaaaaaaataaaaaaacaatataaagggggccccccccggggggagccccaaattcccccttaaaaagttgctaaaaccccccccgtatacgtattttttataaaatatt

SEQ ID NO: 49280 - DNA, 492 bp, Homo sapiens
  misc_feature 44, 369, 370, 372, 430: n = A,T,C or G
taaagggaacaaaagctgggtaccgggccccccctcgagagtancttctagaattaattaaggcgggggcagaaaatgggccctcttggccgtcgggacttgtactgttggtgactccgtctccttagacggtggagcctgcgtgacccagaaaggccacagctgtgctcctgattctcaggcctcgggacccagaccaggatttccatcagctcccctggctcgcaggccttctgacttctgactcaccatcagctctcctggatccagcttgccaatggcagatcgtgggactccttgccctctaatcgcatgaaacaatgcccacagtatgtctcctattaaataaatatatatctaatctcttannanaaaaaaaaaaacaaaaaaaaaaaaagggggaaaaacaaaaaaaaaaaaaaaaaaaaancccccgccccccccccggggggggacccccaaccccccttttggggggttttaccccccccc

SEQ ID NO: 49281 - DNA, 251 bp, Homo sapiens
  misc_feature 191, 193, 194: n = A,T,C or G
ggaacaaagctgggtaccgggccccccctcgagagtacttctagaattaattaaggcggggaaacgggtgttccgaataatatcctggaagttatcaggacacctattttaaatataggcctgaattttgtaaagtaatatttaaggtggtccgtgataattaaataaaatgcttaattcatgtggctcanannaaaaaaaaaaaaaaaaaaaaaaaagcgcccccccccgggggggacccccaatccccc

SEQ ID NO: 49282 - DNA, 368 bp, Homo sapiens
  misc_feature 290, 340: n = A,T,C or G
acttctagaattaattaacgcggggaattcttttaatagcttctctagaatactaaaactaacctatacaattatcaattaaatgtataccttttattagtaggaaacgctctttgggggctcatatttattagtgaaaggacacactgtggcaagtgttttgttttactcctcttcacaaagacaaaagaaattagatctcaacaaaacatttatctcaccttttcctaaagatcacgtctcaggtgtgggcctctaaacctactgtcatacgtacattcccatatcanaagggcatacagaaagccactatgccatcttaagtacactcccacattanaaagtgatgcaaagggcacacacactca

SEQ ID NO: 49283 - DNA, 347 bp, Homo sapiens
acaaaagctgggtaccgggccccccctcgagatacttctagaattaattaaggcgggaggggaacggactgcattcaaccagcttccttgaaaaaaagtgaacaagaaatttgattggacattagaacacacagtggaaactgctataacgtgcctgtctactgctctatcacttgatttcaaaccttcaaaaatccaagttggagacttgactgttgaagatccttacttcacgattcttacagaagcagagattggtgctcaccttgatgctctagcatagagagactaaacattgacgttagtttaccagatccgtgaagccacttacctgtgtgtgtggtaac

SEQ ID NO: 49284 - DNA, 452 bp, Homo sapiens
  misc_feature 324: n = A,T,C or G
aaagggaacaaaagctgggtaccgggccccccctcgagagtacttctagaattaattaaggcgggattaaaccaggcagtacagggttactcggggaagccagactgctgggatttcctgtcgctttagccagaataatccaggtatatggatatacagataatctgaaagagtttctcatttttatatttgtggaacatcgtgtaagaaaaactgaagagcaagtgcctgaaataaaatcccccacatgtatcagcctgcaaaacaatgtataactaagacataaactgtagactcactcctgaaaggctactgcaaaaactntgtgctgcccctacccggggggggcaaaatgcccaaggcaataagtggggaggaaccccccccgcagacggttttaaaaaatgatgcaagaaaatcaaatgggaatctggggacccaacacaacatcc

SEQ ID NO: 49285 - DNA, 214 bp, Homo sapiens
attaaggcgggctctcaatacaggaggcctgggggcagcaaagggaataggatggaaaaaagtttaaatatggctgcaattcggcaaggtgtggtggctcacacctgtaatcccagcactttgggaagccaaggcaggtggattgtctgagtccaggagttcaagaccagcctgggcaacagagcgagactccgtctcacaaaaaaaagaaaaa

SEQ ID NO: 49286 - DNA, 453 bp, Homo sapiens
  misc_feature 436, 437, 438, 439, 440: n = A,T,C or G
tactggccgtcgttttacacacaggaaaacagcgtataaccatgattactggccgtccctttccacacagtacatcatatattaccttgatgccgtgaccgacaatggttaatggaagtagaaggaggtaatagaaaagggaaaatcagttttcctaaaatgcaatgtctgtcatattattctcctgctcaccaggactttccttgtctaagaattatgtacccatttttaacctttccctccaaggcttcccaaaaaataacaccagggttccactatgggcatcttatcccttatttggttttctaaccattttttgaactgggcatggtggtttgcacctttaatcccagctgatcagaaggctgagacagaaggattgcaagcccaggagttcgagaccagcttgggcaatatagtgagaccccccatcccnnnnnaaaaaaaaaaaaa

SEQ ID NO: 49287 - DNA, 566 bp, Homo sapiens
ctcactaaagggaacaaaagctgggtaccgggccccccctcgagagtacttctagaattaattaaggcgggagagggctgatgatacagttttgatatgatcgagctttgaagtggactactgtaacacacatgttcgggaaggccatgattagaatggagttgattgggaaattaaagataaaaacgtccttttagaagaaacctgattaattccatcctgacaagtatgacgcgcaagaaaagatgacgggcttcgaatcagaaagctaagggctgcacaaaacataaaaggatagtggcgcgcccaccagctggggatggctttccatccttcttgctttctgtacatcgccctatcttgggtcctttgtagcaagtggacctaacaagttgagcaaaatgaatatttggatccatgttcctcttgtgaccctgagtcttcatgcaaggagatctgaagctgaacaatgaaaatcttcagcagaaatagaaatggccgtggattgtaatacacactgaaattctgactttctgaatttaaatgtagaataaattttaccaact

SEQ ID NO: 49288 - DNA, 338 bp, Homo sapiens
cctcactaaagggaacaaaagctgggtaccgggccccccctcgagagtacttctagaattaattaaggcgggaagtattttgaaagcgtcatgctggcacaactggatatccatattttttaaatgaaccttgaccactatctcataccacatttaaaacttaatttgagatgaatcataaacataattataaaagctaaaacttctgaaagaacgcagaggagactatcctcgcaatgttttgaggaggcaaagatttttaggcaggatacaaaaagctcttactagaaaaagaaaaaggataaatttgtactacactttccttaaattaaaaacgt

SEQ ID NO: 49289 - DNA, 440 bp, Homo sapiens
  misc_feature 327: n = A,T,C or G
agcgggaaaaagtgaaagtagaacaagtttttgattgcctcaaatataacaaggaggagtcagagcataattttagaggtagcaaatcaaaagcagaaggacaaatttttaaaaaaggaaaaaagaggggccaaaaatactagcttaagtgtattactataaagataaatattagaacaaaaataaaaatctttctaaataccaagacgaaaaaaacccaaataaatagtagaagacacacagtaaatataaaataaaatgacaaatctgagactaaacatatcagtcatatcaattatataaatggacatgactcatctaactaanaaaaaaaaaaaaaaaaaaaaaaaaaacggcccccccccgggggggaccccaaattccccctaaagggaggttttttccccccccccctgggccgttttttaacaaaaaaaaaa

SEQ ID NO: 49290 - DNA, 323 bp, Homo sapiens
  misc_feature 247: n = A,T,C or G
acaaaagctgggtaccgggccccccctcgagagtacttctagaattaattaagcggggattgtgtgttgaaggataaaggttgtagctataaaagagtaacataaggaatccttttggtgatggaaacgtcctgtttcttagctgtatcaaggtcagcatactgttgtgatgttgcagcagttttgaaagatgcctccattggaggaaactgaaaaactgcatatgaagctataattaattcaaaanaaaaaaaaaaaaaaaaaaaaaaaaagcggccgccaccgcggtggagctccaattcgccctatagtgagtcgtatta

SEQ ID NO: 49291 - DNA, 722 bp, Homo sapiens
  misc_feature 242, 698: n = A,T,C or G
aaggaaacaaaagctgggtgccgggccccccctcgagagtacttctagaattaattaaggggggtttagatctttatctcaagccataagtgaaacaaattaatttggtcagctacagcggctcacacctgtaatcccagcactttgggaggccgaggcaggcggatcacgaggtcaggagatcgagaccatcctggctaacacggtgaaaccccatgtctactaaaaatacaaaaaattanccaggtgtggtggcaggcgcttgtggtcccagccactcgggaggctgaggcaggagaatggcatgaacccgggaggtgaagcttgcagtgagccgagatcacgccattgcactccagctgggcgataaagtgtgactctgtctccaaaaaaaaaaaaagggggggggttttttccccccccccccaaaaaaaaaggaggggggggccccccacccaaaggggccccttttgtggaaaaaaactttctcttctggggggggggaagcccccccccccccccccccccccaggggggggggggggggggggacccccccccccccccccccgtgcgggtttttttttttaaaaaaaaaaaatagaaatttttgttggtgggagaagaaaagtggttgtaagaaaaaggaggaagaagtgccccccctggaagagaaaaaaaaaaaaaaaaaaaaaatnacgggggggggggggggggggggg

SEQ ID NO: 49292 - DNA, 544 bp, Homo sapiens
attcactgcccgtcgttttacataaagggaacaaaagctgggtaccgggccccccctcgagagtacttctagaattaattaaggcgggagggacacacctgtgattctagcactttgggaggcccatgctcctttttgcggattggttgagcccaggagttcaagaccaacctgggcaacatagggagaccctgtactctctctctctctctcacacacacacacacacacacacacacacacacacaaattaccaccgcatggtggcgcatgcctataatcccagctacttgggaggctgaggtgggaggatcacttgcccccaggaggtcgaggctgcaattatctatgatgatgccactgcactccagcctgggtaacaaaatgagactctgtatcaaaaaaaaaaaggggggccccgggatttctttttcggggccttttttatactgaaatattacagggggtttgtcccagcgggttaacccccctttgtaaatcctcccaaaatgggggaaacaccccaagtcccctttcaaagggg

SEQ ID NO: 49293 - DNA, 323 bp, Homo sapiens
ctaaagggaacaaaagctgggtaccgggccccccctcgagagtacttctagaattaattaaggcggggttctaaaactgtttttaactcccagatttcaactttcatgaaccagggaaataaatccaataatatttaacaacccaagattaataggccacgatgaggttaaactcaatgtgaaactgtcctcctaggataaggtttaaagtggctttttgggggctgggtgccgcggctcacgcctgttattccaacattcagggaggctgaggtggcctaatcacttgacgccaagagttcgagaccagactggccaacatg

SEQ ID NO: 49294 - DNA, 620 bp, Homo sapiens
  misc_feature 551, 554, 582: n = A,T,C or G
cctcactaaagggaacaaaagctgggtaccgggccccccctcgagagtacttctagaattaattaagggggctttgatgataaatgaaccccaagcccactctagcctttcacttaagtcctctgtcaagcattttaactgagctgctcaaaagaccaggcttacaaattagcaatttcagtttgttccctttttcctactggggcctaggtattcaatcaggaaaaactgcttctcaaactgacacagctagctggacagcttttcttagagccctcaggagacagggtcctctagacttcagagttttaggagagagagccagggagttccagattggtttagttctgaaaaacagactaagtatctctaaagaggggaagcataataaagattagacaggccaggcgcagtggcttcatgcctgtaatcctaacactttgggaagccaaggcaggagggtcacttgagctcaagcacttgacaccagcctaggcaacacagttaccaacacaggcaacataaccagcctcgtctctattaaaaagtanatntaggccaggcatggtggctcacgcctgntatcccagcacgttggggaggccaaggcagatggatca

SEQ ID NO: 49295 - DNA, 526 bp, Homo sapiens
taaagggaacaaaagctgggtaccgggccccccctcgagagtacttctagaattaattaaggcgggaatagatagtgcttaacagttgcaatcttgatcaacttataaggcttgaacctcagcctccctgctctcattccaaaggaaacaccagtgctaaaatcaactacaaatgtgagcttataatgtaaactgaagtcaatgtgagactggcgggtaggctggactcctgttttaatgtggtatagagaaaaagaacaaaagccccttactcaagctgcagcttacttaacttctagccagtcagcaacaaaagacccaagaagctatgaaccactagttcctgtcttaaagaggggctggaaacttccctgcgaccctgcatgtgcaattagaagtaaacttcgccttatactggcctcttcctcattttaatgctgaaaatcacacccaggtgtggaaatttaaactgctaatgttacgtgcaatgtatgaaaaaaacatgatggcagggcgcggtggctca

SEQ ID NO: 49296 - DNA, 446 bp, Homo sapiens
  misc_feature 400, 402, 425: n = A,T,C or G
taaagggaacaaaagctgggtgccgggccccccctcgagagtacttctagaattaattaaggcgggatgagagagaatattatttcagggttgttgtaatagaaaaagtctagttttcagcaacagcaatgaaatacaaagtgtgcaaataaattaatgaaaaaataatggcccactaataagataacagatattaacagaaacagtcctagaggaatcgtaggcattgaaaaatctagaaaaagtctttaaattacctgtcttaaatgtgctgcaaagataaataacatcaaaaggaaaaacatttcagaagaatagtgtctcatcaaatagaaaatatcaatagagatagagattataaactgaagccaaactctaaagttgaaaattaagataaccnanaaaaaaaaaaaaaaaaaaaaaanggggggccccccccggggggg

SEQ ID NO: 49297 - DNA, 334 bp, Homo sapiens
ggcccgccctcgagagtacttctagaattaattaaggcggggtaaaggaacataaaggaaggtaagtttactatacttcacttgaactggtaaaatcattataccagtagagcatgatgtatgttatggctataaaatgtcatacctaccaaccactagaaaaagctatacaaagagatatattctaaaacactctacataaatcacaaggaaattctaaaaaaatgttcaagtaatctacaggaaggtaggacaagtaatctacaggaagtaaacaaaaaaaaaaaaaaaaaaaaagggggcccccccccggggggaaccccaattccccctt

SEQ ID NO: 49298 - DNA, 417 bp, Homo sapiens
agggaaccaaagctgggtaccggtccccccctcgatagtacttctttaattaattaaggcgggcgcctataatcctagctactagggaggccaaggtgggagatcgcttaaacccaggaggtggaggttgtagtgagccaagattgcaccacggcacgctagcctgggtgacacagcaagactccatctcaaaaaaaaaaaaaatttcttttcaccagggcttatagcctttggaaatatatttgtttcctataactttgaccaaaatctgtccttatgttgggggggtaatatcccaattagttttatataatatcctcataaccttttttaatttttgaaaaaaccccaaaaggttttaaatggatagtctgtttaattttaaacaaattattaccctttataaaaagttttttt

SEQ ID NO: 49299 - DNA, 264 bp, Homo sapiens
  misc_feature 124: n = A,T,C or G
aaagggaacaaaagctgggtaccgggccccccctcgagagtacttctagaattaattaaggcgggggtatgtcagtgtcactggatgtcaaacagtaataaattaaaccaacaacaaagcgcanaagaaaaaaaaaaaaaaaaaaaaaaaaaaaaaaaaaaaaaaaaagggggggggcccccggggggggggaaaaaaatccctctttaggggggggttaaacccccccccctggggggctttaaaaaaaaaaaagaaaattgt

SEQ ID NO: 49300 - DNA, 465 bp, Homo sapiens
ctaaagggaacaaaagctgggtaccgggccccccctcgagagtacttctagaattaattaaggcgggaaaaggtaactaataatcaagggaacaaataaactaggagcagactcacaaataacctagatattgcagttaacatacaaggcacttaaaacaactaggaataatatcttaaagaaaatagaggaaaagtacaaaagggatgaaaagatggagaatttaaaaggttagaatctataagaataatcacatgacagtctagatttgaaaaatacaatttctgaaactaagaacatattggatgggtttaacagagtcagaatacagcaggagacagaattagtgacttcgaaggcagtaacatagaaaatattcagactgaagcacagagagaagaaataatagaaagagaccagggcaaagattgatgtgggacatggtctaacgtccatgtaattgga

SEQ ID NO: 49301 - DNA, 386 bp, Homo sapiens
ctcactaaagagaacaaaagctgggtaccgggccccccctcgagagtacttctagaattaattaaggcggggggtccagaaggcagactgctatgggttgaactgtggtccccaagaaatgtatgtgaagtccttaacacccagtatcttacacagtaaccttatttggaaaaaggatcattgcaaatgtaattaggatgaggtcacatgatggagtagggcaggaccctaatccaatatgactggtctcctaataagaagatagccatatggagacagagacaaaggaagaatggaatgtgaagatagcagcagagattagggtgatttaaaaaaaaaaaacaaaaaaccaaaactgtcaaccactgacatccatcactagaagc

SEQ ID NO: 49302 - DNA, 577 bp, Homo sapiens
aaagggaacaaatgctgggtgccgggccccccctcgagagtacttctagaattaattaaggcgggggaaatacctaccctttgaaataccacctagaggagggggttatagcacaccctatcatgtgctccagactatgaaatatttgcacgttactctgaattgtgaagaacaatatattttcaggactcaaaagatttgcttgctatggacttgtcttgcaacataaagaatctttttgtggacctcttctccaagtaccaaaaagcaactgaaagaaacaaacatggagaagaagagaagtaacaccgaaaaatctttaccatcactttacaaaggggaccctgactgtgttaaagaagaagtgggagaacccatggctgggagcatagtctcacacaaactctctacggaacagcagcactgagattaggcacagagcagaccatcctcctgctgaagtgacaagccacgctgcttctggagccaaagctgaccaagaagaacaaatccaccccagatctagactcaagtcacctcctgaagccctcgttcagggtcgatatccccacatcaa

SEQ ID NO: 49303 - DNA, 500 bp, Homo sapiens
acaaaagctgggtaccgggccccccctcgagagtacttctagaattaattaaggcggggatgtgagtgttctgccttccaataaatattaggccctaaaaaactgcatacttttttagcccttttccttaaagggctccactctaaagtcagtaattgaattaagaaacaaactggccagacgcagtggctcacgcctgtaatcccagcaatttgggaggccaaggcaggaagattgctagaagtcaagaattcaagaccaccctgaggaacaaaatgagaccacatctctacacaaaatgtaaaaattaactgggcttagtggtgcgtgcctgtagtgccagctattcaggaggctggggtgggaggatcacttaactaagttcaaggctatagtgagctatgatcacaccactgcactacagcgtgggtgacagagcaagaccttatcccaaaaaaaaaaaaaaaaaaaaaaaaaaaaaaggggccccccccgggggg

SEQ ID NO: 49304 - DNA, 456 bp, Homo sapiens
  misc_feature 377, 378: n = A,T,C or G
taactaaagggaacaaaagctgggtaccgggccccccctcgagagtacttctagaattaattaaggcgggagatgaaaatacctttaaaatgggaaaaaaggccaaatatttaaaacagatccatagaaaatatagatatgtacattatacagtaggagaattgaaacaaaaacattgaatatattcaataaaatataaaacaaggtgaaatattatataagagaattgggaaaataaaatactgaatctcattgctctacatattggctttgtaacaaaatagacaaaggaaaaaaagatgtttggtgactagaacgtgtgtctgtaaaagttacccaactcgataaggaaaaaaaaaaaaaaaaaaaaaaaaaanngggggccccccccggggggggaccccaattccccctaaagggggggtttttccccccccccttgggggggtttttaaa

SEQ ID NO: 49305 - DNA, 688 bp, Homo sapiens; identical to SEQ ID NO: 48683

SEQ ID NO: 49306 - DNA, 449 bp, Homo sapiens
  misc_feature 371: n = A,T,C or G
actcctaactaaagggaacaaaagctgggtaccgggccccccctcgagagtacttctagaattaattaaggcgggagacacaaccagcaagcttgaggtcacttcaattcgtattatcccaactagcagaaataaaaattaatgaataaagatgaacagagcctaagataacaatgggatactatgaaatgtgccattacaagcattatgaaaactcccgaaagaagggagaaagataaaatggggcagaaagaacatctgaagaaataatggctaaaaagttcccaagcgtgatgaaatacgtgaatctacacattccaaaatctcattgaattcatagtctccaaaagaaaaaaaaaaaaaaaaaaaanggggggccccccccgggggggaccccaaatccccctttaagggggggtttttcccccccccccggggccggtttttaa

SEQ ID NO: 49307 - DNA, 291 bp, Homo sapiens
  misc_feature 19, 91: n = A,T,C or G
taccgggcccccccctcgngggtacttctagaattaattaaggcgggcggatcacgaggtcaagagtttgagaccagcctggccaacatgngtgaaaccccatctttactaagaatacaaaaattagctgggcatgttggcacgtgcctgtaatcccagctacttggcaggctgaggcaggagaattgcttgaacccaggaggcacaggtcgcagtgagcagagatcacgctgctgtactccagcctgagcagcgggagtaagacttgtccttgggaaaaaaaaaaaaaag

SEQ ID NO: 49308 - DNA, 304 bp, Homo sapiens
aaaactgggtaccgggccccccctcgagatacttctagaattaattaaggcgggagtggcagctggaagaagagggagaggtggtagcaacattgagggccgagtgagagcgtgctccagcctggctcccacaggcagctttaaccattaaaactgaagtctgaaagatggggcgacctcggaacaaaaacccaacctccgagcagtacatgctaagacttcaccagtcggcgcgccctcctatactgaattgatccaataacttgacaaacggaacaagttaccctacggataacagcgcaat

SEQ ID NO: 49309 - DNA, 652 bp, Homo sapiens
ataaagggaacaaaagctgggtaccgggccccccctcgagagtacttctagaattaattaaggcgggggactatggtggctattgcaacattattcaatgtagaccttaaggtgaaaagtattacaaagagagacaatttgtaatgataaaagatttgattcaccagaaagtttcaacaggtctaatattttaatgatttaacaatatagcctcaaatatataagcagaaatgaacagaactaaaatgagaaaagacaagtctgcattcccagattttaatatactcagtaacagaacagcagccatgcaaaaatacgtaaatatgtaaagattggaataatactttaaaacttaacctaattggcatatatgaaacagaatacccaacaactgcaaaatacacattattttcaaatgcagatagaatatttatcaaaactgaccatattccaagtcataggaatggaatatattctttggccatgtatcattcacttagaaatcaataataatttcaaaaatagaaaaattctattaagttcataaattaagaaatacacttttaaataactcatggatcagaccataaattacaatgaaaattagaatatttttgaactggatagtgaaagtgctacatgttaaaactta

SEQ ID NO: 49310 - DNA, 526 bp, Homo sapiens
  misc_feature 226, 403: n = A,T,C or G
tgggtgccgggccccccctcgagagtacttctagaattaattaaggcggggatttgacttgtttttccatttggatgccttttatttctttctcttgcctgattgctctggctaggacttccagtactacattgaatagcagtgtaattgggaaggaaggttgaaaatgaatgtacacatagttaaaggatgccaattattgctggaaaggcagctcatcatgcanagtgaaatgagggaaagacaaatggccatgcagattgcgtggtctcgggaattcctcaaatattttggaactttttttggccttgcagccatctctttaacagctggagcgattaaaaaaaagaagccagccttcctggtcccgattgttccattaagctttatcctcacctaccantatgacttgggctatggaacccttttaaaaagaatgaaaggtgaagctgaggacatactggaaacagaaaagagtaaattgcagctgccaagaggaatgatcacttttgaaagcattgaaaaa

SEQ ID NO: 49311 - DNA, 474 bp, Homo sapiens
taaagggaacaaaagctgggtaccgggccccccctcgagagtacttctagaattaattaaggcgggagtggagtggaagaagagggagaggtggagcaaagtgagggccgagtgagagcgtgctccagcctggctcccacaggcagctttaaccattaaaactgaagtctgaaaaaaaaaaaaaaaaaaaaaaaaaaaaaaaaaaaaaaaaaaaaaaaaaaaaaaaaaaaaaaaaaaaaaaaaaaaaaaaaaaaaaaaaaaaaccccccccccccccccgggggggaatatcttttttaaaaatagaagtttggaacacccccctcctgagggctaaacaaaaaggctaattttccccataaccgtggggtgaattccctggtcaccaaggcagtgcatgcatgttggggtttcctttaccttttctataagttggaccaaaacatccacttaagttctttgatttgtacccaa

SEQ ID NO: 49312 - DNA, 497 bp, Homo sapiens
  misc_feature 451, 453: n = A,T,C or G
ttaaccctcactaaagggaacaaaagctgggtaccgggccccccctcgagagtacttctagaattaattaacaatatacctaacagaactttgcttcctaccaagattcttcataggattaaaaaactgtatcccatgactcaccactacaaacttactcgaaatacagagagaaagagttgaggagggggcaccccagtaacagccaccactcatgtaccccaggaaagatttctattagtcccttaatcaaatgtttcacatcactggctaatccctgcgacagggaaatcacctggcaaatatagctcctaagcactggcagagactgaataccctaaacctagttacagcaaatgttttcccaaacagcaccagagtcccttaactcctcagaaatcttttcccagccaactctcgattctccaaactaagcacataaattcatcananaaaaaaaaaaaaaaaaaataaaaaaaaaagcggccgccaccgcg

SEQ ID NO: 49313 - DNA, 189 bp, Homo sapiens
aattaaccctcacttaagggaaacaaaagctgggtaccgggccccccctcgagggtacttctagaattaattaaggcggggtcgaagaaggtggtgttgaggttgcggtctgttagtagtatagtgatgccagcagctagaactactcccaccctggagcctccgtagacctaaccatcttctccttac

SEQ ID NO: 49314 - DNA, 399 bp, Homo sapiens
  misc_feature 286, 287: n = A,T,C or G
gccctccctcgagagtacttctagaattaattaaggcgggagaatcgcttgaacccaggagatggaggttgcggtgagccgagactgtgccgctgcactctagcctgggcaacagagcaaaactccgtctcacaaaaaaaaaaaaaaccctgcagaaaaaacccagctgcccctatccatgaggtccctcctggtttccatgggctaaagtttccctataaaaaaaatcccaaaagggggaatggtgggggtgggcttaaaaaaatttggcaaaatggccctcccnnaaaaaaaaaaaaaaaggaaaaaaaaaaaaagggtggaacaagggggggccccccccccccccgggggaaacccttcccccccccagggggggtttcccccccccccccccgg

SEQ ID NO: 49315 - DNA, 317 bp, Homo sapiens
  misc_feature 47: n = A,T,C or G
agggtaacaaagctgggtgaccgggccccccctcgagggtacttctngaaattaattaaggcgggcggatcatgaggtcaggagatcgagaccatctgcctaacacggtgaaaccccgtctctactaaaaatacaaaaaaaaaaaaaaaatttccccgggggtggggggggccccctttttcccaattttttgggggggttagggcgggaaatgggatttacccttgggggcaaaggttgcagtaacccaaaatcgcccctttgccctccacctggggcaacaaacgaaaactccttttaaaaaaaaaaaaaaaaac

SEQ ID NO: 49316 - DNA, 470 bp, Homo sapiens
  misc_feature 69, 70, 102, 104: n = A,T,C or G
ataaagggaacaaaagctgggtaccgggccccccctcgagagtacttctagaggggggagcagccggtnnaactactgacacttttttttatttatttgtcncngcacaaaactatactagtagccattatatctttcaccttcatgtgctcacgataaaaaggagaaaaaagtccattttatttaagaatgtgcttgatgagagtaaatattattaattttattaactcttctccccagagttatgtctttctactattctgcgtaacaaatggaaagtatgcataaagcgcttctgttgcattcagaagtgttgcattcagctttctgctgcattcagaaatggctgtctcaaaaagcgtgtgtgcgggccgggtgcagtggctcacacctgtaatcccagcactttgggaggctgaggctgacagatcacctgaggtcaggagtttgagaacagcctggccaacatg

SEQ ID NO: 49317 - DNA, 378 bp, Homo sapiens
  misc_feature 320: n = A,T,C or G
aacaaagctgggtaccgggccccccctcgagagtacttctagaattaattaaggcgggtggatcatttgaggtcaggagttcgagaccagcgtgcccaacatggtgaaacccccgtctctactaaaaattagccggatgtggtgccgcacgcctgtaatctcagctactctgagggtgaggcaggcaaatcgcttgatcccgagagagggaggttgcagtcatcggagatcgcgccactgcactccagcctgggcgagagagcaagactccacgtcaaaaatgtttttaattaaggcgggatggaatggatgcaccgcanataatgcattttctgagttttcttgttaaaaaaaaattttttttaagtaagaaaaaaa

SEQ ID NO: 49318 - DNA, 476 bp, Homo sapiens
atacaaccctcactaaagggaacaaaagctgggtaccgggccccccctcgagagtacttctagaattaattaaggcggggagttaaaatatttcgattttttttttttttttaagggaaagtcctgcataacaacccggggcctttttaactaaaaggctcaccacttacccggttttttatcccttttttaaaaaaacaaataattttgttcaggaatttggctgtttttcttaaggctaaaacctggccttttattcctgctccaccggggggggaaaatgggcattctgataaaaaccgggcccttaggaaactggaagtttaaaaatgtccaagtcctttcagggataagggaattgattttttttaaaagcctttttcttaaaaagccaaaatgtttgtttttttaaaattctgaaaggggttgggacaacaatgacccatttatgaccttaaatctttttcaaaaaaaaa

SEQ ID NO: 49319 - DNA, 380 bp, Homo sapiens
gtacttatagaattaattaaggcggtctatgaagacaagttagctctaaagcatgtcaagttgaatgagtatatctaaaaaataatactatatttgttttagaaccatagataaaaatccagtattatgtttttataatcagctaacagatatggttacttcattggagtaatgctaatatgacaataatatcatattcaatataggaaattcttcattgcaatgtgaccttgacaagctatataacctctgtaaatatcaaatttagcacctccaaaatggacatataatgagcttcaaagcgtattcaattaaatattctataacagtgcctggcacatagtaggcgctcaataaatacttgtttgttgaacaattga

SEQ ID NO: 49320 - DNA, 590 bp, Homo sapiens
  misc_feature 41: n = A,T,C or G
ctcctaagggaacaaagctgggtaccgggccccccctcggnagtcttctagaattaattaaggcgggaatagggaatacaactttgtttcgagactacttggaacacttaggaaagttgacatatattagcttacaaagacaacctcaatgagttccgtaacagaaataatacaaacaacattctgtgctcacaatgcaataaaactaaaaattaatcataagattaaaaaccaaaaaggcccttcaatttgaagagttacaagattaaactctattaaataagtttttaggaaaaaaaaaaaaaaaaaaaaaaaaaaaaaagcggccgccaccgcggtggagctccaattcgccctatagtgagtcgtattacgcgcgctcactggccgtcgttttacaacgtcgtgactgggaaaaccctggcgttacccaacttaatcgccttgcagcacatccccctttcgccagctggcgtaatagcgaagaggcccgcaccgatcgcccttcccaacagttgcgcagcctgaatggcgaatggaaattgtaagcgttaatattttgttaaaattcgcgttaaatttttgttaaa

SEQ ID NO: 49321 - DNA, 423 bp, Homo sapiens
  misc_feature 378, 380, 381, 383, 397: n = A,T,C or G
gcgcgcaatcaaccctcactaaagggaacaaaagctgggtaccgggccccccctcgagagtacttctagaattaattaaggcgggttaatcttgcatatttgtttctaattactctatttttactactcccatcatttctctttctcctgcaagaagttggaatgtgctaaccacagtgcatcacatacacccacagaacagtaccaaatgagggccccagggtttctgtaaagaaagcagtcaccctgataactgccggtaatgacaaccttgttgactgtaccagtcaaggtttattattaagtgtgcagaaattttcatttttgactcacaaatacatttttgttctttcataaacatgtataatagcaaaaaanannanaaaaaaaaaaaaangggggggcccccccgggggggggccc

SEQ ID NO: 49322 - DNA, 264 bp, Homo sapiens
aacaaaactgggtaccgggccccccctcgagagtacttctagaattaattaaggcggggggacacatcgaatcctctttttctccctggtattcacctgtctttgttatcccaaagaaatctggtaggtggcgaatgcttactgatcttaaggtggtaaatgctgtccgtcagcctatgggaacgttacaacccagtttgccctcccccactatgattcctgagtattggccacttatcatcattgaccttaaagattgcttct

SEQ ID NO: 49323 - DNA, 460 bp, Homo sapiens
ctggccgtcgttttacacccggaaacacagtgttacccttatttctggccggtcctttcctctagagaactagtaaaatactttatgcgggggaaggatttaaagctggagaatataatgccaccaaaggatggtttgataattttagaaagatgtttggctttaaaaatgtcaggataacggaagaagcatcttctgccaacgaagaggcagcagacctcaagttctcagatgccatggagaaaatcagtgaaggccgtctgtggtggctcacacctgtaaccgcaccatagctggaccccatctctaccctcaccccaccccctgcggaaaaaaaaaataaataacccaaaagagggaaaaaataataaataaaaaaaaaaaaagggccccccccccgggggggacccccaattcccctttttaggggggtattaccccccccctagggggggttttt

SEQ ID NO: 49324 - DNA, 501 bp, Homo sapiens
ctcactaaagggaacaaaagctgggtaccgggccccccctcgagagtacttctagaattaattaaggcgggcggatcacgaggtcaggagatcgagatcatcctggctaacacggtgaaaccccgtctctactaaaaatacaaaaaaattaactgcgcgtggtggtgagcgcctgtagtcccagctactggggaggctgaggcaggagaatggcgtgaacccaggaggtggagcttgcagtgagctgagatagtgccactgcactccagcctgggcggtaaagcgagactccatcccaaaacaaataaaaaaaaaaataatacttagcgcccccccccggggggaaacccaaatccccccttaggaggaatggtttcaccccccttatgggccgggtgaaaaaaactaattttatcttgctaaataacttagtttactataatataaacagaatgtccaaaggggaatatttttaatatattcttaatctcaacctttcct

SEQ ID NO: 49325 - DNA, 490 bp, Homo sapiens
aaataaagggaacacatgctgggtgccgggccccccctcgagagtacttctagaattaattaaggcggggttacagtgagccgagatcacgacactgcactccagcctaggcgacagagtgagactacatctaaaaaaaaaaaaaaaaatttttgatccaaaatttacaactacaaaaacttgctttcggttgggcccaccggttaatgcctgtaatcccaggactttgggaggcggaggtaaccggatcacaaggtcaggaaatcgaaaccttcctggttaacacgggaaaaccccatttttcctaaaaatacaaaaaattacccgggcttgggggcccccccctgttttcccacctactcgggaggataaggcaggaaaatggcttaaacccgggaaggggaccttgcaataacccaaaatcgggccattggcctccaccccaggggacaaagtgaaactccttttttcaaaaggggaaaaaaaaaaa

SEQ ID NO: 49326 - DNA, 381 bp, Homo sapiens
aaagggaacaaaagctgggtaccgggccccccctcgagagtacttctagaattaattaaataaaagcactgaatgaaatgatacaaaaaacattttatcacttcaagtggtaaaagcttttctaactaagagtttttaagatttctggacttcatattgacatatttaactatataataatcagaaactctatatgcaaaaaaaatcaaaaagtaaattaaacacttagaaaaatcatttgcaacccatatcattacataagcacaaatagcttcctgaaaaaaaaaaaaaaaaaaaaaaaaaaaggggggccccccccggggggggcccccaattccccctttgggggggttttttacccccccctctggggccgttttt

SEQ ID NO: 49327 - DNA, 457 bp, Homo sapiens
aaagggaacaaaagctgggtaccgggccccccctcgagagtacttctagaattaattaaggcgggcggatcacgaggtcaggagtttgagaccatcctggccaacatatgaaaccccatcttttttaaaaatattaaaattacccaagcctggtggggtgaggcatgaaaatcccttgaacctgagaggtggaggttgcaattagcctaaatcatgccagtgcactccaccctgggtgacaaacactcttgtgtcataaatattgataataataataatcttcatcttgataataaatactcattatcacaactatattgtctaaagggtatgttccccaaccataatggataagacaatccacaggggtaccacaagaaaactcagagggcaaacaacgacaaaaataaacaatgaaaacaaaacaaaaaaaactcagagggctgacagtgctgct

SEQ ID NO: 49328 - DNA, 408 bp, Homo sapiens
taaataaagggaacaaaagctgggtagccgggccccccctcgagagtacttctagaattaattaaggcgggatcaatattactgattttcttttgtctcagattccaatatggtttcatagcttttgtgctttgacttccaaaaaaaaaataattaaataaaataaaaaaaatcaaaggaaaccaaaccaaagcaacaaaaaaaaataagtaatacccaaaaaaaaaaaaaaaaaaaaaaaaaggccccccccccccgggggggaccccaaatcccctttaaagaaaattttttcccccccctttatgggccttttttaaaacagatttataaacctacaaatagtgtgtatacatttctaaaccttgtttgcaggaataaaccgggcatttagcaaattataaaaaa

SEQ ID NO: 49329 - DNA, 567 bp, Homo sapiens
  misc_feature 51: n = A,T,C or G
accctaactaaagggaacaaaagctgggtaccgggccccccctcgagagtnacttctagaattaattaaggcgggcagatcacttgaggccaggagttcaagaccagtctggccaacatagcgaaaccccatctctaataaaaatacaaaaaaaaaaaaaaaaaaaaaaaaaaaaaaaaaaaaaaaaaaaaaaatcccccccaaaaaaaagggttttttattttccaaaaaaaacccccctttgggcccccgggggtttttttaaaaaaaggaccccaaaaaatgggccctttgaaataaaaagtttcttccccctccccgggggggaggggaaaaaatttttttaatatttcggggggaaaagcccaaaaaaattttgacccaaaaggaaaaccctttccaaagggaaaattttggggttaccaaaaaaaaaaaaacttttcccgggggggaatcccgggaaaaaaattaatttaaaattctgggggggggcatttttttttaaaaaaaaaattttttggcctttttaaaaatgggcaaaaatccaaaaaaaaaaccgggaaaatt

SEQ ID NO: 49330 - DNA, 475 bp, Homo sapiens
  misc_feature 402: n = A,T,C or G
ctaaagggaacagaagctggatcctcccccccccctcgagagtacttccagaatcattctacgcgggacacacagagccaaaccgtatcatgtggtaggatggtcattaagggtaaatggcatcataaggatggagacctaaatccaataggactattgtctttgtaagaagagggagagatatcatagcttgcaccagccacctcccccttgcctcaccaatcccccttctaccatgcacccacaaagagaaggccatgtgagagcacagtaaggaggggctgtctataagtcaggaagagaggcctcacgagaaagcaaccctgctggcaccttgctcttggactttcagcctccagagctgtgggaaaatacatttctgcagtttagactacccattangtggtatggtgggccctccatatccatgggttctgtttctgtggattcaaccaacaaacaaaaaaaaaaaaaa

SEQ ID NO: 49331 - DNA, 371 bp, Homo sapiens
taacgggaactgaagctgggtaccgggccccccctcgagagtacttctagaattaattaaggcgggagggcccaaggccaggagttcaagaccagcctaggcaacatgacaagacctccatctctacaaaaaatgaaactaagaagttctgaataggaatgaaagggtggtaggtgctaggagtttgctgcttcttgaaccatagcacttggctaagttaaataaaaaccccagctctctgagaaggccaaaaattgaaaaacggggccccccccggggggggaccccaccctcccctttatgggggagatttcgcccccccctaggggcccttttttaaccaggcatgttagcatgtacctgtagtccca

SEQ ID NO: 49332 - DNA, 500 bp, Homo sapiens
taaataaagggaacaaaagctgggtaccgggccccccctcgagagtacttctagaattaattaaggcgggatatcgaagtgtcctgagcacatttaaggtaggctaggctaagctatgatgctcggcagattaggagtatcagatgcattttcaacttgcgatatgttcaacttatgatgggtttttcaggacgtaaccccactgtaagttgagaagtatctgcgctcatacacatacacactttttcctgaaactctgagagtaagctctagacattgtgcccctttactcctaaatatttctgggtgtatttcccaacaaacacattttttaacataaccaatagcacaattatcaaaatcgggacatttaactttttataatactaatatttaatttacagactttattcgtattttgccaattgtcctatcgatgcccatcatcgcaaaaaaaaaagaaggaaaaaaaaatttgttctggtccaggccccaatcta

SEQ ID NO: 49333 - DNA, 426 bp, Homo sapiens
cactaaagggaacaaaagctgggtaccgggccccccctcgagagtacttctagaattaattaagggcgggattattaaacttggacaaagtagaatttaaggttgaaaacattaagcagggataaagagccacattataataataaaaagcacaatttataaaagagatctaacagtcataaacccgtagacacctagtaacaaagcagctaacaagataaagcgaaaattattaaaatgcaaggattacttgattaaaggtacagctaggctgggcgcagtggctcacgcctgtaatcccagcactgtgggaggccgaggcaggtggatcacctgaggagtttgagaccagcttggccaacatgatgaaaccctatctgtactaaaaatacaaaaaaaaaaaaaaaagggggccccccccggggg

SEQ ID NO: 49334 - DNA, 290 bp, Homo sapiens
ggccgtcgtctttcacctggaaaaaggaaacaaagctgggtgccgggccccccctcgagagtacttctagaattaattaaggcgggactctcacggtgacatgtttacagctgggtgtgactcagtaaagtggatttttttttcaaaaaaaaaaaaaaaaaaaaaaaattaaaaaaaaaaaaaaaaaaaaaaaaaaaaagggggcccccccccggggggggaccccaaccccccctaaaagggggtttaaacccccccccccggggggggttttaaaaaaaaaaaaaaaa

SEQ ID NO: 49335 - DNA, 598 bp, Homo sapiens
  misc_feature 514, 515, 538: n = A,T,C or G
caaccgtaaataaagggaacaaaagctgggtgccgggccccccctcgagagtacttctagaattaattaaggcgggcatggtggcacgcacctataatcccagctacccaggaggctgaggcaggagaatcgctggaacccgggagtctgaggttgcagtgagccgagagatcatgccactgtactccagcctgggggacagagcaaggttctgtctcaaaaaaaaaaaaagggccaaaccggggggttaagccttgtattcccaccttttgggaaacccggggcggggggttccttggaaatagggatttaaaaaccacccgggccaactggggaaaccctcttttttcttaaaaccccaaaatttccccgggcttaagggggggtccctgtatccccacctcctgggtgggctagggcaggaaaatctttttaccccggaagggggaggttgcggtaacccaaacccggccccttgtcctccacccggggggataaaccaaaactatttttnnaaaaaaaaaaaaaaaaaaaaaanggggggcccccccccgggggggaccccaaatcccccttttggggggtttttttccccccc

SEQ ID NO: 49336 - DNA, 510 bp, Homo sapiens
  misc_feature 475: n = A,T,C or G
agcgcgcaattaaccctcactaaagggaacaaaagctgggtaccgggccccccctcgagagtacttctagaattaattaaggcgggggaagggaaaaataataactttacagtggagaaatctggcagacaccaccttatcaagtattcaagatgaaccttcccaacaagtcatggtgcttctgaagagcacttcatctctgtggtattcttctcccaaatctatgccccagattaatcatgacatagcatcagacaagcccaaattgagggacattctacaaagtatccaaccaagcacccttcaaaagtgtcaaggtcgtaaaaagcaagcaaagactgagaagctatcacagattgatggagactaaggggtcatgataactaaatacaatatggacattagtggaaaaactggtgaaatccaagtaaattctgtagttaatagtgttgtaccaatgtcaatttcttagttntgataaatgcactatggttagataagatgttaata

SEQ ID NO: 49337 - DNA, 658 bp, Homo sapiens
aaagggaacaaaagctgggtaccgggccccccctcgagagtacttctagaattaattaaggcgggcaggaaatacacaaagtgagcatggggcatcttgcagtgctagaaagtaaggatgtgctcaaacacatacacaggtgtacacacatgcacacatacacagtgatggaggtatatcaaagggacataggaggaagttgatggagcttcccatggtcaaaatggaataatttgaccaacaaaataaataatgtaatgttgtataaatgctacaggcattaaaagagtaatgtgtacattagaaacaactttattacacaaagttgacaacttagttgaaatagaccatttcttgaaagatgcaaactactaatattcattcgagatgaaattgataactcagtaatactctgtttattgaagacattgtattagtatttgtaatcttcaaaaaaaatcaaaaacaaaaacgaaaaacaaaacactgtcccagatagttctgggaaattctacaaaacatttaaagaagaaatgataccaattctcacagtttcttctggaaaaatataagacagaatacttctcaacttattttgtgaagccaatcttaacctgctaccaaaatcatgcaaagatggcacatgaaaataaaacta

SEQ ID NO: 49338 - DNA, 373 bp, Homo sapiens
attaattaaggcggggagatgggactggtgtctttacaagcagcagaagagagaccggagctaacacatttgctctgtcttgccatgtgatgcctcccaccattgtcatgatgtagcaggaaggccctcaccagatgccagcaccatactcttggacatctcagcctctagaactgcgagttaaataaacttctattgtttattatttacttagtgcatggtattctgttatagtaacagaaaatggactaggacaggtaactatacttttatcagataaaagagacattaagtcaaaaactgtaaaataagaaaaataaggtcattatataatgacaaagggaccaattcatcaataagatgtaaaattttt

SEQ ID NO: 49339 - DNA, 419 bp, Homo sapiens
accctcactaaagggaacaaaagctgggtaccgggccccccctcgagagtacttctagaattaattaaggcgggagaaaaactggcaactaattaatgcggaaggaattaaagaaacagaaaatagaaaataatgtggtaccatcattagtggctgataattcaagtgggagtcttgaatgtatgttaaggttggtgaatggaggtttgacaagaaacaggctattaagagtatcagaatatcactccacaataatatttatcaattataagagaaaagcagtgtctttacagtagagaaacctggcagacaataacatgaacaggtaatcaggattgatatcatgtcagcagggcatggtggctcacacctgtaatcccagcgctttgggagactgaagtgtgcagatcacttgaggt

SEQ ID NO: 49340 - DNA, 349 bp, Homo sapiens
ggaacaaaagctgggtaccgggccccccctcgagagtacttatagaattaattaaggcggggaatcagtgtcattcaaggacgtaactgtatacttcagtagggatgagtggcaacaattagaccttgctcagaaaagcctgtacagagaagtgatgctggaaaactatttcaacttgatctcagtgggatgtcaagttcccaaaccagaagtcatcttcagcttggaacaagaagagccatgtatgttggatggtgagatccccagtcagagccgtccagatggggacattggttttggacctttacaacagaggatgtctgaagaagttttctttccagtctgagat

SEQ ID NO: 49341 - DNA, 447 bp, Homo sapiens
gggtgccgggccccccctcgagagtacttctagaattaattaagggggggatgtgtgactcatccgctggaacacagacctgtttttacaacaaatactaatcaaatcggtatgatcacaatcctggaagaatgatcctgcatgcttgatgctgctgaagcatactgtgagaaaccacatttcttgaatacattacaataccaattattttacctacaaaccactttgtgcgttcccaccatgtgggggtgtccatcagtcttaactatgggtatactaccggccctatattgttttttttttgagacaacagtacatataatagaggtacaattcggtggatttttggttatgtatttatttcattccagggtggatttatttaaattgttgatacttaagttgtcgaacaggagacattacttgttttatttatgatatatttca

SEQ ID NO: 49342 - DNA, 488 bp, Homo sapiens
ctaaagggaacaaaagctgggtaccgggccccccctcgagagtacttctagaattaattaaggcgggtgggtcatttgaggtcaggaatttgagaccagcctggccaacatggtgaaaccctatctctactaaaaatacaaaatttagccgggcatggtagcaggcgcctgtaatcccagctacttaggaggctgagacaagagaatagctcaaacctgggaggcagaggttgcagtaaaccgagatggcaccactgcactccagcctgggcaacagagtgaaactccatctcaaaaaaaaaaagggaaaaatcttctaatttctaaaattggcttaattaacccaaaaggggcggggctatgggttaaaaaaaaaattcctaataaatttttaaaaatcaataacttttttaatgtcgaaaaattcccataataggcttttaaaaaaaaaaagtttttgggctagggccaggggctaatccctgaaa

SEQ ID NO: 49343 - DNA, 367 bp, Homo sapiens
ttcctacctaaaaggaacaaaagctgggttccgggccccccctctagagtacttctagaattaattaatgaatgtaggccctgagagagttgattgataaacatttgccatctcactactgctcataaatgtgccatttaatgaatgaaaagcaggaaaagctcctcaaattaggttcctgctagatcaaggatcctcgtaatgctttcattatggcctgcctttcctgttgctaataacgcccatgggggcttgttttcactgatcacagggaccaaattgtctccataccacaaggactactcttcctttatataagcatccttaatgaacaattcctttaaagttggaaattgaaggacatgag

SEQ ID NO: 49344 - DNA, 468 bp, Homo sapiens
  misc_feature 65, 69, 70, 99, 415, 417, 418, 437: n = A,T,C or G
gctgggtgccgggccccccctcgagagtacttctagaattaattaaggcggggggaacaagtcangctnngaaataaaaactattctgtttaactcggngaaacctcgtctctactaaaaatacaaaaattggccgggcacagtggtacatgcctgtaatcccagcactttgggaggccgaggcaggcggatcacgtgaggccaagaattcaagaccagtctggtcaacatggcacaaccccatctctactaaaaatacaaaaattggccaggcatggtggcgcaagcctgtaatctcagctatttgggagactgaggcacaagaatcgcttggacccggcaggcagaagttgcagtgagctgagattgtgccattgcactccagcctgggcagcagaatgagagtccatctcanannaaaaaaaaaaaaaaaaaanggggggccccccccgggggggggcccaaatt

SEQ ID NO: 49345 - DNA, 276 bp, Homo sapiens
ggtaccgggccccccctcgagagtcttctagaattaattaaggcgggagaaaagatagagaataagagaaattataagataaaaacatacttttagaggaaaaaagataaatttaaacctgaaaagtcggaagcagaagaaaaaagacaagctaggaaacaaaaagctaagggcaaaatgtacaaacttagaagaaaattggaagatagaaacaagatagaatatgaaaatattgtctaaaaaggaaaatgcaaaaatattatgcggggccccccc

SEQ ID NO: 49346 - DNA, 361 bp, Homo sapiens
gctgggtgccgggccccccctcgagagtacttctagaattaattaaggcggggctagtatttgcgcacagctgccttgtactttaaaaaaccttgtgccctgacagattacatctgctgagatgaagtgatgtgaaatatatgtagtgatgttgattttaacttgtactggtgttaagcaccaaagcatgtttcaagaaaaaaatattctacaagttgcaaaagcctttattccaagtgtacaggtttcaaatggactaaaaagaatataagcccacccttaaagatgagaaaaattaacggaatacatatacatcctttaattgatgttccatgaatattgtatattgtaaaaaaaaaaa

SEQ ID NO: 49347 - DNA, 501 bp, Homo sapiens
tgattacgccaagcgcgcaattaaccctcactaaagggaacaaaagctgggtaccgggccccccctcgagagtacttctagaattaattaaggcgggagaattgcttgaaccctgaaggcggaggttgcagggagccaggatcgtgccactgcactccagcctggtgacacagtaagactccgtctcaaaaaaaccaaaaccaaaaacaaacaaaaaaagttaatatacaaataccaaaaacagaaactgcagaatatctgagtacttactaaggagcagtcaccattttaagtactttactcatttaattctcacaacagccatgtgaggtaagtagtattatctccattttccaaaaggggaaaattagagagatctaacaactttactaaggtcacaaagatattaagggtgaatgtgggatttaaagtcattctctttaatgactaagcaatcatgcataactctgttttgtaaacctaaagttacaaatcaaaaaa

SEQ ID NO: 49348 - DNA, 477 bp, Homo sapiens
agggaacaaaagctgggtaccgggccccccctcgagagtacttctagaattaattaaggcggggtaagagcgagcttcggagaagcagtggtgggttccatgtgatggtggagtaggaggcaggtctccgcggttcatctgtgttgctctaaatgacactgtttcattattttgatggctggagaatatttcctagtgtatgtatatgagagtttcttgatctctttatctgtggatgaacaggctagtcaccctgctgtggaatagaaggccagaattgatcagtctcatctgagagtaactttgtacccatcactgattccttctgagactgcctccacttccccagcagcctctggtttcttcatgtggctgcagatggcaggatttcccaaaggtttctggctgaaacatattccgtggtgtatctgtacagcagtttcctcatccctgcagctgtgtttgaacaggtcattt

SEQ ID NO: 49349 - DNA, 530 bp, Homo sapiens
accctaactaaagggaacaaaagctgggtaccgggccccccctcgagagtacttctagaattaattaatgcttttcataattgagacagaactgtttgttatgtaccataatgctaaataaaactgtggcacttttcaccataatttaatttagtggaaaaagaagacaatgctttccatattgtgataaggtaacatggggtttttctgggccagcctttacaacactgttagggtacatacgctaccttgatgaaagggaccttagagcaactgtagtcatcttaaaggcttctcatccactgtgcttcttaatgtgtaatctaagtgaggagaaattaaatactctgagggcgttatatataataaattcttgaagaaaaatacaaaaaatcaaatgccatcctaataaaaatgtgcaaggctttttttccttaaaaagaaactaggtacattcaaataatggcactgtgaaaattttgaggcacaaattcgcccctttttttgcatgctaatataccaaaaaaaaa

SEQ ID NO: 49350 - DNA, 352 bp, Homo sapiens
ctggccgtcgttttacaacacggaaacagctgtgaccatgattactggccgtcgttttacaccagggaacagctataaccctgaatgccgggcacgaaggatggaacgagggaaggaaggaagaatgaaggaaagaacgaagattcattattctgtcctctgaacctgagtgaagaaatatactctgtcctttgtacctgcgtgaagaaagaaaagaaaagaaagaaaagggaaggaaggaaggaaagaaggaaggaaggaagaaagaaggaaagaaagaagattcattattctgtcctctgaacctgagtgaagaaatatactctgtcctttgtacctgcgtgaagaaaga

SEQ ID NO: 49351 - DNA, 355 bp, Homo sapiens
aagggaacaaagctgggtaccgggccccccctcgagagtacttctagaattaattaaggcggggtgttttgaggagtgtcagtctgctgaataagccacttgcagtgacaccggtgatgagccttttggaagaggagccacgagaaaatcaaaagaagcttttgcccttataagtaacacctgaggttgtgcggctagttggctatttaagaaacctcgcccctctgaatgtggtactgtaatctttaatgaagacagctacatgaattaattgtactctatgggagaatctctttggaaagatattttgtaaaactttttttttccagtaaaaaactttatgaaaaaaaaaaaa

SEQ ID NO: 49352 - DNA, 427 bp, Homo sapiens
tttacaatcctgaataaagggaacacatgctgggtaccgggccccccctcgagagtacttctagaattaattaaggcgggacgggatttttatcctaaggctaatcaaaagccattgaatagttgtatgcagaagggtgtcataatactcacatcttataaagaccactttttaaaagggcatagtggtcctaatgggaggtgatgtgggcaacagagtagactcgttagactaatgaggacacagaatccagcatcacactgtgccagatgcacatccaggttcagttctagaaaacttacaataagctattctgtgaaaacacagtcagtgggttctgtatctgcagatatgcaaggttgactgtactgggtcattttatatcagagacttgaatacccacagactttggtatctgtggggatcc

SEQ ID NO: 49353 - DNA, 324 bp, Homo sapiens
gcgcgcaattaaccctcactaaagggaacaaaagctgggtaccgggccccccctcgagagtacttctagaattaattaaagcgggtggggaggggtgctctgctggtcttcaattaccaagaattctccaaaacaattttctgcaggatgattgtacagaatcattgcttatgacatgatcgctttctacactgtattacataaataaattaaataaaataaaaaaaagaataaaaagaataaaaaaaaaaaaaaaaagcggccgccaccgcggtggagctccaattcgccctatagtgagtcgtattacgcgcgctcactggc

SEQ ID NO: 49354 - DNA, 237 bp, Homo sapiens
caaaagctgggtaccgggccccccctcgagagtacttctagaattaattaaggcggggtaaggggtgcgtgggaactctgtaatttccactcaattttgctgtgaacttaaatcagctctaaaaaataaagtctattttttaaaaaggtaaactaaagtctgtgagttacatcatttcagtgtttttctcaatcacactatataatctggatcattatataagattgtgaaattaac

SEQ ID NO: 49355 - DNA, 508 bp, Homo sapiens
cgcgcaattaaccctcactaaagggaacaaaagctgggtaccgggccccccctcgagagtacttctagaattaattaaggcgggcatcgtggtgggcgcctgtagtcccagctactcaggaggctgaggcaggagagtggcgtgaacccgggaggcggagcttgcagtgagccgagatcgcaccactgcactcccccctgggcaacagagccagactccatcttttaaaaaaaaaaaaaaaagaattagtaaagattcaccaggggttgagctcagggattgcgtgggggacctgacaattctctaggcaaagggaatgacctggataaagatacagaggcaagcaaacattgctaaaaatagtatcctttgtaagctctattccttggtcctgagaaaataaaatgtatagctttatttatttctgtgagatgagttaccaatgggtactgctattcaaaaaagcaaaacagtgcaattcttttgacatttacggtgtcctacttat

SEQ ID NO: 49356 - DNA, 638 bp, Homo sapiens
ctaaagggaacaaaagctgggtaccgggccccccctcgagagtacttctagaattaattaaggcaggagttggttgatacagaaggaattatatttagtttttctcttacacttcatttaacttttgaaaagctctataagtttactgcaggaaatgcaagaaggaaaataattttttagagacttgataaagaacatggggttttcagtactatttttaataagtagcattctgatacatattattgctagttaggatgtcaaatgaaaaaataagcaatgttaatttggatttttaacatctacatgtagtctctaggttatctgaagtaatccagggcattcagctatatgtaattactaaactatttgagttattgcttaatccatgattttttgtttgttttatgcagggggatagtttcatagtaagttctgaattccctgtaagactgagtgtatacttagaagaagaggatattactgaagaagctgctttgtctaaaaagagagctacaaaagccaaaaatactggacagagaggcctgaaaatgtgacaggatcatgaatgtcaaaggtgaagcatatagaaaaaacgacttcatagaaatgaataaagataaatgtggatatatgta

SEQ ID NO: 49357 - DNA, 394 bp, Homo sapiens
gccccccctcgagagtacttctagaattaattaaggcgggtggctgtagtcccaactacttgagaggctgaggcaggagaatggcttgaatctgggaggcagagcttgcagtaagccgagattgtgccgctgcactctggcctgggcaacagagcaagactccgtctcaaacaaaaactacaagcaaaacatgctaaaacttcgccggcccccccgaggggggatactcaattgacccaataacgtgtgaccaacggaccccgctaccctcgggattacaacacaatcctattctagagtccatatcaacaatagggtttacgacctcgatgttggatcaggacatccccgagggtgcagccgctattaaaggttcgtttgttcaacgattaaa

SEQ ID NO: 49358 - DNA, 405 bp, Homo sapiens
  misc_feature 354, 355, 356, 357, 358: n = A,T,C or G
tgggtaccgggccccccctcaagagtacttctagaattaattaaggcgggaagaatttatgttaaagagaaagaatttctttgtaagaaattcttccgtttttacaattattagggtaatgggtttcttgacagtggcattgcaatgaagcccagaattatatttgattaattcaagtcatcttaaatctgtagatgtaagctgactcaaactcctggccttaagtgatcctcccccctcggggggccccattattgccattacaggggtgaaccacccccccccgtcttggcatgcatatattagtcactgttacttcttttaaattgttttaattgtataagataaaaaccnnnnnaaataaaaaaaattaaaaacaaaaccccccccccccccggggggaac

SEQ ID NO: 49359 - DNA, 505 bp, Homo sapiens
gcgcaattaaccctcactaaagggaacaaaagctgggtaccgggccccccctcgagagtacttctagaattaattaaggcggggacttgggacttttaaaattttctttttaaaatcattttttcaactctattattttgtttgttcctacatgtgaaagttgtgcttttcatgattgtcagaagaatagctttccatatgaaaatggcatccatcaacatcatgttttcgataagggaaagagagacttcttaaatctttgtctgagaaacagctctacttattataaagataattcaaaagaaacttcaaacacagattttgacaacatcgtggatcctgatgtgtattcttctgacattgaaaaaaattgaggaaagcacctcctttgaaagaaatttaaaggagaaaaatataggtttagaaagtaatcaaaagtctgatgattcctgtgtatcacttgaaagcaaggacactttgctaggtagagatttagaaaaagctc

SEQ ID NO: 49360 - DNA, 443 bp, Homo sapiens
cgcaattaactcctcactaaagggaacaaaagctgggtaccgggccccccctcgagagtacttctagaattaattaaggcggggagaaagcctgggtggctcagcatcctccacgggctgcgccgtctgctcggggctgagctggcgggagcagtttgcgtgtttgggttttttaattgagatgaaattcaaataacctaaaaatcaatcacttgaaagtgaacaatcagcggcatttagtacatccagaaagttgtgtaggcaccacctctgtcacgttctggaacattctgtcatcaccccgtgaagcaatcatttcccctcccgtcttcctcctcccctggcaactgctgatcgactttgtgtctctgttgtctaaaataggttttccctgttctggacatttcatataaatggaatcacacaattgtgaaaaaaaaaaa

SEQ ID NO: 49361 - DNA, 312 bp, Homo sapiens
  misc_feature 292: n = A,T,C or G
acaaaagctgggtaccgggccccccctcgagagtcttctagaattaattaaggcgggcatggtggcttatacttgtaatcctaacactttgggaggttgaggtgggaggattgcttgagttcaggagtttgagaccagcctgggcaacagagtgagactccatccctaaagataaaaaaacaaataaaattatttttaaaagttatttattaattttaaattatataaaactatttttaaaattaactcttaaaaaaatattgccttacataaactggccttggagatccanacatgttgtcaagacttgag

SEQ ID NO: 49362 - DNA, 506 bp, Homo sapiens
cctgaataaagggaacaaaagctgggtaccgggccccccctcgagagtacttctagaataattaaggcgggcgcctgtagtcccagctactcggaaggctgaggcaggagaatggcatgaacctgggtggcggagctggcagtgagccgagatcgcaccactgcactccagcctgggcgaaggagcgagactccgtctcaaaaaaaaaaaaaaaaaaaaagaaaattaaagggggggctttcctgggtgggttttcaaaaatgggggggggggggggggattctccttttttccccaggggtggttttaaaccccggggccctaaacctcccaaagggcttgggggggggggttcccaacttggggaaatggaaccctccggggttacccgggaaaacccccctttttcttaaaatcccaaaattttccccggctttggggggggccccttttttccccttttcttaaaagggttagggcagaaaaaggccttaacctgggggggg

SEQ ID NO: 49363 - DNA, 480 bp, Homo sapiens
  misc_feature 433, 457, 458: n = A,T,C or G
gcaatcaaccctcactaaagggaacaaaagctgggtaccgggccccccctcgagagtacttctagaattaattaaggcgggcagatagatagatagatagatagatagatagatagatagatagatagatagataaatataaatgtgcttctaattctttcctctgtaaggccaagaagcaaaaataagcaaacatagcacctattctctaatttattccccactaaacggcccaggaagccttggagaaatggctgattacagggctgaggcagggtaggtacaagatggccctgtaacatcttgttatactggatattaagcttccaaaaaaaatgatggtggtgtgtcgtgaagacacaggggtttccgctggctaattctgggacagttcgcacaacaataaaagtacaataattataaaccattgaanaaaaaaaaaaaaaaaaaaaaaaannggggggccccccccgggggggg

SEQ ID NO: 49364 - DNA, 647 bp, Homo sapiens
ggccgtctttttacaccccggaatacaggggaaaccatgatgggtgccgggccccccctcgagagtacttctagaattaattaaggcggggagatatatggcataccatacagctattaagtggcagaaatcttacagacatgaacacaatatttattcttatttccattttacagataaaaaaactgaggaggtacacaagaggttaatttgaccaaggtcacccagctagtaagtggcaggattatacaagacaagagcaagcaattaagtctctccaaactcaagtcttcttatatactgctacatgttttgtatactgctacatgttttgtatcaatgagctttttaacaacacacacaaaaaaactcatggattgattggtaggacagtaaaagcaaaaggccaatatatttaatgactacaatccttgcacattttagaatccaggataaggtgaaaggtaaaagatcattccaaatgggtaattttacatatagaattctattaacctgaatttaatggatcagaatacatccattcctgctaaatagcaacactatctgaaatcagttagcataatgtgtttacatttcattaaaactaaatctcttccatgtcactcttccaaaggcccatgaaaatg

SEQ ID NO: 49365 - DNA, 500 bp, Homo sapiens
gattacgccaagcgcgcaattaaccctcactaaagggaacaaaagctgggtaccgggccccccctcgagagtacttctagaattaattaaggcggggaaacgccatatcgggggcaccgattattaggggaactactcccaccctggagcctccgtagacctaaccatcttctccttacacctagcaggtgtctcctctatcttaggggccatcaatttcatcacaacaattatcaaaaaaaaaaaaaaaaaaaaaaaaaaaaaagcggccgccaccgcggtggagctccaattcgccctatagtgagtcgtattacgcgcgctcactggccgtcgttttacaacgtcgtgactgggaaaaccctggcgttacccaacttaatcgccttgcagcacatccccctttcgccagctggcgtaatagcgaagaggcccgcaccgatcgcccttcccaacagttgcgcagcctgaatggcgaatggaaattgtaagcgttaata

SEQ ID NO: 49366 - DNA, 325 bp, Homo sapiens
caattaaccctcactaaagggaacaaaagctgggtaccgggccccccctcgagagtacttctagaattaattaaggcgggtgatggtggatatgatggtggggatgaccatctatatttttaataaaagctccacaagttaattctgaaaaaaaaaaaaaaaaaaaaaaaaaaaaaaaaaaaaaaaaaaaaaaaaaaaaaaaaaaaaaaaaaaaaggaaaaaaaaaaaaaaaaaaaaaaaaaaaaaggcggccgccaccgggggggaactcaaattccccctaaatgaagccgaataaccccccctaactggccgtcttttaaaa

SEQ ID NO: 49367 - DNA, 353 bp, Homo sapiens
gcgcgcaattaaccctcactaaagggaacaaaagctgggtaccgggccccccctcgagagtacttctagaattaattaaggcggggtgatgcctgttgtgggccctttcagccctcctaatgacctccggcctagccatgtgatttcactttctatggaagagactaatgtgctttgagaaataacattcccactgaccttatacccaagatggcgcgaagtggctctaaatagcacatgccaaggccacattttctcaaactaagtgcttgctgttcccaaatacgcaagaataacttttacactttttccttccaacacttcttgattggctttgcagaaataaagttcta

SEQ ID NO: 49368 - DNA, 464 bp, Homo sapiens
agcgcgcaattaaccctcactaaagggaacaaaagctgggtaccgggccccccctcgagagtacttctagaattaattaaggcggggtaggattaggtttcatatattaaagtcagcagaaatttcatgtttcacaatttgttgccagagagatccccaaattccttgaagccactgggaagttctctcaggtaaagaaagcttacagcagatttgtaatatatgtctggagagctatttataagaaatttaagaggattgttttgttttcctttattaaagatttaagcctttttactttgcaaaaagaaaactacaaaagttttatagatataactttgctaattttttaaacttttctgaaacgattagctgtagccaaattatgtggttacgttttgctacattagaatttgaaaatgcaatatgtgtggtaaatctactgtttgaaatttataatggtc

SEQ ID NO: 49369 - DNA, 477 bp, Homo sapiens
ctaaagggaacaaaagctgggtaccgggccccccctcgagagtacttctagaattaattaaggcgggtggatctcctgagctcaggagttcgagaccaccctgggcaacatggtgaaaccccgtctctgctgaaaaaaaaattagctgggtgtggtggcacacgcctgtggtcccagctacttgagaggctgaggcgggagaatcgcttgaaaccgggaagcagaggttgcagtgagctgaaatcgtgccaccgcactctagcctggtgacagagtgagattccgtctcaaaaaaaaaaaaaaaaaatttattggggcgggggggcccccccttgttcccccacttttccgggaggttgaggcccaaaattcgtttcacccccgcgggcgggggttccattgacccaaatttgcccccttgccccccacttgggctaacaaagtgaaatggctttaaaaaaaaaaaaaaaaaaaaaa

SEQ ID NO: 49370 - DNA, 359 bp, Homo sapiens
gcgcaattaaccctcactaaagggaacaaaagctgggtaccgggccccccctcgagagtacttctaaaattaattaaggcggcctctggaaaaaatggaccttaagttcattgaccccacctccaagtttggccatggccgcttccaaaccatggagggaaaagaaagcattcatgggaccactgaagaaagaccgaattgcaaaggaagaaggagcttaatgccaggaacagattttgcagttggtggggtctcaataaaagttattttccactgaaaaaaaaaaaaaaaaaaaaaaaaaaaaaaaaaaaaaaaaaaaaaagggaaaataaaaattaaaaaaaaaaaaaatgggggcc

SEQ ID NO: 49371 - DNA, 271 bp, Homo sapiens
agggaaacaaagctgggtaccgggccccccctcgagagtacttctagaattaattaaggcgggggacatggcttagattgatatcacaagaaaagtatcactatagaaatgacatttaaactgagaactgagttagctagatgaagtgtgtgaataagaacatttagagagagagaatattactgtgtgtctttatatgtgaggtccatgtagcaacacacacacacacacacacacacacacacacacacacacacacacacacacacac

SEQ ID NO: 49372 - DNA, 483 bp, Homo sapiens
  misc_feature 407, 410, 411: n = A,T,C or G
accctcactaaagggaacaaaagctgggtaccgggccccccctcgagagtacttctagaattaattaaggcgggggaaaaaacagagaaaattgaagtatttatttataaaacatgcaaactattttaatacaacatcctgattttacaaataaagagaaaagaaatcccttaaaggtataaatgacttcaattatccacagccagcacagagaatggcttgatcctcaatcagttgtccaacttaagtagaaaaaaactttaaaaaatgtacattgggggctgggcgcggtggctcatgcctgtgatcctagcactttgggaggccgaggcggatgataacctcaggtcagcagttcgagaccagcctggccggcatggcgaaaccccgtctctactaaaaatccngannaatagaaaaagaaaaaataaaaaaaaagcggccgccaccgcggtggagctccaattcgccctatagtgagtc

SEQ ID NO: 49373 - DNA, 410 bp, Homo sapiens
taaccctcactaaagggaacaaaagctgggtaccgggccccccctcgagagtacttctagaattaattaagggggtttatgccagttacatacaaggatcctgcatatctcaaggaccctaaagtttgtaacatcagatatcgggaataaattctatcacgttaccactaataaacttattttacagcacaaaaaaaaaaaaaaaaaaaaaaacaaggggcccccccccgggggagcacccctattcccccattagggagggatttacacccccccctggggacggtttataaaaaaatttcagaaaacaaaaaagacactgattgtagacacttttttttttgagatggagtctcgctctgtcgcccaagctagagtgcagtagtaggatctcagctcactgcaaactc

SEQ ID NO: 49374 - DNA, 474 bp, Homo sapiens
  misc_feature 304: n = A,T,C or G
gcgcgcaattaaccctcactaaagggaacaaaagctgggtaccgggccccccctcgagagtacttctagaattaattaaggcgggggactgtttgttttaaattctgaatacttctagacaggatacaccacaccattctccaaatacttcaatccctgtttcactcacttacgccaccatcctggcccctaaaggcatttgagtttgaagcatctatctagggtccaagacttaaatctggaaggaccttaggcatcatctgggcttgtggtttgcaaccatgggacttttcaaaaatatgtnaaaaaaaaaaaaaaaaaaaaaaaaaagcggccgccaccgcggtggagctccaattcgccctatagtgagtcgtattacgcgcgctcactggccgtcgttttacaacgtcgtgactgggaaaaccctggcgttacccaacttaatcgccttgcagcacatccccctttcgc

SEQ ID NO: 49375 - DNA, 309 bp, Homo sapiens
cgggccccccctcgagagtaacttctagaattaattaaggcgggtggggggatatggggattcaggcaattgtttacacactttgaataactgcaaaggatttacggtttgtgaaaaatgtgtactgtggaaaagataataaattgaagacattaaaaaaaaaaaaaaaaaaaaaaaaaaaaaaaaaaaaaaaaaaaaaaaaaaaaaaaaaaaaaaaaaaaaaaaaaaaaaaaaaaaaaaatgtcattgtcccccccggccctgtgattcacttttattctaaaagacaggatattccccccccccaac

SEQ ID NO: 49376 - DNA, 355 bp, Homo sapiens
  misc_feature 274: n = A,T,C or G
aaagggaacaaaagctgggtaccgggccccccctcgagagtacttctagaattaattaaggcgggagtcctcatccagtgtgccctaagctgaagcaggttaaaagtttagctctgccagcatgtacccacagaaagatttcctagaaaaggtctcttctttttgagcgtttcattatatatgaaggcttaagaagtcctgtgaccaagaaacctgcataacccacaacttcctagacatttttttctcaagaacataccttaggaacactctnaaaaaaaaaaaaaaagaaaatatagattgaaaagaaaataaaaaaaaaagaagatggacaaaaaaaaaaaaaaaaaaagaa

SEQ ID NO: 49377 - DNA, 92 bp, Homo sapiens
taaagggaacaaaagctgggtaccgggccccccctcgagagtacttctagaattaattaaggcgggcataggaattttgaactagggtaccc

SEQ ID NO: 49378 - DNA, 352 bp, Homo sapiens
ctggccgtcgttttacaccacggaacaagtgtttacctttgcttgttgccgggcccttcctcgagagtacttctagaattaattaaggcgggtgagaaagcctgtggtttcacttatttatataactcactgggacattgccaaatgagtaaacacttaattcgctgcttctgagacttctctgtcaaaacagccccactgataatattagacggaactagaatgcaggggtctcttccctcccctggggtttaggaagctcatgaggagctcggcttaaaatgtctttgaaggtctcttcctttgtctcaaaaagtaatgtccaattttatatactatttgaatattacta

SEQ ID NO: 49379 - DNA, 503 bp, Homo sapiens
taaagggaacaaaagctgggtaccgggccccccctcgagagtacttgtacaattaaaaaaggcgggtgcctgtggtcccagctacttgggaggcacaggcaggagaatggcatgaacccgggaggcggagcttgcagtaagccgcgccactgcactctaacctgggcgactgaccgagactcatctcaaaaaaagcaaaaatttcacccggcgttgcgacctacacttgtaattccagcccttggggagactgaggcaacaaatcacttgagggatggtatcgcaaactaacccgggaaaacgggtgaaccctagtgtttactaaaaatccaaaaaaaaatttccccggggcgtaattgaccccccttgaaatcccacctccgggggaggctgaggcttaaaaattgtttgaccctggaaaggaaaaaattgcagggacctaaaatagggccatttttttccaccctgggcaacaaaccaaaattgtttcttacccccgcccc

SEQ ID NO: 49380 - DNA, 404 bp, Homo sapiens
  misc_feature 304: n = A,T,C or G
cctaaataaagggaacaaaagctgggtaccgggccccccctcgagagtacttctagaattaattaaggcgggaagtggagggtgaataggtcacggcggcctttttttttttagttaaacttttccttttttgctgtctagtcatcctcgtcggtcttctgcttcttggtatcgacatcgtcatcctcatcatcttcagctgcccgcttgcccgtagctgactcagcttcctcatgttcatacacctatcccccattctcctcctatccctaaaccccgacatcattaccgggttttcctcttnaaaaaaaaaaaaaaaaaaaaaaaaaaagggcgcccccccccggggggggccccaaatcccccttataggggggtttttaccccccccctttggggggttt

SEQ ID NO: 49381 - DNA, 452 bp, Homo sapiens
aaagggaacaaaagctgggtaccgggccccccctcgagagtacttctagaattaattaaggcgggggttgcagagctagtacctgataaaacacactttaaaccaacacatatcagatgagacaatgaaggccattgcataagggtaaagggatcaattcaacaagaagagttcactatcctaaatatgtatgcacccaatacaggagcacccatattcataaagcaggtgcttagacacccacaaagagacttaaactcccgcacaatgataatgggagactttaacacccgactgtcaatatcagacagatcgagacagaaggttaacaaggatatccaggactagaactcaactttgcacacatgcagacctaatagacatctacagaactattcaccacagatcaacacaatatacattcttcttagcaccacattgcacttattcta

SEQ ID NO: 49382 - DNA, 400 bp, Homo sapiens
ctggccgtcgtttacatcagggaccaagtatgacctttaattctggccggtggtttacaataaagaaaaaaaaaaaaccttaattcggggcgggggttgtccgaaaaaaaaaaaaaaaataacttttttatggtcccgggactttactaatagcctactataggctttaccaataacacaaccaatcagttaggcacgtattttgtatatgtgttatatatattcttacaataaagtaagctagagaaaagaaaatattaaggaaaccagcctgggcgtggtggctcacacctgtaatcccagcattttgggaggccaaggcaggtagattgcttgaggtcaggagtttgagaccagcctggccagcatgttgaaaccctgtctctactaaaaaaaaaaa

SEQ ID NO: 49383 - DNA, 277 bp, Homo sapiens
gcgcgcaattaaccctcactaaagggaacaaaagctgggtaccgggccccccctcgagagtacttctagaattaattaaagcgggtgtgctcttttagctgtttcttatgtatgggttttttttaatgtgatcccttcatttgaatattaatggctttttccattaaagaataaaatattttggacaatgcctaaaaaaaaaaaaaaaaaaaaaaaaaaaaaaaaaaataatccaaaaaatataaaaaaaaaaaaaaaaaaaaaggcggccgccacc

SEQ ID NO: 49384 - DNA, 274 bp, Homo sapiens
accctcactaaagggaacaaaagctgggtaccgggccccccctcgagagtacttctagaattaattaaggcgggataatggtgtgaactcgggaggcagagcttgcagtgagcctagatcgtgccactgcactccagcctgggcaacagagtgagaatctgtctcaaaaaaaaaaaaaaaaaaaaaaaaaaggggggccccccccggggggggcccccaattcccccttaggggggtttttttccccccccccacgggcccctttttaaaaaaa

SEQ ID NO: 49385 - DNA, 365 bp, Homo sapiens
aataaattaatgcggggagagcatcaggataactagctaatgcatgtggggcttaatacctaggtgataggttgataggtgcagcaaaccaccatgggacacgtttacctatgtaacaaacccgcacatcctgcacttgtatccagaacttaaaatattttaaaaatctttagagaattctattaaaaaaatactaaaggatataaagtgtgggcccccccccggggggggccccattcctcctaattagggatgtttaaaccccccctttgctggcggttttttaaaaattgaaagaagagaaatgtttattcaaatcttttgcccatttttaaaagggggttggttattcgttaacaagaatt

SEQ ID NO: 49386 - DNA, 470 bp, Homo sapiens
aaccctaaataaagggaacaaaagctgggtaccgggccccccctcgagagtacttctagaattaattaacatttcagcaaaatacacacatgcacacagacaaagaaaatatgacaaaatggtaattattgaatttcaggataggtgtatgagtgacaattataccactttttcaactcttctatgtttagatgctttaaatatttaaagctaggggctgggtgcagtagctcatgcttgtaatcatcatattttgaggggctgaggtgggagcatagcttgagcccagcagttcgaggctgcagtgagctatgatcacaccactgccctccgggctgggcagcagagcaagaccctgtctcaaaaaaaaaaaaaaaaaaaaaaaaaaaaaaggcccccccccccgggggggaccccaaatccccctttaagggggttttttacccccccccctggggcccttttttaaa

SEQ ID NO: 49387 - DNA, 332 bp, Homo sapiens
actggccgtcgttttcaccccggatacagggaacacatgatgggtagcgcgggccccccctcgagagtacttctagaattaattaaggcggggcctgctctccccagctgcccctgccaatgagggccccgggctgccctgtcactcctctaacacttccctcccctgtccccaacatgccctgtaataaaattagagaagactaaaaaaaaaaaaaaaaaaaaaaaaaaaaaaaaaaaaaaaaaaaaaaaaagggggcccccccccggggggggcccccaatcccccctaaagaggagaaaaaaacccccccccccggggccctttttaaa

SEQ ID NO: 49388 - DNA, 476 bp, Homo sapiens
gcgcgcaattaaccctcactaaagggaacaaaagctgggtaccgggccccccctcgagagtacttctagaattaattaaggcgggatgagattataaaaggttaaaattctcatctaggccaggcacagtggcttatgcctgtaatcccagactgaggcaagaggatcacctgaggtcagaatttcgagaccagcctggccaacatggtaaaaccccatctctactaaaaatataaaaattagccaggcgtggtggtgcgtgcctgtaatcccacctacttgggaggctgaggcaggagaatcacttgaacccagaaggtggaggttgcagtgagcagagatcgtgccactgcactccagcctgggcaacaagagctaaactccatctcaaaaaaaaaaaaaagagggaaaaaaactttcagaaagcgcagtgtaaattacggcaagagtcaaccactaagtccattttcattcct

SEQ ID NO: 49389 - DNA, 363 bp, Homo sapiens
  misc_feature 24, 25, 61: n = A,T,C or G
ggccccccctcgagagtacttctnnaggggggaacaagaaagtgaaaaaaaaaaaaaatanggttttgttaggcttggtaggtgcttagtatcaccctattatttttatttgcatgagtaagctattaagtactcaacaatcaaaaaatcctccgattcttctggtgcattccaaatgaaaatcttacagcagagccgcctactgtacaattctaagtactctaacgaggtatgaatctatgaacccaggctgaaaaccagccaatgcggaaatccaggtagctttataagccagcaaacatcaagcatgtcagaccctcaaaagatcccaaataatgtcaaaatacacatacatccctttaa

SEQ ID NO: 49390 - DNA, 305 bp, Homo sapiens
ggaacaaaatctgggtaccgggcccaccctcgagagtacttctagaattaattaaggcggggggacagactgcggcacggacagtggacgctgggacacgtttgtagctgcggccccgacgttccgacccacgtcgccgtcgccgccatgacggggctaacactgctatactcccgggtctacaaggccttttgggcatgctcgctggccgcgggattctgctacaccatttgtggatttggcttccgcttagatgtggcatggttcctgacggagacttaacccttcatgtggtccaacctggg

SEQ ID NO: 49391 - DNA, 284 bp, Homo sapiens
gcccccctctcgagagtacttactagaaattaattaaggcggggattgtggcaacgtttgcaaccgttcacgattcaataaatattggatgaatttaaccgaaaaaaaaaaaaaaaaaaaaaaaaaaaaaaaaaaaaaaaaaaaaaaaaaaaaaaaaaaaaaaaaaaaaaaaaaaaaaaaaaaaaaaaaaaaggccccccccccccggggggggggcccccccccccaaaaaaaggggatttcccccccccccccccggggttttaaaaaaaaaaaaaaaaaaa

SEQ ID NO: 49392 - DNA, 469 bp, Homo sapiens
ctaaagggaacaaaagctgggtaccgggccccccctcgagagtacttctagaattaattaaggcgggcgcctgttttcccacctactcatgatgcttaggcaagagaattacttaaacacttgaagcagaggctgcactgagcatgacatacgaccatttggctccagactgggcatcaacagtgaaaatctgtctttgctgtaaattccttttgattttctttttccgggttcatggtccttggtaatttcattcatggaaaaaaatcttattatcctcccaacaaagatttgtatatttttgactttatatttcctgagctctcctgactttgtgaaaaagggtggatgaaaatgcattccgaatctgtgagggcccaaaacagaatttaggggtgggtgaaagcacttgtgctttagctttttcatattaaatatatattatatttaaacattcatggcatagatg

SEQ ID NO: 49393 - DNA, 453 bp, Homo sapiens
  misc_feature 351: n = A,T,C or G
gccaagcgcgcaattaaccctcactaaaggggacaaaagctgggtaccgggccccccctcgagagtacttctagaattaattaaagcgggtgggggatccgatcatggtgatgtacggggtgaattctcttgccgtgttgcaaatgtgtaaaataaagattatctggccaaaaaaaaaaaaaaaaaaaaaaaaaaaaaaaaaaaaaaaaaaaaaaaaaaaaaaaaaaaaaaaaaaaaaaaaaaaaaaggaaaaataaaaacagccctaaaaagaaaaatatcccgcccccccccggggaaagcccaaaataccccaataaagagaaaaataaaccccccccccgggcgcgngtgtaaaacagggggaacgggaaaaaccctgtgggaaacaaaaaaaaaggcctggaaaaaaatccctttttacaaaagggggaaaaaaaaaaaaaagcccaa

SEQ ID NO: 49394 - DNA, 447 bp, Homo sapiens
ctaaagggaacaaaagctgggtaccgggccccccctcgagagtacttctagaattaattaaggcgggagcaagggtatacacaccaaaaactaattattatgtggttagcccaacacataggcccaacacatccgataccatacaaagatctcatattctcttccaaatctgactgaaaagctatacttttctgtttctttcttaagcaacaactggtctattcaagctcaaccagagcatataacagaaaaaatgactaatgagaggctcttaaatagttttgaaggacagacactttctagaaagtagaaagatcactgagtaaacactgcacctcccctaccccacaaacacacacaaaaaagatgaggatgaatgtagaagtgtagagcaagcttgtggacatcctcaagtttggttttggcgcttctgttggtaagcagtca

SEQ ID NO: 49395 - DNA, 356 bp, Homo sapiens
ctaagggaaacaaagctgggtaccgggccccccctcgagagtacttctagaattaattaacggggccttgatacttaactaaataaaaaactaagcagatatgagttaaatgtaaaaaaaaaaaagaaaaaaaaacaacagcggggtgactacggggggcagaaacctattgcccatttaaaaaataaatagtctccccggaatattcggaatggaaatgataaatacttgaggtgaatggatatcccatttcctctaatgtggttcttatgcaccatatgcctgtgtcaaaatatcttatgtaccccataaaataacacatatactggttacccctaaaattttaaaaaaaaaaa

SEQ ID NO: 49396 - DNA, 287 bp, Homo sapiens
ctaagggaacaaagctgggtaccgggccccccctcgagagtacttctagaattaattaaggcgggaggtttaggtttcataatcctggaccgatcgaatgcaccaaatatcccaaaactcaatacattccttcttctgttcattggattcgtctgtgtcctattgagttttttcatggctagagtattcatgagaatgaaactgccgggctatctgatgggttagagtgcctttgagaagaaatcagggatactggatttgctcctgtcgatgaagttttaaaggct

SEQ ID NO: 49397 - DNA, 492 bp, Homo sapiens
cccctgactaaagggaacacatgctgggtaccgggccccccctcgagagtacttctagaattaattaaggcggggggttccattctgatcacaactcattaaatatttatgaagatatcctgtgatttccatcccagggtgacaggttaggtaagccagatgcctcatgcgttatgattactagattaggactgcagcggtgcctcacacctgtaatcctttcactatgggtggcctaggttgatcactggatgccaagatttggagaccttcctggccaatattgtgaaaccctttgtctactatgaatataagctttacccctgcatgttggcacatgcctgtactccctacttcttacgaggctctggcacttaaatcgcttgcacccgttaggcagaggttgcagtgagccgacatcgcaccgttacattccagcctgggcatcacagtgaaactccatctcaaaaaaaaaaaaaatttcctaattta

SEQ ID NO: 49398 - DNA, 268 bp, Homo sapiens
gctgggtaccgggccccccctcgagggtactctctaaaattaattaaggcgggagtggtaggatgaaacatttggagaagatagaagtttgaagtggaaaactggaagacagaagtcgggaaggcgaagaaaagatagagaagatagggaaattagaagataaaaactacttttagaagaaaaaagataaatttaaacctgaaaagttggaagcagaagaaaaaagacaagctaggaaacaaaaagctaagggcaaaatgtacaaact

SEQ ID NO: 49399 - DNA, 312 bp, Homo sapiens
  misc_feature 305: n = A,T,C or G
ctgggtaccgggccccccctcgagagtacttctagaattaattaaggggggagtgggggactagaactgggatgtcttggcttgtatgttttttgaagcttcgattatgatttttaaacaataaaaagttctccacaaaaaaaaaaaaaaaaaaaaaaaaaaaaaaaaaaaaaaaaaaaaaaaaaaaaaaacaaaaaaaaaaaaaaaaaaaaaaaaacccccccccccccccccggggggacccccccccccccctaaaaagggggagacccccccccccccccggggggttaaaaaaaaaaaanaaaaaaa

SEQ ID NO: 49400 - DNA, 516 bp, Homo sapiens
  misc_feature 328, 341, 342: n = A,T,C or G
gcgcgcaattaaccctcactaaagggaacaaaagctgggtaccgggccccccctcgagagtacttctagaattaattaaggcgggatttagaagttcattctctggtcactgaatgtatcaggtcaatgaagccttcaaggtgccaacagagatcatggtcaggtggacccatatatgaactccaccaacacattgagaggatccttgctggaaaggaacaggctgttcctaagccaaaatctggtgcttctcagaagaaaaagataacccaaaaggaactgaagaggaaaatttagggcaggaaatacaaagcacacaattaatgtnaataaaaaaaaannaaaaaaaatataaacaaaaaagcggccgccaccgcggtggagctccaattcgccctatagtgagtcgtattacgcgcgctcactggccgtcgttttacaacgtcgtgactgggaaaaccctggcgttacccaacttaatcgccttgcagcacatccccctttcgccagctggcg

SEQ ID NO: 49401 - DNA, 527 bp, Homo sapiens
ctggccgtggttttcaatcacaggaaacaggatacaaccgttatgtccgggcgcgccgccctacagagtactgatagaattaattaaggggggtctttaaaaagacaagtgtctgtcctttagcattccaaagagttagaggacaaaactgtaaaattctggtatgtaatatttatttcttataaataaatacatatatacacatagcagtcatgtgctgcataacgatgattcagttagtgacagaccccatataggacagggtcccatatgattataatggagtatatttgagccaggcatgatggctcattcctataatcccagttacttggcaggcagaggtgggaggattgttcaagaccagcctgggcaacattgtgagaccctgtctctaaacaaaaaaaaaacccaaaaaacaaacaaaaaaaccttctgtcattgtccagcttctaagtcttcagggttttttcactgatcttaaaacaaggactgcaggactaatggggtcctcaagccttgcattt

SEQ ID NO: 49402 - DNA, 450 bp, Homo sapiens
  misc_feature 367, 368: n = A,T,C or G
cctaactaaagggaacaaaagctgggtaccgggccccccctcgagagtacttctagaattaattaaggcgggaggattgtgtaagcccaggagttcaaggttacagtgagctatcatgccacagcattccagtctaggcaccaaggcaagatcctgtctctaaaaataacaataattatcatcatgatctcacaatgaacactttgtttgatgggcattcaacaaatgtgtagctatttctgttgaactgcttcctccctgtgtatctgctgagtaaataaacgaatgaacaaacccaaaaaaaaaaaaaaaaaaaaaaaaaaaaaaaaaaaaaaaaacccccaaaaaaaaaaaaaaaaaaaaaaannggccccccccccccggggggggccccccccccccctaaagggggggtttttccccccccccctggggggttataaaaaaaaa

SEQ ID NO: 49403 - DNA, 483 bp, Homo sapiens
ctgggtgccgggccccccctcgagagtacttctagaattaattaaggcgggggcaggtctcactatgttgtccaggccaatctcaaactcctagcctcaagcaatcctcccacctcagcctcccaaagagctaaggttacctgagccactacacttggccactatagtttttttttaaggctgccctgagaaaccagaggcagccctaagttctccctccccatgtcctgccccatcctcaccctacagacacccaaaatgacctcaggactcaaaaaaaaaaaaaaaagggggggggggggggggggcccaaccctggaatcccaaccttttggggggccagggggggcaaattttttgggggcggggtttaaaaaaccgtttggcccaatggggaaaacccccttttttaaaaaaaaaaaaaaacggggggggggggggccccccttttcccccatttttgggggggggaagggccaaaaa

SEQ ID NO: 49404 - DNA, 295 bp, Homo sapiens
gggtccgggccccccctcgagatacttctagaattaattaaggcgggaggctgttaaaacattttagcataacacctacagagcttgagccagtcttccaggggcaaatatataaaaatgttgcaaaatacaaaatatttaataacagcatagagaatgagattcagctgtagagagatcatttgaatctactcccagcatttaagctagactgctggtgtactaacagcactgattctgttagcaacaagtagtggtagacaactagaaatatgtcagtttaaaacttgtgaag

SEQ ID NO: 49405 - DNA, 339 bp, Homo sapiens
  misc_feature 296: n = A,T,C or G
cctcactaaagggaacaaaagctgggtaccgggccccccctcgagagtacttctagaattaattaaggcggggtaggggggtgaaaagaagaaaaagtggatttcggattggctgaatattttgttactaattttcactagctttttcaaaaatactataattcatataccatacaatttatccacttaaagagtacaagtcactattgtttggtatattcatggagtctctacttttcatatactgtgctacatgattcagatcatgtagtgactgctagttaagtaaatggatntatttccttctgcaggatccctctacttaatgcagtagctaca

SEQ ID NO: 49406 - DNA, 576 bp, Homo sapiens
aaagggaacaaaagctgggtaccgggccccccctcgagagtacttctagaattaattaaggcggggtgggggagcctcacttcgttttttctttttttcctttctaaaaattccaacagctgctctaaaaccttaattattccaagcaagtttctagaaccactgagtttctgggaatgtctgggtttgcaaagtcaccagctgtgtttggaaagacatttccaatggggttgaactctccagtgtgaatgaacttttcttgtcatgacctcactgtctgtaatgagggcttcctgattgcagtttgctttacctgaaaacaaaacagaggccaaacaccaccttatttaaagcaataatggaagttatcctatgaaagatagcagcccaccagcagatgtgaaaagcaattactaggttaaaaaaagagaaagaaagagagagagagagagagagagagaaagaaagagaaagaaaaggaaggagggacaaattttaaacttaaccatttttttcgggcccccccccccgggggggggcctaaaatcccccttaggggggggttttacccccccc

SEQ ID NO: 49407 - DNA, 524 bp, Homo sapiens
gccgtcgttttcaccctgataagggaacacagctgggtgccgggccccccctcgagagtacttctagaattaattaaggcggggccaatcccttggtacggagccgcagtgtgagcctgcgcaggacagttatcatgtggttttaaagaacacgtggaaatcccttgaatttaggatcctggtctaaccatgaaagataagactgttcttaacgacctagatgattctgttcatctctgaacgggatcaggttttgtcctcactccaattaaaagaaagcaatgtctatatacatcaaaaatgcctgaaataaaacaatattccacccaggtgaaacattttgaaaatggcttaaagaatgtctgggctgggcgcagtggctcacatctataattccagcactttgggaggccgaggcgggtggctcacaaggtcaggagttcgagacaagcctggccaatatggtgaaacccgtctctactaaaagaaaaatcagccaggcgtggtggttggcgcctgtaatc

SEQ ID NO: 49408 - DNA, 582 bp, Homo sapiens
taaataaagggaacaaaagctgggtaccgggccccccctcgagagtacttctagaattaattaaggcgggctgatcacctgacatcaggagttcgacagcagcctgggcaatgtggtaaaactctgtctctattcaaaatacaaaatgagccaggcgtggtgctggcatgcgcctgtatgctactcgggaggctgaggcaggagattggcttgaatccagaaggcagaagttgcagtgggctgagatcacaccagtgtactccagcctgggcaacagagtgagactctgtctcaaaaaaaaaaaaaaaaagggggtaaaaaacttggttttaactttaaaatttaatttgaaagtttaaaacggcccgggcccgggggttaacccttgaatccccacctttttggaaggttaagccgggggaatcaaagggtcgggaaatcaaaaccttctgggtaaaaaggggaaacccccactttttttgaaaaaaaaaaaaaaaaaaaaaaaaaaggggggccccccccccgggggggacccccaatcccccttttagggggttttattcccccccctaaggggggggt

SEQ ID NO: 49409 - DNA, 481 bp, Homo sapiens
ccctactaaagggaacaaaagctgggtaccgggccccccctcgagagtacttctagaattaattaaggcgggtggatcacaaggtcgggagatcgagaccatcctggctaacatggtgaaaccctgtctccactaaaaataaaaaaattagcagggcatggtggtacgagcctgtagttccagctacttgggaggctgaggcaggagaatcacttgaacccggaaggcggaggttgcactaagccgatatcacgccactgcactccagcctgggcgacagagcgagactctgtctcaaaaaaaaaaaaaaaaaaaaaaaagggggaagggccccgcttacacctttgaatcccaattttttggggggtttgggcaaaaaaattggtaaaacttaacatttttaaacccccccgccccaccaagggaaacccccttttttaaaaaaaaaaaaaaattaccgggcctatagggaaaccctttt

SEQ ID NO: 49410 - DNA, 491 bp, Homo sapiens
agcgcgcaattaaccctcactaaagggaacaaaagctgggtaccgggccccccctcgagagtacttctagaattaattaaagcgggtaaaagtgtggaggttttgtattcaattgaagttaagttgctattaacttaaaaaagactgttgtaactacaagatattttatgaaagctttgagctaaccacaaataaaattcccacaatatacaaataataaaaaagaaaaagaaaaaaaaatgcggccgccaccgcggtggagctccaattcgccctatagtgagtcgtattacgcgcgctcactggccgtcgttttacaacgtcgtgactgggaaaaccctggcgttacccaacttaatcgccttgcagcacatccccctttcgccagctggcgtaatagcgaataggcccgcaccgatcgcccttcccaacagttgcgcagcctgaatggcgaatggaaattgtaagcgttaatattttgttaaaattcg

SEQ ID NO: 49411 - DNA, 566 bp, Homo sapiens
aaccctaaataaagggaacaaaagctgggtaccgggccccccctcgagagtacttctagaattaattaaggggggacttgaccacctcactgccgacattacacaaatcacccacacagatagttaacatggatacccaggaaaagaactcaattatgaacctaggtggaccgtaatttagcatcctacataaactgatctaccccaaatcaacagaatttacatttgtttcacctccacaccacatctatgccaaaattgaccacatcgttggaagtaaagcactgctaacctaatgtaaaacaacagacaattataacaaactgtactctcataccatagcgtactcaaactaaaactcaggattaataaactcactcaaaactgctcaactacatggaaacagaacacctggctcctgaatgactactgggcacataacaaaatgaaggcccaaataaagatgttctttgaaacctacgatatcaaagacacaacataccagtatctttgggacaaattcaaagcagtgtgtagagggaaatttatagcactaaatgcccaca

SEQ ID NO: 49412 - DNA, 295 bp, Homo sapiens
  misc_feature 173, 174, 232: n = A,T,C or G
aagggtaacaaagctgggtgccgggccccccctcgagagtacttctagaattaattaaggcgggaataaaaaagtttgaaacaaacgaagataaaagcacaatataccaaaacctgtgggatacagcaaaaacagggctaaggggaattttatagcaataaatgcctacagcnnaaaaaaaaaaaaaaaaaaaaaaggggggggcccccttttttttttttttttttttttngggggggggggggtttttttacaaaaaaaaaaaaacctgggggaaaaaaaacacgcttttttt

SEQ ID NO: 49413 - DNA, 502 bp, Homo sapiens
  misc_feature 404, 405, 407, 408: n = A,T,C or G
accctaactaaagggaacaaaagctgggtaccgggccccccctcgagagtacttctagaattaattaaggcgggaaaggaagcatggagaaagtgagaaaaataaccaaaataagatgataaaattcaaatgtattggtaaagggactaatgcttaagttaaaagacaaagattgttaaggtaggttaataaccaaaaacatctagctttaagctgttgataagaaatacatcaaaagcctaaggatatagaaagctttccacaagatgattatgtcaggcaaatattaaaatagaaggctggcatagctatattaatatcagataaatagatctgtaaggcagaaaactttgtaaaagccagatgttcatctctgtgtatttctgccccgaagttgcttgacnnannaaaaaaaaaaaaaaaaaaaaaggggcccccccccgggggggaaccccatttccccttttaggggggttttttacccccccttttgggccgtttt

SEQ ID NO: 49414 - DNA, 538 bp, Homo sapiens
actaaagggaacataagctgggtaccgggccccccctcgagagtacttctagaattaattaaggcgggagaggaaccaggagagagcatgtggagaggtgccacgctctctatgacacccagcttttacaggaactactagagcaagaactggctcacccctgtcacctaagaaagggcattaacgtatacgtgaaggatccactcctgtgacccaaacacatgccataacgtcccacctgcaacattggggatcagatctcaacatgagattggaggacacagacttcgcctctataggatgtttaggctttctatttcttcctgactcagttttggtaggtggcatgtttctaaaaatttatgcatttcttctagattatcccatttgttggcatataattatacatgatagtcccttataatcttttttatttcagagacattcattttaatacctcttttaaaatttctgactttatttatttgagccttctctctttctttgtattgctaagggtttgtcaattttattttat

SEQ ID NO: 49415 - DNA, 453 bp, Homo sapiens
ttaaccctcactaaagggaacaaaagctgggtaccgggccccccctcgagagtacttctagaattaattaaggcgggaggatcgcttgagcccaggagtttgagaccagtcaaggcaacatagtgagagccccatttctacaaaagatagaaaaaattagctaggcaaggtggtgcaagcctgtagtcccagctacttgggagggcacagtgggaggatcacttgagcccaggaagttgaggttgtagtgagctatgatcgtaccactgcactccagcctgggtgacagagcagaccctgcctcaaaaaagatagagatagagagatagagaaatagggggagagagagagagaaatagtagcttttggttactagaaaggattgcccaaaataaaaccttgtgtttagaggaaagagtttaaggaataaaaacaattctttggtcttttttt

SEQ ID NO: 49416 - DNA, 495 bp, Homo sapiens
gcgcgcaattaaccctcactaaagggaacaaaagctgggtaccgggccccccctcgagagtacttctagaattaattaaggcgggggagaagcagccgtgctgccaggtcacccatacctccagacagtcggctagccgcactgcccgttccttttacgcccatgttgtgctccttgagagcagattggctgatgcccccgcaaccccagcccaagctctgcctcaaagaccgagtgacataagccattcccaccctcctaggttcacatccagggctgtgtcttccttgggggaggagatggcgccgactagaccacggtaacgcagtcaggcaggtgatcaccactgcctttcctaactctgatcgtgagaacactgtacccattcactgaccttgggtccctgtcctgaagacggccccatacgtcctttccacctgttgcgctgcctgaatggcgaatggaaattgtaagcgtccatattttgttaaaatt

SEQ ID NO: 49417 - DNA, 299 bp, Homo sapiens
agggaacacagctgggtgccgggccccccctcgagagtacttctagaattaattaaggcgggggtgcacaatggctgggtacttctttccatttccccttgcagctacacttactttctccctgactaccaagtggtagtgaccggtgaataatcatgctcataatatgatacacccagacagtacccagaaatcttgtgatttccccagcgagatacttacgcactctctcttctctttggcatggttaaaacaggaggggcgtcctctgtcactgctaactattcttcactcgagtg

SEQ ID NO: 49418 - DNA, 478 bp, Homo sapiens
  misc_feature 391, 392, 393, 394: n = A,T,C or G
accctcactaaagggaacaaaagctgggtaccgggccccccctcgagagtacttctagaattaattaaggcgggcgcctgtagtcccagctacttgggaggctgaggcaggagaatggcgtgaacccgggaggcggagcttgcagtgagccgaggtcccgccactgcactccagcctgggcgacagagcgagactccgtctcaaaaaaaaaaaaaaaattacccgggcgggggggtctcctaaaaatccaaaatttacccgggcgttgtaatctgacctcctcaggaggctggggcaggacatttgcttgacccccaaaaccggaggttgcagtgacccaaaattttgccactgcactccaccctgggcaacaaagggaaactctgtcttnnnnaaaaaaaaaaaaaaaaaaaaaaaaaggggcccccccccggggggggccccaattcccccttttggggggttttttacccccccc

SEQ ID NO: 49419 - DNA, 234 bp, Homo sapiens
gctccgcggcgctgccgtttcgttccgcctgggcgggattctgacttaaaggcgttcagtcataatcccacagatggtagcttcgccccattggctcactcacccaccacattaacaacataaaaccctcattcacacgagaaaacaccctcatgttcatacacctatcccccattctcctcctatccctcaaccccgacatcattaccgggttttcctcttaaaaaaaaaaaa

SEQ ID NO: 49420 - DNA, 177 bp, Homo sapiens
gtaactcctcactaaagggaacaaaagctgggtaccgggccccccctcgagagtacttctagaattaattaaggcccggtaacttacatgatgattatgctttctcttcttttttgtattcttaattggcacttttgtgtgatccttgaagctccaggacgggtccttttaaacagt

SEQ ID NO: 49421 - DNA, 313 bp, Homo sapiens
taaagggaacaaaagctgggtaccgggccccccctcgagagtacttctagaattaattaaggcggggaagggtgcatagctgttttagctgatggacatggtgccgacgcccccatacctagctaggctaagtcaagatcaacattccagggttggtaatgtcggatgatgaaacattcattgttaccttgtggatgctagtgctgtagagttcactgttgtacacagtctgttttctatttgttaagaaaaaactacagcatcattgcataattcttgatggtaataaatttgaataatcagatttcttaca

SEQ ID NO: 49422 - DNA, 444 bp, Homo sapiens
aataaagggaacaaaagctgggtaccgggccccccctcgagagtacttctagaattaattaaggcgggagaataagcagcagaataacatctctacagacaataaaagcacactagaaagacacacctacagatcaaaaccttaactgtttcaaaatgtgataaaagacattaagaaaatgataacagatatgaaactacataaatcagaagtagaaaaattcagaaatgaagtgacagaactcagaaatgtattagaaatgaaaggaaaaatcatttcagaatgaagattaaaggataataagcaaaacagataatgccataagacaaatagaaggcaaaaaaaaaaaaaaaaaaaaaaaaaaaagggggccccccccggggggggccccaaatccccctttaggggggtttttttcccccccccttgggggggttttttaaa

SEQ ID NO: 49423 - DNA, 483 bp, Homo sapiens
taaagggaacaaaagctgggtaccgggccccccctcgagagtacttctagaattaattaagccccttttctttataaattactcagtcttgcatagttctttatagtagtgtgaaatggactaatacatacatttatcttttaaaatagtgcaacagacctttctggaatccttagtcaattactctttcatataacacagaaacaaagcaatggttaagagaagtagaagtgagagatatcacatctgagtaaaataaaataaggaaacaaaagaagaattgagaagtcaaagaaaataaaaactaatctatattttttatagaaagaataaattaacctagtaattttataatgaattacctatataatatgttgttcatgctatatattcatctcaatttgtactatgtgtaatacactatatgtactatatgtactatgtgtaatacactatatgtactatgtgtaatacactatatgt

SEQ ID NO: 49424 - DNA, 475 bp, Homo sapiens
gggaacaaaagctgggtaccgggccccccctcgagagtacttctagaattaattaaggcgggtgtggtggagaacgcctgtaatccccgctacttgggagactgaggagggaggatcaattaggcccaggagttggagatcagcctgagcaacatggtgaaaccccatgcctacaaaaaaaatttaaaaagaatcaccctttgttgacttcatcccctggttgtcttctgctacggcccttactagcatttgaaattatttcacgtttttacttgataatcgtgtctctccactcttgactcaccatccccaccatacacacacacacacacacacacacacacacacacacacacacttaaaactacacattcctgaaagttctgcgggagcaggcatctattcaacacttgacggtttgctgtgggtttgacaagcaggcaagtacggtcgggtgagagaggggtatggagaa

SEQ ID NO: 49425 - DNA, 548 bp, Homo sapiens
  misc_feature 57, 58: n = A,T,C or G
taaagggaacaaaagctgggtcccgggccccccctcgagagtacttctagaaggaannaaggcggggtagctgagcaatgcttgtgaatcttttcttaagaaatcccaaaaagccaatattagttaaaattctgttgtttaatttggttatcttgctttataaattatgcctctaaacaatcaaatctatttttgaaatagactgaatgatgtcaagaaatatacctactgctatccgtatgtggtggattagaaatgtgttaaatctgcaaaaggtataaagatgtcagtttaatttctttgataatttaacctatgttgtatgtgaattatttattataaacttagcacgattctgtgactgtttttctctgtttcacgttcgttgagtgtaagcaatgaaaatgtcccaaataagttttttaagttttactttaataagattaatttcagtaaacattctagttgttcaatgtaacctttttatcttgatgcattgtaagtaaaatgaatcatttactcttgaaatgccagtcattgactgatgt

SEQ ID NO: 49426 - DNA, 267 bp, Homo sapiens
acaaagctgggtgccgggccccccctcgagagtacttctagaattaattaaggcgggtggatcacgatgtccagagatagagcccatcctggctaaaacagtgagacccccgtctttacaaaaaaaaaaaaaatttttttttttttttttaaattaccgggacatgggggggggcccctgttttcccatttattgggaaacctggggcaggaaaatggcttaaccccggggggctgaggcaggaaaattgtttatttccaaaaggta

SEQ ID NO: 49427 - DNA, 558 bp, Homo sapiens
  misc_feature 459, 460, 461, 462, 463, 485, 486: n = A,T,C or G
taaagggaacaaaagctgggtaccgggccccccctcgagagtacttctagaattaattaaggcgggagatatcgatcatcacagcaaagctggccgagataggcacacaactaaaccttcaaaaagtcaatgcctctctgggctggatggtggaacccgatcaacactattgatacgatagaccggtcgcgggactactagcgagtaaaacagaatactctgatgactgcagtaaaaaatgatcacggggatatcgccgcgcggatcccacagaagtacaaactgccgccctagaatgctatcagcacctctacgcaagtctccttctcaatctagaagaattggataaattcctggacacatacaccctcccaagactaaaccaggaagaagttgaatccctgaatagaccaataacaggctctgaaattgaggcaataattaatagcctaccaaccnnnnnaaaaaaaaaaaaaaaaaaaaannaaagggcccccccccgggggggccccccaatccccctttagggggggtttttaccccccccctagggggggt

SEQ ID NO: 49428 - DNA, 414 bp, Homo sapiens
  misc_feature 370, 372, 373, 374, 375, 376, 377: n = A,T,C or G
gcctgatacaagcggtatggaaacagtgatggctcgctgccaggcactaactgaccccccatttcacggccataactacagcgtcactttccataacttcctcctgataagacaccactggccacggactggttctgctggtctatggaggatgtgactggagtgactcccgggccgcgcctcacctttggccatatagggcctaattgtcttacatgtaaatgtgaaatctcacctctcagtgaacatgggtcctgcgttacatgcatgtttatctagtacacatgcattaagacaggagagaggagcgcttgagcccaggagttcaagaccagcctgcgaaacacagcaagacaccctttttaccgantnnnnnnaaaaaaaaaaaaaaaaaaaggcccccccccggggggg

SEQ ID NO: 49429 - DNA, 555 bp, Homo sapiens
ggccgtcgttttacacacacggaaacagcgtatgaccatgatgactgcgcgcgcgctttccacacaggactaagagaattaattaaggcgggcacctgccgttccagctactcaggaggctgaggcaggagaatggcatgaacccaggaggcagagcttgcagtgagctgagatcgcaccactgcactccagcctgggcgacagtgtgagactccatctcaaaaaaaaaaaattatgttttggtcaaaaccataaatgtggtgaagccacctgataccttgtgaatgttataatttgtcaaaaagatggtagtttaaaaatcctaagggccaagcacaatggctatgcctgtaatcccagcactttcggaggtcaagatgggaggactacttgagcctaagagtctgagatcagcctggccaacacagggagacccccatctctacaaaaaataaaaaaataaaaattatttgggtgtgggggcatgcgtctgtagtctcagctacacaggaggctgaaatgggaggaaaacttgagcccaggaggttgaggctg

SEQ ID NO: 49430 - DNA, 397 bp, Homo sapiens
  misc_feature 314: n = A,T,C or G
aaacggaacaaaagctgggtaccgggccccccctcgagagtacttctagaattaattaaggcgggtaagatagtccgctcagaacccaccccgggccaggcacagtaatcccagttctttgggaggtcaaggccaaggatcattgagcctaagagtttgagatcagcctaggcaacgtagtgagaccctgtctctactaaaaaaaaaaaaaaaacaaaaaaagaggggccccccccccggggggggccccaactccccctttaggggggttttatacccccccctgggggggggttttaaaaaaaaagactaanaatgtggaaaaaacaaaaaaaaaaaaagaaaaaaaataaaaaaaaaaaaaaaaaaggggggcccccccccggggggggacccc

SEQ ID NO: 49431 - DNA, 69 bp, Homo sapiens
ggaaacaaaagctgggtacccgggccccccctcgagaatacttctagaattaattaaggcggggaaaca

SEQ ID NO: 49432 - DNA, 582 bp, Homo sapiens
aataaagggaacaaaagctgggtaccgggccccccctcgagagtacttctagaattaattaaggcgggaatgggccatctccattgagatgattaactgaaccacactccttctcataattctacacacaaggagggaatgagactgaggaagctgtgacataggacttgaagaccaaagactttgaaatttgcgagctgttcatgtgtgaacttgttatcactgctgtctttctattgagttacccatctagtatttttattgaagtgttatagaagaactgaacagcaccatcaatcaaatgtgtataaattgaatcttgagaactagtcgctcccatgatgggagaataacattcttctcaagctcatatggaacattcacccccacagaccacattctgggccataaaacacaccttgatttgtgctgtcagaccacagtggaattaaggtagaaattagtaacacaaaaatagctgtaaaattcccaactatttggaggttaaaccacacatttataaagaactcatgggacaaagaagtctcaagataaaaatttttttaacttcaatgaaatgaa

SEQ ID NO: 49433 - DNA, 441 bp, Homo sapiens
aaagggaacaaaagctgggtaccgggccccccctcgagagtacttctagaattaattaaggcgggcatggtggtggacacctgtaatcccagctactagggaggctgaggcaggagaattgcttgaacctgggaggcggaggttgcagtgagccactgcactccagcctgatgacagagcaagactcagtctcaaaaataaataaaaataataaaacctccataaaaaaaaaaaaaaaaaaaaaaaaaaaagggcgcccccccccgggggggccccaaaatccccccttttggaggtatttttacccccccttttgggcctttttttaatagaaaggcctcatgttacctatcgcaagagggtctctttgttcaattatttttaatctaaaaagattgggcctctgaaaaaaaaaaaaaagtcctacgtgatctgagttca

SEQ ID NO: 49434 - DNA, 198 bp, Homo sapiens
gccccccctcgtaaatacttctagaattaattaaggcgggggccgggcttggaacgatgtacgataccctcatagtgaccattaaacctgatcctccacgcgcgaaaaaaaaaaaaaaaaaaaaaaaaaaaaaaaaaaaaaaaaaaaaaaaaaaaaaaaaaaaaaaaaaaaaaaaaacggggtcgccgcggggggggg

SEQ ID NO: 49435 - DNA, 499 bp, Homo sapiens
tacgccaagcgcgcaattaaccctcactaaagggaacaaaagctgggtaccgggccccccctcgagagtacttctagaattaattaaggcggggggaggtgactcatgtctgtagtcccagcactttgggattacagatgctagctcacaagtttactattaaagaaacatcaccctaggtgtatttttcatgtaaactggctttttcatataaaggacaaacatttttagtaaataatttaaaaacactaataaggctgggaatggtgactcatgtctgtagtcccagcactttgggaggccaaggtgggaggactgcttgaggttagcagtttgagaccagcctggccaaaacagtgagactctcatctcaaaataaaaaaactaggtagagggcgaaaacgcggccgccaccgcggtggaccttcaattggccctatattgagtcgtattgcgcgcgctcactgaccgtcgttttacaacatcctgactgggaaaa

SEQ ID NO: 49436 - DNA, 382 bp, Homo sapiens
gccgtcgtctttcacccggcactaagggaacacagctgggtgccgggccccccctcgagagtacttctagaattaattaaggcgggctgggacgcaacagtgctttgcgggtaaatgtcgcgaaaagggacttttaatgtccaaccgcttgtgacctttcaggatgtacgacaagtgatgctttcagttgtaacacgtgacttggtgctgtccctgctggtctaagtagaactgtagattcatatgggctggtgttcctgtgcgctgtgggtgtggtgattcagcctggcatttctaccataagtttttggtctgctgatttgctgccctgtcttctcttactttactttatcaatacctggcaaactgaccagaattacct

SEQ ID NO: 49437 - DNA, 46 bp, Homo sapiens
ctcgcaaatgaagctgcaggccgaaaaaaaaaaaaaaaaaaaaaaa

SEQ ID NO: 49438 - DNA, 557 bp, Homo sapiens
  misc_feature 509: n = A,T,C or G
ggccctttctacagagtttttatagaattaattaaggcgggcggatcacttagatcaagagatcaagaccatcctggccaacatggtgaaaccccatctctattaaaaatacaaagattagatgggcatggtggtgtgcacctgtagtcccagctacttgggagtctgaggcaggagaatcacttgaactcgggaggcagaggttgcagtgagcgagatcgcgccactgcactccagcctggcgacagagtgagactccatcttaaaaaaaaaaaaatccaaatggcctttttatagttaagtctaaccatttattacacatttcaaaaaacaaataaactctctcctacttttgcccacctgtaaaactcatttcagtacctattttattttctcctagtttttcccatggtcttattttaaaaattcccaaattctcacttattgaattcactcacaaaattttacttcccactacagttttatcaaaaataggcccgacctatttnaaataaaaaaaaaaaattgcgggcccccccccggggggaacccccaat

SEQ ID NO: 49439 - DNA, 465 bp, Homo sapiens
cactaaagggaacaaaagctgggtaccgggccccccctcgagagtacttctagaattaattaaggcggggtttcaccatgttggccaggctggtctcaaactcctgacctcaagtgatccaccagcctcggcctcccaaagtgctgggattacaggtgtgtgccaccacgcctggctaatttttgtatttttcagtagagatgaggtttcaccatattggtcagtctcgtctccaactcctgacctcaggtgatccacccacctcagcctcccaaaatgctgggattacaggcgtgagccactgcgcctggcccataagttttaaaatgtgtatccatgctgtagacgctccctgcctgttagtcacctagtagctgtcttggtgatcacagcaactgtctcgtatcaaactgcttgtgttcaagtaaccttgaacttgacttcgtaatggcctcaaagagcaac

SEQ ID NO: 49440 - DNA, 341 bp, Homo sapiens
aaagggaacaaaagctgggtaccgggccccccctcgagagtacttctagaattaattaagatcaaagtatatatatatatatatatatgtgctgtatttgcaactttcgcattgtaatttcctatacacttattaaagtattgttttgccatgtggtttattaaataaaaatgtacagtctcttaaaaaaaaaaaaaaaaaaaaaaaaaaaaaaaaaaaaaaaaaaaaaaacccaaaaaaaaaaaaaaaaaaaaaaaaagggcccccccccccggggggggacccccctccctttttaaggggggtttttaccccccccccccgggggggtttaaaaaaaa

SEQ ID NO: 49441 - DNA, 317 bp, Homo sapiens
  misc_feature 166, 168: n = A,T,C or G
cactaaagggaacaaaagctgggtaccgggccccccctcgagagtacttctagaattaattaaggcgggggtggagcttgccgtgagccaagatcgggcaactgcactccagcatgggcgacagagcaagactccgtctcaaaaataaataaataaatcaaaccananaaaaaaaaaaaaaaaaaaaaaaaaggcggccgccaccgcgggggagctccaattcgccctatagtgagtcgtattacgcgcgctcactggccgtcgttttacaacgtcgtgactgggaaaaccctggcgttacccaacttaatcgcctt

SEQ ID NO: 49442 - DNA, 469 bp, Homo sapiens
aattaaccctcactaaagggaacaaaagctgggtaccgggccccccctcgagagtacttctagaattaattaagggggagcgagacccttgcactgccatttgagcccttgtgatctcatcttgtagaacatgttgtacaatcattttattggtatcattagtgttatttggggctggaataaaaatctcagtgcaccaaagagatttcccctttatccacgttaccctggttttcctttgttttatgtttaacctaaacgggcttaatataaaatagtgcttatttggtgttttaattgtctgcttctataacataagctgcactgtccattgtggaactgctcaccatattgcccaacctgtcttgataggtttatacatgggaggcattcagtaatattaattacctctctagaccagtgttagcaataacaaacacttgctagaattttaagactatataatcaa

SEQ ID NO: 49443 - DNA, 428 bp, Homo sapiens
ggtcccccccgcgagagtacttataagaattaattaaggcgggaggcgagggaggagcacgcgtgtcttacatggcaacaggcaagacgcttgtgcgggggaactcccctttataaaaccatcagatcttgtgagacttattcactatgacgggaacagcacaggaaaaactcgtccccacgattcaattgcctaccaccgggtccctcccatgacacatggggatcattaaaattcaaggtgagatttgggtggaaaacacagagccaaaccatctcaccaatatatccaaaacattatcatctcagcatttaatcaatgtaaacattattagtgagtttatttaaccttttttttgtactcagcttcaaagtgcttgtaaaatgttataattatagcacattttatttttggactaacccacattt

SEQ ID NO: 49444 - DNA, 281 bp, Homo sapiens
cgggccccccctcgagaagtacttctagaattaattaagcggggcatggttggtggcaggcacctgtagtcccagctacacgggaggcttaggcaggagaattccttgaacccaggaggtggaggttgcagtgagccgagatggcaccactgcactccagcctgggcaacagagcaagactctgtctcaaaaaaaaaaaaaaaaaaaccggccccccccgggggggaccccaattcccccttttagggagtcttttacccccccctcatggcccgtgtttt

SEQ ID NO: 49445 - DNA, 308 bp, Homo sapiens
ataaagggaacaaaagctgggtaccgggccccccctcgagagtacttctagaattaattaaggcagggggagaggcccccatcagggaccagactgttccaaaaaaaaaacaaaaaacaaaaacaaacaaaaaaacacttaaaagcccaaaaaaaaaaaaaaaaaaaaaaaaaaaaaaaaaaaaaaaaaaaaaaaaaaaaaaaaaaaaaaaaaaaaaaaaaaaaaaaaaaaaaaaacaaaaaaaaaaaaaaaaaaaaaaaaaaaaaaaaaaaaaaaaaacaacgccccccccccccccgggaacctaa

SEQ ID NO: 49446 - DNA, 224 bp, Homo sapiens
  misc_feature 178, 179, 180, 209, 212: n = A,T,C or G
gggtaccgggccccccctcgagatacttctagaattaattaaggcggggggaggtccaagcagagtgttttattattatcgctttatgtttttggttattggtttttttgtatagaccaaagcaaagaaaataaaaataacacagatgaaaaaaaaaaaaaaaaaaaaaaaaaaaaannnaaaaaaaaaaaaaaaaaaaaaaaaaaaanaanaaaaaaaaaaaa

SEQ ID NO: 49447 - DNA, 217 bp, Homo sapiens
  misc_feature 105: n = A,T,C or G
aattaaggcgggggcggaccttgtgaggctcaattgacccgttacttgcaacctgaaaacaaatcatgtttttgacttaaaaaaaaaaaaaaaaaaaaaaaaaanatgaaaaaaaaaaaaaaaaaaaaaaaagggggcgcccccccccggggggggacccaaacccccctaaaaaaggaatttttacccccccccctcggcccgtttataaaaaaaa

SEQ ID NO: 49448 - DNA, 509 bp, Homo sapiens
gcgcgcaattaaccctcactaaagggaacaaaagctgggtaccgggccccccctcgagagtacttctagaattaattaaggcagggggtaactttactgatttgggggtggtttttagtttaatttttcttttctagcttcccatcgacggtcagtgcgcacgttgtaatcagctgaggccatgtcaggagacggagccacggagcaggcagctgagtatgtcccagagaaggtgaagaaagcggaaaagaaattagaagagaatccatatgaccttgatgcttggagcattctcattcgagaggcacaggtttagtgatataggattacatttccttctctatgggtccaatcacactacttggttctgcagtgaataatattttcataatcctaacattgtaaatgctgtttattggttttcaattttagaatcaacctatagacaaagcacggaagacttatgaacgccttgttgcccagttccccagttctggcagattctggaa

SEQ ID NO: 49449 - DNA, 298 bp, Homo sapiens
aaagggaacaaaagctgggtaccgggccccccctcgagagtacttctagaattaattaaggcgggataagatcctccactgttttggacaagcccactagcatccgtacacacctcatggcatcagatctaatgtcccggcatctaccatcaactctgctgagggcttcgcactgtggactgattcagtgtaaataaaagtccctcccagctagtagttcctgtcagttctgttggaagcagcccactccctcacttttactccttccttcaaacccttaatcagagctacttacagc

SEQ ID NO: 49450 - DNA, 639 bp, Homo sapiens
  misc_feature 21: n = A,T,C or G
aattaaccctcacttaagggnaacaaaagctgggtaccgggccccccctcgagagtacttctagaattaattaaggcgggagtcacatgattaataaatcatttaattagaaagacattagttattccattccattagagtcctgatgtttaatttactacaattaaatggtcagtttattaaatttcataggatttaagattgcatccaagcctataggactccaagttattcagtggctgtaagtatagcacccaaatccacttagctgtgactgtgggcaatcacctttctgagggctttacatatatacatttaatcatcacacatctgcgatgattaaattataatggctaaattataatattcacattttacaaaaaaaaaaaaaaaaaaaaaaaaaaaaggcggccgccaccgcggtggagctccaattcgccctatagtgagtcgtattacgcgcgctcactggccgtcgttttacaacgtcgtgactgggaaaaccctggcgttacccaacttaatcgccttgcagcacatccccctttcgccagctggcgtaatagcgaagaggcccgcaccgatcgcccttcccaacagttgcgcagcctgaatggcgaatggaaattgtaagcgtta

SEQ ID NO: 49451 - DNA, 520 bp, Homo sapiens
cgcaattaaccctcactaaagggaacaaaagctgggtaccgggccccccctcgagagtacttctagaattaattaaggcgggaaatggatgtagcagtgatcactataaaactggtcactgagcttggaagagaatgaaataacctagaatgaggatggaatgacaaatagactaataacagaaccctgaagaacactaacagtttaagattagacaaagaaccattaagccaaaaaaaaaaaaaataaaaaaaaaaaaaaagcggccgccaccgcggtggagctccaattcgccctatagtgagtcgtattacgcgcgctcactggccgtcgatttacaacgtcgtgactgtgaaaaccctggcgttacccaacttaatcgccttgcagcacatccccctttcgccagctggcgtaatagcgaagaggcccgcaccgatcgcccttcccaacagttgcgcagcctgaatggcgaatggaaattgtaagcgttaatattttgttaaaattcgcgttaaat

SEQ ID NO: 49452 - DNA, 532 bp, Homo sapiens
ataacgggaacaaaagctgggtaccgggccccctctcgagagtttttctagaattaattaaggcgggcggatcacgaggtcaggagatcgagaccatcctggctaacatggtgaaacgccgtttctactgaaaaaaataacaaaaaaaattacctgggcgtggtggcgggtgcctgtagtcccagctactccggaggtgacagagcgagactccatctcaaaaaacaaacaaacaaaaactcagaggcatttattgagcaccttctataataagacagctattatttattgagcagtggcgtctcttttctttcttgttagacggagtttcgctcttactgcccagattgaagtgcagtggcgtgatctcggctcactgcaacctctgcctcccaggttcaagcgattctcatgcctgtaatcccaacactttgggaggctcagacgggcggatcacgaggtcaggagatcgagaccatcctggctaacatggtgaaacgccgtttctactgaaaaaaataacaaaaaaatt

SEQ ID NO: 49453 - DNA, 474 bp, Homo sapiens
aaagctgggtcccgggccccccctcgagagtacttctagaattaattaaggcggggtaagatttgccgagttccttttactttttttaacctttccttatgagcatgcctgtgttgggttgacagtgagggtaataatgacttgttggttaaaggggacttcagctttttatataaacatccacttctctttcaaaagacttcaagtaaatataagaagatactgattgattctggattgtggtatagggatatcttgtcttattttttgtacttttctgtatttttaaaatttctcaaaataggaatgggagtgaggatgggaatgctgtatctgtggaagtcatgttatactggattcatttccaattaaatactaaacattttatagaaaatatttctaaaattttatcacggatgaatggatggacttgctctctatgtaatatgaaattaatctattttattaaaattt

SEQ ID NO: 49454 - DNA, 433 bp, Homo sapiens
attataaagggaacaaaagctgggtaccgggccccccctcgagagtacttctagaattaattaaagcggggtaagatttgccgagttccttttacttttttttaacctgaccttttgacaggtgtgcactgttttgtctccagtgagcacataccatgcggattttatatgtacatcagtagtgtgaatccactggcacagtgtgtgtaaatgccagatgtggtgagattttatcttataaatgtgatcagataaaataactcctgacagaaactgtaaggaaaccagctgaatgttttgacctgatggactgatgttgtatggtttatgttaaatgtatattctttttaatcaatgaataaagcagtaaaataataaaaataataaaacagaaaaaagcgggcgccaccgcggtggaactccaattcgccct

SEQ ID NO: 49455 - DNA, 331 bp, Homo sapiens
cgcgcaattaaccctcactaaagggaacaaaagctgggtaccgggccccccctcgagagtacttctagaattaattaaggcggggcccaagatcacatgattactacttacagatgtcctttattcaatgtaagctcacgttttcttgattttagcaatacttgtaataatttttaaaatataaatatatatgaaataaaagttcatcattgattgactaaaaaaaaaaaaaaaaaaaaaaaaaaaaaaaaaaaaaaaaaaaaaaaaaaaaaaaaaaaaaaaaaaaaggcggccgccaccgggggggagctccaattccccctatagggag

SEQ ID NO: 49456 - DNA, 563 bp, Homo sapiens
aaataaagggaacacaaagctgggtgccgggccccccctcgagagtacttctagaattaattaaggcgggggaggtgtattgaagtcctccagacaaccctcaaatttgatgatttcctagtacaactcacagaaataaagagctgttatactgtgaaaaaaaagaaaaaaaaaaaagaaaagaaaaaaaaaaaaaaaaaaaaaaaaatggctcgcccccccggggggggcaccctacctctctgtttgggggaggtttttacccccccaactggggctctttttataccttcattaccctgtccattccgttgcggtgccgaatctccatctgctccttagccttctggaagcgagcatgctcattatcatctgcagaggtctcgaaatacacatcaacatcattggttggcagaggagttggaggaactttgacatcatgaataatttccttgtctgacatggggccgtcgctgccgggttcagtaggattctcctcattgtaatcatctcctttgaaggtgtcatagtagtaatctcggtcctccaccacttcctcccct

SEQ ID NO: 49457 - DNA, 461 bp, Homo sapiens
ctaaagggaacaaaagctgggtaccgggccccccctcgagagtacttctagaattaattaaggcagggaaataaaaaaagaatacaagaaagaggacaccatgggttgtaaaagaagggaaagatgtgaaaatttcagaaaataaaagtatgttttataaaattaatgcctctcctttgaagaaataaaaccaggtattgttgacaggattgccactagtgattgaaactggttaggaagacctttcactttgcattttatactcttctgtattattgtattatctgcatttatttttgttttgaatacagattacttgcagtcttctttttttttttgggggcaaaatctcactttgtcaaaaaaaaaaaaaaaaaaaaagggggggcccccccccgggggggcccccaattcccccttagggggggtttttttcccccccctttgggggcctttttaaa

SEQ ID NO: 49458 - DNA, 477 bp, Homo sapiens
agcgcgcaattaaccctcactaaagggaacaaaagctgggtaccgggccccccctcgagagtacttctagaattaattaaggcgggctatttagagcctgaaatctgaatgctggctcaacttaaatccccagctacgtcttatcccactattctctgaatgcttgcataatcataagcaccttaccactagaatacataatctaaaaatcatataagaaagctgggagccatgaaaatgtcagatgtgatgtccatgatgtagataaatatatatggtgtcctttcaggactgtcacagtaacactttatttaccgagctaatgtttgtcctaaattttcacgaccctagaggagagctttatacacttaccgatgtgaatttctctaaagtgtatatgttagagcccagtcatattacttataaaagtgttactttgtaaaaattgtatataaagaactgtatagttcaaaaagc

SEQ ID NO: 49459 - DNA, 603 bp, Homo sapiens
ctcactaaagggaacaaaagctgggtaccgggccccccctcgagagtacttctagaattaattaaggcgggatgaacggttttgtcattacaggaccagtgcccaaggagtgtgcacacttgcggcctcggattgcatccaatgctggccgcatttcctgattcttcagtttatggggagaaatttaaaattaagtcttaaacggcagaattagtataaagtacattcattaggcgttctcgccaggattatttcccgtaaaaccgtattgagcacttttcatatactaatttagttgtacatttaactttgtataatacagaaatctaaatatatttaatgaattcaagcaatatatcacttgaccaagaaattggaatttcaaaatgttcgtgcgggtatataccagatgagtacagtgagtagttttatgtatcaccagactgggttattgccaagttatatatcaccaaaagctgtatgactggatgttctggttacctggtttacaaaattatcagagttgtaaaactttgatatatatgaggatattaaaactacactaagtatcatttgattcgattcaaaaagtactttgatatc

SEQ ID NO: 49460 - DNA, 210 bp, Homo sapiens
taagggggggggggggtttcctttgggaaaaaaaaaaaaaaaaaataaaaacatacttttaaaaaaaaaaaaaaaaataaaaaacatacttgtattaatccaaattcatttcgccccccccccccgggggatccccccggctttttttagaaattttttacccccctcccctctccgctttttttaaaaaaataaaaaatttcccccgtt

SEQ ID NO: 49461 - DNA, 373 bp, Homo sapiens
  misc_feature 241, 353: n = A,T,C or G
gctgggtgccgggccccccctcgagagtacttctagaattaattaaggcgggaggaaggagattttatataaaggtaattactttgtgataattgatcaagctgtaaatgtaatattagtgtatttttcagtatgtgaattttacttttcaaaataaatatttaaaatctaagctgaaatgagagagggaggaggaaggaagttagggaaggaggaagaaaggaaggcaggaagacaggcnggaaaaaaaaaaaaaaaaaaaaaaaaaaatgggggcccccccccgggggggcccccaattcccccttaaggggggttttttacccccccccttggggcggttttttaaaaanggaagaaaaaaaaaaccccc

SEQ ID NO: 49462 - DNA, 497 bp, Homo sapiens
agcgcgcaattaaccctcactaaagggaacaaaagctgggtaccgggccccccctcgagagtacttctagaattaattaaggcgggggatatcttaaacatcatattactttatttagatttctactactccaattattaatgttatgtatttctcattgttttacttcttcatggtattatgaagactatatagatgattcaaccaagcccgcaaatctccctcttgtggaattccactggacccaatctgttttccatttccattgcaatactactaaagccatacaatatcaagcaccctccctctaggtccagggactatcacagaagaagcaggcatgtaagattttaaggactggtttcgaggggtcgagtgtaggaaaacagcctgttgcattgtaagagtgatgtcatcttgaagagcagctggcatgatgactgctgtttgactcctgcataccaagatattctgcagcaatgtctttaaacagtgcc

SEQ ID NO: 49463 - DNA, 493 bp, Homo sapiens
taaagggaacaaaagctgggtaccgggccccccctcgagagtacttctagaattaattaaggcggggttgtcctgaaagaattcataataaggtagactactcctctctggcttgcttattttattttttatttattttaatttctttatttgctttttgagacaaggcaactctgtcacctaggctaaagtgcagtggcgtgaatacagcgcactacagcctcaacatcccgggctcaagcaatcctctcacctccctcctgagtaactgggaccacaggtgcgcaccatcatacctggccaatttttgtatttttggtagagacgaggttttgccatgttgcccaggctagtctcgaattcctgcgttcaagccacccagctgccttagcctcccaaaatgctgcgatcacaggcataagccaccgcacccagccctctctggctttattttaaacacactgttttcatgttccatgttttttcttgctct

SEQ ID NO: 49464 - DNA, 450 bp, Homo sapiens
  misc_feature 304, 306: n = A,T,C or G
aaagggaacaaaagctgggtaccgggccccccctcgagagtacttctagaattaattaaggcgggtgcctgtagtcccagctactcgggaggctgaggcaggagaatggcgtgaacccaggaggtggagcttgcagtgaccccagatcacgccactgcactccagcctgggtgacagagcgagactctgtctcaaaaaaaaaaaaacaaaaaaaaaaagggggcccccccccgggggggacccccattcccccctaagagaagcttaatgcccccccccccggggcctgtttttaaaaaaatgntntgttggctcaataaataggttttggaataaaagttacaacacaccctcttgcttataacaaaatgatgaatggaggtcattacacctactctgagaatcgtgtggaaaaagacagcctgattcttacaagccgggggcctggga

SEQ ID NO: 49465 - DNA, 254 bp, Homo sapiens
  misc_feature 220, 221, 222, 223, 224, 225, 244: n = A,T,C or G
tgggtgaccgggccccccctcgagagtacttctagaattaattaaggcgggtggggttggcccttgtcttttcaagtaattttcatattaaacaaaaacaaagaaaaaaaatcttataaaaaggaaaaaaaccaaaaaaaaaaaaaaaaaaaaaaaaaaaaaaaaaaaaaaaaaaaaaaaaaaaaaaaaaacccccccccaaaaaaaaaaaaaaaaaaannnnnncccccccccccccccgggnaccccccccc

SEQ ID NO: 49466 - DNA, 455 bp, Homo sapiens
  misc_feature 306, 307, 309, 315: n = A,T,C or G
ccctcactaatgggaacaaaagctgggtaccgggccccccctcgagagtacttctagaattaattaaggcgggcagatgatttgagcccaggagttcaagatcagcctgggtaatgtagtgagacgccatctctacaaaaaaattttttaaaaattagctgggcatggtggttcatgcctgtagtccaagctacttgggaggctcaggtgggaggattgcttgagcccaggaggttgaggttgtggtgagctgtgatcatgccactgcactccagcctgggcaatagagtgagaccgtctccaaannanaaaaanaaaaaaaaaaaaaaaagcggccgccaccgcggtggagctccaattcgccctatagtgagtcgtattacgcgcgctcactggccgtcgttttacaacgttctgactgggaaaaccctggcgtttcccaacttaatcgcctt

SEQ ID NO: 49467 - DNA, 502 bp, Homo sapiens
taaataaagggaacaaaagctgggtaccgggccccccctcgagagtacttctagaattaattaaggcggggtaaaagactaactttacagtagagaaagttaacactggtcagcaaggtgatcgaggtcaataccaacacacaaaactcaggttggtagtatgtactcttgatataatgtgatgaaaatggctctctacttctatgttcttacttataaaaatccataatcccatcctaattatgagaaaaaacaacagacaaattccaacagaggggcctcctacatagacctgattagtgctcctcaaagtaattaagggcactgaaaacaaggaaagtctaagaaactgacagagtcaagaagagcccagggagacatgacaactaaaagtgatgtactatcctacacggggtcctcaaacagaaaaagaacagtacataaaaactaaggaaatgttttaaaattatggactttgattaataataatgtatcagggccg

SEQ ID NO: 49468 - DNA, 245 bp, Homo sapiens
  misc_feature 132: n = A,T,C or G
ccgggccccccctcgagagtacttctagaattaattaaagcggggcagctcatgaataatttttatgttgaagacttgtcgaaataatattttggttatgttgggttaaataaaatataaagttagtctgtnaaaaaaaaaaaaaaaaaaaaaaaaaaaaaaaaagggggcccccccccgggggggcccccaatccccccttttaggggtttttttacccccccccctgggccgtttttttaaaa

SEQ ID NO: 49469 - DNA, 606 bp, Homo sapiens
aagctgggtaccgggccccccctcgagagtacttctagaattaattaaggcggggggatcaagaacctgaagcatttcttcaaataattgttataagagatgaaatatggctttaccagtactattctaaagacaaagcacaatcaaagcagtggctaccaagatgtggaagtggtccagtcaaggcaaaagcagaccagtcaagaggaaaggtcatggcaaattttggggggaatgctcaaggtaatttgcttgttgactttttggatggccaaaggattataatatttgcttattatgagagtgttttgagaaagccagagctttaacagtaaaatgcctaggaaagcttcatcagagagtacttctccacaatgaaaaagctcctgctcattcctattagcaagcaagggcaattttatgagagttttgatgaaaaatcactaggcatccactttactgtcctgaattgactctttccaacttatttttgtttcttaaaaatctttaaaagatactctttttttcagacaataatgtaaaaaagactgcatttgcatggttaattcacagaatcctcagttctttatgaatgggacaaatgat

SEQ ID NO: 49470 - DNA, 494 bp, Homo sapiens
gcgcgcaattaaccctcactaaagggaacaaaagctgggtaccgggccccccctcgagagtacttctagaattaattaaggcgggactaatgctgttaaaggcaaatggtttcctttccattaaaaccatattcctgcctgttaagttactgaggtaactccaaaaaattaagcagtaaaaaagatctccatgggatgtgccctaacacaaattctactcggcctattcaaccagcaccgtaatttttaacattcacttagcacctatgagtaattaaacaggcatcatcagagaatattccagttgctaaatggtaccccattattaattagtactatgccatggctctctctgagtatttctctgctcagttctagtagtatcttagcagtgataaaagtgttttgcccaaatagttattctcattttgtttcactttgattgaaacaaacatctgattttctttcatcatgtgctgtcatacggtgatatg

SEQ ID NO: 49471 - DNA, 435 bp, Homo sapiens
accctcactaaagggaacaaaagctgggtaccgggccccccctcgagagtacttctagaattaattaaggcggggggggtcaagatcgccgaagtagactgcactgctgaacggaatatctgcagcaagtattcggtacgaggctaccccacgttattgcttttccgaggagggaagaaagtcagtgagcacagtggaggcagagaccttgactcgttacaccgctttgtcctgagccaagcgaaagacgaactttaggaacacagttggaggtcacctctcctgcccagctcccgcaccctgcgtttaggagttcagtcccacagaggccactgggttcccagtggtggctgttcagaaagcagaacatactaagcgtgaggtatcttctttgtgtgtgtgttttccaagccaacacactctacagattcttta

SEQ ID NO: 49472 - DNA, 496 bp, Homo sapiens
agcgcgcaattaactcctcactaaagggaacaaaagctgggtaccgggccccccctcgagagtacttctagaattaattaaggcgggagtaaatatctggcgatttttaaaaatgtgtgggtgaggtagtatttcaaggaagagaaaaaaatttccacaaagtatagaataaaaatgcaaaaacgaggcaagagagttaacttgtctagctggcgttaagatttcttccgtatgcaagtccaaaaaaaaaaaaaaaaaaaaaaaaaaaaaaaaagcggccgccaccgcggtggagctccaattcgccctatagtgagtcgtattacgcgcgctcactggccgtcgttttacaacgtcttaactgggaaaaccctggcgttacccaacttaatcgccttgcagcacatccccctttcgccagctggcgtaatagcgaagaggcccgcaccgatcgcccttcccaacagttgcgcagcctgaatggcgaatggaaatt

SEQ ID NO: 49473 - DNA, 435 bp, Homo sapiens
gggtgccgggccccccctcgagagtacttctagaattaattaaggcggggaaggagcagacaaggattactatcacttttcattcaacatatcctgtagtttgaatttttaaaagcaatcccatttatttatagagatattaaaattgtaataaaaatattagcacgacaaatgtaataatgcatttttgtaaatacaccttgactaagtagggtttattctgtgaatgcaagaatgacttgacatgaggaaatctacagtgaatctacaattcactacgttaagacattaggaggggaaagaaaaagacattaggaaccatatacaatctcaagaccatatgccagtcatcaataccatctcaaatgtcaaaactcaacatctactcaatgtgttgagcatgacgacattcttagaaagctagaaatagaaaaa

SEQ ID NO: 49474 - DNA, 377 bp, Homo sapiens
acaaaagctgggtaccgggccccccctcgagagtacttctagaattaattaaggcgggcaattatattattcttctgtagttaagcaaacacttgttgagtgcctgctatgtgcacggcatgggcccatatgtgtgaggagcttgtctaattatgtaggaagcaatagatctcggtagttacgtattgggcagatacttactgtatgaatgaaagaacatcacagtaatcacaatatcagagctgaattatcctcagtgtagcttcttggaattcagtttctggaactagagatagagcatttattaaaaaaaactcctgttgagactgtgtcttatgaacctctgaaacgtacaagccttcacaagtttaaactaa

SEQ ID NO: 49475 - DNA, 475 bp, Homo sapiens
ccgtggttttacacccgggaaagaatgggacccatgctgggtgcgcgggcccttcctcgagagtacttaaagaattaattaaggctggagacgtcttacagaggaacaaaaataaggatgacagaaaacttcacctcaaaaacaatgcaaaggagaaaacagtagagtgccatctttatgaatacaggagagaaaaaagtcagtctagaattctatataacaagccaaaatattttgttaaataaagaagaaaattaaacttttgcagacaaaagacagagaaattaattactagctaatcttcacttaagaacttaaagtcgttcaggcaaatttaaatctacataaaggcataaaaagcactagaaatagtaaacatgtgagcaaatataaaatagtatataaaatacattttaaaacattcaaaactcaacattttaagaatattcaaattaggccgggcgcagtggctcac

SEQ ID NO: 49476 - DNA, 287 bp, Homo sapiens
  misc_feature 192, 193, 194, 195, 196, 197, 246: n = A,T,C or G
aaaagctgggtgccgggccccccctcgagatacttctagaattaattaaggcggggatcaatagaggggcagaggagttccccggaacccgtgcagattaaagtaactgtgaagttttcaaaaaaaaaaaaaaaaaaaaaaaaaaaaaaaaaaaaaaaaaaaaaaaaaaaaaaaaaaaaaaaaaaaaaaaannnnnncccccccccccccggggggggaaaacaacccccccaaaaaagggaggtntcccccccccccctgggggggctttaataaaaaaaaaaaaa

SEQ ID NO: 49477 - DNA, 497 bp, Homo sapiens
agcgcgcaattaaccctcactaaagggaacaaaagctgggtaccgggccccccctcgagagtacttctagaattaattaaagcggggtaggcatagagactccagtgcagctttgtggtagaagaagatttatggacaggaaaaggaaagtgaagtacagaaaacacaaatgaggtttagaagcaactggattgcttacatttcagcgtttgccttattttaacacagttggaacaattggctacatttgattggcccaaactcagtgattggcacagatatgggctacagtctgtttacatctccacttgttgtagttcatgatgtacagaaaatctttaggctgaacttaaaatatataaggaggcagctttaggctaaacttgatttaacaattccccccttttgatcattttctcaattttgagagattgaccaaaactttagtcattcatgtcaccatcccagcataaatatacttatttggtcttgaaacc

SEQ ID NO: 49478 - DNA, 470 bp, Homo sapiens
actggccgtcgttttacatcacaggaaacagctatgaccatgattactggccgtcgttttacaatcacaggaaacagctatgaccagtgattactggaccgtattttgcattcacatggaaacgactattatcgataaccctggtttgcagacaatagtatcttaaatttagaaaaacctaaggactctaccagaaaactgttagaactgaggtttagtaaaattgcaggatgcaaagtcagcatataaaaatcagcagcatttctgtatgccaagagcaaacaatctagaaaataaaccaagaaaataatcttatttccaatagctacaaataaaataaaataaaatacctaggaaaaaaaaaacaaaaaaaaaaaaaaaagggggcccccccccgggggggaccccaattcccccttttggggggttttttccccccccccctggggccgttttttaaaaccaaaaaa

SEQ ID NO: 49479 - DNA, 463 bp, Homo sapiens
gggaacaaaagctgggtaccgggccccccctcgagagtacttctagaattaattaaagtgactcaatactgccctgcccatctgctctgagtctgatcagtcataactctgcaagaaaacattttagctacttcttaaataaaaaattcacaccattagaatataccatacgtctaaactaagccataattttacatttaaattttttttcaatttatcctttaattccacagaatattttgaaatatttgcagcattaagttcaataaaccactcagcaatagggagtcagttctctcccgtgctaaaactagtagcagagaatattttaatcgtcagtaagaacttattttctatttttagctgtaagaatagctattcatttgtttcttaacaatatttcttctcctttagggaaaatctaatttccaagttactattcatttgtggattacattttatt

SEQ ID NO: 49480 - DNA, 573 bp, Homo sapiens
  misc_feature 438, 456, 548, 550: n = A,T,C or G
cctgactaaagggaacaaatgctgggtaccgggccccccctctagagtacttctagaattaattaaggcggggacatgttaacacccactctccttatgctggaatgaggtccgggatccaactaatacaatggccaaggagacttttttggtgtctccaccaccctctatgatgattcacacctcagacctataccgcgtttctcttccatccctaaaccacttccttagaaggtgtggatttgcaaaaccaattgggggcctgaggagcctggggttggatagggccatggctggtcccccaccatacctccgatccacgtcgctgacacaactgaccttgttatccatctccccaaactttatctttctttgaacttgttggcatccccactcccaaccccttttcctctatgaaatcttggatttggggctgangggtgggagggagggcanagctctgcacactcaaaggctaaactggtgtcagtccttttttcctttgttccaaataaaagaattaacccaagaaaaaaaaaaataaaaananggggcgcccccccccggggggaa

SEQ ID NO: 49481 - DNA, 466 bp, Homo sapiens
  misc_feature 414: n = A,T,C or G
cgcgcaatgtaaccctcactaaagggaacaaaagctgggtaccgggccccccctcgagagtacttctagaattaattaaggcggggtcctggccgggcagggacagggcagaggactctgagcgccccacccatgcctgcctggcttggtagagaagatggcacaggatggaggcgccccaagacggacagtgtacataagagtttcttgttgctttacaataaaacatgagaacccgaaataaaaaataaaaagaaaaaaatagggcgggccccccccggggggggcccccattccccctttttggggttgttttaacccccccccatgggcgggtttaaaaaaaatttttgtccaaagttaattttaatctatacaattaaaaccttttggcctgtctataggagagaaagnagagtgtgagagatataaaaaaatactggaccaaaaaaaaaaaaaaaaaaaa

SEQ ID NO: 49482 - DNA, 368 bp, Homo sapiens
gctgggtaccgggccccccctcgagagtacttctagaattaattaaggcgggggaggcatgctttattcctgcggtcagtacctaacgaaccaacgcgtcctatgctgccaaaactccattaaaacctctggtgggagcaaccgtcggagcatacacccgacactccgaccatgacatgactcctacttcaccagatccctgctacctactatactaagccggttccataacctgtccaacggaactattccccctagggataacaattcagtactacttcttatgccttatcacctgtttgtgctaccacctcgatgttggatcaggacatcccgatggtgcaaccgctattaaaggttcgtttgtt

SEQ ID NO: 49483 - DNA, 322 bp, Homo sapiens
  misc_feature 288, 289: n = A,T,C or G
acaaaggctgggtaccgggccccccctcgagagtacttatagaattaattaaggcgggtggatcacctgaggtcgggagttcgagaccagcctgaccaaacatggagtaactccgtctctactaaaaatacaaaattagccaggcgtggtggcacatgcctgtaatcccagctacttgggaggatgaggtgggaggattgcttgaatctgggaggcagaggttgcagtgagctgagatcatgccactgtactctagcctgggcaacagagtaagattccatctcaaannaaaaaaaaggagagaggggttaattggcggggg

SEQ ID NO: 49484 - DNA, 448 bp, Homo sapiens
  misc_feature 320: n = A,T,C or G
cctcactaaagggaacaaaagctgggtaccgggccccccctcgagagtacttctagaattaattaaggcgggactaagagagccgaggtcgctccccatccactctcacaaggtttgtggccatctctttgccttacaaattttgagctgtaggaaatctcctgagccgggcgcggtggttcacgcctgtaatcccagcagtctgggacgtcggggcgggcggatcaccggaggtcgggagttcgagaccagcctgaccaacatggagaaacctcgtctctactaaaaatacaaaattagccaggcgtggtggcgcatgncctgtatctcagctactcaggaggctgaggcaggagaatcgcttgattccaagaaaccagaagttgcggtgagccgagatcgccccatgcacttccaccctaaaaaaaaaaaaaaaaaaaaaaaaaaa

SEQ ID NO: 49485 - DNA, 182 bp, Homo sapiens
tagaattaattaaggcgggggcttaaagcgagggaagggggggaactggtggaagcaaaggctctccccatcaccaccttggttttaggtagggattttaatttaactgaaggacatctctcaacttggacaataattaatccctcaacagcacctcatatctgctatgactttggcagcgc

SEQ ID NO: 49486 - DNA, 278 bp, Homo sapiens
  misc_feature 212, 213, 214, 215: n = A,T,C or G
accgggccccccctcgagatacttctagaattaattaaggcggggtaaggagtctcaggccaaggatgtcattgaagagtatttcaaatgcaagaaatgaagaaataaatctttggctcacaaaaaaaaaaaaaaaaaaaaaaaaaaaaaaaaaaaaaaaaaaaaaaaaaaaaaaaaaaaaaaaaaaaaaaaaaaaaaaaaaaaaaaaaaannnnccccccccccccccggggggaacacccccccccccccaaaaaagagacccccccccccccccc

SEQ ID NO: 49487 - DNA, 490 bp, Homo sapiens
caattaaccctcactaaagggaacaaaagctgggtaccgggccccccctcgagagtacttctagaattaattaaggcgggggtaagaaagaacaaccatcataatttacaacctaaatcagatgaactaaaaggatccaaaaatttccagctctgtgacagtacaaaacaaaattcatcaccagtaaccagtgcttgaaaggattctactacttgggtatctcagatggctttaaaaaaaaaaaaaatcagtctgaacattttctgaaataatacaacatttctatttaagaattgagattagaaaatattttatggctgcttaatgcacaaaattttagggaaattttaaaaagacttgaaagaattatattctcatgattggaataagaaaaactaagcttttccaaagaacttccaagggccacatctgtattttttggcatacaagattttaagaaaagtatgatattctcggtctgtattgataa

SEQ ID NO: 49488 - DNA, 508 bp, Homo sapiens
cgcaattaaccctcactaaagggaacaaaagctgggtaccgggccccccctcgagagtacttctagaattaattaaggcgggaggaggttgcagtgagccaagattgcaccacttcgctcaagcttgggcaaaagagcgaaactccgcctttaaaaaaaaaaaagaactgaaagaagaaatgagcagcaacacaatactaacaggcgacttcaataccccactttcagtaagaatagaacaaccagacagaagatcaaacagaagacacagatgacttgaataactctttagaccaattggaactaacaaacatatacagaacacttcacccaacaacaggggatacacattctcaaacgcacatgtaatattctccaagacagactacatattagaccacgaaaaaagccttaaatgtaagaagattgaagtcatacaaatatattctccaacctcagcacaatgaaactacaaatcaatagcaaaaaaaacaaaaaacaggcaaat

SEQ ID NO: 49489 - DNA, 335 bp, Homo sapiens
accctcactaaagggaacaaaagctgggtaccgggccccccctcgagagtacttctagaattaattaaggcgggaaaacaagtcgctataattgaaagccagaaaaaaaaaaccaacagattcaaacacccaagatctcaaataattaacttgtcaaaaatgtaatataaaacaaatagaacaaaaatgaccaaccaacaagggaaattagaaacaaacagatccttttaaaaaaaaaaaaaaaaaaaaaaaaaaaaggggggccccccccggggggggccccaattcccccctttggggggttttttacccccccccaagggggcgtttttaaa

SEQ ID NO: 49490 - DNA, 465 bp, Homo sapiens
accctcactaaagggaacaaaagctgggtaccgggccccccctcgagagtacttctagaattaattaaggcgggggtaaaggttaaaagtatggattttggagcttggatttaaatccttgatccatcatttactagcattgtgaccttggccgagtttttaaatctctactgcaatttcctcatgtaaatggtataaatggtaatgatagtagattctaccttataacattgttatgagagttaaatgagttaatacaattttctcgtattctcattttattcttgccataaccctatgaagtaggtgctgctatatttctttcattattcaataaatgtttggagttcctactatgtgctaggtattgtgctgtactgcgtgagcaatggtgaacaaaacttgtaagtcaccttgatttaaaaatacaccaatgaataaatattataagtttggggaggtgtg

SEQ ID NO: 49491 - DNA, 283 bp, Homo sapiens
aaaaaaaggaaaacacatgatgggtaccgggccccccctttagagtacttctagaattaattaaggggggctggggtggacaataaagaaggcgccatgagccagcctatgctgaaaaaaaaaaaaaaaaaaaaaaaaaaaaaaaaaaaaaaaaaaaaaaaaaaaaaaaaaaaaaaaaaaaaaaaaaaaaaaaaaaaaggccccccccccgggggggagacaaaactcctaaaaaaaaaaggaatataaacccccccccggggggggtttttaaaaaaaaaaa

SEQ ID NO: 49492 - DNA, 419 bp, Homo sapiens
cgggccccccctcgagagtacttctagaattaattaaggcgggaagcatgtacggtaccaatcgcaggttaactagaggccggtattctactactgtacgtccttactagttcattctaaataggctttgtgtggcagcatactaaaacccttatgtgcctatattttacctgggtgtttttttaatcttcaaatattggtcctcctgttacttcatgattaaacatggcccttgctgaagagtatattggtataagtatggtcttacttatcaatggcctgttagccttcccctcctcttcctccactgggaatactaatatcattgcatctgtgtctcccaggggaaatcaaggcttttccttgcacgtgcagtcttgtgatttcagagtgggcaggctttgtatcctcatgagccc

SEQ ID NO: 49493 - DNA, 213 bp, Homo sapiens
atgtgtagcgggatattggagcgattatatcatgatttggctggcgcatttatggccatgaatacgctctaaggatattgatgatgggttcatcccagagctcagttgacattatttttatgctcccaattttgtattaccaagaatataactccgtttattttgtagtgggatttatctttatagattattactattttaaactttatgatg

SEQ ID NO: 49494 - DNA, 561 bp, Homo sapiens
ttactggccgcgcgctttcaaccctaactaaagggaacaaaagctgggtaccgggccccccctcgagagtacttctagaattaattaaggcgggttggactcttaagggaaaatgtaccatagcactttaggaatcgtgaggatatgattttttccctccttttaaatcttgactacaaactgagcatctgttctcctaaagaaaactcaaccacagatcttcctctagtgttaaaagaaccagttgatgctgaaaatctgaatagctcttacatacatataactgttcagacatggcttctataaagttctaacttaagattctaaatcactatataaggaaaatagatctattttttgacaaaaaaaattatacctactgcccaataatagcatggattaaaaaaattagacaattttcacttactatgaatgctaatctctctagaaatctgctctctctagaaatctgatctgtccagaaaaaaaaataagttttgccaatgacatttgggtatctggggctttcaccaaataaaagtttataaagccataaccaaa

SEQ ID NO: 49495 - DNA, 540 bp, Homo sapiens
atataacccttactaaagggatcaaaagctgggtaccgggccccccctcgagagtacttctagaattaattaaggcgggagagaagaacaccaccaggaagatcaagaagtaaagataggaggagaaggaggagagactcacggagctcagagagagaagaaagtcaaagcagaaacaaagacaaatacagaaaccaagagagtaagagctcacacagaaaagaaaattctgagagtgagaaaagaatgtactctaaaagtcgtgatcataatagctcaaataacagcagggaaaaaaaggctgatagagatcaaagtcccttctcaaaaataaaacaaagcagtcaggacaatgaattaaagtcctccatgttgaaaaataaggaggatgagaagatcagatcctcagtggaaaaagaaaaccaaaaatcaaaaggtcaagaaaatgaccatgtacatgaaaaaaataaaaaatttgatcatgaatcaagccctggaacagatgaagacaaaagcggatgaatgagttatataaactta

SEQ ID NO: 49496 - DNA, 291 bp, Homo sapiens
caaccctaaataaagggaacaaaagctgggtaccgggccccccctcgagagtacttctagaattaattaaggcggggaggaaataccaaatgcattgttgttctgctcaatacatctcacttgtttctaataaagaaagcagctgaaaaaaaaaaaaaaaaaaaaaaaaaaaaaaaaaaaaaaaaaaaaaaaaaaaaaaaaaaaaaaaaaaaaaaaaaaaaaaggaaaaaaaaaaccaaccaaaaaaaaaaaataaaaaacaaaacacaaaaaaaaaaaaatccccccccc

SEQ ID NO: 49497 - DNA, 453 bp, Homo sapiens
  misc_feature 315: n = A,T,C or G
accctactaaagggaacaaaagctgggtaccgggccccccctcgagagtacttctagaattaattaaagcgggtgcctgttgtcccagctactcaggggactgaggcaggagaatggcgtaaacctgggaggcagagcttgcagcgagccaagatcgcgccactgcactccagcctgggcaacagagcgagactccgtctcataaacaatctaaccacccaaataaagggggcccccccccccggggaagcgcccaactcccccattgagggggtttttaaccccccccccagtggcggtgttttaaaaggaagnatggtgtgtgaaacagtgtctggtcttttgtgccagctctggttgatgtttgtaagaccatgtttgtaagacatgaataaattgctggctttgcacaaaaaaaaaaaaaaaaaaaaaaaaaaaggcggcccccccggg

SEQ ID NO: 49498 - DNA, 538 bp, Homo sapiens
  misc_feature 408, 410, 411, 412: n = A,T,C or G
ttaaccctcactaaagggaacaaaagctgggtaccgggccccccctcgagagtacttctagaattaattaagggggctaggttgggaaaacccagtgtgtgaagatgacatagccttacattgaatgttattgggccagaatggtgcagaaagagagccagcaatgagaaatgggagagcacagagcagtgccccatctcagatacaatcagtgactttcccagcagcagagccttaagatacaggaaagaaaaactgacaaaattgaagggaaaaatcaacaattcagcaataatttggagactttgatacgccacttttaataatggatagaacagcttaagactataaaccaatgaggcctaacagacatctatagaacctcatcagaatacgcattcatctcanannnaaaaaaaaaaaaaggaaaaaaaaaaagcggccgccaccgcggtggagctccaattcgccctatagtgagtcgtattacgcgcgctcactggccgtcgttttacaacgtcgtgactgggaaaaccct

SEQ ID NO: 49499 - DNA, 534 bp, Homo sapiens
aaccctcaataaggggaacaaaagctgggtaccgggccccccctcgagagtacttctagaattaattaaggcgggatatcagagtgtaactaaggtagtgaacacacacaaacacacattcacaaatacatgcaaactaatgatcaagtttatgaataatgatgcaaaattttaagaaaatattagaataaaaatatttcagcattgtatttatttaattagccaaaaaaggtaatcatataatcatctcttttgatcaggcaaaaacaattagatttttctctcctttcttcactgttagttattattttgatgtatcaatcaatgcaattgtatacaaggccaaaaaatgagacatataaatgatacatccttcaaagaaggatttaaattcctctctctgagatgttgtatgttgaaaatctgaaaatttctgtaaaaccttataaaaacaaaagaaaattaggttcattgggacgccccccccccgggggggaccccttttccccctttaagggggggaaattccccccc

SEQ ID NO: 49500 - DNA, 461 bp, Homo sapiens
  misc_feature 380, 385: n = A,T,C or G
accctcactaaagggaacaaaagctgggtaccgggccccccctcgagagtacttctagaattaattaaggcggggggactgcaaaggccaatgttggcgctggaaaaaagcgatctggatatgggatcactaccctatgatttactgtgctgcaatgatgttatcctacgccactgcggatttttcgcatgaactttattcctctctatacttctatattcacagttcaaaagtcaagtgctgagagatggtttaaagacaaattcatgaaggtatattttgtgttataattgttgatgggtcctttggttttctgtatttttccccctctctttaaaacatcactgacctttcaataaatttttattgaaatgtcaaanaaaanaaaaaaaaaataaaagagcggcccccccccgggggggacccccaattcccccttttaagggttattttcccccccc

SEQ ID NO: 49501 - DNA, 240 bp, Homo sapiens
  misc_feature 165: n = A,T,C or G
aaagggaacaaaagctgggtaccgggccccccctcaagagtacttctagaattaattaaagcgggtagtgctcttttagctgtccatgtttctaggggtattcatttgctttctcgttgaaacctgttgttaataaagtttttcactctgaagaaaaaaaaaaangaaaaaccaaataattataaaaactaaaataaaaaaaaatttcccccccccccccccggggggacccccccaccc

SEQ ID NO: 49502 - DNA, 461 bp, Homo sapiens
aagctgggtaccgggccccccctcgagagtacttctagaattaattaagatgtgaaaatatcacatgccctcataacaagtgttgttctttttactttcttctagccaacttgttttagaaaattaagactctttttgatgactcagactgacaaaaatggaaaactttgcctatgtagactaaagaatgcctactgcctgagaaaatgcagacctaattgttggtttattttctcctccttaccccaccctgctctctctttttctctctgggtatctcaccagaactctcttcctgcccctctttctctttcttcctttactttcccttgcttttccctcttttcttactcctcctctttctctccccaacccccattctcatctgcacccttcttttctcatgtgtttgcataaacattcttttaacttctttctatttgacttgtggttgaattaaa

SEQ ID NO: 49503 - DNA, 297 bp, Homo sapiens
acaaaagctgggtaccgggccccccctcgagatacttctagaattaattaaggcgggtggatctcttgaggtcaggctggtctcgaactcctgacttcaggtggtccgcctgccttggcctcccaaagtgctgggattacaagcatgagccaccgcgcccatcccatttaacaggttttttttaagtgtttcctttatgtctaatatcagaaacagtaggcagtatgtgtggtagtcaagagctagactgcctgggttcagatcctggcagtgccatttgcctgctctgtgactttg

SEQ ID NO: 49504 - DNA, 516 bp, Homo sapiens
gcgcgcaattataccctcagtcgcgcaattaaccctcactaaagggaacaaaagctgggtaccgggccccccctcgagagtacttctagaattaattaaggcgggaggtagatataggcctgttctttttagcaatgtgattcttgtgtttcttctggattcagcttctcctaaacagacagtttaattatagttgcggcctggccccaaaaaaaaaaaaaaaaaaaaaaaaaaaaaaaaaaaaaaaaaaaaaaaaaaaaaaaaaaaaaaaaaaaaaaaaaggcggccgccaccgcgggggagctccaattcgccctatagtgagtcgtattacgcgcgctcactggccgtcgttttacaacgtcgtgactgggaaaaccctggcgttacccaacttaatcgccttgcagcacatccccctttcgccagctggcgtaatagcaaaaaggcccgcaccgatcgcccttcccaacagttgcgcagcctgaatggcaaatggaaattgtaagcgttaat

SEQ ID NO: 49505 - DNA, 437 bp, Homo sapiens
acaaaagctgggtaccgggccccccctcgagagtacttctagaattaattaaggcgggggtgattggaactgtgtaattgcaatgctcttacattttatattttacccagattaagtattaatagaatataaaaagttaaggctatgtattgtactcccttagagcatgggccagcaaactttttcttaaagatagtaaatagttcaggctttgatggttaagaggcaaaattaaggatattatatagatatttatataacattataaaatgtaaaagccattcttgaatagctcacagtttttttagaattccatttcaatttctctattggctttttagatttcttcctcccactgggcttgccttctttctgtaggtcacagttgtttccatattcttgatgatctttttaaaaacagtaacaagagaaagaag

SEQ ID NO: 49506 - DNA, 291 bp, Homo sapiens
acaaaagctgggtaccgggccccccctcgagagtacttctagaattaattaaagcggggtctagtgacaaatgagagggtgtggcctgtgcggagagaagccccggagaggacatggtgaagagccaatggggaaccagaaatagaggaggggcgtgacctgcagccaataagtggtggggaatgtgaataaacatgatttcttgccgggcgaaataaaaaaaaaaataaaaaaaaaaattaaaaaaaaattaaaaaataaatatataaaaaaccaaaaaaaaaaaaaaaa

SEQ ID NO: 49507 - DNA, 449 bp, Homo sapiens
aaagggaacaaaagctgggtaccgggcccccactcgagagtacttctagaattgatgaaagcggggtctccctttgttgagcacgttatagtgcaatgatgtgatcatgactcactgcagcctcaaccacctggactcaagcaattctaccacctcagcctacatagtagccgggaccacagatgtgagccaccatgcccagttaattttttgattatttgtagagatgaggtctatgttgcccaagctggtctcacactcctgagctcaagcgatcctgcctcaaaatcaatcaatcaatcaatcttagttaaactatcttcttaatgggtagattttactttttaattcagtttcaatgaaaagaaagggtctatacttcccttctgtttagaaaagctaagtggccatgctacattttgaaaatgcttcgaaaaggaaacattatg

SEQ ID NO: 49508 - DNA, 170 bp, Homo sapiens
ctgggtgcccggccccccctcgagagtcttctagaattaattaaggcgggctacagaaaaaatctggtgttcttgctaactttgcccttcactgttgcttaattgtgaacagccaaaagctatatgttatggcttattgtgtgaaggtaactaaaaagtggtgttccatg

SEQ ID NO: 49509 - DNA, 282 bp, Homo sapiens
agggaaacaaagctgggtaccgggccccccctcgagagtacttctagaattaattaaggcggggacatcagagaattgagaatttagaatctctacaatggatcattcacaaagtccagtatgcaaacagaaattactagacatacaaagacaaaaccataaaacaaaaatcaagaaaaaagacagtcaatagagactgacaccagtatgacccagatgttaaaattaacaaagatttcaaagcacatataataattatgatcaaagacttttaaaaatgct

SEQ ID NO: 49510 - DNA, 304 bp, Homo sapiens
tgggtaccgggccccccctcgagagtacttctagaattaattaaggcgggcagagatggaatatatcattggtagaataagtgtttggtaagtttttatttagtaaaatttagtagaagaaatgatgtccactttaaaattgtggagtttttaatacttgggacaaactgaaattgtttctagaaagtctctaagaaaaaaaaaaaaaaaaaaaaaaaaaaaggggggcccccccgggggggggcccccattccccctttttgggggactttttccccccccctctgggccgttttttaaaaaa

SEQ ID NO: 49511 - DNA, 346 bp, Homo sapiens
  misc_feature 262, 323: n = A,T,C or G
ccctcactaaagggaacaaaagctgggtaccgggccccccctcgagagtcttctagaattaattaaggcaggcacaaagaaataatggatgaaaatgttccaaatttagcaaaaggcataaacctacagatctgagtagctgagcaaaccccaaacacaataagccaaaataaatcaggaatggccatattagtgtcagataaagaagactttagagcaaagaaaattaccagagacagagagggctgttacattgtaatanaagtgtcaaacaaccgagaagaacaacatcctaaatgtgtatgcagaaaataacacagctngccaaaaacatgaaggaaaactg

SEQ ID NO: 49512 - DNA, 508 bp, Homo sapiens
gcgcgcattaccctactaaagggaacaaaagctgggtaccgggccccccctcgagagtacttctagaattaattaaggcggggacttgctaattagtgtctgaaagtcaattatttaaattgatattcaatctaccacatattcaaatctaacaggttagagggtttttaacctaaatgtgtcattacctggtcttgcagatactcatccacagtaccaccatgtctaagatttgctaatagcatttcggcagcttcaattccaactttgtctgcatttacaccttaagataagcacaacattaaaacaaaacaaaacaaaacaaaacaaaactaattactaagagacaaaaagtttggtatatcccaattagcactggtatacaatttttaggcctcaaaaacccactcaatgcaccttttagaataagatctttagttatttaatattctgagtgtttgggatacacaagtcttatacctttaaatatactagtggaggaaaatat

SEQ ID NO: 49513 - DNA, 428 bp, Homo sapiens
gcgcgcaattaaccctcactaaagggaacaaaagctgggtaccgggccccccctcgagagtacttctagaattaattaaggcgggtgtgctttggtctgcaaattgactgtcacttctcaggagaatctgtcttggagcactaagtttgaaaatgtgccctgtatggaatgtctagtgagtgggagtgaaaggttatatttgcatttatgaagggctaagcaggatacagggaacaaagagaaaggggagagaagagaagataaaataataattaaaaaaaacagtaaatcattctctttttcttagaaaaaaaatggggcaatctgttacaaacccacgagttcaaggctgtagtgagtcatgatcatgccactgtactagatacagcctgggtgacagattgaggctgtgtctctaaaaaaaatct

SEQ ID NO: 49514 - DNA, 318 bp, Homo sapiens
aagctgggtaccgggccccccctcgagagtacttctagaattaattaaggcgggttatcaaagcttactgactgacagaagtgagaaaaggtggcagatgagaaagtgggatggggagcagaggagaggctggagagagaaaggaagaagtggttattttagaattctctatatagtaaaaatatgttttttaaaaataagaaacatttttttaaatattaaaaaagcccaaagaattcatagccattagattctcaatataaaaaatgtttaaacaaaaaaagttctttggacattgattctagataaaaacctgca

SEQ ID NO: 49515 - DNA, 504 bp, Homo sapiens
accctaactaaagggaacaaaagctgggtaccgggccccccctcgagagtacttctagaattaattaaggcgggagagaaaagatgagccggattcatcagaaatacctcaggaacttacttataataaatggtaaagtattttgttcctttttttgccattataaataggattgctttcctggcttcctttttaagtagtagatgtatagacataaagacagaatagagagccccaaaataaatctacataccccacgttgaactgatcttcaacaagcatgccaagaacacaaaatgaggaaagggtagcagttttgattaatggtattgggaaaactgaatgtccacaacagaaaaatgaaaatggacccttatctcacaccacatatagaaatcaactcaaaatggattaaagacttaaatgtaagacctgaaactgtaaaactctagaaaaataggggaaaagcttcttggcattggatatcacaccaaaagcacaggc

SEQ ID NO: 49516 - DNA, 427 bp, Homo sapiens
gaacaaaagctgggtaccgggcccgccctcgagagtacttatagaattaattaattttcaagacataagataacaaagatattcatggcctaaactgagtactggatcaaatggacctgatagatatctacaaaattctccacccagaaacaacagaatagacattcttctcatcagcccatggcacttactctaaaattgatcacataattggaagtaagacactcctcagctaaaaaaaaaaaaaaaaaaaaaaaaaaaaaagcggccgccaccgaggtggagctccaattggccctatagggagtcgtattacgcgcgctcactggccgtcgttttacaaacgtcgtgactgggaaaaccctggcgttacccaacttaatcgccttgcagcacatccccctttcgccagctggcgtaatagcga

SEQ ID NO: 49517 - DNA, 533 bp, Homo sapiens
gcgcgcaattaaccctcactaaagggaacaaaagctgggtaccgggccccccctcgagagtacttctagaattaattaaggcgggtacatatgttggaattaacagacaaggacactagttattataaccatactccatatatttaaaaagttgcatacagacatataagactcaaagtgaatttctagacatgaaatctacaatatctgagatgaaaaatacactggatgggattaacagcagattaacattgcagattagtgaactttaaggcgtatcagtagaaactatctaaaaaaaaaaaaaaaaaaaaaaaaaaaaaggcggccgccaccgcggtggagctccaattcgccctatagtgagtcgtattacgcgcgctcactggccgtcgttttacaacgtcgtgactgggaaaaccctggcgttacccaacttaatcgccttgcagcacatccccctttcgccagctggcgtaatagcgaagaggcccgcaccgatcgcccttcccaacagttgcgcagcctgaatg

SEQ ID NO: 49518 - DNA, 396 bp, Homo sapiens
  misc_feature 308, 319: n = A,T,C or G
ctaaagggaacaaaagctgggtaccgggccccccctcgagagtacttctagaattaattaaggcggggagggaggagaggctgccaacgaacaagcttctctttttggtgcgagcggtgctcgaggaccccgcaaaaaagaagatagctctgtgaaacatagagagcattacaactacataaaaactttcttctataagatactaaaatattgcttacctgaaaagtttgaaccgtattataatagacttactatgatacgagaagctatgggcactttgaacagtctcatgcgaaaaaaaaaaaaanaaaaaaaaaangggggccccccccccgggggggccccccatcccccctttagggggggtttttccccccccccttggggggttttttt

SEQ ID NO: 49519 - DNA, 407 bp, Homo sapiens
ataaagggaacaaaagctgggtaccgggccccccctcgagagtacttctagaattaattaaggcgggccctgggccgcatggtggaacggagcctgcgcagcgagctggctgcacttccccccatcgtacaggaggagcacgggcagctgcttgcgctactggcaaagctgctgcaaggaccctgtggcggctatgatgtgcgcaagacagctgacgactgacccctgcttctgctggggctgcgtacagagtgcaaatgtttatttaaaaaaaagttctatttatcccttgtcgaaccaaatggattaccacaatatgtgctggtgggccccccccggggggaacccccgccccccccttgtgggagttttaatcccccccttagggggccttttttttacccccc

SEQ ID NO: 49520 - DNA, 508 bp, Homo sapiens
gcgcgcaattaaccctcactaaagggaacaaaagctgggtaccgggccccccctcgagagtacttctagaattaattaaggcggggagcttgttgtctctggggtaagcattagctgaacaaaaagagggccagtgggaacgtgctgacccttgtcagaaatgaaagtcacctcctatccgcataaacacctgccctgggaaagtgtgctgtgcagaaactccaagtcctgtcccagtctctggagaccaaggtctgtccatcatctgttccctgtagaactgtgacacctgcggggcactgcaagggctgaaaggctggcctcctcccctttgctggccactcactgggtaggaatttttaaaaatcttccttgggaccgggcgtggtggcaggtacctgtaagtcccagctacttgggaggctgagacacaataattacttgagcctgggagatggaggttgcagtgagccgagatggcaccactgcactcccgtctgggcaacag

SEQ ID NO: 49521 - DNA, 486 bp, Homo sapiens
agcgcgcaattaaccctcactaaagggaacaaaagctgggtaccgggccccccctcgagagtacttctagaattaattaaggcgggaagaggtggtggtcagaataacctatgttaatcaaaataaactccttagcattagttaaggttctttacctcaatctctcaaaattaatgttattctgaactaaaacttaaaaaaaaaaaaactaaatctctcagttctacttgtcttattacacatatactcatcttcttttccagaaaaaaataatattcatgtcctaaacttagaaacctaacctgaagttttgatctggatttttaggaagaaggaagtattgatggtttcatcattcttagctctataaaagaacctattaatttttcataacttttagcttagtattatagttggccttttctctgtaagggacattcttaaatattcaagtctaattttctttaaaaagttcgcttgctttct

SEQ ID NO: 49522 - DNA, 468 bp, Homo sapiens
cctgaataaagggaacaaaagctgggtaccgggccccccctcgagagtacttctagaattaattaaagctgcaattggcagtaactaaattctccgaggtttctttcctctcctctttgctactgaaaggtgcagaaatgcttttgacagcatctttcctactgacagatgaattgttttgacaggagaatttgaaaccttcaactgaagacacattcagatgtcaggcctggtacagggcgatcgtgttcatagaaataagtgagatgctttagatgtgtgtgcatgtcagctgccacctgaaagaaaggcctcattaaagattttcactgattaactctttgattgttcttgggatctcagatgggaattcacgctgcttgctgcagagctcttgggctaagtgtattttcttaattactgagaaatgcgtgttatcagtaagcagtgaaaagtcttgaaaaaaac

SEQ ID NO: 49523 - DNA, 438 bp, Homo sapiens
  misc_feature 246, 248: n = A,T,C or G
ctaaagggaacaaaagctgggtaccgggccccccctcgagagtacttctagaattaattaaggcgggaaaccgatgaaaaaaaaaaaaaaaaaaaaaaaaaaagggggccccccccgggggggcacaaaaagaaccaaaagaaatgaaaatatatccccccccccccgcccgggtgttaaaaatctggttacttttggaaggtttttttctccccccccatggggggggaaattaaaaaaaataananttaatggattttcttgtgtgtggaactatgatccagtgaagaaacaaagcaaatattctactgttgctatactttttttttttgggttccaaaaaagggtggaaaggggatttcctttttttaagtatgggccatgttttctaaattccccttttttttgccaaaaaattttgaaaaatgggttttttta

SEQ ID NO: 49524 - DNA, 457 bp, Homo sapiens
accctcactaaagggaacaaaagctgggtaccgggccccccctcgagagtacttctagaattaattaaggcgggccaaactacagctccagccccagggtctgtttttgtactttctgcaagctaggaataacttgtatcaattttaagcgattaaaaataatttgaatagtatttcacaacatgtgaaaatcacatgaactttacatttctgtgactataaaggttcactggaacacagccatgctcattcagtgtctattgccactttcacactacaaaggtagaagtgagtagttgtgatggagaccatgtgacccacaaaacctgaaatatttactatctggtccttcacagaaagttttcccaagccatgggtctacaataatcgtaagtgatttattaacaagttttaagtttatgaaggtcacagaaaacaaggttatgatacaaaaacg

SEQ ID NO: 49525 - DNA, 506 bp, Homo sapiens
acgccaagcgcgcaattaaccctcactaaagggaacaaaagctgggtaccgggccccccctcgagagtacttctagaattaattaaggcgggatagtagtagggtcgtggtgctggagtttaagttgagtagtacgaatgcggtagtagttaggataatataaatagttaaattaagaatggttatgttaaggttgtacggtagaactgctattatatcatcctatgtgggtaattgaggagtgtgctaacattttgcgtacctgggtttggtttaatccacctgaactgcctgctatgatggataagattgaaagagtgaacatttatctgcatacgtgaagtattttcctgcttaaaaaagttatatacgtgttatttgctctaatcttggctgtattattagatgttaacacatcttgcatgctagctgtattaggtcatgtagtattgatattatgtgattcaatagtactagtttaaacctatcttactcattttattttc

SEQ ID NO: 49526 - DNA, 450 bp, Homo sapiens
aaccctaactaaagggaacaaatgctgggtaccgggccccccctcgagagtacttctagaattaattaaggcgggcggatcacaaggtcaggagattgagaccattctggctaacacggtgaaaacttgtctctactaaaaaaaaaaatacaaaaaattacctggcgtagtggcaggcccttgtaatccagctacttgggaggctgaggaaggaaaattgcttgaatccaggaagcaaaggttgcagtgaaatgacatcgtgccactctgcactccaccctgagtgacaaagtgagacactgactcgaaaaaaaaaaaaaaaaaagggcggggccggggggttatccccctaacctccacctttagggggggccgggggggccgatttttggggtcggaaaataaaaaccttctgggtaaaaaaaaaaaacccctttttttttaaaaaaa

SEQ ID NO: 49527 - DNA, 174 bp, Homo sapiens
ctcactaaagggaacaaaagctgggtaccgggccccccctcgagagtacttctagaattaattaaggcgggcataacacagcaagacgagaagaccctatggagctttaatttattaatgcaaacagtacctaacaaacccacaggtcctaaactaccaaacctgcattaaaaa

SEQ ID NO: 49528 - DNA, 326 bp, Homo sapiens
gggaacacttgctggctgccgggccctccctagagagtacttatagaattaatgaaggcggggcaggaccgccgcataacgcactaaggagagtgtggaccctcgccctgtcctctaagctccatgtagagaatgtggataatattccttactgccataaatagccactggccgctgactacgcgtaaggcaaacaagctacctgcgttcaagggacccgaagactaggggagaagcagcgagcgggtcgcggccgccaccgcggtggagctccaattcgccctatagtgagtcgtattacgcgcgctcactggccgtcgttttac

SEQ ID NO: 49529 - DNA, 214 bp, Homo sapiens
  misc_feature 49: n = A,T,C or G
cgggccccccctcgagtgtacttctagaaattaattaaggcgggggggngaaaaaaaaaaaaaaaaaaaaaaaaaaaaaaaaaaaaaatttttttaaaaaaaaaaaaaaaaaaaaaaaaaaaagcgcccccccccgggggggcccccccccccccctttttaggggtttttttccccccccctttggggcgcttttttaaaaaaaaaaaaaaaa

SEQ ID NO: 49530 - DNA, 288 bp, Homo sapiens
aaagggaacaaaagctgggtaccgggccccccctcgagagtacttctagaattaattaaggcgggaggaaagcctttcttctgtgctaattgcgtacaggctacaggggttagcctggactaaaggcatccttgtcttttgagctattcacctcagtagaaaaggatgttagggaagatcactgtagtttagttctgttgacctgtgcacctaccccttggaaatgtctgctggtagtttctaattccacaggtcatcagatgcctgcttgataatatataaccatta

SEQ ID NO: 49531 - DNA, 283 bp, Homo sapiens
taaagggaacaaaagctgggtaccgggccccttctcgagagtacttctagaattaattaaggcgggagaggttttcaaaaggcatttagcatgaagaatgttatgtatgaaattgacattcagaaacagtgactaaagatgcagttgtataatacatgccacgtacaacctctggcctaccactacgctcagtggtaatgatgactttgaggcattccataagttaaaaaaaaaaaaaaaaaaaaaaaagggggccccccccgggggggacccccaattcccc

SEQ ID NO: 49532 - DNA, 476 bp, Homo sapiens
accctcactaaagggaacaaaagctgggtaccgggccccccctcgagagtacttctagaattaattaaggcgggatcaaatcaacatcctttaaacaatcagtaagaggttccctttcagataaagataaagaatttgacttgggacactgccagacttctaactgttacagaaaaacattctgttgccacagcttgctgaagcaagaaaatcgcttgaaaccaaggcgcccccccccgcggggagccccgatcccgccactgtagtggagttttttacccccctgagagggcgttttttataaaaaggaaatcaagaagctaaggcttcttggtggctcatggtggctcatgcctgcaatcccagcattttgggaggccgaggcgggcagatcacctgaagtcgggagtttgggaccagcctggccaacatggtgaaaacctgtctttaccaaaaatacaaaaattaactgggcg

SEQ ID NO: 49533 - DNA, 372 bp, Homo sapiens
  misc_feature 272: n = A,T,C or G
accctactaaagggaacaaaagctgggtaccgggccccccctcgagagtacttctagaattaattaaggcgggctaatagatataaaacacctgaaactcatcagcagcttctcaataagatctcaggagtgaggagaagtaatgcaagatcccaaagtatgccagcgtataaaatcccaagtcaagaggtcaagctgccggtttctcaagtcgcttgcttggccctcttccaagttgtactttgctcctttccttttcttcccttcctcanaaaaaaaaaaaaaaaaaaaaaaaaaagggggcccccccccgggggggccccccaatccccccttaagggggtttttttcccccccccctggggccctttt

SEQ ID NO: 49534 - DNA, 490 bp, Homo sapiens
gcgcgcaattaaccctcactaaagggaacaaaagctgggtaccgggccccccctcgagagtacttctagaattaattaaggcgggggtgctaggaggataaactccctggacaactgctagtgaagagtgatatgactaatcctgtatctttgtgatctgaatagcccgtaattcaaaaatatattactttcaatcttgtaagatgcacactggatcaaggatgtcctgtgctactgatgaaactaggaaaagaaggcgaccatgaatatgaaccaagacatatgctttcatatcattttctcacttatcacatcaccacgcacctattaacagtacttgattttaccacattatcggtctaactagcttatgggagctcccaccatcataagatgggccgtgtttgctactcatttaaaaatcgcattttttgttccgattataacagtcgtatatgtttactatggagaatctagagaaaaatattta

SEQ ID NO: 49535 - DNA, 293 bp, Homo sapiens
  misc_feature 254, 255: n = A,T,C or G
acaaaagctgggtaccgggccccccctcgagatacttctagaattaattaaggcggggttccccggcttccaagtcgctgtttcgtcaaagcacgagggccgcctgtggccttaattcctaacggcggccccggttctcccttctcggcaataaaccaggcctagttttgtaaaaaaaaaaaaaaaaaaaaaaaaaaaaaaaaaaaaaagagaaaaaaaaaaaaagaaaaaaaaaaaaaaaaaaaaaaaaaaannggggggccccccccccggggggggcccccccccccccc

SEQ ID NO: 49536 - DNA, 386 bp, Homo sapiens; identical to SEQ ID NO: 49301

SEQ ID NO: 49537 - DNA, 452 bp, Homo sapiens
gttccgggccccccctcgagagtacttctagaattaattaaggcggggctcgcagtgagctgagatcacaccactacactccagcctggaagacaaagcaagactccatctcaaaaaaaaaaaaaaaggggcgggcccgggggcctcccccttttttcccccccttttggggggcccggggggggggtttcccagggtgggaaaataaaacccttcgggtttaacgggggaaacccccttttttcttaaaaaacaaaaaattaccccggccagggggggggccccttttttccttaccttctcggggggctggggcgggaaaatggctttaaccccaggggggggacccctcctttgccccaaattggcccctttgctttccccctggggaaaaagaaaaactccttttaaaaaaaaaaaaaaaaaaaaaaaggggccccccccccgggggg

SEQ ID NO: 49538 - DNA, 295 bp, Homo sapiens
ctggccgtcgttttcaggaaacagcatatggcacactattgctggtcccgggccccccctcgagagtacttctagaattaattaaggcgggtggaaaggcggaggcgagccctggaggagggaggccacaactccgagctgcccacctggtgctgagctggggccccgcctcctttctgttttatttttgaggaaataaaataaccaagtgcttaaaaaaaaaaaaaaaaaaaaaaaaaaaaaaaaaaaaaaagaagaaaaagaaaaaaaaaacaacaaaaaccaaaatgaagaa

SEQ ID NO: 49539 - DNA, 219 bp, Homo sapiens
acaaaagctgggtaccgggccccccctcgagagtacttctagaattaattaaggcgggcacctgtagtcccagctactcgggaggctgaggcaagagaatggcgtgaacccaggaggcggagcttgcagtgagctgagatggcgccactgcactccagcctgggcaacagagcgagactctgtcttaaaaaaaaaaaaaaaaaagttggggtggggttt

SEQ ID NO: 49540 - DNA, 735 bp, Homo sapiens
tgatgggtgccgggccccccctcgagagtacttgtagaattaattaaggcgggggaataggagagcaatgccctagggaaaagagggcactaggggaaacaatggttacagtgcactgcagaatgaccaatggcacctacttccagagttttccttcaactaaaaagagatggcattttcttatgattcagtaaccgcattacttacatcaacattatggttgctatagacaagcctaggtagctagcctctatttacatcatcccactaagggtatccaaacccaagtaaccaaattttagaacactatcagatagtttcctgcattcaagacttcaactcataactctttgaactcttattagatataaggaatctaagatgtattataggcattcctataattagccatatttacaagatacaaaatatttggataaaaagcaaatttcatcacatcgtataatgtacagataaggtttataaagtaaattaatttatttttagcaccatatatacaatccaaacactgcaaattaatttcttttcaaactcaaaagatagttttcattaatcatgatggcacatcctctctctcaataaacccaaatgctgttttaatggctgggtggtaatagttaacattttataattgttatttaaaaatatggtctcaagactaggctgcatttcctaaaaaaaaaaaaaaaaaaaaaaggggcccccccccggggg

SEQ ID NO: 49541 - DNA, 511 bp, Homo sapiens
accctcactaaagggaacaaaagctgggtaccgggccccccctcgagagtacttctagaattaattaaggcgggtggtctgaatatttacgtccccctgaaattcatcttttgaaaccgaattactaatgtgatgacgttttggaagtgattaggtcataagggtggggccctcctgaatgagatttttgccattactgaaaaggctggagagagacccttcaccccttccatcgtgaggatacagcaagaaggcaccgtctataaaccagaaagtgggccctcaatagacactgaatctgccggtgctttgatctaggacttcccagcctccaaaactgtaagaaacaaatttctgttgttgataagccattcagtttatggcgttttgttatagcagtttaaatggactgagttagtatatgaattatatttcaataaagctgttattaagtaaaggaaaaaaaaaaaaaaaaaaaaaaaaaaaaggcggccccccccgggggggaccc

SEQ ID NO: 49542 - DNA, 468 bp, Homo sapiens
agggaacaaaagctgggtaccgggccccccctcgagagtacttctagaattaattaaggcggggagtagatgccttctagctctaagaaagaagatggatggtgattaaacatttccaagagtttgtggagtgttagaagctgagagaatgcaggcttgagatcctctcattattctttgaagccaatcaaattgtgagataaaaacctgagccagagaagcaattgggtagggcccttgggacaggagctaaaatttggaagagctgctattagaagtggcagagggagctgacgagcagaatgtagaattgctgagtggttttgagagcttggaaactataaatttgtagtggcatcggtccacatgattgttgtatttcctccagcagaagtcagcagtccacttatgagaactcaaaaaatgctgattgaaactgaaactggaggtgctgtgaatccaagatgg

SEQ ID NO: 49543 - DNA, 497 bp, Homo sapiens
ttaaccctcactaaagggaacaaaagctgggtaccgggccccccctcgagagtacttctagaattaattaaggcgggtgaatggggtggggtgcgaattatagctcactaaaactgcttcagaagacaagatgaggaggcagcactagggccagatggcagaggagcttataagtcatccctcagagacggaacttcatcctgatgatggcagcaggaagcctttgtagggactggtgtgaagggatttgctgctgggcaaggaatggaatggaggggcagaagtgggtatggagagcactggagtgagagtgagatggtaatgcggtcagaggagaaggcgcagcattgaagtcatgtccatgattagctcctgctttctcacactcactgtgttgctttgcagaagacagtttccctctttgggcctcagtctccccaccagtcacaaggctactttggaaaagtctggcaggtcctcaaaagttttaatgtaaa

SEQ ID NO: 49544 - DNA, 459 bp, Homo sapiens
  misc_feature 360: n = A,T,C or G
aaagggaacaaaagctgggtaccgggccccccctcgagagtacttctagaattaattaaggcgggagaatggcgtgaacctgggaggcggggcttgcagcgagccgagatcacgccactgcactccagcctgggcgacagagcaagactccgtctcaaaaaaaaaaaaaaaaattttttttttggggaaaagctgttttttgtgggaaacaaacttttttaaaacaaactttattacaacccacctccttgttttgtcccaataaaaatgtaaacagttggggattaaaaaaaatattggaagggtataagtttttttatttttaggattgaaaacacccttttttaattggccctattnaaaaaaaaaaaaaaaaaaaaaaaaagggggcccccccccggggggggccccccatcccccctttgggggggtttttttcccccccccctggggggtttt

SEQ ID NO: 49545 - DNA, 661 bp, Homo sapiens
aaagggaacaaaagctgggtaccgggccccccctcgagagtacttctagaattaattaaatgtttaaggaacatttcaccagaacagtatgacagtttggatggtatgtatacccaaataacttagcctttaaatatctaaacaaagcaaacagaataacaaggagaaactgacaaattctcaatgggaataggtgagtttttagcatatagtcatgcactgcataatgatgtttgagtcaacaatggactgcctatacaatgatgttcctatgagattataatggagctaatgaggataattcccatcatctaatgacatcataactatcttaatgatatagcacaacacattactcatgtatttgaggtgatgctggtgtcaacaagcctgctgcattgactgccagttgtttaaaatatagcacataccattgtttgcagtacataatacttgaaaatgataataaactagtatattgctgatttatgtatttgctatactatactttttatcattattttagagtgtacttccactgatgtaaaaacaagttaactgcaaaacaacttcaggcaggccctttaggaggtattccagaagaaagcattgttatcatagaagatgacatctccatgcatgttattgtccccaaatacat

SEQ ID NO: 49546 - DNA, 479 bp, Homo sapiens
ttaaccctcactaaagggaacaaaagctgggtaccgggccccccctcgagagtacttctagaattaattaaggcaggaaaggaggctgaatcaaataaagtagtagaataaataaataaataaaagttaaaaataaaaaagccccgaagcccaggtaccttgtctttttctcctcagaacttcagttaataaacacgaaatacctggctgaggaacgcaagtccaaacctcagtgtgcaaaataacttgtataatctaaacaaactgtagtgttcttgaagacatgatagaataactttgttaaaaaaaaaaaaaaaaaaaaaaaaaaaaaggcggccgccaccgcggtggagctccaattcgccctatagtgagtcgtattacgcgcgctcactggccgtcgttttacaacgtcgtgactgggaaaaccctggcgttacccaacttaatcgccttgcagcacatccccctttcgccag

SEQ ID NO: 49547 - DNA, 338 bp, Homo sapiens
cactcctgggtaaagggaactgatgctgggtaccgggccccccctcgagagtacttctagaattaattaaggcggggggatggaggctgtagtgagccgagatcatgccactgcactccagcctgggtgacggagccagatcctgccaccgcagtcattctggatgacagagtgagaccctgtctcaaaaaagaaagaaaaaaatttttttcctctgtaataaagcaataggcctaagaaaaaaaaaaaaaaaaaaaaaaaaggggggcccccccccgggggggacccccaattcccccttttgggggggggtttacccccccccatgggccgggttt

SEQ ID NO: 49548 - DNA, 188 bp, Homo sapiens
ggaaaaaaactgggtaccgggccccccctcgagatacttctagaattaattaaggcgggcataccaaggccaccacacaccacctgtccaaaaggccttggatcgggataatcctatttattacctgagaatttttttcttcgcaggatttttctgatccttttaccactgcaacctagcccctgccc

SEQ ID NO: 49549 - DNA, 322 bp, Homo sapiens
ggaacagaagctgggtaccgggccccccctcgagagtacttctagaattaattaaggcgggcgcctgtagtcccagctactcaggaggctgaagcaagagaatcgcttgaacctgggaggcagaggttgcagtgacctgagatcatgccactgcactccagcctgggcaacagggcaacagagtgagactccatcacaaaaaaaaaaaaaaaaaaaaaaaaaaaaaaaaaaaaaaaaaaaaaaaaaaaaaaacccccccccccccgggggggggcccccccccccccttttggggggttttttcccccccccccccattggg

SEQ ID NO: 49550 - DNA, 438 bp, Homo sapiens
  misc_feature 28, 46, 47, 416, 418, 423, 424, 425: n = A,T,C or G
acaaaagctgggtacccgggcccccccntcgaaagtaccttctagnnaattaattaaggggcgggcgtatggactgtagcatgaaagtatatcattgataaatccttttttataaatacaaactttaggcctgccattacggttaacgtttgtcattccgtcactttgatatgcctaagcaggcagatctcaacgtcatgaggttaagaccacactggctaacacaatgtaacctcttctctgcttagcacacaaaaacaaaaaattagctcggcttggtggccggcgcctgtagtcccagctactcgggaggctgaggcaggggaatggcgtgaacctgggaggtggagcttgcagtgagccaagattgcgccactgcgctccagcctgggtgacagagtgagactccgtctctnanaattnnnaaaaaaaaaaaaa

SEQ ID NO: 49551 - DNA, 561 bp, Homo sapiens
tcactaaagggaacaaaagctgggtaccgggccccccctcgagagtacttctagaattaattaaggcggggacataattattgcaccaaataacgtcaaaagatatgctcgcagtcagaaacgacttcacaatgcgtcttagccaagattgagacattattcaagaggccggaggagatgacttgctattgtcacatatacgggatatctaccccatcaacaagatcctcctgatgtgcacaggaacacttcactggatgcgcctgcactttgccgcttatatattgcactcagcatcacgccgggacctgaattccacttcttccatctattacatctctgagtctaaatgaaaatgaagagaagaccggaccttttgttgtacactggctaaacaataaagaactgcattttactttgtccatggaagttttttttacagcaacttaaaaaaggttttgaacaaccatcttctgaggccagtgttgaaaattctaatcaggcaaatgtaaaatctgatgaaaaaactgatgatggggttgatgaaaaaaaaaaaaaaaa

SEQ ID NO: 49552 - DNA, 456 bp, Homo sapiens
attgaccctcactaaagggaacaaaagctgggtaccgggccccccctcgagagtacttctagaattaattaaggcgggagactttctaaacagtttttctttcaggaattctgtagcattcccccttccctctgttaggaaccaaggacatcagaaatagcaactttaagtggcaagccggaggaactctgttagaataatccacacagtgaggcaaatatcaatctaagcattgtggatggaaggaatggtctttggagagagcatatccatctcctcctcactgcctcctaatgtcatgaggtacactgagcagaattaaacagggtagtcttaaccacactatttttagctaccttgtcaagctaatggttaaagaacacttttggtttacacttgttgggtcatagaagttgctttccgccatcacgcaataagttcgtgtgtaatcagaag

SEQ ID NO: 49553 - DNA, 587 bp, Homo sapiens
ctaaagggaacaaaagctgggtaccgggccccccctcgagagtacttctagaattaattaaggcgggcatggtggctcacgcctgtgatcccagcactttgggaggccaaggcgggtggatcctttgaggtcaggagtttgagaccagcctggccaacatggtgaaaccccatctctactaaaaatacaaaaaaattatccaggcatggtgtcgcacacctgtagtccccagctactcgggaggctgaggcaagagaatcgcttgaacctgggaggcggaggttgcagtgaaccaagatcgtgccgctgcactccagcctgggcaacaagcaaaactccatctcaaaaaaaaaaaaaaagtgggaccaaaccccacttccggaatataatatagtcccttattaacaatttttatttggggacggccttttccctcaccttttcaaatatccagaggatgaaattttttttttaaaaatatcattttttctttctccgggccaaaaattaagaaaacctttaggggactgccccctttaaaaaaaaataacttattcccttaaaattttttaaaaaaaaaaggggta

SEQ ID NO: 49554 - DNA, 283 bp, Homo sapiens
aaccctaaataaagggaacaaaagctgggtaccgggccccccctcgagagtacttctagaattaattaaggcggggatcatcacggaaagatttgttaatttgatcaacttctatcttaaaacttttgaattaaatcaaaaacaaagactacaatgcaatcaaacaagtctactataaaaatagaaggcgcagagcgtaaaaaaaaaaaaaaaaaaaaaaaatgggccggccccccagggggggaaagcctttttcactaataagggagaaattatcccccct

SEQ ID NO: 49555 - DNA, 146 bp, Homo sapiens
  misc_feature 28, 55, 61, 73, 99, 103, 105, 106: n = A,T,C or G
tgcagtgaaagaaagttcttcatattangacagatatcattgcatcacatttatntatctntctgggtatttntatagcccttaataaaaaatattaanaccnannaaaaaaaaaaaaaaaaaaaaaagcggccccccccccgggg

SEQ ID NO: 49556 - DNA, 259 bp, Homo sapiens
cgcgcaattaaccctcactaaagggaacaaaagctgggtaccgggccccccctcgagagtacttctagaattaattaaggcgggtcagaggactgtaatgatagaattaaattagtgtcactaaaaactgtcccaaagtgctgcttcctaataggaattcattaacctaaaacaagatgttactattatatcgatagactatgaatgctatttctagaaaaagtctagtgccaaatttgtcttattaaataaaaacaat

SEQ ID NO: 49557 - DNA, 465 bp, Homo sapiens
  misc_feature 46, 47: n = A,T,C or G
agggaacaaaagctgggtaccgggccccccctcgagagtacttctnnagtgggaagaagccggggatgaacaggacatttcgttttttttttcggctgcgagatttgggcacttttgggggtgccggtggcccggtcctatggcgcaaggttgggcaggcttctctgaggaggaactgaggagactaaagcagactaaagatccatttgaaccacagcgacgtctccccgcgaagaaaagtcgacaacaacttcagcgagaaaaagcccttgtagagcaaagccaaaaacttgggcttcaagatggatcaacctcattacttccagagcagctgctttcagcaccaaaacagagagttaacgttcaaaaaccacctttttcttcccctactcttccgagtcatttcactctcacctcccccgttggtgatggacaaccacagggcattgaaagtcagccaaagga

SEQ ID NO: 49558 - DNA, 460 bp, Homo sapiens
accctcactaaagggaacaaaagctgggtaccgggccccccctcgagagtacttctagaattaattaaggcggggcttgcagtgagccggggagatcgcgccacagccctccagcctgggtgacagagcaagactctgtctcaaaaaaaaaaaaaaatttacctggaaaaaaaactttttacctgttaaccccctggtccttttttttgccttggggggaaaacctctcattttttttcaaagccaaaaggtaaattttttttaaaataattttttaaggggtcccctttggggcggggcccaggggctcttccctttattcccacctactcgggaggctgcgggggaaaaatcattggaccctggaaaggggaggttgtattgacccaaaactgccccattgccttttacccgggaaaaaaaagggaaactccttttcaaaaaaaaaaaaaaaaaaaaa

SEQ ID NO: 49559 - DNA, 278 bp, Homo sapiens
tgggtaccgggccccccctcgagatacttctagaattaattaaggcggggaacaatctacaaaatactaatgcatgtcaaacatttcctcggcttggtcataagcaatccatgtattacctcatttaatcctcacaacaaccctctaagaaaagtactattatctccccttacagaggaggaaactgaggcacagagaatgtcaccccaagcgatctatgttgaaagtacataccccggccaggcgcagtggctcacacctgtaatcccagcaccttg

SEQ ID NO: 49560 - DNA, 378 bp, Homo sapiens
  misc_feature 325: n = A,T,C or G
actggccggcgttttacaacccgaaataaagggaacacatgctgggtgccgggccccccctcgagagtacttctagaattaattaaggcgggagaatcgcttagaacacgggaggtggaggttgcagtcagcagagatcgcaccactgcactccaacctgggcaacaagagtgaaactccatcaaaaaaaaaaaagccaaaaaaaaaaaaaaaaaaaaaaaaaaagggggccccccccgggggggaaccacaatcccccctaataaaaacttttttccccccccccacacccccttttttaaacaaaagacgtaagggagacacntgggaaaggaaagggaacggaaagggaaagggaaaggaaaagggaaagggaaa

SEQ ID NO: 49561 - DNA, 548 bp, Homo sapiens
ctggccgtcgttttacacccgggaataaggggtacccatgctgggtgccgggcccttcctcgagagtacttatagaattaattaaggcgggagccagggcgtcagggcctgcggacgatgtgtgtgtgaaagggcgcgtcagccataagaagccatatgcgtgcgagccggtccccaccgtccccgcggcgttgtcaccatcatcatgaggccactggagcagcctcaggctctgctgccggggggccgggcgcggggtgcgtcgggctctgcaggttggcactcacacccagcgcgcaggatggcaggaatagcacatttcaaacctacaagaaagaagtgtgcctcccccgtcattcgatgcaccctggcccctgggccatctgctgtgaatgccagaccagattcgggggccgcctgcctgtgtccagggtggaagcagcactgccttactgggtccctctgtccctgagaccccgaaagcagcacccctgctggatgcatgctgctggcacaactgctggcggatctgcggtgatgagtgcctg

SEQ ID NO: 49562 - DNA, 449 bp, Homo sapiens
cgggccccccctcgcagagtacttctagaattaattaaggcgggagaagaggatggaacctggatgctgaggtcgcggagatccaatatcattcctttgctctccagcctgggcaacaagagtgaaactcctcagaaaaaaaaaaaaaaaaaaaaccccccccccccgcccggggaggaaacccccatttcccatttttattatccaccccccccccccccatggataaaattacacctttatagtgatattaccactctttacgtttgattacagaccgcttttgtcttttgcatcctaatggcttatttcattttaggattgtattcgttctcatatatcaactaagctacactagcagaaaagtgagtgaaaataaaatgtagaaaccagtaaaatccagtgctcttaaataccagggaaaacagaactagtcactgcttggaatt

SEQ ID NO: 49563 - DNA, 455 bp, Homo sapiens
  misc_feature 337, 338, 339, 340, 433, 434, 435, 436: n = A,T,C or G
cactaaagggaacaaaagctgggtaccgggccccccctcgagagtacttctagaattaattaaggcgggtaggcctaggattgtgggggcaatgaatgaagcgaacagattttcgttcattttggttctcagggtttgttggctaattgaagttattaggctcagcttcagtcatgtgtaagttttgcagtgtaatacatatgtagtctggtctgtatatatgaaaatttgaattaaactgcagaatgtttatgtctagttatggtttaaattttcttagtagtatataaaaggtaagagtactgaaaaattaataaaattgcaagttaagaaattnnnnaaaaaaaaaaaaaaaaaaaaaaaaaaaaaaaaaaaaaaaaaaaaaaaaaaaaaaaaaaaaaaaaaaggggaaaaaaaaaaaaaaaaaaaaaannnngggggcccccccccccggg

SEQ ID NO: 49564 - DNA, 477 bp, Homo sapiens
  misc_feature 364: n = A,T,C or G
agggaacaaaagctgggtaccgggccccccctcgagagtacttctagaattaattaaggcggggaaagtcatgtcacagactctgcccacagcagccattctgaggtgccttttcagtctcttatcctcttttgagctttcctcttcttaattttttgttttgttttgttttcattgtactcattaatcccctcctcaatttttaacagaattataaaagcaaagtcaaaaggtccttcaggatgactgggaggcttcctaggataacttttgcatttgaaaatggaaaaaataaattacttgatatttgtgataagactaagatttcttaaaagtctgcacatcaatatattacctggcttangagggtgagggcacagtatccatctgcacataatacaccctccatttttgttaccaagagaaagcttccatcaggtagctttaccaatacatttccattcccatgaaatgcaa

SEQ ID NO: 49565 - DNA, 519 bp, Homo sapiens
cgccaagcgcgcaattaacacctcactaaagggaacaaaagctgggtaccgggccccccctcgagagtacttctagaattaattaaggcggggtagaaactacaaaagagataagtgaattcgaagacataagagaaaaaactatcttaaattaaacaaagagaaaaaaagactgaaataaaatgaccaaaaaataaatgtggggggacaacttcaattaaatttaaaaatatgcaatcatagctcataaatgtgggtaaaaaaagtatgtgaaatataatggctatattttcttcaaatttgattaaaactataagccaaaagatccaagtaactcaacaagctctaagtacgaaaaataaaaaaaaaaaaaaaaagtatgaggcggccgccaccgcggtggagctccaattcgccctatagtgagtcgtattacgcgcgctcactggccgtcgttttacaacgtcgtgactgggaaaaccctggcgttacccaacttaatcgccttgcagcacatcc

SEQ ID NO: 49566 - DNA, 357 bp, Homo sapiens
cctaactaaagggaacaaaagctgggtaccgggccccccctcgagagtacttctagaattaattaaggcgggggtggtggctcatgcctgtaatcccagcactttgggaggcagaggcgggcagatcacatattcatgagatccagaccatcctggctaacacggtgaaaccccgttctcttctagccactggaacaacctaagctatgctggcccccccccgggggggggctccatttgcctctttagggggggttttaacccccccctcgcaggatgggattgaataacacatttcaaacctacaagaaagaagtgtgcctcccccgtcattcgatgcaccctggcccctgggcc

SEQ ID NO: 49567 - DNA, 480 bp, Homo sapiens
accctcactaaagggaacaaaagctgggtaccgggccccccctcgagagtacttctagaattaattaaggcgggagctacttagggtgagcctgccttcttccattctatccgaagtctcttctaaagttgcggaattgtccatatccattagttcaggattttttgttttttagggcttcactaaagtttcaggtttctatttaacatgtaattctgtataccaaatgtaccagaaagggttatgttattcatgaaaaaaaaaagagaatagttttgtctaattcaatagttatctaaaagttggttcaaattacagatttaaaaaaggttattcataaaacaatgtagtaaggaatcattaggcaaaaaaatgtgggaaaagtttaaatcataaaatattttttaaaccctgataaagaattggagacgtttggctaattaaacattttcataaagctgttagttttgattaaagtaa

SEQ ID NO: 49568 - DNA, 498 bp, Homo sapiens
cgcgcaattaaccctcactaaagggaacaaaagctgggtaccgggccccccctcgagagtacttctagaattaattaaggcggagttatgatgactgtgtggaaagcggctgtgcagacattcaattgttattattatgtcctacttgccaggtgccaagaaaaaagattaactgaaattgcggccgccaccgaggtggagctccaattcgccctatatggagtaaaaacacgctcgctcactggccggaaagatacaacgcactgactgggaaaaccctggcgttacccaacttaatcgccttgcagcacatccccctttcgccagctggcgtaataacgaagaggcccggaccgatcgcccttccgaacagttgcgcagcctgaatggcgaatggaaattgtaagcgttaatatttcgttaaaattcgcgttaaattttcgttaaatcagctcattttttaaccaataggccgaaatcggcaaaatcccttataaa

SEQ ID NO: 49569 - DNA, 254 bp, Homo sapiens
catatctgggtaccgggccccccctcgagagtatcttctagaattaattaaggcggggggggagggaaaaaaaaaaaaaaaaaaaaaaaaaaaaaaaaaaaaaaaaaaaaaaaaaaaaaaaaaaaaaaaaaaaaaaaaaaaaaaaaaaaaaaaaaataaaaaaaaaaccccccccccccccggggggggaaccccttaacctttaaaatgggtttcaccccccccccccccgggggttttaaaaaaaaaaagat

SEQ ID NO: 49570 - DNA, 419 bp, Homo sapiens
  misc_feature 328, 329, 330, 331: n = A,T,C or G
ctgaataaagggaacaaaagctgggtaccgggccccccctcgagagtacttctagaattaattaaggcggggtatatttttagattaaagaagactaaggagacatgaccactaaatccagtttatgatccttggctggaccctgaatccaaaagtatgatggtaatagtaatgtataaaggtcattagtgggtcagtggggaaatctgaatagggattgtatatttttagatcttacaacattatagctttgcaggagaatgtgcttgttcttaacatatacatgtatttgctggtcaagtgaagtgatgtctgcaagttaattccnnnnaaaaaaaaaaaaaaaaaaaaaaaagggcccccccccgggggggacccccaattcccccaataaggagtgtttacccccccccccctgg

SEQ ID NO: 49571 - DNA, 312 bp, Homo sapiens
aaccctaaataaagggaacaaaagctgggtaccgggccccccctcgagagtacttctagaattaattaaggcgggagccccaggttctggccctgtggacctgtttcgggagctgctggaggaagggaaaggagtgatcagccgtcatataaaactatttattcataaatattttccaaaatgaaaaaaccaaaaaaaattttaaaaaaaaaaaaaaaaaaaaaaaaaaagggggccccccccccgggggggccccaaatcccccttaaagagaggattttaccccccccccccggcccggtttttaaaaaa

SEQ ID NO: 49572 - DNA, 503 bp, Homo sapiens
actaaagggaacaaaagctgggtcccgggccccccctcgagagtacttctagaattaattggggcggggggagattaagaatgaatggatattttactataggcaaagaaaattctaaagcgactttctagacataggcaggaggccgacaagttaaaagctgaaccaatattttcaatggtagaggttgccaacctatggtctgggggccatatttggctgcccagtgtgtttcatttggcccattcaatatttcctaattttgggaattcttttctcacatttaaaagttggaagatttctggatgtcctgcttctctttgaatatcatccagccacgcacagcccacgatgtctccagttcccctcttctccaccctctctatcactttacatgcgaccccagtcgctcatgtctgcgcctgtaggtacttgcgtttacaatccctggctcctaaagctctggaaacagtcgggagtggctgggaggattacgctgggtt

SEQ ID NO: 49573 - DNA, 459 bp, Homo sapiens
acataaagggaacaaaagctgggtaccgggccccccctcgagagtacttctagaattaattaatatatatcaaaaggttaacaggggttatcagtgggcagcagtatttcaggtgtttcttttttgtttttttctatttttttctccgagaaatgtggaattaaagggggaggagagggtaaagaagaaaaataaagaaattaacgttcactgggaagtgaataaggatcaagtaaaaccttatttaccctccaggtagttattaccatctcattttgaccgatggggaaactgaggcccagagagattgcatcatgctcaaggagacatagcgactgacaggaaagatctaattccaaagcctataatcttcctgtgtcagaagattatgaacagtctattcatgttcactttcttaagagagacagaaataagacaggggtaatttaatcagtttct

SEQ ID NO: 49574 - DNA, 484 bp, Homo sapiens
aattaaccctcactaaagggaacaaaagctgggtaccgggccccccctcgagagtacttctagaattaattaaggcggggctgtggggtcagtatcagccgctttcagattttcatcaataaaatttccaatttcatcgggattggcagggcggggaagataccgggggacactcatgagggttggtgtaacgtcgttacgagtcacttcaggccgagcgtccaggcccctgtgcagctggctcaagtcaaagtcctggccctcttactccttcctctctcctcctccttccccattgctgtaaatatttcaacgaaatggaaaagaaaaaaaaaagacgtttaaaaaaaaaatttatatattatatttgcggccgccaccgcggtggagctccaattcgccctatagtgagtcgtattacgcgcgctcactggccgtcgttttacaacgtcgtgactgggaaaaccctggcgttacccaactt

SEQ ID NO: 49575 - DNA, 368 bp, Homo sapiens
  misc_feature 172: n = A,T,C or G
cgggccccccctcgagagtacttctagaattaattaaggcggggcggtgatgtagagggtgatggtagatgtggcgggttttaggggctctttggtgaagagttttatggcgtcagcgaagggttgtagtagaagagcgatggtgagagctaaggtcggggcggtgatgtanagggtgatggtagatgtggcgggttttaggggctctttggtgaagagttttatggcgtcagcgaagggttgtagtagcccgtaggggcctattaaaaaaaaaaaaaaaaaaaaaaaaattgggcggccccccccgggggggcccccatatcccccttttggggggtttttttaccccccccccttggccccttttt

SEQ ID NO: 49576 - DNA, 491 bp, Homo sapiens
gattacgccaagcgcgcaattaaccctcactaaagggaacaaaagctgggtaccgggccccccctcgagagtacttctagaattaattaaggcgggtgtgttgtttctagtaatgcatgtaaatacatcatcaatctagttgatgtcaatggattcagttaaaatgacttactttttacatattaatttaacaatgtaatatatttacttaatattttatgtgataacgtgagttacagcatggtttctcaacatgagcactactaacatttggggctactttgttgctgtggctgtcctgggcactgtagaatgtttagcagcatagctggcctctacctactacatgccagtaatacatcctcctttctccaagttgtgacaactgaaatatagcaaatgtcccccagagggtaaaatcatatcagttgaaaaccaccaagttacagttatgattacataaatcagaactgctaattaaagtaaaataa

SEQ ID NO: 49577 - DNA, 418 bp, Homo sapiens
gggaacaaaagctgggtaccgggccccccctcgagagtacttctagaattaattaaggcgggggacgatggcgagaggggagggggagcgagttcgcatctctccttttcctggttagactctgttcaaccacattcttatgttggcagatctgcttccagattgatttttagagcaccatcactttcacattcctgattctgattttgttttgttttgtttgggttttctgaaacttaaaatgctgccccgaaaatactatatttttgagtttgtgttctgaaagcctccgtgctgctggatctttggggggaaatacaggatccttcaccattgaggtgtttaaaatttgcaactaccattgcaattttttctaaatatggggattttacccttttttaaaaatttttccaaacct

SEQ ID NO: 49578 - DNA, 496 bp, Homo sapiens
accctcactaaagggaacaaaagctgggtaccgggccccccctcgagagtacttctagaattaattaaggcgggatggagaaaggaggtagggagagtcatccaaggaacatgagcaacatgttaaaagccaagtggtttaatttctggagatggtgaacccaagaggctctgctgggagacaacaaaaaaaaaaaaaaaaaaaaaaaaaaaaaaagcggccgccaccgcggtggagctccaattcgccctatagtgagtcgtattacgcgcgctcactggccgtcgttttacaacgtcgtgactgggaaaaccctggcgttacccaacttaatcgccttgcagcacatccccctttcgccagctggcgtaatagcgaagaggcccgcaccgatcgcccttcccaacagttgcgcagcctgaatggcgaatggaaattgtaagcgttaatattttgttaaaattcgcgttaaatttttgttaaatcagctcatttt

SEQ ID NO: 49579 - DNA, 372 bp, Homo sapiens
aagggaacaaaagctgggtaccgggccccccctcgagagtacttctagaattaattaaggcgggcagatcacaaggtcaggagttcgagaccagcctggccaatatggtgaaactccgtctgtactaacaatacaaaaattagccgggcgtggtggcgggctcctgtagtcccagctactcgggaggctgaggcaggagaatcgcttgaacccgggaggcagaggttgcaatgagccaagattatgccactgcactccagcctgggcgacagagcaagactcggtctcaaaaaaaaaaagaaaaaaaaagaaatcaaaagcggccgccaccgcggtggagctccaattcgccctatagtgagtcgtattacg

SEQ ID NO: 49580 - DNA, 331 bp, Homo sapiens
aagggaacaaaagctgggtaccgggccccccctcgagagtacttctagaattaattaaggggggaagtggacggtgatacataaggaatttcctgtactccatattggaaatggagtgaaacaagcccttccatgccatgtccccgtgggccacgccatatgtctgaatatttccatatttcagtgggcactctcaacctcaacacttgtacataaggtcacacccgtgcccagttgctgaatgtatgtagcgtatcccaaggcactgaacatgaggaaagatgatcatgtccatctggatgatatagagaaattatcttttccaaatgag

SEQ ID NO: 49581 - DNA, 436 bp, Homo sapiens
aaataaagggaacaaaagctgggtaccgggccccccctcgagagtacttctagaattaattaaggcgggtggattgcctgagctcaggagttgaagaccagcctgggcaacaacggtaaaaccccgtctctactaagatacaaaaaattagccaggcatggcagcatgcacctgtagtcccagctactcgggaggcagagacaggagaatcgcttgatcctgaaaggcggaggttgcagtgagccgagatattgcgccactgaattccagtccgggcgacagagcaagactgcatctcaaaaaaaaaaaaaatccctggccccccccccaaaaaaaaacccaaggttgggggggggtccatgggtaaagccctaaaaacccatactttgggggggctgggggggaaaaatcattgggggtttaaattcaaaaacgg

SEQ ID NO: 49582 - DNA, 490 bp, Homo sapiens
cgcgcaattaaccctcactaaagggaacaaaagctgggtaccgggccccccctcgagagtacttctagaattaattaagggggaaaatatgagctcagtaatggtggactttaactctaacaggcctgggacatggcccacaatttcgatatctggccccttgactttagaaacttgatgcactataagggctaaggtgtgctcattctactaatagctccaacactctgatgggtagggccaaccaaagtgcttcatcagggtggtggcagagggatctgtgcccacttgcatgtccctgcagccacaatggggtgcacacacattggcttaagtggggtactgacaggagcatggctgtggcattcctgcatgtgctcacaccctatctactttattaaatgactgaggacctgtctctgttatatgtatatctccattaacatctttccatattgttgtaagtgaatttcacgtttagccactcact

SEQ ID NO: 49583 - DNA, 478 bp, Homo sapiens
  misc_feature 320: n = A,T,C or G
tcactaaagggaacaaaagctgggtaccgggccccccctcgagagtacttctagaggggggaaagagcgagggtacagggagctattatttttcttttgctctccaggttgggtgagagagccagatcccgtctcaaagaataacaaaagacttttaactcaagatgtcagaaaaaaaaagttttaagaaaattcagcaaggctgggtgcagtgactcacactttgggaagccgaggcaggtggatcacgaggtcaggagttcaagaccagcctggccaacatggtgaaaccccatttctactaaaaatataaaaattanccgggtgtggtggggtgtgcctgtaatcccagctacttaggaggctgaagcaggagaatcgcttgaacccaggaggcagaggttgcagtgagccaagattgtgccactgcactccacactccagcctggcgacaaagtgagactgtctcgaaaaaaaa

SEQ ID NO: 49584 - DNA, 506 bp, Homo sapiens
accctaactaaagggaacaaaagctgggtaccgggccccccctcgagagtacttctagaattaattaacaaataataatcatacatattcatggggtagataatgttctgatacatataatgtacagaaatcaaatcaaggtaattaacatatccattatctaaatatttatcatttctttgcgttaggaatgttcagtatcttccttccagctatttgaaactatatagtattgttaactacagtcatcctacagtggtatagaacactagaacttatttcttctatctagctgaaattttgtatccttcaacaaatttctccctatcccttccttcctcctacccttcccagcctctattatctatccccgccttaattaaggcggggcagaacgtgagggctgggcggagggcttagggatgagaaacatgtccggagggccgggggcaggacttaatcagaactaaatcactggccgggcacagtggctaacgcctgtaatc

SEQ ID NO: 49585 - DNA, 386 bp, Homo sapiens
aatgctgggtgccgggccccccctctagagtacttctagaattaattaaggcgggggttattaaagaggaaatttgagccagctgattacaaacacataattaaagcttatgagcagtcacagaatgagataaaagtttcagtgttttcacgaaaaactgatatactatttgctgtgagttaatgagatcttcaagaaagagaatgtaaaaattgaagaacttaggacatgttgttcaatcttagggaatagacatttgaaagaaaaggaaggaacatgaggaatgaaaggaacaaatgagaaacatgtgcctgctatcaacttatagttggtgaagcaaattggttaacattggcgaattttatggggttattgatgacccaaac

SEQ ID NO: 49586 - DNA, 474 bp, Homo sapiens
gattacgccaagcgcgcaattaaccctcactaaagggaacaaaagctgggtaccgggccccccctcgagagtacttctagaattaattaaggcggggggaatgttcttttaaaagcagaacttatttctaaaagtaccaatacttaacgatactaataataattttgcatataactatttctcagatgtattacatgttttttggtcacattatctatataacagaaatattttacattttcctaatatttaagcattatcaaaatggattattttgtgccacgtggctgggtgctaatcttgactctgtgacttcctagctctgggatcctggtaaaattacctctctgtgtctcagtttcttcatctgtaaaatgaagagaacaatagtacctatttcacagaatagttgaagattaaatgagttaatagtaataaagtgattaaatcatttctggcacatacttttacaca

SEQ ID NO: 49587 - DNA, 321 bp, Homo sapiens
  misc_feature 216: n = A,T,C or G
taaagggaacaaaagctgggtaccgggccccccctcgagagtacttctagaattaattaaggcggggtaataaacttagagcttagagttttttagtatttccttgtactgaccaaagttaaggtgtaatcagtttaaagtaacttattataaaacacttttttaaagccttataaccacaaagcaaaaactcataatacattaatatcaaagccnaaaaaaaaaaaaaaaaaaaaaaaaaaaaggggcccccccccggggggaaccccaattcccccttaaggaggtttttttacccccccttaggggggggtttttaaa

SEQ ID NO: 49588 - DNA, 477 bp, Homo sapiens
ctaaagggaacaaaagctgggtaccgggccccccctcgagagtacttctagaattaattaaggcggggaggagaaactgctgttcaaaaaagtcaatatcctgaaaggctgtgggaaacttccagactacaaaaagctagagacatgataactaaatacatttcctgaccctagactggatcctgtgctggaagggaaaattctagaaaggacattatatggtcaactcccaaaattagaatatggacaggttagaaaaaagtactgcatcaatgtaaatttgtgaaagtggtaacgtattactgtggttatttaagagaatatgcctattcttaggaaatacacattcaagaatttaggattaagtggctacagtgtatgtaatcttccctgaaatctcaaagggtttggaaaaatattgtatgtctgtatatttgcatttgttagcccatgtctgtgtgtctgtatgtgtatccg

SEQ ID NO: 49589 - DNA, 354 bp, Homo sapiens
cctactaaagggaacaaaagctgggtaccgggccccccctcgagagtacttctagaattaattaaggcgggggaattgcttgaacctgagaggcataggttgcagtgagccaagatcgcaccactgcactccagcctggtgatagagtaagactgtctcaaaaaaaaaaaaaaaaaatttaaaaaattccccccttaaatggtcaccttccttgggaaagcaaaagcccattattaaaaatttttttaaaggggaaaagtaccacctttgatttattatttattccaaagggttttgggccaaaaagggggggtaaaactcatgttttttttgggtgaacggcccccaattttt

SEQ ID NO: 49590 - DNA, 466 bp, Homo sapiens
actaaagggaacaaaagctgggtaccgggcccgccctcgagagtacttctagaattaattaaggcgggagaggatcaggaaaaataactaatggttactaggcttaatacctgggcgatgaaataatctgtacaacaaacccccatgacacgtttacctatgtaacaaaactgcacatgtacccctgaacttaaaagttaaaatacacacacaaacacacacatgcatgtgcacgtgcgcacacacacacacacacacacacacacacacacacacacatatatatgtgtgtttgtccaaaatctctcattgttttctgtgggagggctggtctcatataactactccttttttaattgaaatggaactcacaaaactcagagacagtagttgtgtataacaaacatgaaggctttcaaaaggtcttgtacagttttcttatacacaaaagagaaagacctcagtt

SEQ ID NO: 49591 - DNA, 585 bp, Homo sapiens
  misc_feature 503: n = A,T,C or G
cctgaatacaagggaacacatgctgggtagccgggccccccctcgagagtacttctagaattaattaaggcgggggacggcttcaacacacagtgcctcaagctggcctagctgcctccaacacactacgtcacaaggacccgggtctttgaaactgtgtattgaagctaatgtattaatgtgacatggaggaactcaataaaactcctgcttaaacatatgtaataaacccacagggtggcccccccccgtgggggaacactccattctcccaaaggatgtaacaatcccccccgtttatgtgcccaataacaaaactttaaaatatatgggctgggtgcagtggctcatgcctgtaatcccagcactctgggaggctaagctgggcggatcacgaggtcagatcgagaccatccttgccaacatggtgaaaccctgtctccaccaaaaatacaaaaaattagctgggcgtggtggtgggcgcctgcagtcccagctattcnggaggctgaggcaagagaatggcgtgaacctgggaggcggagcttgcagtgagccaagaatacaccactgcactccagcctg

SEQ ID NO: 49592 - DNA, 503 bp, Homo sapiens
caattaaccctcactaaagggaacaaaagctgggtaccgggccccccctcgagagtacttctagaattaattaaggcggggagaaatcaataggaattattcaatttgaagaacaaagagaaaaaaggttttaaaaagttaacgtattatcactgacctgtggaacaatgctatgagtctagcatatctgtatttgctatttcagaaaaagaggagagaaataatggagcagaaaataatttgaaaatatacttgctaaaaaattctcatttttgtgacaataattgatttttatatccacaaattttaggaaaacaaaaaaataaataaaataaatataaaaaaaagcggccgccaccgcggtggagctccaattcgccctatagtgagtcgtattacgcgcgctcactggccgtcgttttacaacgtcgtgactgggaaaaccctggcgttacccaacttaatcgccttgcagcacatcctcctttcgccagctggcgtaa

SEQ ID NO: 49593 - DNA, 569 bp, Homo sapiens
  misc_feature 469, 470, 471, 472, 473, 474, 475, 476, 477, 478, 479, 480,481, 482, 483, 484, 485, 486, 487, 488, 489, 490, 491, 492,493, 494, 495, 496, 497, 498: n = A,T,C or G
cgcaattaaccctcactaaagggaacaaaagctgggtaccgggccccccctcgagagtacttctagaattaattaaggcggggagtcagtgatttaaggatatattttggaggtaaagtaaaaaggaattcctgatagatcctggggaaagggaaagcaaagaatcaaggataactttcataacccaagttgggcagatgggaatgccatcttctaagacagaaaaaaaacttggagaagaggtgattggtgggcttttggggtaattaagagttctcttttgaacaagttgagtttaagatgtttattaagcatccaagtaagggtgtcacataggcagctacagttctcgagagaggttatattttaaatagccatgtggcatagtgaaacccaacacattgttttatcaattccaagacagaatttttcaacaactgcttctttttgattctgtataaaagactgnnnnnnnnnnnnnnnnnnnnnnnnnnnnnngcggccgccaccgcggtggaactccaattcgccctatagtgagtcgtattacgcgcgctcactggccgtcg

SEQ ID NO: 49594 - DNA, 359 bp, Homo sapiens
gctgggttctcgggccccctctccagagtttttatagaattaattaaggcggggctatgttttgcaccttaatctttaaagttgcaatatattttaagcattttaaccttgttttagatctgatcagcagtagaatgttttcagataagaaacaatggagcaaaagcaaaacaatattcaatacctagatgatggggcaagacagagattagtatacctttttgtttccaaaatataacttttatcttaatttcttgagctgaaattgggtaggaggtgtaacaagtacaaatcaacatatttaccatttgccatttcaaatgttgatagtgaacctgggacctttgtttattatggaa

SEQ ID NO: 49595 - DNA, 491 bp, Homo sapiens
accctgactaaagggaacaaaagctgggtaccgggccccccctcgagagtacttctagaattaattaaggcgggtttgatcttctagccagaccattacaacttcctccatcttagcgataatgctgttccactttcttatcattcatgtgttcagtggagtagcactttcaactttcttcaagaatgtttccttcgcaatcacaacttgactgtttgggacaagaggcctagtatttggcctacctctgctttcaacacgccttcctcactaagcttaataatttctagttctttttatttaaagtgagagatgtgcaaatcttccttatacttgaacacttacaggccattataaagttattaattggcctaatttcaatattgctatgtctcagggaataaggaagcccatggagaggaaactagggaagagctggctggtggagcagtcaaaacacacacattattatataagtttaccattttaca

SEQ ID NO: 49596 - DNA, 489 bp, Homo sapiens
gaacaaaagctgggtaccgggccccccctcgagagtacttctagaattaattaaggcgggcacctgtagtcccagctactcgggaggctgagacaggagaattgcttgaacccgggaggcagaggttgctgtgagctgagatcgggcaattgcactccagcctatacaacaagagcgaaactctgtaacaaaaaaaagggggtgtggggggagaatacaaagataaaaagaaaaaaagtaagaaaaaatgggaaaatttgggaaaaaagagaaaaaaataaaatcagtaaggacgttgcttaaccaatcaagttcaatcaactatatatgtcatctgtagacgaattaatccaataacagcagaatgcatacacttctcaagcttgcctagaataggcaccaagatagatcacaccctaggtcatatgacacactttaaaacattttataaataggaatcatactatgtctgctctcataccacaatgg

SEQ ID NO: 49597 - DNA, 469 bp, Homo sapiens
ctgggtgccgggccccccctcgagagtacttctagaattaattaaggtgggacatcatggctgagcttgctcttgggtaatttagcaaaagttatttgctgtaagtttgatattatttcaaaataaaacgaaggtcataagggactattataaacagctttataccaatatttttgaaattttagatgagatgacaaattcctaggagaaaaaattatctacattgatataagcaataaaaaatagtatatccaatagctagtagaaaaaaatccaacccatagtttaaaaccttcctaacaaagaaaactcaagaacagatgtctacctgtaaattcttccaaacattagaaaaaaataccaatctgatagaaattcttcctgagaatagaaaaaaatgagaacagcacccaaactattgtatgaggtcatcataactttgatatcaaagccagtccaggacattaag

SEQ ID NO: 49598 - DNA, 447 bp, Homo sapiens
aaatagagggaacaatagctgggtgccgggccccccctcgagagtacttctagaattaattaaggcgggcagatcacgaggtcaggagatcgagaccatcctggctgacacggcgaaaccccgtctctactaaaaatagaaaaaattagcccggcgtggtggcgggtgcctgtagtcccagctactctggaggctgacgcaggagaatggcgtgaacccgggaggcggagcttgcagtgagctgagatcgcgccactgcactccagcctgggggacagagcgagactctgcctcaaaaaaaaaaaaaaaccttagcctgggtacctaacccttttaatcccaccttttgggggggctaacggggccccttctttggatcccgggatttgaaaaccaccctgggaaactgggaaaacctccgtttttccaaattttccaaaatttccc

SEQ ID NO: 49599 - DNA, 489 bp, Homo sapiens
tgctgggtgccgggccccccctcgagagtacttctagaattaattaaggcgggggaagggaggggtctgaacaataccatagtagggctggttcagtcataggctaaggctgggtcaaggaaagcttggttcttgaaagtcttaaagcagagctaaaggcagtgcatgtgtaagagtagtattcctggccggacacactggctcatgcccgtaatcccaacactttgggaggccgaggcgggtggatcacacggtcaggagtggatcacagggtcaggagattgagaccatcctggccaacatggtgaaacccctgtctctactaaaatacaaaaaaaattagccaggcatggtgatgtgtgcctgtattcccagctacttgggaggctgaggcaggagaatcgcttgaatccatgaggcagaggttgcagtgagctgagattgtgccactgcaatccactctgtctcaaaaaaaaaaaaaagggccaa

SEQ ID NO: 49600 - DNA, 482 bp, Homo sapiens
gcgcaattaaccctcactaaagggaacaaaagctgggtaccgggccccccctcgagagtacttctagaattaattaaggcggggtaagatttgccgagttccttttactttttttaacctttccttatgagcatgcctgtgttgggtttctgtgatggtgagaataatggacatggggaagtagcatctttccctggcccattgaaagaagagaatctgttaaatgttccgaagccactgccaaaacaactgtgggagaccaaagaggtgggtgaacagtactcagctatgtttgttgtcactgaatgtttgtacttagaggtcattgaaaaatcctgcagaggtgaaagcaagaggaactgggggaaaaggagaagatttgtctgagaacagagataagaatatacaagggaaggacgcttcaagtaaaaattatcgcgcttgtgtcaatgaattaacacattgatctcttggcttactaa

SEQ ID NO: 49601 - DNA, 579 bp, Homo sapiens
taaagggaacaaaagctgggtaccgggccccccctcgagagtacttctagaattaattaaggcgggggaaacaatataagaaagaagttgaagcaaaacaacttgaaccaactattcaatcactagagatgaaaccgaagactacaagaaatactccaaatcagataaataaatctttggattttcataatcaggaagaaatgaaagatctgatggatgaaaattgcattttgaagacagatattgctatactccgacaggaaatacgcacaatgaaaaatgacaacctggaaaaagaaaataaatatcttaaggacgttaaaattgttaaaaaaacaaacgctgcccttgaaaagtatataaaactcaatgaggaattgataacaagaacagcattccggtatcaacaagagcttaatgatctcaaagctgagaatacaaggctcaattccgaactgttgaaggaagaagaaagcaacaaaagactggaagctgaaattgaatcatcagtctagactgactgctgctataagtaagcacagtgaaagtgtgaaaacagaaagaaacctaaaacttgca

SEQ ID NO: 49602 - DNA, 467 bp, Homo sapiens
taaagggaacaaaagctgggtaccgggccccccctcgagagtacttctagaattaattaaggcgggagaagggtaatttacagggtgtacattttatcattcttgaaatgttaactaaaaatttcaggacaaaatatgtaaaccttgtataacatgcagattattgcttaaaacttgcatatactttaaaatggcacacataaagtatcctaacatttcaaaattctaatggaaataacttagacatttattatccctaagacaatagtagctcggaacagcaaaaaggatgaccccccccttagggaaggccggggaccccctttgagtgtaagtgaaaacccctcttttggagacgataatgccatcatataatgataaaagggccaatccagcaagaggatataaaaattccaaatatgtatatatatgtacccagtagtggaatagatatattaaaaatgtca

SEQ ID NO: 49603 - DNA, 477 bp, Homo sapiens
aacccgaaataaagggaacaaaagctgggtgccgggccccccctcgagagtacttctagaattaattaaggcggggagggaaagcattaggagatatacccaatgtaaatgacgagttaatgggtgcagcacaccaacgtggcacatgtatatatatgtaacaaacctgcacgttgtgcacatgtaccctagaacttaaagtataataaaaataaaaaaattaaaattaaaaaataaaaaataaattttgatttagatcatagaaaacactactcttgtttatgacttaaagattatatagatcaggcttggtggctcatgcctgtaatccagcattttgggaggccgaggtgggtggatcacctgaggtgaagaattcgagaccagcctggccaacatggtggaaccccgtctctactaaaaatacaaaagttagccgggcatggtggtgcgcgcctatagtcccagctacttggg

SEQ ID NO: 49604 - DNA, 480 bp, Homo sapiens
tcactaaagggaacaaaagctgggtaccgggccccccctcgagagtacttctagaattaattaaggcgggcggatcactagttgacgaatttgaaacaaccctggccagcgtattgaaacccggtctctactcaaaatacatacgattaactgggcatggtgacgcacacctcatatcccagctatttctgaggctgatgcaggagaatagtttgagcctcgcacgcagaggttgcattgaactgaaataacgccattgcactccagactgggcaacagacagagactgcgtatccgataaaataaacttgaaagaattattgcccggctgacgctcacatgccaaaggaaaatctggttcttccctgagctggcctccgcgtgtttgcttatcatggtggtcaattggaggtgttaatttgaatggattaaggaacaccttgaacactggtaaggcattatttctgggacattatttct

SEQ ID NO: 49605 - DNA, 337 bp, Homo sapiens
aaagggaacaaaagctgggtaccgggccccccctcgagagtacttctagaattaattaaaaagtttcaaatctagacactaaatgtgtgtgaatgtacaaagaaaacaaaccattgcttatgctgttatatactaaagaaattttgttttgcttgctggtttaacttgacagatgaaggactttagttgaacttcatattgtaagaactgttaataaaggttgtcaagttaaaagccttataaaaactgtttgccaatgcaatcggggcccccccccgggggggacccccattcccctttttgggggttttttaagccccccccatgggccggtttt

SEQ ID NO: 49606 - DNA, 574 bp, Homo sapiens
  misc_feature 26: n = A,T,C or G
aagctgggtaccgggccccccctcgngggtacttctagaaattaattaaggcggggagcgggggagagagagagagagagagaattagaagaaaaaacatacttttagaagaaaaaagataaatttaaacctgaaaagtaggaagcaaaaaaaaaaaaaaaaaaaaaaaaaaaaaaagcggccgccaccgcggtggagctccaattcgccctatagtgagtcgtattacgcgcgctcactggccgtcgttttacaacgtcgtgactgggaaaaccctggcgttacccaacttaatcgccttgcagcacatccccctttcgcacagctggcgtaatagcgaagaggcccgcaccgatcgcccttcccaacagttgcgcagcctgaatggcgaatggaaattgtaagcgttaatattttgttaaaattcgcgttaaatttttgttaaatcagctcattttttaaccaataggccgaaatcggcaaaatcccttataaatcaaaagaatagaccgagatagggttgagtgttgttccagtttggaacaagagtccactattaaagaacgtggactcc

SEQ ID NO: 49607 - DNA, 618 bp, Homo sapiens
tcactaaagggaacacaagctgggtaccgggccccccctcgagagtacttctagaattaattaaggcgggtgatcagagagcatactctgtctgattttttaactatattaaaactttttttaatggcctaacgtaggtttatcctggacaatgttccatgtgcacttgagaaaaacatgtattctgctgctgttggagtagactataaatgtctagttgattctggtattttcaagtttaccattaccttgttatcttttaccggtttattatctaaaataaattgctgactggtggcttgtgcctataatcccaggactttggaagggctaggcgggcggactcattcctcctagaagtttaagaccaacctgagcatcgttgtgagaccctgtctttccgtgtcaacaagagcttaatgatctcaaagctgggacccccccgctcggtggccaactgttgaccgaagaagaaagcaacttaagactgccccctggactgtgaatcatcagtctaactgactgctgctataagtaagcacaaggaaagtgtgaaaacagaaagaaacctaaaacttgcattagagtggacacaagatgtttccgtacaagtaaaaa

SEQ ID NO: 49608 - DNA, 474 bp, Homo sapiens
tcactaaagggaacaaaagctgggtaccgggccccccctcgagagtacttctagaattaattaaggcgggatgttaagttgggtctgcccctactcagggttcctttagcttgatactgctggtcttttggactggcaaactctttgttgcattatagaatgttagccagcatctctgaggtctatccattacatactagtagcaccctggtccctaagttgtgacgactaacaatgtctctaagaccttgccaaatgtcccctgggagtgggggcagacccaacttaacatcctgccttctccatgaagactaatgttccagtccgcataattcatccgtcgcttatagatgatcccaactctggtctgtgtgtgtcttcattttgtctccccattcaagtttcactgttaaagaatgaggaccacattgtaatttctctttctccacaaagcaaatacttgtttgctgtatt

SEQ ID NO: 49609 - DNA, 484 bp, Homo sapiens
agggaacaccaagctgggtagccgggccccccctcgagagtacttctagaattaattaaggcgggggaggctcaatcttccatcattttccacaaatagaattgaacatatatccatctggaagttctaaaattagcaaaataagcacgttatttgtttttgaaatggactctcactatgtgccaaggctcaagtgcactgacgcgatctcagctcactgcaaagccgcttggaaacatatattaccggttttctgactcaagtctgcattcttgactccacactacataagtgcactatctgccgggccaggcacaccttcccctggaacccctaagggatttgaaaataaccaggggtgggtcttggcgtgccacaatgactgagatcctatgcctggccagtgacagaagtcttgacactgtactgcactaaactgcataatcaaaaaccattgccgtgatagggtatctaatccaaccat

SEQ ID NO: 49610 - DNA, 211 bp, Homo sapiens
ctcactaaagggaacaaaagctgggtaccgggccccccctcgagagtacttctagaattaattaaggcgggtgtgctcttttagctgttcttaggtagctcgtcagatttgatgatttcctagcaggacttacagaaataaagagctatcatgctgtggtttaaaaaaaaaaaaaaaaaaaaaaaaaaaaatgaaaataaacaaaaaaaaa

SEQ ID NO: 49611 - DNA, 575 bp, Homo sapiens
ttacaaccgggaataaagggaacaaaagctgggtagccgggccccccctcgagagtacttctagaattaattaagccgtcgttggctatgtggagatataaacctcccaatagagagtcgaatggcccgcactcactggccgaattggtacaacaatacagggaagaaatccgaaactatgcaatgttactaatcattcagctcatttctgagccttgaggcctgctcctgtgggaatgatacattaattcagactaatctttgggggctttattttgtaagttagaactttcaagggaaacatgttcaacactattattttgttataaatttataactttgttattacattgtgtaacaaaatataaggtttacgagctatgagaattggtgctatcaccattagctatttgctgtaatgtcaagaaaatgttcaccagatgcaagaatgtaccttttctttttaaaaagccaaatgtactttagacatgaatgcaactttttaaagaatagcttcatcaatggtattccttacatgtcataagattcttacttaaacttggtcttttttttaa

SEQ ID NO: 49612 - DNA, 440 bp, Homo sapiens
tcgttctacatggagggaacaaaagctgggtaccgggccctccctagagagtacttatagaattaattaaggcgggcctgtagtcccagctaatcggcaggctgaggcaggacaatcgattgaacccgggaggcagaggttgcagggagatcgtaccattgccagcccgggcaacaagatcaagactccatctcaaaaaaaaaaacgggaaaaaatggtttaggggggaaaaatcggttaaccccgggagtggagggcccccctgaatggtgtttttgcccctgttttccacccagggtgacgggggggttgttttaaaaaaaaaaaaaaagggggggccccggggtctcacggggggggaaaaggaacccctttttggccaactgggaaaaccccttttttttaaaaccaaaaattttccccgattggggggccccgcc

SEQ ID NO: 49613 - DNA, 459 bp, Homo sapiens
  misc_feature 403: n = A,T,C or G
ctgggtaccgggccccccctcgagagtacttctagaattaattaaggcgggtggatcacgaggtcaggagatcgagaccatcctggctaacatggtgaaaccccgtctctactaaaaatacaaaaaattagccaggcgtggtggcacgcacctgtcccagctactcagaaggctgaggcagaatggcatgaacccgggaggcggagcttgcagtgagctgagatggcaccactgcactccagcctgggtgacagagcgagactccatctcaaaaaagaaaaaaaagaactaataaccatttaatagcccatgtttttctatcagctccttccaccaacaagtttctgcaaatgacttaagacaactgtaggtctaaaatataaaagacccataaacaccaaanaaaaaaaaaaaaaaaaaaaaaaaaaagggaaaaaataaaaaaaaaaaaaaaaaaaa

SEQ ID NO: 49614 - DNA, 254 bp, Homo sapiens
ggccctccctcgagagtacttatagaattaattaaggcggggtaaaacaatctgactcaggtttttaaagtactgttgttttgctactgtgttggaattaaacaataatcatgcacaggcagaaggagaacaattaggagctctactggaatagtctaggcaagagatgatagtagcttggagtaggggaacagtagctgaggatgtaaagaagtggtcatatggccgggcgcggtggctcacacctgtaatac

SEQ ID NO: 49615 - DNA, 318 bp, Homo sapiens
ctcactaaagggaacaaaagctgggtaccgggccccccctcgagagtacttctagaattaattaaggcgggggagaatgttttcatgttacttatactaacattagttcttctatagggtgatagattggtccaattgggtgtgaggagttcagttatatgtttgggtttgacaggtagtgacgtgtagtttgacactgttaacttgttaaatacagtgaaaagtttgtgagtgaagaatgctgagaagattgtaatgctttgtacaaataaaagtcttgttaaaacaaaaaaaaaaataaaacaaaaaaaaaaaaaa

SEQ ID NO: 49616 - DNA, 591 bp, Homo sapiens
taaagggaacaaaagctgggtaccgggccccccctcgagagtacttctagaattaattaaggcggggcccagtgactgacacctgtaatctgattactatgggaggccaaggcataaggattgcttgagcccaaaaactcgacatcatcctggacaacatggcaaaatcctgtctctacaaaacatacaaaacttagctgggcgtggtggcatgtgcctgtggtcttagctacgcgggaagctgaggtgggaagaccacttcagcctgtgaggtggagactgcagtgagccaagatcacgcctctgcactccaacctgggtgacagagcgagattgcctctgattgaaactgatcctctggattctttttttgcgaaaaaaaaatgggagataaacagttatatgtgaatgtgtggcaatccaacatttgggtggggcatcattttttccaaaaaaataaaaaggcttctgttttcttcaaataaagaaaatggtgacaatttttaaaaaaaaaaaaaaaaattcccccaaaccaaaaaggggggaaaaaaaattcccccccccccccccgggggaccccccccccccccc

SEQ ID NO: 49617 - DNA, 526 bp, Homo sapiens
  misc_feature 466, 467, 468, 469, 470, 491: n = A,T,C or G
agggaacaaaagctgggtaccgggccccccctcgagagtacttctagaattaattaaggcgggcaaatgctcacaaagacctacgaagctgttatctctcatgtctgctttacctccaagcactgcacaagcaggaagaaaagaaaacagcaaagttgtaatctttctggctaagtaaacccaactgcaagaactagtagatttatatttgatgtgagcaggcatttgagaaaatctctgtcaaatagctagctcacatgaagctaataaagcagagatttttattgctaaacacgacaaaaggatgatattttaaaaataattttgaaaactcaccaaacaaacaagtaaaatttacaataagcaacaaaaaaaacccaacgggatgagagagaatattatttcagggttgttgtaatagaaaaagtctagttttcagcaacagcaatgaaatacaaagtgtgcnnnnnaaaaaaaaaaaaaaaaaaaanggggggcccccccccggggggggccccaaatcccc

SEQ ID NO: 49618 - DNA, 659 bp, Homo sapiens
cctaaataaagggaacaaaagctgggtaccgggccccccctcgagagtacttctagaattaattaaggcggggtgcagtggctcacggctgtaatcccagcacttcagaaggccaaggcaggcagatcatgaggtcaggagtttgataccggcctggccaacatggtgaaaccccatctatactaaaaatacaaaaatcagccaggcgtggtggcgggtgcctgtaatcccaactactcggaaggctgaggcatgagaatcacccgaaaccagaaggcagaggttggagtgagccgagatcgcactactgcactccagcctgggcaaaagagtgaaactccatctcaaaaaaagagaaagaaacagaaacttctccttatataggggttttcacattcttaggatttttctcctggtcgccccccgccaacaaattactgtcttcttgaagataagtttctccttgaaaaataaaagctcgtagaatttatccatataagaacaaaagattcaggcagtatctaacctagtaggttactatgctatcgctacatctgtttgtctacgacaaaatccttacttaattctaacaataacttgagtttttcagaaatgcataatagaaaatattctattattctaaataatttaaatattat

SEQ ID NO: 49619 - DNA, 293 bp, Homo sapiens
gggtagccgggccccccctcgagagtacttatagaattaattaaggcggggggaggtgtattgaagtcctccagacaaccctcagatttgatgatttcctagtagaactcacagaaataaagagctgttatactgtgaaaaaaaaaaaaaaaataggagatgctataataagaataaaatactgcaagccaagagagcattgacaaagtcttaggaatcttaactatcataaatttcagcaagaagcagttctctaatttagttaaaaaaaaaaaaaaaaaaggggccgcccc

SEQ ID NO: 49620 - DNA, 343 bp, Homo sapiens
  misc_feature 287, 288: n = A,T,C or G
aatcactgcagtctgtcactccttggatgttatggataacaggactgaccatctttacctggtcctggaactgaaaaactgtaacttgtgtgaaaatgagcctttggaccagtctttattaaaacaaacaaacatgagtagtctgcatatcgaatatctagagctctaaaccccccaatacttaaaagtctaattgctgtcctgtggtttcattagtctgataggaagatagggatttcctcagtcacagatgatattttgaaggaaagctgcaataaagccaaaannaaaaaaaaaaaaaaaaaaaaaagggcgccccccccggggggggccccaaattccc

SEQ ID NO: 49621 - DNA, 502 bp, Homo sapiens
aaccctcactaaagggaacaaaagctgggtaccgggccccccctcgagagtacttctagaattaattaaagcgggagtcgccaaactccaagccccaaatgtctaatagtgttatcttacgtataatgtgataaaggttaggtaaataaccgtagaggtcaatacatgatctacataaagtttatccaacttgataacaaaaaaaaggtaattttttttcgttattgcaataataacagtaataaaattttattactgttcggttcttctttgactgctaaaacacgaatgaacagttttccagtatcccccctccagccctttgacttaagatactttttaatcacaagtgaacagaaaagaacaatcaaaaaagccctacttattggtattagtgaagaaacaaagctacctgaattgggaattactttaaaactgcactgtagtgtattttagttacataaagtaattaaaattaatgtttagaaaaaagtcttagtcc

SEQ ID NO: 49622 - DNA, 380 bp, Homo sapiens
ctaaagggaacaaaagctgggtaccgggccccccctcgagagtacttctagaattaattaaggcggggagaagccttataaatgcaatgactgtggcaaagcttttaatcgtagctcaaggcttacccagcatcaaaaaattcacatgggatagaccacttacatataaatgtgtatatatgtgaataaacctatagccttaacgaaaaaaaaaaaaaaaaaaaaaaaaaaaaaaagggggcccccccccgggggggaccccaattcccccttttgggggggtttttcccccccccaatggggcggttttttaaaaagaaaacgggaaaaaattcccaaagggaaataaaatttgatttggatccaaaaaaataatccaa

SEQ ID NO: 49623 - DNA, 626 bp, Homo sapiens
taaccctcactaaagggaacaaaagctgggtaccgggccccccctcgagagtacttctagaattaattaaggcggggatgacagaccaccattggaaacaaggtggtttgactccagagcccgcaccctccaccacaacgcctcactgcttttctcttgcgctggaaagatctcatctctcactgggaggactcacctttctgtctgttccgctggtgatgatctggaactcctcagggtgatagcacacacactggaataaggtgttggctagtatcatctgattcctcctgagacgcctggaaagtagattcaaaagctgtgaaagtcgactttctcttccctaggaaatttattcactattcaagctggatttggtgcaagctgggatttgggttggtttatctccatgccaaacatctcatactgctcagcaaagtggtgcttgtatttcttcaaaacagacttcaggtcaccctgtcctctctacttctgtgtactccggttggcctatcagtgaccaccagaggacaatgggaagggccctttcctaaagacagagcacgaaactcaatgagaacccttaagttccagggaagaagaagcagaagaggctgaactcacag

SEQ ID NO: 49624 - DNA, 348 bp, Homo sapiens
ataaagggaacaaaagctgggtaccgggccccccctcgagagtacttctagaattaattaaggcgggagggattgcttaagcctgggaggcagaggttgcagtgagccgagattgcgccattgcactctagcctgtgtgacagagcaagaccctgtcccaaaaaaagaaaaagaaaataaaaaaaaaatgggggccccgccggggggggtcctattatccgggaaataggatgttgtaaaccccccctatcgtgccgtttttattaaaatatgtgggatttaaccgataatttaactttgacaaaattatgaaatggtttttctaataccttttttggggagaaaaaa

SEQ ID NO: 49625 - DNA, 470 bp, Homo sapiens
ctaaagggaacaaaagctgggtaccgggccccccctcgagagtacttctagaattaattaaggcgggcggatcacgaagtcagcagatcgagaccatcctggccaacatggtgaaaccccgtctctactaaaaaaaaaaaaaaaaaaattacccgggcttgggggggggggccatttttcccacctccttgggaggctgaggcaggaaaatggcgtgaacccaggaggcaaactttgcagggacccaaaattgccccattgcactccaccctgggcaaaaaagtgaaactccttttcaaaaaaaaaaaaaacgtttaaacttcccccccccccctggggtggtttttccccctttgggttggccctaaaaggggggggttaaaaattaaatggtaaaaatggttttaaaatttaaaccccccttttttggtcccaaaaattttttaaaaattttaaaaaaaaaaaaaaaa

SEQ ID NO: 49626 - DNA, 302 bp, Homo sapiens
  misc_feature 274, 275, 276: n = A,T,C or G
taagggaacaaagctgggtaccgggccccccctcgagagtacttctagaattaattaaggcggggtacacaagggtttctagcactgaggacaaaccctcctgcccacaggaagtgctttccagcagtctacgctgagagcagaaaggttttctggttttctgggcatgaaggggatatggaaaagtcacaaatagaataaagcaatagcaatacataaaaaaaaaaaaaaaaaaaaaaaaaaatttttaaaaaaaaaaaaaaaaaaaaaaaannngggggccccccccccggggggacccc

SEQ ID NO: 49627 - DNA, 463 bp, Homo sapiens
aaccctgaataaagggaacaaaagctgggtaccgggccccccctcgagagtacttctagaattaattaaggcgggcggatcatctgaggtcaggggatcaacaccagcctggccaacatggcgaaacccaggctctgttgaaaaatacaaaaattagaatccggcgcagtggcgcaaacctgtaatcccatctacttgggaggttgaggcaggagaatcgcttgaacccgggaggcggaggttgtaggtgagccaagatcgctccactgcactccaccctgggcaacagagcaagattccatctccatggaagaaaaaaagttaaaccaatgactgggggatgatgcggacaatcactgtcctccggttattgagagtgttttagccccccctgtttggggatgttgtttagggtatgctggtgggaaattgaaactgggaaagtagatgggtgaaagtactg

SEQ ID NO: 49628 - DNA, 508 bp, Homo sapiens
agcgcgcaattaaccctcactaaagggaacaaaagctgggtaccgggccccccctcgagagtacttctagaattaattaaggcgggctaatgacactatctgtgccaatgagttggaaatagagcgcctcaccatgagggtcaatgacttggttggaaccagtatgactgtcctacaggagcagcagcaaaaagaagaaaaattgagggaatctgaaaaactattagaggctctgcaggaagaaaagagagaattgaaggcagctcttcagtctcaagaaaatctcatacatgaggccagaatacaaaaggagaagttacaagaaaaagttaaggcaactaacactcaacatgctgtagaagctataagtttggaatctgtgagtgcaacgtgtaaacagctgagccaagaactaatgttaagtaaaaaaaggacaattctttgggcggtcgccaccgcggtggagctccaattcgccctatagtgagtcgtattacgcgcgctcact

SEQ ID NO: 49629 - DNA, 519 bp, Homo sapiens
tgctgggtgccgggccccccctcgagagtacttgtagaattaattaaggcggggggggggacgagcgccgggttccgtccaagccctgttgaagcaggaaacccctacgactctcggcgaagaacgtctctcatcagagactcttaatagcagagttgaccaagcagaagaattggcgagcttgacgacaggctatttgaaatatccactcagagataataaaagaaaaagcttgaagcatgcctacaagatctagaaaatagcctcaaaagggcaaatctaagagttattggccagtagagagagagatagcagagtagaaagtttattcaaagggataatcacagagaacttcccaaacctagagaaagacatcaatattcaagaacaagaaagttatataaaaacaagcagatttaaaccttattaaataagactacctcaagacatttagtaatcaaacttcaaaaggttgagaatacagaagggatcctaaaagaagcaggagaataaaaccaa

SEQ ID NO: 49630 - DNA, 268 bp, Homo sapiens
gggccccccctcgagagtacttctagaattaattaaggcgggtgaagggtctggcatctcattgtccaggtgcagtgttctggtgagtttcagatccttcatactatctgggagagctaatgatttgtttcctaagaaaggaactcagataagacaaatataactttctcaagttttaagattggaggggggaatcactttctaggtttattcaaaagaaactataaacatcagttctatgagacaaatgggctagttcaaaatcatt

SEQ ID NO: 49631 - DNA, 248 bp, Homo sapiens
ggaaaaaaaggattctaaattggaaagaaacaattcaaattatctctgccaatgatataatctcatatgtagaaaggcctaaagattccacaaaaaaaagtagcactaataaatttagcaacatagcaggatacaaggtcaacacacaaaaatagttgcattttcatacactcacaatgaacaattcgaaaaggaaatcaggaaaacaattccattgacaatagcatcaaaaaatatttaggaattaa

SEQ ID NO: 49632 - DNA, 509 bp, Homo sapiens
aaccctaactaaagggaacaaaagctgggtaccgggccccccctcgagagtacttctagaattaattaaggcgggcatggctgacgggatggatgacctgctgtagcttggtcctgggtatcaaacgactctggatttttagggctcatactatcctccgcggtcatgctccaaaaaattcactgctttgtggcgcgacccttaagtattctgcattttcagctgtggagcccttacatacgccatttgccttggcttccttgggaaagaagtcctgctggtagtcagggttgtccaggctaatttggcggctgcctttctaggcccaaagagcagggctggctaatgtgctgtagacacatgtggactggacatagttgagatactctaggttgcccactgcattgctgaaggggtcctggccttaccgctctgggctggactaacgggtggcgcttcaatccctcatggcaccgaccccactctggtgcgggccgtcttcttccccc

SEQ ID NO: 49633 - DNA, 452 bp, Homo sapiens
aaagggaacaaaagctgggtaccgggccccccctcgagagtacttctagaattaattaaggcggggggcaagcacccaggactgatgaggtcttaacaaaaaccagtgtggcgaaaaaaaaaaaaaaaaaaaaaaattttcttaaccccccccccccaaaaaacccttttttttttaaaaaaattttttttggggcccgttttgggaaatttgggccaattaaaaaattttggggggcttttctttatttttttttacaaaaaaaaaaaggggggccccaaaattttttttttttttggggactcttttttaaaaaataattcccccaaggggattttagggaatttgggggcccccccccctttgggggggggggccttttcaaaaaaattttttttcccgggaagcacaatttttttccaccttgggggggggaaaaattttttggcccc

SEQ ID NO: 49634 - DNA, 504 bp, Homo sapiens
  misc_feature 417, 418, 419, 420, 421: n = A,T,C or G
ctaaagggaacaaaagctgggtaccgggccccccctcgagagtacttctagaattaattaaggcgggaggcaaacaggttcctgggtggaaagggattagtcccacgtgaagccccaccttcaaggtagagacggcctgaagcctggtggccgggctgtcagatccaggtggagtgggaactcatggtgctttttaccagcctgcccatggctgcccatggatgaatcagcacgtactttctcccttctgagaccgtaaaatccccgaaaccagccaaactcacatagacatcaggatgacttgcctgtggaaaggagctacccattctggttctccgctccactgagagctgcactcatcacgacaactcaaaatattaaacacaaactaccacctacctccctcaccaaagcccnnnnnaaaaaaaaaaaaaaaaaaaaagggggggcccccccccgggggggacccccattcccccttatagggggggttttacccccccc

SEQ ID NO: 49635 - DNA, 398 bp, Homo sapiens
  misc_feature 331: n = A,T,C or G
aaagggaacaaaagctgggtaccgggccccccctcgagagtacttctagaattaattaagacggggataataagcaaatatgtacaccaataggccaaggcagtaataaacaactacttgaaatctacaaagatacaaaagatgcaaatgacttttatgccaagtatggtttttttccttaatgaaaccatgtggttctaacttaccataggccagcagtcgcatagagggtgctgtctcacctgggtttatactcttcaaaccttcactggcttttctaaaataaaaccacacatgtaattaagaaaaaaaaaaaaaaaaaaaaaaaaanggggggccccccccgggggggacccccattcccccttaaagggggtttttaaccccccccccctggg

SEQ ID NO: 49636 - DNA, 409 bp, Homo sapiens
  misc_feature 306, 307, 308, 310: n = A,T,C or G
gaacaaaagctgggtaccgggccccccctcgagagtacttctagaattaattaaggcgggacaaaagaaggtttgttaacaagtagtgctcactttgtgaacagatttcagacaggaaacaaaggttttacaaaataaaatagaaataatttttttaaaaacaaaatcaaaacatttaacggatctcttgcacccatcccaacatcagaggaagtgtagctgaaaactgatagagtgttaaacacacagcttgtttcaaggggaattctagttccctaattcagaacagttcaagttaaacatctnnnanaaaaaaaaaaaaaaaaaaaaaaaaaaaggggccccccccgggggggaccccaatttccccttttagggggttttttaaccccccctcttgggccgtttt

SEQ ID NO: 49637 - DNA, 506 bp, Homo sapiens
gcgcgcaattaaccctcactaaagggaacaaaagctgggtaccgggccccccctcgagagtacttctagaattaattaaggcggggaagaacacactgttttcctactgttgagatcattagtttccatgaaaagttcaggggaaataaatactgaactctgaatgaaatagcaagttatataaatcttgaaaaataaatattacctaggttaacactagacttaaccacaagagatttcaatcatgaaacctgacataacctagttgacaagtatagcttaagcaagtaagacctcattgctgatggagaagaccccttttcctttgcttgtctgttttgcaaaattcatttttccttcatgagagtaaaaacaatttaggggttattgcagatgtccaaatgcagccagcaattttaaagtcattgatgataccgtcagttatcacactcctacaccagcaatgaaaatactgtatacatagtattacatatatccactcttct

SEQ ID NO: 49638 - DNA, 643 bp, Homo sapiens
  misc_feature 596: n = A,T,C or G
aaagggaacaaaagctgggtaccgggccccccctcgagagtacttctagaattaattaaaaatttaagaaacccttaaactaaatttaaacttgataaagaattagcatctttacaacataattttctgaatcaggacactgctactccgatttaaaaagatgtatcctttggtaaaactttagtttttaaaattaaggccaagtcttttcacactgtatttttgtccttcttttttctgttcagtggatgcctggactttggccttttctcctgattcccagtatctggccacaggaactcatgtcgggaaagtgaacatttttggtgtggaaagtgggaaaaaggaatattctttggacacgagaggaaaattcattcttagtattgcatatagtcctgatgggaaatacctagccagtggagccatagatggaatcatcaatatttttgatattgcaactggaaaacttctgcataccctggaaggccatgccatgcccattcgctccttgaccttttccccggactcccagctccttgtcactgcttcagatgatggctacatcaagatctatgatgtacaacatgccaatntggctggcacgctgaacggccatgcctcctgggtgctgaacgttgca

SEQ ID NO: 49639 - DNA, 558 bp, Homo sapiens
taaccctcactaaagggaacaaaagctgggtaccgggccccccctcgagagtacttctagaattaattaaggcgggcacaattatggcaagaggggtgtagctgaaaaccatagagagtgagaaatacaggcagtaagattctcagagccatgtttgcgtatctacattgcctgtactttatggaattctggttcttggtgatatttggagttcagatagtggatttatagtgagaaagaggattttgaatatagagatagtagaactagggaatgattttttaaaaataaaaggtaaagaacagaataggccgggtgcagtggctcatgcctataatcccagtgctttgggaggcccaagagggggaattgcttgaggccaggagtttgagacagcctggccaacataaagagaccccatctctacaaaagttaaaatttaaaaattagctggtcgtggtggtgcatgtctgtaatcccagcaactcagaaggctgaaacaggaggatcacttgacaccaggatttcaaggttgcagtgaactgtgattataccact

SEQ ID NO: 49640 - DNA, 324 bp, Homo sapiens
aagctgggtaccgggccccccctcgagagtcttctagaattaattaaggcgggaggactaagcagcatccctaaatctagtagaagaggaacataggtatctatatattagggagattatgaataaaattgtgacttgtgttttagaacaagaattttacatgaatagcatttgttgctgttgataattatgtttaaataaataatccttctaagtcaaaaaaaaaaaaaaaaaaaaaaaaaaggggggcccccccccggggggggcccccattccccctttaggggggtttttttccccccccctttgggccgtttttaaaaa

SEQ ID NO: 49641 - DNA, 599 bp, Homo sapiens
  misc_feature 522, 523, 524, 525, 526, 527: n = A,T,C or G
cactaaagggaacaaaagctgggtaccgggccccccctcgagagtacttctagaattaattaaggcgggggaaacctggatacatgtattaacagatataaatatgtgacaaacctatcctttgctgcttctttattggtgtaggaatgtcttcctttaagtaaacctttaatacatgattttaaacttatagaagaaaaagatactaatccacttcagataatttaaagaattaaattatgaaaaaaagaaattcagattggaattgcctagtggtagaattttatagcttatctctactagacaaataagaaaagaaaggaagagagaagaagaaatgaaagaaggaatgtgatgttctaggagtagatttatattgtagaatccagaaggacataacagtaaaagtaactcctggaaaggaatgtgattctctatatcttagccctttaaaatctatcataccaaacatgagttgacatcagaactttttcacaaaaaaataaaaataaaaaaatgttnnnnnnaaaaaaaaaaaaaaaaaaaaaaaaaagcggccgccaccgcggtggagctccaattcgccctatagtgagtcg

SEQ ID NO: 49642 - DNA, 346 bp, Homo sapiens
tgctgggtgccgggccccccctcgagagtacttctagaatcaattgcgggcggggagctcttctctagatgttaacaaaattaccaagtttagatgctagagcactcctgcagagcccaagtgtactatgctcctttcctgtggctaaaaactacggccctcccatatcaaaagactgggttttgtcttttgttaccatgcacttactataatgactgtacaactagacttgaatataaatctaacagtgtaatcacattgctttacaaattccatgctcaggctgttggtaagatgccttatttgtatatgaggttgctcaaaggtgatttcttttttttttaac

SEQ ID NO: 49643 - DNA, 502 bp, Homo sapiens
  misc_feature 424, 425, 428: n = A,T,C or G
gcgcgcaattaaccctcactaaagggaacaaaagctgggtaccgggccccccctcgagagtacttctagaattaattaaggcgggggtgatgaaaaaggaacatttatacactgctggtgggaatgtaaattagtacagcatttatggaaaacattttgttatgggataaatatttttgtctcctcaaaattgttattttgaagccctaaacctctgtgaggctgaatttggaggtggagactttaaggaagtaattaaggttaaataaagtcataagggtgggtcctgatcacataggatttttgtccttttaagaagagacacccccagcactttgggaggctgaggtgggagaatcatgaggtcaggagatcgagaccatcctggctaacacggtgaaaccctgtctctactaaaaatccnnaanaaaaaaaaaaaaaaaaaaaaaaggcggccgccaccgcggtggagctccaattcgccctatagtgagtcgtatta

SEQ ID NO: 49644 - DNA, 541 bp, Homo sapiens
aagggaaacaaagctgggtgccgggccccccctcgagagtcttctagaattaattaaggcggggtagaccaaaatgtgaatgtcatatgaaagagtttaaacattgcccttgaaatatgacagaaagtatcagaaataattataccattccatgctcacaggccagtgggaattctcacagtaagcattttgtccagagaatattcttcttagggaactataacattccaatgataatggtagtcagccatgtggctggatcatcgttcctgtatcctggtctctatgacttagtgtggtgatggtgtcattgtgtccaagtgtgacagaattgttagtgtgtagtgtctgtctcctatctcaggctcacagtcccttttataaacatgcctggattgatgatggcttcagtatcttttggaaatctggactgagcaatagaattgcttctctcaaattgatttcaagtcatataaaaggccatgttacacatatattgttaatctgagggaagctgtgatcatttaagttgtattttata

SEQ ID NO: 49645 - DNA, 469 bp, Homo sapiens
ttaaccctcactaaagggaacaaaagctgggtaccgggccccccctcgagagtacttctagaattaattaaggcgggggagtaaaggtaagatagaaaactaaaatataaaatataaaccacataaccataagtgttttattttaggttcaactactgttttctgtttggtgaggaaacaaaagtcagggcaagagggtgccaataaggagaaagcagaagggacaagaaattggaggcttctgtaacaaagaacaaaaaaaaaaaaaaaaaaaaaaaaaaaaaagcggccgccaccgcggtggagctccaattcgccctatagtgagtcgtattacgcgcgctcactggccgtcgttttacaacgtcgtgactgggaaaaccctggcgttacccaacttaatcgccttgcagcacatccccctttcgccagctggcgtaatagcgaagaggcccgcaccgatcgccct

SEQ ID NO: 49646 - DNA, 493 bp, Homo sapiens
gcgcgcaattaaccctcactaaagggaacaaaagctgggtaccgggccccccctcgagagtacttctagaattaattaaggcgggtgcctgtagtcccagctactggggaggctgaggcaggagaacggtgtgaacctgggaggcggcatttgcggtgagctgagattgcgccactgcactacagcctgggtgacagagcgagactccatctcagaaaagaaaaaaagaaagaaagaaaaagaagggaaattcccaatcagtgaaagaaaaaccccactgaaacagcagcaaaaaggacaaaatacctcagacgaaacattacaaaaaatgtacaagacttttaagaggaaaacttaaaaacactactaaaggttataaacaaaaagagatgctatgttctcggataggaagatttaatatcataaagacataaatttgttaatttaaaactaggccaatttaaacagaaagttttgtttttaacccagccaa

SEQ ID NO: 49647 - DNA, 436 bp, Homo sapiens
  misc_feature 322, 351: n = A,T,C or G
ttacaccccgaaataaggggaaccattgctgggtgccgggccccccctcgagagtacttctagaattaattaaggcggggggtaaaaatgaagcagaagccccaaagttcacattaactcaggcatttcatttattttttccttttcttcttggttggttctttgttctgtcccccatgctctgatgcagtgccctagaaggggaaagaattaatgctctaacgtgataaacctgctccaaggcagtggaaataaaaagaaggaaaaaaaagaaaaaaaaaaaaaaaaaaaaaaaaaaaaaaaaaaaaaaaaaaaaaaaaanaaaaaaaaaaaaaaaaaaaaaaaaaaaanaaaacccccccccccccgggggggaccccccccccccttaaagagggggtttccccccccccccccgggggggtttttaaaaaaa

SEQ ID NO: 49648 - DNA, 499 bp, Homo sapiens
agcgcgcaattaaccctcactaaagggaacaaaagctgggtaccgggccccccctcgagagtacttctagaattaattaaggcgggaacagctaaataggttgttgttgatttggttaaaaaatagtagagggatgatgctaataattaggctggaagtggcagtgaaaaatatgttgggtgttcattttagtgactgtaattaatatcttgctggattaatgttttgtacaattactaaattgtatacattttgttatagaatacttttttctagtttcagtaaataatgaaaaggaagttaataccaaaaaaaaaaaaaaaggaggacgtcacttataggcggccgccaccgcggcggagctccaattcgccctatagtgagtcgtattacgcgcgctcactggccgtcgttttacaacgtcgtgactgggaaaaccctggcgttacccaacttaatcgccttgcagcacatgcccctttcgccagctggcgtaata

SEQ ID NO: 49649 - DNA, 625 bp, Homo sapiens; identical to SEQ ID NO: 48809

SEQ ID NO: 49650 - DNA, 374 bp, Homo sapiens
  misc_feature 308, 311, 313, 316, 317, 319: n = A,T,C or G
accctactaaagggaacaaaagctgggtaccgggccccccctcgagagtacttctagaattaattaaggcgggccaggtgttccatttagagggcatacctcaagttttccagagacaccacctggccagcctcattcaagttacctgcttagggtttaacaaaccctcctcacaaggaaaaggaaataaatagcaaagcaaaaaaaaaaaaaaaaaaaaaaaaaagggggcccccccccggggggggccccaattcccccctaagggggggtttttacccccccccccgggggcggtttaaaaaaanaanancannancgtaggtttccactttaagaaagtgggaaagtattattctttttaaacccaaaag

SEQ ID NO: 49651 - DNA, 505 bp, Homo sapiens
cgcgcaattaaccctcactaaagggaacaaaagctgggtaccgggccccccctcgagagtacttctagaattaattaaggcgggagaattgcttgaacccagcaggcagaggttgcagtgagctgagatcatgccattgcactccaacctgagcgacaaagattccatctcaaaaaaaaaagacaatgtgattccattttccactggattaaaagtaaaaattttataaaactaatgttcataaaattaatataaaataaaatgttatattcagcaatggtaagaatatggagaaaccagtatcttcatacttcatagaagtataaatcagttcagtcttgggcaaattatttaagtttattcaatccaagtttaagtttgctcaaactttgactcagtaattccatttctaggagttatggcactgttgcacatgtgcacaaagacatatgtacatgaatgtgtacagcagtgtcttttgtaaacaaatgtctatgtccaccaa

SEQ ID NO: 49652 - DNA, 473 bp, Homo sapiens
ccctcactgaagggaacaaaagctgggtaccgggccccccctcgagagtacttctagaattaattaaggcgggagggtgcccttccaatagtctattaggagggaagcgacggctggcagtaaaagtaacatcctggacctgcctctagtcattcatgttgtaccacaagagcaaaactgtctccaatgcctacttctgtacaggaaacccatcaagcatagcataggctttaaccacactcagtattttgcacttataatctatatatatgtgcagcttgatctatttttattcacgatatttttttctctttttatatgttaatatgacacaatcgtgtttagaccagaaaggatggtaactggaaataacactgccttaaacatacactcatattccagaattccatatgcacatcagaaatgtttcccgaatttaaatgaattcaatcatttagaaaatgcattgatgc

SEQ ID NO: 49653 - DNA, 368 bp, Homo sapiens
cgccaagcgcgcaattaaccctcactaaagggaacaaaagctgggtaccgggccccccctcgagagtacttctagaattaattaaggcgggggagatgatacagggaatactatctatccaatgaactgaacaagatccctaaactaagcattgaatagagatgcttattattgatgaggtactatccagagctcatgcttagaacaaatgcatctttgcgtatcctaaacttaacaatgcatcagtttctgctaccacagaatcaggttttccgtagtagataaagactctctggtgctttaaattctgattaagtgttttgactcattaacttctactctttatattactgcctttgcctggcttg

SEQ ID NO: 49654 - DNA, 481 bp, Homo sapiens
  misc_feature 438, 439, 440, 456, 457, 458, 459, 460, 461: n = A,T,C or G
ctaaagggaacaaaagctgggtaccgggccccccctcgagagtacttctagaattaattaaattagaaataaaaaaagaaaacaataaaatatctagaaaagaccagttggaaactacacaacaaacttaatacctcatggttgaaagtcatgaaattttaaaataattaaattaagttatgcagtatattgaaatttatgaaactgattaaatgaaaatacaatatattgacatttataatatgagccagagagaagcttagcagaaattttgagcttttaatcctaaattagaaggaagaagaaaggtttaagatcaatagcgtaggtttccactttaagaaagtgggaaagtataatcattttaaacccaaaagcagtaaaaaaagaaaacaaataacaaaggcagaaaactgtgaaataaaaacaaactacaannnaaaaaaaaaaaaaaannnnnngggggcccccccccgggggg

SEQ ID NO: 49655 - DNA, 270 bp, Homo sapiens
aaggaaacaaaactgggtaccgggccccccctcgagagtcttctagaattaattaaggcgggtgcttactatcatccctttctcactgctattttataatattaattttatatattactaattaaaaactatataattatatacataattaatttttttctggttcttcaaaatatttgactaaataatttagaggtctcaaataaaaatggtaattttaagaccactgtgatcaaattctggaaatttttaaagatctaagaacttttt

SEQ ID NO: 49656 - DNA, 591 bp, Homo sapiens
actgattgcccgccacttcttcctacataaagggaacacaagctgggtaccgggccctccctagagagtacttatagaattaatgaaggcggggagaagatagggaacactcattcctggtcgtctatcaccagcgtgtgtttaacattcacagcccacaaccacaaatgtttctgggagagcctggcaaggcattcctcatcaccatcgtgtttgcacaggttaaaacaaaaacataaaaccccatatatattaaacaaaatagaaccttatcccccagaaactaattataattgaaaataatcaatcccgcccccccccagggggagtcccctgatcccttttgaatggcgtgtactcccccctcccgttgttcacatttgccttccagaatgtgttcaaaagaaagacaagaaggagtgtatggcttataaagtgaatctaatacagtatttgttgcatttaaacaagctagacattttcttacggaaaaattatgaaatacagcatattttatgttctcccattgactcaatcatgacaatatttatgctttaacaccatctttcatgattagaaatgtttgatatt

SEQ ID NO: 49657 - DNA, 572 bp, Homo sapiens
aagggtaacaaagctgggtgccgggccccccctcgagagtacttctagaattaattaaggcgggagctggtcatttgaaaagacattgaaattaatctctggcaagacaagaaaaaaagaaaagccataaattaccaatattataaatgaaatgagatgttactacagaccctgcagatataaaaatattaatataggaatactatgaacaactctacacatgcatacatttgattgtttagatgacgtgaagaaattctcgaaagacacaaactaccacaactcacccagtatgaaatagattatttgaatagccctataaatattaaggaaattgaattattgatttatagaacattccccttctcccaaatatgtaagcccagatgattttactagagagaattctaccacacatttaaggaacaattaacagcgattctatacaatctctttcagaaaataagaggagggaagacttctcaattcattttttgaagctagtaataccctagtatctaaactagacaaagacagtaaaaaaaacgaaaaaaaaaaaaaaaaaaaaaaaa

SEQ ID NO: 49658 - DNA, 448 bp, Homo sapiens
ataaagggaacacatgctgggtaccgggccccccctcgagagtacttctagaattaattaaggcgggaaggaaggataaactgtctattaacagataaatatttggtcatgtccataatgatcatttacatgttttctttttttttttctttttctttttttaaaaaataaaaacaaggtcccactatgttgcccaggctagtcttgaactcctgacctcaagtgatcctcccatctcaccctcccaaagtgctaggattataggcttgacccaccaaacctggccactacaaatttttcatcctatacaagggctatatggtcaatttaaaaatatgacaaatgtggcatatcgcacactactgtgatacaccaaaaagctagattaacactctgtcccaaaaaaaaaaaaaaagggccccccccccggggggaccccaatttcccc

SEQ ID NO: 49659 - DNA, 559 bp, Homo sapiens
ctaaagggaacaaaagctgggtaccgggccccccctcgagagtacttctagaattaattaaggcgggaaggaccctgggcctttgctgacataccagccccagactacttaaattcagcttttttttttaatgtgagaaaataaatgcacccctctctggtttaaaaaaaaaaaaaaaaaaaaaaaaaaaaaaaaaaaaaaaaaaaaaaaaaaaaaaaaaaaaaaaaaaaaaaaaagcggccgccaccgcgggggagctccaattcgccctatagggagtcgaattacccccgctcactggccgtcgtttaacaacgtcgtgactgggaaaaccctggcgttacccaacttaatcgccttgcagaaaatccccctttcgccagctggcgtaatagcaaaaaggcccgcaccgatcgcccttccaaacagttgcgcaccctgaatggcaaatggaaattgtaagcgttaatattttgttaaaattcgcgttaaatttttgttaaatcagctcattttttaaccaataggccgaaatcggcaaaatcccttataaatcaaa

SEQ ID NO: 49660 - DNA, 421 bp, Homo sapiens
ccccccctcgagagtacttctagaattaattaaggcggggatactgatgcacaaatcctgtaccgtgtattaaaggaagaggaaatggcgtggaatcactgcctcctgtgatttgaaggccattgtgaaggaaaacaatgcagtgaaagaaagttcttcatattaggacagatatcattgcatcacatatatttatctttctggggatttgtatggcccttaataaaaaatgttgaaataaaggccggggcaaacctcctaatgaaaggaaagcaagccaagatggatatttacgacactcaaaccttgggggttgtggtttttggaggatccccggctgttggtgccattggcatcttcctggtgtggactttctccctcccccgacacgtcctatgtaaaaaaccctagccaaccagcg

SEQ ID NO: 49661 - DNA, 493 bp, Homo sapiens
  misc_feature 309: n = A,T,C or G
ccctcactaaagggaacaaaagctgggtaccgggccccccctcgagagtacttctagaattaattaatacattagtgcagaaactggtgaaatctaaactaaactaactggagattagttaataaagctggagtggctatctgaataacagagaaagtatactttagaacaaaaaatattatcacagataaagagggtaatttcataaggggatcaattcacaaagaagacataatattaactgtgtgtgcactggtaacaacagagctttagaacacaaaatgatgtaactaaaaacttttgccaccnaaaaaaaaaaaaatataaaaaagcggccgccaccgcggtggagctccaattcgccctatagtgagtcgtattacgcgcgctcactggccgtcgttttacaacgtcgtgactgggaaaaccctggcgttacccaacttaatcgccttgcagcacatccccctttcgccagctggcgtaatagcga

SEQ ID NO: 49662 - DNA, 449 bp, Homo sapiens
caaccctcactaaagggaacaaaagctgggtaccgggccccccctcgagagtacttctagaattaattaaggcgggcgtggtggcgggtgcctgtagtcccagctactcgggaggctgaggcaggagaatggtgtgaacctgggaggcggaacttggagtgagccgagatcgcgccactgcactctggcctaggcaacagagcaagactctgtctcaaaaaaaaaaaccaaaaaccaaaaccaaaacccttaaggctcctacatactattaagtaccatttttatgaaaaataattttccacccaggcaagggggctcatgcctgtaatcccagctttttgggaggccgaggcggccggttcacaaggtcaggaaatcgaaaccatcctggctaacacggggaaaccccgtctttcctaaaattccaaaaatttacccaggcttggcgg

SEQ ID NO: 49663 - DNA, 496 bp, Homo sapiens
  misc_feature 421: n = A,T,C or G
aaccctaactaaagggaacaaaagctgggtaccgggccccccctcgagagtacttctagaattaattaacaaataataatcatacatattcatggggtagataatgttctgatacatataatgtacagaaatcaaatcaaggtaattaacatatccattatctaaatatttatcatttctttgcgttaggaatgttcagtatcttccttccagctatttgaaactatatagtattgttaactacagtcatcctacagtggtatagaacactagaacttatttcttctatctagctgaaattttgtatccttcaacaaatttctccctatcccttccttcctcctacccttcccagcctctattatctatccccgccttaattaaggcggggcagaacgtgagggctgggcggagggcttanggatgagaaacatgtccggaaggccgggggcaggacttaatcagaaactaaaatcactggccgggcacagtggct

SEQ ID NO: 49664 - DNA, 490 bp, Homo sapiens
gcgcgcaattaaccctcactaaagggaacaaaagctgggtaccgggccccccctcgagagtacttctagaattaattaaagcgggtctagaaatacaggccgcggcgcttacctctcacactcgcgaaacaccccaataggtcaatctgtctgtcctgccttggcctcccaaagtgcgaggattacaggtgtgagccactgtgtctggccagttttaacttttatgtttaggtctttgatccatttcaaattaattttgaatattgtataagttagggggttgagtttaactttttcccatatgggtatcagttatttctgtaccttttgttgaaaagactttttaaaaaaaataatgtgggtctattctatttcattgatccgttgattctaatattagagtcacactgtcttgattactgagactgtagaatagatctttttctttctttttgagacagagtcttgctctgatgcctaggctggagtg

SEQ ID NO: 49665 - DNA, 513 bp, Homo sapiens
ctaaagggaacaaaagctgggtaccgggccccccctcgagagtacttctagaattaattaatgtgggcttcactcacggactgacaatgcataccatcacccacactggatagtttccaaacactttatataatatgtggatcaaaccatgcatcttagtagaaacttatgacacttagaatgaagaagaaaagcaaatttctaacatatgctatgaagtagtcagaaggaattgtctagcttaaatgcttatatcattgcaaatgctgacaatatggtcgaggattataaacttaggaaatgtaaaaaacaaatacctataaggttttaaatgcaaagtttttaccatctaccaaactgccaagtaacagaagatgaaactcttgtataaaaacttttctagagattttacatatatataaaattatttactctccagcttattttaagaggctagtaaaacctttaaaccaaaatcagaaaagcatagttaaaaaaagaaattactggcca

SEQ ID NO: 49666 - DNA, 335 bp, Homo sapiens
aagctgggtaccgggccccccctctagagtacttctagaattaattaaggcggggtatgtgtgtgcatgtggtttgcagtcaccgcatgtttagttttgttaggtttaattcactagctttcctactgcacaaatggcttccaggatttcttctacttcccattgtgccgattcgctcagtgctctgtactcactaatgaactgtaaattataaatgtgccatgtgctctccccctactgtgagaagaacatatttgagaaatctcagctacatcatttgaactgcaatttgaaaggatgttttggaatgtgtcaacaaaacaaatggtttggct

SEQ ID NO: 49667 - DNA, 463 bp, Homo sapiens
taaagggaacaaaagctgggtaccgggccccccctcgagagtacttctagaattaattaaggcggggtaccctagggattcatctgttttcttcacttccctttgcatctgagatcctgctggaaaccacagcaacctgtatccactattaggaggtaaaaatcaataaaatggcccattcatttgtgttgttaaaaaaaaaaaaagaaatataaaaaaaaaaaaaaaaaaaaaaataacaaaaatactccaaacagtatctgaagtgttacatgaaaaaaaagattgtttgctcaaaaaagcttggaaaatactacacacttcctttctccctctggagatgaacccacattaaagtgtctaaagactcctgagaattcccgccccagtaaacaaaactaacgtaatctaccatttcctacactatttgagcatggaaatcatagtccccactctgtgaaaa

SEQ ID NO: 49668 - DNA, 314 bp, Homo sapiens
  misc_feature 303: n = A,T,C or G
ggaaacaaaagctgggtaccgggccccccctcggagtacttctagaattaattaaggcggggggactgttgggaaggtacagaaacccctgaaaacccatcagatctcgtgagacttattcactatcatgagaatagcacgggaaagacccgcccctatgattgcagttacctccccctgagtccctcccacaacacgtgggtattctgggagatacaattcaagttgacatttcagtggggacacagtcaaaccgtataattccaccccggcccctccaaatctcatgtcctcacatttcanaactaactgta

SEQ ID NO: 49669 - DNA, 411 bp, Homo sapiens
  misc_feature 323: n = A,T,C or G
aaccctactaaagggaacaaaagctgggtaccgggccccccctcgagagtacttctagaattaattaaggagttttatacatctcatttcccctacctcacaataatctcatgtagatagtagtaatctccttttacagaaaagaaaactgaggctcaaagttgttggataacccgcctaggtaatcaagccagtaaatggcaaggccaagcttccaagccagctgtgacatagagtgcggcccttcagtagtagatcctggaggatcagatccttgctagtcacagttcctgattggcctcagtactatttgtaggaaaaanaaaaaaaaaaaaaaaaaaaaagggggcccccccccgggggggaccccaattcccccttaaggggggttttttacccccccccccgggc

SEQ ID NO: 49670 - DNA, 376 bp, Homo sapiens
cgcgcaattaactcctcactaaagggaacaaaagctgggtaccgggccccccctcgagagtacttctagaattaattaagcgggcgcccccgggggtggagcttccaattcgccctatagtgagtcgtattacgcgcgctcactggccgtcgttttacaacgtcgtgactgggaaaaaccctgccgttacccaacttaatcgccttgcagcacatcccccttttcccaactggcgtaatagcgaaaagggcccgcaccgatcgccctttccaacaattgcgcagcctgaatggcgaatggaaattgtaagcgttaatattttgataaaattcgcgttaaatttttgttaaatcagctcattttttaaccaataggc

SEQ ID NO: 49671 - DNA, 500 bp, Homo sapiens
ctaaagggaacaaaagctgggtaccgggccccccctcgagagtacttctagaattaattaaggcggggggctgtgtggcaatgttcagctctagaggcagtgaaaagatgggaacttagggtcaccaggctgaggaacccgatgaccatcttcctgtgtaacgttcagtctttcattgtagtgaggaggcatttctccactctttaatgactcttttaaatcattcaacagtcacttctacccagaagcagatgaaaggatgaaggggcacttttccctgggtcagcagaacagcaccttatcagcaccattatgtgatctgaagggactaggattaaaacccttaagcatcctgccctccagggaaatgtggaaacctgaagcagccccttataacagaaagactctagaaaagtaaagctggtttcagtgggatttctgtggttttctccattgatttttcatttccacctccaagagccttttattgccaagtatta

SEQ ID NO: 49672 - DNA, 309 bp, Homo sapiens
tgggtaccgggccccccctcgagagtacttctagaattaattaaggcggggctggagcgcaagacgtgctgacacagtgagttttctctgatgtatttaaggtgatgtatttgcttgagttactcctgtatcattgctcataatattggaaactaaaataaaacctagttggaaaaaaaaaaaaaaaaaaaaaaaaaaaaaaaaaaaaaaaaaaaaaaaaaaaaaaaaaaaaaaaaaaaaaaaaaaaacccccccccccccggggggcccccccccccccccaaaaaggggggaaaccccccccccccc

SEQ ID NO: 49673 - DNA, 582 bp, Homo sapiens
accctcactaaagggaacaaaagctgggtcccggcccccccctcgagagtacttctagaattaataagggcgggcgcctgtaatcccagctactagggaggctgaggcaggagaatcacttgaacatgggaggtggagtgagccaagatcatgccattgcactccggcctgggcaacaagagcgaaactcggtcttaaaaataaaaaaataaaacagcctcacaggtgtgctgaatcttgacctgagagtcaccaatccatctgtggaccagattcacctataagagtcaattttgcaattttccactgcctccaggtgtgacattcagagcttcagaagtaggttatgtttatgttaagggatgacaatatttactgttggctggttgcgcatatgagtataacaatgtcacctgtgtgctgggccatgtaagggcactcagtgtattacccgagggctttatacaatatacaggagagtcaaatccactctgagatctttgtgattgtataaaaccatgatcgtacctgcggccctaggcccaaactggggcaggtggatcatgaggtcagtagttcaag

SEQ ID NO: 49674 - DNA, 492 bp, Homo sapiens
cgcgcaattaaccctcactaaagggaacaaaagctgggtaccgggccccccctcgagagtacttctagaattaattaaggcaggattatgcattttttattcaaacatacctataaaaatattatttttacatttgaaaaaatattaaatttttaaataattacctttttgtctcgactcccagtgaagaaatacttgctgtcaggactccaatcacaagaccaaataattctactgtgcacagaagtaattttgttggtgaaggcaaaaagactaaaaactggctctgaaagaaatatgtatacactattcacaaagcagagaaagctgggtttttacctgttaggaagtgatgtttaagtgccatatacaccatatgacttaatattcaatttatatgcactgacttttgaaatagactgaagccaggcaaccaacccctcaccagaaggctgtggacacagctatttttctagtagggaatgcttttgt

SEQ ID NO: 49675 - DNA, 462 bp, Homo sapiens
aaagggaacaaaagctgggtaccgggccccccctcgagagtacttctagaattaattaaggcgggggattccaagctatagaaaaaacatgagtctagaatgacagagtgtgtcatcttcaaatgtgtattaatatatttcttgatgatgagaccaatatttctaagttaatggaactattttattacacctgataatcacagttcaattcttgtctgttgcagaattatctacctctttcaaactgtaaatgaaaataactgtgaaaaaaaggatgcagtactgataaaaacactgctttgtttttatctcacctcttttttaaggatatgattttataagaggcagttctcttttgcttttcaagacttctgtagagtttgtgttttttgtttttgtttttgtttttgtttttgtttttttacctaatgtgaatcttattttatctactcaacttcgttc

SEQ ID NO: 49676 - DNA, 510 bp, Homo sapiens
  misc_feature 428: n = A,T,C or G
actaaagggaacaaaagctgggtaccgggccccccctcgagagtacttctagaattaattaaccctaacacccaaaccaatgtttagaatagtgggcacttgatgcatacttgtttgaatgaatgagtgaatgaatgaatctgccaaatgaagggtgcagatgtaaatagatatttttttatagcatagatttttatttaacctttattgaaaaataaattttaagcttttcttcctactcgtttttgtttccacaaagagccattttacctctgtttggcagctagagtagggctggattgtctgctcaaggggaggggtgtttaaaaaaaaaaaacacacacagagcagtcttttgcagcaaagaaagttcaggtgattgctgggcatggtggctcccgccttaattaaggcgggggacgatggcnagaggggagggggagcgagttcgcatctctccttttcctggttagactctgttcaaccacattcttatgttggcagatctgc

SEQ ID NO: 49677 - DNA, 319 bp, Homo sapiens
  misc_feature 74, 75, 76, 88, 102, 104, 105, 107: n = A,T,C or G
aacaaaagctcggtgccgggccccccctcgagagtacttctagaattaattaaggcgggggagccaggcggccnnnggaaaaaaaaanctcactttttaggncnncntggaaggcatcctggaggtgcaggccaagaagaaaaccaacctacaatactacgcctagggcacacaggccagccccagtctcacggctgaagtgcgcaataaaagatggtttagggtccctacaaaaaaaaaaaaaaaaaaaaaaaaaaaaaaccccccccccccgggggggcccccacaaccccccataaaagaatatataccccccccc

SEQ ID NO: 49678 - DNA, 551 bp, Homo sapiens
  misc_feature 205: n = A,T,C or G
tccaagcgcgcaattaaccctcactaaagggaacaaaagctgggtaccgggccccccctcgaagtacttctagaataattaaaggcggtgggctcacccctggtattccaacactttggaaggctaaggcaggaggatcagtagagtccaggaatttgaaaacccccctgggcaacatagtggagacccctatcttctccaaaanaaaaaataaaaaaaaaaaaaaaaaaagcggccgccaccgcggtggagctccaattcgccctatagtgagtcgtattacgcgcgctcactggccgtcgttttacaacgttctgactgggaaaaccctggcgttacccaacttaatcgccttgcagcacatccccctttcgccagctggcgtaatagcgaaaaggcccgcaccgatcgcccttcccaacagttgcgcagcctgaatggcgaatggaaattgtaagcgttaatattttgttaaaattcgcgttaaatttttgttaaatcagctcattttttaaccaataggccgaaatcggcaaaatcccttataaatc

SEQ ID NO: 49679 - DNA, 445 bp, Homo sapiens
aagctgggtaccgggccccccctcgagagtacttctagaattaattaagggggaaaaatgactctaaaagggctgggaaggaggatgactaaaaagattgagaaacactaatctagcttattcttcctcctatctgtcaaactcggcttcactatcactttctttgttcccgtcaacactctttgctcaccttagactcctatgcttatttatcattcatatagtttaaatatttatttgtataattatttaatgcctacccttcttgtattctactatatccctagtgcctagcaatgccaggcacctataaaataataaatatttgctaaacaaataaataaatgagagttgaccagtcacggcagctcacacctgtaatcccagcactctgggaggccgaggcaggtagatttcttgagttcaggagttctgagaccagcct

SEQ ID NO: 49680 - DNA, 315 bp, Homo sapiens
  misc_feature 288, 290, 297, 299: n = A,T,C or G
ctcttcacaaagggaaacaaaactgggtaccgggccccccctcgagatacttctagaattaattaaggcgggcaggaggaagtagcgcttttgagtaggaatataccatttactgagtggcacatgaacagaatcttgtgaaaaattaaagtaagaaattaacctggaaaaaaaaaaaaaaaaaaaaaaaaaaaaaaaaaaaaaaaaaaaaaaaaaaaaaaaaaaaaaaaaaaaaaaaaaaaaaaaaaaaaaaaaaccccccccggaaagaaaaaaaaaaaaaaaaanancaaaaanangaaaaaaaaaaaaaag

SEQ ID NO: 49681 - DNA, 508 bp, Homo sapiens; identical to SEQ ID NO: 49520

SEQ ID NO: 49682 - DNA, 483 bp, Homo sapiens
cgcgcttttaaccctcactaaagggaacaaaagctgggtaccgggccccccctcgagagtacttctagaattaattaaggcgggaggcagaaggattagaatcagagaggacaaggcaacgtgtagattggagtgatgtggccacaagctaaggaatgctggaagtctttagaagctggaaaaggtgaggaacagattctccctaagtgcctccagaggaaccagccctgttgacaccttgattttagccccttaacactcactttggacttctgaccttcagaactgtaagataatatatttgtgttgttttaagccacaaatttgtaatagtttgttacagcagcaaatggaaattaatatatttgtttatttaatttttattactttaaaagaaatacatggttattggccaggaattcaaatagaatcaaatggtagaaagtaaaatcccctatttttcctaatgaactattcctgcat

SEQ ID NO: 49683 - DNA, 372 bp, Homo sapiens
  misc_feature 329: n = A,T,C or G
ctaaagggaacaaaagctgggtaccgggccccccctcgagagtacttctagaattaattaaggcgggcatacacaaaacacaatttcagtctaagttctcactaacagcgttgatagcagtttcttggaaaccacgattttaaacgaaataactataaagaaaccaattttaccataagctaatggatagaaacaggagttaagattctaccgcatatttctggtcataaaaatactaccaaaccttactacataaagtagtaaacatcagagccaaaacacttctaatattaaacattgaaataaatgtgagctctacatacacttangaaaaaaaaaaaaaaaaaaaaaaaaaaggggggcccccccccg

SEQ ID NO: 49684 - DNA, 279 bp, Homo sapiens
  misc_feature 237, 238: n = A,T,C or G
aattaattaaggcggggggcggaggatgggaactggctagtgagcactgaaatataaattctgaatcctctcctaaaaaaaaaaaaaaaaaaaaaaaaaaaaaaaaaacccccaaaaaaaaaaaaaaaaaaaaaaaaagccccccccccccccgggggggccccccccccccccaaaaaaaaaaaaaaaacccccccccccccggcccctttaaaaaaaaaaaaaaaaaaaaaaacnnttttttgtgtggggtttttaaaaaaaaaaaaaaaaaaaaaa

SEQ ID NO: 49685 - DNA, 360 bp, Homo sapiens
  misc_feature 298, 301: n = A,T,C or G
aaaggaaacaaaagctgggtaccggcccccccctcgagagtacttctagaattaattaaggcgggaggatcgtttgagctcagcagttcaagaccagcctgggcatcatagtgagaccctgtctctatttataaaaaaaaaatgaaaaaaaaaaaaaaaaaaaggaaaacaatcaggccaggtgcggtggttcctacctataatcccagcacttcaggaggtcaaggtgggtggatcacttgagcccaggagtttgagaccagcctgggcaacatggtaagaccctgcctctactttnaantaaaaaaaaaaaaaaaaaaaaaaggcggccgccaccgcggtggagctccaattcgccct

SEQ ID NO: 49686 - DNA, 452 bp, Homo sapiens
aaagggaacaaaagctgggtaccgggccccccctcgagagtacttctagaattaattaaggcgggcagaactaggagaggaggggaaggagagcagagaggaagaaacattccacttgggaaacgaaggtgtgacagcagagagagaaaatcccgaatatttaaggaacagtgggaagaccagtttgaccgaagtggcggttccaaaagagataaacaagttttgaaccatttagaactgtgtgctttgttattgagccatttatacaattgtggtgagtgattaacaggcatcctcacttggaatctatgaggttgattactgttattatccctagtaataattaagaaactagttgaaagagttgataagaaaaccaaggcttacagaagtaacttgcccaagatcacagccagcaagctgagcacagcagtgaacctctttgcccctga

SEQ ID NO: 49687 - DNA, 461 bp, Homo sapiens
ggaacaaaagctgggtaccgggccccccctcgagagtacttctagaattaattaaggcgggggtgaaaagaaggtatggttttttggtttttttaaaatctctcttactgaatcacacacttttcggaccgcatttgtttctcagatttgtctcattaaaaatatgcttgctcaaatgtaatgtggtcttctgaatttcaaaaaagtattcatgtcttgtccaaatacagatatttgataaataaataataaaaaataccatggaaaaataaacttagtatttctaatagaattcctttggttataaggaaagggattttcatgggtgtccaaaaaatgtatttcatgaggaatcatacgttttacttttgggcttagattacccagattcagtttaattttttaaacatttgtataattgagtgctgcatataaacgccaaagcaaacaaattaaactaa

SEQ ID NO: 49688 - DNA, 494 bp, Homo sapiens
ggaacaaaagctgggtaccgggccccccctcgagagtacttctagaattaaaagcatgtacggtatcaacgcagaatgaacccatagggagctgatcgtaatgtttatcatgttacttccccacccctacattttttgaaataaaataaggaattttattctcaaaaaaaaaaaaaaaaaaaaaaaaaaaaaaaaaaaaaaaaaaaaaaggcggccgccaccgcggtggagctccaattcgccctatagtgagtcgtattacgcgcgctcactggccgtcgttttacaacgtcgtgactgggaaaaccctggcgtatcccaacttatatggcttgcagaacatcccccttttgccagctggcgtaatagcaaaaaggcccgaaccgatcgcccttcccaacagttgcgcagcctgaatggcgaatggaaattgtaagcgttaatattttgttaaaattcgcgttaaatttttgttaaatcagctcattatttaa

SEQ ID NO: 49689 - DNA, 311 bp, Homo sapiens
  misc_feature 244: n = A,T,C or G
acaaaagctgggtaccgggccccccctcgagagtacttctagaattaattaaggcggggagatgcaatatttagcatttcctcaaactttttttggccatgaaatccaccacccccctcctttttcagagcatttcatgaagttcacatttcaaataatacattttgaaaaacatttatcttgtctaattgaagctcaaagagatagagtcaatgacttttcaaagtcaggtagcagatagttntaaagctgcaagtactgataagtgtgagccattagttaattcgcatttataaagaagtggtctgtca

SEQ ID NO: 49690 - DNA, 494 bp, Homo sapiens
gcgcgcaattaaccctcactaaagggaacaaaagctgggtaccgggccccccctcgagagtacttctagaattaattaaggcgggacacctgtacagagcacttacggtgaatggagcaggtaggcctgagttgcactgggtgagtcagggagagaatgtgaaggcctgggccctcactggacaccactgtcacctttataaacaccgtccacttaacactacactcaatttttaaattttcctttcttcaataataaaccctagcctactatggcttttttactttacaaactacttttttaaaagctttaaggtttttgactcttttgtaaacacaaatatatcatatagctgtacaaaaattttttttgttatatccttattccataagcttttttctattaaattttttttaactttttgaacttttttgttataaatgaagacacggccaggcacagtggctcatgcctataatcccagccctttggga

SEQ ID NO: 49691 - DNA, 468 bp, Homo sapiens
gaacaaaagctgggtaccgggccccccctcgagagtacttctagaattaattaaggcgggtgcctgtaatcccagctactcgggaggctgaggcaggagaattgcttgaacccaggagacagaggctgcactgagctgaaatcaccccactgcattccagccaatcacgaggtcaagagatcgagactatcctggccaatatggtgaaaccccgtctctactaaaaatacaaaaattagctgggtatggtggcgcgtgcctgtagtcccagctacttgggcgacagagcaggactctgtctcaaaaaactaaaaaaaaaaatagaaatgggtgaccagtatacagtttcagaccactaaaaacacctccatctacagctgtcagccatcatgacactccatgcaactacttactcattaatatttagtaactatctaatggatgctgcaaggctctataaaaacaaaa

SEQ ID NO: 49692 - DNA, 523 bp, Homo sapiens
tatataaccctcactaaagggaacaaaagctgggtaccgggccccccctcgagagtacttctagaattaattaaggcgggggaattgcttgaacctgagaggcagaggttgcagtgagccaagatcgcaccactgcactccagcctggtgatagagtaagactgtctcaaaaaaaaaaaaaaaaaatttaaaaaaatccccccttaaattgtcaccttcttttggaaagcaaaagcccaatattaaaaaattttttaaaggggaaaattccccccttggaattaaaattaaacccaaagggtttttggtaaaaaagggggggtaaaactaaggggtttttcgggtggacgggccccaatttttaatacccgggaaaaaaggaataaaaaatcttccaaaaaaattaaattaaaggggagggggtaaaacgggtataaaaatacaattttggaaaaatttggggaaggttttctttttaaaaccaattgaaaaaaaaaaaaaaaaggggccccccccggggggg

SEQ ID NO: 49693 - DNA, 728 bp, Homo sapiens
gcaatgtaaccctcactaaagggaacaaaagctgggtaccgggccccccctcgagagtacttctagaattaattaaggcggggatcatgtatatatcatctacaagaatctcactttaaataaaaacaaataggttgaaagtaaagaaatggagaattatatactatgttaatactaatcaaaggaaagcctggatagctatattaatttcacataaagcagacatgagaacaaggatgataaacaggaatacaaagtgccattttacaatgaaaaaggggccaattatccaaaaagtctaaacaatgctatgtgtatgcatgtgaaaacagtgtcaaaatatgtgatgccaaaaaactgttagaaatgcaagaagaaataaataaatatactattatagttgcttggaaacatcaacatcctctctcagtaatcgatacatcaaacagaaagaaaacagtaattgacctaaacagaagtatcaaacgatttgatataatagacacaaagacataccccatccaaccacagtagaatgcacattcttctcaggtttgcttagaactttcactaaaaaacaatattcttgataataaaacacccctttacaaatttgttaaaaataaaaatcataaaattatgttctcagacaatggaattaagctagaaataaataccataaagagagctgaaaaatctgcaagtatctggagatttaacaacatatt

SEQ ID NO: 49694 - DNA, 385 bp, Homo sapiens
gactggccgtcgttttacacccgggaacacagtatgacccttaattctggccggtcgttttccacagagaaaaaaaaaaaaccttttttgccggggcgtgggattgcatgaaagaaagcaacggagggccacattcggagcctccgtccactccagttttatcagcttttgccttttgcacggagtgctaaacaaattctagctctgtgttttttttccattcccagatttactatcagttctccttaaaaagtatctaagctgttacagtagctttcccttcacttgattctattgtgtgttttctatgtttggaataattacacccaaatatctagatattttctcttcaccgcattttgtaaataaagagatgtgtatgcct

SEQ ID NO: 49695 - DNA, 615 bp, Homo sapiens
ctggccgtcgttttacatcacggaaacacagtgataccatgaatggtgggcgcgcctttactcgagagaactagtagaattaattaatgcttgtgggacataataataacaatagaatgtgtgcacagccgctttccacacagacatcataacaaaaaatttccaccaaacccccccccccttaattaaggcgggaccgtgggtgccctggaggagctggagaacccctttactctggtcaaggagtcctgccccggcatataaaacaagctgatggtgcacctgggggaaccagtgccaaggttttcacacaacagaaaccacctgacatccacccgctgaagcgcactgctgttcaaataggggacggaaggtcgtttgtttttgttctgagctccataaaaactgtgctgacttggaaggggccctgtgctatgtcgtgcctgcagggacacttcggatcccgtgggcctcacatgccaggtcaccaggtccccgtctccttccacccctgcaatgtgctgttgtgcacgtcagggaccctgttctttatgcccactgccctcctccctttcctggcccaacagtattgctcacgggggctccaaccgccgg

SEQ ID NO: 49696 - DNA, 493 bp, Homo sapiens
ggcccgccctcgagagtacttctagaattaattaaggcgggggatcacctgaggtcaggagttcgagaccagcctggccaacatggtgaaaccctgtctctactaaaaattcaaaaattagccaagtgtggcgcatgcttgtagtgccggctgctcaagaggctgaagcaggagaatcgcttgaacccgggaggcagaagttgcagtgagctgagatcacgccactgtactccagcccgggtgacagagtgagaccctgtctcaaaaaaaaaaaaaaaaaatggagggtgggtaacttttttttcccggcccaggggggaaatttgggggattttagggaaattttccatgggcccagggcaaaaaaggccggggggttccttttttttaaaaaaacccctaaaaaccccccaaaaaaaaaacggtaagtgttaattttttttaaacctccaaaaaaaaaatgtttaaactttttttatggggaaaaaaaaaa

SEQ ID NO: 49697 - DNA, 381 bp, Homo sapiens
ctggccgtcgttttacatcaggaaacaggtgtgaccatgattgctggccggcgctttactttagagaacaagtagaatcaataatgcgggagagtgggtgcttcatattaacatattttgttgtaagtaatatataatctttaattttttgtcttcataggttgtcagatttttttgacatgattatgactttttagtttacaaatgagtgaaattatttcagattaaactggtcattgaaaaattttgaggctaggcatggtggctcacacatgtaatcccagcactttgggagggtgtcaggaggattgcttgagcccagtagtttgagaccagcctgggcaacatagtgagaccccgtctctacaaaaaaataccaaa

SEQ ID NO: 49698 - DNA, 465 bp, Homo sapiens
gccccccctcgagagtacttctagaattaattaaggcgggtcggttgaggtcaggagttcaagaccagcatggccaacacggtgaaaccctgtctctattaaaaatacaaaattagccggacatggtagtgcgtgcctgtggtctcggctactcaagtggctgagacaggagaatcgcttgaaccagggaggtggaggttgcggtgggctgagattgcgccactgcactccagcctgggtgacagagactctgtctcagaaaaaaaaaagaaagaaagaagggggggcccccccaggggggaccccccattccccctaatgggggggggaataccccccctccagggcgccgttttaaacactggctaagaaaaccagaaacctttgttcacttgtttatctgctgaccttccctccactgttgtcccatgaccctgccaaatccccctctgtgagaaacaccca

SEQ ID NO: 49699 - DNA, 458 bp, Homo sapiens
aagggaacaaaagctgggtaccgggccccccctcgagagtacttctagaattaattaaagcggggtgacagtgagaccctgtttcaaaataataataataataataataataataataataataaactgatagaactgtacacaagaaaagtcaattttactgtaggctaacttaaaattaaaatatataaaataatgtttacatgaatacaataaaaatgttaacataaataacagttatgcaaaaaataacttcacaaaagaatttccaaaaaaaaaaaaaaaaaaaaaataataaaaagcggccgccaccgcggaggagctccaattcgccctatactgagtctgattacgcgcgctcactggccgtctttttacaacgtcgtgactgggaaaaccctggcgttacccaacttaatcgccttgcagcacatccccctttcgccagctggcgtaat

SEQ ID NO: 49700 - DNA, 285 bp, Homo sapiens
ctaaagggaacaaaagctgggtaccgggccccccctcgagagtacttctagaattaattaaggcggggttgttaatcatttagccgttgcaataaatgtagaggaaatgcaaaaaaaaaaaaaaaaaaaaaaaaaaaaaaaaaaaaaaaaaaaaaaaaaaaaaaaaaaaaaataaaaaaaaaaaaaaaaaaaaaaatccccccccgcccgggagggaaaaaccaccctggccaaaatgggaaaaaccccccccctactaaaaatacaaaaaattaatgggcatgg

SEQ ID NO: 49701 - DNA, 473 bp, Homo sapiens
gcgcgcaattaaccctcactaaagggaacaaaagctgggtaccgggccccccctcgagagtacttctagaattaattaaggcgggtgagtgaaaaggtggaaatccctggtaccttgcctggtggttacacagtttaaccataggccaattttaggggcctctgaagtatctttctacaaacgcagacaagctccactacccctaacctgccaggatgctcaagtccactgtcacaatccctttcagaaaacattagtggccgctgccccagctacagagacggccgaaatgctttcactccttagctttgccaactccatcctccaaaacttcccagaatacctccctttccagttctaccaaatctgtacttgggagcagcctgctggatccagaacatgacaacagagagctgcgtccacagggaacaaagccctgacctctctctccacattaccctcacaaaaacagg

SEQ ID NO: 49702 - DNA, 531 bp, Homo sapiens
aaagggaacaaaagctgggtaccgggccccccctcgagagtacttctagaattaattaaggcggggagtaggccatcccccaggagaatgacagaagcaaaggacttgttactaagcagatttaagggtcagtgggggaaggctatcaacccattgtcagatcagcatcaggctgttatcaagtctgttggtgctaaaaagtacaagataaaaaaaaaaaaaaaaaaaaataaaaaagagcggcccccccccgggggggcccccaatctcccctttttgggagtaatttaccccccccccttgggccgttttttaaacaggtactggagattgagagcagttggcttctggaagtggctccccattattataaggccaaagagcttgaagatccccatgctaagaaaatgctcaaaaaaataggccaaacacgagaagaacttaggttagaaaaggacgtaaacagaacctgacaccagctccttttccttctatacattatttaatacctattaaataaaattatttttg

SEQ ID NO: 49703 - DNA, 241 bp, Homo sapiens
attaattaaggcgggcctcctgggcagcatcgatgaaggcctgcgtctgctcgtcgtagggcggcattttgtcttcctcagcaaagcggcggcggcggcggcggcggtggcggaggcggacacattggcgtgagacctgggagtacgttgtgccaaatcattgccacttgccacatgagtgtaaatgatggcggatgccaagtatgtcctctgccgatgggaaaagcgattatggcctgcg

SEQ ID NO: 49704 - DNA, 470 bp, Homo sapiens
actaaagggaacaaaagctgggtaccgggccccccctcgagagtacttctagaaattaattaaggcggggctcggcggctcacgcctgtaatcccagcacttagggaggctgaggtggacgtatcactaggccaagaaatctagaccatcctgtctaacagggtgggattaaacaactgttttttttccactagagtgagcgagaaaggacggatctcccggttgactggcttcggagcagatgggacacagcagcttctgcccgcctcctggttctcctgcaaataaatttctcagatgcatatatttagggaaccaattcatcaatgaaaatgacaaaaccatctggctctagagacttaaaaaaaattttagaggttgtaaacatttacattctgatgaagagtgtgtgtctaggttttatttcaaggatttgatgagtttggtttgtggcttgtttttagggattt

SEQ ID NO: 49705 - DNA, 406 bp, Homo sapiens
aaagggaacaaaagctgggtaccgggccccccctcgagagtacttctagaattaattaagggggggatccacactgagagagtggagagtgacatgtgctggacactgtccatgaagcactgagcagaagctggaggcacaacgcaccagacactcacagcaaggatggagctgaaaacataacccactctgtcctggaggcactgggaagcctagagaaggctgtgagccaaggagggagggtcttcctttggcatgggatggggatgaagtaaggagagggactggaccccctggaagctgattcactatggggggaggtgtattgaagtcctccaaacaaccctcagatttgatgatttcctagtagaactcacagaaataaagagctgttatactgtgaaaa

SEQ ID NO: 49706 - DNA, 462 bp, Homo sapiens
tgggtcccgggccccacgtcgagagtacttctagaattaattaaggcgggcggattgcctgacgtcaggagttcgagactagcctgggcaacatggcgaaactccgtctctgctaaaaatacaaaagattggccggtcgtagtggtacgcgcctgtaatcccggctaaactggaggctgaggcgcaagaattacttgaaccccgaaggtggaggttgtagtgagcccagatcgtgcacctggactctttggactgtgtctcaccctataaatccccttgtaaataaaactggcccccccccgaggggcactctttgcaccctatgaaaaaactttgtccccccactaagggctttattttccatagtaggcctaaaagcagccaccaattaagaaagcgttcaagctcaacacccactacctaaaaaaaaaaaaataaaaaaaaaaaagcgccgcccccccc

SEQ ID NO: 49707 - DNA, 470 bp, Homo sapiens
actggccgtcgttttacaccagggaacacggtatgacctttgtttcttgccggcgttttacactacggaaaaaaaaaaaccctttatgctgggcggggggtttccttcaaaaaaaaaaaaaaatgattgtctttggggtgtttctcccgtgtggagaagactctggccaggctcaaaaatgatgggtcgcgttctgcctactgttttaggaccacactggccagggtgtcccccaaggtgcctttgtgcctatggaatccctgttacgggcccacggaaagcctgtggatgcccaccagctgctgaggggtccctgtgatggtttagatctgaaatcatactcagttctttggccatgttctggaaggctagaattgttatgtcactgtgagtatggaaatcccttttgtgttctacttgataattcagagcaataaattccattctaatttccatgcccttgaagaact

SEQ ID NO: 49708 - DNA, 238 bp, Homo sapiens
agggaacaaaactgggtaccgggccccccctcgagagtacttctagaattaattaaggcgggagcggctatttttcctaaatgagaattgttacattgcaaattgttgaataaaatattttgcgctccttcaaaaaaaaaaaaaaaaaaaaaaaaaaagggggccccccccgggggggacccccaatcccccctaaaggggggtttttacccccccccccggggccgttttttaaaaa

SEQ ID NO: 49709 - DNA, 266 bp, Homo sapiens
taaccctcactaatgggaacaaaagctgggtaccgggccccccctcgagagtacttctagaattaattaaggcgggatttttgaatacctaactacaattgctttccccttctaagttatcttcccttaataatatttatgataccaggacagtgagggtataagaccaaatgtagtgaggtattcaaaaattctgcatatatggactcaaaagatctttaactatttgaactatatatccctatattattttattagcttgggtt

SEQ ID NO: 49710 - DNA, 673 bp, Homo sapiens
ctggccgtcgttttacaacccgaaacaaggtggaaccaatgctgggtgccgggccccccctcgagagtacttctagaattaattaaggcgggtggatctcctgaggtcaggagtatgagaccaacctggccaacatagtgaaaccccgtctctactaaaaaaacaaaaatcaaccgggtgtggtgggacgtgcctgtaaccccagctactctggaggctgacgcaggaaaataacttgaacccagggggaggaggttgcagtgagcctagatggctccgatgcactccagcttgggtgacagaacaagactccggctcatggtaaaccggaatgaaggcaaaggaacacccgccccacccaggggggaaaactgcttacggtgtggctgaaccacaaccccccccatgggccatctgttccttaaggacaagttcctgctgcagataactagccagagcccttccctttgtttcccggaaggaaggcttttagttagtctataatctatagaaacaacgcttatcactggcttactgtcaataaatatgtgggtaaaactctgtttgtggctctcagctctgaaggctgtcagccccctgatttcccactccacactctaaatttctgtgtgtgtgtgtctttaattcctttaatgccgctgggttaggctct

SEQ ID NO: 49711 - DNA, 499 bp, Homo sapiens
agcgcgcaattaaccctcactaaagggaacaaaagctgggtaccgggccccccctcgagagtacttctagaattaattaaggcggggctttcggagggtggtgagctagtctgcggacgctgtataccctcctccacttcccgctgcagccaataaaggccgttcctaccatcaaaaaaaaaaaaaaaaaaaaaaaaaaaaaaagcggccgccaccgcggaggagctccaattcgccctatagtgagtcgtattacgcgcgctcactggccgtcgttttacaacgtcgtgactgggaaaaccctggcgttacccaacttaatcgccttgcagcacatccccctttcgccagctggcgtaatagcgaagaggcccgcaccgatcgcccttccaaacagttgcgcagcctgaatggcgaatggaaattgtaagcgttaatattttgttaaaattcgcgttaaatttttgttaaatcagctcattttttaaccaataggccg

SEQ ID NO: 49712 - DNA, 459 bp, Homo sapiens
  misc_feature 259, 354, 362: n = A,T,C or G
tcactaaagggaacaaatgctgggtgccgggccccccctcgagagtacttctagaattaattaaggcgggcagatcgcttggcccaggagttcgagaccaacctagggcaacatagcgagaccctgtctacaaaaaaattaaccgggcacgatggcgcctatagtcctagctactcaggaggctgaggtggaggcttcagtgagccatcattgtgctactgtactcaaccctgggtcacagagtgagaccctgtctcanaaagaaaaaaaaaaaaataaaaaggggggcccccccgggggggacccccattaccccctttggggggcttttataacccccccgagagggagttntttataanagaacttaacattaccctaggaacagcaagagcatgatgagccccaggaaaatctacctctgatatggagaccaggcttaagaaaatcccctagaac

SEQ ID NO: 49713 - DNA, 341 bp, Homo sapiens
acaaaagctgggtaccgggccccccctcgagagtacttctagaattaattaagggggcgctgcacggagtggacctcctatatgccatataaagagtggtatatacccgcatcttctactgtctctaactgttacggctcacttccagttagtttgaatgaaaataataattttctacttggagttgaagagggcagaatccgcagctctcatcattgtgatgtgtagcatgtctgccctctgactggacatcattgccattaactttcttctgggcatcacggcaatgtcacgatgcccagacttggagcagggcaccttggagtcagtccactcataaa

SEQ ID NO: 49714 - DNA, 733 bp, Homo sapiens
tggccgtcggtttacaatccggaataaggggaacacatgctgggtgccgggccccccctcgagagtacttctagaattaattaaggcggggataaagacaggttggttaataggtacaaacatacagttagatagaatcagtaagttctagtgtttgagagcagattagagtgactatagttaacaatatattgtgtatttcaaaatagctagaatagaagattttaaatgttcccaatacaaagaaatggtaaatgttcaaggtgatggatatcctaaatagcttgacttgattctatgcatgtatcaagtatcacatgtacttcataaatatttacagtattatgtgtcaaaaaaactttgaaaagaataaatggagaaacatactgtacttattaattggaagattcaatatagtaaagataattacatagtcttaatgcagttcctgtcaaagtccagcaagattttttgaggacatatacaagcttattccaaaatgtatatggaagcctaagaaactagaatagctaagagttttcaaaaataaaaataaagtggaagttaccagtctacatgatttggaatggaatactacttagccaaaaagacttattatatggctatagtaatcaagactatgtgatattggtagaggggtaggcaaatagatccgtggagtagaatagaaaacccagaaatagatccacacaaatatgcctattattgactg

SEQ ID NO: 49715 - DNA, 509 bp, Homo sapiens; identical to SEQ ID NO: 49227

SEQ ID NO: 49716 - DNA, 367 bp, Homo sapiens
aaagaggaacaaaagctgggtaccgggccccccctcgagagtacttctagaattaattaaggcgggaaccatcctgctgttcctttagtgcaatacaataaaactctgaaattaaaaaaaaaaaaataaaaaaaatttaaaaaaaaaaaaaaaaaaaaaaaaaccggggcccccccccgggggagaaccccgacgcccaaaaagggtgaaaaaaatccccccctcatggggatgtgattaaaaaaacccatcaggtttttaaacggctcactgctcttttcttgttaaagcttaaaaaactcaattttgcaagaaacattctgagaaagagataatacttacttactgaccccgctgatttctaaca

SEQ ID NO: 49717 - DNA, 453 bp, Homo sapiens
ctaaagggaacaaaagctgggtaccgggccccccctcgagagtacttctagaattaattaaggcgggaggatcgcttgagcccaggagttcaatgtttatagtgagctatgatcatgtcactctgcactccagcctgggtgacagtgcaagactgtttcaaaatttttaaaaaaaaatgtaatattaaaattgacttaacctgtttctttttacctttatagtgtggttccaagaaaattcaaaagtacacatatgcctcacatatttccatcagacaattctgatataggttttaagaacaaaagcattattaagaaaaaagatggttgctacataatgattaaaagttcaattcaccaagaagttatagaaatactaaatacatagctgcacaaaaaaaaaaaaaaaaaaaaaaaggggccccccccggggggggcccccattcccccttt

SEQ ID NO: 49718 - DNA, 453 bp, Homo sapiens
aagctgggtaccgggccccccctcgagagtacttctagaattaattaaggcggggaagaactgttaggcaagaatactatacccatcaaagttattgttcaaaaatgatggagaaatagtctttcccagacaaacaaaggctgaggaaatacatcaccatgagaccagtcctacatgaactgcttaagagatttttacatctggcagccaaaagacaatatccaccatcataaaaaatacactaaaatataaaacttactgaaacaacagacacacaaaggagaaggtgaaaggaatcaaatggtatcattatagaaagctgccaaattttattatcaaagataagcaataagaaagaaaaaaaggaaaaaaaaaaaagcggccgccaccgcgggggagctccaattcgccctatagtgagtcgtattaccccccctcactggccgtcgtttt

SEQ ID NO: 49719 - DNA, 565 bp, Homo sapiens
ctaaagggaacaaaagctgggtaccgggccccccctcgagagtacttctagaattaattaaggcgggagcaacatttctggcaggaggctagaacacagaaggcttattggatttatctttgcagatgccggatgtatattacaaatgaatctggcttgccggctctgaatacagtacctgtcaaaatgagaattaccctccaggttccaaatccctcaaaattaagagccaaagccaccttcttattactacacctgcgccgactcggccacccgggacatcagtgagggtggggagtcccccgttgttcactccgatgaggaggaagttcaagtggacactgccctggccacatcacacactgacagagaggccactccggatggtggtgaggacagcgactcttaaattgggacatgggcgttgtctggccacactggaatccagttttggctgtatgcggaattccacctggaaagccaggttgttttatagaggttcttgatttttacataattgccaataatgtgtgagaaacttaaagaacagctaacaataaagtgt

SEQ ID NO: 49720 - DNA, 450 bp, Homo sapiens
ctggccgtcgttttacacccgggaatacaggtgtgtacacatgctgggtgccgggccctccctcgagagaacttatagaattaattaaggcgggggtttcaccatattataagtattactaagcatgtgttgatttatggtaataatttacatttattaaagcacttactatagcatactataatgtgacaagcactgttctaagccctttgattttctacctcagttaaccctcacagtaaccctgtaaggtagatacttttattgtctccattttacagatgaggaatcagaggcccagaaaggacataacttgccccaaatcacacagtttaagtggcagaactggaattcaaaacctgcagggtctagctccggggtctgttctttaaagatgcccattaggaaaaaaaaaaaaaaaaaaaaaaaaagggggcccccccccggggg

SEQ ID NO: 49721 - DNA, 246 bp, Homo sapiens
ctaaagggaacaaaagctgggtaccgggccccccctcgagagtacttctagaattaattaaggcgggagggcaggcacaagaactaactaaatttggagataattatctttctgtaagttcgttctgcaccaaaatccccatgttctcccaataatgattttatagttacttatcactttactcatggagaattaaaacgtaatgtttttcaactgtatctttctttaactggatgaatactgcta

SEQ ID NO: 49722 - DNA, 621 bp, Homo sapiens
aagggaaacaaagctgggtgccgggccccccctcgagagtacttctagaattaattaaggcgaggtgctgtttgtgtggcacagggaggaggtgctcataccaggcacttctctgtgcgcatgcacacatacacacacccctcattattccatctcacaaccacaactggctttagacatagatacagtgcgcctcctccatggtctaactccattccactgtctctgcttttaaagtggaaatgctcctagtgcaaataacgcgttaaactgttgtcatttatttatacctgacagtgagtgagctaatctttttctgagatgagcttttcttgtagaattgggaggaaaatagtttttaaaaattaggaaccatacctactcagtgcctggcactatgatccagttgctgcctcaggtcacccaggcccagcgtaaaggccggggtggtgggaaggtatcatcggaagagcaaaagtggctgagccacatccaagcctggtttgctgcactctattgccaaagactgacactggcctcagtcttactcagatatggctcctcaattgggatggggaagcatctgagcaaaaacccccagaaaaaaaaaaaaaaaaaaaa

SEQ ID NO: 49723 - DNA, 358 bp, Homo sapiens
ctgggaaccgggcccgccctccgagagtacttctagaattaattaaggcggggtaataatggcaaaaagatagaaatatagatcacaggaatggaatagaccattctgaaatagaaccacacacattgccaactaattttcagcagaatgccaggtcaattcgataaagaaataaaaatctttccaacaaatggtgctagaataaccagaaatccataagaaaaattaaaaaaacctcatgccatatgcaaaacttaattttaaataagttataagcctaaatgtataaaattgtaaggcttttagaacaagacatttgcagaaaattttacaaacttgaataagcagttatttgtta

SEQ ID NO: 49724 - DNA, 525 bp, Homo sapiens
  misc_feature 434, 466: n = A,T,C or G
ctaaagggaacaaaagctgggtaccgggccccccctcgagagtacttctagaattaattaaggcggggtccgatgaggccagatccttatagtccatctaccgttctcgtatggtcccgcctgcgtgcggatgtcggtgaccttgttctgaagcttcccgcgcctataaagacttacccgacgtacccaaggactatgcctgaacgaactctaaccatcctactttcgacatgttcatgggctggtgccttcatcagaccactgcatctgtggcttcacagctatgctccgggctcatcttcacatatctggtgaggctcagccagctattactctgctggaaccgtgcagccttacagctggcacacatgatacaacgcccagctggcttgagaaaccccgcaaccacaaagctgccatagtgggcccctgancaaaccgtggagaaaggaagccgaggcctggngttggggagggtaccaggcagcccaccaagggtccccgaatcccttaccgccaagctgc

SEQ ID NO: 49725 - DNA, 428 bp, Homo sapiens
gcgcaattaaccctcactaaagggaacaaaagctgggtaccgggccccccctcgagagtacttctagaattaattaaggcgggaggaagaaaaaaaaaaggcgtacacgcttgaaaacaagggaaaaaaatatattttcaggaaagaaaaattgtccataattgtccatgcataaaacgctgcggaattcacacgaagattctataactagtaaatgagcttaccaggtacacaggatacaaagtctacatagaaaaatcaaaagagacatttctatataataacaacgaaaattagaaattaattgttattatatactttttgagatgtgtttgccacattacccatgctggtgttaaactcgggagctcaaagacgtccgtccacctcgggctcccaaagtgctacgattacaggcgtgagccact

SEQ ID NO: 49726 - DNA, 470 bp, Homo sapiens
taaagggaacaaaagctgggtaccgggccccccctcgagagtacttctagaattaattaaggcggggcaaccatgttcacacgtattgttattactacctatcactgctgagctggatgataaactgtggtacaatatataagacggacaagagcttgatattcaagtactatccacacctagtctgacattgttagctggaaaaatcttattgctaatggtaaatcagctacacttgatgctgaagctgctgaaaaaatagtatctactacggaaatgtcattttatcatatatcttacgaccacactgtacaaatgaatctgtgatcaagactactatcttaaatgtatttcctgcttttgtaagcattaacgatttataagaaaattattcaaactattttttataaaatgaaagttatgatttttaaacttattgattcctcttgcccctaccccctctttttgga

SEQ ID NO: 49727 - DNA, 480 bp, Homo sapiens
tcactaaagggaacaaaagctgggtaccgggccccccctcgagagtacttctagaattaattaaggcgggggtagggaaaaagttaagtgctatttctttttggtttatgctatccatgtattatataggctttttcatttttaaaaataaactttattgtgcatatttaaggtttacaacatgatgttataggatttatatatatagtaaaatggttactatagtgaaacaaattaacatatccatcatctcacacagttactcatttcctcccactacccatccacatcccagtggcaagagcagctgtaagctactcatttaacaaaaatcctgaatacaatacactattaataactataatccccaagttgtacatttgatctttagacttattcaactacacatttgctactttgaatcccttaccacgctactcctacctatctccccttttatactaataatcttataaaaaa

SEQ ID NO: 49728 - DNA, 509 bp, Homo sapiens
aaagggaacaaaagctgggtaccgggccccccctctagagtacttctagaattaattaaggcgggggagcaatttgtcttttgctatattctccaagattatctcttaagaccatatgccccctgttttaatgtttcttacatcttgtttttactcatttctgactggacaaagttcttccaaacaattctgagaaacaaaaacacacacgcagaattaacaattcttttccctgtgcttcttatgtaagaatcctcctgtgacctctgcttgtacagaactgggaaacaacactgggttagtctcttttaagttccaaaaagccaatggaggttccttatccttttaaaattttaaatattttgttataaatcctcccaggatcccttatttccctacctatcatctcctgacttaatgttttttaaacccaccaatataaatttaattagggcggaaaggggaggggaaaaaaagtctcaaactgtgggacacggactcgcaaaata

SEQ ID NO: 49729 - DNA, 418 bp, Homo sapiens
caaccctaaataaagggaacaaaagctgggtaccgggccccccctcgagagtacttctagaattaattaaggcggggcctaactatatgagatggctgaaaaaataccacatcgtctgttttcactaggtgaagccaaaatatcctgctttatgtatattacaattctttttaaaacactggaagactcatgttaaactctaattgtgaaggcagaaactctgctaatttttcagattaaaattctctttgaaaaaagctgccaaaaaaaaaacaatattggggcccccccgtgcggaaagcccccatgcccctggatatttggggggaaaccccccatccttcagcacttatgaaaataaagatttgcaactagcaatgcaattttttctaaatatggggatatttacctttattaa

SEQ ID NO: 49730 - DNA, 460 bp, Homo sapiens
ctaaagggaacaaaagctgggtaccgggccccccctcgagagtacttctagaattaattaaggcgggtgtgctcttttagctgttcttaggtagctcgtctggtttcgggggtcttagctttggctctccttgcaaagttatttctagttaattcattatgcagaaggtataggggttacctagataatgccaaagtcagcatttgtcctgggttcccttgtgtgatctgtttggactatgttttcttttcttctcccacttgctcagcagcttgggcttccattctagatcttttaccaagatttttgtgtgaccatgttgacttcatttggattgccctctttcaatttccttgtgaaaacacccttaactttctctttacccttagctgagatgtttacatagctactggtgatatcttttcatgattttatatctcttaaaatggtgatggatgtg

SEQ ID NO: 49731 - DNA, 456 bp, Homo sapiens
ctggccgtcgttttacacccggaaacaagtgttacctttgcttgttgccgggcccttactttagagaacttatagaattaattaaggcgggtcgagcataaagttaaatattttatggtacatatgtgaaaaagtagttatgtttattaatagactaactgctggatgttaccaccaattgagaaagcaccaggtaagataggctttctctatgcctataccaagtaatttatacctacacagattgggcaattctagctaatgaaaatatacttaatagtatttcttacgccgggcatggtggctcacacctgtaatcccagcactttgggaggccgaggcgggcggatcacctgaagtcaggattttgagaccaccctgaccaacatgataaaacctcgattctactaaaaatacaaaaattacccaggtgtgggggcatgtgcctgtaatccc

SEQ ID NO: 49732 - DNA, 468 bp, Homo sapiens
ataaagggaacacatgctgggtgccgggccccccctcgagagtacttctagaattaattaagggggggaagttgagctagcaatgggcatttctattatttaagttacatatcagtttccaggaatatttttcaaatgggacaaactaaaaagttgaggactagagcatcgtagtgtctaagtgcacctaataacttaatgcatgtgcacacaccctcagttaatttgtaagagagtgacttctcattgttatttgtggagaggctaattatagtagcttcattctttattttctgtgttcttaaatttttttttacatttgaaagtatgaaaatactatttttgacactttactgatactcagggattaaaagttaaattttactgactgtagcagcaggtaaatctcttaaatttactcaggtttcctatcctttgcctccatatttaagaaaatatagaatgcct

SEQ ID NO: 49733 - DNA, 362 bp, Homo sapiens
  misc_feature 242, 243, 244: n = A,T,C or G
gattacgccaagcgcgcaattataccctcactaaagggaacaaaagctgggtaccgggccccccctcgagagtacttctagaattaattaaggcgggggaatgttcaactgtaagtgattaattcaacgaatatttagtgagcgcctactatgtgccaggcattgtggatttataagtgcaagctgtgtctggttccttctcccctagaacatgctgtacagtggaagagacaaatttgccnnntaaaaaaaaaaaaaaaaaaaaaaaagcggccgccaccgcggtggagctccaattcgccctatagtgagtcgtattacgcgcgctcactggccgtcgttttacaacgtcgtgactggga

SEQ ID NO: 49734 - DNA, 286 bp, Homo sapiens
tggccgtgtgtttacaaccctaaataaagggaacaaaagctgggtaccgggccccccctcgagagtacttctagaattaattaaggcgggtgaaagctccgtcttctgaattcatctctacaggctcaaaactcctgtttgatatcagacctgatgttattttccttcttttggagggcatttgtttggttaagaaggcttctttggactttggaatttcaacccatattttaccttggaacccaggaggcaaagcgttaagtgtagtggggaatcaaatactgca

SEQ ID NO: 49735 - DNA, 411 bp, Homo sapiens
gtaacaaaactgggtaccgggccccccctcgagagtacttctagaattaattaaggcggggtgagatttgccgagttccttttactccttttaacctttccttatgagcctgcctgtgttgggtgtccactgaggtgctggctgcggcgatcggccttgtgatctactacttggcctttagtgcaaacagccgcatccaagcctgagggcggcaccccagccctgcccttgcttacttcaataaacatcacaggacctgggactgcgcaggaaaaacgagactccatctcaaaaaaaaaaaaaaaagggctttggaaaatttggggccgggaaaaccccccccccccgggggggcccccccccccctttgaaaatttcaaaaacccccccccccggggcccttttaaaaaa

SEQ ID NO: 49736 - DNA, 349 bp, Homo sapiens
  misc_feature 338: n = A,T,C or G
actaaagggaacaaaagctgggtaccgggccccccctcgagagtacttctagaattaattaaggcgggatggctgtgaaggaaggctggggaggggcaaggccggctttctggaggtgtgcaggaagagcgaactggggacaggtgggggctggattcactggacaatacatgccaacacttggacctatgacacggaggcccgggggccacgccagcctcaattcagagccacaaacggcctggacgagttactgaaggcatcctcagcagagacatcgggggtggaggtcctgagaaatatccccacccaattccttctcttgagtaaagtgattntcattaatcct

SEQ ID NO: 49737 - DNA, 473 bp, Homo sapiens
ttaaccctcactaaagggaacaaaagctgggtaccgggccccccctcgagagtacttctagaattaattaaggcgggggaaaaggttatagctttgccttgagattgactcattaaaatcagagactgttgaaaataaaaataaaaaaaaaacaaaagaaaaggaaaaaaaaaaaaaaagcggccgccaccgcggtggagctccaattcgccctatagagagatgtattacgcgcgctcactggccgtcgttttacaacgtcgtgactgggaaaaccctggcgttacccaacttaatcgccttgcagcacatccccctttcaccaactggcgtaaaaacgaagaggcccgcaccgatcgcccttcccaacagttgcgcatccttgaatggcgaatggaaattgtaagcgttaatattttgttaaaattcgcgttaaatttttgttaaatcacctcattttttaaccaataggc

SEQ ID NO: 49738 - DNA, 531 bp, Homo sapiens
aaagggaacaaaagctgggtaccgggccccccctcgagagtacttctagaattaattaaggcggggtagctatattaatatctgatgaagtagggagtaaagaaatttactagggacagagtaagacattatgtactgataagatattcaactcaccaggaagacctaatgatcctaaatgttcatgcaccagacaacagagcctcaaaatacatgaagcaaaaactgatagagcagaaaaaagaaatggataaatttacaattgcagttggggacctactctcagcaactgataggattattaaacaaaataagcaagaatatagaggatctgaacaatataatcaactaaaaggatctaattaatttatatagacctctactcaataacagtataacactattttttccaagtgcctatacagctattcacaaaggtagaccatatattggaccataacacaaaccttaatgcgtttgaaggaactgtaatcatatacaatattttctctgaccataatgaaatcaagt

SEQ ID NO: 49739 - DNA, 320 bp, Homo sapiens
acaaaagctgggtaccgggccccccctcgagagtacttctagaattaattaaggcggggatacaatgagagagaaacaatattactattatgctacaccctgtttaatcaaatagaatttatagatatgatgtcttcctaagtgtattggtagtcctgacttttaataattatacattgatacccctaaaccttttacatattttgaatttgaacattcatctatcagccctcaagcaaatgtataaagttatcactcattgacactgtcagttaaacaaattagcttaatttcagcaaagtagataactttgcccttat

SEQ ID NO: 49740 - DNA, 502 bp, Homo sapiens
ctcactaaagggaacaaaagctgggtaccgggccccccctcgagagtacttctagaattaattaaggcggggttatgaattataaacagttttatgattaagtccaatcgttcaattgttattgaaagatagtcttatatttttaagtcctattttgctatttaacccttgtttatacttttgttcagtgctttgctctcctggtgtcaccttcataataataattcaactttgatcaataaaataaacaatcttctggatgcagttggccagtgtgaagagtatgtgctcaaacatctgaaatcaatcactccaccgtcccatgttgtagatttattggactccattgaggatatggacctttgtcatgtagttccagctgagaaaaagattgatgaagctaaagatgaaagactctgtgaaaataatgctgagtttaacaaaaactgtagcaagagccatagtgggatagattgttcatatgtagaatgttgtagaacac

SEQ ID NO: 49741 - DNA, 522 bp, Homo sapiens
ataaagggaacacaatgctgggtgccgggccccccctcgagagtacttctagaattaattaaggcggggggggaataatatgtggtttttgtacaagcatgtttctcagtgtgttgttattttggaaaaaatgaggggagggagtttggcaagaatggagaaaatgaatgaagaaggcctaatctctctctttttcagtgaataaatggaacaccatttctggattctagtcccattctctgcattcatacaccagtttcttcatatatcctatgaagaacctaaacatttggccccacctggtcttggtttgatcagcagttaaaattctgtgactcgggcttccttcccgactgcccaccttcatgatgtgtaaggaacatacattttgagggtaccttacccactgttcatttgcgtggtcaaagtgaaaatgagtggaagttctccaaaaatgatggccaacatcctggcacctccaagtgtgagaaataactttgcttggtgaatgggataatgttt

SEQ ID NO: 49742 - DNA, 409 bp, Homo sapiens
ctaaagggaacaaaagctgggtaccgggccccccctcgagagtacttctagaattaattaaggcgggcgcctgcaatccccactactagggaggctgaggcaggagaatcacttgaactgggaatgcagagattttagtaagctgagatcgcgccattgcactccagtctggacaacaagagcaaaactccatttcaaaaaaaaaaaaaaatctgttaaaatttgatttattgggccctgacaaaaaaggtcaaatgcgggactgatttttaagctggcaatctatttaaatgcaaatgctaattaaaagggcataatttttacacaagtccaaacctgggttggggctaaaatttcattttgggcaataaaagggttaagtgatggttaaccagggtgtaaattatcc

SEQ ID NO: 49743 - DNA, 292 bp, Homo sapiens
tgatactggccgtcgttttacacacaggaaaacagcgtgtgaccatgattactggcgcgccttttctacagagtacatcatagattacattaatgcggggttcagtgtatactgaacaggtgatgggtgcaccataatctcacaagtaaccacttaattacttacgcatgtaaccagataccacctgttccccaaacacctatggaaataattttgttttttttttaaaaaaggaatgagatcatgtcctttgcagggacatggatgaagctggaagccattatcctcagca

SEQ ID NO: 49744 - DNA, 236 bp, Homo sapiens
cggggatcaggctgcatgggaataaggaaataacaccaggcaataacttaaatctttagggaacaaaatgaacagatttcgaaattgtaaataagattattataagctaaatgtttatgtccccctcccccccaaattaatatgttaaagcctccagagtaatgatatttgaaggtgaggtcttcaggagttaatcaggtcataatttggagccctctttaatgggattagtgcct

SEQ ID NO: 49745 - DNA, 464 bp, Homo sapiens
ttaaccctcactaaagggaacaaaagctgggtaccgggccccccctcgagagtacttctagaattaattaaggcaggagagtggcgtgaacccgggaggcggagcttgcagtgagccgagatcgcaccactgcactcccccctgggcaacagagcgagactccatcttttaaaaaaaaaaaaaaagaattagtaaagattcaccaggggttgagctcagggattgcgtgggggacctgacaattctctaggcaaagggaatgacctggataaagatacagaggcaagcaaacattgctaaaaatagtatcctttgtaagctctattccttgggcctgagaaaaataaaaggtatagctttatttattgctgggagatgagtaacccatgggtactgctattcaaaaaaacaaaacagtgcaattcttttgacattgacggtgtcctacttattcagaaaatacc

SEQ ID NO: 49746 - DNA, 540 bp, Homo sapiens
taaccctcactaaagggaacaaaagctgggtaccgggccccccctcgagagtacttctagaattaattaaggcgggttaagaaagctaaatcttccatcatcttccacagatagaattgaacatatatcaatctggaagttctaaaattagcaaaataagcacgttatttgtttttgagatggagtctcgctctgtcccaaggctcaagtgcagtggcgcgatctcagctcactgcaaagccggtaggagacagagattacaggttttctgactcaagtctgcattcttgactccacactacataagtgcactatctgccaggccaggcacaccttcccctgaaacccgtaaggtatttgaaaatgaccaggggtggtactaggcgtgccacaatgactgagatcctatgcctggccagcgacagaagtcttgacgctgtactacactaatctgcagaatcaaaaacgattgccgtgagagggtatctagtccaaccatcctctggcagacaaggacacccagactcaaaggggtggtta

SEQ ID NO: 49747 - DNA, 352 bp, Homo sapiens
taaataaagggaacaaaagctgggtaccgggccccccctcgagagtacttctagaattaattaaggcgggagaatcacttgaacccgggaggcggaggttgcagtgagctgagattgtgccactgcactccagcctgacagagagagactccgcctcaaaaaaaaaaaaaaaaaaaaaaaaaaggggttttaatccgggtctacccaaaaaaatctttaagcccaagggtttttaagtccccctttagccacctaattttgaaaaaaaccttaaatcgaaatttcgggtggaaaaaacccccaaaaaaaaaaaaaatcagtggatttttgggggcccccccttaaaaaaaat

SEQ ID NO: 49748 - DNA, 354 bp, Homo sapiens
ccctcactaaagggaacaaaagctgggtaccgggccccccctcgagagtacttctagaattaattaaggcgggaatatcatgagcaatttatgtcaactaatgtgacaattgagatgaagaaattctatcgaagacacagactgcaaaagctcattcaggaagaaacagactgccttatgactattgagtaaatcggatttacagctaaaaacctctccacaaagaaaacccagatagcttcactgctgaattctattaaacttaagaggaagaaatactacaaattctacacaaacttgtctattaaactgaagaggagaaaatacttcccagctcattgtatgaagctgatg

SEQ ID NO: 49749 - DNA, 602 bp, Homo sapiens
ataaagggaacaaatgctgggtgccgggccccccctcgagagtacttctagaattaattaagggggagggtcagggaagaacgaaccttgacgttgcagtgcagtttcacagatcgttgttagatctttatttttagccatgcactgttgtgaggaaaaattacctgtcttgactgccatgtgttcatcatcttaagtattgtaagctgctatgtgtggatttaaaccgtaatcatatctttttcctatctatctgaggcactggtggaataaaaaacctgtatattttactttgttgcagatagtcttgccgcatcttggcaagttgcagagatggtggagcgaataataaaaaaacaatgaaaaaaaaagcggcccccccccgggggggacccccattcccccttatgtgaggagatttacccgcccctgactggcggttttttaaaacaccattgtgtataaagaaggcagttcaacccacggatgaaagaaagggacaactaaatgggtaaacaattggatctttattaatagttttttccttgagagcctaggatccctttcctatgtggttctatgtatgtatctcccaatactag

SEQ ID NO: 49750 - DNA, 569 bp, Homo sapiens
ctaaagggaacaaaagctgggtaccgggccccccctcgagagtacttctagaattaattaaggcgggagaatcgcttgaacctgggaggtggaggttgcagtgagctgagatcgcaccactgcactttagcctgggcaacagagctagactcttgtctcagtaaataaattaaccgagtgcggtggtgtgcagttactaattccagttactacagaactagactccatctcaataaattaaaaaaaaaaaaaaaaaaaaaaaaaaagcggccgccaccgcggtggagctccaattcgccctatagtgagtcgtattacgcgcgctcactggccgtcgttttacaacgtcgtgactgggaaaaccctggcgttacccaacttaatcgccttgcagcacatccccctttcgccagctggcgtaatagcgaaaaggcccgcaccgatcgcccttcccaacagttgcgcaacctgaatggcgaatggaaattgtaagcgttaatattttggtaaaattcgcgttaaatttttgttaaaacagctaattttttaaccaataggccgaaatcggc

SEQ ID NO: 49751 - DNA, 491 bp, Homo sapiens
gccaagcgcgcaattaaccctcactaaagggaacaaaagctgggtaccgggccccccctcgagagtacttctagaattaattaaggcgggaggatcgcttgagcccggagggttgaggctgcagtgggctgtcattgtgccactgcattccagcctaggcaacaaagggagatgctgtctcaaaccaaaaaaataaataaataaataaaaaagaataattagtagtgatgggaaaaagaaaacttgaacaatcacacaggaggcaggataatagtctattactgcctaacaaattacctaaaaacttagtgggttaaaataacaaatacttatcgtgtctgttattgtaggtcaagaactgggaagaagctcacctgggtggccctgactcagggtctctcatgaggttgcagtccacacgtaggccagggctgcagtcgtatgaaggcctgacaggggctgatggatctgcttataagcccactcatgtg

SEQ ID NO: 49752 - DNA, 222 bp, Homo sapiens
aacaaagctgggtgccgggccccccctcgagagtacttctagaattaattaaggcgggggttgagctgagaagaggccagtgcactcaagcctgagcaataagaataaaaccgagtagaacaaaataaaaaattcaaaaaacaaaacaaaacccacactccaaaaactaacaaagaataaataaataatataaaaataaaaaaaaaaaaaaaaaaaaaaaaa

SEQ ID NO: 49753 - DNA, 408 bp, Homo sapiens
cctcactaaagggaacaaaagctgggtaccgggccccccctcgagagtacttctagaattaattaaggcgggggaccataagggatataaaggctacactgaatactatgagcctgagcaactgcttggctgatttgactaatgaatgctgatctgttatcacactgcatagaggtggcaaggctaagctgaggacatatttctgactaaacggaagaaatcactgcggtggccttatcagaccctgtaggaaaggccttattcagtgaaagtgtctatttagactaagaggtattttagtttcctgactcacggcatattgagtaaagctaatttgccagtcctgggtggtggcaaatcctccagcttgatgtgtagggaagggagggggcctgaataatccctgag

SEQ ID NO: 49754 - DNA, 565 bp, Homo sapiens
ttaaccctcactaaagggaacaaaagctgggtaccgggccccccctcgagagtacttctagaattaattaaggcggggcaggggggtatgaaaaaaatcttccatattaaaatggtttgcattgctccaaagctgagccctacttgacaaaaaccttactcctcagtatttaattcctctcattgtgttttcttgggtatcccacaagcaacattaatatggaagatacagtaaatgtgtgcaagaacactgctataaaactatggcagcagatggctgtgattggaagactctatccattgctagatctccaagtcacattgaatgggaggccatttgactgccttgtggctgatctttagagcttttgtgtgtagcttaggctctgataattaaacaaaaatagtttatattttactatttaattcaaaaggttatttaacccagtattaatttatggtaagtactcaaaagactaggcgtggtggctcacacctgaggccaaggcaggaagatcacttgaggccaggagtttaagatcagcctaagcaacacagagaaactg

SEQ ID NO: 49755 - DNA, 340 bp, Homo sapiens
  misc_feature 308: n = A,T,C or G
aagggaaacaaaactgggtaccgggccccccctcgagagtacttctagaattaattaaggcgggggctgaggaaagaggaatcagattaattctctgggttgcaaagaggctattctgcaagccccttacagtggccctgaaagctcaataagtgttttgtacctcttgtaaatgtgccattgtgtgaagcattaaacccaacatctagaattcaggattcatccagaataaaaggatgtaaaatctttcccaacagaagagtgttacttttggtcagacaacttcatgggttcttactgcacattanattatgacttatggaacattgcaatatattct

SEQ ID NO: 49756 - DNA, 286 bp, Homo sapiens
  misc_feature 178, 179, 180: n = A,T,C or G
gctgggtaccgggccccccctcgagagtacttctagaattaattaaggcgggagtgggccctggttcaatgtttgctgatggggaagatggcaaaaacaagcctgcccaaccagaaaaaaaaaaaaaaaaaaaaaaaaaaaaaaaaaaaaaaaaaaaaaaaaaaaaaaaaaaaaaaannnccccccccccggggggggccccttggaacataaaaaaaggatttaatcccccccccccctcccgagttttatataaagaaaaaaaaaaaaaggtaaaaacaagtat

SEQ ID NO: 49757 - DNA, 303 bp, Homo sapiens
  misc_feature 200, 201, 202, 203, 204, 205, 206, 207, 208, 225: n = A,T,C or G
ggtaccgggccccccctcgagatacttctagaattaattaaggcgggggggcctgtgtcctggtggcttgaagccacatggagggagtttcattaaatgctaactacttttaaaaaaaaaaaaaaaaaaaaaaaaaaaaaaaaaaaaaaaaaaaaaaaaaaaaaaaaaaaaaaaaaaaaaaaaaaaaaaaaaaaaaaaannnnnnnnnaccccccccccgggggngccccccccccccccccaaaaaaaaaaagccccccccccccccccccgccggagaaaaaaaaaaaaaaaaaaaaaaaa

SEQ ID NO: 49758 - DNA, 259 bp, Homo sapiens
aattaaccctcactaaagggaacaaaagctgggtaccgggccccccctcgagagtacttctagaattaattaaggcgggagaaagtgactgacgacacaagcagtgttctgggttcccagatgcccggactggtggtggccgtgtctgtcaagcctggagacacgctatcacactgtcaacaaatttgcgtgattgaagctcttataatgcagaatagtatgacagctgggaaaactggcacggtgaaatctgtgcact

SEQ ID NO: 49759 - DNA, 476 bp, Homo sapiens
aaagggaacaaaagctgggtaccgggccccccctcgagagtacttctagaattaattaaggcgggtggatcacgaggtcaggcgattgagaccatcctggctaacacggtgaaactccatctctactaaaaatacaaaaaattagccaggcgcggtgccaggcacctgtagtcccagccactggggaggctgaggcaggagaatggcgtgaacccgggaggcggagcttgcagtgagccgagatcgcaccgctgcactccagcctgggtgaaacagtgagactctgtctcaaaaaaaaaaaaagggaaaaaaattccgggcctggccccgggggctaacccctgtaatcccacccttttggtaggctaaaacaggggggtcacaaggtcaggaaatcgaaaccttccgggttaaaagggtaaaacccggtttttcttaaaaacccaaaaaatttccctgggcttaggggcaggccc

SEQ ID NO: 49760 - DNA, 474 bp, Homo sapiens
aagggaacaaaagctgggtaccgggccccccctcgagagtacttctagaattaattaaggcgggggaggcctcacaatcatggcagaaggcgaatgaggtgcaaagtcatgtcttacatggcaccaggcaagaataggagttgtgccggggaactcccatttataaaaccatcagatctcatgagacttattcagtaccatgagaacagtatgggagaaacttcccttatgattcagttatctccaccttatcctgcccttgacatgtggggattacaattcaaggtgagatttgggtggggacacagagccaaaccatatcaagttgtatgccaacaaattaggtaacctaaatggaatttatacaaattcatgtagatgcaaatggccataactgactaaagaatttgaaaatctgaataggccaataacaggtaaagagattgaaatagcaatcaggaaaccttccaccaa

SEQ ID NO: 49761 - DNA, 611 bp, Homo sapiens
taaggggaaccaatgctgggtgccgggccccccctcgagagtacttctagaattaattaaggcgggaataaaaaaagcggaaacagctgacttgaacaacacagtagattaaacactgacagatacacaactttccatccaacagcagcagaatatacattcttctcaagtgcacacagaatcttctctgagatagatcaaatcttaggtcacaaggcatactacaaatttaagaagtttgatataatgccaagtatcttctcattccacaatggaataaaattagaagtcaataacaaagaaaacagaaacatttacaaaaatgcagaaactaaataacacatgcttaaacaaccattgggtaaaagaagaaatcaaaagggaattttaaaaatatcttgagacaaacaaaaatgaacatacaactcaacaaaacttacaggattcaataaaagaagtgctaagagggaaatgttacagtgataaatacctacattaaaaaataagaaagatctaactcgaacaacctaactttacaaataaacaattagaaaaagagaaactaactaaacccaaagttagcataatgaagtaaataataaagatgagaa

SEQ ID NO: 49762 - DNA, 430 bp, Homo sapiens
agcgcgcaattaaccctcactaaagggaacaaaagctgggtaccgggccccccctcgagagtacttctagaattaattaaggcgggagctgggtcaccggcttgaggggctgcgtgaggcgcggaggcagatcaaagaaagtgcatcacagacaagggatgttctcaaacagcattttaatgatttaaagggaacccttggaaagctcctggatgagcgattggtgacccttttgcaagaggtggacaccattgaacaggagaccattaaaccactagatgactgccagaagctcatagaacacggagtcaacactgcagaggacttagtccgagaaggtgggggaccagggagcctgttgtattagtgcattcgtccattttcacactgctgataaagacatacctgaaactgggcaatttaaaaaaaa

SEQ ID NO: 49763 - DNA, 291 bp, Homo sapiens
  misc_feature 229, 230: n = A,T,C or G
ctaaagggaacaaaagctgggtaccgggccccccctcgagagtacttctagaattaattaaggcgggtctgaatatattaagtcttaaatttatgaatgtaaaagaattgaagtgacacacgtatgtgttctgatttgcaactgagttaaattagaaatcagtaaccatgaaaaatctctaaataaattaaaatgaaaaagcccactagtaaataactcattgatctannaaaaaaaaaaaaaaaaaaaaaaaaaaaaagggcccccccccggggggggcccccattcccc

SEQ ID NO: 49764 - DNA, 393 bp, Homo sapiens
ggggggggggcttatgttttacttaattaacaaaacactgggttccgggccccccctcgagagtacttctagaattaattaaggcgggaatggaatattatttggccataaaaaggaaggaaattctgacgcatgccacagcctgagtgaatcctacaaatattacgctaagtgaaagaagccaatcacgagtttatgtgaaatgtccataataggcaaatctgtgtatcatagacaaagcacattggtggttgccaggtactggaggaagagagaagaggcatgacagctaacagggacgggctttctttggaagatgatgaaattgtggaatgatggttgcacaactttgtgaatatactagaaaccaatgaattaaaaactttggaagat

SEQ ID NO: 49765 - DNA, 482 bp, Homo sapiens
aaaagctgggtaccgggccccccctcgagagtacttctagaattaattaaggcgggtggatcacttgaggtcaggagttcgagaccagcctgaccaacatggtgaaaccctgtctctactaaaaaatacaaaattagccgggtgtggtggcacatgcctgtaatcccagctacttgggaggctgaggcaggggaatcacttgaacctgggacgcggaggttgcagtgagccgagattgtgccattgcactccagcctgggcaacaagagcgaactctgtctcaaaaaaaaaagtattaatctgagatacactttaatttttttggtgttacatctttgacaatctaataaattcgcattcagtttcagcgggttcatgttaccttagtaattcttgagtgtcttaagagtaaagctggccacatttgtatctaaactgtttgctttgtttataggattttaaactgtctacggttcttaacc

SEQ ID NO: 49766 - DNA, 417 bp, Homo sapiens
ctaactgaagggaacaaaagctgggtaccgggccccccctcgagagtacttctagaattaattaaagctgttttctttgtaacttaagcaaatcacaaaacaagggctaatgttaatatgaaaagtgcaaaaattcaaggaaaaagcatggggacaaaaaaagatttttcctctttttgggggctgttcatgtgtagcctactacagaactattagacctatacacatttatatgaatatttatttgaaaacgtataatatcaaacaatgtaaaaaccaatagaaatctcagataattgaatgtatagaaactagcagcttgaaagtgattagttcattatttgctgatcaagcggaaaaaaaagaaacaaaaaaaaaggggggcccccccccgggggggaccccccttcccctttt

SEQ ID NO: 49767 - DNA, 147 bp, Homo sapiens
aattaattaaggcgggggagaagattgggaacactcatccctggacgtctatcccagtgtgtgtttaacattcacagcccaaaaccacaaatgtgtctgggagagcctggcaaggcattcctcattaccatcttgtttgcaaaggtt

SEQ ID NO: 49768 - DNA, 411 bp, Homo sapiens
tcactaaagggaacaaaagctgggtaccgggccccccctcgagagtacttctagaattaattaaggcgggcagaaaacccatgacgggaaagtgaggcaactggggaaaagaaaaaaaaaaaaccccgcaaaaaaccaaaccctgggtccccgaggaaaaacgtgttttcccaccagccactgcgcttggccccgtggaacctggcttcctttgttcaaccccagggtgccccttgggccgctaggggtcccccaaagcgtgcaaaaggcccatgaggggaaggtgaggcccctggggctgccaaaaaaaaaaaaaaaaaaaaaaaaaaaaggggccccccccccgggggggccccccatccccccttttggggggttttttcccccccccctttgggggtttttttaaaa

SEQ ID NO: 49769 - DNA, 458 bp, Homo sapiens
aaagggaacaaaagctgggtaccgggccccccctcgagagtacttctagaattaattaaggcggggtgaaatcaaataacgcagttttggaaacctataaccgcattttgtgcttgaattacgtgccccacactgtggcttaggatacttattggggtataatgaaaatcttactgaaagttaatttcacattcttacaccccaaaatctgcattgccattgatgcatatgcaccacattattatatttccacatcagtttcttgtgtgccaaataagacccatgctatgcatcttggtttccatgaagtgaaaatacatagtaagaatgcgagaaatataaatcaggccaggcacggtggctcacacctgtaatcccagtactttgggaggccaaggcaagcagatcacctgaagtcaggctggattcagtgccgagtctcaaaggccaaggtacca

SEQ ID NO: 49770 - DNA, 398 bp, Homo sapiens
acacctaataaagagaacaaaagctgggtaccgggccccccctcgagagtacttctagaattaattaaggcaggcggtgcctctaatactggtgatgctagaggtgatgtttttggaaacagcaattaaagtttttcttccttgaaaaaaaaaaaaaaaaaaaaaaaaaaaaaaaaaaataaataaaaaaaaaaaaaaaaaaaaaaaaaaaagcggccgccaccgcgggggagctccaattcgccctatagtgagtcgaattacgcgcgctaactggccgtcgtttaacaacgtcgtaactggaaaaaccctggcgttaccaaacttaatcgccttgcagaaaatccccctttcgccagctggcgtaatagcaaaaaggcccgaaccgatcgcccttc

SEQ ID NO: 49771 - DNA, 663 bp, Homo sapiens
ctggccgtgctttctcagccctaactaaagggaacaaatgctgggtgccgggccccccctcgagagtacttctagaattaattaaggcgggcgtggccacgggctcttcgagatattcactgatagactgtaaaacaatatgcatgaagcatgcctacaagatctagaatgttgcctcccttgggcaaatctaagagttattggccagtagagagagagatagcagagtagaaagtttattcaaagggataatcacagagaacttcccaaacctagagaaagacatcaatattcaagaacaagaaagttatataaaaacaagcagatttaaaccttattaaataagactacctcaagacatttagtaatcaaacttcaaaaggttgagaatacagaaaggatcctaaaagaagcaagagaataaaaacaaataacatgccaagaaccttctatatgactggcagcaaatttctcagtgaaaaccttaagggccaggagagagtggcatgacatagctaaagcactgaaggaaaaagtattttatcctagaatagtatatccagtgaaaatatcctttaaaaatgtgggagaaataaagacttctccagacaaactaaaataagggatttcatcaataccagatctgtcctataagaaatgctg

SEQ ID NO: 49772 - DNA, 513 bp, Homo sapiens
  misc_feature 473: n = A,T,C or G
ctaaagggaacaaaagctgggtaccgggccccccctcgagagtacttctagaattaattaaggcgggaagatcacttgacgtcaggagttcaaaactggcccggccaacatggtgaaaccgcatctccactaaaaatacaaaaattagcctggtgtggtggtgggcacctgtaatcccaatgacttgggaggctaacgcaagaaaatttcttgaacccaggaagcagaagttgcaatgaccagcaaggttgtgccaatgcaccccaacctgggcgataagagtgaaaactccatctctgaaaagtaagaagcagaaaaaaaaagacgggctccgaaacaaagggctaacggcaaaatgtccaaacttagaagaaaattggcccatataagcgcgatttaaaatgaaaatattgtcaagagtttcagatagaaaatgaaaaacaagctaagacaagtataaaaaaaaaaaaagnaaaaaaagaaaagggggcgcccccccccgggggggcccca

SEQ ID NO: 49773 - DNA, 454 bp, Homo sapiens
  misc_feature 383, 384, 385: n = A,T,C or G
accctaaataaagggaacaaaagctgggtaccgggccccccctcgagagtacttctagaattaattaaggcgggtggatcatggggtcaggagatcgagaccatcctggctaacaaggtgaaaccccgtctctactaaaaatacaaaaaaaaaaaaaaaaaatttccccggccccggggggggccccctgtatccccacttccgggggaggttaaggcagaaaaagggcttaaccccggaaaggggactttgcagggacccaaaatggccccattgaatcccgaatcccggccggggcaaaaaaccaaaactccttttcaaaaaaaaaaaaaaaaaaaaaaaaaaaaaaaaaaatttttttaaaaaaaaaaaaaaaaaaaaannnggcccccccccccccgggggggccccccccccccccctaaaggggagtttttcccccccccccaggggg

SEQ ID NO: 49774 - DNA, 275 bp, Homo sapiens
ggaacaaaactgggtaccgggccccccctcgagagtcttctagaattaattaaggggggaatttgtatttagaatatgtaaagaactgttacaataataattaaaaggcatataattcaatttttaaaaatcaacaagagatctgaattaacagttctccaaagaagatacacaaaaggccaataagcacatgaaaaggttctcaacatcactagccatcagggaaatgcaaatgagatctacaatgagatatcacttaacactcactggaatag

SEQ ID NO: 49775 - DNA, 512 bp, Homo sapiens
  misc_feature 427, 428, 429: n = A,T,C or G
aaccctcactaagaggaacataagctgggtaccgggccccccctcgagagtacttctagaattaattaaggcggggggtggagcctttaagaggtaggacacgataagagccatttcagtcaaaggggatcttcccttgtgtgtgtcttggtgctgttctctgagctctcaccttcacaatgctggattagttctcacaggaatcaattagctctttcaggaacaggttggcttcttcacacgtgtttgctttccctctgactttctaccctgttatggtgcagcagaaaacccctcaccagaagccagcaccatgcctttgaacttcccagcctgaagaaccataagccaaataaacttcttttctttataaattatccagcctcagatattttgttataataaaacaaaatggactaagaccaannnaaaaaaaaaaaaaaaaaaaaaggggcccccccccgggggggacccccaatccccccttaaggggggttttttccccccccccc

SEQ ID NO: 49776 - DNA, 396 bp, Homo sapiens
actaaagggaacaaaagctgggtaccgggccccccctcgagagtacttctagaattaattaaggcgggtacatgtgaaactctaaatgcatggcaactgttaatgtcataacagtttagttattttgttctgttctgtcatgtgccacaaaatatgtacttttttcacttttttccctttgtatatcagttacgggttacaactggttcattctgaaaacaacaacaacaaaagtccattcatattttttaacaattgtataagtgcccaagtaattcactacagcctaaagccttgcctttgtaatttgacttctgacatgttggcaatcaaagcatgcacttgtaacaatgaaaaagaaaaagcattttatattactactcaataaaatgtgca

SEQ ID NO: 49777 - DNA, 565 bp, Homo sapiens
aaataaagggaacaaaagctgggtaccgggccccccctcgagagtacttctagaattaattaaggcggggaagcgtaacaatttctgagaagtgtaataacacagtgaaagccgtgtttaaagatgataaaatggccagacgcggtggctcacgcctgtaatcccagcactttggaaggccgagacaggcggatcatttgaggtcaagagttcaagaccagcccgaccaacatggtgaaaccctgtctctactcaaaatacactgtactccagctgggagacagagcgcaattccatctcaaaaataaataaataaataaataaataaataaataaataaataaataaataaagataataaaatatggtaacaatttattacaatggcaagaaatcagtaatgttataagatactgcctataaagcctaacatgaaatactgaaggtccacatcaaactggtggaggcggaaaggtggacagacattggacactgacacattacttaaaataccaggagctgggccaggcacagtggctcacgcgtgtaatcccaacactttggg

SEQ ID NO: 49778 - DNA, 391 bp, Homo sapiens
  misc_feature 319, 355: n = A,T,C or G
acaaaagctgggtaccgggccccccctcgagagtacttctagaattaattaaggcgggagagaacaagaagcagaataacatccctacggacagtgaaagcttctcagaaagacatgcccatcaaacatgagcactataataagtggtaggactcagaagagttaaaattttaaaaagattaagataaacatctgagtcaacaaacataagaattaatgcctttacaaaatagaaaattagaaaacagggtatttgtaaaaaacaaaagaaacataggatataaggatttgagagaaatgctatactgaaaataggcanagaagatccaagagataggtgtccacaaaaaagaanaagcagggggtaaaaaaaaaaaaaaaaaaaaaaaaa

SEQ ID NO: 49779 - DNA, 460 bp, Homo sapiens
accctcactaaggggaacaaaagctgggtaccgggccccccctcgagagtacttctagaattaattaaggcgggggtaaaaccggaattggtttatcgtcttctaggccttggacccaatttggagtgagatggatcgctaacgggtatagggactctgtcgggttcttgaaaatactctaaaattgattgtggtgaaggttgcacaattctgtggatatactaagcacaattctgtggatatactaaaagcaattgaattgtaccctctatgtgggtgaattgtatgccgtatgaattatatctcaacattgtattagaaaataaaattaatgaagcatagaagttacggagaactactggaaagaagaaatacaagaactcaaggaagagacagccagacaacagtagagtgtgaaatgggaaccagcagaaaaaaagaaatagagaataatgatcaa

SEQ ID NO: 49780 - DNA, 478 bp, Homo sapiens
ctaaagggaacaaaagctgggtaccgggccccccctcgagagtacttctagaattaattaaggcgggaatcagctaaagcagtgcttagagaaatgtattgccttaagcaaatgtattttttaaaaatgaaagaaaaagataaacgatctagattcaatttaaataaattagaaagaggcaatgatataaaaactcaaatttttaaaaaggaaataaaaataatagcaaaaatgaataaaaatgaagacaagtatacagaagaaaaactcatcaaagggaattactggctatatatttgatcggctctgataatactattcatgaaaagaaaaagaaggagggagaaggcacaaattatccatcttaagaagaaaaagcaaggcatcataaaagatcttacaggtattaaacagataagaatatattttgacaggaattatggcaatgcatttaaaaattttgtaaagtagaaaaatg

SEQ ID NO: 49781 - DNA, 148 bp, Homo sapiens
cgcgcaattaaccctcactaaagggaacaaaagctgggtaccgggccccccctcgagagtacttctagaattaattaaggcggggggggggagatttgtgcagggggaagtgtattacagaagtgagaaataaagacagttatttaaa

SEQ ID NO: 49782 - DNA, 386 bp, Homo sapiens
actcctcagctaaagggaacaaaagctgggtaccgggccccccctcgagagtacttctagaattaattaaggcggggcatcattggctatcatgtttgaagaccaatctttaacatctgattatatttgatctattatttgagtgttgttggaccatgtgtgatcagactgctctctgaatcaaatacgatttgtcgagaaaaagaaactcgaggagcaaaaagaaaaagccgcggggaaggggcccttggccacaggtggaattaaaaaatctggcaaaaagtaagctgttccttgtgcctgaggagatggtgaccctttatttcatctgtttttaaacctctctattccctgccataacatcttttgccacgtattgctggaat

SEQ ID NO: 49783 - DNA, 349 bp, Homo sapiens
ctttcactaagggaaacaaagctgggtaccgggccccccctcgagagtacttctagaattaattaaggcgggtgctccagagtcgggtctgctttccaaagtataggacatttgaagaactggtatgctactcactggtgaaggactgtaagcccacacaagctcttcttatctctactagaattaaaatgttaagtcaaaaaaaaaaaaaaaaaaaaaaccccaaaaaaaaaaaaaccccaaaaaaaaaaaaaaaaaaaaaaaaaggggccccccccccggggggggccccccccccccccttaaagggggtttttacccccccccccggggggggttttaaaaaaaa

SEQ ID NO: 49784 - DNA, 357 bp, Homo sapiens
  misc_feature 320: n = A,T,C or G
tcactaaagggaacaaaagctgggtaccgggccccccctcgagagtacttctagaattaattaaggcggggtaagatttgccgagttccttttactttttgtaagctttccactcaataaaatgaacctgtatggcaaatacttgaaatggaactcactccttccactttccccctttcttctgtcccaggaaatagatcatcttttgaaaagactcttgtctaggaaaagttgtgtccttttcctaatttaacgtgttctttcttaatgaagttttaatttatttttgttgagaatttgctagatgggctttgcatccnctgtagatggtgagtgtttgcggtgatgtccgtctcg

SEQ ID NO: 49785 - DNA, 468 bp, Homo sapiens
aagggaacagaagctgggtaccgggccccccctcgagagtacttctagaattaattaacacaaatggctgtgcctagtctttaaatctgtccaaagcaaatggagcgaaagcctgctaattcttcagtgcttcatctggcaatgacctcagaaaaaagagtctccctcctgtattatcaagctgacttcctttagttccttgttgttctgtgtagatctttgttcccagaattctctagacaggaaaaaacagaggaaaaaggacagctaaaatattgagtaccctagcacccactctgcaaatcccctaaaatattaaattagaatatatgttaagcaatgcattccaaaaatctatacccactatctattcaagcccttaaaacgattttttgtttgtttaaagaaagtagttctcaccacgtggtggtcatttgggcctgaaggcactctgtccataaatgtaat

SEQ ID NO: 49786 - DNA, 637 bp, Homo sapiens
taaagggaacaaaagctgggtaccgggccccccctcgagagtacttctagaattaattaaagaatgcattctggaaagtgtgtaaaaatttcccattagaaacaccctgctggtaatatcctgatgctataatgtgaatgttagggtattaacaaaattcatatattgaaatctcagctgataaaattgtgacattaggaagatgggaccttttacgaagacagtaggtaatgagttgtaaggcctcatgaacagaactagtgcccttgtaaaatatgcccaagggagtttatccattcattctaccgtttgaggaagctgccagaaggagctgttttatgaaccaaacaagaggctcttcccacagaccaaatatgatactgactccgtcttaacttactcatcctctgatactatgagaaatacattttgttttttataaactactcagtctatggtattttgttatagcagcctgaacaaactaagatgactgaaaaaacatgaggacttttttcttccttacatgagagatttgcatgaggatatgtatgtatacatgtacctccaaatggaactattcaagctttattattttgaactaaattctgacacacacacactacatttgatattt

SEQ ID NO: 49787 - DNA, 304 bp, Homo sapiens
aaagggaacaaaagctgggtaccgggccccccctcgagagtacttctagaattaattaaggcgggcatggtggtgcgtgcctgcagtcccagctactcgggaggctgaggcaggggaatcgcttgaacctgggaggcggagattgcagtgagctgagattgcaccactgcactccaaacctggagacagagcgagactctatctcataaaaaaaaaaaaactataaaaaaggggcccccccccccgggggggtccccaactcccaccaatggggggtttttacccccccccctttgggactact

SEQ ID NO: 49788 - DNA, 424 bp, Homo sapiens
ataaagggaacaaaagctgggtaccgggccccccctcgagagtacttctagaattaattaaggcgggtcatttgaaatagagatgcaatcaggacggttgggggactcgggactgtggctcaattgacaccttgctgatgtcttcatgtcaacacctgacttacagaccatgtgcccggaagcagactcttcacataggcagtgatttgcgaatacttttaagctcacctttcttcttcccctctctgttcgctgatgtcaacctaatgattgtgtaccttacctatgggatccatctgttttgtgaacaataaaggctctgaggcatgaaaaatcactgaagagaatcaaagacgcgcccccccacctggggaggtctttcctagaacataaagaccgttctaataacgcccaaaaggagaga

SEQ ID NO: 49789 - DNA, 470 bp, Homo sapiens
aaagggaacaaaagctgggtaccgggccccccctcgagagtacttctagaattaattaaggcggggcttggcttatggagatgcctcgtgaaacacagctgggcaagtattaatgtatatggaacagcctggatttctgcatatggataagccaccttggaataggaagaggtgttgagcctggactgtgggaggaaagagctgcgtggatagattcaaacttcctgtggtagtgctcccagtctgacctctgtagaccttcagtactcactcttcttgcttaggctctctgtgtgttgaaagccatcccgtgttgcatgtgttgttacaattttttgtgatacttgcaatttatgtttgagaagaagtgaaaagtttgccctctgacctcatttccttcttgaacagtgaacactaacattttggggacaacttaatcaattgggtttccttacaacaaaataaagtaa

SEQ ID NO: 49790 - DNA, 411 bp, Homo sapiens
ggaacaaaagctgggtaccgggcccccctctcgagagttcttctagaattaattaaggcggggttagcgaggcttgctagaagtcatcaaaaagctattagtgggagtccgagtggagagagcgagctgagtggttgtgtggtcgcgtctcggaaaccggtagcgcttgcagcatggctgaccaactgactgaagagcatattgcataaaaaaaaaaaaaaaaaaaaaaaaaaaagcggccgccaccgcggtggagctccaattcgccctatagtgagtcgtattacgcgcgctcactggccgtcgttttacaacgtcgtgactgggaaaaccctggcgttacccaacttaatcgccttgcagcacatccccctttcgccagctggcgtaatagcgaagaggcccgcaccg

SEQ ID NO: 49791 - DNA, 536 bp, Homo sapiens
  misc_feature 344, 351, 377, 396, 397, 417, 418, 446, 447: n = A,T,C or G
aaccctaactaaagggaacaaaagctgggtaccgggccccccctcgagagtacttctagaattaattaaggcgggcatgtgtaatctcagctactcaggaggctgtggctcaagaactgcttgaacccggtaaacaggctgcagtgagccaagactgtgccactgcactacatcctgcacaaaatagtgagtgagactccttctcactccatacagccataacataacaagaggagggggccacagacggggggtccacactcttctaaagagcatgagcttaaaaatccgcctcccacttggttccggtttattccatgtggaccagaactgattcccacagnctacagnttcagctttgagggggagactgtatnagccaagaatattttcagnnttagaattcaggggggttcnngcttggtaaggggaaggggaagaagaanntggatactgttcggttctgtgcctccagggagacttaaaaactcaatggctgaaacactttttgcaacaatgcctggcgtgttatgcac

SEQ ID NO: 49792 - DNA, 531 bp, Homo sapiens
ctggccgtcgttttacaccccggaacacaggtgtgtacccatgctgggtggcgggccccccctcgagagaacttatagaattaattaaggcggggactggtgcgtgtctgcaatacatgacgaacattaacgccccgtccttcaccctagaccttgttattcgctgaaatcattaaatggaggtgctatgtcccatgaaaagggttagatcttcctcctagggaggctattggctaatggagatgagtaagttgactcctattttaatatttgatctgcagtactccgggcttcttattactggatatatgggcattaaacctactggccatgttagttattagaagattattttccttatgaaccctgttttgttttgcttcctttctgcttcaattctaatgtcacattgcatacctggatgtaaacagcagtcagtttctcagatcaaatagagccctgtagcaacttggaagacacagaagacacacggacataaaactgtatttattatccagggaatgtcactac

SEQ ID NO: 49793 - DNA, 363 bp, Homo sapiens
ctaagggacaaagctgggtaccgggccccccctcgagagtcttctagaattaattaagaggggaaaagataacatccaagtctgattagaactgcccatcagtttttcttgtaaatttttagaagacctcacagaactttacagtttatttttctcggccaacacattaaaaccattcttggatttcaagtagccaactttgccttttatgtattcttacatagtttcctcttgaagaaaaaaaaagcagagtttttgtttttcaaccctttatgtttgttttgttttattcttaaataagcaagcaaaacctgcacattggattcacgtgagatgataatgaaaacttttagtttaagagtg

SEQ ID NO: 49794 - DNA, 349 bp, Homo sapiens
agcgcgcattatgattacgccaagcgcgcaattaaccctcactaaagggaacaaaagctgggtaccgggccccccctcgagagtacttctagaattaattaaggcgggactgggctaatgggccaactgtccccgtacgcatccaccccaaccaggtggctatcactaggctctaaccggacaaagacctccaagagagccttctacgaaatgccgaatactatcagaggtgaaaggataacggctcctgcaatgtatataccattagaaccactctctaatctgctatttttatataccatctatgattctaacttgcttcttggttaatctaagttgaaaagaacat

SEQ ID NO: 49795 - DNA, 609 bp, Homo sapiens
ctaaagggaacaaaagctgggtaccgggccccccctcgagagtacttctagaattaattaaggcggggtaagaacatcgcttgaactaaggagtttgaggccaacccgggcaacatggtgaaaccccatctgtacgaataatactgaaattacctaggcgtggtggcacacgcctgtaaactgaggtggcaggaatgctttaacctatgaggttgaggctgcagtgagtcatgatcgcaccactgaactctatcctgggtgacaggctagccctgtctccatttacaaagaaaaatgcaagatcaaaatcctgtgagtaatagcgttattttaactgtgtaaaaaaatgtatagaacaggaaactttctgaggtaactgaaatgttctgtcttgattggagtggtgattacatggttacatttatcaaaattcattgaattgtacatttaagatctgtgcatttcactgcatgtaaattttatcttaatttttaaagataaaatctgttcaactattttgattggctaaatattttggctaagagaaaacagaaatttgttggagagaaaataggagatatgccaaatgttataatgttttatctttga

SEQ ID NO: 49796 - DNA, 459 bp, Homo sapiens
acaaaagctgggtaccgggccccccctcgagagtacttctagaattaattaaggcggggcatgagaaactgctgttcaaaaaactcaatatcctgaaaggctgtgggaaacttccagactaccaaaagctagagacctgatcactaaatccattttctgaccctacactggatcctgtgctggaagggaaaattctataaaggacattatatggtcaactcccaaaattagaatatggacaggttataaaaaagtactgcatcaatgtccattggagaaagtggtaacgtataactgaggttatttaaaagaatatgcctatttcttaggaaatacacatccaacaatttaggattaaatggctacagcgtatgtaatcttccctgaaatgtcaaagggtttggaaaaatattgtctgtctgtatatgagcatttatcagcccatgtctgggcgtctgt

SEQ ID NO: 49797 - DNA, 679 bp, Homo sapiens
ggtaacaaaagctgggtaccgggccccccctcgagagtcttctagaattaattaaggggcggggtactggagagattacatttgcctcttaactagtatcgcacatgcgtgacactggccatgaaagtacacatgcactcatctagtacagggggcatatgcgagaatgaatttatgtacaagaccggaaacttcgtggaactactattcacaagaagtagacatgtatgcctagtgaactcgctacctagtgtatctagacacactccttgtagtacacgcaccaggtggaattcaggctaacacaggctgagccgcctaaaagaacgtgtgaccggtcctctgggaggttggcattgtgaaggaggaacagctcagggtacatggattataaaatgagcctacatacgttgagattctcttgagtcagcatgttctctaaccccggtttggctgccttgtgaaatgattccctgcagtaaacggacttttcatttatttaatcattcaaacttccattcacatctgcatgattacagaaaacatggggttatgtagactagtaacacataagaaaattgcagtaagatggtaacaaaacctcatattgtctttacatgtttccaatggaaaatgttttgagtgtttattgttcagtttattacgtttcacttgatta

SEQ ID NO: 49798 - DNA, 337 bp, Homo sapiens
acaaaagctgggtaccgggccccccctcgagatacttctagaattaattaaggcgggggagtcacctcaaggtcaggagttagtgaccaacttggcccacatggcgaaatcccatctctactaaaactacacaaattggccggtatctcgcaaaagaaaatatataattaaattatgtgctcattacaaacacatcttacctgattctcaggctaaatgcctcagtagtgcctagagcatattaaaggtttcccttttttcttcacaatggccctccactgtcaagttggataaatatcatgctagtatactacatatgcaaatggtaagaaaaaac

SEQ ID NO: 49799 - DNA, 553 bp, Homo sapiens
taaccctcactaaagggaacaaaagctgggtaccgggccccccctcgagagtacttctagaattaattaaggcgggtggatcacgaggtcaggagatcgagaccatcctggctaacacggtgaaaccccatctctactgaaaatacaaaaaattatccgggcgtggtggcaggcgcctgtagtcccagctacttgggaggttgaggcaggagaatggcgtgaacccgggaggcggagcttgcagtgagctgagattgtgccactgcactccatcctgggtgacagagcgagactccgtcctaaaaaaaaacaaacaaacaaaaaaaaaggcggccgccaccgcgggggagctccaattcgccctatagtgagtcgtattacgcgcgctcactggccgtcgttttacaacgtcgtgactgggaaaaccctggcgttacccaacttaatcgccttgcagcacatccccctttcgcccgctggcgtaatagccaaaaggcccgcaccgatcgccctttccaacaattgcgcagcctgaatggcgaatggaaattgt

SEQ ID NO: 49800 - DNA, 323 bp, Homo sapiens
  misc_feature 212, 213, 214: n = A,T,C or G
cgcgcaattaaccctcactaaagggaacaaaagctgggtaccgggccccccctcgagagttacttctagaattaattaaagcgggtggggacgcacatccccgccaagaaggaagccgggaggagctgaacaacgtactggccgccatgaggaagccgccgtactgcaaatgactttaatcattaaatagcttctatgccaaaaaaaaaaannnaaaaaaaaaaaaaaaaaaaaaaaaaaaaaaaaaaaaaaaaaaaaaaaaaaaaaaaaaaggaaaaaaaaaaaaaaaaaaaaaaaaaaaaaaggggccgccaccggggggg

SEQ ID NO: 49801 - DNA, 435 bp, Homo sapiens
ccccccctcgagagtacttctagaattaattaaggcgggtgttaaagcaaactaaatatggcctgaagacttcgttctatatttgagtccttgtggacaaaccgtaacctagcttaataggcagacaaaattgaaaacctaactagtaatatgcacctgtaacaatagctgagtgttggccaatcccagcggccatacttcaatcactcatagactgctgagtgttcaaactgcattcaaataaggcaaacaccaagctgtaaccaatcgcactgtttctgaacctcacttccaattcctgtaaatcactttaccccttttgtccataaacttgttctgaccacgaggcaccccggagtctccaaatctgctgtgattctggacgctgcctgattcgtgaatcgtttctgttttttttgctcaattaaactccac

SEQ ID NO: 49802 - DNA, 237 bp, Homo sapiens
agggaacaaaactgggtaccgggccccccctcgagatacttctagaattaattaaggcgggggcagaggctgcagtgacccaagattgtgccactgcactccaccctggacaacagagcaagaccccatctcaaaaataaataaatatatataaaaaataaaaagctatttctagtttatttcactataaagttttgctttattaaaaagctaataaacagctattaatcataaaaa

SEQ ID NO: 49803 - DNA, 332 bp, Homo sapiens
  misc_feature 234, 258: n = A,T,C or G
accctcactaaagggaacaaaagctgggtaccgggccccccctcgagagtacttctagaattaattaatatagaaaaccagttactagcctacaattagaattgacaacaaaacaggtaatgaagtggtatcgttgtctgtggtaaatcctcgaggttcatcatctcatgccaagaagattaagggcatggacacacacaaggagtgagtttaggagtagagtctccacaaaanaaaaaaaaaaaaaaaaaaaaaaangggcccccccccccgggggggacccccatccccccttaaagggggttttttccccccccccccggggccttttt

SEQ ID NO: 49804 - DNA, 161 bp, Homo sapiens
acaaaagctgggtaccgggccccccctcgagatacttctagaattaattaaggcgggcggatcatgaggccaagagatggtgaccatcctgcccaacatggtgaaattctgtctgtacctacaaaatacataaattaacaggccatggtggtccgtgcctg

SEQ ID NO: 49805 - DNA, 473 bp, Homo sapiens
gccgtcgttttacaccccggaataagaggaaccaatgctgggtgccgggccccccctttagagtacttatagaattaattaagggggaaatagtcaagggaataaagaaaaaaccatcaaaaattcaggaaattttggacacgcttttaaaaatgcaaaatgctccggaaagtctcagtaatagagctgaacaagtagaagaaggaaattcagagctcgaagataagttcttctaattaactcaaaaaacaactgcaaaaaatgaaaatggggggcccccccccggggggagccctagccccccaaaaaagaagcccttttcgcccccccgatgggcactttttttctggaacaacctgatcattcacaacttaggtccttacccatttaatatgtcaagataatatccagtgtgggcagaaaaaaataaataatgcagccgttaaaagaaccaatggaggtcataccatgca

SEQ ID NO: 49806 - DNA, 232 bp, Homo sapiens
agcgcgcaattaaccctcactaaagggaacaaaagctgggtaccgggccccccctcgagagtacttctagaattaattaaggcggggggggaaaaaacagagaaaattgaagtatttatttataaaacatgcaaactattttaatacaacatgctgattttacaaataaagagaaaagaaatcccttaaaggtataaatgacttcaattatccacagccagcacagagaatg

SEQ ID NO: 49807 - DNA, 528 bp, Homo sapiens
aaagggaacaaaagctgggtaccgggccccccctcgagagtacttctagaattaattaaggcggggacaaaaataagttgtgttgtactcttttatcaagtataataaatttgccttttaacttgatatatttagaccctttacatataatgtaattattgagatgattagttaaaatctaccattttgctggttgttttctatttgttttttcttattttttctgccttattttagattgagcatttttttatgattcagtttttaaccactattgcctcattatttgttctttttcataaactattttagtggtttctctaacatttttagtattcatctttaaatagtcaaggagtatattatggcacttaacatgtactgtaagaactttataacaatatactctcaatcctttattctcattgtactgttgtcatacattttatttttacacatactataagtttttatacatacatacaatacatacaatacattgctactatttttgctttaggcagtcag

SEQ ID NO: 49808 - DNA, 364 bp, Homo sapiens
  misc_feature 290: n = A,T,C or G
aaagggaacaaaagctgggtaccgggccccccctcgagagtacttctagaattaattaaggcgggggattatctgtgatccaatgaagttggactagagatgtgaagccttagaaaacggtggattgaaaaaagaattttagtctcctccagagattatattttgtgtgttcattgctctcaaaaacatgaaaataaagagtattttatattgtgaaaaaaaaaaaaaaaaaaaaaaaaaaaaaaaaataaaaaaaaaaaaaaaaaaaaaaaaaaaaaaaaaaaaaaaanccgccccccccccccgggggggcccccccccccccctttaggggattttttttccccccccccccggggggttt

SEQ ID NO: 49809 - DNA, 380 bp, Homo sapiens
  misc_feature 79, 118, 320: n = A,T,C or G
accctcgataaagggaacaaaagctgggtaccgggccccccctcgagagtacttctagaattaattaaggcgggggagncagtcaaggacaagaagcatatatcggtgatgttttgcnggggtggaccgccatgagcatgaaaagacccgaagcaagttgactcttgcaatgtgcaactgttatgttctgcaaaatgagcaacgatgtatcaaattgatgcaaatttagatgttgatacttacaataaagtttttaatgtgttttaaaaaaaaaaaaaaaaaaaaaaaaaaaaaaaaaaaaaaaaaaaaaaaaaaaaaanttgtcccccccccccgggggaggaccccccctccccctttttggggcgtttttccccccc

SEQ ID NO: 49810 - DNA, 545 bp, Homo sapiens
caagcgcgcaattaaccctcactaaagggaacaaaagctgggtaccgggccccccctcgagagtacttctagaattaattaaggcgggtggatcacgaggtcacgagatcgagaccatcctggctaacacagtgaaatgccgtctctactaaaaatacaaaaaaattagccgggtgtggtggtgtgtgcctgtggtcccagctgcttgggaggctgaggcaagagaatagcatgaacccaggaggcagagcttgcagtgagccgagattgtgccactgcactccagcctgggcgacagagcgaaactccgtctcaaaaaaaaaaataaataattgaattcaggccgggcacagtggctcacgcctgtaatcccagcattttgggagtctgaggcaggtctatcacctgaagtcaggagttcacgaccagcctggccaacatggagaaaccccatccttactaaaaatataaaaatttgctgggtgtggtggtgcacaactttaatcccagctattcgggagactgaagcaggagaatcgcttgaa

SEQ ID NO: 49811 - DNA, 573 bp, Homo sapiens
  misc_feature 468: n = A,T,C or G
tacttctagaattaattaaggcggggacctttgcaccctaatattgtacaagcaagggatctttaatatacaaaaattacatgcaaagtttgtgtatacttttgcctaaaaaggaaataggatagggattctgtggcaaaaggtaaaacaccagatcattgagcttttattttataagaaaatcataaatgggtaagtgcatacggcaacttgttctgaaggatgaaccacaggtctaggaaaaaaccctgttgcccccaactaatacaggcttttataaaatgaaggcgacaagaaggaatcctgtgaatattagacataccagatttttagccttgaccacagttctcactctcttaaatggtacctcaaaaagctggagcctctctgccatgattatgcttctacaaatttcttttataaagagactcaaagctaatgatagcttaaaagaaaagttaatgcctntctcattggaaatgtataatcaaataagtagttaagggcttttggtattaaagatattctgaagctctgaaatgctagaaaaaaaaaaaaaaaaaaaaaaaaaaa

SEQ ID NO: 49812 - DNA, 411 bp, Homo sapiens
agaattaattaaggcgggcttggcgacaggctatttgaaatatccactcacagataataaaagaaaaagcatgaagcatgcctacaagatctagaaaatagcctcaaaagggcaaatctaagagttattggccagtagagagagagatagcagagtagaaagtttattcaaagggataatcacagagaacttcccaaacctagagaaagacatcaatattcaagaacaagaaagttatataaaaacaagcagatttaaaccttattaaataagactacctcaagacatttagtaatcaaacttcaaaaggttgagaatacagaaaggatcctaatagaagcaagagaataaaaacaaataacatgccaagaaccttctatatgactggcagcaaatttctcagtgaaaacc

SEQ ID NO: 49813 - DNA, 551 bp, Homo sapiens
ctcactaaagggaacaaaagctgggtaccgggccccccctcgagagtacttctagaattaattaaggtgggaggagaagaaagccagttacaaaagtacatcatcagttgttcagtcatctgtcagtttatgtgtgaatgcccctcatgagccaggtctgtaatccagtgggcagtccccatctcctgcattgtctctgtgacttatagtttcgttctttctgctgtcaaatgaatatataaagaaaatatccaaaaaaaaaaaaaaaaaaaaaaaaaaaaaagcggccgccaccgcggtggagctccaattcgccctatagtgagtcgtattacgcgcgctcactggccgtcgttttacaacgtcgtgactgggaaaaccctggcgttacccaacttaatcgccttgcagcacatccccctttcgccagctggcgtaatagcgaagaggcccgcaccgatcgcccttcccaacagttgcgcagcctgaatggcgaatggaaattgtaagcgttaatattttgttaaaattcgcgttaaatttttgttaaa

SEQ ID NO: 49814 - DNA, 413 bp, Homo sapiens
  misc_feature 328, 329, 330, 331, 332, 333, 334, 335, 336, 349, 350, 351: n = A,T,C or G
aaagctgggtaccgggccccccctcgagagtacttctagaattaattaaggcgggcaggatagttcagacggtttctatttcctgagcgtctgagatgttagtattagttagttatcttttgagtaagaaaagctttcctaaagtcccatacatttggaccatggcagctaattttgtaacttaagcattcatatgaactacctatggacatctattaaagtgattgacaaaaaaaaaaaaaaaaaaaaaaaaaaaaaaaaaaaaaaaaaaaaaaaaaaaaaaaaaaaaaaaaaaaaaaaaaaaaaaaaaaaaaaaaaaaaaaaaaannnnnnnnnccccccccccccnnncaccccccccccccccccaaaaaaaaaaccccccccccccccccccccccccaaaaaaaaaa

SEQ ID NO: 49815 - DNA, 477 bp, Homo sapiens
  misc_feature 141, 142, 143, 144, 173, 216: n = A,T,C or G
cctcactaaagggaacaaaagctgggtaccgggccccctctcgagagtacttctagaattaattaaggcaggcagatcatgaggtcaggagatcaagactatgccgctaacacgtcagacctttctctacggaaagcggcnnnngaatatattaaatattggcgctatatcgnatgaggagctcctagataaccctatagagaggcgtattacgcncgctcactggccgtcgttttacaacgtcgtgactgggaaaaccctggcgttacccaacttaatcgccttgcagcacatccccctttcgccagctggcgtaataacgaagaggcccagaccgatcgcccttcccaacagttgcgcagcctgaatggcgaatggaaattgtaagcgttaatattttgttaaaattcgcgttaaatttttgttaaatcagctcattttttaaccaataagccgaaatcggcaaaatcccttata

SEQ ID NO: 49816 - DNA, 418 bp, Homo sapiens
  misc_feature 99: n = A,T,C or G
aagggaacacagctgggtgccgggccccccctcgagagtacttctagaattaattaaggcgggagtggtattctagaatgagagttagggatggtacangaattcacatatgggaggaatttattaaagtcagcccaagggatgtatctttgaaaggtgtgatattcttgtagactctttaatatgtgactttagtcccatacaactaaaggcaaatctattatctttcgttgttagccatcaaagtctgcgttaaaactgttgtatcattcttaaattcatgatgaaatctgttagttgatgcctgtggcatgtgagatgctaggttcgatggagagtgttcaatatggaatcactgtccagaatagataatgtagtctttaaatataaactataccctttatagaattaaactgta

SEQ ID NO: 49817 - DNA, 244 bp, Homo sapiens
agctaatttcttcttctgtgcgaatagggttattgcgattattaaataagttaataagagtaaagcatttataatagaacctagcgcagactaagtgctatagtttgctattgttaaaactattattaatttgttctattccaggtcagatttaatttcccagcattaacaaaaatcaataaataatactgaaaagtaaaaagtcataagttatgctaaaagagtgtctacttctccagttcac

SEQ ID NO: 49818 - DNA, 227 bp, Homo sapiens
ctgggtgccgggccccccctcgagagtacttctagaattaattaaggcggggggaatgggtcttttctaaattgttaaaagcagttcatgccattattcttaataaacatttctaatatgctgtgaaaaaaaaaaaaaaaaaaaaaaaaaaaaaaaaaaaaaaaaaaaaaaaaaaaaaaaaaaaaaaaaaaaaaaaaaaaaaaaaatgcgcgcccccccccgggggg

SEQ ID NO: 49819 - DNA, 491 bp, Homo sapiens
agcgcgcaattaaccctcactaaagggaacaaaagctgggtaccgggccccccctcgagagtacttctagaattaattaaggcggggggaaacactagatatattaagattagtttgaatttaatatatgaacttgaattttagtattacaagggattagttttaatttgggaaattgtatccaattttcagaaattctacatttgcattaaagcagcaccaaatttgttttttaaattaaaagcaggctataatgttcatagaaatgtgctatggccaggcacagtggcttatgcctttaattccagcattctgggagcccgaggaaagaggatcacttgagcccaggatttcaagaccagcctgagcaatatagacctggtctctacaaaaaaattttttaaaaattagccaagcacggtggcgcatgcctgtaggaggatcacttgcgccctggaaatagaggttgcagtgagctgagatagcaccac

SEQ ID NO: 49820 - DNA, 289 bp, Homo sapiens
gccctctccctcgtgaagtactatctaaaattaattaaggcgggtggatcacgaggtcaggagatcgagaccatcctgcctaacacggtgaaaccccgtctctactaaaaaatacaaaaaattagccaggcgtggtggcgggcgcctgtagtcccagctactcaggaagctgaggtaggagaatggcgtgaacccgggaggtggagcttgcagagagccaagatggcaccactgcactccagccctgggcgacagagcgattccctcttaaaaaaaaaaaaaaaaaaag

SEQ ID NO: 49821 - DNA, 414 bp, Homo sapiens
ctgggtaccgggccccccctcgagagtacttctagaattaattaaggcgggggcgggaccacggagaattaataaactgctggactttcgctaaaccacaaggcggagctaaatagaagacaaagaaaaaacaaggagggaactagaaaacaacctgcaaggctgaaagaacaacagacaaaacggttaccggccccccccacagagagagagagatacttaacaggagctgtgacctatggcccagggacacagccagtccttgatgacccagcagagagagccagggaagaggccaggcgcggtgactcgtgccagtaatcccagcactttgagaggctgaggcggacagatcgccggagctcaggagttcgagaccaccctgggcaagatggcaaaaccccatctctacta

SEQ ID NO: 49822 - DNA, 512 bp, Homo sapiens
gggaacaaaagctgggtaccgggccccccctcgagagtacttctagaattaattaaggcggggcacagtggctcatacctgtaatcccagcactttgggaggcctaagcaggctggtcgcttgagcccaagagttcgagaccagcctgggcaatacagcgagaccccatctcaatttatattatttaaaaaataattaatgtaagagaaattaaaacagatttttaaaaaaaaaaagaaagtgaaaatacaaagcacacaaacaaatatggccttgaaaagcaataaccctgtttgcacaaaggataaacaacttccattctggaacaacctgatccttcacaacttaggtccttacccatttaatatgtgaagataatatcccccgcgggccgaaaaaaataaataatgcagccgttagaagaaccaatggagggcataccatgcaattcattaagtagaatattatacagcagtgaaaaaggatgaactatatcgacgtgcattatcatg

SEQ ID NO: 49823 - DNA, 423 bp, Homo sapiens
ctgggtgccgggccccccctcgagagtacttctagaattaattaaggcggggatgctggtttaatttggcactgtgcaaggaatgcttgcaacatatgcagattttgtaaactaaggtagttaaagtggaactgctatatttgtttggcgtgcctgtaagagctgatcatgacatctgtagacacagagaggaccaccccattgccaccagttactagcggaagccctaacgtgtcgggatagatcccacataccagctctggatggtcatctggaagttcagtgtgagagaatactctctcattaaccttgcatgataggcagcttatgttgtatagagtgtgtgtgtctgtgtatactgacgttgcaaagagactagaccccactactgcactccggcctaggtgacacggtgagactcca

SEQ ID NO: 49824 - DNA, 276 bp, Homo sapiens
ggccgtcgttttacacccggaaaaagggaacactgctgggtgcccggccccccctcgagagtacttactagaattaattaaggcgggcccctgtggtcccagttttactcgggaggctgagacaggagaatggcgtgaacccgggaggcacagcttgcagtgagctgagatcccgccactgcactccagcctgggcaacagagcgagagtctgtctcaaaaaaaaaaaaaaaaaaaaaaaaaaggggcccccccccgggggggaccccccatcccc

SEQ ID NO: 49825 - DNA, 702 bp, Homo sapiens
aaataaagggaacaaaagctgggtaccgggccccccctcgagagtacttctagaattaattaagggggagggtggagtatgggaggagggagaggatcaggaaaaataactaatgggtactaggcttaattacctcggttatgaaataatctgtacaacaaacccctatgacacaagttttcctcaataacaaacctgcacttgtaccctgaacttaaaagttcaaataacaataataataataataataggaagaatattaaagtaaaccatggctgaatcttctccagaatttctgaaaacaacaatctgcagattcaggcctaagaaattccagataaggtaaataaaaaagaaattaatatctccacacattataatcaaactacagaacaacaaagacaaagacgaaatcttaaactagaaagaaaaaaaatgatcatgaacaaaagaacaattagactgatagctgactcctcaataagcaatgatgttagccagattacaatatgatgttgaaagtgctcaaagaaaataatttcatcctaaaattatatattctttggggaataaaggcaaaataaaacattttaatataaaaaaattttaaagagtttaccatcaatacttcctcactaagtaaggaaaattatccaaaaagcaagttttgagataccaaaaaaaaaaaaaaaaaaaaaaaaa

SEQ ID NO: 49826 - DNA, 303 bp, Homo sapiens
  misc_feature 197, 275: n = A,T,C or G
aagggtaacacagctgggtgccgggccccccctcgagagtacttctagaattaattaaggcgggcaggatagttcagacggtttctatttcctgagcgtctgagatgttagtattagttagttttgttgtgagtgttaggaaaagggcatacaggactaggaagcagataaggaaaatgattatgagggattgaacncatggagaaatatgaaaaccctggattctgagtatttgttgggcagggcgtttagtactgtctcccctttaccagcanacctgacttcaccatgtttattcccttt

SEQ ID NO: 49827 - DNA, 705 bp, Homo sapiens
ctaactaaagggaacaaaagctgggtaccgggccccccctcgagagtacttctagaattaattaaggcgggagtaaagataaacagaaattaacaggattgagactaaaaaataaaaaagatcaatgaaatggaaagtggattttcttaaaagataagtaaaatcaacaaaccattggctagactaaggaaaaaaaggagaaaagaccaaaataaataaaatcagaaatgaaaaaggacacattacaactgatatcacagaaatacaaagaatcattagagactattatgaacaacagtatgcaaacaacttggaaaacctagaggaaatgggtaaatccctgagaatatagaatctatcaagactgaattaaaaagaaatagaaaacttcagcagaccaataatgatgtgattaaaatcataataaaaagtctcccaccaaagaaaattctaggaccagatggctttactgctgaattctaccaaacttgtaaagaagaaataatgccagttcttctcaaactattaaaaaaattgaagaggagaaaattcttcctgtttccgtgaggccagtattatcctgatatcaaaacctaacaaagatccaacaaaaaagaaaactataggccaatatccctgatattgaacatagatgcaaaaatggcttataaaatactagcaaactagtatttttgaactgaattc

SEQ ID NO: 49828 - DNA, 337 bp, Homo sapiens
acaaaactgggtaccgggccccccctcgagagtacttctagaattaattaaggcgggtgtatgaagacccagcttctcgggaggctgacgcgtgaaatattgcttgaaccctggagcacaggttgcattcagccgatatcaccccattgcactccagcctggaacatgagcgaaactccgtcttgaaaaaggcctggccacaggggtcttcggcccctgccgaatgagagtttccttcccggctcccagggaaaccattatcctccgccgaggtgatagctgatgaagaacggggatttggacgagagacacaggatgagtaccggggggcagcccc

SEQ ID NO: 49829 - DNA, 320 bp, Homo sapiens
gaaacaaagctgggtaccgggccccccctcgagagtacttctagaattaattaaggcggggtaagatttgccgagttccttttactttttttaacctttgcttatgagcatgcctgtgttgggttgacagtgagggtaataatgaaggaactgggcttgccgatggcattgatggttatgaagctgatgatgctgagggtggtgatgggactgatccaggtacagaaacagaagaaagtatgggtggaggtgaaggtaatcacagagctgctgattctcaaaacagtggtgaaggaaatacaggtgctgcagaatcttct

SEQ ID NO: 49830 - DNA, 456 bp, Homo sapiens
aaagggaacaaaagctgggtaccgggccccccctcgagagtacttctagaattaattaaggcgggaagaacagacagagaacaagggaggagaaatatttgaagagataattgctgagactttcccaaacgtagtgcaagacaaaacactatggattcaagaagcttagagcatcccaagcaggattagtacaaagaaaaacacatctaagtacatcatagttaagctgctgaaacttcaaaataaagagaaaatcatcactgtagccagacaaaaaacatatgcagaggaataaatataacaatgacagtaaaattctcagaaaacacgcaatccagaagataatggagtgacaactttaaatattgaaagaaaaaaaaacctctagtcctagtttactgaaattgaaaaattatacccagggaatacatctttaaaaataaattagatgataat

SEQ ID NO: 49831 - DNA, 319 bp, Homo sapiens
  misc_feature 314: n = A,T,C or G
aaggaaacaaaactgggtaccgggccccccctcgagatacttctagaattaattaaggcggggggagggagggatttcttatcccgtttgttacattttgaggataataaaggtgtgtgatctggtttggtaaaaaaaaaaaaaaaaaaaaaaaaaaaaaaaaaaaaaaaaaaaaaaaaaaaaaaaaaaaaaaaaaaaaaaaaaaaaaaaaaaggcccccccccccccggggggccccccccccccccttaaaaaaaattttttccccccccccccccggccctttttaaaaaaaaaaaaaaaaaaattttatnttttt

SEQ ID NO: 49832 - DNA, 524 bp, Homo sapiens
accctaaataaagggaacaaaagctgggtaccgggccccccctcgagagtacttctagaattaattaaggcgggcctgtagtcccagctaatcggcaggctgaggcaggacaatcgattgaacccgggaggcagaggttgcagggagatcgtaccattgccagcccgggcaacaagatcaagactccatctcaaaaaaaaaaaaagggaaaaattggcttaggggggaaaaatcgttaaaccccgggatttaagggcccccctaatttgtttttttgccattgttttccacccggggtgacgggggggttttttaaaaaaaaaaaaaaaaggcccggcccgggggttcccccctttaacccccaccttttggggggcccaaggggggggttccagggggcccaaaaataaaacccttttggttaaaaaaggaaaacccttttttttttaaaaaatcccaaaatttcccccggcttggggggctcccccttttaccccccctaattggggggtttaggcaaaaaa

SEQ ID NO: 49833 - DNA, 466 bp, Homo sapiens
ccctactaaagggaacaaaagctgggtaccgggccccccctcgagagtacttctagaattaattaaggctgggttcaaaagaaatgaatgtaaaggacctcgtcagtaccttttagcattgattacattgtggaaatgacaatattttgcatatattggattagataaaatactattaaaataaatggcactggtttctttcttacatttttcaatgtggctagtagcaaattgaaaattcccggccaggcaaagtggctcacacctgtaattctagcactttgggaggccgaggtcagtggatcacttcatctcaggagtttgagaccagcctgggcaacatggtaaaaccccattatctaccaaaaaaaaaaaattagtcgggcatggtggtgtgtacctgtagtcccggctacttcggtggctgaggtggtaggattgcttgaccacaggcggtggaggttgc

SEQ ID NO: 49834 - DNA, 325 bp, Homo sapiens
tgggtaccgggccccccctcgagagtcttctagaattaattaaggccgggcacggtggctcacgcctgtaattccagcactttgggaggctgaggcgggtggatcacctgaggtcaggagttcgagaccagcctggccaacatggtgaaaccctgtctctactaaaaatagaaaaattagccgggcatctgtaatcccagctactccggaggctcaggcaggagaatcacttgaacccgggaggcggaggttgcagtgagctgaggtcgtgccactgcactccagcctggggcacaagagtgaaactccattctcaaaaaaaaaa

SEQ ID NO: 49835 - DNA, 513 bp, Homo sapiens
cgcgcagcgcgcaattaaccctcactaaagggaacaaaagctgggtaccgggccccccctcgagagtacttctagaattaattaaggcgggtggatcagaggcgggtacatcacgaggtcagagtatcaagaccatcctggccaacatagtgaaaccccacctctactaaaaatacaaaaaaacaaaaacaaaaacaaaaacaaaaaaactagctgggtgtggtggctcgtgtctgtaatcccagctactcgggaggctgaggcaggagaatcgcttgaacctgggaggcagaggttgcagtgagccgagatcgcaccactgcactccagcctgggcaacaagagtaaaactccatctcagaaaaaaagctctttggaaccctcagtaatattttagaatataaagagtcctaaaagctaagaactgtttacataatttactactcttctctattgaaggctctttggattgcccaaatattcaattattacaattattatgctgcaggaatg

SEQ ID NO: 49836 - DNA, 564 bp, Homo sapiens
  misc_feature 490: n = A,T,C or G
acaaaagctgggtaccgggccccccctcgagagtacttctagaattaattaaggcgggctgcttgccgctatggctggcagtcaggacatattcgatgccatcgtgatggcggatgagaggtttcatggggaagggtatcgggaaggctatgaagaaggcagtagtttgggtgtgatggagggaaggcagcatggcacgctgcatggagccaaaatcgggtctgagatcgggtgctaccaaggttttgcttttgcatggaaatgtctactgcacagttgcaccactgagaaggacaggtaaaggtggagatgtctttctttctcagcgtaggaaccaggagttctagttccatgggttaccagcatgcccttgagtaatcaatctgtctgttcctcatctgtaaaatggagaaaattatcagtgtcaagcttgagtgttgttaggagatttaacggaaatactaaatagaaagtgccaggcacattttangtgtttggtgaacactggctgttgttgcttctcaagagttctatgctcctgccttttacctggagtcattagtg

SEQ ID NO: 49837 - DNA, 491 bp, Homo sapiens
tcactaaagggaacaaaagctgggtaccgggccccccctcgagagtacttctagaattaattaaggcggggctaaggtggagaaatggcatgggggcctattttgagtctaatgaagttggcgtggtggactttgtattatgttttgtactattaaatgggtttgtggcttgggaccctgtttatctgttactttagacgctaccgtgtgatatttgatagatcttctgaggcgactgttggttaaatggattatgggcggtgcaagatgtgcttgggtaagaagatgcttgtatgcatctcgctcgttaagagtcatcaccactccctaatgtcaagtacccagggacacaaacactgcggaaggcctcaaggtcctctgcctaggaaaaccggacacctttgttcacttgttgatctgctgaccttccctccactattgtcctatgaccctgccaaatccccctctgcgagaaacacccaagaatgatc

SEQ ID NO: 49838 - DNA, 247 bp, Homo sapiens
ggccccccctcgagtagtacttctagaattaattaaggcggggaagagcaagggtttatcttgtatcttcctctctttctggcttccctgacattctactctgacatcaaatttggcatacacatttttcacatgcttttgctttgtaggtaagtcaatctcagacattgtgaaaacataaatgctcataattattttggctaaatacttattggaaaattagttcctgaaagcaccacctgactct

SEQ ID NO: 49839 - DNA, 250 bp, Homo sapiens
  misc_feature 65, 206: n = A,T,C or G
aagggaaacaaagctgggtgccgggccccccctcgagagtacttctagaattaattaaggcgggnggaagaataattagtgtttataagacatttaagaggccctttttcatatactgactcactgatgaatcagcatttgcattttatggaaaaatataaatccaaagaaataatttaaaaaaaaaagaaaaaaaaaaaaaaaanaaaaaaaaagggggcccccccccgggggggacccccattccccc

SEQ ID NO: 49840 - DNA, 263 bp, Homo sapiens
taaggcggggccgcaggacaggtcaagagcctcacaagtgggactctgggcctctgaccagctgtgcggcatgggctaagtcactctgcccttcggagcctctggaagcttagggcacattggttccagcctagccagtttctcaccctgggttggggtcccccagcatccagactggaaacctacccattttcccctgagcatcctctagatgctgccccaaggagttgctgcagttctggagcctcatctggctgggatct

SEQ ID NO: 49841 - DNA, 557 bp, Homo sapiens
aaccctcactaaagggaacaaaagctgggtaccgggccccccctcgagagtacttctagaattaattaaggcggggggggacagggactgcacattggaaagcacactcagaaggcttcatcaccaagattttgggagagtaaagctaagtatagttgatgtaacattgtagaagcagcataggaacaataagaacaataggtaaagctataattatggcttatatttagaaatgactgcatttgatattttaggatatttttctaggttttttcctttcattttattctcttctagttttgacattttatgatagatttgctctctagaaggaaacgtctttatttaggagggcaaaaattttggtcatagcattcacttttgctattccaatctacaactggaagatacataaaagtgctttgcattgaatttgggataacttcaaaaatcccatggttgttgttagggatagtactaagcatttcaattccaggagaataaaagaaattcctatttgaaatgaattcctcatttggaggaaaaaaagcatgcat

SEQ ID NO: 49842 - DNA, 478 bp, Homo sapiens
  misc_feature 411: n = A,T,C or G
accctcactaaagggaacaaaagctgggtaccgggccccccctcgagagtacttctagaattaattaaggcggggactggcaggcttcacaatgtgtgaatttcaaaagtttttccttaatggtggctgctagagctttggcccctgcttaggattatgtggtcctcacaggggtggggccatcacagctacctcctgccagctgcatgctgccagttcctgttctgagttcaccacatccccacaccccattgccacttatttattcatctcaggaaataaagaaaggtcttggatcgctgtgcagatgaacaaaaaacataatgagggtggcccccccccgggggggctctctacttcccctacctatggacctgttacccccccccaaaggccacagatagtcaatgnggatgagaactaatcgctgatcgtcagatcaaataaagttataaaattgcagaaaaaaaaaaaaaaa

SEQ ID NO: 49843 - DNA, 457 bp, Homo sapiens
ggaacaaaagctgggtgccgggccccccctcgagagtacttctagaattaattaaggcgggagaaagcacaaacatatacaatttgaaataagaaaaaaaaaacccgaaaaaaagaaaccaccttgtttgaaaatggtctaaaattctacactaccacagggacggaaaatgtaaattaccagcattaactcaataaaaaaaaacccgatcgtaatgaatttttttttttttttttaaaaaaagggggccgggccccaggggctcacccccgtaatcccacccctttggaaacccagggcgggaaatcctttgcaccagggatttaaaaaccccccgggacaaaatacctaaactccttttggacaaaatatttttaaaaattacctgggcggccggccttgggaactaatccctgtatccccacccttttgaaaggctaggggggggggatcccct

SEQ ID NO: 49844 - DNA, 413 bp, Homo sapiens
ctaaagggaacaaaagctgggtaccgggccccccctcgagagtacttctagaattaattaaggcggggggcaggtcagagataataaaattggaataaaactctataaagattctttgccaccttcaccattgctatttcctggcaaagtaacagtagaccaagttactgatagattggtaatagcagacactggacatcatagaattttggtcgtttggaagaatggacaaattcaatatagcattggaggtaaaacttgcttctgattacgatagataacgtgttttacagtaaaaaaatagttcaaggtaaatataaaagttgaaatgtctaaatgaaaactaattatagaaaagtgatatacattgacttaatttcctaataaaaattttttgttaattagaaaaaaaa

SEQ ID NO: 49845 - DNA, 597 bp, Homo sapiens
ggccgtcgttttacattaggaaacacagtatgacccttgtttctggccggcgttttcctttagagaaaaagaaaaaacctttattcggggctgagtgatttccagaaaaaaagagtcaaagtactttatagtgtgaatcctgtgagctaatacagtctatacttatttcttccctacctgtttcacatccgtaagatttaagatatacattttttgagaggtagtctgtctgatacaatgtaaatgacaaaacataattcctgagaggcccagaacaaactggagtctagcctggagttaaattgagacttctaaaatgattggaacaaagactaagttgtgccaaatgtaaatcaacccctcttttagtttactttagactttgtattaactcatcttttttgtagtaaatctatagttttaaggtttctcaagatgtggctctacctactatgatgaaaattgaagtgggttcaaaagaattagatgtacagtgaagggaaaagaaaaaaaatgggcgaaaagagggtggaaaaataaaaggattcttttttcttcctttctggttctcggatccctgctccctttttcctcccc

SEQ ID NO: 49846 - DNA, 538 bp, Homo sapiens
  misc_feature 314: n = A,T,C or G
taaagggaacaaaagctgggtaccggtccccccctcgtgtagtacttctagaattaattaaggcgggcggatcacctgaagttaggagttcgagaccagcctggtcaacaagacgaaaccccgtctctactacaaatacaaaaaaattagcagggcgtggtggtgcgcatctaatcccaggtactcgggaggctgaagcagaagaatcgcttgaacccaggaggcggaggttgcagttaaccaggatcgcgccattgcactccagcatgggcaacaagagcgagactccgtctcaaaaaaaaaaaaaaaaaaanggccggaaatttttttggggaagggcgggcccaaaaaaaaaattttttttgaaggggaaaaaaaaaaaaaaaaaaaaaaaaaaaaaaaaaaaaaaaaaaaaaaaaaaagatttttttttttaaaaaaaaaaaataaatttaaaaccccccccccccccggggggacccccccccccccccttgttggggggttaccccccccccccctctgggttaaaaaaaaa

SEQ ID NO: 49847 - DNA, 289 bp, Homo sapiens
aaaactgggtaccgggccccccctcgagagtacttctagaattaattaaggcggggtaagatttgccgagttccttttactttttttaacctttcctgatactggcattttgtagatgtggtttgactatttctgtatgtctccatctattgatgagggtcttaaaaaaaaaaaaaaaaaaaaaaaaaaaaaaaaaaaaaaaaaaaaagggcccccccccccggggggacccccatcccccccttaagagaggtttttaccccccccccctggggcgttttttaaaaaa

SEQ ID NO: 49848 - DNA, 541 bp, Homo sapiens
  misc_feature 479: n = A,T,C or G
ctggccgtcgttttcaccccggaataaagggaacacatgctgggtgccgggccccccctcgagagtactagtagaattaattaaggcgggcggatcacgaggtcaggagatcaagaccatcccggcgaacatggtgaaaccccggtctctactaaaaatacaaaaattagctgggcgtggcggcatgtgcctgtaatcccagctactcagaaggcttagcaggagaattgcttgaacctgggaggcggagattgcagtgagccgagatcatgccactgtacttcagcttggcgacagagctagactccatctcaaaaaaaaaaaaattccaaaacttaaacgggcatgggggggggcccctgtattcccagctactcagtaggctgaaacaggaaaacccaggaaggggaggttgcattgacccaaaattgtgcccctgcactccagcctgagcgacagaccaagacttttgtcttttnccaaaaaaaatatgactgaataaattggcggcccccccccgggggggccccctattccccct

SEQ ID NO: 49849 - DNA, 336 bp, Homo sapiens
acaaaagctgggtaccgggccccccctcgagatacttctagaattaattaaggcgggaggggaccttgcttccacagtctgagtgctgccccgaatcactgggaacacttctcagcagggtgccgctgacatttcagactgggtgcgtttctgctggagggctgtctgcacattgcagaagctgagaggcattcctggcctccacccactagatgccagtagcagcccccctccagttgtgacaatcgaatcgaatatatcttctgacgttgccatgtgtcccgtaggggacaaaattgccaggtcgagagcactgcttttaagaagcagctgaca

SEQ ID NO: 49850 - DNA, 557 bp, Homo sapiens
  misc_feature 508: n = A,T,C or G
aagggtaacaaagctgggtaccgggccccccctcgagagtacttctagaattaattaaggcgggaaagggataaatttcaggagcattttattttattttattgagacagggtctcactctgtctctcaggctggagggcagtggcatggtgtcggctcactgcaacctctgcctcctgggttcaagcgattgtcatgcctcaccctcccgagtagctgggattacaggcatgtgccaccatgcctggctaatttttgtattttttgtggacatggtggtttgctgtgttggccaggctggttttgaacttctggcctcaagtgatccgtctgcctcggcctcccaaagtgctgggattacaggcatgagccaccgcacctggctttcttaagatctaacttaatgatgttttcattaagcctttctggatgctcgaatgaagtcactgctcattcacctgtgcctctgcttgtaccttatattacataatcacatactgcagcccancactgtgctctttactgtgtgtgtgtgcctgtgtgtggtctgcgtgtgt

SEQ ID NO: 49851 - DNA, 453 bp, Homo sapiens
ctgggtgccgggccccccctcgagagtacttctagaattaattaagggggggtttacttcactagaaatgtactgtaagaagctggacagaaagaggtcttgttagaacccaacagtgagttttcttgctcaagagacaactcttagtctcctacgcttcttttctagtacatgaaacattaccatatgcagaaaaccattcgtcttacctagtcattaagatgttcacaaatcctttatctacatgaagtttgggagagatgttatctttaatccatttatatatggtttgaggggatggatccaactttatttgcttcaacagttccttctccaatttgaggagtgggaataagaaactcagtccctttccttccaaaatctccaacatgcggtccttattctgatcaatttctgaagagacaaagccacctgcatcatctaatagttcat

SEQ ID NO: 49852 - DNA, 340 bp, Homo sapiens
gaagctgggtcccgggccccccctcgagagtactgctagaattaattaaggcgggcagactgcttgagcccaggagtttgagaccaacctgggcaacatggcaaaaccccatttctacgaaaaattagctaggtgtggtagcatgtgcctgcagctacttgggaggctgaagaagaatcaagtaacctgggaagtcaaggctgcaatgagctgtgatcgcactccagcctgggtgacagagtaaaaccctgtctcctataaaatacatgtactattaaaaaaagcggcccccccgcgggtggccccaaagactccttttaaggaataaatgccccccccc

SEQ ID NO: 49853 - DNA, 570 bp, Homo sapiens
aaccctcactaaagggaacaaaagctgggtaccgggccccccctcgtgagtacttctagaattaattaaggcgggggcctcttgaaaaaagactaaatggggccgaaactggattctgtccaacgtaaaaatgtaatggatatttataagcctgaataatcactatggatggttttcacagtgactacacacagtacgaacctacagttttaactgtggatattgttacgtagcctaaggctcctgttttgcacagccaaatttaaaactgttggaatggatttttctttaactgccgtaatttaactttctgggttgcctttatttttggcgtggctgacttacatcatgtgttggggaagggcctgcccagttgcactcaggtggcatcctccaaatagtgtacctgaggaggcacctacactcacctgcactaacaaagtggccgtcctaacctcgggcctgctgcgcaaacgtccatcacgttagctgtcccacatcacaagactatgccattggggtagttgtgtttcaacggaaagtgctgtcttaaactaaatgtgcaataaa

SEQ ID NO: 49854 - DNA, 477 bp, Homo sapiens
agggaacaaaagctgggtaccgggccccccctcgagagtacttctagaattaattaaggcgggttaaaagtagacatttcctggaacatatatttaatagtatttaagactgttaatactgtttaattataaaactttgggccgggtgtggtggctcacgcctataatcccaaaactttgggaggccgaggtgggcggaccatgaggtcaggagatcgggaccatcctggctaacatggtgaggccccatctctactaaaaatacaaaaaatgtagccgggcatggtggcacgtgcctgtagtcccagctactctggaggctgacgcaggagaattgcttgaacctgggaggtggaggttgcagtgagccgagatcaagccactgcactccggcctgggagacagaatgagactccgtctctaaataaacaaacaaataaaaatgtattctctaaggacattttttgtttggttact

SEQ ID NO: 49855 - DNA, 337 bp, Homo sapiens
cgggccccccctcgagagtacttctagaattaattaaggggggaaggcaggggtagtatgtagggagcgctctacatactctactttttgatcagtttttctatatacctaaagctatctttaaaacattaagtctatgaggccaggggtttgagaccagcctgggcgtgatatggtgagaccttgactctacaaaaaaaaaaaaaaaaaaaaaaaaaaaaaaaaaaaaaaaaaaaaaaaaaaaaaaaacccccccccccccgggggggcccccaccccccccctaaaagggggaaaaccccccccccccggggggggggaaaaaaaaaaaaaaaaa

SEQ ID NO: 49856 - DNA, 623 bp, Homo sapiens
taactaaagggaacaaaagctgggtaccgggccccccctcgagagtacttctagaattaattaaggcgggggcgagcggatcacctggggtcaggagttcgagaccagcctggccaacatggcgaaaccccgtctcaattaaaaatacaaacattagccgggcatggtggcgggcgcctgtaatcccagctactcgcctgtaatcccagctgaggaaggaaaatcgctagaacccgggaggcggaggctgcagtgagccgagatcttgccattgcactccagcctgggcgacaagagcgaaactccgtctcaaaaaaaagaaagaaaataaaaagtgaaatgtggatgtaacaacgcacttttaaaaaaagtctaaacatctgaggaatgtgtctgtgcttgcagtgtccagccagcacagagactgcactcaagggatgtgggaacggctgattgaacgtgaactgcggtcattaaatcttttatgtctgtgttaatatctacaaataagccttaatttctgtagtttctgcatatctcacacggttcctggcaaattgaagagtgtttcatgaattcaggactttattgtgtttgctgtgaatcagtttgttttgtactga

SEQ ID NO: 49857 - DNA, 365 bp, Homo sapiens
taactaaagggaacaaaagctgggtaccgggccccccctcgagagtacttgtagaattaattaaggcggggggaaaggagggaccagcaaacccttcttgggatggctgaggacacaggggactccagcagaaagggaggcccctgggtgtgcaagacgggacgctgaccagcctgggccctcaccggccactacccccgtatttaccctatagcaccccctctaccccctctcgtatacaaaaaaaaaaaaaaaaaaaaaaaaaaaaaaaaaaaaaaaaaaaatggggccccccccccgggggggacccaaaccccccctttgagaggtttttacccccccccccccccgccccttttaaaaaa

SEQ ID NO: 49858 - DNA, 276 bp, Homo sapiens
ccgggccccccctcgagagtacttctagaattaattaaggcgggagatataagccaaggattttaaattgacccttagctatagagaatttgctataagctagtcttgtttgttaaaaaaaaaaaaaaaaaaaaaaaaaaaaaagcggccgccaccgcggtggagctccaattcgccctatagtgagtcgtattacgcgcgctcactggccgtcgttttacaacgtcgtgactgggaaaaccctggcgttacccaacttaatcgccttgcagcaca

SEQ ID NO: 49859 - DNA, 486 bp, Homo sapiens
tacgactcactatagggcgaattggagctccaccgcggtggcggccgcttttttttttttttttttttttttttttttggagacggaatctcactctgttgcccagactggagtgcaatggtgcgatctcggctcactgcaacctccgcctcccgggttcaagtgattctcctgcctcagcctcccaagtagctgggattacaggcgcccaccatcacgcccagctaatttttgtatttttagtagagacggggtttcaccaggttggcctggctgatctcaaactcctgaccacagttgatccacccgccttaattaattctagaagtactctcgagggggggcccggtacccaccttttgttccctttagtgagggttaattgcgcgcttggcgtaatcatggtcatagctgtttcctgtgtgaaattgttatccgctcacaattccacacaacatacgagccggaagcataaagtgtaaagcc

SEQ ID NO: 49860 - DNA, 513 bp, Homo sapiens
ccagcgcgcattaccctcactaagggaacaaaagctgggtaccgggccccccctcgagagtacttctagaattaattaaggcgggagggtgggctatatattttgattccaaatgaacctctctgtcttaaaattagaaattagtaacagagaattttggaaataatgcaaacacatggatattaatcattatgttcttgaatgaccagtgtgtgaatgaaaaaaagtaagaatggggcctaaattgttgttgatcgtatgaaacctagaaacacaacatattaaaatttacaggatgcagcagatgcacaactaagagcaaagtttccagctgtcaagtgcctccaatttaaaaagtatataaactccatataaacaacctatcaatgcattttaaagaattagaaaagcaggagcacacagaacccaaaattagtagagagaaaaaataatacggagcggaacataaattaatgaaattgaaatgaagattacagcccacaagatcaactt

SEQ ID NO: 49861 - DNA, 462 bp, Homo sapiens
gaataaagggaacaaaagctgggtgccgggccccccctcgagagtacttctagaattaattaactatttaaagtaaaagtaattaacaatgaacatttgggtttataatatatgtagaaataaaacaagtgactacaatagcacataggaggacaaacagaagtataaggtttcaggttcttatattatatgtaaaatgttatcctactatttgaaagtaggctgtgagaagttgaaattcattttataaaccccagaacagctactttttaattatatatataattaaattaatttaatttaatttatatatacataaaataagccaagaatagaataaattagaatactaaaaactacacaattaatccaaaagaaagaaaggtgggtggggaaagaaaacacaacagataggacaaaaaggaaacaaacagcaagacagatttaaacccaaacatgtcg

SEQ ID NO: 49862 - DNA, 156 bp, Homo sapiens
atctcctccccagcttggctgcctcatgtcatcacagtattccattttgtttgttgcatgtcttgcgaagccatcaagattttctcggctgttttcctctcattggtaatgctcactttgtgacttcatttcaaatctggaatcccgttcaaataa

SEQ ID NO: 49863 - DNA, 185 bp, Homo sapiens
  misc_feature 21, 40: n = A,T,C or G
gcggccagcaaaaggccttgnaaccgaaaaagtccacctngctggtgtttatccataggctccgcccccctgacgatgcattacaaaaatcgacgctcaagtcagaggtggcgaaacccgacaggactataaagataccaggcgtttccccctggaagctccctcgtgcgctctcctgttccgac

SEQ ID NO: 49864 - DNA, 272 bp, Homo sapiens
cgactactatagggcgaattggagctccaccgcggtggcggccgcctatgtttatggccgtttagcgagggataattgcccgcttggcgtagtcatgggcatagctgtttcctgtgtgaaattgttatccgctcacaattccacacaacatacgagccgggagcataaagtgtaaaagcctgggggtggcctaaatgagtgagcctaactcacattaaattgcgtttgcgctcactgcccgcttttccagttcgggaaaacctgtcgttgcc

SEQ ID NO: 49865 - DNA, 346 bp, Homo sapiens
ctactatagggcgaattggagctccaccgcggtggctgcagccacacaaatctcccctctgtttttctccccgcgtacctcggccgctctagaactagtggatcccccgggctgcaggaattcgatatcaagcttatcgataccgtcgacctcgagggggggcccggtacccagcttttgttccctttagtgaggggttaattgcccgcttggcgtaatcatggtcatagctgtttcctgtgtgaaattgttatccgctcacaattccacacaacatacgagccgggagcataaaagtgtaaaagcctggggtgccctaatgagtggagctaacttaacatttaat

SEQ ID NO: 49866 - DNA, 308 bp, Homo sapiens
tatagggcgaattggagctccaccgcggtggcggccgagcttgatgagcggagagacctgcgccggcggcaccactttgtgcgtgacctgagaaccggaggccccggagttcttcatcactaacaaagcactcctacatcccttagacttcttgctgtcaaaagagatgtaatgagagagcacctcagccgatgtagagctagaggatgccccgggctgcaggaattcgatatcaagcttatggataccggcgacctcgagggggggcccggtacccagcttttgcttcccttgtagtgaggagttaa

SEQ ID NO: 49867 - DNA, 336 bp, Homo sapiens; identical to SEQ ID NO: 31885

SEQ ID NO: 49868 - DNA, 448 bp, Homo sapiens
agggcgaattggagctccaccgcggtggcggccgaggtaccgataccccacatgcaggcttcaatcctaacttttgagatgatactccacaaagaaatggttccttcagtgccctcttcatctggacaaataatctgatcaggatagggtggttcgggaaaattaactgaattgcattcataagcagctaatgtaactgaggctatatgtggacccagataaagcagaaaggtgtgcagccctgttccaagcccaacagaagacaaaattcctaagcctatccagtaggcatacaaaagaaactgtttctctatacgttgcacatactgttgatgcactccttcaacataatacgtagctataagcacagcaagcagcagtaaaaaagacaccacaatgctttgacgatgccataattttgaggtccattccttcaagattacaagga

SEQ ID NO: 49869 - DNA, 89 bp, Homo sapiens; identical to SEQ ID NO: 31924

SEQ ID NO: 49870 - DNA, 422 bp, Homo sapiens
tccaccgcggtggcggccgaggtacagactggggttgttaacatagttcatggtgcctgcagccccttcatggtgggggtgcctggtttgtcctcccaggagaagcagatggtaacactgctggacctggctggaaggagcctgaagcatcggccacgtccactggcttacctgcatgtaacctttcccaatctcagcctcataggatactacacttatggcaaggctaaaggagaggggataagtcacagccccagcacccagcaacacacacggtgagcggccgctctagaactagtggatcccccgggctgcaggaattcgatatcaagcttatcgataccgtcgacctcgagggggggcccggtacccagcttttgttccctttagtgagggttaattgcgcgcttggcgtaatcatg

SEQ ID NO: 49871 - DNA, 351 bp, Homo sapiens
  misc_feature 319: n = A,T,C or G
cccccctcggggtacttctagaattaattaacgcggggtgtttatgctggaattgaagtctgagaccttccggtgctgggaacacacaagagttgttgaaagttgacaagcagactgcgcatgtctctgatgctttgtatcattcttgagcaatcgctcggtccgtggacaataaacagtattatcaaagagaaaaaaaaaaaaaaaaaaaaaaaaaaaaaaaaaaaaaaagaaaaaaaaaaaaataaaaaaaaaagaaaaaaaaaaaaaaaagaaaaaaaaaataaaaaaaattaaaaatatataaagagaaagcccnaaaaaaaataataaagcggcccccccccgggg

SEQ ID NO: 49872 - DNA, 73 bp, Homo sapiens; identical to SEQ ID NO: 32014

SEQ ID NO: 49873 - DNA, 381 bp, Homo sapiens
agggcgaattggagctccaccgcggtggcggccgcccgggcaggtacgaactggagggcttgtgtgttagcttctgaattggcaattggaggcggtagtggtcgtgcctgtgtgtatcagaagggataggtatcttgcctcctttctctcaggcagtgcaaatcaccctgtggaaaaccgatggacaggaaggagtgttacacactgcttaccctgatttattcagtggttttgttttcattctggaaccatactatcaaatggcgacagactgttccgccccacccccgtgaagtaatcatgcaccgtgtgaatagtatcaagcaggattgctttcattgtatggagcatgaccagcgtgtgactcattctgacatttca

SEQ ID NO: 49874 - DNA, 446 bp, Homo sapiens
attggagctccaccgcggtggcggccgctataattatttttttttttttatttttgtgtagtttagtgaagaccacctacttacaactttcttatagaaaatacaaaacaagaaacagacttggtttcaaatgcataaccaggtgctggagtttaaagcattactgataacattgttacagaaaaatggcagcttactccagggcacttcagtattcctgaggaataaacatgatttctcttgtcctcccgctgggatgttctcaagtgaagtcactgctcctgctctttgacatattttccatgtagaaaatatggagcctggaaatcatgctgacagttggaataagccattcctaatcccatgccaaaaccgaaggctaatggccacattctttttttaaagaaggtaagtgagaaaacaattcctaatccaaaaccagtacc

SEQ ID NO: 49875 - DNA, 457 bp, Homo sapiens; identical to SEQ ID NO: 31541

SEQ ID NO: 49876 - DNA, 272 bp, Homo sapiens; identical to SEQ ID NO: 49864

SEQ ID NO: 49877 - DNA, 401 bp, Homo sapiens
gactcactatagggcgaattggagctccaccgcggtggcggccgataacttgcgtctgatccaggtgccgaaagggccggttgagggatatgaggagaatgaggagtttctgaggaccatgcaccacctgctgctggaggtggaagtgatagagggcaccctgcagtgcccggaatctggacgtatgttccccatcagccgcgggatccccaacatgctgctgagtgaagaggaaactgagagttgattgtgccaggcgccagtttttcttgttatgactgtgtatttttgttgatctataccctgtttccgaattctgccgtgtgtatccccaacccttgacccaatgacaccaaacacagtgtttttgagctcggtattatatatttctttctcattaa

SEQ ID NO: 49878 - DNA, 343 bp, Homo sapiens
tatagggcgaattggagctccaccgcggtggcggccgcagaaggtcccggcagcagcaggaagaagacggaccccgcgatgagggcggcggcaaggagcaccttcatgttgcgttcggagaggcgcagcatcccccgcgtacctcggccgctctagaactagtggatcccccgggctgcaagaattcgatatcaagcttatcgataccgtcgacctcgagggggggcccggtacccagcttttgttccctttaatgagggttaattgcgcgccttggcgtaatcatgggcatagctgtttcctgggtgaaaattgttatcccgtcacaattccacacaacata

SEQ ID NO: 49879 - DNA, 323 bp, Homo sapiens; identical to SEQ ID NO: 33919

SEQ ID NO: 49880 - DNA, 434 bp, Homo sapiens; identical to SEQ ID NO: 33925

SEQ ID NO: 49881 - DNA, 183 bp, Homo sapiens; identical to SEQ ID NO: 34592

SEQ ID NO: 49882 - DNA, 347 bp, Homo sapiens; identical to SEQ ID NO: 34257

SEQ ID NO: 49883 - DNA, 189 bp, Homo sapiens; identical to SEQ ID NO: 34168

SEQ ID NO: 49884 - DNA, 116 bp, Homo sapiens; identical to SEQ ID NO: 34427

SEQ ID NO: 49885 - DNA, 119 bp, Homo sapiens; identical to SEQ ID NO: 34453

SEQ ID NO: 49886 - DNA, 550 bp, Homo sapiens
  misc_feature 336: n = A,T,C or G
ccctctagatgcatgctcgagcggccgccagtgtgatggatatctgcagaattcgccctttcgagcggccgcccgggcaggtacgcggggagaagaaatagcaagtgccgagaagctggcatcagaaaaacagaggggagatttgtgtggtgcagccgagggagaccaggaagatctgcatggtgggaaggacctgatgatacagaggtgagaaataagaaaggctgctgactttaccatctgaggccacacatctgctgaaatggagataattaacatcactagaaacagcaagatgacaatataatgtctaagtagtgacatgtttttgcacanttccagtccctttaaatatccacacacacaggaagcacaaaaggaagcacagagatccctgggagaaatgcccggccgccatcttgggtcatcgatgagcctcgccctgtgcctggtcccgcttgtgagggaaggacattagaaaatgaattgatgtgttccttaaaggatgggcaggaaaacagatcctgttgtggatatttatttgaacggg

SEQ ID NO: 49887 - DNA, 562 bp, Homo sapiens
ccgggccccccctcggaagtcttctagaattaattaacgcggggggggctagcagaggagagccagtgactgggcagttcctaggaaaccagtcttattaaaaagaaggaggaaaaagaacatagaacaagaagaaactgagtggaaacatcatggttgcacatcacagtgaaaatagatttcatgtgtttaacccagcctgttactaaacaaaagtgaacaagcagacaaggcaacaccaccaactttaagggggaaaatatcagaatccagagttgctacaatatactgtctaaaatgttcacttttcaacagattataagacatgcaaaatatagagatgtttgactcatattcaggaaaacaaaagtctatagaaactgtctataagtgttcccagataatggatttagcagagacaaacttcaaagcaattaatataaatatgtccaaagactaaaggaaaaaaaaaaaaaaaagcggccgccaccgcggtggagctccaattcgccctatagtgagtcgtattacgcgcgctcactggccgtcgttttacaacgtc
